United States Patent Application Publication US 2005/0255487 A1 - sequence listing, part 13

SEQ ID NO: 334701 - RNA, 19 nt, Homo sapiens
  misc_RNA (1)...(19): siRNA sense strand
cccagucuauuaaagaaag

SEQ ID NO: 334702 - RNA, 19 nt, Homo sapiens
  misc_RNA (1)...(19): siRNA sense strand
caucugggugugagaguga

SEQ ID NO: 334703 - RNA, 19 nt, Homo sapiens
  misc_RNA (1)...(19): siRNA sense strand
ccagucuauuaaagaaaga

SEQ ID NO: 334704 - RNA, 19 nt, Homo sapiens
  misc_RNA (1)...(19): siRNA sense strand
cgaaauccagaacaaagca

SEQ ID NO: 334705 - RNA, 19 nt, Homo sapiens
  misc_RNA (1)...(19): siRNA sense strand
aagagaaucccaggacaga

SEQ ID NO: 334706 - RNA, 19 nt, Homo sapiens
  misc_RNA (1)...(19): siRNA sense strand
gauguggucaauggaagaa

SEQ ID NO: 334707 - RNA, 19 nt, Homo sapiens
  misc_RNA (1)...(19): siRNA sense strand
ggaccugcgaaauccagaa

SEQ ID NO: 334708 - RNA, 19 nt, Homo sapiens
  misc_RNA (1)...(19): siRNA sense strand
gagcaugauuuugaaguca

SEQ ID NO: 334709 - RNA, 19 nt, Homo sapiens
  misc_RNA (1)...(19): siRNA sense strand
gugacccagucuauuaaag

SEQ ID NO: 334710 - RNA, 19 nt, Homo sapiens
  misc_RNA (1)...(19): siRNA sense strand
agaacaaagcacaucagaa

SEQ ID NO: 334711 - RNA, 19 nt, Homo sapiens
  misc_RNA (1)...(19): siRNA sense strand
uggaagaaaccaccaaggu

SEQ ID NO: 334712 - RNA, 19 nt, Homo sapiens
  misc_RNA (1)...(19): siRNA sense strand
ucaacuggaauggauggua

SEQ ID NO: 334713 - RNA, 19 nt, Homo sapiens
  misc_RNA (1)...(19): siRNA sense strand
ggaaauggcugaacuagaa

SEQ ID NO: 334714 - RNA, 19 nt, Homo sapiens
  misc_RNA (1)...(19): siRNA sense strand
gaacaaagcacaucagaaa

SEQ ID NO: 334715 - RNA, 19 nt, Homo sapiens
  misc_RNA (1)...(19): siRNA sense strand
cagcuacccuuccaucaua

SEQ ID NO: 334716 - RNA, 19 nt, Homo sapiens
  misc_RNA (1)...(19): siRNA sense strand
gggauaccaugcaacauaa

SEQ ID NO: 334717 - RNA, 19 nt, Homo sapiens
  misc_RNA (1)...(19): siRNA sense strand
gaggagauguggucaaugg

SEQ ID NO: 334718 - RNA, 19 nt, Homo sapiens
  misc_RNA (1)...(19): siRNA sense strand
gaaggagcuuucaucauuc

SEQ ID NO: 334719 - RNA, 19 nt, Homo sapiens
  misc_RNA (1)...(19): siRNA sense strand
cuagaaaucuguugcuaug

SEQ ID NO: 334720 - RNA, 19 nt, Homo sapiens
  misc_RNA (1)...(19): siRNA sense strand
gcucagggcuauccucuca

SEQ ID NO: 334721 - RNA, 19 nt, Homo sapiens
  misc_RNA (1)...(19): siRNA sense strand
aaacaagcgucucugaaga

SEQ ID NO: 334722 - RNA, 19 nt, Homo sapiens
  misc_RNA (1)...(19): siRNA sense strand
caacauaaccugauaaagc

SEQ ID NO: 334723 - RNA, 19 nt, Homo sapiens
  misc_RNA (1)...(19): siRNA sense strand
gaaacaagcgucucugaag

SEQ ID NO: 334724 - RNA, 19 nt, Homo sapiens
  misc_RNA (1)...(19): siRNA sense strand
gcagagggauaccaugcaa

SEQ ID NO: 334725 - RNA, 19 nt, Homo sapiens
  misc_RNA (1)...(19): siRNA sense strand
ugaacuagaagcuguguua

SEQ ID NO: 334726 - RNA, 19 nt, Homo sapiens
  misc_RNA (1)...(19): siRNA sense strand
gagaaucccaggacagaaa

SEQ ID NO: 334727 - RNA, 19 nt, Homo sapiens
  misc_RNA (1)...(19): siRNA sense strand
gcccacagaucaacuggaa

SEQ ID NO: 334728 - RNA, 19 nt, Homo sapiens
  misc_RNA (1)...(19): siRNA sense strand
gaagacugcucagggcuau

SEQ ID NO: 334729 - RNA, 19 nt, Homo sapiens
  misc_RNA (1)...(19): siRNA sense strand
gacccagucuauuaaagaa

SEQ ID NO: 334730 - RNA, 19 nt, Homo sapiens
  misc_RNA (1)...(19): siRNA sense strand
acuagaagcuguguuagaa

SEQ ID NO: 334731 - RNA, 19 nt, Homo sapiens
  misc_RNA (1)...(19): siRNA sense strand
caugcaacauaaccugaua

SEQ ID NO: 334732 - RNA, 19 nt, Homo sapiens
  misc_RNA (1)...(19): siRNA sense strand
gcuggacaccuaccugaua

SEQ ID NO: 334733 - RNA, 19 nt, Homo sapiens
  misc_RNA (1)...(19): siRNA sense strand
cagaucaacuggaauggau

SEQ ID NO: 334734 - RNA, 19 nt, Homo sapiens
  misc_RNA (1)...(19): siRNA sense strand
gcaggaaauggcugaacua

SEQ ID NO: 334735 - RNA, 19 nt, Homo sapiens
  misc_RNA (1)...(19): siRNA sense strand
ccacagaucaacuggaaug

SEQ ID NO: 334736 - RNA, 19 nt, Homo sapiens
  misc_RNA (1)...(19): siRNA sense strand
caacaugcccacagaucaa

SEQ ID NO: 334737 - RNA, 19 nt, Homo sapiens
  misc_RNA (1)...(19): siRNA sense strand
ucaccaacaugcccacaga

SEQ ID NO: 334738 - RNA, 19 nt, Homo sapiens
  misc_RNA (1)...(19): siRNA sense strand
cagaggagauguggucaau

SEQ ID NO: 334739 - RNA, 19 nt, Homo sapiens
  misc_RNA (1)...(19): siRNA sense strand
caauugggcagauguguga

SEQ ID NO: 334740 - RNA, 19 nt, Homo sapiens
  misc_RNA (1)...(19): siRNA sense strand
ggagauguggucaauggaa

SEQ ID NO: 334741 - RNA, 19 nt, Homo sapiens
  misc_RNA (1)...(19): siRNA sense strand
guacagcuguguggugcuu

SEQ ID NO: 334742 - RNA, 19 nt, Homo sapiens
  misc_RNA (1)...(19): siRNA sense strand
ccaaagcgagcaagagaau

SEQ ID NO: 334743 - RNA, 19 nt, Homo sapiens
  misc_RNA (1)...(19): siRNA sense strand
gcuaugggcccuucaccaa

SEQ ID NO: 334744 - RNA, 19 nt, Homo sapiens
  misc_RNA (1)...(19): siRNA sense strand
gaaugagcaugauuuugaa

SEQ ID NO: 334745 - RNA, 19 nt, Homo sapiens
  misc_RNA (1)...(19): siRNA sense strand
ucagggcuauccucucaga

SEQ ID NO: 334746 - RNA, 19 nt, Homo sapiens
  misc_RNA (1)...(19): siRNA sense strand
agggauaccaugcaacaua

SEQ ID NO: 334747 - RNA, 19 nt, Homo sapiens
  misc_RNA (1)...(19): siRNA sense strand
gcuagaaaucuguugcuau

SEQ ID NO: 334748 - RNA, 19 nt, Homo sapiens
  misc_RNA (1)...(19): siRNA sense strand
ugaaugagcaugauuuuga

SEQ ID NO: 334749 - RNA, 19 nt, Homo sapiens
  misc_RNA (1)...(19): siRNA sense strand
ggcuagaaaucuguugcua

SEQ ID NO: 334750 - RNA, 19 nt, Homo sapiens
  misc_RNA (1)...(19): siRNA sense strand
ugaaacaagcgucucugaa

SEQ ID NO: 334751 - RNA, 19 nt, Homo sapiens
  misc_RNA (1)...(19): siRNA sense strand
aacauaaccugauaaagcu

SEQ ID NO: 334752 - RNA, 19 nt, Homo sapiens
  misc_RNA (1)...(19): siRNA sense strand
ugacccagucuauuaaaga

SEQ ID NO: 334753 - RNA, 19 nt, Homo sapiens
  misc_RNA (1)...(19): siRNA sense strand
gaacuagaagcuguguuag

SEQ ID NO: 334754 - RNA, 19 nt, Homo sapiens
  misc_RNA (1)...(19): siRNA sense strand
gugaaacaagcgucucuga

SEQ ID NO: 334755 - RNA, 19 nt, Homo sapiens
  misc_RNA (1)...(19): siRNA sense strand
ccaacaugcccacagauca

SEQ ID NO: 334756 - RNA, 19 nt, Homo sapiens
  misc_RNA (1)...(19): siRNA sense strand
uaugggcccuucaccaaca

SEQ ID NO: 334757 - RNA, 19 nt, Homo sapiens
  misc_RNA (1)...(19): siRNA sense strand
guccaaagcgagcaagaga

SEQ ID NO: 334758 - RNA, 19 nt, Homo sapiens
  misc_RNA (1)...(19): siRNA sense strand
cagaacaaagcacaucaga

SEQ ID NO: 334759 - RNA, 19 nt, Homo sapiens
  misc_RNA (1)...(19): siRNA sense strand
ccugcgaaauccagaacaa

SEQ ID NO: 334760 - RNA, 19 nt, Homo sapiens
  misc_RNA (1)...(19): siRNA sense strand
gaaaccaccaagguccaaa

SEQ ID NO: 334761 - RNA, 19 nt, Homo sapiens
  misc_RNA (1)...(19): siRNA sense strand
gauaaagcuccagcaggaa

SEQ ID NO: 334762 - RNA, 19 nt, Homo sapiens
  misc_RNA (1)...(19): siRNA sense strand
aaggagcuuucaucauuca

SEQ ID NO: 334763 - RNA, 19 nt, Homo sapiens
  misc_RNA (1)...(19): siRNA sense strand
ggugugagagugaaacaag

SEQ ID NO: 334764 - RNA, 19 nt, Homo sapiens
  misc_RNA (1)...(19): siRNA sense strand
gaaauggcugaacuagaag

SEQ ID NO: 334765 - RNA, 19 nt, Homo sapiens
  misc_RNA (1)...(19): siRNA sense strand
auaaagcuccagcaggaaa

SEQ ID NO: 334766 - RNA, 19 nt, Homo sapiens
  misc_RNA (1)...(19): siRNA sense strand
acccuuccaucauaaguga

SEQ ID NO: 334767 - RNA, 19 nt, Homo sapiens
  misc_RNA (1)...(19): siRNA sense strand
ggugacccagucuauuaaa

SEQ ID NO: 334768 - RNA, 19 nt, Homo sapiens
  misc_RNA (1)...(19): siRNA sense strand
cccagucuauuaaagaaag

SEQ ID NO: 334769 - RNA, 19 nt, Homo sapiens
  misc_RNA (1)...(19): siRNA sense strand
caucugggugugagaguga

SEQ ID NO: 334770 - RNA, 19 nt, Homo sapiens
  misc_RNA (1)...(19): siRNA sense strand
ccagucuauuaaagaaaga

SEQ ID NO: 334771 - RNA, 19 nt, Homo sapiens
  misc_RNA (1)...(19): siRNA sense strand
cgaaauccagaacaaagca

SEQ ID NO: 334772 - RNA, 19 nt, Homo sapiens
  misc_RNA (1)...(19): siRNA sense strand
aagagaaucccaggacaga

SEQ ID NO: 334773 - RNA, 19 nt, Homo sapiens
  misc_RNA (1)...(19): siRNA sense strand
gauguggucaauggaagaa

SEQ ID NO: 334774 - RNA, 19 nt, Homo sapiens
  misc_RNA (1)...(19): siRNA sense strand
ggaccugcgaaauccagaa

SEQ ID NO: 334775 - RNA, 19 nt, Homo sapiens
  misc_RNA (1)...(19): siRNA sense strand
gagcaugauuuugaaguca

SEQ ID NO: 334776 - RNA, 19 nt, Homo sapiens
  misc_RNA (1)...(19): siRNA sense strand
gugacccagucuauuaaag

SEQ ID NO: 334777 - RNA, 19 nt, Homo sapiens
  misc_RNA (1)...(19): siRNA sense strand
agaacaaagcacaucagaa

SEQ ID NO: 334778 - RNA, 19 nt, Homo sapiens
  misc_RNA (1)...(19): siRNA sense strand
uggaagaaaccaccaaggu

SEQ ID NO: 334779 - RNA, 19 nt, Homo sapiens
  misc_RNA (1)...(19): siRNA sense strand
ucaacuggaauggauggua

SEQ ID NO: 334780 - RNA, 19 nt, Homo sapiens
  misc_RNA (1)...(19): siRNA sense strand
ggaaauggcugaacuagaa

SEQ ID NO: 334781 - RNA, 19 nt, Homo sapiens
  misc_RNA (1)...(19): siRNA sense strand
gaacaaagcacaucagaaa

SEQ ID NO: 334782 - RNA, 19 nt, Homo sapiens
  misc_RNA (1)...(19): siRNA sense strand
cagcuacccuuccaucaua

SEQ ID NO: 334783 - RNA, 19 nt, Homo sapiens
  misc_RNA (1)...(19): siRNA sense strand
gggauaccaugcaacauaa

SEQ ID NO: 334784 - RNA, 19 nt, Homo sapiens
  misc_RNA (1)...(19): siRNA sense strand
gaggagauguggucaaugg

SEQ ID NO: 334785 - RNA, 19 nt, Homo sapiens
  misc_RNA (1)...(19): siRNA sense strand
gaaggagcuuucaucauuc

SEQ ID NO: 334786 - RNA, 19 nt, Homo sapiens
  misc_RNA (1)...(19): siRNA sense strand
cuagaaaucuguugcuaug

SEQ ID NO: 334787 - RNA, 19 nt, Homo sapiens
  misc_RNA (1)...(19): siRNA sense strand
gcucagggcuauccucuca

SEQ ID NO: 334788 - RNA, 19 nt, Homo sapiens
  misc_RNA (1)...(19): siRNA sense strand
aaacaagcgucucugaaga

SEQ ID NO: 334789 - RNA, 19 nt, Homo sapiens
  misc_RNA (1)...(19): siRNA sense strand
caacauaaccugauaaagc

SEQ ID NO: 334790 - RNA, 19 nt, Homo sapiens
  misc_RNA (1)...(19): siRNA sense strand
gaaacaagcgucucugaag

SEQ ID NO: 334791 - RNA, 19 nt, Homo sapiens
  misc_RNA (1)...(19): siRNA sense strand
gcagagggauaccaugcaa

SEQ ID NO: 334792 - RNA, 19 nt, Homo sapiens
  misc_RNA (1)...(19): siRNA sense strand
ugaacuagaagcuguguua

SEQ ID NO: 334793 - RNA, 19 nt, Homo sapiens
  misc_RNA (1)...(19): siRNA sense strand
gagaaucccaggacagaaa

SEQ ID NO: 334794 - RNA, 19 nt, Homo sapiens
  misc_RNA (1)...(19): siRNA sense strand
gcccacagaucaacuggaa

SEQ ID NO: 334795 - RNA, 19 nt, Homo sapiens
  misc_RNA (1)...(19): siRNA sense strand
gaagacugcucagggcuau

SEQ ID NO: 334796 - RNA, 19 nt, Homo sapiens
  misc_RNA (1)...(19): siRNA sense strand
gacccagucuauuaaagaa

SEQ ID NO: 334797 - RNA, 19 nt, Homo sapiens
  misc_RNA (1)...(19): siRNA sense strand
acuagaagcuguguuagaa

SEQ ID NO: 334798 - RNA, 19 nt, Homo sapiens
  misc_RNA (1)...(19): siRNA sense strand
caugcaacauaaccugaua

SEQ ID NO: 334799 - RNA, 19 nt, Homo sapiens
  misc_RNA (1)...(19): siRNA sense strand
gcuggacaccuaccugaua

SEQ ID NO: 334800 - RNA, 19 nt, Homo sapiens
  misc_RNA (1)...(19): siRNA sense strand
cagaucaacuggaauggau

SEQ ID NO: 334801 - RNA, 19 nt, Homo sapiens
  misc_RNA (1)...(19): siRNA sense strand
gcaggaaauggcugaacua

SEQ ID NO: 334802 - RNA, 19 nt, Homo sapiens
  misc_RNA (1)...(19): siRNA sense strand
ccacagaucaacuggaaug

SEQ ID NO: 334803 - RNA, 19 nt, Homo sapiens
  misc_RNA (1)...(19): siRNA sense strand
caacaugcccacagaucaa

SEQ ID NO: 334804 - RNA, 19 nt, Homo sapiens
  misc_RNA (1)...(19): siRNA sense strand
ucaccaacaugcccacaga

SEQ ID NO: 334805 - RNA, 19 nt, Homo sapiens
  misc_RNA (1)...(19): siRNA sense strand
cagaggagauguggucaau

SEQ ID NO: 334806 - RNA, 19 nt, Homo sapiens
  misc_RNA (1)...(19): siRNA sense strand
caauugggcagauguguga

SEQ ID NO: 334807 - RNA, 19 nt, Homo sapiens
  misc_RNA (1)...(19): siRNA sense strand
ggagauguggucaauggaa

SEQ ID NO: 334808 - RNA, 19 nt, Homo sapiens
  misc_RNA (1)...(19): siRNA sense strand
guacagcuguguggugcuu

SEQ ID NO: 334809 - RNA, 19 nt, Homo sapiens
  misc_RNA (1)...(19): siRNA sense strand
ccaaagcgagcaagagaau

SEQ ID NO: 334810 - RNA, 19 nt, Homo sapiens
  misc_RNA (1)...(19): siRNA sense strand
gcuaugggcccuucaccaa

SEQ ID NO: 334811 - RNA, 19 nt, Homo sapiens
  misc_RNA (1)...(19): siRNA sense strand
gaaugagcaugauuuugaa

SEQ ID NO: 334812 - RNA, 19 nt, Homo sapiens
  misc_RNA (1)...(19): siRNA sense strand
ucagggcuauccucucaga

SEQ ID NO: 334813 - RNA, 19 nt, Homo sapiens
  misc_RNA (1)...(19): siRNA sense strand
agggauaccaugcaacaua

SEQ ID NO: 334814 - RNA, 19 nt, Homo sapiens
  misc_RNA (1)...(19): siRNA sense strand
gcuagaaaucuguugcuau

SEQ ID NO: 334815 - RNA, 19 nt, Homo sapiens
  misc_RNA (1)...(19): siRNA sense strand
ugaaugagcaugauuuuga

SEQ ID NO: 334816 - RNA, 19 nt, Homo sapiens
  misc_RNA (1)...(19): siRNA sense strand
ggcuagaaaucuguugcua

SEQ ID NO: 334817 - RNA, 19 nt, Homo sapiens
  misc_RNA (1)...(19): siRNA sense strand
ugaaacaagcgucucugaa

SEQ ID NO: 334818 - RNA, 19 nt, Homo sapiens
  misc_RNA (1)...(19): siRNA sense strand
aacauaaccugauaaagcu

SEQ ID NO: 334819 - RNA, 19 nt, Homo sapiens
  misc_RNA (1)...(19): siRNA sense strand
ugacccagucuauuaaaga

SEQ ID NO: 334820 - RNA, 19 nt, Homo sapiens
  misc_RNA (1)...(19): siRNA sense strand
gaacuagaagcuguguuag

SEQ ID NO: 334821 - RNA, 19 nt, Homo sapiens
  misc_RNA (1)...(19): siRNA sense strand
gugaaacaagcgucucuga

SEQ ID NO: 334822 - RNA, 19 nt, Homo sapiens
  misc_RNA (1)...(19): siRNA sense strand
ccaacaugcccacagauca

SEQ ID NO: 334823 - RNA, 19 nt, Homo sapiens
  misc_RNA (1)...(19): siRNA sense strand
uaugggcccuucaccaaca

SEQ ID NO: 334824 - RNA, 19 nt, Homo sapiens
  misc_RNA (1)...(19): siRNA sense strand
guccaaagcgagcaagaga

SEQ ID NO: 334825 - RNA, 19 nt, Homo sapiens
  misc_RNA (1)...(19): siRNA sense strand
cagaacaaagcacaucaga

SEQ ID NO: 334826 - RNA, 19 nt, Homo sapiens
  misc_RNA (1)...(19): siRNA sense strand
ccugcgaaauccagaacaa

SEQ ID NO: 334827 - RNA, 19 nt, Homo sapiens
  misc_RNA (1)...(19): siRNA sense strand
gaaaccaccaagguccaaa

SEQ ID NO: 334828 - RNA, 19 nt, Homo sapiens
  misc_RNA (1)...(19): siRNA sense strand
gauaaagcuccagcaggaa

SEQ ID NO: 334829 - RNA, 19 nt, Homo sapiens
  misc_RNA (1)...(19): siRNA sense strand
aaggagcuuucaucauuca

SEQ ID NO: 334830 - RNA, 19 nt, Homo sapiens
  misc_RNA (1)...(19): siRNA sense strand
ggugugagagugaaacaag

SEQ ID NO: 334831 - RNA, 19 nt, Homo sapiens
  misc_RNA (1)...(19): siRNA sense strand
gaaauggcugaacuagaag

SEQ ID NO: 334832 - RNA, 19 nt, Homo sapiens
  misc_RNA (1)...(19): siRNA sense strand
auaaagcuccagcaggaaa

SEQ ID NO: 334833 - RNA, 19 nt, Homo sapiens
  misc_RNA (1)...(19): siRNA sense strand
acccuuccaucauaaguga

SEQ ID NO: 334834 - RNA, 19 nt, Homo sapiens
  misc_RNA (1)...(19): siRNA sense strand
ggugacccagucuauuaaa

SEQ ID NO: 334835 - RNA, 19 nt, Homo sapiens
  misc_RNA (1)...(19): siRNA sense strand
cccagucuauuaaagaaag

SEQ ID NO: 334836 - RNA, 19 nt, Homo sapiens
  misc_RNA (1)...(19): siRNA sense strand
caucugggugugagaguga

SEQ ID NO: 334837 - RNA, 19 nt, Homo sapiens
  misc_RNA (1)...(19): siRNA sense strand
ccagucuauuaaagaaaga

SEQ ID NO: 334838 - RNA, 19 nt, Homo sapiens
  misc_RNA (1)...(19): siRNA sense strand
cgaaauccagaacaaagca

SEQ ID NO: 334839 - RNA, 19 nt, Homo sapiens
  misc_RNA (1)...(19): siRNA sense strand
aagagaaucccaggacaga

SEQ ID NO: 334840 - RNA, 19 nt, Homo sapiens
  misc_RNA (1)...(19): siRNA sense strand
gauguggucaauggaagaa

SEQ ID NO: 334841 - RNA, 19 nt, Homo sapiens
  misc_RNA (1)...(19): siRNA sense strand
ggaccugcgaaauccagaa

SEQ ID NO: 334842 - RNA, 19 nt, Homo sapiens
  misc_RNA (1)...(19): siRNA sense strand
gagcaugauuuugaaguca

SEQ ID NO: 334843 - RNA, 19 nt, Homo sapiens
  misc_RNA (1)...(19): siRNA sense strand
gugacccagucuauuaaag

SEQ ID NO: 334844 - RNA, 19 nt, Homo sapiens
  misc_RNA (1)...(19): siRNA sense strand
agaacaaagcacaucagaa

SEQ ID NO: 334845 - RNA, 19 nt, Homo sapiens
  misc_RNA (1)...(19): siRNA sense strand
uggaagaaaccaccaaggu

SEQ ID NO: 334846 - RNA, 19 nt, Homo sapiens
  misc_RNA (1)...(19): siRNA sense strand
ucaacuggaauggauggua

SEQ ID NO: 334847 - RNA, 19 nt, Homo sapiens
  misc_RNA (1)...(19): siRNA sense strand
ggaaauggcugaacuagaa

SEQ ID NO: 334848 - RNA, 19 nt, Homo sapiens
  misc_RNA (1)...(19): siRNA sense strand
gaacaaagcacaucagaaa

SEQ ID NO: 334849 - RNA, 19 nt, Homo sapiens
  misc_RNA (1)...(19): siRNA sense strand
cagcuacccuuccaucaua

SEQ ID NO: 334850 - RNA, 19 nt, Homo sapiens
  misc_RNA (1)...(19): siRNA sense strand
gggauaccaugcaacauaa

SEQ ID NO: 334851 - RNA, 19 nt, Homo sapiens
  misc_RNA (1)...(19): siRNA sense strand
gaggagauguggucaaugg

SEQ ID NO: 334852 - RNA, 19 nt, Homo sapiens
  misc_RNA (1)...(19): siRNA sense strand
gaaggagcuuucaucauuc

SEQ ID NO: 334853 - RNA, 19 nt, Homo sapiens
  misc_RNA (1)...(19): siRNA sense strand
cuagaaaucuguugcuaug

SEQ ID NO: 334854 - RNA, 19 nt, Homo sapiens
  misc_RNA (1)...(19): siRNA sense strand
gcucagggcuauccucuca

SEQ ID NO: 334855 - RNA, 19 nt, Homo sapiens
  misc_RNA (1)...(19): siRNA sense strand
aaacaagcgucucugaaga

SEQ ID NO: 334856 - RNA, 19 nt, Homo sapiens
  misc_RNA (1)...(19): siRNA sense strand
caacauaaccugauaaagc

SEQ ID NO: 334857 - RNA, 19 nt, Homo sapiens
  misc_RNA (1)...(19): siRNA sense strand
gaaacaagcgucucugaag

SEQ ID NO: 334858 - RNA, 19 nt, Homo sapiens
  misc_RNA (1)...(19): siRNA sense strand
gcagagggauaccaugcaa

SEQ ID NO: 334859 - RNA, 19 nt, Homo sapiens
  misc_RNA (1)...(19): siRNA sense strand
ugaacuagaagcuguguua

SEQ ID NO: 334860 - RNA, 19 nt, Homo sapiens
  misc_RNA (1)...(19): siRNA sense strand
gagaaucccaggacagaaa

SEQ ID NO: 334861 - RNA, 19 nt, Homo sapiens
  misc_RNA (1)...(19): siRNA sense strand
gcccacagaucaacuggaa

SEQ ID NO: 334862 - RNA, 19 nt, Homo sapiens
  misc_RNA (1)...(19): siRNA sense strand
gaagacugcucagggcuau

SEQ ID NO: 334863 - RNA, 19 nt, Homo sapiens
  misc_RNA (1)...(19): siRNA sense strand
gacccagucuauuaaagaa

SEQ ID NO: 334864 - RNA, 19 nt, Homo sapiens
  misc_RNA (1)...(19): siRNA sense strand
acuagaagcuguguuagaa

SEQ ID NO: 334865 - RNA, 19 nt, Homo sapiens
  misc_RNA (1)...(19): siRNA sense strand
caugcaacauaaccugaua

SEQ ID NO: 334866 - RNA, 19 nt, Homo sapiens
  misc_RNA (1)...(19): siRNA sense strand
gcuggacaccuaccugaua

SEQ ID NO: 334867 - RNA, 19 nt, Homo sapiens
  misc_RNA (1)...(19): siRNA sense strand
cagaucaacuggaauggau

SEQ ID NO: 334868 - RNA, 19 nt, Homo sapiens
  misc_RNA (1)...(19): siRNA sense strand
gcaggaaauggcugaacua

SEQ ID NO: 334869 - RNA, 19 nt, Homo sapiens
  misc_RNA (1)...(19): siRNA sense strand
ccacagaucaacuggaaug

SEQ ID NO: 334870 - RNA, 19 nt, Homo sapiens
  misc_RNA (1)...(19): siRNA sense strand
caacaugcccacagaucaa

SEQ ID NO: 334871 - RNA, 19 nt, Homo sapiens
  misc_RNA (1)...(19): siRNA sense strand
ucaccaacaugcccacaga

SEQ ID NO: 334872 - RNA, 19 nt, Homo sapiens
  misc_RNA (1)...(19): siRNA sense strand
cagaggagauguggucaau

SEQ ID NO: 334873 - RNA, 19 nt, Homo sapiens
  misc_RNA (1)...(19): siRNA sense strand
caauugggcagauguguga

SEQ ID NO: 334874 - RNA, 19 nt, Homo sapiens
  misc_RNA (1)...(19): siRNA sense strand
ggagauguggucaauggaa

SEQ ID NO: 334875 - RNA, 19 nt, Homo sapiens
  misc_RNA (1)...(19): siRNA sense strand
guacagcuguguggugcuu

SEQ ID NO: 334876 - RNA, 19 nt, Homo sapiens
  misc_RNA (1)...(19): siRNA sense strand
ccaaagcgagcaagagaau

SEQ ID NO: 334877 - RNA, 19 nt, Homo sapiens
  misc_RNA (1)...(19): siRNA sense strand
gcuaugggcccuucaccaa

SEQ ID NO: 334878 - RNA, 19 nt, Homo sapiens
  misc_RNA (1)...(19): siRNA sense strand
gaaugagcaugauuuugaa

SEQ ID NO: 334879 - RNA, 19 nt, Homo sapiens
  misc_RNA (1)...(19): siRNA sense strand
ucagggcuauccucucaga

SEQ ID NO: 334880 - RNA, 19 nt, Homo sapiens
  misc_RNA (1)...(19): siRNA sense strand
agggauaccaugcaacaua

SEQ ID NO: 334881 - RNA, 19 nt, Homo sapiens
  misc_RNA (1)...(19): siRNA sense strand
gcuagaaaucuguugcuau

SEQ ID NO: 334882 - RNA, 19 nt, Homo sapiens
  misc_RNA (1)...(19): siRNA sense strand
ugaaugagcaugauuuuga

SEQ ID NO: 334883 - RNA, 19 nt, Homo sapiens
  misc_RNA (1)...(19): siRNA sense strand
ggcuagaaaucuguugcua

SEQ ID NO: 334884 - RNA, 19 nt, Homo sapiens
  misc_RNA (1)...(19): siRNA sense strand
ugaaacaagcgucucugaa

SEQ ID NO: 334885 - RNA, 19 nt, Homo sapiens
  misc_RNA (1)...(19): siRNA sense strand
aacauaaccugauaaagcu

SEQ ID NO: 334886 - RNA, 19 nt, Homo sapiens
  misc_RNA (1)...(19): siRNA sense strand
ugacccagucuauuaaaga

SEQ ID NO: 334887 - RNA, 19 nt, Homo sapiens
  misc_RNA (1)...(19): siRNA sense strand
gaacuagaagcuguguuag

SEQ ID NO: 334888 - RNA, 19 nt, Homo sapiens
  misc_RNA (1)...(19): siRNA sense strand
gugaaacaagcgucucuga

SEQ ID NO: 334889 - RNA, 19 nt, Homo sapiens
  misc_RNA (1)...(19): siRNA sense strand
ccaacaugcccacagauca

SEQ ID NO: 334890 - RNA, 19 nt, Homo sapiens
  misc_RNA (1)...(19): siRNA sense strand
uaugggcccuucaccaaca

SEQ ID NO: 334891 - RNA, 19 nt, Homo sapiens
  misc_RNA (1)...(19): siRNA sense strand
guccaaagcgagcaagaga

SEQ ID NO: 334892 - RNA, 19 nt, Homo sapiens
  misc_RNA (1)...(19): siRNA sense strand
cagaacaaagcacaucaga

SEQ ID NO: 334893 - RNA, 19 nt, Homo sapiens
  misc_RNA (1)...(19): siRNA sense strand
ccugcgaaauccagaacaa

SEQ ID NO: 334894 - RNA, 19 nt, Homo sapiens
  misc_RNA (1)...(19): siRNA sense strand
gaaaccaccaagguccaaa

SEQ ID NO: 334895 - RNA, 19 nt, Homo sapiens
  misc_RNA (1)...(19): siRNA sense strand
gauaaagcuccagcaggaa

SEQ ID NO: 334896 - RNA, 19 nt, Homo sapiens
  misc_RNA (1)...(19): siRNA sense strand
aaggagcuuucaucauuca

SEQ ID NO: 334897 - RNA, 19 nt, Homo sapiens
  misc_RNA (1)...(19): siRNA sense strand
ggugugagagugaaacaag

SEQ ID NO: 334898 - RNA, 19 nt, Homo sapiens
  misc_RNA (1)...(19): siRNA sense strand
gaaauggcugaacuagaag

SEQ ID NO: 334899 - RNA, 19 nt, Homo sapiens
  misc_RNA (1)...(19): siRNA sense strand
auaaagcuccagcaggaaa

SEQ ID NO: 334900 - RNA, 19 nt, Homo sapiens
  misc_RNA (1)...(19): siRNA sense strand
acccuuccaucauaaguga

SEQ ID NO: 334901 - RNA, 19 nt, Homo sapiens
  misc_RNA (1)...(19): siRNA sense strand
ggugacccagucuauuaaa

SEQ ID NO: 334902 - RNA, 19 nt, Homo sapiens
  misc_RNA (1)...(19): siRNA sense strand
cccagucuauuaaagaaag

SEQ ID NO: 334903 - RNA, 19 nt, Homo sapiens
  misc_RNA (1)...(19): siRNA sense strand
caucugggugugagaguga

SEQ ID NO: 334904 - RNA, 19 nt, Homo sapiens
  misc_RNA (1)...(19): siRNA sense strand
ccagucuauuaaagaaaga

SEQ ID NO: 334905 - RNA, 19 nt, Homo sapiens
  misc_RNA (1)...(19): siRNA sense strand
cgaaauccagaacaaagca

SEQ ID NO: 334906 - RNA, 19 nt, Homo sapiens
  misc_RNA (1)...(19): siRNA sense strand
aagagaaucccaggacaga

SEQ ID NO: 334907 - RNA, 19 nt, Homo sapiens
  misc_RNA (1)...(19): siRNA sense strand
gauguggucaauggaagaa

SEQ ID NO: 334908 - RNA, 19 nt, Homo sapiens
  misc_RNA (1)...(19): siRNA sense strand
ggaccugcgaaauccagaa

SEQ ID NO: 334909 - RNA, 19 nt, Homo sapiens
  misc_RNA (1)...(19): siRNA sense strand
gagcaugauuuugaaguca

SEQ ID NO: 334910 - RNA, 19 nt, Homo sapiens
  misc_RNA (1)...(19): siRNA sense strand
gugacccagucuauuaaag

SEQ ID NO: 334911 - RNA, 19 nt, Homo sapiens
  misc_RNA (1)...(19): siRNA sense strand
agaacaaagcacaucagaa

SEQ ID NO: 334912 - RNA, 19 nt, Homo sapiens
  misc_RNA (1)...(19): siRNA sense strand
uggaagaaaccaccaaggu

SEQ ID NO: 334913 - RNA, 19 nt, Homo sapiens
  misc_RNA (1)...(19): siRNA sense strand
ucaacuggaauggauggua

SEQ ID NO: 334914 - RNA, 19 nt, Homo sapiens
  misc_RNA (1)...(19): siRNA sense strand
ggaaauggcugaacuagaa

SEQ ID NO: 334915 - RNA, 19 nt, Homo sapiens
  misc_RNA (1)...(19): siRNA sense strand
gaacaaagcacaucagaaa

SEQ ID NO: 334916 - RNA, 19 nt, Homo sapiens
  misc_RNA (1)...(19): siRNA sense strand
cagcuacccuuccaucaua

SEQ ID NO: 334917 - RNA, 19 nt, Homo sapiens
  misc_RNA (1)...(19): siRNA sense strand
gggauaccaugcaacauaa

SEQ ID NO: 334918 - RNA, 19 nt, Homo sapiens
  misc_RNA (1)...(19): siRNA sense strand
gaggagauguggucaaugg

SEQ ID NO: 334919 - RNA, 19 nt, Homo sapiens
  misc_RNA (1)...(19): siRNA sense strand
gaaggagcuuucaucauuc

SEQ ID NO: 334920 - RNA, 19 nt, Homo sapiens
  misc_RNA (1)...(19): siRNA sense strand
cuagaaaucuguugcuaug

SEQ ID NO: 334921 - RNA, 19 nt, Homo sapiens
  misc_RNA (1)...(19): siRNA sense strand
gcucagggcuauccucuca

SEQ ID NO: 334922 - RNA, 19 nt, Homo sapiens
  misc_RNA (1)...(19): siRNA sense strand
aaacaagcgucucugaaga

SEQ ID NO: 334923 - RNA, 19 nt, Homo sapiens
  misc_RNA (1)...(19): siRNA sense strand
caacauaaccugauaaagc

SEQ ID NO: 334924 - RNA, 19 nt, Homo sapiens
  misc_RNA (1)...(19): siRNA sense strand
gaaacaagcgucucugaag

SEQ ID NO: 334925 - RNA, 19 nt, Homo sapiens
  misc_RNA (1)...(19): siRNA sense strand
gcagagggauaccaugcaa

SEQ ID NO: 334926 - RNA, 19 nt, Homo sapiens
  misc_RNA (1)...(19): siRNA sense strand
ugaacuagaagcuguguua

SEQ ID NO: 334927 - RNA, 19 nt, Homo sapiens
  misc_RNA (1)...(19): siRNA sense strand
gagaaucccaggacagaaa

SEQ ID NO: 334928 - RNA, 19 nt, Homo sapiens
  misc_RNA (1)...(19): siRNA sense strand
gcccacagaucaacuggaa

SEQ ID NO: 334929 - RNA, 19 nt, Homo sapiens
  misc_RNA (1)...(19): siRNA sense strand
gaagacugcucagggcuau

SEQ ID NO: 334930 - RNA, 19 nt, Homo sapiens
  misc_RNA (1)...(19): siRNA sense strand
gacccagucuauuaaagaa

SEQ ID NO: 334931 - RNA, 19 nt, Homo sapiens
  misc_RNA (1)...(19): siRNA sense strand
acuagaagcuguguuagaa

SEQ ID NO: 334932 - RNA, 19 nt, Homo sapiens
  misc_RNA (1)...(19): siRNA sense strand
caugcaacauaaccugaua

SEQ ID NO: 334933 - RNA, 19 nt, Homo sapiens
  misc_RNA (1)...(19): siRNA sense strand
gcuggacaccuaccugaua

SEQ ID NO: 334934 - RNA, 19 nt, Homo sapiens
  misc_RNA (1)...(19): siRNA sense strand
cagaucaacuggaauggau

SEQ ID NO: 334935 - RNA, 19 nt, Homo sapiens
  misc_RNA (1)...(19): siRNA sense strand
gcaggaaauggcugaacua

SEQ ID NO: 334936 - RNA, 19 nt, Homo sapiens
  misc_RNA (1)...(19): siRNA sense strand
ccacagaucaacuggaaug

SEQ ID NO: 334937 - RNA, 19 nt, Homo sapiens
  misc_RNA (1)...(19): siRNA sense strand
caacaugcccacagaucaa

SEQ ID NO: 334938 - RNA, 19 nt, Homo sapiens
  misc_RNA (1)...(19): siRNA sense strand
ucaccaacaugcccacaga

SEQ ID NO: 334939 - RNA, 19 nt, Homo sapiens
  misc_RNA (1)...(19): siRNA sense strand
cagaggagauguggucaau

SEQ ID NO: 334940 - RNA, 19 nt, Homo sapiens
  misc_RNA (1)...(19): siRNA sense strand
caauugggcagauguguga

SEQ ID NO: 334941 - RNA, 19 nt, Homo sapiens
  misc_RNA (1)...(19): siRNA sense strand
ggagauguggucaauggaa

SEQ ID NO: 334942 - RNA, 19 nt, Homo sapiens
  misc_RNA (1)...(19): siRNA sense strand
guacagcuguguggugcuu

SEQ ID NO: 334943 - RNA, 19 nt, Homo sapiens
  misc_RNA (1)...(19): siRNA sense strand
ccaaagcgagcaagagaau

SEQ ID NO: 334944 - RNA, 19 nt, Homo sapiens
  misc_RNA (1)...(19): siRNA sense strand
gcuaugggcccuucaccaa

SEQ ID NO: 334945 - RNA, 19 nt, Homo sapiens
  misc_RNA (1)...(19): siRNA sense strand
gaaugagcaugauuuugaa

SEQ ID NO: 334946 - RNA, 19 nt, Homo sapiens
  misc_RNA (1)...(19): siRNA sense strand
ucagggcuauccucucaga

SEQ ID NO: 334947 - RNA, 19 nt, Homo sapiens
  misc_RNA (1)...(19): siRNA sense strand
agggauaccaugcaacaua

SEQ ID NO: 334948 - RNA, 19 nt, Homo sapiens
  misc_RNA (1)...(19): siRNA sense strand
gcuagaaaucuguugcuau

SEQ ID NO: 334949 - RNA, 19 nt, Homo sapiens
  misc_RNA (1)...(19): siRNA sense strand
ugaaugagcaugauuuuga

SEQ ID NO: 334950 - RNA, 19 nt, Homo sapiens
  misc_RNA (1)...(19): siRNA sense strand
ggcuagaaaucuguugcua

SEQ ID NO: 334951 - RNA, 19 nt, Homo sapiens
  misc_RNA (1)...(19): siRNA sense strand
ugaaacaagcgucucugaa

SEQ ID NO: 334952 - RNA, 19 nt, Homo sapiens
  misc_RNA (1)...(19): siRNA sense strand
aacauaaccugauaaagcu

SEQ ID NO: 334953 - RNA, 19 nt, Homo sapiens
  misc_RNA (1)...(19): siRNA sense strand
ugacccagucuauuaaaga

SEQ ID NO: 334954 - RNA, 19 nt, Homo sapiens
  misc_RNA (1)...(19): siRNA sense strand
gaacuagaagcuguguuag

SEQ ID NO: 334955 - RNA, 19 nt, Homo sapiens
  misc_RNA (1)...(19): siRNA sense strand
gugaaacaagcgucucuga

SEQ ID NO: 334956 - RNA, 19 nt, Homo sapiens
  misc_RNA (1)...(19): siRNA sense strand
ccaacaugcccacagauca

SEQ ID NO: 334957 - RNA, 19 nt, Homo sapiens
  misc_RNA (1)...(19): siRNA sense strand
uaugggcccuucaccaaca

SEQ ID NO: 334958 - RNA, 19 nt, Homo sapiens
  misc_RNA (1)...(19): siRNA sense strand
guccaaagcgagcaagaga

SEQ ID NO: 334959 - RNA, 19 nt, Homo sapiens
  misc_RNA (1)...(19): siRNA sense strand
cagaacaaagcacaucaga

SEQ ID NO: 334960 - RNA, 19 nt, Homo sapiens
  misc_RNA (1)...(19): siRNA sense strand
ccugcgaaauccagaacaa

SEQ ID NO: 334961 - RNA, 19 nt, Homo sapiens
  misc_RNA (1)...(19): siRNA sense strand
gaaaccaccaagguccaaa

SEQ ID NO: 334962 - RNA, 19 nt, Homo sapiens
  misc_RNA (1)...(19): siRNA sense strand
gauaaagcuccagcaggaa

SEQ ID NO: 334963 - RNA, 19 nt, Homo sapiens
  misc_RNA (1)...(19): siRNA sense strand
aaggagcuuucaucauuca

SEQ ID NO: 334964 - RNA, 19 nt, Homo sapiens
  misc_RNA (1)...(19): siRNA sense strand
ggugugagagugaaacaag

SEQ ID NO: 334965 - RNA, 19 nt, Homo sapiens
  misc_RNA (1)...(19): siRNA sense strand
gaaauggcugaacuagaag

SEQ ID NO: 334966 - RNA, 19 nt, Homo sapiens
  misc_RNA (1)...(19): siRNA sense strand
auaaagcuccagcaggaaa

SEQ ID NO: 334967 - RNA, 19 nt, Homo sapiens
  misc_RNA (1)...(19): siRNA sense strand
acccuuccaucauaaguga

SEQ ID NO: 334968 - RNA, 19 nt, Homo sapiens
  misc_RNA (1)...(19): siRNA sense strand
ggugacccagucuauuaaa

SEQ ID NO: 334969 - RNA, 19 nt, Homo sapiens
  misc_RNA (1)...(19): siRNA sense strand
cccagucuauuaaagaaag

SEQ ID NO: 334970 - RNA, 19 nt, Homo sapiens
  misc_RNA (1)...(19): siRNA sense strand
caucugggugugagaguga

SEQ ID NO: 334971 - RNA, 19 nt, Homo sapiens
  misc_RNA (1)...(19): siRNA sense strand
ccagucuauuaaagaaaga

SEQ ID NO: 334972 - RNA, 19 nt, Homo sapiens
  misc_RNA (1)...(19): siRNA sense strand
cgaaauccagaacaaagca

SEQ ID NO: 334973 - RNA, 19 nt, Homo sapiens
  misc_RNA (1)...(19): siRNA sense strand
aagagaaucccaggacaga

SEQ ID NO: 334974 - RNA, 19 nt, Homo sapiens
  misc_RNA (1)...(19): siRNA sense strand
gauguggucaauggaagaa

SEQ ID NO: 334975 - RNA, 19 nt, Homo sapiens
  misc_RNA (1)...(19): siRNA sense strand
ggaccugcgaaauccagaa

SEQ ID NO: 334976 - RNA, 19 nt, Homo sapiens
  misc_RNA (1)...(19): siRNA sense strand
gagcaugauuuugaaguca

SEQ ID NO: 334977 - RNA, 19 nt, Homo sapiens
  misc_RNA (1)...(19): siRNA sense strand
gugacccagucuauuaaag

SEQ ID NO: 334978 - RNA, 19 nt, Homo sapiens
  misc_RNA (1)...(19): siRNA sense strand
agaacaaagcacaucagaa

SEQ ID NO: 334979 - RNA, 19 nt, Homo sapiens
  misc_RNA (1)...(19): siRNA sense strand
uggaagaaaccaccaaggu

SEQ ID NO: 334980 - RNA, 19 nt, Homo sapiens
  misc_RNA (1)...(19): siRNA sense strand
ucaacuggaauggauggua

SEQ ID NO: 334981 - RNA, 19 nt, Homo sapiens
  misc_RNA (1)...(19): siRNA sense strand
ggaaauggcugaacuagaa

SEQ ID NO: 334982 - RNA, 19 nt, Homo sapiens
  misc_RNA (1)...(19): siRNA sense strand
gaacaaagcacaucagaaa

SEQ ID NO: 334983 - RNA, 19 nt, Homo sapiens
  misc_RNA (1)...(19): siRNA sense strand
cagcuacccuuccaucaua

SEQ ID NO: 334984 - RNA, 19 nt, Homo sapiens
  misc_RNA (1)...(19): siRNA sense strand
gggauaccaugcaacauaa

SEQ ID NO: 334985 - RNA, 19 nt, Homo sapiens
  misc_RNA (1)...(19): siRNA sense strand
gaggagauguggucaaugg

SEQ ID NO: 334986 - RNA, 19 nt, Homo sapiens
  misc_RNA (1)...(19): siRNA sense strand
gaaggagcuuucaucauuc

SEQ ID NO: 334987 - RNA, 19 nt, Homo sapiens
  misc_RNA (1)...(19): siRNA sense strand
cuagaaaucuguugcuaug

SEQ ID NO: 334988 - RNA, 19 nt, Homo sapiens
  misc_RNA (1)...(19): siRNA sense strand
gcucagggcuauccucuca

SEQ ID NO: 334989 - RNA, 19 nt, Homo sapiens
  misc_RNA (1)...(19): siRNA sense strand
aaacaagcgucucugaaga

SEQ ID NO: 334990 - RNA, 19 nt, Homo sapiens
  misc_RNA (1)...(19): siRNA sense strand
caacauaaccugauaaagc

SEQ ID NO: 334991 - RNA, 19 nt, Homo sapiens
  misc_RNA (1)...(19): siRNA sense strand
gaaacaagcgucucugaag

SEQ ID NO: 334992 - RNA, 19 nt, Homo sapiens
  misc_RNA (1)...(19): siRNA sense strand
gcagagggauaccaugcaa

SEQ ID NO: 334993 - RNA, 19 nt, Homo sapiens
  misc_RNA (1)...(19): siRNA sense strand
ugaacuagaagcuguguua

SEQ ID NO: 334994 - RNA, 19 nt, Homo sapiens
  misc_RNA (1)...(19): siRNA sense strand
gagaaucccaggacagaaa

SEQ ID NO: 334995 - RNA, 19 nt, Homo sapiens
  misc_RNA (1)...(19): siRNA sense strand
gcccacagaucaacuggaa

SEQ ID NO: 334996 - RNA, 19 nt, Homo sapiens
  misc_RNA (1)...(19): siRNA sense strand
gaagacugcucagggcuau

SEQ ID NO: 334997 - RNA, 19 nt, Homo sapiens
  misc_RNA (1)...(19): siRNA sense strand
gacccagucuauuaaagaa

SEQ ID NO: 334998 - RNA, 19 nt, Homo sapiens
  misc_RNA (1)...(19): siRNA sense strand
acuagaagcuguguuagaa

SEQ ID NO: 334999 - RNA, 19 nt, Homo sapiens
  misc_RNA (1)...(19): siRNA sense strand
caugcaacauaaccugaua

SEQ ID NO: 335000 - RNA, 19 nt, Homo sapiens
  misc_RNA (1)...(19): siRNA sense strand
gcuggacaccuaccugaua

SEQ ID NO: 335001 - RNA, 19 nt, Homo sapiens
  misc_RNA (1)...(19): siRNA sense strand
cagaucaacuggaauggau

SEQ ID NO: 335002 - RNA, 19 nt, Homo sapiens
  misc_RNA (1)...(19): siRNA sense strand
gcaggaaauggcugaacua

SEQ ID NO: 335003 - RNA, 19 nt, Homo sapiens
  misc_RNA (1)...(19): siRNA sense strand
ccacagaucaacuggaaug

SEQ ID NO: 335004 - RNA, 19 nt, Homo sapiens
  misc_RNA (1)...(19): siRNA sense strand
caacaugcccacagaucaa

SEQ ID NO: 335005 - RNA, 19 nt, Homo sapiens
  misc_RNA (1)...(19): siRNA sense strand
ucaccaacaugcccacaga

SEQ ID NO: 335006 - RNA, 19 nt, Homo sapiens
  misc_RNA (1)...(19): siRNA sense strand
cagaggagauguggucaau

SEQ ID NO: 335007 - RNA, 19 nt, Homo sapiens
  misc_RNA (1)...(19): siRNA sense strand
caauugggcagauguguga

SEQ ID NO: 335008 - RNA, 19 nt, Homo sapiens
  misc_RNA (1)...(19): siRNA sense strand
ggagauguggucaauggaa

SEQ ID NO: 335009 - RNA, 19 nt, Homo sapiens
  misc_RNA (1)...(19): siRNA sense strand
guacagcuguguggugcuu

SEQ ID NO: 335010 - RNA, 19 nt, Homo sapiens
  misc_RNA (1)...(19): siRNA sense strand
ccaaagcgagcaagagaau

SEQ ID NO: 335011 - RNA, 19 nt, Homo sapiens
  misc_RNA (1)...(19): siRNA sense strand
gcuaugggcccuucaccaa

SEQ ID NO: 335012 - RNA, 19 nt, Homo sapiens
  misc_RNA (1)...(19): siRNA sense strand
gaaugagcaugauuuugaa

SEQ ID NO: 335013 - RNA, 19 nt, Homo sapiens
  misc_RNA (1)...(19): siRNA sense strand
ucagggcuauccucucaga

SEQ ID NO: 335014 - RNA, 19 nt, Homo sapiens
  misc_RNA (1)...(19): siRNA sense strand
agggauaccaugcaacaua

SEQ ID NO: 335015 - RNA, 19 nt, Homo sapiens
  misc_RNA (1)...(19): siRNA sense strand
gcuagaaaucuguugcuau

SEQ ID NO: 335016 - RNA, 19 nt, Homo sapiens
  misc_RNA (1)...(19): siRNA sense strand
ugaaugagcaugauuuuga

SEQ ID NO: 335017 - RNA, 19 nt, Homo sapiens
  misc_RNA (1)...(19): siRNA sense strand
ggcuagaaaucuguugcua

SEQ ID NO: 335018 - RNA, 19 nt, Homo sapiens
  misc_RNA (1)...(19): siRNA sense strand
ugaaacaagcgucucugaa

SEQ ID NO: 335019 - RNA, 19 nt, Homo sapiens
  misc_RNA (1)...(19): siRNA sense strand
aacauaaccugauaaagcu

SEQ ID NO: 335020 - RNA, 19 nt, Homo sapiens
  misc_RNA (1)...(19): siRNA sense strand
ugacccagucuauuaaaga

SEQ ID NO: 335021 - RNA, 19 nt, Homo sapiens
  misc_RNA (1)...(19): siRNA sense strand
gaacuagaagcuguguuag

SEQ ID NO: 335022 - RNA, 19 nt, Homo sapiens
  misc_RNA (1)...(19): siRNA sense strand
gugaaacaagcgucucuga

SEQ ID NO: 335023 - RNA, 19 nt, Homo sapiens
  misc_RNA (1)...(19): siRNA sense strand
ccaacaugcccacagauca

SEQ ID NO: 335024 - RNA, 19 nt, Homo sapiens
  misc_RNA (1)...(19): siRNA sense strand
uaugggcccuucaccaaca

SEQ ID NO: 335025 - RNA, 19 nt, Homo sapiens
  misc_RNA (1)...(19): siRNA sense strand
guccaaagcgagcaagaga

SEQ ID NO: 335026 - RNA, 19 nt, Homo sapiens
  misc_RNA (1)...(19): siRNA sense strand
cagaacaaagcacaucaga

SEQ ID NO: 335027 - RNA, 19 nt, Homo sapiens
  misc_RNA (1)...(19): siRNA sense strand
ccugcgaaauccagaacaa

SEQ ID NO: 335028 - RNA, 19 nt, Homo sapiens
  misc_RNA (1)...(19): siRNA sense strand
gaaaccaccaagguccaaa

SEQ ID NO: 335029 - RNA, 19 nt, Homo sapiens
  misc_RNA (1)...(19): siRNA sense strand
gauaaagcuccagcaggaa

SEQ ID NO: 335030 - RNA, 19 nt, Homo sapiens
  misc_RNA (1)...(19): siRNA sense strand
aaggagcuuucaucauuca

SEQ ID NO: 335031 - RNA, 19 nt, Homo sapiens
  misc_RNA (1)...(19): siRNA sense strand
ggugugagagugaaacaag

SEQ ID NO: 335032 - RNA, 19 nt, Homo sapiens
  misc_RNA (1)...(19): siRNA sense strand
gaaauggcugaacuagaag

SEQ ID NO: 335033 - RNA, 19 nt, Homo sapiens
  misc_RNA (1)...(19): siRNA sense strand
auaaagcuccagcaggaaa

SEQ ID NO: 335034 - RNA, 19 nt, Homo sapiens
  misc_RNA (1)...(19): siRNA sense strand
acccuuccaucauaaguga

SEQ ID NO: 335035 - RNA, 19 nt, Homo sapiens
  misc_RNA (1)...(19): siRNA sense strand
ggugacccagucuauuaaa

SEQ ID NO: 335036 - RNA, 19 nt, Homo sapiens
  misc_RNA (1)...(19): siRNA sense strand
cccagucuauuaaagaaag

SEQ ID NO: 335037 - RNA, 19 nt, Homo sapiens
  misc_RNA (1)...(19): siRNA sense strand
caucugggugugagaguga

SEQ ID NO: 335038 - RNA, 19 nt, Homo sapiens
  misc_RNA (1)...(19): siRNA sense strand
ccagucuauuaaagaaaga

SEQ ID NO: 335039 - RNA, 19 nt, Homo sapiens
  misc_RNA (1)...(19): siRNA sense strand
cgaaauccagaacaaagca

SEQ ID NO: 335040 - RNA, 19 nt, Homo sapiens
  misc_RNA (1)...(19): siRNA sense strand
aagagaaucccaggacaga

SEQ ID NO: 335041 - RNA, 19 nt, Homo sapiens
  misc_RNA (1)...(19): siRNA sense strand
gauguggucaauggaagaa

SEQ ID NO: 335042 - RNA, 19 nt, Homo sapiens
  misc_RNA (1)...(19): siRNA sense strand
ggaccugcgaaauccagaa

SEQ ID NO: 335043 - RNA, 19 nt, Homo sapiens
  misc_RNA (1)...(19): siRNA sense strand
gagcaugauuuugaaguca

SEQ ID NO: 335044 - RNA, 19 nt, Homo sapiens
  misc_RNA (1)...(19): siRNA sense strand
gugacccagucuauuaaag

SEQ ID NO: 335045 - RNA, 19 nt, Homo sapiens
  misc_RNA (1)...(19): siRNA sense strand
agaacaaagcacaucagaa

SEQ ID NO: 335046 - RNA, 19 nt, Homo sapiens
  misc_RNA (1)...(19): siRNA sense strand
uggaagaaaccaccaaggu

SEQ ID NO: 335047 - RNA, 19 nt, Homo sapiens
  misc_RNA (1)...(19): siRNA sense strand
ucaacuggaauggauggua

SEQ ID NO: 335048 - RNA, 19 nt, Homo sapiens
  misc_RNA (1)...(19): siRNA sense strand
ggaaauggcugaacuagaa

SEQ ID NO: 335049 - RNA, 19 nt, Homo sapiens
  misc_RNA (1)...(19): siRNA sense strand
gaacaaagcacaucagaaa

SEQ ID NO: 335050 - RNA, 19 nt, Homo sapiens
  misc_RNA (1)...(19): siRNA sense strand
cagcuacccuuccaucaua

SEQ ID NO: 335051 - RNA, 19 nt, Homo sapiens
  misc_RNA (1)...(19): siRNA sense strand
gggauaccaugcaacauaa

SEQ ID NO: 335052 - RNA, 19 nt, Homo sapiens
  misc_RNA (1)...(19): siRNA sense strand
gaggagauguggucaaugg

SEQ ID NO: 335053 - RNA, 19 nt, Homo sapiens
  misc_RNA (1)...(19): siRNA sense strand
gaaggagcuuucaucauuc

SEQ ID NO: 335054 - RNA, 19 nt, Homo sapiens
  misc_RNA (1)...(19): siRNA sense strand
cuagaaaucuguugcuaug

SEQ ID NO: 335055 - RNA, 19 nt, Homo sapiens
  misc_RNA (1)...(19): siRNA sense strand
gcucagggcuauccucuca

SEQ ID NO: 335056 - RNA, 19 nt, Homo sapiens
  misc_RNA (1)...(19): siRNA sense strand
aaacaagcgucucugaaga

SEQ ID NO: 335057 - RNA, 19 nt, Homo sapiens
  misc_RNA (1)...(19): siRNA sense strand
caacauaaccugauaaagc

SEQ ID NO: 335058 - RNA, 19 nt, Homo sapiens
  misc_RNA (1)...(19): siRNA sense strand
gaaacaagcgucucugaag

SEQ ID NO: 335059 - RNA, 19 nt, Homo sapiens
  misc_RNA (1)...(19): siRNA sense strand
gcagagggauaccaugcaa

SEQ ID NO: 335060 - RNA, 19 nt, Homo sapiens
  misc_RNA (1)...(19): siRNA sense strand
ugaacuagaagcuguguua

SEQ ID NO: 335061 - RNA, 19 nt, Homo sapiens
  misc_RNA (1)...(19): siRNA sense strand
gagaaucccaggacagaaa

SEQ ID NO: 335062 - RNA, 19 nt, Homo sapiens
  misc_RNA (1)...(19): siRNA sense strand
gcccacagaucaacuggaa

SEQ ID NO: 335063 - RNA, 19 nt, Homo sapiens
  misc_RNA (1)...(19): siRNA sense strand
gaagacugcucagggcuau

SEQ ID NO: 335064 - RNA, 19 nt, Homo sapiens
  misc_RNA (1)...(19): siRNA sense strand
gacccagucuauuaaagaa

SEQ ID NO: 335065 - RNA, 19 nt, Homo sapiens
  misc_RNA (1)...(19): siRNA sense strand
acuagaagcuguguuagaa

SEQ ID NO: 335066 - RNA, 19 nt, Homo sapiens
  misc_RNA (1)...(19): siRNA sense strand
caugcaacauaaccugaua

SEQ ID NO: 335067 - RNA, 19 nt, Homo sapiens
  misc_RNA (1)...(19): siRNA sense strand
gcuggacaccuaccugaua

SEQ ID NO: 335068 - RNA, 19 nt, Homo sapiens
  misc_RNA (1)...(19): siRNA sense strand
cagaucaacuggaauggau

SEQ ID NO: 335069 - RNA, 19 nt, Homo sapiens
  misc_RNA (1)...(19): siRNA sense strand
gcaggaaauggcugaacua

SEQ ID NO: 335070 - RNA, 19 nt, Homo sapiens
  misc_RNA (1)...(19): siRNA sense strand
ccacagaucaacuggaaug

SEQ ID NO: 335071 - RNA, 19 nt, Homo sapiens
  misc_RNA (1)...(19): siRNA sense strand
caacaugcccacagaucaa

SEQ ID NO: 335072 - RNA, 19 nt, Homo sapiens
  misc_RNA (1)...(19): siRNA sense strand
ucaccaacaugcccacaga

SEQ ID NO: 335073 - RNA, 19 nt, Homo sapiens
  misc_RNA (1)...(19): siRNA sense strand
cagaggagauguggucaau

SEQ ID NO: 335074 - RNA, 19 nt, Homo sapiens
  misc_RNA (1)...(19): siRNA sense strand
caauugggcagauguguga

SEQ ID NO: 335075 - RNA, 19 nt, Homo sapiens
  misc_RNA (1)...(19): siRNA sense strand
ggagauguggucaauggaa

SEQ ID NO: 335076 - RNA, 19 nt, Homo sapiens
  misc_RNA (1)...(19): siRNA sense strand
guacagcuguguggugcuu

SEQ ID NO: 335077 - RNA, 19 nt, Homo sapiens
  misc_RNA (1)...(19): siRNA sense strand
ccaaagcgagcaagagaau

SEQ ID NO: 335078 - RNA, 19 nt, Homo sapiens
  misc_RNA (1)...(19): siRNA sense strand
gcuaugggcccuucaccaa

SEQ ID NO: 335079 - RNA, 19 nt, Homo sapiens
  misc_RNA (1)...(19): siRNA sense strand
gaaugagcaugauuuugaa

SEQ ID NO: 335080 - RNA, 19 nt, Homo sapiens
  misc_RNA (1)...(19): siRNA sense strand
ucagggcuauccucucaga

SEQ ID NO: 335081 - RNA, 19 nt, Homo sapiens
  misc_RNA (1)...(19): siRNA sense strand
agggauaccaugcaacaua

SEQ ID NO: 335082 - RNA, 19 nt, Homo sapiens
  misc_RNA (1)...(19): siRNA sense strand
gcuagaaaucuguugcuau

SEQ ID NO: 335083 - RNA, 19 nt, Homo sapiens
  misc_RNA (1)...(19): siRNA sense strand
ugaaugagcaugauuuuga

SEQ ID NO: 335084 - RNA, 19 nt, Homo sapiens
  misc_RNA (1)...(19): siRNA sense strand
ggcuagaaaucuguugcua

SEQ ID NO: 335085 - RNA, 19 nt, Homo sapiens
  misc_RNA (1)...(19): siRNA sense strand
ugaaacaagcgucucugaa

SEQ ID NO: 335086 - RNA, 19 nt, Homo sapiens
  misc_RNA (1)...(19): siRNA sense strand
aacauaaccugauaaagcu

SEQ ID NO: 335087 - RNA, 19 nt, Homo sapiens
  misc_RNA (1)...(19): siRNA sense strand
ugacccagucuauuaaaga

SEQ ID NO: 335088 - RNA, 19 nt, Homo sapiens
  misc_RNA (1)...(19): siRNA sense strand
gaacuagaagcuguguuag

SEQ ID NO: 335089 - RNA, 19 nt, Homo sapiens
  misc_RNA (1)...(19): siRNA sense strand
gugaaacaagcgucucuga

SEQ ID NO: 335090 - RNA, 19 nt, Homo sapiens
  misc_RNA (1)...(19): siRNA sense strand
ccaacaugcccacagauca

SEQ ID NO: 335091 - RNA, 19 nt, Homo sapiens
  misc_RNA (1)...(19): siRNA sense strand
uaugggcccuucaccaaca

SEQ ID NO: 335092 - RNA, 19 nt, Homo sapiens
  misc_RNA (1)...(19): siRNA sense strand
guccaaagcgagcaagaga

SEQ ID NO: 335093 - RNA, 19 nt, Homo sapiens
  misc_RNA (1)...(19): siRNA sense strand
cagaacaaagcacaucaga

SEQ ID NO: 335094 - RNA, 19 nt, Homo sapiens
  misc_RNA (1)...(19): siRNA sense strand
ccugcgaaauccagaacaa

SEQ ID NO: 335095 - RNA, 19 nt, Homo sapiens
  misc_RNA (1)...(19): siRNA sense strand
gaaaccaccaagguccaaa

SEQ ID NO: 335096 - RNA, 19 nt, Homo sapiens
  misc_RNA (1)...(19): siRNA sense strand
gauaaagcuccagcaggaa

SEQ ID NO: 335097 - RNA, 19 nt, Homo sapiens
  misc_RNA (1)...(19): siRNA sense strand
aaggagcuuucaucauuca

SEQ ID NO: 335098 - RNA, 19 nt, Homo sapiens
  misc_RNA (1)...(19): siRNA sense strand
ggugugagagugaaacaag

SEQ ID NO: 335099 - RNA, 19 nt, Homo sapiens
  misc_RNA (1)...(19): siRNA sense strand
gaaauggcugaacuagaag

SEQ ID NO: 335100 - RNA, 19 nt, Homo sapiens
  misc_RNA (1)...(19): siRNA sense strand
auaaagcuccagcaggaaa

SEQ ID NO: 335101 - RNA, 19 nt, Homo sapiens
  misc_RNA (1)...(19): siRNA sense strand
acccuuccaucauaaguga

SEQ ID NO: 335102 - RNA, 19 nt, Homo sapiens
  misc_RNA (1)...(19): siRNA sense strand
ggugacccagucuauuaaa

SEQ ID NO: 335103 - RNA, 19 nt, Homo sapiens
  misc_RNA (1)...(19): siRNA sense strand
cccagucuauuaaagaaag

SEQ ID NO: 335104 - RNA, 19 nt, Homo sapiens
  misc_RNA (1)...(19): siRNA sense strand
caucugggugugagaguga

SEQ ID NO: 335105 - RNA, 19 nt, Homo sapiens
  misc_RNA (1)...(19): siRNA sense strand
ccagucuauuaaagaaaga

SEQ ID NO: 335106 - RNA, 19 nt, Homo sapiens
  misc_RNA (1)...(19): siRNA sense strand
cgaaauccagaacaaagca

SEQ ID NO: 335107 - RNA, 19 nt, Homo sapiens
  misc_RNA (1)...(19): siRNA sense strand
aagagaaucccaggacaga

SEQ ID NO: 335108 - RNA, 19 nt, Homo sapiens
  misc_RNA (1)...(19): siRNA sense strand
gauguggucaauggaagaa

SEQ ID NO: 335109 - RNA, 19 nt, Homo sapiens
  misc_RNA (1)...(19): siRNA sense strand
ggaccugcgaaauccagaa

SEQ ID NO: 335110 - RNA, 19 nt, Homo sapiens
  misc_RNA (1)...(19): siRNA sense strand
gagcaugauuuugaaguca

SEQ ID NO: 335111 - RNA, 19 nt, Homo sapiens
  misc_RNA (1)...(19): siRNA sense strand
gugacccagucuauuaaag

SEQ ID NO: 335112 - RNA, 19 nt, Homo sapiens
  misc_RNA (1)...(19): siRNA sense strand
agaacaaagcacaucagaa

SEQ ID NO: 335113 - RNA, 19 nt, Homo sapiens
  misc_RNA (1)...(19): siRNA sense strand
uggaagaaaccaccaaggu

SEQ ID NO: 335114 - RNA, 19 nt, Homo sapiens
  misc_RNA (1)...(19): siRNA sense strand
ucaacuggaauggauggua

SEQ ID NO: 335115 - RNA, 19 nt, Homo sapiens
  misc_RNA (1)...(19): siRNA sense strand
ggaaauggcugaacuagaa

SEQ ID NO: 335116 - RNA, 19 nt, Homo sapiens
  misc_RNA (1)...(19): siRNA sense strand
gaacaaagcacaucagaaa

SEQ ID NO: 335117 - RNA, 19 nt, Homo sapiens
  misc_RNA (1)...(19): siRNA sense strand
cagcuacccuuccaucaua

SEQ ID NO: 335118 - RNA, 19 nt, Homo sapiens
  misc_RNA (1)...(19): siRNA sense strand
gggauaccaugcaacauaa

SEQ ID NO: 335119 - RNA, 19 nt, Homo sapiens
  misc_RNA (1)...(19): siRNA sense strand
gaggagauguggucaaugg

SEQ ID NO: 335120 - RNA, 19 nt, Homo sapiens
  misc_RNA (1)...(19): siRNA sense strand
gaaggagcuuucaucauuc

SEQ ID NO: 335121 - RNA, 19 nt, Homo sapiens
  misc_RNA (1)...(19): siRNA sense strand
cuagaaaucuguugcuaug

SEQ ID NO: 335122 - RNA, 19 nt, Homo sapiens
  misc_RNA (1)...(19): siRNA sense strand
gcucagggcuauccucuca

SEQ ID NO: 335123 - RNA, 19 nt, Homo sapiens
  misc_RNA (1)...(19): siRNA sense strand
aaacaagcgucucugaaga

SEQ ID NO: 335124 - RNA, 19 nt, Homo sapiens
  misc_RNA (1)...(19): siRNA sense strand
caacauaaccugauaaagc

SEQ ID NO: 335125 - RNA, 19 nt, Homo sapiens
  misc_RNA (1)...(19): siRNA sense strand
gaaacaagcgucucugaag

SEQ ID NO: 335126 - RNA, 19 nt, Homo sapiens
  misc_RNA (1)...(19): siRNA sense strand
gcagagggauaccaugcaa

SEQ ID NO: 335127 - RNA, 19 nt, Homo sapiens
  misc_RNA (1)...(19): siRNA sense strand
ugaacuagaagcuguguua

SEQ ID NO: 335128 - RNA, 19 nt, Homo sapiens
  misc_RNA (1)...(19): siRNA sense strand
gagaaucccaggacagaaa

SEQ ID NO: 335129 - RNA, 19 nt, Homo sapiens
  misc_RNA (1)...(19): siRNA sense strand
gcccacagaucaacuggaa

SEQ ID NO: 335130 - RNA, 19 nt, Homo sapiens
  misc_RNA (1)...(19): siRNA sense strand
gaagacugcucagggcuau

SEQ ID NO: 335131 - RNA, 19 nt, Homo sapiens
  misc_RNA (1)...(19): siRNA sense strand
gacccagucuauuaaagaa

SEQ ID NO: 335132 - RNA, 19 nt, Homo sapiens
  misc_RNA (1)...(19): siRNA sense strand
acuagaagcuguguuagaa

SEQ ID NO: 335133 - RNA, 19 nt, Homo sapiens
  misc_RNA (1)...(19): siRNA sense strand
caugcaacauaaccugaua

SEQ ID NO: 335134 - RNA, 19 nt, Homo sapiens
  misc_RNA (1)...(19): siRNA sense strand
gcuggacaccuaccugaua

SEQ ID NO: 335135 - RNA, 19 nt, Homo sapiens
  misc_RNA (1)...(19): siRNA sense strand
cagaucaacuggaauggau

SEQ ID NO: 335136 - RNA, 19 nt, Homo sapiens
  misc_RNA (1)...(19): siRNA sense strand
gcaggaaauggcugaacua

SEQ ID NO: 335137 - RNA, 19 nt, Homo sapiens
  misc_RNA (1)...(19): siRNA sense strand
ccacagaucaacuggaaug

SEQ ID NO: 335138 - RNA, 19 nt, Homo sapiens
  misc_RNA (1)...(19): siRNA sense strand
caacaugcccacagaucaa

SEQ ID NO: 335139 - RNA, 19 nt, Homo sapiens
  misc_RNA (1)...(19): siRNA sense strand
ucaccaacaugcccacaga

SEQ ID NO: 335140 - RNA, 19 nt, Homo sapiens
  misc_RNA (1)...(19): siRNA sense strand
cagaggagauguggucaau

SEQ ID NO: 335141 - RNA, 19 nt, Homo sapiens
  misc_RNA (1)...(19): siRNA sense strand
caauugggcagauguguga

SEQ ID NO: 335142 - RNA, 19 nt, Homo sapiens
  misc_RNA (1)...(19): siRNA sense strand
ggagauguggucaauggaa

SEQ ID NO: 335143 - RNA, 19 nt, Homo sapiens
  misc_RNA (1)...(19): siRNA sense strand
guacagcuguguggugcuu

SEQ ID NO: 335144 - RNA, 19 nt, Homo sapiens
  misc_RNA (1)...(19): siRNA sense strand
ccaaagcgagcaagagaau

SEQ ID NO: 335145 - RNA, 19 nt, Homo sapiens
  misc_RNA (1)...(19): siRNA sense strand
gcuaugggcccuucaccaa

SEQ ID NO: 335146 - RNA, 19 nt, Homo sapiens
  misc_RNA (1)...(19): siRNA sense strand
gaaugagcaugauuuugaa

SEQ ID NO: 335147 - RNA, 19 nt, Homo sapiens
  misc_RNA (1)...(19): siRNA sense strand
ucagggcuauccucucaga

SEQ ID NO: 335148 - RNA, 19 nt, Homo sapiens
  misc_RNA (1)...(19): siRNA sense strand
agggauaccaugcaacaua

SEQ ID NO: 335149 - RNA, 19 nt, Homo sapiens
  misc_RNA (1)...(19): siRNA sense strand
gcuagaaaucuguugcuau

SEQ ID NO: 335150 - RNA, 19 nt, Homo sapiens
  misc_RNA (1)...(19): siRNA sense strand
ugaaugagcaugauuuuga

SEQ ID NO: 335151 - RNA, 19 nt, Homo sapiens
  misc_RNA (1)...(19): siRNA sense strand
ggcuagaaaucuguugcua

SEQ ID NO: 335152 - RNA, 19 nt, Homo sapiens
  misc_RNA (1)...(19): siRNA sense strand
ugaaacaagcgucucugaa

SEQ ID NO: 335153 - RNA, 19 nt, Homo sapiens
  misc_RNA (1)...(19): siRNA sense strand
aacauaaccugauaaagcu

SEQ ID NO: 335154 - RNA, 19 nt, Homo sapiens
  misc_RNA (1)...(19): siRNA sense strand
ugacccagucuauuaaaga

SEQ ID NO: 335155 - RNA, 19 nt, Homo sapiens
  misc_RNA (1)...(19): siRNA sense strand
gaacuagaagcuguguuag

SEQ ID NO: 335156 - RNA, 19 nt, Homo sapiens
  misc_RNA (1)...(19): siRNA sense strand
gugaaacaagcgucucuga

SEQ ID NO: 335157 - RNA, 19 nt, Homo sapiens
  misc_RNA (1)...(19): siRNA sense strand
ccaacaugcccacagauca

SEQ ID NO: 335158 - RNA, 19 nt, Homo sapiens
  misc_RNA (1)...(19): siRNA sense strand
uaugggcccuucaccaaca

SEQ ID NO: 335159 - RNA, 19 nt, Homo sapiens
  misc_RNA (1)...(19): siRNA sense strand
guccaaagcgagcaagaga

SEQ ID NO: 335160 - RNA, 19 nt, Homo sapiens
  misc_RNA (1)...(19): siRNA sense strand
cagaacaaagcacaucaga

SEQ ID NO: 335161 - RNA, 19 nt, Homo sapiens
  misc_RNA (1)...(19): siRNA sense strand
ccugcgaaauccagaacaa

SEQ ID NO: 335162 - RNA, 19 nt, Homo sapiens
  misc_RNA (1)...(19): siRNA sense strand
gaaaccaccaagguccaaa

SEQ ID NO: 335163 - RNA, 19 nt, Homo sapiens
  misc_RNA (1)...(19): siRNA sense strand
gauaaagcuccagcaggaa

SEQ ID NO: 335164 - RNA, 19 nt, Homo sapiens
  misc_RNA (1)...(19): siRNA sense strand
aaggagcuuucaucauuca

SEQ ID NO: 335165 - RNA, 19 nt, Homo sapiens
  misc_RNA (1)...(19): siRNA sense strand
ggugugagagugaaacaag

SEQ ID NO: 335166 - RNA, 19 nt, Homo sapiens
  misc_RNA (1)...(19): siRNA sense strand
gaaauggcugaacuagaag

SEQ ID NO: 335167 - RNA, 19 nt, Homo sapiens
  misc_RNA (1)...(19): siRNA sense strand
auaaagcuccagcaggaaa

SEQ ID NO: 335168 - RNA, 19 nt, Homo sapiens
  misc_RNA (1)...(19): siRNA sense strand
acccuuccaucauaaguga

SEQ ID NO: 335169 - RNA, 19 nt, Homo sapiens
  misc_RNA (1)...(19): siRNA sense strand
ggugacccagucuauuaaa

SEQ ID NO: 335170 - RNA, 19 nt, Homo sapiens
  misc_RNA (1)...(19): siRNA sense strand
cccagucuauuaaagaaag

SEQ ID NO: 335171 - RNA, 19 nt, Homo sapiens
  misc_RNA (1)...(19): siRNA sense strand
caucugggugugagaguga

SEQ ID NO: 335172 - RNA, 19 nt, Homo sapiens
  misc_RNA (1)...(19): siRNA sense strand
ccagucuauuaaagaaaga

SEQ ID NO: 335173 - RNA, 19 nt, Homo sapiens
  misc_RNA (1)...(19): siRNA sense strand
cgaaauccagaacaaagca

SEQ ID NO: 335174 - RNA, 19 nt, Homo sapiens
  misc_RNA (1)...(19): siRNA sense strand
aagagaaucccaggacaga

SEQ ID NO: 335175 - RNA, 19 nt, Homo sapiens
  misc_RNA (1)...(19): siRNA sense strand
gauguggucaauggaagaa

SEQ ID NO: 335176 - RNA, 19 nt, Homo sapiens
  misc_RNA (1)...(19): siRNA sense strand
ggaccugcgaaauccagaa

SEQ ID NO: 335177 - RNA, 19 nt, Homo sapiens
  misc_RNA (1)...(19): siRNA sense strand
gagcaugauuuugaaguca

SEQ ID NO: 335178 - RNA, 19 nt, Homo sapiens
  misc_RNA (1)...(19): siRNA sense strand
gugacccagucuauuaaag

SEQ ID NO: 335179 - RNA, 19 nt, Homo sapiens
  misc_RNA (1)...(19): siRNA sense strand
agaacaaagcacaucagaa

SEQ ID NO: 335180 - RNA, 19 nt, Homo sapiens
  misc_RNA (1)...(19): siRNA sense strand
uggaagaaaccaccaaggu

SEQ ID NO: 335181 - RNA, 19 nt, Homo sapiens
  misc_RNA (1)...(19): siRNA sense strand
ucaacuggaauggauggua

SEQ ID NO: 335182 - RNA, 19 nt, Homo sapiens
  misc_RNA (1)...(19): siRNA sense strand
ggaaauggcugaacuagaa

SEQ ID NO: 335183 - RNA, 19 nt, Homo sapiens
  misc_RNA (1)...(19): siRNA sense strand
gaacaaagcacaucagaaa

SEQ ID NO: 335184 - RNA, 19 nt, Homo sapiens
  misc_RNA (1)...(19): siRNA sense strand
cagcuacccuuccaucaua

SEQ ID NO: 335185 - RNA, 19 nt, Homo sapiens
  misc_RNA (1)...(19): siRNA sense strand
gggauaccaugcaacauaa

SEQ ID NO: 335186 - RNA, 19 nt, Homo sapiens
  misc_RNA (1)...(19): siRNA sense strand
gaggagauguggucaaugg

SEQ ID NO: 335187 - RNA, 19 nt, Homo sapiens
  misc_RNA (1)...(19): siRNA sense strand
gaaggagcuuucaucauuc

SEQ ID NO: 335188 - RNA, 19 nt, Homo sapiens
  misc_RNA (1)...(19): siRNA sense strand
cuagaaaucuguugcuaug

SEQ ID NO: 335189 - RNA, 19 nt, Homo sapiens
  misc_RNA (1)...(19): siRNA sense strand
gcucagggcuauccucuca

SEQ ID NO: 335190 - RNA, 19 nt, Homo sapiens
  misc_RNA (1)...(19): siRNA sense strand
aaacaagcgucucugaaga

SEQ ID NO: 335191 - RNA, 19 nt, Homo sapiens
  misc_RNA (1)...(19): siRNA sense strand
caacauaaccugauaaagc

SEQ ID NO: 335192 - RNA, 19 nt, Homo sapiens
  misc_RNA (1)...(19): siRNA sense strand
gaaacaagcgucucugaag

SEQ ID NO: 335193 - RNA, 19 nt, Homo sapiens
  misc_RNA (1)...(19): siRNA sense strand
gcagagggauaccaugcaa

SEQ ID NO: 335194 - RNA, 19 nt, Homo sapiens
  misc_RNA (1)...(19): siRNA sense strand
ugaacuagaagcuguguua

SEQ ID NO: 335195 - RNA, 19 nt, Homo sapiens
  misc_RNA (1)...(19): siRNA sense strand
gagaaucccaggacagaaa

SEQ ID NO: 335196 - RNA, 19 nt, Homo sapiens
  misc_RNA (1)...(19): siRNA sense strand
gcccacagaucaacuggaa

SEQ ID NO: 335197 - RNA, 19 nt, Homo sapiens
  misc_RNA (1)...(19): siRNA sense strand
gaagacugcucagggcuau

SEQ ID NO: 335198 - RNA, 19 nt, Homo sapiens
  misc_RNA (1)...(19): siRNA sense strand
gacccagucuauuaaagaa

SEQ ID NO: 335199 - RNA, 19 nt, Homo sapiens
  misc_RNA (1)...(19): siRNA sense strand
acuagaagcuguguuagaa

SEQ ID NO: 335200 - RNA, 19 nt, Homo sapiens
  misc_RNA (1)...(19): siRNA sense strand
caugcaacauaaccugaua

SEQ ID NO: 335201 - RNA, 19 nt, Homo sapiens
  misc_RNA (1)...(19): siRNA sense strand
gcuggacaccuaccugaua

SEQ ID NO: 335202 - RNA, 19 nt, Homo sapiens
  misc_RNA (1)...(19): siRNA sense strand
cagaucaacuggaauggau

SEQ ID NO: 335203 - RNA, 19 nt, Homo sapiens
  misc_RNA (1)...(19): siRNA sense strand
gcaggaaauggcugaacua

SEQ ID NO: 335204 - RNA, 19 nt, Homo sapiens
  misc_RNA (1)...(19): siRNA sense strand
ccacagaucaacuggaaug

SEQ ID NO: 335205 - RNA, 19 nt, Homo sapiens
  misc_RNA (1)...(19): siRNA sense strand
caacaugcccacagaucaa

SEQ ID NO: 335206 - RNA, 19 nt, Homo sapiens
  misc_RNA (1)...(19): siRNA sense strand
ucaccaacaugcccacaga

SEQ ID NO: 335207 - RNA, 19 nt, Homo sapiens
  misc_RNA (1)...(19): siRNA sense strand
cagaggagauguggucaau

SEQ ID NO: 335208 - RNA, 19 nt, Homo sapiens
  misc_RNA (1)...(19): siRNA sense strand
caauugggcagauguguga

SEQ ID NO: 335209 - RNA, 19 nt, Homo sapiens
  misc_RNA (1)...(19): siRNA sense strand
ggagauguggucaauggaa

SEQ ID NO: 335210 - RNA, 19 nt, Homo sapiens
  misc_RNA (1)...(19): siRNA sense strand
guacagcuguguggugcuu

SEQ ID NO: 335211 - RNA, 19 nt, Homo sapiens
  misc_RNA (1)...(19): siRNA sense strand
ccaaagcgagcaagagaau

SEQ ID NO: 335212 - RNA, 19 nt, Homo sapiens
  misc_RNA (1)...(19): siRNA sense strand
gcuaugggcccuucaccaa

SEQ ID NO: 335213 - RNA, 19 nt, Homo sapiens
  misc_RNA (1)...(19): siRNA sense strand
gaaugagcaugauuuugaa

SEQ ID NO: 335214 - RNA, 19 nt, Homo sapiens
  misc_RNA (1)...(19): siRNA sense strand
ucagggcuauccucucaga

SEQ ID NO: 335215 - RNA, 19 nt, Homo sapiens
  misc_RNA (1)...(19): siRNA sense strand
agggauaccaugcaacaua

SEQ ID NO: 335216 - RNA, 19 nt, Homo sapiens
  misc_RNA (1)...(19): siRNA sense strand
gcuagaaaucuguugcuau

SEQ ID NO: 335217 - RNA, 19 nt, Homo sapiens
  misc_RNA (1)...(19): siRNA sense strand
ugaaugagcaugauuuuga

SEQ ID NO: 335218 - RNA, 19 nt, Homo sapiens
  misc_RNA (1)...(19): siRNA sense strand
ggcuagaaaucuguugcua

SEQ ID NO: 335219 - RNA, 19 nt, Homo sapiens
  misc_RNA (1)...(19): siRNA sense strand
ugaaacaagcgucucugaa

SEQ ID NO: 335220 - RNA, 19 nt, Homo sapiens
  misc_RNA (1)...(19): siRNA sense strand
aacauaaccugauaaagcu

SEQ ID NO: 335221 - RNA, 19 nt, Homo sapiens
  misc_RNA (1)...(19): siRNA sense strand
ugacccagucuauuaaaga

SEQ ID NO: 335222 - RNA, 19 nt, Homo sapiens
  misc_RNA (1)...(19): siRNA sense strand
gaacuagaagcuguguuag

SEQ ID NO: 335223 - RNA, 19 nt, Homo sapiens
  misc_RNA (1)...(19): siRNA sense strand
gugaaacaagcgucucuga

SEQ ID NO: 335224 - RNA, 19 nt, Homo sapiens
  misc_RNA (1)...(19): siRNA sense strand
ccaacaugcccacagauca

SEQ ID NO: 335225 - RNA, 19 nt, Homo sapiens
  misc_RNA (1)...(19): siRNA sense strand
uaugggcccuucaccaaca

SEQ ID NO: 335226 - RNA, 19 nt, Homo sapiens
  misc_RNA (1)...(19): siRNA sense strand
guccaaagcgagcaagaga

SEQ ID NO: 335227 - RNA, 19 nt, Homo sapiens
  misc_RNA (1)...(19): siRNA sense strand
cagaacaaagcacaucaga

SEQ ID NO: 335228 - RNA, 19 nt, Homo sapiens
  misc_RNA (1)...(19): siRNA sense strand
ccugcgaaauccagaacaa

SEQ ID NO: 335229 - RNA, 19 nt, Homo sapiens
  misc_RNA (1)...(19): siRNA sense strand
gaaaccaccaagguccaaa

SEQ ID NO: 335230 - RNA, 19 nt, Homo sapiens
  misc_RNA (1)...(19): siRNA sense strand
gauaaagcuccagcaggaa

SEQ ID NO: 335231 - RNA, 19 nt, Homo sapiens
  misc_RNA (1)...(19): siRNA sense strand
aaggagcuuucaucauuca

SEQ ID NO: 335232 - RNA, 19 nt, Homo sapiens
  misc_RNA (1)...(19): siRNA sense strand
ggugugagagugaaacaag

SEQ ID NO: 335233 - RNA, 19 nt, Homo sapiens
  misc_RNA (1)...(19): siRNA sense strand
gaaauggcugaacuagaag

SEQ ID NO: 335234 - RNA, 19 nt, Homo sapiens
  misc_RNA (1)...(19): siRNA sense strand
auaaagcuccagcaggaaa

SEQ ID NO: 335235 - RNA, 19 nt, Homo sapiens
  misc_RNA (1)...(19): siRNA sense strand
acccuuccaucauaaguga

SEQ ID NO: 335236 - RNA, 19 nt, Homo sapiens
  misc_RNA (1)...(19): siRNA sense strand
ggugacccagucuauuaaa

SEQ ID NO: 335237 - RNA, 19 nt, Homo sapiens
  misc_RNA (1)...(19): siRNA sense strand
cccagucuauuaaagaaag

SEQ ID NO: 335238 - RNA, 19 nt, Homo sapiens
  misc_RNA (1)...(19): siRNA sense strand
caucugggugugagaguga

SEQ ID NO: 335239 - RNA, 19 nt, Homo sapiens
  misc_RNA (1)...(19): siRNA sense strand
ccagucuauuaaagaaaga

SEQ ID NO: 335240 - RNA, 19 nt, Homo sapiens
  misc_RNA (1)...(19): siRNA sense strand
cgaaauccagaacaaagca

SEQ ID NO: 335241 - RNA, 19 nt, Homo sapiens
  misc_RNA (1)...(19): siRNA sense strand
aagagaaucccaggacaga

SEQ ID NO: 335242 - RNA, 19 nt, Homo sapiens
  misc_RNA (1)...(19): siRNA sense strand
gauguggucaauggaagaa

SEQ ID NO: 335243 - RNA, 19 nt, Homo sapiens
  misc_RNA (1)...(19): siRNA sense strand
ggaccugcgaaauccagaa

SEQ ID NO: 335244 - RNA, 19 nt, Homo sapiens
  misc_RNA (1)...(19): siRNA sense strand
gagcaugauuuugaaguca

SEQ ID NO: 335245 - RNA, 19 nt, Homo sapiens
  misc_RNA (1)...(19): siRNA sense strand
gugacccagucuauuaaag

SEQ ID NO: 335246 - RNA, 19 nt, Homo sapiens
  misc_RNA (1)...(19): siRNA sense strand
agaacaaagcacaucagaa

SEQ ID NO: 335247 - RNA, 19 nt, Homo sapiens
  misc_RNA (1)...(19): siRNA sense strand
uggaagaaaccaccaaggu

SEQ ID NO: 335248 - RNA, 19 nt, Homo sapiens
  misc_RNA (1)...(19): siRNA sense strand
ucaacuggaauggauggua

SEQ ID NO: 335249 - RNA, 19 nt, Homo sapiens
  misc_RNA (1)...(19): siRNA sense strand
ggaaauggcugaacuagaa

SEQ ID NO: 335250 - RNA, 19 nt, Homo sapiens
  misc_RNA (1)...(19): siRNA sense strand
gaacaaagcacaucagaaa

SEQ ID NO: 335251 - RNA, 19 nt, Homo sapiens
  misc_RNA (1)...(19): siRNA sense strand
cagcuacccuuccaucaua

SEQ ID NO: 335252 - RNA, 19 nt, Homo sapiens
  misc_RNA (1)...(19): siRNA sense strand
gggauaccaugcaacauaa

SEQ ID NO: 335253 - RNA, 19 nt, Homo sapiens
  misc_RNA (1)...(19): siRNA sense strand
gcucagggcuauccucuca

SEQ ID NO: 335254 - RNA, 19 nt, Homo sapiens
  misc_RNA (1)...(19): siRNA sense strand
aaacaagcgucucugaaga

SEQ ID NO: 335255 - RNA, 19 nt, Homo sapiens
  misc_RNA (1)...(19): siRNA sense strand
caacauaaccugauaaagc

SEQ ID NO: 335256 - RNA, 19 nt, Homo sapiens
  misc_RNA (1)...(19): siRNA sense strand
gaaacaagcgucucugaag

SEQ ID NO: 335257 - RNA, 19 nt, Homo sapiens
  misc_RNA (1)...(19): siRNA sense strand
gcagagggauaccaugcaa

SEQ ID NO: 335258 - RNA, 19 nt, Homo sapiens
  misc_RNA (1)...(19): siRNA sense strand
ugaacuagaagcuguguua

SEQ ID NO: 335259 - RNA, 19 nt, Homo sapiens
  misc_RNA (1)...(19): siRNA sense strand
gaagacugcucagggcuau

SEQ ID NO: 335260 - RNA, 19 nt, Homo sapiens
  misc_RNA (1)...(19): siRNA sense strand
acuagaagcuguguuagaa

SEQ ID NO: 335261 - RNA, 19 nt, Homo sapiens
  misc_RNA (1)...(19): siRNA sense strand
caugcaacauaaccugaua

SEQ ID NO: 335262 - RNA, 19 nt, Homo sapiens
  misc_RNA (1)...(19): siRNA sense strand
gcaggaaauggcugaacua

SEQ ID NO: 335263 - RNA, 19 nt, Homo sapiens
  misc_RNA (1)...(19): siRNA sense strand
ucagggcuauccucucaga

SEQ ID NO: 335264 - RNA, 19 nt, Homo sapiens
  misc_RNA (1)...(19): siRNA sense strand
agggauaccaugcaacaua

SEQ ID NO: 335265 - RNA, 19 nt, Homo sapiens
  misc_RNA (1)...(19): siRNA sense strand
ugaaacaagcgucucugaa

SEQ ID NO: 335266 - RNA, 19 nt, Homo sapiens
  misc_RNA (1)...(19): siRNA sense strand
aacauaaccugauaaagcu

SEQ ID NO: 335267 - RNA, 19 nt, Homo sapiens
  misc_RNA (1)...(19): siRNA sense strand
gaacuagaagcuguguuag

SEQ ID NO: 335268 - RNA, 19 nt, Homo sapiens
  misc_RNA (1)...(19): siRNA sense strand
cagaacaaagcacaucaga

SEQ ID NO: 335269 - RNA, 19 nt, Homo sapiens
  misc_RNA (1)...(19): siRNA sense strand
gugaaacaagcgucucuga

SEQ ID NO: 335270 - RNA, 19 nt, Homo sapiens
  misc_RNA (1)...(19): siRNA sense strand
ccugcgaaauccagaacaa

SEQ ID NO: 335271 - RNA, 19 nt, Homo sapiens
  misc_RNA (1)...(19): siRNA sense strand
gauaaagcuccagcaggaa

SEQ ID NO: 335272 - RNA, 19 nt, Homo sapiens
  misc_RNA (1)...(19): siRNA sense strand
ggugugagagugaaacaag

SEQ ID NO: 335273 - RNA, 19 nt, Homo sapiens
  misc_RNA (1)...(19): siRNA sense strand
auaaagcuccagcaggaaa

SEQ ID NO: 335274 - RNA, 19 nt, Homo sapiens
  misc_RNA (1)...(19): siRNA sense strand
acccuuccaucauaaguga

SEQ ID NO: 335275 - RNA, 19 nt, Homo sapiens
  misc_RNA (1)...(19): siRNA sense strand
gaaauggcugaacuagaag

SEQ ID NO: 335276 - RNA, 19 nt, Homo sapiens
  misc_RNA (1)...(19): siRNA sense strand
caucugggugugagaguga

SEQ ID NO: 335277 - RNA, 19 nt, Homo sapiens
  misc_RNA (1)...(19): siRNA sense strand
cgaaauccagaacaaagca

SEQ ID NO: 335278 - RNA, 19 nt, Homo sapiens
  misc_RNA (1)...(19): siRNA sense strand
ggaccugcgaaauccagaa

SEQ ID NO: 335279 - RNA, 19 nt, Homo sapiens
  misc_RNA (1)...(19): siRNA sense strand
agaacaaagcacaucagaa

SEQ ID NO: 335280 - RNA, 19 nt, Homo sapiens
  misc_RNA (1)...(19): siRNA sense strand
ggaaauggcugaacuagaa

SEQ ID NO: 335281 - RNA, 19 nt, Homo sapiens
  misc_RNA (1)...(19): siRNA sense strand
gaacaaagcacaucagaaa

SEQ ID NO: 335282 - RNA, 19 nt, Homo sapiens
  misc_RNA (1)...(19): siRNA sense strand
cagcuacccuuccaucaua

SEQ ID NO: 335283 - RNA, 19 nt, Homo sapiens
  misc_RNA (1)...(19): siRNA sense strand
gggauaccaugcaacauaa

SEQ ID NO: 335284 - RNA, 19 nt, Homo sapiens
  misc_RNA (1)...(19): siRNA sense strand
gaggagauguggucaaugg

SEQ ID NO: 335285 - RNA, 19 nt, Homo sapiens
  misc_RNA (1)...(19): siRNA sense strand
gaaggagcuuucaucauuc

SEQ ID NO: 335286 - RNA, 19 nt, Homo sapiens
  misc_RNA (1)...(19): siRNA sense strand
cuagaaaucuguugcuaug

SEQ ID NO: 335287 - RNA, 19 nt, Homo sapiens
  misc_RNA (1)...(19): siRNA sense strand
gcucagggcuauccucuca

SEQ ID NO: 335288 - RNA, 19 nt, Homo sapiens
  misc_RNA (1)...(19): siRNA sense strand
aaacaagcgucucugaaga

SEQ ID NO: 335289 - RNA, 19 nt, Homo sapiens
  misc_RNA (1)...(19): siRNA sense strand
caacauaaccugauaaagc

SEQ ID NO: 335290 - RNA, 19 nt, Homo sapiens
  misc_RNA (1)...(19): siRNA sense strand
gaaacaagcgucucugaag

SEQ ID NO: 335291 - RNA, 19 nt, Homo sapiens
  misc_RNA (1)...(19): siRNA sense strand
gcagagggauaccaugcaa

SEQ ID NO: 335292 - RNA, 19 nt, Homo sapiens
  misc_RNA (1)...(19): siRNA sense strand
ugaacuagaagcuguguua

SEQ ID NO: 335293 - RNA, 19 nt, Homo sapiens
  misc_RNA (1)...(19): siRNA sense strand
gagaaucccaggacagaaa

SEQ ID NO: 335294 - RNA, 19 nt, Homo sapiens
  misc_RNA (1)...(19): siRNA sense strand
gcccacagaucaacuggaa

SEQ ID NO: 335295 - RNA, 19 nt, Homo sapiens
  misc_RNA (1)...(19): siRNA sense strand
gaagacugcucagggcuau

SEQ ID NO: 335296 - RNA, 19 nt, Homo sapiens
  misc_RNA (1)...(19): siRNA sense strand
gacccagucuauuaaagaa

SEQ ID NO: 335297 - RNA, 19 nt, Homo sapiens
  misc_RNA (1)...(19): siRNA sense strand
acuagaagcuguguuagaa

SEQ ID NO: 335298 - RNA, 19 nt, Homo sapiens
  misc_RNA (1)...(19): siRNA sense strand
caugcaacauaaccugaua

SEQ ID NO: 335299 - RNA, 19 nt, Homo sapiens
  misc_RNA (1)...(19): siRNA sense strand
gcuggacaccuaccugaua

SEQ ID NO: 335300 - RNA, 19 nt, Homo sapiens
  misc_RNA (1)...(19): siRNA sense strand
cagaucaacuggaauggau

SEQ ID NO: 335301 - RNA, 19 nt, Homo sapiens
  misc_RNA (1)...(19): siRNA sense strand
gcaggaaauggcugaacua

SEQ ID NO: 335302 - RNA, 19 nt, Homo sapiens
  misc_RNA (1)...(19): siRNA sense strand
ccacagaucaacuggaaug

SEQ ID NO: 335303 - RNA, 19 nt, Homo sapiens
  misc_RNA (1)...(19): siRNA sense strand
caacaugcccacagaucaa

SEQ ID NO: 335304 - RNA, 19 nt, Homo sapiens
  misc_RNA (1)...(19): siRNA sense strand
ucaccaacaugcccacaga

SEQ ID NO: 335305 - RNA, 19 nt, Homo sapiens
  misc_RNA (1)...(19): siRNA sense strand
cagaggagauguggucaau

SEQ ID NO: 335306 - RNA, 19 nt, Homo sapiens
  misc_RNA (1)...(19): siRNA sense strand
caauugggcagauguguga

SEQ ID NO: 335307 - RNA, 19 nt, Homo sapiens
  misc_RNA (1)...(19): siRNA sense strand
ggagauguggucaauggaa

SEQ ID NO: 335308 - RNA, 19 nt, Homo sapiens
  misc_RNA (1)...(19): siRNA sense strand
guacagcuguguggugcuu

SEQ ID NO: 335309 - RNA, 19 nt, Homo sapiens
  misc_RNA (1)...(19): siRNA sense strand
ccaaagcgagcaagagaau

SEQ ID NO: 335310 - RNA, 19 nt, Homo sapiens
  misc_RNA (1)...(19): siRNA sense strand
gcuaugggcccuucaccaa

SEQ ID NO: 335311 - RNA, 19 nt, Homo sapiens
  misc_RNA (1)...(19): siRNA sense strand
gaaugagcaugauuuugaa

SEQ ID NO: 335312 - RNA, 19 nt, Homo sapiens
  misc_RNA (1)...(19): siRNA sense strand
ucagggcuauccucucaga

SEQ ID NO: 335313 - RNA, 19 nt, Homo sapiens
  misc_RNA (1)...(19): siRNA sense strand
agggauaccaugcaacaua

SEQ ID NO: 335314 - RNA, 19 nt, Homo sapiens
  misc_RNA (1)...(19): siRNA sense strand
gcuagaaaucuguugcuau

SEQ ID NO: 335315 - RNA, 19 nt, Homo sapiens
  misc_RNA (1)...(19): siRNA sense strand
ugaaugagcaugauuuuga

SEQ ID NO: 335316 - RNA, 19 nt, Homo sapiens
  misc_RNA (1)...(19): siRNA sense strand
ggcuagaaaucuguugcua

SEQ ID NO: 335317 - RNA, 19 nt, Homo sapiens
  misc_RNA (1)...(19): siRNA sense strand
ugaaacaagcgucucugaa

SEQ ID NO: 335318 - RNA, 19 nt, Homo sapiens
  misc_RNA (1)...(19): siRNA sense strand
aacauaaccugauaaagcu

SEQ ID NO: 335319 - RNA, 19 nt, Homo sapiens
  misc_RNA (1)...(19): siRNA sense strand
ugacccagucuauuaaaga

SEQ ID NO: 335320 - RNA, 19 nt, Homo sapiens
  misc_RNA (1)...(19): siRNA sense strand
gaacuagaagcuguguuag

SEQ ID NO: 335321 - RNA, 19 nt, Homo sapiens
  misc_RNA (1)...(19): siRNA sense strand
gugaaacaagcgucucuga

SEQ ID NO: 335322 - RNA, 19 nt, Homo sapiens
  misc_RNA (1)...(19): siRNA sense strand
ccaacaugcccacagauca

SEQ ID NO: 335323 - RNA, 19 nt, Homo sapiens
  misc_RNA (1)...(19): siRNA sense strand
uaugggcccuucaccaaca

SEQ ID NO: 335324 - RNA, 19 nt, Homo sapiens
  misc_RNA (1)...(19): siRNA sense strand
guccaaagcgagcaagaga

SEQ ID NO: 335325 - RNA, 19 nt, Homo sapiens
  misc_RNA (1)...(19): siRNA sense strand
cagaacaaagcacaucaga

SEQ ID NO: 335326 - RNA, 19 nt, Homo sapiens
  misc_RNA (1)...(19): siRNA sense strand
ccugcgaaauccagaacaa

SEQ ID NO: 335327 - RNA, 19 nt, Homo sapiens
  misc_RNA (1)...(19): siRNA sense strand
gaaaccaccaagguccaaa

SEQ ID NO: 335328 - RNA, 19 nt, Homo sapiens
  misc_RNA (1)...(19): siRNA sense strand
gauaaagcuccagcaggaa

SEQ ID NO: 335329 - RNA, 19 nt, Homo sapiens
  misc_RNA (1)...(19): siRNA sense strand
aaggagcuuucaucauuca

SEQ ID NO: 335330 - RNA, 19 nt, Homo sapiens
  misc_RNA (1)...(19): siRNA sense strand
ggugugagagugaaacaag

SEQ ID NO: 335331 - RNA, 19 nt, Homo sapiens
  misc_RNA (1)...(19): siRNA sense strand
gaaauggcugaacuagaag

SEQ ID NO: 335332 - RNA, 19 nt, Homo sapiens
  misc_RNA (1)...(19): siRNA sense strand
auaaagcuccagcaggaaa

SEQ ID NO: 335333 - RNA, 19 nt, Homo sapiens
  misc_RNA (1)...(19): siRNA sense strand
acccuuccaucauaaguga

SEQ ID NO: 335334 - RNA, 19 nt, Homo sapiens
  misc_RNA (1)...(19): siRNA sense strand
ggugacccagucuauuaaa

SEQ ID NO: 335335 - RNA, 19 nt, Homo sapiens
  misc_RNA (1)...(19): siRNA sense strand
cccagucuauuaaagaaag

SEQ ID NO: 335336 - RNA, 19 nt, Homo sapiens
  misc_RNA (1)...(19): siRNA sense strand
caucugggugugagaguga

SEQ ID NO: 335337 - RNA, 19 nt, Homo sapiens
  misc_RNA (1)...(19): siRNA sense strand
ccagucuauuaaagaaaga

SEQ ID NO: 335338 - RNA, 19 nt, Homo sapiens
  misc_RNA (1)...(19): siRNA sense strand
cgaaauccagaacaaagca

SEQ ID NO: 335339 - RNA, 19 nt, Homo sapiens
  misc_RNA (1)...(19): siRNA sense strand
aagagaaucccaggacaga

SEQ ID NO: 335340 - RNA, 19 nt, Homo sapiens
  misc_RNA (1)...(19): siRNA sense strand
gauguggucaauggaagaa

SEQ ID NO: 335341 - RNA, 19 nt, Homo sapiens
  misc_RNA (1)...(19): siRNA sense strand
ggaccugcgaaauccagaa

SEQ ID NO: 335342 - RNA, 19 nt, Homo sapiens
  misc_RNA (1)...(19): siRNA sense strand
gagcaugauuuugaaguca

SEQ ID NO: 335343 - RNA, 19 nt, Homo sapiens
  misc_RNA (1)...(19): siRNA sense strand
gugacccagucuauuaaag

SEQ ID NO: 335344 - RNA, 19 nt, Homo sapiens
  misc_RNA (1)...(19): siRNA sense strand
agaacaaagcacaucagaa

SEQ ID NO: 335345 - RNA, 19 nt, Homo sapiens
  misc_RNA (1)...(19): siRNA sense strand
uggaagaaaccaccaaggu

SEQ ID NO: 335346 - RNA, 19 nt, Homo sapiens
  misc_RNA (1)...(19): siRNA sense strand
ucaacuggaauggauggua

SEQ ID NO: 335347 - RNA, 19 nt, Homo sapiens
  misc_RNA (1)...(19): siRNA sense strand
ggaaauggcugaacuagaa

SEQ ID NO: 335348 - RNA, 19 nt, Homo sapiens
  misc_RNA (1)...(19): siRNA sense strand
gaacaaagcacaucagaaa

SEQ ID NO: 335349 - RNA, 19 nt, Homo sapiens
  misc_RNA (1)...(19): siRNA sense strand
cagcuacccuuccaucaua

SEQ ID NO: 335350 - RNA, 19 nt, Homo sapiens
  misc_RNA (1)...(19): siRNA sense strand
gggauaccaugcaacauaa

SEQ ID NO: 335351 - RNA, 19 nt, Homo sapiens
  misc_RNA (1)...(19): siRNA sense strand
gaggagauguggucaaugg

SEQ ID NO: 335352 - RNA, 19 nt, Homo sapiens
  misc_RNA (1)...(19): siRNA sense strand
gaaggagcuuucaucauuc

SEQ ID NO: 335353 - RNA, 19 nt, Homo sapiens
  misc_RNA (1)...(19): siRNA sense strand
cuagaaaucuguugcuaug

SEQ ID NO: 335354 - RNA, 19 nt, Homo sapiens
  misc_RNA (1)...(19): siRNA sense strand
gcucagggcuauccucuca

SEQ ID NO: 335355 - RNA, 19 nt, Homo sapiens
  misc_RNA (1)...(19): siRNA sense strand
aaacaagcgucucugaaga

SEQ ID NO: 335356 - RNA, 19 nt, Homo sapiens
  misc_RNA (1)...(19): siRNA sense strand
caacauaaccugauaaagc

SEQ ID NO: 335357 - RNA, 19 nt, Homo sapiens
  misc_RNA (1)...(19): siRNA sense strand
gaaacaagcgucucugaag

SEQ ID NO: 335358 - RNA, 19 nt, Homo sapiens
  misc_RNA (1)...(19): siRNA sense strand
gcagagggauaccaugcaa

SEQ ID NO: 335359 - RNA, 19 nt, Homo sapiens
  misc_RNA (1)...(19): siRNA sense strand
ugaacuagaagcuguguua

SEQ ID NO: 335360 - RNA, 19 nt, Homo sapiens
  misc_RNA (1)...(19): siRNA sense strand
gagaaucccaggacagaaa

SEQ ID NO: 335361 - RNA, 19 nt, Homo sapiens
  misc_RNA (1)...(19): siRNA sense strand
gcccacagaucaacuggaa

SEQ ID NO: 335362 - RNA, 19 nt, Homo sapiens
  misc_RNA (1)...(19): siRNA sense strand
gaagacugcucagggcuau

SEQ ID NO: 335363 - RNA, 19 nt, Homo sapiens
  misc_RNA (1)...(19): siRNA sense strand
gacccagucuauuaaagaa

SEQ ID NO: 335364 - RNA, 19 nt, Homo sapiens
  misc_RNA (1)...(19): siRNA sense strand
acuagaagcuguguuagaa

SEQ ID NO: 335365 - RNA, 19 nt, Homo sapiens
  misc_RNA (1)...(19): siRNA sense strand
caugcaacauaaccugaua

SEQ ID NO: 335366 - RNA, 19 nt, Homo sapiens
  misc_RNA (1)...(19): siRNA sense strand
gcuggacaccuaccugaua

SEQ ID NO: 335367 - RNA, 19 nt, Homo sapiens
  misc_RNA (1)...(19): siRNA sense strand
cagaucaacuggaauggau

SEQ ID NO: 335368 - RNA, 19 nt, Homo sapiens
  misc_RNA (1)...(19): siRNA sense strand
gcaggaaauggcugaacua

SEQ ID NO: 335369 - RNA, 19 nt, Homo sapiens
  misc_RNA (1)...(19): siRNA sense strand
ccacagaucaacuggaaug

SEQ ID NO: 335370 - RNA, 19 nt, Homo sapiens
  misc_RNA (1)...(19): siRNA sense strand
caacaugcccacagaucaa

SEQ ID NO: 335371 - RNA, 19 nt, Homo sapiens
  misc_RNA (1)...(19): siRNA sense strand
ucaccaacaugcccacaga

SEQ ID NO: 335372 - RNA, 19 nt, Homo sapiens
  misc_RNA (1)...(19): siRNA sense strand
cagaggagauguggucaau

SEQ ID NO: 335373 - RNA, 19 nt, Homo sapiens
  misc_RNA (1)...(19): siRNA sense strand
caauugggcagauguguga

SEQ ID NO: 335374 - RNA, 19 nt, Homo sapiens
  misc_RNA (1)...(19): siRNA sense strand
ggagauguggucaauggaa

SEQ ID NO: 335375 - RNA, 19 nt, Homo sapiens
  misc_RNA (1)...(19): siRNA sense strand
guacagcuguguggugcuu

SEQ ID NO: 335376 - RNA, 19 nt, Homo sapiens
  misc_RNA (1)...(19): siRNA sense strand
ccaaagcgagcaagagaau

SEQ ID NO: 335377 - RNA, 19 nt, Homo sapiens
  misc_RNA (1)...(19): siRNA sense strand
gcuaugggcccuucaccaa

SEQ ID NO: 335378 - RNA, 19 nt, Homo sapiens
  misc_RNA (1)...(19): siRNA sense strand
gaaugagcaugauuuugaa

SEQ ID NO: 335379 - RNA, 19 nt, Homo sapiens
  misc_RNA (1)...(19): siRNA sense strand
ucagggcuauccucucaga

SEQ ID NO: 335380 - RNA, 19 nt, Homo sapiens
  misc_RNA (1)...(19): siRNA sense strand
agggauaccaugcaacaua

SEQ ID NO: 335381 - RNA, 19 nt, Homo sapiens
  misc_RNA (1)...(19): siRNA sense strand
gcuagaaaucuguugcuau

SEQ ID NO: 335382 - RNA, 19 nt, Homo sapiens
  misc_RNA (1)...(19): siRNA sense strand
ugaaugagcaugauuuuga

SEQ ID NO: 335383 - RNA, 19 nt, Homo sapiens
  misc_RNA (1)...(19): siRNA sense strand
ggcuagaaaucuguugcua

SEQ ID NO: 335384 - RNA, 19 nt, Homo sapiens
  misc_RNA (1)...(19): siRNA sense strand
ugaaacaagcgucucugaa

SEQ ID NO: 335385 - RNA, 19 nt, Homo sapiens
  misc_RNA (1)...(19): siRNA sense strand
aacauaaccugauaaagcu

SEQ ID NO: 335386 - RNA, 19 nt, Homo sapiens
  misc_RNA (1)...(19): siRNA sense strand
ugacccagucuauuaaaga

SEQ ID NO: 335387 - RNA, 19 nt, Homo sapiens
  misc_RNA (1)...(19): siRNA sense strand
gaacuagaagcuguguuag

SEQ ID NO: 335388 - RNA, 19 nt, Homo sapiens
  misc_RNA (1)...(19): siRNA sense strand
gugaaacaagcgucucuga

SEQ ID NO: 335389 - RNA, 19 nt, Homo sapiens
  misc_RNA (1)...(19): siRNA sense strand
ccaacaugcccacagauca

SEQ ID NO: 335390 - RNA, 19 nt, Homo sapiens
  misc_RNA (1)...(19): siRNA sense strand
uaugggcccuucaccaaca

SEQ ID NO: 335391 - RNA, 19 nt, Homo sapiens
  misc_RNA (1)...(19): siRNA sense strand
guccaaagcgagcaagaga

SEQ ID NO: 335392 - RNA, 19 nt, Homo sapiens
  misc_RNA (1)...(19): siRNA sense strand
cagaacaaagcacaucaga

SEQ ID NO: 335393 - RNA, 19 nt, Homo sapiens
  misc_RNA (1)...(19): siRNA sense strand
ccugcgaaauccagaacaa

SEQ ID NO: 335394 - RNA, 19 nt, Homo sapiens
  misc_RNA (1)...(19): siRNA sense strand
gaaaccaccaagguccaaa

SEQ ID NO: 335395 - RNA, 19 nt, Homo sapiens
  misc_RNA (1)...(19): siRNA sense strand
gauaaagcuccagcaggaa

SEQ ID NO: 335396 - RNA, 19 nt, Homo sapiens
  misc_RNA (1)...(19): siRNA sense strand
aaggagcuuucaucauuca

SEQ ID NO: 335397 - RNA, 19 nt, Homo sapiens
  misc_RNA (1)...(19): siRNA sense strand
ggugugagagugaaacaag

SEQ ID NO: 335398 - RNA, 19 nt, Homo sapiens
  misc_RNA (1)...(19): siRNA sense strand
gaaauggcugaacuagaag

SEQ ID NO: 335399 - RNA, 19 nt, Homo sapiens
  misc_RNA (1)...(19): siRNA sense strand
auaaagcuccagcaggaaa

SEQ ID NO: 335400 - RNA, 19 nt, Homo sapiens
  misc_RNA (1)...(19): siRNA sense strand
acccuuccaucauaaguga

SEQ ID NO: 335401 - RNA, 19 nt, Homo sapiens
  misc_RNA (1)...(19): siRNA sense strand
ggugacccagucuauuaaa

SEQ ID NO: 335402 - RNA, 19 nt, Homo sapiens
  misc_RNA (1)...(19): siRNA sense strand
cccagucuauuaaagaaag

SEQ ID NO: 335403 - RNA, 19 nt, Homo sapiens
  misc_RNA (1)...(19): siRNA sense strand
caucugggugugagaguga

SEQ ID NO: 335404 - RNA, 19 nt, Homo sapiens
  misc_RNA (1)...(19): siRNA sense strand
ccagucuauuaaagaaaga

SEQ ID NO: 335405 - RNA, 19 nt, Homo sapiens
  misc_RNA (1)...(19): siRNA sense strand
cgaaauccagaacaaagca

SEQ ID NO: 335406 - RNA, 19 nt, Homo sapiens
  misc_RNA (1)...(19): siRNA sense strand
aagagaaucccaggacaga

SEQ ID NO: 335407 - RNA, 19 nt, Homo sapiens
  misc_RNA (1)...(19): siRNA sense strand
gauguggucaauggaagaa

SEQ ID NO: 335408 - RNA, 19 nt, Homo sapiens
  misc_RNA (1)...(19): siRNA sense strand
ggaccugcgaaauccagaa

SEQ ID NO: 335409 - RNA, 19 nt, Homo sapiens
  misc_RNA (1)...(19): siRNA sense strand
gagcaugauuuugaaguca

SEQ ID NO: 335410 - RNA, 19 nt, Homo sapiens
  misc_RNA (1)...(19): siRNA sense strand
gugacccagucuauuaaag

SEQ ID NO: 335411 - RNA, 19 nt, Homo sapiens
  misc_RNA (1)...(19): siRNA sense strand
agaacaaagcacaucagaa

SEQ ID NO: 335412 - RNA, 19 nt, Homo sapiens
  misc_RNA (1)...(19): siRNA sense strand
uggaagaaaccaccaaggu

SEQ ID NO: 335413 - RNA, 19 nt, Homo sapiens
  misc_RNA (1)...(19): siRNA sense strand
ucaacuggaauggauggua

SEQ ID NO: 335414 - RNA, 19 nt, Homo sapiens
  misc_RNA (1)...(19): siRNA sense strand
ggaaauggcugaacuagaa

SEQ ID NO: 335415 - RNA, 19 nt, Homo sapiens
  misc_RNA (1)...(19): siRNA sense strand
gaacaaagcacaucagaaa

SEQ ID NO: 335416 - RNA, 19 nt, Homo sapiens
  misc_RNA (1)...(19): siRNA sense strand
cagcuacccuuccaucaua

SEQ ID NO: 335417 - RNA, 19 nt, Homo sapiens
  misc_RNA (1)...(19): siRNA sense strand
gggauaccaugcaacauaa

SEQ ID NO: 335418 - RNA, 19 nt, Homo sapiens
  misc_RNA (1)...(19): siRNA sense strand
gaggagauguggucaaugg

SEQ ID NO: 335419 - RNA, 19 nt, Homo sapiens
  misc_RNA (1)...(19): siRNA sense strand
gaaggagcuuucaucauuc

SEQ ID NO: 335420 - RNA, 19 nt, Homo sapiens
  misc_RNA (1)...(19): siRNA sense strand
cuagaaaucuguugcuaug

SEQ ID NO: 335421 - RNA, 19 nt, Homo sapiens
  misc_RNA (1)...(19): siRNA sense strand
gcucagggcuauccucuca

SEQ ID NO: 335422 - RNA, 19 nt, Homo sapiens
  misc_RNA (1)...(19): siRNA sense strand
aaacaagcgucucugaaga

SEQ ID NO: 335423 - RNA, 19 nt, Homo sapiens
  misc_RNA (1)...(19): siRNA sense strand
caacauaaccugauaaagc

SEQ ID NO: 335424 - RNA, 19 nt, Homo sapiens
  misc_RNA (1)...(19): siRNA sense strand
gaaacaagcgucucugaag

SEQ ID NO: 335425 - RNA, 19 nt, Homo sapiens
  misc_RNA (1)...(19): siRNA sense strand
gcagagggauaccaugcaa

SEQ ID NO: 335426 - RNA, 19 nt, Homo sapiens
  misc_RNA (1)...(19): siRNA sense strand
ugaacuagaagcuguguua

SEQ ID NO: 335427 - RNA, 19 nt, Homo sapiens
  misc_RNA (1)...(19): siRNA sense strand
gagaaucccaggacagaaa

SEQ ID NO: 335428 - RNA, 19 nt, Homo sapiens
  misc_RNA (1)...(19): siRNA sense strand
gcccacagaucaacuggaa

SEQ ID NO: 335429 - RNA, 19 nt, Homo sapiens
  misc_RNA (1)...(19): siRNA sense strand
gaagacugcucagggcuau

SEQ ID NO: 335430 - RNA, 19 nt, Homo sapiens
  misc_RNA (1)...(19): siRNA sense strand
gacccagucuauuaaagaa

SEQ ID NO: 335431 - RNA, 19 nt, Homo sapiens
  misc_RNA (1)...(19): siRNA sense strand
acuagaagcuguguuagaa

SEQ ID NO: 335432 - RNA, 19 nt, Homo sapiens
  misc_RNA (1)...(19): siRNA sense strand
caugcaacauaaccugaua

SEQ ID NO: 335433 - RNA, 19 nt, Homo sapiens
  misc_RNA (1)...(19): siRNA sense strand
gcuggacaccuaccugaua

SEQ ID NO: 335434 - RNA, 19 nt, Homo sapiens
  misc_RNA (1)...(19): siRNA sense strand
cagaucaacuggaauggau

SEQ ID NO: 335435 - RNA, 19 nt, Homo sapiens
  misc_RNA (1)...(19): siRNA sense strand
gcaggaaauggcugaacua

SEQ ID NO: 335436 - RNA, 19 nt, Homo sapiens
  misc_RNA (1)...(19): siRNA sense strand
ccacagaucaacuggaaug

SEQ ID NO: 335437 - RNA, 19 nt, Homo sapiens
  misc_RNA (1)...(19): siRNA sense strand
caacaugcccacagaucaa

SEQ ID NO: 335438 - RNA, 19 nt, Homo sapiens
  misc_RNA (1)...(19): siRNA sense strand
ucaccaacaugcccacaga

SEQ ID NO: 335439 - RNA, 19 nt, Homo sapiens
  misc_RNA (1)...(19): siRNA sense strand
cagaggagauguggucaau

SEQ ID NO: 335440 - RNA, 19 nt, Homo sapiens
  misc_RNA (1)...(19): siRNA sense strand
caauugggcagauguguga

SEQ ID NO: 335441 - RNA, 19 nt, Homo sapiens
  misc_RNA (1)...(19): siRNA sense strand
ggagauguggucaauggaa

SEQ ID NO: 335442 - RNA, 19 nt, Homo sapiens
  misc_RNA (1)...(19): siRNA sense strand
guacagcuguguggugcuu

SEQ ID NO: 335443 - RNA, 19 nt, Homo sapiens
  misc_RNA (1)...(19): siRNA sense strand
ccaaagcgagcaagagaau

SEQ ID NO: 335444 - RNA, 19 nt, Homo sapiens
  misc_RNA (1)...(19): siRNA sense strand
gcuaugggcccuucaccaa

SEQ ID NO: 335445 - RNA, 19 nt, Homo sapiens
  misc_RNA (1)...(19): siRNA sense strand
gaaugagcaugauuuugaa

SEQ ID NO: 335446 - RNA, 19 nt, Homo sapiens
  misc_RNA (1)...(19): siRNA sense strand
ucagggcuauccucucaga

SEQ ID NO: 335447 - RNA, 19 nt, Homo sapiens
  misc_RNA (1)...(19): siRNA sense strand
agggauaccaugcaacaua

SEQ ID NO: 335448 - RNA, 19 nt, Homo sapiens
  misc_RNA (1)...(19): siRNA sense strand
gcuagaaaucuguugcuau

SEQ ID NO: 335449 - RNA, 19 nt, Homo sapiens
  misc_RNA (1)...(19): siRNA sense strand
ugaaugagcaugauuuuga

SEQ ID NO: 335450 - RNA, 19 nt, Homo sapiens
  misc_RNA (1)...(19): siRNA sense strand
ggcuagaaaucuguugcua

SEQ ID NO: 335451 - RNA, 19 nt, Homo sapiens
  misc_RNA (1)...(19): siRNA sense strand
ugaaacaagcgucucugaa

SEQ ID NO: 335452 - RNA, 19 nt, Homo sapiens
  misc_RNA (1)...(19): siRNA sense strand
aacauaaccugauaaagcu

SEQ ID NO: 335453 - RNA, 19 nt, Homo sapiens
  misc_RNA (1)...(19): siRNA sense strand
ugacccagucuauuaaaga

SEQ ID NO: 335454 - RNA, 19 nt, Homo sapiens
  misc_RNA (1)...(19): siRNA sense strand
gaacuagaagcuguguuag

SEQ ID NO: 335455 - RNA, 19 nt, Homo sapiens
  misc_RNA (1)...(19): siRNA sense strand
gugaaacaagcgucucuga

SEQ ID NO: 335456 - RNA, 19 nt, Homo sapiens
  misc_RNA (1)...(19): siRNA sense strand
ccaacaugcccacagauca

SEQ ID NO: 335457 - RNA, 19 nt, Homo sapiens
  misc_RNA (1)...(19): siRNA sense strand
uaugggcccuucaccaaca

SEQ ID NO: 335458 - RNA, 19 nt, Homo sapiens
  misc_RNA (1)...(19): siRNA sense strand
guccaaagcgagcaagaga

SEQ ID NO: 335459 - RNA, 19 nt, Homo sapiens
  misc_RNA (1)...(19): siRNA sense strand
cagaacaaagcacaucaga

SEQ ID NO: 335460 - RNA, 19 nt, Homo sapiens
  misc_RNA (1)...(19): siRNA sense strand
ccugcgaaauccagaacaa

SEQ ID NO: 335461 - RNA, 19 nt, Homo sapiens
  misc_RNA (1)...(19): siRNA sense strand
gaaaccaccaagguccaaa

SEQ ID NO: 335462 - RNA, 19 nt, Homo sapiens
  misc_RNA (1)...(19): siRNA sense strand
gauaaagcuccagcaggaa

SEQ ID NO: 335463 - RNA, 19 nt, Homo sapiens
  misc_RNA (1)...(19): siRNA sense strand
aaggagcuuucaucauuca

SEQ ID NO: 335464 - RNA, 19 nt, Homo sapiens
  misc_RNA (1)...(19): siRNA sense strand
ggugugagagugaaacaag

SEQ ID NO: 335465 - RNA, 19 nt, Homo sapiens
  misc_RNA (1)...(19): siRNA sense strand
gaaauggcugaacuagaag

SEQ ID NO: 335466 - RNA, 19 nt, Homo sapiens
  misc_RNA (1)...(19): siRNA sense strand
auaaagcuccagcaggaaa

SEQ ID NO: 335467 - RNA, 19 nt, Homo sapiens
  misc_RNA (1)...(19): siRNA sense strand
acccuuccaucauaaguga

SEQ ID NO: 335468 - RNA, 19 nt, Homo sapiens
  misc_RNA (1)...(19): siRNA sense strand
ggugacccagucuauuaaa

SEQ ID NO: 335469 - RNA, 19 nt, Homo sapiens
  misc_RNA (1)...(19): siRNA sense strand
cccagucuauuaaagaaag

SEQ ID NO: 335470 - RNA, 19 nt, Homo sapiens
  misc_RNA (1)...(19): siRNA sense strand
caucugggugugagaguga

SEQ ID NO: 335471 - RNA, 19 nt, Homo sapiens
  misc_RNA (1)...(19): siRNA sense strand
ccagucuauuaaagaaaga

SEQ ID NO: 335472 - RNA, 19 nt, Homo sapiens
  misc_RNA (1)...(19): siRNA sense strand
cgaaauccagaacaaagca

SEQ ID NO: 335473 - RNA, 19 nt, Homo sapiens
  misc_RNA (1)...(19): siRNA sense strand
aagagaaucccaggacaga

SEQ ID NO: 335474 - RNA, 19 nt, Homo sapiens
  misc_RNA (1)...(19): siRNA sense strand
gauguggucaauggaagaa

SEQ ID NO: 335475 - RNA, 19 nt, Homo sapiens
  misc_RNA (1)...(19): siRNA sense strand
ggaccugcgaaauccagaa

SEQ ID NO: 335476 - RNA, 19 nt, Homo sapiens
  misc_RNA (1)...(19): siRNA sense strand
gagcaugauuuugaaguca

SEQ ID NO: 335477 - RNA, 19 nt, Homo sapiens
  misc_RNA (1)...(19): siRNA sense strand
gugacccagucuauuaaag

SEQ ID NO: 335478 - RNA, 19 nt, Homo sapiens
  misc_RNA (1)...(19): siRNA sense strand
agaacaaagcacaucagaa

SEQ ID NO: 335479 - RNA, 19 nt, Homo sapiens
  misc_RNA (1)...(19): siRNA sense strand
uggaagaaaccaccaaggu

SEQ ID NO: 335480 - RNA, 19 nt, Homo sapiens
  misc_RNA (1)...(19): siRNA sense strand
ucaacuggaauggauggua

SEQ ID NO: 335481 - RNA, 19 nt, Homo sapiens
  misc_RNA (1)...(19): siRNA sense strand
ggaaauggcugaacuagaa

SEQ ID NO: 335482 - RNA, 19 nt, Homo sapiens
  misc_RNA (1)...(19): siRNA sense strand
gaacaaagcacaucagaaa

SEQ ID NO: 335483 - RNA, 19 nt, Homo sapiens
  misc_RNA (1)...(19): siRNA sense strand
cagcuacccuuccaucaua

SEQ ID NO: 335484 - RNA, 19 nt, Homo sapiens
  misc_RNA (1)...(19): siRNA sense strand
gggauaccaugcaacauaa

SEQ ID NO: 335485 - RNA, 19 nt, Homo sapiens
  misc_RNA (1)...(19): siRNA sense strand
gaggagauguggucaaugg

SEQ ID NO: 335486 - RNA, 19 nt, Homo sapiens
  misc_RNA (1)...(19): siRNA sense strand
gaaggagcuuucaucauuc

SEQ ID NO: 335487 - RNA, 19 nt, Homo sapiens
  misc_RNA (1)...(19): siRNA sense strand
cuagaaaucuguugcuaug

SEQ ID NO: 335488 - RNA, 19 nt, Homo sapiens
  misc_RNA (1)...(19): siRNA sense strand
gcucagggcuauccucuca

SEQ ID NO: 335489 - RNA, 19 nt, Homo sapiens
  misc_RNA (1)...(19): siRNA sense strand
aaacaagcgucucugaaga

SEQ ID NO: 335490 - RNA, 19 nt, Homo sapiens
  misc_RNA (1)...(19): siRNA sense strand
caacauaaccugauaaagc

SEQ ID NO: 335491 - RNA, 19 nt, Homo sapiens
  misc_RNA (1)...(19): siRNA sense strand
gaaacaagcgucucugaag

SEQ ID NO: 335492 - RNA, 19 nt, Homo sapiens
  misc_RNA (1)...(19): siRNA sense strand
gcagagggauaccaugcaa

SEQ ID NO: 335493 - RNA, 19 nt, Homo sapiens
  misc_RNA (1)...(19): siRNA sense strand
ugaacuagaagcuguguua

SEQ ID NO: 335494 - RNA, 19 nt, Homo sapiens
  misc_RNA (1)...(19): siRNA sense strand
gagaaucccaggacagaaa

SEQ ID NO: 335495 - RNA, 19 nt, Homo sapiens
  misc_RNA (1)...(19): siRNA sense strand
gcccacagaucaacuggaa

SEQ ID NO: 335496 - RNA, 19 nt, Homo sapiens
  misc_RNA (1)...(19): siRNA sense strand
gaagacugcucagggcuau

SEQ ID NO: 335497 - RNA, 19 nt, Homo sapiens
  misc_RNA (1)...(19): siRNA sense strand
gacccagucuauuaaagaa

SEQ ID NO: 335498 - RNA, 19 nt, Homo sapiens
  misc_RNA (1)...(19): siRNA sense strand
acuagaagcuguguuagaa

SEQ ID NO: 335499 - RNA, 19 nt, Homo sapiens
  misc_RNA (1)...(19): siRNA sense strand
caugcaacauaaccugaua

SEQ ID NO: 335500 - RNA, 19 nt, Homo sapiens
  misc_RNA (1)...(19): siRNA sense strand
gcuggacaccuaccugaua

SEQ ID NO: 335501 - RNA, 19 nt, Homo sapiens
  misc_RNA (1)...(19): siRNA sense strand
cagaucaacuggaauggau

SEQ ID NO: 335502 - RNA, 19 nt, Homo sapiens
  misc_RNA (1)...(19): siRNA sense strand
gcaggaaauggcugaacua

SEQ ID NO: 335503 - RNA, 19 nt, Homo sapiens
  misc_RNA (1)...(19): siRNA sense strand
ccacagaucaacuggaaug

SEQ ID NO: 335504 - RNA, 19 nt, Homo sapiens
  misc_RNA (1)...(19): siRNA sense strand
caacaugcccacagaucaa

SEQ ID NO: 335505 - RNA, 19 nt, Homo sapiens
  misc_RNA (1)...(19): siRNA sense strand
ucaccaacaugcccacaga

SEQ ID NO: 335506 - RNA, 19 nt, Homo sapiens
  misc_RNA (1)...(19): siRNA sense strand
cagaggagauguggucaau

SEQ ID NO: 335507 - RNA, 19 nt, Homo sapiens
  misc_RNA (1)...(19): siRNA sense strand
caauugggcagauguguga

SEQ ID NO: 335508 - RNA, 19 nt, Homo sapiens
  misc_RNA (1)...(19): siRNA sense strand
ggagauguggucaauggaa

SEQ ID NO: 335509 - RNA, 19 nt, Homo sapiens
  misc_RNA (1)...(19): siRNA sense strand
guacagcuguguggugcuu

SEQ ID NO: 335510 - RNA, 19 nt, Homo sapiens
  misc_RNA (1)...(19): siRNA sense strand
ccaaagcgagcaagagaau

SEQ ID NO: 335511 - RNA, 19 nt, Homo sapiens
  misc_RNA (1)...(19): siRNA sense strand
gcuaugggcccuucaccaa

SEQ ID NO: 335512 - RNA, 19 nt, Homo sapiens
  misc_RNA (1)...(19): siRNA sense strand
gaaugagcaugauuuugaa

SEQ ID NO: 335513 - RNA, 19 nt, Homo sapiens
  misc_RNA (1)...(19): siRNA sense strand
ucagggcuauccucucaga

SEQ ID NO: 335514 - RNA, 19 nt, Homo sapiens
  misc_RNA (1)...(19): siRNA sense strand
agggauaccaugcaacaua

SEQ ID NO: 335515 - RNA, 19 nt, Homo sapiens
  misc_RNA (1)...(19): siRNA sense strand
gcuagaaaucuguugcuau

SEQ ID NO: 335516 - RNA, 19 nt, Homo sapiens
  misc_RNA (1)...(19): siRNA sense strand
ugaaugagcaugauuuuga

SEQ ID NO: 335517 - RNA, 19 nt, Homo sapiens
  misc_RNA (1)...(19): siRNA sense strand
ggcuagaaaucuguugcua

SEQ ID NO: 335518 - RNA, 19 nt, Homo sapiens
  misc_RNA (1)...(19): siRNA sense strand
ugaaacaagcgucucugaa

SEQ ID NO: 335519 - RNA, 19 nt, Homo sapiens
  misc_RNA (1)...(19): siRNA sense strand
aacauaaccugauaaagcu

SEQ ID NO: 335520 - RNA, 19 nt, Homo sapiens
  misc_RNA (1)...(19): siRNA sense strand
ugacccagucuauuaaaga

SEQ ID NO: 335521 - RNA, 19 nt, Homo sapiens
  misc_RNA (1)...(19): siRNA sense strand
gaacuagaagcuguguuag

SEQ ID NO: 335522 - RNA, 19 nt, Homo sapiens
  misc_RNA (1)...(19): siRNA sense strand
gugaaacaagcgucucuga

SEQ ID NO: 335523 - RNA, 19 nt, Homo sapiens
  misc_RNA (1)...(19): siRNA sense strand
ccaacaugcccacagauca

SEQ ID NO: 335524 - RNA, 19 nt, Homo sapiens
  misc_RNA (1)...(19): siRNA sense strand
uaugggcccuucaccaaca

SEQ ID NO: 335525 - RNA, 19 nt, Homo sapiens
  misc_RNA (1)...(19): siRNA sense strand
guccaaagcgagcaagaga

SEQ ID NO: 335526 - RNA, 19 nt, Homo sapiens
  misc_RNA (1)...(19): siRNA sense strand
cagaacaaagcacaucaga

SEQ ID NO: 335527 - RNA, 19 nt, Homo sapiens
  misc_RNA (1)...(19): siRNA sense strand
ccugcgaaauccagaacaa

SEQ ID NO: 335528 - RNA, 19 nt, Homo sapiens
  misc_RNA (1)...(19): siRNA sense strand
gaaaccaccaagguccaaa

SEQ ID NO: 335529 - RNA, 19 nt, Homo sapiens
  misc_RNA (1)...(19): siRNA sense strand
gauaaagcuccagcaggaa

SEQ ID NO: 335530 - RNA, 19 nt, Homo sapiens
  misc_RNA (1)...(19): siRNA sense strand
aaggagcuuucaucauuca

SEQ ID NO: 335531 - RNA, 19 nt, Homo sapiens
  misc_RNA (1)...(19): siRNA sense strand
ggugugagagugaaacaag

SEQ ID NO: 335532 - RNA, 19 nt, Homo sapiens
  misc_RNA (1)...(19): siRNA sense strand
gaaauggcugaacuagaag

SEQ ID NO: 335533 - RNA, 19 nt, Homo sapiens
  misc_RNA (1)...(19): siRNA sense strand
auaaagcuccagcaggaaa

SEQ ID NO: 335534 - RNA, 19 nt, Homo sapiens
  misc_RNA (1)...(19): siRNA sense strand
acccuuccaucauaaguga

SEQ ID NO: 335535 - RNA, 19 nt, Homo sapiens
  misc_RNA (1)...(19): siRNA sense strand
ggugacccagucuauuaaa

SEQ ID NO: 335536 - RNA, 19 nt, Homo sapiens
  misc_RNA (1)...(19): siRNA sense strand
cccagucuauuaaagaaag

SEQ ID NO: 335537 - RNA, 19 nt, Homo sapiens
  misc_RNA (1)...(19): siRNA sense strand
caucugggugugagaguga

SEQ ID NO: 335538 - RNA, 19 nt, Homo sapiens
  misc_RNA (1)...(19): siRNA sense strand
ccagucuauuaaagaaaga

SEQ ID NO: 335539 - RNA, 19 nt, Homo sapiens
  misc_RNA (1)...(19): siRNA sense strand
cgaaauccagaacaaagca

SEQ ID NO: 335540 - RNA, 19 nt, Homo sapiens
  misc_RNA (1)...(19): siRNA sense strand
aagagaaucccaggacaga

SEQ ID NO: 335541 - RNA, 19 nt, Homo sapiens
  misc_RNA (1)...(19): siRNA sense strand
gauguggucaauggaagaa

SEQ ID NO: 335542 - RNA, 19 nt, Homo sapiens
  misc_RNA (1)...(19): siRNA sense strand
ggaccugcgaaauccagaa

SEQ ID NO: 335543 - RNA, 19 nt, Homo sapiens
  misc_RNA (1)...(19): siRNA sense strand
gagcaugauuuugaaguca

SEQ ID NO: 335544 - RNA, 19 nt, Homo sapiens
  misc_RNA (1)...(19): siRNA sense strand
gugacccagucuauuaaag

SEQ ID NO: 335545 - RNA, 19 nt, Homo sapiens
  misc_RNA (1)...(19): siRNA sense strand
agaacaaagcacaucagaa

SEQ ID NO: 335546 - RNA, 19 nt, Homo sapiens
  misc_RNA (1)...(19): siRNA sense strand
uggaagaaaccaccaaggu

SEQ ID NO: 335547 - RNA, 19 nt, Homo sapiens
  misc_RNA (1)...(19): siRNA sense strand
ucaacuggaauggauggua

SEQ ID NO: 335548 - RNA, 19 nt, Homo sapiens
  misc_RNA (1)...(19): siRNA sense strand
ggaaauggcugaacuagaa

SEQ ID NO: 335549 - RNA, 19 nt, Homo sapiens
  misc_RNA (1)...(19): siRNA sense strand
gaacaaagcacaucagaaa

SEQ ID NO: 335550 - RNA, 19 nt, Homo sapiens
  misc_RNA (1)...(19): siRNA sense strand
cagcuacccuuccaucaua

SEQ ID NO: 335551 - RNA, 19 nt, Homo sapiens
  misc_RNA (1)...(19): siRNA sense strand
gggauaccaugcaacauaa

SEQ ID NO: 335552 - RNA, 19 nt, Homo sapiens
  misc_RNA (1)...(19): siRNA sense strand
gaggagauguggucaaugg

SEQ ID NO: 335553 - RNA, 19 nt, Homo sapiens
  misc_RNA (1)...(19): siRNA sense strand
gaaggagcuuucaucauuc

SEQ ID NO: 335554 - RNA, 19 nt, Homo sapiens
  misc_RNA (1)...(19): siRNA sense strand
cuagaaaucuguugcuaug

SEQ ID NO: 335555 - RNA, 19 nt, Homo sapiens
  misc_RNA (1)...(19): siRNA sense strand
gcucagggcuauccucuca

SEQ ID NO: 335556 - RNA, 19 nt, Homo sapiens
  misc_RNA (1)...(19): siRNA sense strand
aaacaagcgucucugaaga

SEQ ID NO: 335557 - RNA, 19 nt, Homo sapiens
  misc_RNA (1)...(19): siRNA sense strand
caacauaaccugauaaagc

SEQ ID NO: 335558 - RNA, 19 nt, Homo sapiens
  misc_RNA (1)...(19): siRNA sense strand
gaaacaagcgucucugaag

SEQ ID NO: 335559 - RNA, 19 nt, Homo sapiens
  misc_RNA (1)...(19): siRNA sense strand
gcagagggauaccaugcaa

SEQ ID NO: 335560 - RNA, 19 nt, Homo sapiens
  misc_RNA (1)...(19): siRNA sense strand
ugaacuagaagcuguguua

SEQ ID NO: 335561 - RNA, 19 nt, Homo sapiens
  misc_RNA (1)...(19): siRNA sense strand
gagaaucccaggacagaaa

SEQ ID NO: 335562 - RNA, 19 nt, Homo sapiens
  misc_RNA (1)...(19): siRNA sense strand
gcccacagaucaacuggaa

SEQ ID NO: 335563 - RNA, 19 nt, Homo sapiens
  misc_RNA (1)...(19): siRNA sense strand
gaagacugcucagggcuau

SEQ ID NO: 335564 - RNA, 19 nt, Homo sapiens
  misc_RNA (1)...(19): siRNA sense strand
gacccagucuauuaaagaa

SEQ ID NO: 335565 - RNA, 19 nt, Homo sapiens
  misc_RNA (1)...(19): siRNA sense strand
acuagaagcuguguuagaa

SEQ ID NO: 335566 - RNA, 19 nt, Homo sapiens
  misc_RNA (1)...(19): siRNA sense strand
caugcaacauaaccugaua

SEQ ID NO: 335567 - RNA, 19 nt, Homo sapiens
  misc_RNA (1)...(19): siRNA sense strand
gcuggacaccuaccugaua

SEQ ID NO: 335568 - RNA, 19 nt, Homo sapiens
  misc_RNA (1)...(19): siRNA sense strand
cagaucaacuggaauggau

SEQ ID NO: 335569 - RNA, 19 nt, Homo sapiens
  misc_RNA (1)...(19): siRNA sense strand
gcaggaaauggcugaacua

SEQ ID NO: 335570 - RNA, 19 nt, Homo sapiens
  misc_RNA (1)...(19): siRNA sense strand
ccacagaucaacuggaaug

SEQ ID NO: 335571 - RNA, 19 nt, Homo sapiens
  misc_RNA (1)...(19): siRNA sense strand
caacaugcccacagaucaa

SEQ ID NO: 335572 - RNA, 19 nt, Homo sapiens
  misc_RNA (1)...(19): siRNA sense strand
ucaccaacaugcccacaga

SEQ ID NO: 335573 - RNA, 19 nt, Homo sapiens
  misc_RNA (1)...(19): siRNA sense strand
cagaggagauguggucaau

SEQ ID NO: 335574 - RNA, 19 nt, Homo sapiens
  misc_RNA (1)...(19): siRNA sense strand
caauugggcagauguguga

SEQ ID NO: 335575 - RNA, 19 nt, Homo sapiens
  misc_RNA (1)...(19): siRNA sense strand
ggagauguggucaauggaa

SEQ ID NO: 335576 - RNA, 19 nt, Homo sapiens
  misc_RNA (1)...(19): siRNA sense strand
guacagcuguguggugcuu

SEQ ID NO: 335577 - RNA, 19 nt, Homo sapiens
  misc_RNA (1)...(19): siRNA sense strand
ccaaagcgagcaagagaau

SEQ ID NO: 335578 - RNA, 19 nt, Homo sapiens
  misc_RNA (1)...(19): siRNA sense strand
gcuaugggcccuucaccaa

SEQ ID NO: 335579 - RNA, 19 nt, Homo sapiens
  misc_RNA (1)...(19): siRNA sense strand
gaaugagcaugauuuugaa

SEQ ID NO: 335580 - RNA, 19 nt, Homo sapiens
  misc_RNA (1)...(19): siRNA sense strand
ucagggcuauccucucaga

SEQ ID NO: 335581 - RNA, 19 nt, Homo sapiens
  misc_RNA (1)...(19): siRNA sense strand
agggauaccaugcaacaua

SEQ ID NO: 335582 - RNA, 19 nt, Homo sapiens
  misc_RNA (1)...(19): siRNA sense strand
gcuagaaaucuguugcuau

SEQ ID NO: 335583 - RNA, 19 nt, Homo sapiens
  misc_RNA (1)...(19): siRNA sense strand
ugaaugagcaugauuuuga

SEQ ID NO: 335584 - RNA, 19 nt, Homo sapiens
  misc_RNA (1)...(19): siRNA sense strand
ggcuagaaaucuguugcua

SEQ ID NO: 335585 - RNA, 19 nt, Homo sapiens
  misc_RNA (1)...(19): siRNA sense strand
ugaaacaagcgucucugaa

SEQ ID NO: 335586 - RNA, 19 nt, Homo sapiens
  misc_RNA (1)...(19): siRNA sense strand
aacauaaccugauaaagcu

SEQ ID NO: 335587 - RNA, 19 nt, Homo sapiens
  misc_RNA (1)...(19): siRNA sense strand
ugacccagucuauuaaaga

SEQ ID NO: 335588 - RNA, 19 nt, Homo sapiens
  misc_RNA (1)...(19): siRNA sense strand
gaacuagaagcuguguuag

SEQ ID NO: 335589 - RNA, 19 nt, Homo sapiens
  misc_RNA (1)...(19): siRNA sense strand
gugaaacaagcgucucuga

SEQ ID NO: 335590 - RNA, 19 nt, Homo sapiens
  misc_RNA (1)...(19): siRNA sense strand
ccaacaugcccacagauca

SEQ ID NO: 335591 - RNA, 19 nt, Homo sapiens
  misc_RNA (1)...(19): siRNA sense strand
uaugggcccuucaccaaca

SEQ ID NO: 335592 - RNA, 19 nt, Homo sapiens
  misc_RNA (1)...(19): siRNA sense strand
guccaaagcgagcaagaga

SEQ ID NO: 335593 - RNA, 19 nt, Homo sapiens
  misc_RNA (1)...(19): siRNA sense strand
cagaacaaagcacaucaga

SEQ ID NO: 335594 - RNA, 19 nt, Homo sapiens
  misc_RNA (1)...(19): siRNA sense strand
ccugcgaaauccagaacaa

SEQ ID NO: 335595 - RNA, 19 nt, Homo sapiens
  misc_RNA (1)...(19): siRNA sense strand
gaaaccaccaagguccaaa

SEQ ID NO: 335596 - RNA, 19 nt, Homo sapiens
  misc_RNA (1)...(19): siRNA sense strand
gauaaagcuccagcaggaa

SEQ ID NO: 335597 - RNA, 19 nt, Homo sapiens
  misc_RNA (1)...(19): siRNA sense strand
aaggagcuuucaucauuca

SEQ ID NO: 335598 - RNA, 19 nt, Homo sapiens
  misc_RNA (1)...(19): siRNA sense strand
ggugugagagugaaacaag

SEQ ID NO: 335599 - RNA, 19 nt, Homo sapiens
  misc_RNA (1)...(19): siRNA sense strand
gaaauggcugaacuagaag

SEQ ID NO: 335600 - RNA, 19 nt, Homo sapiens
  misc_RNA (1)...(19): siRNA sense strand
auaaagcuccagcaggaaa

SEQ ID NO: 335601 - RNA, 19 nt, Homo sapiens
  misc_RNA (1)...(19): siRNA sense strand
acccuuccaucauaaguga

SEQ ID NO: 335602 - RNA, 19 nt, Homo sapiens
  misc_RNA (1)...(19): siRNA sense strand
ggugacccagucuauuaaa

SEQ ID NO: 335603 - RNA, 19 nt, Homo sapiens
  misc_RNA (1)...(19): siRNA sense strand
cccagucuauuaaagaaag

SEQ ID NO: 335604 - RNA, 19 nt, Homo sapiens
  misc_RNA (1)...(19): siRNA sense strand
caucugggugugagaguga

SEQ ID NO: 335605 - RNA, 19 nt, Homo sapiens
  misc_RNA (1)...(19): siRNA sense strand
ccagucuauuaaagaaaga

SEQ ID NO: 335606 - RNA, 19 nt, Homo sapiens
  misc_RNA (1)...(19): siRNA sense strand
cgaaauccagaacaaagca

SEQ ID NO: 335607 - RNA, 19 nt, Homo sapiens
  misc_RNA (1)...(19): siRNA sense strand
aagagaaucccaggacaga

SEQ ID NO: 335608 - RNA, 19 nt, Homo sapiens
  misc_RNA (1)...(19): siRNA sense strand
gauguggucaauggaagaa

SEQ ID NO: 335609 - RNA, 19 nt, Homo sapiens
  misc_RNA (1)...(19): siRNA sense strand
ggaccugcgaaauccagaa

SEQ ID NO: 335610 - RNA, 19 nt, Homo sapiens
  misc_RNA (1)...(19): siRNA sense strand
gagcaugauuuugaaguca

SEQ ID NO: 335611 - RNA, 19 nt, Homo sapiens
  misc_RNA (1)...(19): siRNA sense strand
gugacccagucuauuaaag

SEQ ID NO: 335612 - RNA, 19 nt, Homo sapiens
  misc_RNA (1)...(19): siRNA sense strand
agaacaaagcacaucagaa

SEQ ID NO: 335613 - RNA, 19 nt, Homo sapiens
  misc_RNA (1)...(19): siRNA sense strand
uggaagaaaccaccaaggu

SEQ ID NO: 335614 - RNA, 19 nt, Homo sapiens
  misc_RNA (1)...(19): siRNA sense strand
ucaacuggaauggauggua

SEQ ID NO: 335615 - RNA, 19 nt, Homo sapiens
  misc_RNA (1)...(19): siRNA sense strand
ggaaauggcugaacuagaa

SEQ ID NO: 335616 - RNA, 19 nt, Homo sapiens
  misc_RNA (1)...(19): siRNA sense strand
gaacaaagcacaucagaaa

SEQ ID NO: 335617 - RNA, 19 nt, Homo sapiens
  misc_RNA (1)...(19): siRNA sense strand
cagcuacccuuccaucaua

SEQ ID NO: 335618 - RNA, 19 nt, Homo sapiens
  misc_RNA (1)...(19): siRNA sense strand
gggauaccaugcaacauaa

SEQ ID NO: 335619 - RNA, 19 nt, Homo sapiens
  misc_RNA (1)...(19): siRNA sense strand
gaggagauguggucaaugg

SEQ ID NO: 335620 - RNA, 19 nt, Homo sapiens
  misc_RNA (1)...(19): siRNA sense strand
gaaggagcuuucaucauuc

SEQ ID NO: 335621 - RNA, 19 nt, Homo sapiens
  misc_RNA (1)...(19): siRNA sense strand
cuagaaaucuguugcuaug

SEQ ID NO: 335622 - RNA, 19 nt, Homo sapiens
  misc_RNA (1)...(19): siRNA sense strand
gcucagggcuauccucuca

SEQ ID NO: 335623 - RNA, 19 nt, Homo sapiens
  misc_RNA (1)...(19): siRNA sense strand
aaacaagcgucucugaaga

SEQ ID NO: 335624 - RNA, 19 nt, Homo sapiens
  misc_RNA (1)...(19): siRNA sense strand
caacauaaccugauaaagc

SEQ ID NO: 335625 - RNA, 19 nt, Homo sapiens
  misc_RNA (1)...(19): siRNA sense strand
gaaacaagcgucucugaag

SEQ ID NO: 335626 - RNA, 19 nt, Homo sapiens
  misc_RNA (1)...(19): siRNA sense strand
gcagagggauaccaugcaa

SEQ ID NO: 335627 - RNA, 19 nt, Homo sapiens
  misc_RNA (1)...(19): siRNA sense strand
ugaacuagaagcuguguua

SEQ ID NO: 335628 - RNA, 19 nt, Homo sapiens
  misc_RNA (1)...(19): siRNA sense strand
gagaaucccaggacagaaa

SEQ ID NO: 335629 - RNA, 19 nt, Homo sapiens
  misc_RNA (1)...(19): siRNA sense strand
gcccacagaucaacuggaa

SEQ ID NO: 335630 - RNA, 19 nt, Homo sapiens
  misc_RNA (1)...(19): siRNA sense strand
gaagacugcucagggcuau

SEQ ID NO: 335631 - RNA, 19 nt, Homo sapiens
  misc_RNA (1)...(19): siRNA sense strand
gacccagucuauuaaagaa

SEQ ID NO: 335632 - RNA, 19 nt, Homo sapiens
  misc_RNA (1)...(19): siRNA sense strand
acuagaagcuguguuagaa

SEQ ID NO: 335633 - RNA, 19 nt, Homo sapiens
  misc_RNA (1)...(19): siRNA sense strand
caugcaacauaaccugaua

SEQ ID NO: 335634 - RNA, 19 nt, Homo sapiens
  misc_RNA (1)...(19): siRNA sense strand
gcuggacaccuaccugaua

SEQ ID NO: 335635 - RNA, 19 nt, Homo sapiens
  misc_RNA (1)...(19): siRNA sense strand
cagaucaacuggaauggau

SEQ ID NO: 335636 - RNA, 19 nt, Homo sapiens
  misc_RNA (1)...(19): siRNA sense strand
gcaggaaauggcugaacua

SEQ ID NO: 335637 - RNA, 19 nt, Homo sapiens
  misc_RNA (1)...(19): siRNA sense strand
ccacagaucaacuggaaug

SEQ ID NO: 335638 - RNA, 19 nt, Homo sapiens
  misc_RNA (1)...(19): siRNA sense strand
caacaugcccacagaucaa

SEQ ID NO: 335639 - RNA, 19 nt, Homo sapiens
  misc_RNA (1)...(19): siRNA sense strand
ucaccaacaugcccacaga

SEQ ID NO: 335640 - RNA, 19 nt, Homo sapiens
  misc_RNA (1)...(19): siRNA sense strand
cagaggagauguggucaau

SEQ ID NO: 335641 - RNA, 19 nt, Homo sapiens
  misc_RNA (1)...(19): siRNA sense strand
caauugggcagauguguga

SEQ ID NO: 335642 - RNA, 19 nt, Homo sapiens
  misc_RNA (1)...(19): siRNA sense strand
ggagauguggucaauggaa

SEQ ID NO: 335643 - RNA, 19 nt, Homo sapiens
  misc_RNA (1)...(19): siRNA sense strand
guacagcuguguggugcuu

SEQ ID NO: 335644 - RNA, 19 nt, Homo sapiens
  misc_RNA (1)...(19): siRNA sense strand
ccaaagcgagcaagagaau

SEQ ID NO: 335645 - RNA, 19 nt, Homo sapiens
  misc_RNA (1)...(19): siRNA sense strand
gcuaugggcccuucaccaa

SEQ ID NO: 335646 - RNA, 19 nt, Homo sapiens
  misc_RNA (1)...(19): siRNA sense strand
gaaugagcaugauuuugaa

SEQ ID NO: 335647 - RNA, 19 nt, Homo sapiens
  misc_RNA (1)...(19): siRNA sense strand
ucagggcuauccucucaga

SEQ ID NO: 335648 - RNA, 19 nt, Homo sapiens
  misc_RNA (1)...(19): siRNA sense strand
agggauaccaugcaacaua

SEQ ID NO: 335649 - RNA, 19 nt, Homo sapiens
  misc_RNA (1)...(19): siRNA sense strand
gcuagaaaucuguugcuau

SEQ ID NO: 335650 - RNA, 19 nt, Homo sapiens
  misc_RNA (1)...(19): siRNA sense strand
ugaaugagcaugauuuuga

SEQ ID NO: 335651 - RNA, 19 nt, Homo sapiens
  misc_RNA (1)...(19): siRNA sense strand
ggcuagaaaucuguugcua

SEQ ID NO: 335652 - RNA, 19 nt, Homo sapiens
  misc_RNA (1)...(19): siRNA sense strand
ugaaacaagcgucucugaa

SEQ ID NO: 335653 - RNA, 19 nt, Homo sapiens
  misc_RNA (1)...(19): siRNA sense strand
aacauaaccugauaaagcu

SEQ ID NO: 335654 - RNA, 19 nt, Homo sapiens
  misc_RNA (1)...(19): siRNA sense strand
ugacccagucuauuaaaga

SEQ ID NO: 335655 - RNA, 19 nt, Homo sapiens
  misc_RNA (1)...(19): siRNA sense strand
gaacuagaagcuguguuag

SEQ ID NO: 335656 - RNA, 19 nt, Homo sapiens
  misc_RNA (1)...(19): siRNA sense strand
gugaaacaagcgucucuga

SEQ ID NO: 335657 - RNA, 19 nt, Homo sapiens
  misc_RNA (1)...(19): siRNA sense strand
ccaacaugcccacagauca

SEQ ID NO: 335658 - RNA, 19 nt, Homo sapiens
  misc_RNA (1)...(19): siRNA sense strand
uaugggcccuucaccaaca

SEQ ID NO: 335659 - RNA, 19 nt, Homo sapiens
  misc_RNA (1)...(19): siRNA sense strand
guccaaagcgagcaagaga

SEQ ID NO: 335660 - RNA, 19 nt, Homo sapiens
  misc_RNA (1)...(19): siRNA sense strand
cagaacaaagcacaucaga

SEQ ID NO: 335661 - RNA, 19 nt, Homo sapiens
  misc_RNA (1)...(19): siRNA sense strand
ccugcgaaauccagaacaa

SEQ ID NO: 335662 - RNA, 19 nt, Homo sapiens
  misc_RNA (1)...(19): siRNA sense strand
gaaaccaccaagguccaaa

SEQ ID NO: 335663 - RNA, 19 nt, Homo sapiens
  misc_RNA (1)...(19): siRNA sense strand
gauaaagcuccagcaggaa

SEQ ID NO: 335664 - RNA, 19 nt, Homo sapiens
  misc_RNA (1)...(19): siRNA sense strand
aaggagcuuucaucauuca

SEQ ID NO: 335665 - RNA, 19 nt, Homo sapiens
  misc_RNA (1)...(19): siRNA sense strand
ggugugagagugaaacaag

SEQ ID NO: 335666 - RNA, 19 nt, Homo sapiens
  misc_RNA (1)...(19): siRNA sense strand
gaaauggcugaacuagaag

SEQ ID NO: 335667 - RNA, 19 nt, Homo sapiens
  misc_RNA (1)...(19): siRNA sense strand
auaaagcuccagcaggaaa

SEQ ID NO: 335668 - RNA, 19 nt, Homo sapiens
  misc_RNA (1)...(19): siRNA sense strand
acccuuccaucauaaguga

SEQ ID NO: 335669 - RNA, 19 nt, Homo sapiens
  misc_RNA (1)...(19): siRNA sense strand
ggugacccagucuauuaaa

SEQ ID NO: 335670 - RNA, 19 nt, Homo sapiens
  misc_RNA (1)...(19): siRNA sense strand
cccagucuauuaaagaaag

SEQ ID NO: 335671 - RNA, 19 nt, Homo sapiens
  misc_RNA (1)...(19): siRNA sense strand
caucugggugugagaguga

SEQ ID NO: 335672 - RNA, 19 nt, Homo sapiens
  misc_RNA (1)...(19): siRNA sense strand
ccagucuauuaaagaaaga

SEQ ID NO: 335673 - RNA, 19 nt, Homo sapiens
  misc_RNA (1)...(19): siRNA sense strand
cgaaauccagaacaaagca

SEQ ID NO: 335674 - RNA, 19 nt, Homo sapiens
  misc_RNA (1)...(19): siRNA sense strand
aagagaaucccaggacaga

SEQ ID NO: 335675 - RNA, 19 nt, Homo sapiens
  misc_RNA (1)...(19): siRNA sense strand
gauguggucaauggaagaa

SEQ ID NO: 335676 - RNA, 19 nt, Homo sapiens
  misc_RNA (1)...(19): siRNA sense strand
ggaccugcgaaauccagaa

SEQ ID NO: 335677 - RNA, 19 nt, Homo sapiens
  misc_RNA (1)...(19): siRNA sense strand
gagcaugauuuugaaguca

SEQ ID NO: 335678 - RNA, 19 nt, Homo sapiens
  misc_RNA (1)...(19): siRNA sense strand
gugacccagucuauuaaag

SEQ ID NO: 335679 - RNA, 19 nt, Homo sapiens
  misc_RNA (1)...(19): siRNA sense strand
agaacaaagcacaucagaa

SEQ ID NO: 335680 - RNA, 19 nt, Homo sapiens
  misc_RNA (1)...(19): siRNA sense strand
uggaagaaaccaccaaggu

SEQ ID NO: 335681 - RNA, 19 nt, Homo sapiens
  misc_RNA (1)...(19): siRNA sense strand
ucaacuggaauggauggua

SEQ ID NO: 335682 - RNA, 19 nt, Homo sapiens
  misc_RNA (1)...(19): siRNA sense strand
ggaaauggcugaacuagaa

SEQ ID NO: 335683 - RNA, 19 nt, Homo sapiens
  misc_RNA (1)...(19): siRNA sense strand
gaacaaagcacaucagaaa

SEQ ID NO: 335684 - RNA, 19 nt, Homo sapiens
  misc_RNA (1)...(19): siRNA sense strand
cagcuacccuuccaucaua

SEQ ID NO: 335685 - RNA, 19 nt, Homo sapiens
  misc_RNA (1)...(19): siRNA sense strand
gggauaccaugcaacauaa

SEQ ID NO: 335686 - RNA, 19 nt, Homo sapiens
  misc_RNA (1)...(19): siRNA sense strand
gaggagauguggucaaugg

SEQ ID NO: 335687 - RNA, 19 nt, Homo sapiens
  misc_RNA (1)...(19): siRNA sense strand
gaaggagcuuucaucauuc

SEQ ID NO: 335688 - RNA, 19 nt, Homo sapiens
  misc_RNA (1)...(19): siRNA sense strand
cuagaaaucuguugcuaug

SEQ ID NO: 335689 - RNA, 19 nt, Homo sapiens
  misc_RNA (1)...(19): siRNA sense strand
gcucagggcuauccucuca

SEQ ID NO: 335690 - RNA, 19 nt, Homo sapiens
  misc_RNA (1)...(19): siRNA sense strand
aaacaagcgucucugaaga

SEQ ID NO: 335691 - RNA, 19 nt, Homo sapiens
  misc_RNA (1)...(19): siRNA sense strand
caacauaaccugauaaagc

SEQ ID NO: 335692 - RNA, 19 nt, Homo sapiens
  misc_RNA (1)...(19): siRNA sense strand
gaaacaagcgucucugaag

SEQ ID NO: 335693 - RNA, 19 nt, Homo sapiens
  misc_RNA (1)...(19): siRNA sense strand
gcagagggauaccaugcaa

SEQ ID NO: 335694 - RNA, 19 nt, Homo sapiens
  misc_RNA (1)...(19): siRNA sense strand
ugaacuagaagcuguguua

SEQ ID NO: 335695 - RNA, 19 nt, Homo sapiens
  misc_RNA (1)...(19): siRNA sense strand
gagaaucccaggacagaaa

SEQ ID NO: 335696 - RNA, 19 nt, Homo sapiens
  misc_RNA (1)...(19): siRNA sense strand
gcccacagaucaacuggaa

SEQ ID NO: 335697 - RNA, 19 nt, Homo sapiens
  misc_RNA (1)...(19): siRNA sense strand
gaagacugcucagggcuau

SEQ ID NO: 335698 - RNA, 19 nt, Homo sapiens
  misc_RNA (1)...(19): siRNA sense strand
gacccagucuauuaaagaa

SEQ ID NO: 335699 - RNA, 19 nt, Homo sapiens
  misc_RNA (1)...(19): siRNA sense strand
acuagaagcuguguuagaa

SEQ ID NO: 335700 - RNA, 19 nt, Homo sapiens
  misc_RNA (1)...(19): siRNA sense strand
caugcaacauaaccugaua

SEQ ID NO: 335701 - RNA, 19 nt, Homo sapiens
  misc_RNA (1)...(19): siRNA sense strand
gcuggacaccuaccugaua

SEQ ID NO: 335702 - RNA, 19 nt, Homo sapiens
  misc_RNA (1)...(19): siRNA sense strand
cagaucaacuggaauggau

SEQ ID NO: 335703 - RNA, 19 nt, Homo sapiens
  misc_RNA (1)...(19): siRNA sense strand
gcaggaaauggcugaacua

SEQ ID NO: 335704 - RNA, 19 nt, Homo sapiens
  misc_RNA (1)...(19): siRNA sense strand
ccacagaucaacuggaaug

SEQ ID NO: 335705 - RNA, 19 nt, Homo sapiens
  misc_RNA (1)...(19): siRNA sense strand
caacaugcccacagaucaa

SEQ ID NO: 335706 - RNA, 19 nt, Homo sapiens
  misc_RNA (1)...(19): siRNA sense strand
ucaccaacaugcccacaga

SEQ ID NO: 335707 - RNA, 19 nt, Homo sapiens
  misc_RNA (1)...(19): siRNA sense strand
cagaggagauguggucaau

SEQ ID NO: 335708 - RNA, 19 nt, Homo sapiens
  misc_RNA (1)...(19): siRNA sense strand
caauugggcagauguguga

SEQ ID NO: 335709 - RNA, 19 nt, Homo sapiens
  misc_RNA (1)...(19): siRNA sense strand
ggagauguggucaauggaa

SEQ ID NO: 335710 - RNA, 19 nt, Homo sapiens
  misc_RNA (1)...(19): siRNA sense strand
guacagcuguguggugcuu

SEQ ID NO: 335711 - RNA, 19 nt, Homo sapiens
  misc_RNA (1)...(19): siRNA sense strand
ccaaagcgagcaagagaau

SEQ ID NO: 335712 - RNA, 19 nt, Homo sapiens
  misc_RNA (1)...(19): siRNA sense strand
gcuaugggcccuucaccaa

SEQ ID NO: 335713 - RNA, 19 nt, Homo sapiens
  misc_RNA (1)...(19): siRNA sense strand
gaaugagcaugauuuugaa

SEQ ID NO: 335714 - RNA, 19 nt, Homo sapiens
  misc_RNA (1)...(19): siRNA sense strand
ucagggcuauccucucaga

SEQ ID NO: 335715 - RNA, 19 nt, Homo sapiens
  misc_RNA (1)...(19): siRNA sense strand
agggauaccaugcaacaua

SEQ ID NO: 335716 - RNA, 19 nt, Homo sapiens
  misc_RNA (1)...(19): siRNA sense strand
gcuagaaaucuguugcuau

SEQ ID NO: 335717 - RNA, 19 nt, Homo sapiens
  misc_RNA (1)...(19): siRNA sense strand
ugaaugagcaugauuuuga

SEQ ID NO: 335718 - RNA, 19 nt, Homo sapiens
  misc_RNA (1)...(19): siRNA sense strand
ggcuagaaaucuguugcua

SEQ ID NO: 335719 - RNA, 19 nt, Homo sapiens
  misc_RNA (1)...(19): siRNA sense strand
ugaaacaagcgucucugaa

SEQ ID NO: 335720 - RNA, 19 nt, Homo sapiens
  misc_RNA (1)...(19): siRNA sense strand
aacauaaccugauaaagcu

SEQ ID NO: 335721 - RNA, 19 nt, Homo sapiens
  misc_RNA (1)...(19): siRNA sense strand
ugacccagucuauuaaaga

SEQ ID NO: 335722 - RNA, 19 nt, Homo sapiens
  misc_RNA (1)...(19): siRNA sense strand
gaacuagaagcuguguuag

SEQ ID NO: 335723 - RNA, 19 nt, Homo sapiens
  misc_RNA (1)...(19): siRNA sense strand
gugaaacaagcgucucuga

SEQ ID NO: 335724 - RNA, 19 nt, Homo sapiens
  misc_RNA (1)...(19): siRNA sense strand
ccaacaugcccacagauca

SEQ ID NO: 335725 - RNA, 19 nt, Homo sapiens
  misc_RNA (1)...(19): siRNA sense strand
uaugggcccuucaccaaca

SEQ ID NO: 335726 - RNA, 19 nt, Homo sapiens
  misc_RNA (1)...(19): siRNA sense strand
guccaaagcgagcaagaga

SEQ ID NO: 335727 - RNA, 19 nt, Homo sapiens
  misc_RNA (1)...(19): siRNA sense strand
cagaacaaagcacaucaga

SEQ ID NO: 335728 - RNA, 19 nt, Homo sapiens
  misc_RNA (1)...(19): siRNA sense strand
ccugcgaaauccagaacaa

SEQ ID NO: 335729 - RNA, 19 nt, Homo sapiens
  misc_RNA (1)...(19): siRNA sense strand
gaaaccaccaagguccaaa

SEQ ID NO: 335730 - RNA, 19 nt, Homo sapiens
  misc_RNA (1)...(19): siRNA sense strand
gauaaagcuccagcaggaa

SEQ ID NO: 335731 - RNA, 19 nt, Homo sapiens
  misc_RNA (1)...(19): siRNA sense strand
aaggagcuuucaucauuca

SEQ ID NO: 335732 - RNA, 19 nt, Homo sapiens
  misc_RNA (1)...(19): siRNA sense strand
ggugugagagugaaacaag

SEQ ID NO: 335733 - RNA, 19 nt, Homo sapiens
  misc_RNA (1)...(19): siRNA sense strand
gaaauggcugaacuagaag

SEQ ID NO: 335734 - RNA, 19 nt, Homo sapiens
  misc_RNA (1)...(19): siRNA sense strand
auaaagcuccagcaggaaa

SEQ ID NO: 335735 - RNA, 19 nt, Homo sapiens
  misc_RNA (1)...(19): siRNA sense strand
acccuuccaucauaaguga

SEQ ID NO: 335736 - RNA, 19 nt, Homo sapiens
  misc_RNA (1)...(19): siRNA sense strand
ggugacccagucuauuaaa

SEQ ID NO: 335737 - RNA, 19 nt, Homo sapiens
  misc_RNA (1)...(19): siRNA sense strand
cccagucuauuaaagaaag

SEQ ID NO: 335738 - RNA, 19 nt, Homo sapiens
  misc_RNA (1)...(19): siRNA sense strand
caucugggugugagaguga

SEQ ID NO: 335739 - RNA, 19 nt, Homo sapiens
  misc_RNA (1)...(19): siRNA sense strand
ccagucuauuaaagaaaga

SEQ ID NO: 335740 - RNA, 19 nt, Homo sapiens
  misc_RNA (1)...(19): siRNA sense strand
cgaaauccagaacaaagca

SEQ ID NO: 335741 - RNA, 19 nt, Homo sapiens
  misc_RNA (1)...(19): siRNA sense strand
aagagaaucccaggacaga

SEQ ID NO: 335742 - RNA, 19 nt, Homo sapiens
  misc_RNA (1)...(19): siRNA sense strand
gauguggucaauggaagaa

SEQ ID NO: 335743 - RNA, 19 nt, Homo sapiens
  misc_RNA (1)...(19): siRNA sense strand
ggaccugcgaaauccagaa

SEQ ID NO: 335744 - RNA, 19 nt, Homo sapiens
  misc_RNA (1)...(19): siRNA sense strand
gagcaugauuuugaaguca

SEQ ID NO: 335745 - RNA, 19 nt, Homo sapiens
  misc_RNA (1)...(19): siRNA sense strand
gugacccagucuauuaaag

SEQ ID NO: 335746 - RNA, 19 nt, Homo sapiens
  misc_RNA (1)...(19): siRNA sense strand
agaacaaagcacaucagaa

SEQ ID NO: 335747 - RNA, 19 nt, Homo sapiens
  misc_RNA (1)...(19): siRNA sense strand
uggaagaaaccaccaaggu

SEQ ID NO: 335748 - RNA, 19 nt, Homo sapiens
  misc_RNA (1)...(19): siRNA sense strand
ucaacuggaauggauggua

SEQ ID NO: 335749 - RNA, 19 nt, Homo sapiens
  misc_RNA (1)...(19): siRNA sense strand
ggaaauggcugaacuagaa

SEQ ID NO: 335750 - RNA, 19 nt, Homo sapiens
  misc_RNA (1)...(19): siRNA sense strand
gaacaaagcacaucagaaa

SEQ ID NO: 335751 - RNA, 19 nt, Homo sapiens
  misc_RNA (1)...(19): siRNA sense strand
cagcuacccuuccaucaua

SEQ ID NO: 335752 - RNA, 19 nt, Homo sapiens
  misc_RNA (1)...(19): siRNA sense strand
gggauaccaugcaacauaa

SEQ ID NO: 335753 - RNA, 19 nt, Homo sapiens
  misc_RNA (1)...(19): siRNA sense strand
gaggagauguggucaaugg

SEQ ID NO: 335754 - RNA, 19 nt, Homo sapiens
  misc_RNA (1)...(19): siRNA sense strand
gaaggagcuuucaucauuc

SEQ ID NO: 335755 - RNA, 19 nt, Homo sapiens
  misc_RNA (1)...(19): siRNA sense strand
cuagaaaucuguugcuaug

SEQ ID NO: 335756 - RNA, 19 nt, Homo sapiens
  misc_RNA (1)...(19): siRNA sense strand
gcucagggcuauccucuca

SEQ ID NO: 335757 - RNA, 19 nt, Homo sapiens
  misc_RNA (1)...(19): siRNA sense strand
aaacaagcgucucugaaga

SEQ ID NO: 335758 - RNA, 19 nt, Homo sapiens
  misc_RNA (1)...(19): siRNA sense strand
caacauaaccugauaaagc

SEQ ID NO: 335759 - RNA, 19 nt, Homo sapiens
  misc_RNA (1)...(19): siRNA sense strand
gaaacaagcgucucugaag

SEQ ID NO: 335760 - RNA, 19 nt, Homo sapiens
  misc_RNA (1)...(19): siRNA sense strand
gcagagggauaccaugcaa

SEQ ID NO: 335761 - RNA, 19 nt, Homo sapiens
  misc_RNA (1)...(19): siRNA sense strand
ugaacuagaagcuguguua

SEQ ID NO: 335762 - RNA, 19 nt, Homo sapiens
  misc_RNA (1)...(19): siRNA sense strand
gagaaucccaggacagaaa

SEQ ID NO: 335763 - RNA, 19 nt, Homo sapiens
  misc_RNA (1)...(19): siRNA sense strand
gcccacagaucaacuggaa

SEQ ID NO: 335764 - RNA, 19 nt, Homo sapiens
  misc_RNA (1)...(19): siRNA sense strand
gaagacugcucagggcuau

SEQ ID NO: 335765 - RNA, 19 nt, Homo sapiens
  misc_RNA (1)...(19): siRNA sense strand
gacccagucuauuaaagaa

SEQ ID NO: 335766 - RNA, 19 nt, Homo sapiens
  misc_RNA (1)...(19): siRNA sense strand
acuagaagcuguguuagaa

SEQ ID NO: 335767 - RNA, 19 nt, Homo sapiens
  misc_RNA (1)...(19): siRNA sense strand
caugcaacauaaccugaua

SEQ ID NO: 335768 - RNA, 19 nt, Homo sapiens
  misc_RNA (1)...(19): siRNA sense strand
gcuggacaccuaccugaua

SEQ ID NO: 335769 - RNA, 19 nt, Homo sapiens
  misc_RNA (1)...(19): siRNA sense strand
cagaucaacuggaauggau

SEQ ID NO: 335770 - RNA, 19 nt, Homo sapiens
  misc_RNA (1)...(19): siRNA sense strand
gcaggaaauggcugaacua

SEQ ID NO: 335771 - RNA, 19 nt, Homo sapiens
  misc_RNA (1)...(19): siRNA sense strand
ccacagaucaacuggaaug

SEQ ID NO: 335772 - RNA, 19 nt, Homo sapiens
  misc_RNA (1)...(19): siRNA sense strand
caacaugcccacagaucaa

SEQ ID NO: 335773 - RNA, 19 nt, Homo sapiens
  misc_RNA (1)...(19): siRNA sense strand
ucaccaacaugcccacaga

SEQ ID NO: 335774 - RNA, 19 nt, Homo sapiens
  misc_RNA (1)...(19): siRNA sense strand
cagaggagauguggucaau

SEQ ID NO: 335775 - RNA, 19 nt, Homo sapiens
  misc_RNA (1)...(19): siRNA sense strand
caauugggcagauguguga

SEQ ID NO: 335776 - RNA, 19 nt, Homo sapiens
  misc_RNA (1)...(19): siRNA sense strand
ggagauguggucaauggaa

SEQ ID NO: 335777 - RNA, 19 nt, Homo sapiens
  misc_RNA (1)...(19): siRNA sense strand
guacagcuguguggugcuu

SEQ ID NO: 335778 - RNA, 19 nt, Homo sapiens
  misc_RNA (1)...(19): siRNA sense strand
ccaaagcgagcaagagaau

SEQ ID NO: 335779 - RNA, 19 nt, Homo sapiens
  misc_RNA (1)...(19): siRNA sense strand
gcuaugggcccuucaccaa

SEQ ID NO: 335780 - RNA, 19 nt, Homo sapiens
  misc_RNA (1)...(19): siRNA sense strand
gaaugagcaugauuuugaa

SEQ ID NO: 335781 - RNA, 19 nt, Homo sapiens
  misc_RNA (1)...(19): siRNA sense strand
ucagggcuauccucucaga

SEQ ID NO: 335782 - RNA, 19 nt, Homo sapiens
  misc_RNA (1)...(19): siRNA sense strand
agggauaccaugcaacaua

SEQ ID NO: 335783 - RNA, 19 nt, Homo sapiens
  misc_RNA (1)...(19): siRNA sense strand
gcuagaaaucuguugcuau

SEQ ID NO: 335784 - RNA, 19 nt, Homo sapiens
  misc_RNA (1)...(19): siRNA sense strand
ugaaugagcaugauuuuga

SEQ ID NO: 335785 - RNA, 19 nt, Homo sapiens
  misc_RNA (1)...(19): siRNA sense strand
ggcuagaaaucuguugcua

SEQ ID NO: 335786 - RNA, 19 nt, Homo sapiens
  misc_RNA (1)...(19): siRNA sense strand
ugaaacaagcgucucugaa

SEQ ID NO: 335787 - RNA, 19 nt, Homo sapiens
  misc_RNA (1)...(19): siRNA sense strand
aacauaaccugauaaagcu

SEQ ID NO: 335788 - RNA, 19 nt, Homo sapiens
  misc_RNA (1)...(19): siRNA sense strand
ugacccagucuauuaaaga

SEQ ID NO: 335789 - RNA, 19 nt, Homo sapiens
  misc_RNA (1)...(19): siRNA sense strand
gaacuagaagcuguguuag

SEQ ID NO: 335790 - RNA, 19 nt, Homo sapiens
  misc_RNA (1)...(19): siRNA sense strand
gugaaacaagcgucucuga

SEQ ID NO: 335791 - RNA, 19 nt, Homo sapiens
  misc_RNA (1)...(19): siRNA sense strand
ccaacaugcccacagauca

SEQ ID NO: 335792 - RNA, 19 nt, Homo sapiens
  misc_RNA (1)...(19): siRNA sense strand
uaugggcccuucaccaaca

SEQ ID NO: 335793 - RNA, 19 nt, Homo sapiens
  misc_RNA (1)...(19): siRNA sense strand
guccaaagcgagcaagaga

SEQ ID NO: 335794 - RNA, 19 nt, Homo sapiens
  misc_RNA (1)...(19): siRNA sense strand
cagaacaaagcacaucaga

SEQ ID NO: 335795 - RNA, 19 nt, Homo sapiens
  misc_RNA (1)...(19): siRNA sense strand
ccugcgaaauccagaacaa

SEQ ID NO: 335796 - RNA, 19 nt, Homo sapiens
  misc_RNA (1)...(19): siRNA sense strand
gaaaccaccaagguccaaa

SEQ ID NO: 335797 - RNA, 19 nt, Homo sapiens
  misc_RNA (1)...(19): siRNA sense strand
gauaaagcuccagcaggaa

SEQ ID NO: 335798 - RNA, 19 nt, Homo sapiens
  misc_RNA (1)...(19): siRNA sense strand
aaggagcuuucaucauuca

SEQ ID NO: 335799 - RNA, 19 nt, Homo sapiens
  misc_RNA (1)...(19): siRNA sense strand
ggugugagagugaaacaag

SEQ ID NO: 335800 - RNA, 19 nt, Homo sapiens
  misc_RNA (1)...(19): siRNA sense strand
gaaauggcugaacuagaag

SEQ ID NO: 335801 - RNA, 19 nt, Homo sapiens
  misc_RNA (1)...(19): siRNA sense strand
auaaagcuccagcaggaaa

SEQ ID NO: 335802 - RNA, 19 nt, Homo sapiens
  misc_RNA (1)...(19): siRNA sense strand
acccuuccaucauaaguga

SEQ ID NO: 335803 - RNA, 19 nt, Homo sapiens
  misc_RNA (1)...(19): siRNA sense strand
ggugacccagucuauuaaa

SEQ ID NO: 335804 - RNA, 19 nt, Homo sapiens
  misc_RNA (1)...(19): siRNA sense strand
cccagucuauuaaagaaag

SEQ ID NO: 335805 - RNA, 19 nt, Homo sapiens
  misc_RNA (1)...(19): siRNA sense strand
caucugggugugagaguga

SEQ ID NO: 335806 - RNA, 19 nt, Homo sapiens
  misc_RNA (1)...(19): siRNA sense strand
ccagucuauuaaagaaaga

SEQ ID NO: 335807 - RNA, 19 nt, Homo sapiens
  misc_RNA (1)...(19): siRNA sense strand
cgaaauccagaacaaagca

SEQ ID NO: 335808 - RNA, 19 nt, Homo sapiens
  misc_RNA (1)...(19): siRNA sense strand
aagagaaucccaggacaga

SEQ ID NO: 335809 - RNA, 19 nt, Homo sapiens
  misc_RNA (1)...(19): siRNA sense strand
gauguggucaauggaagaa

SEQ ID NO: 335810 - RNA, 19 nt, Homo sapiens
  misc_RNA (1)...(19): siRNA sense strand
ggaccugcgaaauccagaa

SEQ ID NO: 335811 - RNA, 19 nt, Homo sapiens
  misc_RNA (1)...(19): siRNA sense strand
gagcaugauuuugaaguca

SEQ ID NO: 335812 - RNA, 19 nt, Homo sapiens
  misc_RNA (1)...(19): siRNA sense strand
gugacccagucuauuaaag

SEQ ID NO: 335813 - RNA, 19 nt, Homo sapiens
  misc_RNA (1)...(19): siRNA sense strand
agaacaaagcacaucagaa

SEQ ID NO: 335814 - RNA, 19 nt, Homo sapiens
  misc_RNA (1)...(19): siRNA sense strand
uggaagaaaccaccaaggu

SEQ ID NO: 335815 - RNA, 19 nt, Homo sapiens
  misc_RNA (1)...(19): siRNA sense strand
ucaacuggaauggauggua

SEQ ID NO: 335816 - RNA, 19 nt, Homo sapiens
  misc_RNA (1)...(19): siRNA sense strand
ggaaauggcugaacuagaa

SEQ ID NO: 335817 - RNA, 19 nt, Homo sapiens
  misc_RNA (1)...(19): siRNA sense strand
gaacaaagcacaucagaaa

SEQ ID NO: 335818 - RNA, 19 nt, Homo sapiens
  misc_RNA (1)...(19): siRNA sense strand
cagcuacccuuccaucaua

SEQ ID NO: 335819 - RNA, 19 nt, Homo sapiens
  misc_RNA (1)...(19): siRNA sense strand
gggauaccaugcaacauaa

SEQ ID NO: 335820 - RNA, 19 nt, Homo sapiens
  misc_RNA (1)...(19): siRNA sense strand
gaggagauguggucaaugg

SEQ ID NO: 335821 - RNA, 19 nt, Homo sapiens
  misc_RNA (1)...(19): siRNA sense strand
gaaggagcuuucaucauuc

SEQ ID NO: 335822 - RNA, 19 nt, Homo sapiens
  misc_RNA (1)...(19): siRNA sense strand
cuagaaaucuguugcuaug

SEQ ID NO: 335823 - RNA, 19 nt, Homo sapiens
  misc_RNA (1)...(19): siRNA sense strand
gcucagggcuauccucuca

SEQ ID NO: 335824 - RNA, 19 nt, Homo sapiens
  misc_RNA (1)...(19): siRNA sense strand
aaacaagcgucucugaaga

SEQ ID NO: 335825 - RNA, 19 nt, Homo sapiens
  misc_RNA (1)...(19): siRNA sense strand
caacauaaccugauaaagc

SEQ ID NO: 335826 - RNA, 19 nt, Homo sapiens
  misc_RNA (1)...(19): siRNA sense strand
gaaacaagcgucucugaag

SEQ ID NO: 335827 - RNA, 19 nt, Homo sapiens
  misc_RNA (1)...(19): siRNA sense strand
gcagagggauaccaugcaa

SEQ ID NO: 335828 - RNA, 19 nt, Homo sapiens
  misc_RNA (1)...(19): siRNA sense strand
ugaacuagaagcuguguua

SEQ ID NO: 335829 - RNA, 19 nt, Homo sapiens
  misc_RNA (1)...(19): siRNA sense strand
gagaaucccaggacagaaa

SEQ ID NO: 335830 - RNA, 19 nt, Homo sapiens
  misc_RNA (1)...(19): siRNA sense strand
gcccacagaucaacuggaa

SEQ ID NO: 335831 - RNA, 19 nt, Homo sapiens
  misc_RNA (1)...(19): siRNA sense strand
gaagacugcucagggcuau

SEQ ID NO: 335832 - RNA, 19 nt, Homo sapiens
  misc_RNA (1)...(19): siRNA sense strand
gacccagucuauuaaagaa

SEQ ID NO: 335833 - RNA, 19 nt, Homo sapiens
  misc_RNA (1)...(19): siRNA sense strand
acuagaagcuguguuagaa

SEQ ID NO: 335834 - RNA, 19 nt, Homo sapiens
  misc_RNA (1)...(19): siRNA sense strand
caugcaacauaaccugaua

SEQ ID NO: 335835 - RNA, 19 nt, Homo sapiens
  misc_RNA (1)...(19): siRNA sense strand
gcuggacaccuaccugaua

SEQ ID NO: 335836 - RNA, 19 nt, Homo sapiens
  misc_RNA (1)...(19): siRNA sense strand
cagaucaacuggaauggau

SEQ ID NO: 335837 - RNA, 19 nt, Homo sapiens
  misc_RNA (1)...(19): siRNA sense strand
gcaggaaauggcugaacua

SEQ ID NO: 335838 - RNA, 19 nt, Homo sapiens
  misc_RNA (1)...(19): siRNA sense strand
ccacagaucaacuggaaug

SEQ ID NO: 335839 - RNA, 19 nt, Homo sapiens
  misc_RNA (1)...(19): siRNA sense strand
caacaugcccacagaucaa

SEQ ID NO: 335840 - RNA, 19 nt, Homo sapiens
  misc_RNA (1)...(19): siRNA sense strand
ucaccaacaugcccacaga

SEQ ID NO: 335841 - RNA, 19 nt, Homo sapiens
  misc_RNA (1)...(19): siRNA sense strand
cagaggagauguggucaau

SEQ ID NO: 335842 - RNA, 19 nt, Homo sapiens
  misc_RNA (1)...(19): siRNA sense strand
caauugggcagauguguga

SEQ ID NO: 335843 - RNA, 19 nt, Homo sapiens
  misc_RNA (1)...(19): siRNA sense strand
ggagauguggucaauggaa

SEQ ID NO: 335844 - RNA, 19 nt, Homo sapiens
  misc_RNA (1)...(19): siRNA sense strand
guacagcuguguggugcuu

SEQ ID NO: 335845 - RNA, 19 nt, Homo sapiens
  misc_RNA (1)...(19): siRNA sense strand
ccaaagcgagcaagagaau

SEQ ID NO: 335846 - RNA, 19 nt, Homo sapiens
  misc_RNA (1)...(19): siRNA sense strand
gcuaugggcccuucaccaa

SEQ ID NO: 335847 - RNA, 19 nt, Homo sapiens
  misc_RNA (1)...(19): siRNA sense strand
gaaugagcaugauuuugaa

SEQ ID NO: 335848 - RNA, 19 nt, Homo sapiens
  misc_RNA (1)...(19): siRNA sense strand
ucagggcuauccucucaga

SEQ ID NO: 335849 - RNA, 19 nt, Homo sapiens
  misc_RNA (1)...(19): siRNA sense strand
agggauaccaugcaacaua

SEQ ID NO: 335850 - RNA, 19 nt, Homo sapiens
  misc_RNA (1)...(19): siRNA sense strand
gcuagaaaucuguugcuau

SEQ ID NO: 335851 - RNA, 19 nt, Homo sapiens
  misc_RNA (1)...(19): siRNA sense strand
ugaaugagcaugauuuuga

SEQ ID NO: 335852 - RNA, 19 nt, Homo sapiens
  misc_RNA (1)...(19): siRNA sense strand
ggcuagaaaucuguugcua

SEQ ID NO: 335853 - RNA, 19 nt, Homo sapiens
  misc_RNA (1)...(19): siRNA sense strand
ugaaacaagcgucucugaa

SEQ ID NO: 335854 - RNA, 19 nt, Homo sapiens
  misc_RNA (1)...(19): siRNA sense strand
aacauaaccugauaaagcu

SEQ ID NO: 335855 - RNA, 19 nt, Homo sapiens
  misc_RNA (1)...(19): siRNA sense strand
ugacccagucuauuaaaga

SEQ ID NO: 335856 - RNA, 19 nt, Homo sapiens
  misc_RNA (1)...(19): siRNA sense strand
gaacuagaagcuguguuag

SEQ ID NO: 335857 - RNA, 19 nt, Homo sapiens
  misc_RNA (1)...(19): siRNA sense strand
gugaaacaagcgucucuga

SEQ ID NO: 335858 - RNA, 19 nt, Homo sapiens
  misc_RNA (1)...(19): siRNA sense strand
ccaacaugcccacagauca

SEQ ID NO: 335859 - RNA, 19 nt, Homo sapiens
  misc_RNA (1)...(19): siRNA sense strand
uaugggcccuucaccaaca

SEQ ID NO: 335860 - RNA, 19 nt, Homo sapiens
  misc_RNA (1)...(19): siRNA sense strand
guccaaagcgagcaagaga

SEQ ID NO: 335861 - RNA, 19 nt, Homo sapiens
  misc_RNA (1)...(19): siRNA sense strand
cagaacaaagcacaucaga

SEQ ID NO: 335862 - RNA, 19 nt, Homo sapiens
  misc_RNA (1)...(19): siRNA sense strand
ccugcgaaauccagaacaa

SEQ ID NO: 335863 - RNA, 19 nt, Homo sapiens
  misc_RNA (1)...(19): siRNA sense strand
gaaaccaccaagguccaaa

SEQ ID NO: 335864 - RNA, 19 nt, Homo sapiens
  misc_RNA (1)...(19): siRNA sense strand
gauaaagcuccagcaggaa

SEQ ID NO: 335865 - RNA, 19 nt, Homo sapiens
  misc_RNA (1)...(19): siRNA sense strand
aaggagcuuucaucauuca

SEQ ID NO: 335866 - RNA, 19 nt, Homo sapiens
  misc_RNA (1)...(19): siRNA sense strand
ggugugagagugaaacaag

SEQ ID NO: 335867 - RNA, 19 nt, Homo sapiens
  misc_RNA (1)...(19): siRNA sense strand
gaaauggcugaacuagaag

SEQ ID NO: 335868 - RNA, 19 nt, Homo sapiens
  misc_RNA (1)...(19): siRNA sense strand
auaaagcuccagcaggaaa

SEQ ID NO: 335869 - RNA, 19 nt, Homo sapiens
  misc_RNA (1)...(19): siRNA sense strand
acccuuccaucauaaguga

SEQ ID NO: 335870 - RNA, 19 nt, Homo sapiens
  misc_RNA (1)...(19): siRNA sense strand
ggugacccagucuauuaaa

SEQ ID NO: 335871 - RNA, 19 nt, Homo sapiens
  misc_RNA (1)...(19): siRNA sense strand
cccagucuauuaaagaaag

SEQ ID NO: 335872 - RNA, 19 nt, Homo sapiens
  misc_RNA (1)...(19): siRNA sense strand
caucugggugugagaguga

SEQ ID NO: 335873 - RNA, 19 nt, Homo sapiens
  misc_RNA (1)...(19): siRNA sense strand
ccagucuauuaaagaaaga

SEQ ID NO: 335874 - RNA, 19 nt, Homo sapiens
  misc_RNA (1)...(19): siRNA sense strand
cgaaauccagaacaaagca

SEQ ID NO: 335875 - RNA, 19 nt, Homo sapiens
  misc_RNA (1)...(19): siRNA sense strand
aagagaaucccaggacaga

SEQ ID NO: 335876 - RNA, 19 nt, Homo sapiens
  misc_RNA (1)...(19): siRNA sense strand
gauguggucaauggaagaa

SEQ ID NO: 335877 - RNA, 19 nt, Homo sapiens
  misc_RNA (1)...(19): siRNA sense strand
ggaccugcgaaauccagaa

SEQ ID NO: 335878 - RNA, 19 nt, Homo sapiens
  misc_RNA (1)...(19): siRNA sense strand
gagcaugauuuugaaguca

SEQ ID NO: 335879 - RNA, 19 nt, Homo sapiens
  misc_RNA (1)...(19): siRNA sense strand
gugacccagucuauuaaag

SEQ ID NO: 335880 - RNA, 19 nt, Homo sapiens
  misc_RNA (1)...(19): siRNA sense strand
agaacaaagcacaucagaa

SEQ ID NO: 335881 - RNA, 19 nt, Homo sapiens
  misc_RNA (1)...(19): siRNA sense strand
uggaagaaaccaccaaggu

SEQ ID NO: 335882 - RNA, 19 nt, Homo sapiens
  misc_RNA (1)...(19): siRNA sense strand
ucaacuggaauggauggua

SEQ ID NO: 335883 - RNA, 19 nt, Homo sapiens
  misc_RNA (1)...(19): siRNA sense strand
ggaaauggcugaacuagaa

SEQ ID NO: 335884 - RNA, 19 nt, Homo sapiens
  misc_RNA (1)...(19): siRNA sense strand
gaacaaagcacaucagaaa

SEQ ID NO: 335885 - RNA, 19 nt, Homo sapiens
  misc_RNA (1)...(19): siRNA sense strand
cagcuacccuuccaucaua

SEQ ID NO: 335886 - RNA, 19 nt, Homo sapiens
  misc_RNA (1)...(19): siRNA sense strand
gggauaccaugcaacauaa

SEQ ID NO: 335887 - RNA, 19 nt, Homo sapiens
  misc_RNA (1)...(19): siRNA sense strand
gaggagauguggucaaugg

SEQ ID NO: 335888 - RNA, 19 nt, Homo sapiens
  misc_RNA (1)...(19): siRNA sense strand
gaaggagcuuucaucauuc

SEQ ID NO: 335889 - RNA, 19 nt, Homo sapiens
  misc_RNA (1)...(19): siRNA sense strand
cuagaaaucuguugcuaug

SEQ ID NO: 335890 - RNA, 19 nt, Homo sapiens
  misc_RNA (1)...(19): siRNA sense strand
gcucagggcuauccucuca

SEQ ID NO: 335891 - RNA, 19 nt, Homo sapiens
  misc_RNA (1)...(19): siRNA sense strand
aaacaagcgucucugaaga

SEQ ID NO: 335892 - RNA, 19 nt, Homo sapiens
  misc_RNA (1)...(19): siRNA sense strand
caacauaaccugauaaagc

SEQ ID NO: 335893 - RNA, 19 nt, Homo sapiens
  misc_RNA (1)...(19): siRNA sense strand
gaaacaagcgucucugaag

SEQ ID NO: 335894 - RNA, 19 nt, Homo sapiens
  misc_RNA (1)...(19): siRNA sense strand
gcagagggauaccaugcaa

SEQ ID NO: 335895 - RNA, 19 nt, Homo sapiens
  misc_RNA (1)...(19): siRNA sense strand
ugaacuagaagcuguguua

SEQ ID NO: 335896 - RNA, 19 nt, Homo sapiens
  misc_RNA (1)...(19): siRNA sense strand
gagaaucccaggacagaaa

SEQ ID NO: 335897 - RNA, 19 nt, Homo sapiens
  misc_RNA (1)...(19): siRNA sense strand
gcccacagaucaacuggaa

SEQ ID NO: 335898 - RNA, 19 nt, Homo sapiens
  misc_RNA (1)...(19): siRNA sense strand
gaagacugcucagggcuau

SEQ ID NO: 335899 - RNA, 19 nt, Homo sapiens
  misc_RNA (1)...(19): siRNA sense strand
gacccagucuauuaaagaa

SEQ ID NO: 335900 - RNA, 19 nt, Homo sapiens
  misc_RNA (1)...(19): siRNA sense strand
acuagaagcuguguuagaa

SEQ ID NO: 335901 - RNA, 19 nt, Homo sapiens
  misc_RNA (1)...(19): siRNA sense strand
caugcaacauaaccugaua

SEQ ID NO: 335902 - RNA, 19 nt, Homo sapiens
  misc_RNA (1)...(19): siRNA sense strand
gcuggacaccuaccugaua

SEQ ID NO: 335903 - RNA, 19 nt, Homo sapiens
  misc_RNA (1)...(19): siRNA sense strand
cagaucaacuggaauggau

SEQ ID NO: 335904 - RNA, 19 nt, Homo sapiens
  misc_RNA (1)...(19): siRNA sense strand
gcaggaaauggcugaacua

SEQ ID NO: 335905 - RNA, 19 nt, Homo sapiens
  misc_RNA (1)...(19): siRNA sense strand
ccacagaucaacuggaaug

SEQ ID NO: 335906 - RNA, 19 nt, Homo sapiens
  misc_RNA (1)...(19): siRNA sense strand
caacaugcccacagaucaa

SEQ ID NO: 335907 - RNA, 19 nt, Homo sapiens
  misc_RNA (1)...(19): siRNA sense strand
ucaccaacaugcccacaga

SEQ ID NO: 335908 - RNA, 19 nt, Homo sapiens
  misc_RNA (1)...(19): siRNA sense strand
cagaggagauguggucaau

SEQ ID NO: 335909 - RNA, 19 nt, Homo sapiens
  misc_RNA (1)...(19): siRNA sense strand
caauugggcagauguguga

SEQ ID NO: 335910 - RNA, 19 nt, Homo sapiens
  misc_RNA (1)...(19): siRNA sense strand
ggagauguggucaauggaa

SEQ ID NO: 335911 - RNA, 19 nt, Homo sapiens
  misc_RNA (1)...(19): siRNA sense strand
guacagcuguguggugcuu

SEQ ID NO: 335912 - RNA, 19 nt, Homo sapiens
  misc_RNA (1)...(19): siRNA sense strand
ccaaagcgagcaagagaau

SEQ ID NO: 335913 - RNA, 19 nt, Homo sapiens
  misc_RNA (1)...(19): siRNA sense strand
gcuaugggcccuucaccaa

SEQ ID NO: 335914 - RNA, 19 nt, Homo sapiens
  misc_RNA (1)...(19): siRNA sense strand
gaaugagcaugauuuugaa

SEQ ID NO: 335915 - RNA, 19 nt, Homo sapiens
  misc_RNA (1)...(19): siRNA sense strand
ucagggcuauccucucaga

SEQ ID NO: 335916 - RNA, 19 nt, Homo sapiens
  misc_RNA (1)...(19): siRNA sense strand
agggauaccaugcaacaua

SEQ ID NO: 335917 - RNA, 19 nt, Homo sapiens
  misc_RNA (1)...(19): siRNA sense strand
gcuagaaaucuguugcuau

SEQ ID NO: 335918 - RNA, 19 nt, Homo sapiens
  misc_RNA (1)...(19): siRNA sense strand
ugaaugagcaugauuuuga

SEQ ID NO: 335919 - RNA, 19 nt, Homo sapiens
  misc_RNA (1)...(19): siRNA sense strand
ggcuagaaaucuguugcua

SEQ ID NO: 335920 - RNA, 19 nt, Homo sapiens
  misc_RNA (1)...(19): siRNA sense strand
ugaaacaagcgucucugaa

SEQ ID NO: 335921 - RNA, 19 nt, Homo sapiens
  misc_RNA (1)...(19): siRNA sense strand
aacauaaccugauaaagcu

SEQ ID NO: 335922 - RNA, 19 nt, Homo sapiens
  misc_RNA (1)...(19): siRNA sense strand
ugacccagucuauuaaaga

SEQ ID NO: 335923 - RNA, 19 nt, Homo sapiens
  misc_RNA (1)...(19): siRNA sense strand
gaacuagaagcuguguuag

SEQ ID NO: 335924 - RNA, 19 nt, Homo sapiens
  misc_RNA (1)...(19): siRNA sense strand
gugaaacaagcgucucuga

SEQ ID NO: 335925 - RNA, 19 nt, Homo sapiens
  misc_RNA (1)...(19): siRNA sense strand
ccaacaugcccacagauca

SEQ ID NO: 335926 - RNA, 19 nt, Homo sapiens
  misc_RNA (1)...(19): siRNA sense strand
uaugggcccuucaccaaca

SEQ ID NO: 335927 - RNA, 19 nt, Homo sapiens
  misc_RNA (1)...(19): siRNA sense strand
guccaaagcgagcaagaga

SEQ ID NO: 335928 - RNA, 19 nt, Homo sapiens
  misc_RNA (1)...(19): siRNA sense strand
cagaacaaagcacaucaga

SEQ ID NO: 335929 - RNA, 19 nt, Homo sapiens
  misc_RNA (1)...(19): siRNA sense strand
ccugcgaaauccagaacaa

SEQ ID NO: 335930 - RNA, 19 nt, Homo sapiens
  misc_RNA (1)...(19): siRNA sense strand
gaaaccaccaagguccaaa

SEQ ID NO: 335931 - RNA, 19 nt, Homo sapiens
  misc_RNA (1)...(19): siRNA sense strand
gauaaagcuccagcaggaa

SEQ ID NO: 335932 - RNA, 19 nt, Homo sapiens
  misc_RNA (1)...(19): siRNA sense strand
aaggagcuuucaucauuca

SEQ ID NO: 335933 - RNA, 19 nt, Homo sapiens
  misc_RNA (1)...(19): siRNA sense strand
ggugugagagugaaacaag

SEQ ID NO: 335934 - RNA, 19 nt, Homo sapiens
  misc_RNA (1)...(19): siRNA sense strand
gaaauggcugaacuagaag

SEQ ID NO: 335935 - RNA, 19 nt, Homo sapiens
  misc_RNA (1)...(19): siRNA sense strand
auaaagcuccagcaggaaa

SEQ ID NO: 335936 - RNA, 19 nt, Homo sapiens
  misc_RNA (1)...(19): siRNA sense strand
acccuuccaucauaaguga

SEQ ID NO: 335937 - RNA, 19 nt, Homo sapiens
  misc_RNA (1)...(19): siRNA sense strand
ggugacccagucuauuaaa

SEQ ID NO: 335938 - RNA, 19 nt, Homo sapiens
  misc_RNA (1)...(19): siRNA sense strand
cccagucuauuaaagaaag

SEQ ID NO: 335939 - RNA, 19 nt, Homo sapiens
  misc_RNA (1)...(19): siRNA sense strand
caucugggugugagaguga

SEQ ID NO: 335940 - RNA, 19 nt, Homo sapiens
  misc_RNA (1)...(19): siRNA sense strand
ccagucuauuaaagaaaga

SEQ ID NO: 335941 - RNA, 19 nt, Homo sapiens
  misc_RNA (1)...(19): siRNA sense strand
cgaaauccagaacaaagca

SEQ ID NO: 335942 - RNA, 19 nt, Homo sapiens
  misc_RNA (1)...(19): siRNA sense strand
aagagaaucccaggacaga

SEQ ID NO: 335943 - RNA, 19 nt, Homo sapiens
  misc_RNA (1)...(19): siRNA sense strand
gauguggucaauggaagaa

SEQ ID NO: 335944 - RNA, 19 nt, Homo sapiens
  misc_RNA (1)...(19): siRNA sense strand
ggaccugcgaaauccagaa

SEQ ID NO: 335945 - RNA, 19 nt, Homo sapiens
  misc_RNA (1)...(19): siRNA sense strand
gagcaugauuuugaaguca

SEQ ID NO: 335946 - RNA, 19 nt, Homo sapiens
  misc_RNA (1)...(19): siRNA sense strand
gugacccagucuauuaaag

SEQ ID NO: 335947 - RNA, 19 nt, Homo sapiens
  misc_RNA (1)...(19): siRNA sense strand
agaacaaagcacaucagaa

SEQ ID NO: 335948 - RNA, 19 nt, Homo sapiens
  misc_RNA (1)...(19): siRNA sense strand
uggaagaaaccaccaaggu

SEQ ID NO: 335949 - RNA, 19 nt, Homo sapiens
  misc_RNA (1)...(19): siRNA sense strand
ucaacuggaauggauggua

SEQ ID NO: 335950 - RNA, 19 nt, Homo sapiens
  misc_RNA (1)...(19): siRNA sense strand
ggaaauggcugaacuagaa

SEQ ID NO: 335951 - RNA, 19 nt, Homo sapiens
  misc_RNA (1)...(19): siRNA sense strand
gaacaaagcacaucagaaa

SEQ ID NO: 335952 - RNA, 19 nt, Homo sapiens
  misc_RNA (1)...(19): siRNA sense strand
cagcuacccuuccaucaua

SEQ ID NO: 335953 - RNA, 19 nt, Homo sapiens
  misc_RNA (1)...(19): siRNA sense strand
gggauaccaugcaacauaa

SEQ ID NO: 335954 - RNA, 19 nt, Homo sapiens
  misc_RNA (1)...(19): siRNA sense strand
gaggagauguggucaaugg

SEQ ID NO: 335955 - RNA, 19 nt, Homo sapiens
  misc_RNA (1)...(19): siRNA sense strand
gaaggagcuuucaucauuc

SEQ ID NO: 335956 - RNA, 19 nt, Homo sapiens
  misc_RNA (1)...(19): siRNA sense strand
cuagaaaucuguugcuaug

SEQ ID NO: 335957 - RNA, 19 nt, Homo sapiens
  misc_RNA (1)...(19): siRNA sense strand
gcucagggcuauccucuca

SEQ ID NO: 335958 - RNA, 19 nt, Homo sapiens
  misc_RNA (1)...(19): siRNA sense strand
aaacaagcgucucugaaga

SEQ ID NO: 335959 - RNA, 19 nt, Homo sapiens
  misc_RNA (1)...(19): siRNA sense strand
caacauaaccugauaaagc

SEQ ID NO: 335960 - RNA, 19 nt, Homo sapiens
  misc_RNA (1)...(19): siRNA sense strand
gaaacaagcgucucugaag

SEQ ID NO: 335961 - RNA, 19 nt, Homo sapiens
  misc_RNA (1)...(19): siRNA sense strand
gcagagggauaccaugcaa

SEQ ID NO: 335962 - RNA, 19 nt, Homo sapiens
  misc_RNA (1)...(19): siRNA sense strand
ugaacuagaagcuguguua

SEQ ID NO: 335963 - RNA, 19 nt, Homo sapiens
  misc_RNA (1)...(19): siRNA sense strand
gagaaucccaggacagaaa

SEQ ID NO: 335964 - RNA, 19 nt, Homo sapiens
  misc_RNA (1)...(19): siRNA sense strand
gcccacagaucaacuggaa

SEQ ID NO: 335965 - RNA, 19 nt, Homo sapiens
  misc_RNA (1)...(19): siRNA sense strand
gaagacugcucagggcuau

SEQ ID NO: 335966 - RNA, 19 nt, Homo sapiens
  misc_RNA (1)...(19): siRNA sense strand
gacccagucuauuaaagaa

SEQ ID NO: 335967 - RNA, 19 nt, Homo sapiens
  misc_RNA (1)...(19): siRNA sense strand
acuagaagcuguguuagaa

SEQ ID NO: 335968 - RNA, 19 nt, Homo sapiens
  misc_RNA (1)...(19): siRNA sense strand
caugcaacauaaccugaua

SEQ ID NO: 335969 - RNA, 19 nt, Homo sapiens
  misc_RNA (1)...(19): siRNA sense strand
gcuggacaccuaccugaua

SEQ ID NO: 335970 - RNA, 19 nt, Homo sapiens
  misc_RNA (1)...(19): siRNA sense strand
cagaucaacuggaauggau

SEQ ID NO: 335971 - RNA, 19 nt, Homo sapiens
  misc_RNA (1)...(19): siRNA sense strand
gcaggaaauggcugaacua

SEQ ID NO: 335972 - RNA, 19 nt, Homo sapiens
  misc_RNA (1)...(19): siRNA sense strand
ccacagaucaacuggaaug

SEQ ID NO: 335973 - RNA, 19 nt, Homo sapiens
  misc_RNA (1)...(19): siRNA sense strand
caacaugcccacagaucaa

SEQ ID NO: 335974 - RNA, 19 nt, Homo sapiens
  misc_RNA (1)...(19): siRNA sense strand
ucaccaacaugcccacaga

SEQ ID NO: 335975 - RNA, 19 nt, Homo sapiens
  misc_RNA (1)...(19): siRNA sense strand
cagaggagauguggucaau

SEQ ID NO: 335976 - RNA, 19 nt, Homo sapiens
  misc_RNA (1)...(19): siRNA sense strand
caauugggcagauguguga

SEQ ID NO: 335977 - RNA, 19 nt, Homo sapiens
  misc_RNA (1)...(19): siRNA sense strand
ggagauguggucaauggaa

SEQ ID NO: 335978 - RNA, 19 nt, Homo sapiens
  misc_RNA (1)...(19): siRNA sense strand
guacagcuguguggugcuu

SEQ ID NO: 335979 - RNA, 19 nt, Homo sapiens
  misc_RNA (1)...(19): siRNA sense strand
ccaaagcgagcaagagaau

SEQ ID NO: 335980 - RNA, 19 nt, Homo sapiens
  misc_RNA (1)...(19): siRNA sense strand
gcuaugggcccuucaccaa

SEQ ID NO: 335981 - RNA, 19 nt, Homo sapiens
  misc_RNA (1)...(19): siRNA sense strand
gaaugagcaugauuuugaa

SEQ ID NO: 335982 - RNA, 19 nt, Homo sapiens
  misc_RNA (1)...(19): siRNA sense strand
ucagggcuauccucucaga

SEQ ID NO: 335983 - RNA, 19 nt, Homo sapiens
  misc_RNA (1)...(19): siRNA sense strand
agggauaccaugcaacaua

SEQ ID NO: 335984 - RNA, 19 nt, Homo sapiens
  misc_RNA (1)...(19): siRNA sense strand
gcuagaaaucuguugcuau

SEQ ID NO: 335985 - RNA, 19 nt, Homo sapiens
  misc_RNA (1)...(19): siRNA sense strand
ugaaugagcaugauuuuga

SEQ ID NO: 335986 - RNA, 19 nt, Homo sapiens
  misc_RNA (1)...(19): siRNA sense strand
ggcuagaaaucuguugcua

SEQ ID NO: 335987 - RNA, 19 nt, Homo sapiens
  misc_RNA (1)...(19): siRNA sense strand
ugaaacaagcgucucugaa

SEQ ID NO: 335988 - RNA, 19 nt, Homo sapiens
  misc_RNA (1)...(19): siRNA sense strand
aacauaaccugauaaagcu

SEQ ID NO: 335989 - RNA, 19 nt, Homo sapiens
  misc_RNA (1)...(19): siRNA sense strand
ugacccagucuauuaaaga

SEQ ID NO: 335990 - RNA, 19 nt, Homo sapiens
  misc_RNA (1)...(19): siRNA sense strand
gaacuagaagcuguguuag

SEQ ID NO: 335991 - RNA, 19 nt, Homo sapiens
  misc_RNA (1)...(19): siRNA sense strand
gugaaacaagcgucucuga

SEQ ID NO: 335992 - RNA, 19 nt, Homo sapiens
  misc_RNA (1)...(19): siRNA sense strand
ccaacaugcccacagauca

SEQ ID NO: 335993 - RNA, 19 nt, Homo sapiens
  misc_RNA (1)...(19): siRNA sense strand
uaugggcccuucaccaaca

SEQ ID NO: 335994 - RNA, 19 nt, Homo sapiens
  misc_RNA (1)...(19): siRNA sense strand
guccaaagcgagcaagaga

SEQ ID NO: 335995 - RNA, 19 nt, Homo sapiens
  misc_RNA (1)...(19): siRNA sense strand
cagaacaaagcacaucaga

SEQ ID NO: 335996 - RNA, 19 nt, Homo sapiens
  misc_RNA (1)...(19): siRNA sense strand
ccugcgaaauccagaacaa

SEQ ID NO: 335997 - RNA, 19 nt, Homo sapiens
  misc_RNA (1)...(19): siRNA sense strand
gaaaccaccaagguccaaa

SEQ ID NO: 335998 - RNA, 19 nt, Homo sapiens
  misc_RNA (1)...(19): siRNA sense strand
gauaaagcuccagcaggaa

SEQ ID NO: 335999 - RNA, 19 nt, Homo sapiens
  misc_RNA (1)...(19): siRNA sense strand
aaggagcuuucaucauuca

SEQ ID NO: 336000 - RNA, 19 nt, Homo sapiens
  misc_RNA (1)...(19): siRNA sense strand
ggugugagagugaaacaag

SEQ ID NO: 336001 - RNA, 19 nt, Homo sapiens
  misc_RNA (1)...(19): siRNA sense strand
gaaauggcugaacuagaag

SEQ ID NO: 336002 - RNA, 19 nt, Homo sapiens
  misc_RNA (1)...(19): siRNA sense strand
auaaagcuccagcaggaaa

SEQ ID NO: 336003 - RNA, 19 nt, Homo sapiens
  misc_RNA (1)...(19): siRNA sense strand
acccuuccaucauaaguga

SEQ ID NO: 336004 - RNA, 19 nt, Homo sapiens
  misc_RNA (1)...(19): siRNA sense strand
ggugacccagucuauuaaa

SEQ ID NO: 336005 - RNA, 19 nt, Homo sapiens
  misc_RNA (1)...(19): siRNA sense strand
cccagucuauuaaagaaag

SEQ ID NO: 336006 - RNA, 19 nt, Homo sapiens
  misc_RNA (1)...(19): siRNA sense strand
caucugggugugagaguga

SEQ ID NO: 336007 - RNA, 19 nt, Homo sapiens
  misc_RNA (1)...(19): siRNA sense strand
ccagucuauuaaagaaaga

SEQ ID NO: 336008 - RNA, 19 nt, Homo sapiens
  misc_RNA (1)...(19): siRNA sense strand
cgaaauccagaacaaagca

SEQ ID NO: 336009 - RNA, 19 nt, Homo sapiens
  misc_RNA (1)...(19): siRNA sense strand
aagagaaucccaggacaga

SEQ ID NO: 336010 - RNA, 19 nt, Homo sapiens
  misc_RNA (1)...(19): siRNA sense strand
gauguggucaauggaagaa

SEQ ID NO: 336011 - RNA, 19 nt, Homo sapiens
  misc_RNA (1)...(19): siRNA sense strand
ggaccugcgaaauccagaa

SEQ ID NO: 336012 - RNA, 19 nt, Homo sapiens
  misc_RNA (1)...(19): siRNA sense strand
gagcaugauuuugaaguca

SEQ ID NO: 336013 - RNA, 19 nt, Homo sapiens
  misc_RNA (1)...(19): siRNA sense strand
gugacccagucuauuaaag

SEQ ID NO: 336014 - RNA, 19 nt, Homo sapiens
  misc_RNA (1)...(19): siRNA sense strand
agaacaaagcacaucagaa

SEQ ID NO: 336015 - RNA, 19 nt, Homo sapiens
  misc_RNA (1)...(19): siRNA sense strand
uggaagaaaccaccaaggu

SEQ ID NO: 336016 - RNA, 19 nt, Homo sapiens
  misc_RNA (1)...(19): siRNA sense strand
ucaacuggaauggauggua

SEQ ID NO: 336017 - RNA, 19 nt, Homo sapiens
  misc_RNA (1)...(19): siRNA sense strand
ggaaauggcugaacuagaa

SEQ ID NO: 336018 - RNA, 19 nt, Homo sapiens
  misc_RNA (1)...(19): siRNA sense strand
gaacaaagcacaucagaaa

SEQ ID NO: 336019 - RNA, 19 nt, Homo sapiens
  misc_RNA (1)...(19): siRNA sense strand
cagcuacccuuccaucaua

SEQ ID NO: 336020 - RNA, 19 nt, Homo sapiens
  misc_RNA (1)...(19): siRNA sense strand
gggauaccaugcaacauaa

SEQ ID NO: 336021 - RNA, 19 nt, Homo sapiens
  misc_RNA (1)...(19): siRNA sense strand
gcucagggcuauccucuca

SEQ ID NO: 336022 - RNA, 19 nt, Homo sapiens
  misc_RNA (1)...(19): siRNA sense strand
aaacaagcgucucugaaga

SEQ ID NO: 336023 - RNA, 19 nt, Homo sapiens
  misc_RNA (1)...(19): siRNA sense strand
caacauaaccugauaaagc

SEQ ID NO: 336024 - RNA, 19 nt, Homo sapiens
  misc_RNA (1)...(19): siRNA sense strand
gaaacaagcgucucugaag

SEQ ID NO: 336025 - RNA, 19 nt, Homo sapiens
  misc_RNA (1)...(19): siRNA sense strand
gcagagggauaccaugcaa

SEQ ID NO: 336026 - RNA, 19 nt, Homo sapiens
  misc_RNA (1)...(19): siRNA sense strand
ugaacuagaagcuguguua

SEQ ID NO: 336027 - RNA, 19 nt, Homo sapiens
  misc_RNA (1)...(19): siRNA sense strand
gaagacugcucagggcuau

SEQ ID NO: 336028 - RNA, 19 nt, Homo sapiens
  misc_RNA (1)...(19): siRNA sense strand
acuagaagcuguguuagaa

SEQ ID NO: 336029 - RNA, 19 nt, Homo sapiens
  misc_RNA (1)...(19): siRNA sense strand
caugcaacauaaccugaua

SEQ ID NO: 336030 - RNA, 19 nt, Homo sapiens
  misc_RNA (1)...(19): siRNA sense strand
gcaggaaauggcugaacua

SEQ ID NO: 336031 - RNA, 19 nt, Homo sapiens
  misc_RNA (1)...(19): siRNA sense strand
ucagggcuauccucucaga

SEQ ID NO: 336032 - RNA, 19 nt, Homo sapiens
  misc_RNA (1)...(19): siRNA sense strand
agggauaccaugcaacaua

SEQ ID NO: 336033 - RNA, 19 nt, Homo sapiens
  misc_RNA (1)...(19): siRNA sense strand
ugaaacaagcgucucugaa

SEQ ID NO: 336034 - RNA, 19 nt, Homo sapiens
  misc_RNA (1)...(19): siRNA sense strand
aacauaaccugauaaagcu

SEQ ID NO: 336035 - RNA, 19 nt, Homo sapiens
  misc_RNA (1)...(19): siRNA sense strand
gaacuagaagcuguguuag

SEQ ID NO: 336036 - RNA, 19 nt, Homo sapiens
  misc_RNA (1)...(19): siRNA sense strand
cagaacaaagcacaucaga

SEQ ID NO: 336037 - RNA, 19 nt, Homo sapiens
  misc_RNA (1)...(19): siRNA sense strand
gugaaacaagcgucucuga

SEQ ID NO: 336038 - RNA, 19 nt, Homo sapiens
  misc_RNA (1)...(19): siRNA sense strand
ccugcgaaauccagaacaa

SEQ ID NO: 336039 - RNA, 19 nt, Homo sapiens
  misc_RNA (1)...(19): siRNA sense strand
gauaaagcuccagcaggaa

SEQ ID NO: 336040 - RNA, 19 nt, Homo sapiens
  misc_RNA (1)...(19): siRNA sense strand
ggugugagagugaaacaag

SEQ ID NO: 336041 - RNA, 19 nt, Homo sapiens
  misc_RNA (1)...(19): siRNA sense strand
auaaagcuccagcaggaaa

SEQ ID NO: 336042 - RNA, 19 nt, Homo sapiens
  misc_RNA (1)...(19): siRNA sense strand
acccuuccaucauaaguga

SEQ ID NO: 336043 - RNA, 19 nt, Homo sapiens
  misc_RNA (1)...(19): siRNA sense strand
gaaauggcugaacuagaag

SEQ ID NO: 336044 - RNA, 19 nt, Homo sapiens
  misc_RNA (1)...(19): siRNA sense strand
caucugggugugagaguga

SEQ ID NO: 336045 - RNA, 19 nt, Homo sapiens
  misc_RNA (1)...(19): siRNA sense strand
cgaaauccagaacaaagca

SEQ ID NO: 336046 - RNA, 19 nt, Homo sapiens
  misc_RNA (1)...(19): siRNA sense strand
ggaccugcgaaauccagaa

SEQ ID NO: 336047 - RNA, 19 nt, Homo sapiens
  misc_RNA (1)...(19): siRNA sense strand
agaacaaagcacaucagaa

SEQ ID NO: 336048 - RNA, 19 nt, Homo sapiens
  misc_RNA (1)...(19): siRNA sense strand
ggaaauggcugaacuagaa

SEQ ID NO: 336049 - RNA, 19 nt, Homo sapiens
  misc_RNA (1)...(19): siRNA sense strand
gaacaaagcacaucagaaa

SEQ ID NO: 336050 - RNA, 19 nt, Homo sapiens
  misc_RNA (1)...(19): siRNA sense strand
cagcuacccuuccaucaua

SEQ ID NO: 336051 - RNA, 19 nt, Homo sapiens
  misc_RNA (1)...(19): siRNA sense strand
gggauaccaugcaacauaa

SEQ ID NO: 336052 - RNA, 19 nt, Homo sapiens
  misc_RNA (1)...(19): siRNA sense strand
gaggagauguggucaaugg

SEQ ID NO: 336053 - RNA, 19 nt, Homo sapiens
  misc_RNA (1)...(19): siRNA sense strand
gaaggagcuuucaucauuc

SEQ ID NO: 336054 - RNA, 19 nt, Homo sapiens
  misc_RNA (1)...(19): siRNA sense strand
cuagaaaucuguugcuaug

SEQ ID NO: 336055 - RNA, 19 nt, Homo sapiens
  misc_RNA (1)...(19): siRNA sense strand
gcucagggcuauccucuca

SEQ ID NO: 336056 - RNA, 19 nt, Homo sapiens
  misc_RNA (1)...(19): siRNA sense strand
aaacaagcgucucugaaga

SEQ ID NO: 336057 - RNA, 19 nt, Homo sapiens
  misc_RNA (1)...(19): siRNA sense strand
caacauaaccugauaaagc

SEQ ID NO: 336058 - RNA, 19 nt, Homo sapiens
  misc_RNA (1)...(19): siRNA sense strand
gaaacaagcgucucugaag

SEQ ID NO: 336059 - RNA, 19 nt, Homo sapiens
  misc_RNA (1)...(19): siRNA sense strand
gcagagggauaccaugcaa

SEQ ID NO: 336060 - RNA, 19 nt, Homo sapiens
  misc_RNA (1)...(19): siRNA sense strand
ugaacuagaagcuguguua

SEQ ID NO: 336061 - RNA, 19 nt, Homo sapiens
  misc_RNA (1)...(19): siRNA sense strand
gagaaucccaggacagaaa

SEQ ID NO: 336062 - RNA, 19 nt, Homo sapiens
  misc_RNA (1)...(19): siRNA sense strand
gcccacagaucaacuggaa

SEQ ID NO: 336063 - RNA, 19 nt, Homo sapiens
  misc_RNA (1)...(19): siRNA sense strand
gaagacugcucagggcuau

SEQ ID NO: 336064 - RNA, 19 nt, Homo sapiens
  misc_RNA (1)...(19): siRNA sense strand
gacccagucuauuaaagaa

SEQ ID NO: 336065 - RNA, 19 nt, Homo sapiens
  misc_RNA (1)...(19): siRNA sense strand
acuagaagcuguguuagaa

SEQ ID NO: 336066 - RNA, 19 nt, Homo sapiens
  misc_RNA (1)...(19): siRNA sense strand
caugcaacauaaccugaua

SEQ ID NO: 336067 - RNA, 19 nt, Homo sapiens
  misc_RNA (1)...(19): siRNA sense strand
gcuggacaccuaccugaua

SEQ ID NO: 336068 - RNA, 19 nt, Homo sapiens
  misc_RNA (1)...(19): siRNA sense strand
cagaucaacuggaauggau

SEQ ID NO: 336069 - RNA, 19 nt, Homo sapiens
  misc_RNA (1)...(19): siRNA sense strand
gcaggaaauggcugaacua

SEQ ID NO: 336070 - RNA, 19 nt, Homo sapiens
  misc_RNA (1)...(19): siRNA sense strand
ccacagaucaacuggaaug

SEQ ID NO: 336071 - RNA, 19 nt, Homo sapiens
  misc_RNA (1)...(19): siRNA sense strand
caacaugcccacagaucaa

SEQ ID NO: 336072 - RNA, 19 nt, Homo sapiens
  misc_RNA (1)...(19): siRNA sense strand
ucaccaacaugcccacaga

SEQ ID NO: 336073 - RNA, 19 nt, Homo sapiens
  misc_RNA (1)...(19): siRNA sense strand
cagaggagauguggucaau

SEQ ID NO: 336074 - RNA, 19 nt, Homo sapiens
  misc_RNA (1)...(19): siRNA sense strand
caauugggcagauguguga

SEQ ID NO: 336075 - RNA, 19 nt, Homo sapiens
  misc_RNA (1)...(19): siRNA sense strand
ggagauguggucaauggaa

SEQ ID NO: 336076 - RNA, 19 nt, Homo sapiens
  misc_RNA (1)...(19): siRNA sense strand
guacagcuguguggugcuu

SEQ ID NO: 336077 - RNA, 19 nt, Homo sapiens
  misc_RNA (1)...(19): siRNA sense strand
ccaaagcgagcaagagaau

SEQ ID NO: 336078 - RNA, 19 nt, Homo sapiens
  misc_RNA (1)...(19): siRNA sense strand
gcuaugggcccuucaccaa

SEQ ID NO: 336079 - RNA, 19 nt, Homo sapiens
  misc_RNA (1)...(19): siRNA sense strand
gaaugagcaugauuuugaa

SEQ ID NO: 336080 - RNA, 19 nt, Homo sapiens
  misc_RNA (1)...(19): siRNA sense strand
ucagggcuauccucucaga

SEQ ID NO: 336081 - RNA, 19 nt, Homo sapiens
  misc_RNA (1)...(19): siRNA sense strand
agggauaccaugcaacaua

SEQ ID NO: 336082 - RNA, 19 nt, Homo sapiens
  misc_RNA (1)...(19): siRNA sense strand
gcuagaaaucuguugcuau

SEQ ID NO: 336083 - RNA, 19 nt, Homo sapiens
  misc_RNA (1)...(19): siRNA sense strand
ugaaugagcaugauuuuga

SEQ ID NO: 336084 - RNA, 19 nt, Homo sapiens
  misc_RNA (1)...(19): siRNA sense strand
ggcuagaaaucuguugcua

SEQ ID NO: 336085 - RNA, 19 nt, Homo sapiens
  misc_RNA (1)...(19): siRNA sense strand
ugaaacaagcgucucugaa

SEQ ID NO: 336086 - RNA, 19 nt, Homo sapiens
  misc_RNA (1)...(19): siRNA sense strand
aacauaaccugauaaagcu

SEQ ID NO: 336087 - RNA, 19 nt, Homo sapiens
  misc_RNA (1)...(19): siRNA sense strand
ugacccagucuauuaaaga

SEQ ID NO: 336088 - RNA, 19 nt, Homo sapiens
  misc_RNA (1)...(19): siRNA sense strand
gaacuagaagcuguguuag

SEQ ID NO: 336089 - RNA, 19 nt, Homo sapiens
  misc_RNA (1)...(19): siRNA sense strand
gugaaacaagcgucucuga

SEQ ID NO: 336090 - RNA, 19 nt, Homo sapiens
  misc_RNA (1)...(19): siRNA sense strand
ccaacaugcccacagauca

SEQ ID NO: 336091 - RNA, 19 nt, Homo sapiens
  misc_RNA (1)...(19): siRNA sense strand
uaugggcccuucaccaaca

SEQ ID NO: 336092 - RNA, 19 nt, Homo sapiens
  misc_RNA (1)...(19): siRNA sense strand
guccaaagcgagcaagaga

SEQ ID NO: 336093 - RNA, 19 nt, Homo sapiens
  misc_RNA (1)...(19): siRNA sense strand
cagaacaaagcacaucaga

SEQ ID NO: 336094 - RNA, 19 nt, Homo sapiens
  misc_RNA (1)...(19): siRNA sense strand
ccugcgaaauccagaacaa

SEQ ID NO: 336095 - RNA, 19 nt, Homo sapiens
  misc_RNA (1)...(19): siRNA sense strand
gaaaccaccaagguccaaa

SEQ ID NO: 336096 - RNA, 19 nt, Homo sapiens
  misc_RNA (1)...(19): siRNA sense strand
gauaaagcuccagcaggaa

SEQ ID NO: 336097 - RNA, 19 nt, Homo sapiens
  misc_RNA (1)...(19): siRNA sense strand
aaggagcuuucaucauuca

SEQ ID NO: 336098 - RNA, 19 nt, Homo sapiens
  misc_RNA (1)...(19): siRNA sense strand
ggugugagagugaaacaag

SEQ ID NO: 336099 - RNA, 19 nt, Homo sapiens
  misc_RNA (1)...(19): siRNA sense strand
gaaauggcugaacuagaag

SEQ ID NO: 336100 - RNA, 19 nt, Homo sapiens
  misc_RNA (1)...(19): siRNA sense strand
auaaagcuccagcaggaaa

SEQ ID NO: 336101 - RNA, 19 nt, Homo sapiens
  misc_RNA (1)...(19): siRNA sense strand
acccuuccaucauaaguga

SEQ ID NO: 336102 - RNA, 19 nt, Homo sapiens
  misc_RNA (1)...(19): siRNA sense strand
ggugacccagucuauuaaa

SEQ ID NO: 336103 - RNA, 19 nt, Homo sapiens
  misc_RNA (1)...(19): siRNA sense strand
cccagucuauuaaagaaag

SEQ ID NO: 336104 - RNA, 19 nt, Homo sapiens
  misc_RNA (1)...(19): siRNA sense strand
caucugggugugagaguga

SEQ ID NO: 336105 - RNA, 19 nt, Homo sapiens
  misc_RNA (1)...(19): siRNA sense strand
ccagucuauuaaagaaaga

SEQ ID NO: 336106 - RNA, 19 nt, Homo sapiens
  misc_RNA (1)...(19): siRNA sense strand
cgaaauccagaacaaagca

SEQ ID NO: 336107 - RNA, 19 nt, Homo sapiens
  misc_RNA (1)...(19): siRNA sense strand
aagagaaucccaggacaga

SEQ ID NO: 336108 - RNA, 19 nt, Homo sapiens
  misc_RNA (1)...(19): siRNA sense strand
gauguggucaauggaagaa

SEQ ID NO: 336109 - RNA, 19 nt, Homo sapiens
  misc_RNA (1)...(19): siRNA sense strand
ggaccugcgaaauccagaa

SEQ ID NO: 336110 - RNA, 19 nt, Homo sapiens
  misc_RNA (1)...(19): siRNA sense strand
gagcaugauuuugaaguca

SEQ ID NO: 336111 - RNA, 19 nt, Homo sapiens
  misc_RNA (1)...(19): siRNA sense strand
gugacccagucuauuaaag

SEQ ID NO: 336112 - RNA, 19 nt, Homo sapiens
  misc_RNA (1)...(19): siRNA sense strand
agaacaaagcacaucagaa

SEQ ID NO: 336113 - RNA, 19 nt, Homo sapiens
  misc_RNA (1)...(19): siRNA sense strand
uggaagaaaccaccaaggu

SEQ ID NO: 336114 - RNA, 19 nt, Homo sapiens
  misc_RNA (1)...(19): siRNA sense strand
ucaacuggaauggauggua

SEQ ID NO: 336115 - RNA, 19 nt, Homo sapiens
  misc_RNA (1)...(19): siRNA sense strand
ggaaauggcugaacuagaa

SEQ ID NO: 336116 - RNA, 19 nt, Homo sapiens
  misc_RNA (1)...(19): siRNA sense strand
gaacaaagcacaucagaaa

SEQ ID NO: 336117 - RNA, 19 nt, Homo sapiens
  misc_RNA (1)...(19): siRNA sense strand
cagcuacccuuccaucaua

SEQ ID NO: 336118 - RNA, 19 nt, Homo sapiens
  misc_RNA (1)...(19): siRNA sense strand
gggauaccaugcaacauaa

SEQ ID NO: 336119 - RNA, 19 nt, Homo sapiens
  misc_RNA (1)...(19): siRNA sense strand
gaggagauguggucaaugg

SEQ ID NO: 336120 - RNA, 19 nt, Homo sapiens
  misc_RNA (1)...(19): siRNA sense strand
gaaggagcuuucaucauuc

SEQ ID NO: 336121 - RNA, 19 nt, Homo sapiens
  misc_RNA (1)...(19): siRNA sense strand
cuagaaaucuguugcuaug

SEQ ID NO: 336122 - RNA, 19 nt, Homo sapiens
  misc_RNA (1)...(19): siRNA sense strand
gcucagggcuauccucuca

SEQ ID NO: 336123 - RNA, 19 nt, Homo sapiens
  misc_RNA (1)...(19): siRNA sense strand
aaacaagcgucucugaaga

SEQ ID NO: 336124 - RNA, 19 nt, Homo sapiens
  misc_RNA (1)...(19): siRNA sense strand
caacauaaccugauaaagc

SEQ ID NO: 336125 - RNA, 19 nt, Homo sapiens
  misc_RNA (1)...(19): siRNA sense strand
gaaacaagcgucucugaag

SEQ ID NO: 336126 - RNA, 19 nt, Homo sapiens
  misc_RNA (1)...(19): siRNA sense strand
gcagagggauaccaugcaa

SEQ ID NO: 336127 - RNA, 19 nt, Homo sapiens
  misc_RNA (1)...(19): siRNA sense strand
ugaacuagaagcuguguua

SEQ ID NO: 336128 - RNA, 19 nt, Homo sapiens
  misc_RNA (1)...(19): siRNA sense strand
gagaaucccaggacagaaa

SEQ ID NO: 336129 - RNA, 19 nt, Homo sapiens
  misc_RNA (1)...(19): siRNA sense strand
gcccacagaucaacuggaa

SEQ ID NO: 336130 - RNA, 19 nt, Homo sapiens
  misc_RNA (1)...(19): siRNA sense strand
gaagacugcucagggcuau

SEQ ID NO: 336131 - RNA, 19 nt, Homo sapiens
  misc_RNA (1)...(19): siRNA sense strand
gacccagucuauuaaagaa

SEQ ID NO: 336132 - RNA, 19 nt, Homo sapiens
  misc_RNA (1)...(19): siRNA sense strand
acuagaagcuguguuagaa

SEQ ID NO: 336133 - RNA, 19 nt, Homo sapiens
  misc_RNA (1)...(19): siRNA sense strand
caugcaacauaaccugaua

SEQ ID NO: 336134 - RNA, 19 nt, Homo sapiens
  misc_RNA (1)...(19): siRNA sense strand
gcuggacaccuaccugaua

SEQ ID NO: 336135 - RNA, 19 nt, Homo sapiens
  misc_RNA (1)...(19): siRNA sense strand
cagaucaacuggaauggau

SEQ ID NO: 336136 - RNA, 19 nt, Homo sapiens
  misc_RNA (1)...(19): siRNA sense strand
gcaggaaauggcugaacua

SEQ ID NO: 336137 - RNA, 19 nt, Homo sapiens
  misc_RNA (1)...(19): siRNA sense strand
ccacagaucaacuggaaug

SEQ ID NO: 336138 - RNA, 19 nt, Homo sapiens
  misc_RNA (1)...(19): siRNA sense strand
caacaugcccacagaucaa

SEQ ID NO: 336139 - RNA, 19 nt, Homo sapiens
  misc_RNA (1)...(19): siRNA sense strand
ucaccaacaugcccacaga

SEQ ID NO: 336140 - RNA, 19 nt, Homo sapiens
  misc_RNA (1)...(19): siRNA sense strand
cagaggagauguggucaau

SEQ ID NO: 336141 - RNA, 19 nt, Homo sapiens
  misc_RNA (1)...(19): siRNA sense strand
caauugggcagauguguga

SEQ ID NO: 336142 - RNA, 19 nt, Homo sapiens
  misc_RNA (1)...(19): siRNA sense strand
ggagauguggucaauggaa

SEQ ID NO: 336143 - RNA, 19 nt, Homo sapiens
  misc_RNA (1)...(19): siRNA sense strand
guacagcuguguggugcuu

SEQ ID NO: 336144 - RNA, 19 nt, Homo sapiens
  misc_RNA (1)...(19): siRNA sense strand
ccaaagcgagcaagagaau

SEQ ID NO: 336145 - RNA, 19 nt, Homo sapiens
  misc_RNA (1)...(19): siRNA sense strand
gcuaugggcccuucaccaa

SEQ ID NO: 336146 - RNA, 19 nt, Homo sapiens
  misc_RNA (1)...(19): siRNA sense strand
gaaugagcaugauuuugaa

SEQ ID NO: 336147 - RNA, 19 nt, Homo sapiens
  misc_RNA (1)...(19): siRNA sense strand
ucagggcuauccucucaga

SEQ ID NO: 336148 - RNA, 19 nt, Homo sapiens
  misc_RNA (1)...(19): siRNA sense strand
agggauaccaugcaacaua

SEQ ID NO: 336149 - RNA, 19 nt, Homo sapiens
  misc_RNA (1)...(19): siRNA sense strand
gcuagaaaucuguugcuau

SEQ ID NO: 336150 - RNA, 19 nt, Homo sapiens
  misc_RNA (1)...(19): siRNA sense strand
ugaaugagcaugauuuuga

SEQ ID NO: 336151 - RNA, 19 nt, Homo sapiens
  misc_RNA (1)...(19): siRNA sense strand
ggcuagaaaucuguugcua

SEQ ID NO: 336152 - RNA, 19 nt, Homo sapiens
  misc_RNA (1)...(19): siRNA sense strand
ugaaacaagcgucucugaa

SEQ ID NO: 336153 - RNA, 19 nt, Homo sapiens
  misc_RNA (1)...(19): siRNA sense strand
aacauaaccugauaaagcu

SEQ ID NO: 336154 - RNA, 19 nt, Homo sapiens
  misc_RNA (1)...(19): siRNA sense strand
ugacccagucuauuaaaga

SEQ ID NO: 336155 - RNA, 19 nt, Homo sapiens
  misc_RNA (1)...(19): siRNA sense strand
gaacuagaagcuguguuag

SEQ ID NO: 336156 - RNA, 19 nt, Homo sapiens
  misc_RNA (1)...(19): siRNA sense strand
gugaaacaagcgucucuga

SEQ ID NO: 336157 - RNA, 19 nt, Homo sapiens
  misc_RNA (1)...(19): siRNA sense strand
ccaacaugcccacagauca

SEQ ID NO: 336158 - RNA, 19 nt, Homo sapiens
  misc_RNA (1)...(19): siRNA sense strand
uaugggcccuucaccaaca

SEQ ID NO: 336159 - RNA, 19 nt, Homo sapiens
  misc_RNA (1)...(19): siRNA sense strand
guccaaagcgagcaagaga

SEQ ID NO: 336160 - RNA, 19 nt, Homo sapiens
  misc_RNA (1)...(19): siRNA sense strand
cagaacaaagcacaucaga

SEQ ID NO: 336161 - RNA, 19 nt, Homo sapiens
  misc_RNA (1)...(19): siRNA sense strand
ccugcgaaauccagaacaa

SEQ ID NO: 336162 - RNA, 19 nt, Homo sapiens
  misc_RNA (1)...(19): siRNA sense strand
gaaaccaccaagguccaaa

SEQ ID NO: 336163 - RNA, 19 nt, Homo sapiens
  misc_RNA (1)...(19): siRNA sense strand
gauaaagcuccagcaggaa

SEQ ID NO: 336164 - RNA, 19 nt, Homo sapiens
  misc_RNA (1)...(19): siRNA sense strand
aaggagcuuucaucauuca

SEQ ID NO: 336165 - RNA, 19 nt, Homo sapiens
  misc_RNA (1)...(19): siRNA sense strand
ggugugagagugaaacaag

SEQ ID NO: 336166 - RNA, 19 nt, Homo sapiens
  misc_RNA (1)...(19): siRNA sense strand
gaaauggcugaacuagaag

SEQ ID NO: 336167 - RNA, 19 nt, Homo sapiens
  misc_RNA (1)...(19): siRNA sense strand
auaaagcuccagcaggaaa

SEQ ID NO: 336168 - RNA, 19 nt, Homo sapiens
  misc_RNA (1)...(19): siRNA sense strand
acccuuccaucauaaguga

SEQ ID NO: 336169 - RNA, 19 nt, Homo sapiens
  misc_RNA (1)...(19): siRNA sense strand
ggugacccagucuauuaaa

SEQ ID NO: 336170 - RNA, 19 nt, Homo sapiens
  misc_RNA (1)...(19): siRNA sense strand
cccagucuauuaaagaaag

SEQ ID NO: 336171 - RNA, 19 nt, Homo sapiens
  misc_RNA (1)...(19): siRNA sense strand
caucugggugugagaguga

SEQ ID NO: 336172 - RNA, 19 nt, Homo sapiens
  misc_RNA (1)...(19): siRNA sense strand
ccagucuauuaaagaaaga

SEQ ID NO: 336173 - RNA, 19 nt, Homo sapiens
  misc_RNA (1)...(19): siRNA sense strand
cgaaauccagaacaaagca

SEQ ID NO: 336174 - RNA, 19 nt, Homo sapiens
  misc_RNA (1)...(19): siRNA sense strand
aagagaaucccaggacaga

SEQ ID NO: 336175 - RNA, 19 nt, Homo sapiens
  misc_RNA (1)...(19): siRNA sense strand
gauguggucaauggaagaa

SEQ ID NO: 336176 - RNA, 19 nt, Homo sapiens
  misc_RNA (1)...(19): siRNA sense strand
ggaccugcgaaauccagaa

SEQ ID NO: 336177 - RNA, 19 nt, Homo sapiens
  misc_RNA (1)...(19): siRNA sense strand
gagcaugauuuugaaguca

SEQ ID NO: 336178 - RNA, 19 nt, Homo sapiens
  misc_RNA (1)...(19): siRNA sense strand
gugacccagucuauuaaag

SEQ ID NO: 336179 - RNA, 19 nt, Homo sapiens
  misc_RNA (1)...(19): siRNA sense strand
agaacaaagcacaucagaa

SEQ ID NO: 336180 - RNA, 19 nt, Homo sapiens
  misc_RNA (1)...(19): siRNA sense strand
uggaagaaaccaccaaggu

SEQ ID NO: 336181 - RNA, 19 nt, Homo sapiens
  misc_RNA (1)...(19): siRNA sense strand
ucaacuggaauggauggua

SEQ ID NO: 336182 - RNA, 19 nt, Homo sapiens
  misc_RNA (1)...(19): siRNA sense strand
ggaaauggcugaacuagaa

SEQ ID NO: 336183 - RNA, 19 nt, Homo sapiens
  misc_RNA (1)...(19): siRNA sense strand
gaacaaagcacaucagaaa

SEQ ID NO: 336184 - RNA, 19 nt, Homo sapiens
  misc_RNA (1)...(19): siRNA sense strand
cagcuacccuuccaucaua

SEQ ID NO: 336185 - RNA, 19 nt, Homo sapiens
  misc_RNA (1)...(19): siRNA sense strand
gggauaccaugcaacauaa

SEQ ID NO: 336186 - RNA, 19 nt, Homo sapiens
  misc_RNA (1)...(19): siRNA sense strand
gaggagauguggucaaugg

SEQ ID NO: 336187 - RNA, 19 nt, Homo sapiens
  misc_RNA (1)...(19): siRNA sense strand
gaaggagcuuucaucauuc

SEQ ID NO: 336188 - RNA, 19 nt, Homo sapiens
  misc_RNA (1)...(19): siRNA sense strand
cuagaaaucuguugcuaug

SEQ ID NO: 336189 - RNA, 19 nt, Homo sapiens
  misc_RNA (1)...(19): siRNA sense strand
gcucagggcuauccucuca

SEQ ID NO: 336190 - RNA, 19 nt, Homo sapiens
  misc_RNA (1)...(19): siRNA sense strand
aaacaagcgucucugaaga

SEQ ID NO: 336191 - RNA, 19 nt, Homo sapiens
  misc_RNA (1)...(19): siRNA sense strand
caacauaaccugauaaagc

SEQ ID NO: 336192 - RNA, 19 nt, Homo sapiens
  misc_RNA (1)...(19): siRNA sense strand
gaaacaagcgucucugaag

SEQ ID NO: 336193 - RNA, 19 nt, Homo sapiens
  misc_RNA (1)...(19): siRNA sense strand
gcagagggauaccaugcaa

SEQ ID NO: 336194 - RNA, 19 nt, Homo sapiens
  misc_RNA (1)...(19): siRNA sense strand
ugaacuagaagcuguguua

SEQ ID NO: 336195 - RNA, 19 nt, Homo sapiens
  misc_RNA (1)...(19): siRNA sense strand
gagaaucccaggacagaaa

SEQ ID NO: 336196 - RNA, 19 nt, Homo sapiens
  misc_RNA (1)...(19): siRNA sense strand
gcccacagaucaacuggaa

SEQ ID NO: 336197 - RNA, 19 nt, Homo sapiens
  misc_RNA (1)...(19): siRNA sense strand
gaagacugcucagggcuau

SEQ ID NO: 336198 - RNA, 19 nt, Homo sapiens
  misc_RNA (1)...(19): siRNA sense strand
gacccagucuauuaaagaa

SEQ ID NO: 336199 - RNA, 19 nt, Homo sapiens
  misc_RNA (1)...(19): siRNA sense strand
acuagaagcuguguuagaa

SEQ ID NO: 336200 - RNA, 19 nt, Homo sapiens
  misc_RNA (1)...(19): siRNA sense strand
caugcaacauaaccugaua

SEQ ID NO: 336201 - RNA, 19 nt, Homo sapiens
  misc_RNA (1)...(19): siRNA sense strand
gcuggacaccuaccugaua

SEQ ID NO: 336202 - RNA, 19 nt, Homo sapiens
  misc_RNA (1)...(19): siRNA sense strand
cagaucaacuggaauggau

SEQ ID NO: 336203 - RNA, 19 nt, Homo sapiens
  misc_RNA (1)...(19): siRNA sense strand
gcaggaaauggcugaacua

SEQ ID NO: 336204 - RNA, 19 nt, Homo sapiens
  misc_RNA (1)...(19): siRNA sense strand
ccacagaucaacuggaaug

SEQ ID NO: 336205 - RNA, 19 nt, Homo sapiens
  misc_RNA (1)...(19): siRNA sense strand
caacaugcccacagaucaa

SEQ ID NO: 336206 - RNA, 19 nt, Homo sapiens
  misc_RNA (1)...(19): siRNA sense strand
ucaccaacaugcccacaga

SEQ ID NO: 336207 - RNA, 19 nt, Homo sapiens
  misc_RNA (1)...(19): siRNA sense strand
cagaggagauguggucaau

SEQ ID NO: 336208 - RNA, 19 nt, Homo sapiens
  misc_RNA (1)...(19): siRNA sense strand
caauugggcagauguguga

SEQ ID NO: 336209 - RNA, 19 nt, Homo sapiens
  misc_RNA (1)...(19): siRNA sense strand
ggagauguggucaauggaa

SEQ ID NO: 336210 - RNA, 19 nt, Homo sapiens
  misc_RNA (1)...(19): siRNA sense strand
guacagcuguguggugcuu

SEQ ID NO: 336211 - RNA, 19 nt, Homo sapiens
  misc_RNA (1)...(19): siRNA sense strand
ccaaagcgagcaagagaau

SEQ ID NO: 336212 - RNA, 19 nt, Homo sapiens
  misc_RNA (1)...(19): siRNA sense strand
gcuaugggcccuucaccaa

SEQ ID NO: 336213 - RNA, 19 nt, Homo sapiens
  misc_RNA (1)...(19): siRNA sense strand
gaaugagcaugauuuugaa

SEQ ID NO: 336214 - RNA, 19 nt, Homo sapiens
  misc_RNA (1)...(19): siRNA sense strand
ucagggcuauccucucaga

SEQ ID NO: 336215 - RNA, 19 nt, Homo sapiens
  misc_RNA (1)...(19): siRNA sense strand
agggauaccaugcaacaua

SEQ ID NO: 336216 - RNA, 19 nt, Homo sapiens
  misc_RNA (1)...(19): siRNA sense strand
gcuagaaaucuguugcuau

SEQ ID NO: 336217 - RNA, 19 nt, Homo sapiens
  misc_RNA (1)...(19): siRNA sense strand
ugaaugagcaugauuuuga

SEQ ID NO: 336218 - RNA, 19 nt, Homo sapiens
  misc_RNA (1)...(19): siRNA sense strand
ggcuagaaaucuguugcua

SEQ ID NO: 336219 - RNA, 19 nt, Homo sapiens
  misc_RNA (1)...(19): siRNA sense strand
ugaaacaagcgucucugaa

SEQ ID NO: 336220 - RNA, 19 nt, Homo sapiens
  misc_RNA (1)...(19): siRNA sense strand
aacauaaccugauaaagcu

SEQ ID NO: 336221 - RNA, 19 nt, Homo sapiens
  misc_RNA (1)...(19): siRNA sense strand
ugacccagucuauuaaaga

SEQ ID NO: 336222 - RNA, 19 nt, Homo sapiens
  misc_RNA (1)...(19): siRNA sense strand
gaacuagaagcuguguuag

SEQ ID NO: 336223 - RNA, 19 nt, Homo sapiens
  misc_RNA (1)...(19): siRNA sense strand
gugaaacaagcgucucuga

SEQ ID NO: 336224 - RNA, 19 nt, Homo sapiens
  misc_RNA (1)...(19): siRNA sense strand
ccaacaugcccacagauca

SEQ ID NO: 336225 - RNA, 19 nt, Homo sapiens
  misc_RNA (1)...(19): siRNA sense strand
uaugggcccuucaccaaca

SEQ ID NO: 336226 - RNA, 19 nt, Homo sapiens
  misc_RNA (1)...(19): siRNA sense strand
guccaaagcgagcaagaga

SEQ ID NO: 336227 - RNA, 19 nt, Homo sapiens
  misc_RNA (1)...(19): siRNA sense strand
cagaacaaagcacaucaga

SEQ ID NO: 336228 - RNA, 19 nt, Homo sapiens
  misc_RNA (1)...(19): siRNA sense strand
ccugcgaaauccagaacaa

SEQ ID NO: 336229 - RNA, 19 nt, Homo sapiens
  misc_RNA (1)...(19): siRNA sense strand
gaaaccaccaagguccaaa

SEQ ID NO: 336230 - RNA, 19 nt, Homo sapiens
  misc_RNA (1)...(19): siRNA sense strand
gauaaagcuccagcaggaa

SEQ ID NO: 336231 - RNA, 19 nt, Homo sapiens
  misc_RNA (1)...(19): siRNA sense strand
aaggagcuuucaucauuca

SEQ ID NO: 336232 - RNA, 19 nt, Homo sapiens
  misc_RNA (1)...(19): siRNA sense strand
ggugugagagugaaacaag

SEQ ID NO: 336233 - RNA, 19 nt, Homo sapiens
  misc_RNA (1)...(19): siRNA sense strand
gaaauggcugaacuagaag

SEQ ID NO: 336234 - RNA, 19 nt, Homo sapiens
  misc_RNA (1)...(19): siRNA sense strand
auaaagcuccagcaggaaa

SEQ ID NO: 336235 - RNA, 19 nt, Homo sapiens
  misc_RNA (1)...(19): siRNA sense strand
acccuuccaucauaaguga

SEQ ID NO: 336236 - RNA, 19 nt, Homo sapiens
  misc_RNA (1)...(19): siRNA sense strand
ggugacccagucuauuaaa

SEQ ID NO: 336237 - RNA, 19 nt, Homo sapiens
  misc_RNA (1)...(19): siRNA sense strand
cccagucuauuaaagaaag

SEQ ID NO: 336238 - RNA, 19 nt, Homo sapiens
  misc_RNA (1)...(19): siRNA sense strand
caucugggugugagaguga

SEQ ID NO: 336239 - RNA, 19 nt, Homo sapiens
  misc_RNA (1)...(19): siRNA sense strand
ccagucuauuaaagaaaga

SEQ ID NO: 336240 - RNA, 19 nt, Homo sapiens
  misc_RNA (1)...(19): siRNA sense strand
cgaaauccagaacaaagca

SEQ ID NO: 336241 - RNA, 19 nt, Homo sapiens
  misc_RNA (1)...(19): siRNA sense strand
aagagaaucccaggacaga

SEQ ID NO: 336242 - RNA, 19 nt, Homo sapiens
  misc_RNA (1)...(19): siRNA sense strand
gauguggucaauggaagaa

SEQ ID NO: 336243 - RNA, 19 nt, Homo sapiens
  misc_RNA (1)...(19): siRNA sense strand
ggaccugcgaaauccagaa

SEQ ID NO: 336244 - RNA, 19 nt, Homo sapiens
  misc_RNA (1)...(19): siRNA sense strand
gagcaugauuuugaaguca

SEQ ID NO: 336245 - RNA, 19 nt, Homo sapiens
  misc_RNA (1)...(19): siRNA sense strand
gugacccagucuauuaaag

SEQ ID NO: 336246 - RNA, 19 nt, Homo sapiens
  misc_RNA (1)...(19): siRNA sense strand
agaacaaagcacaucagaa

SEQ ID NO: 336247 - RNA, 19 nt, Homo sapiens
  misc_RNA (1)...(19): siRNA sense strand
uggaagaaaccaccaaggu

SEQ ID NO: 336248 - RNA, 19 nt, Homo sapiens
  misc_RNA (1)...(19): siRNA sense strand
ucaacuggaauggauggua

SEQ ID NO: 336249 - RNA, 19 nt, Homo sapiens
  misc_RNA (1)...(19): siRNA sense strand
ggaaauggcugaacuagaa

SEQ ID NO: 336250 - RNA, 19 nt, Homo sapiens
  misc_RNA (1)...(19): siRNA sense strand
gaacaaagcacaucagaaa

SEQ ID NO: 336251 - RNA, 19 nt, Homo sapiens
  misc_RNA (1)...(19): siRNA sense strand
cagcuacccuuccaucaua

SEQ ID NO: 336252 - RNA, 19 nt, Homo sapiens
  misc_RNA (1)...(19): siRNA sense strand
gggauaccaugcaacauaa

SEQ ID NO: 336253 - RNA, 19 nt, Homo sapiens
  misc_RNA (1)...(19): siRNA sense strand
gaggagauguggucaaugg

SEQ ID NO: 336254 - RNA, 19 nt, Homo sapiens
  misc_RNA (1)...(19): siRNA sense strand
gaaggagcuuucaucauuc

SEQ ID NO: 336255 - RNA, 19 nt, Homo sapiens
  misc_RNA (1)...(19): siRNA sense strand
cuagaaaucuguugcuaug

SEQ ID NO: 336256 - RNA, 19 nt, Homo sapiens
  misc_RNA (1)...(19): siRNA sense strand
gcucagggcuauccucuca

SEQ ID NO: 336257 - RNA, 19 nt, Homo sapiens
  misc_RNA (1)...(19): siRNA sense strand
aaacaagcgucucugaaga

SEQ ID NO: 336258 - RNA, 19 nt, Homo sapiens
  misc_RNA (1)...(19): siRNA sense strand
caacauaaccugauaaagc

SEQ ID NO: 336259 - RNA, 19 nt, Homo sapiens
  misc_RNA (1)...(19): siRNA sense strand
gaaacaagcgucucugaag

SEQ ID NO: 336260 - RNA, 19 nt, Homo sapiens
  misc_RNA (1)...(19): siRNA sense strand
gcagagggauaccaugcaa

SEQ ID NO: 336261 - RNA, 19 nt, Homo sapiens
  misc_RNA (1)...(19): siRNA sense strand
ugaacuagaagcuguguua

SEQ ID NO: 336262 - RNA, 19 nt, Homo sapiens
  misc_RNA (1)...(19): siRNA sense strand
gagaaucccaggacagaaa

SEQ ID NO: 336263 - RNA, 19 nt, Homo sapiens
  misc_RNA (1)...(19): siRNA sense strand
gcccacagaucaacuggaa

SEQ ID NO: 336264 - RNA, 19 nt, Homo sapiens
  misc_RNA (1)...(19): siRNA sense strand
gaagacugcucagggcuau

SEQ ID NO: 336265 - RNA, 19 nt, Homo sapiens
  misc_RNA (1)...(19): siRNA sense strand
gacccagucuauuaaagaa

SEQ ID NO: 336266 - RNA, 19 nt, Homo sapiens
  misc_RNA (1)...(19): siRNA sense strand
acuagaagcuguguuagaa

SEQ ID NO: 336267 - RNA, 19 nt, Homo sapiens
  misc_RNA (1)...(19): siRNA sense strand
caugcaacauaaccugaua

SEQ ID NO: 336268 - RNA, 19 nt, Homo sapiens
  misc_RNA (1)...(19): siRNA sense strand
gcuggacaccuaccugaua

SEQ ID NO: 336269 - RNA, 19 nt, Homo sapiens
  misc_RNA (1)...(19): siRNA sense strand
cagaucaacuggaauggau

SEQ ID NO: 336270 - RNA, 19 nt, Homo sapiens
  misc_RNA (1)...(19): siRNA sense strand
gcaggaaauggcugaacua

SEQ ID NO: 336271 - RNA, 19 nt, Homo sapiens
  misc_RNA (1)...(19): siRNA sense strand
ccacagaucaacuggaaug

SEQ ID NO: 336272 - RNA, 19 nt, Homo sapiens
  misc_RNA (1)...(19): siRNA sense strand
caacaugcccacagaucaa

SEQ ID NO: 336273 - RNA, 19 nt, Homo sapiens
  misc_RNA (1)...(19): siRNA sense strand
ucaccaacaugcccacaga

SEQ ID NO: 336274 - RNA, 19 nt, Homo sapiens
  misc_RNA (1)...(19): siRNA sense strand
cagaggagauguggucaau

SEQ ID NO: 336275 - RNA, 19 nt, Homo sapiens
  misc_RNA (1)...(19): siRNA sense strand
caauugggcagauguguga

SEQ ID NO: 336276 - RNA, 19 nt, Homo sapiens
  misc_RNA (1)...(19): siRNA sense strand
ggagauguggucaauggaa

SEQ ID NO: 336277 - RNA, 19 nt, Homo sapiens
  misc_RNA (1)...(19): siRNA sense strand
guacagcuguguggugcuu

SEQ ID NO: 336278 - RNA, 19 nt, Homo sapiens
  misc_RNA (1)...(19): siRNA sense strand
ccaaagcgagcaagagaau

SEQ ID NO: 336279 - RNA, 19 nt, Homo sapiens
  misc_RNA (1)...(19): siRNA sense strand
gcuaugggcccuucaccaa

SEQ ID NO: 336280 - RNA, 19 nt, Homo sapiens
  misc_RNA (1)...(19): siRNA sense strand
gaaugagcaugauuuugaa

SEQ ID NO: 336281 - RNA, 19 nt, Homo sapiens
  misc_RNA (1)...(19): siRNA sense strand
ucagggcuauccucucaga

SEQ ID NO: 336282 - RNA, 19 nt, Homo sapiens
  misc_RNA (1)...(19): siRNA sense strand
agggauaccaugcaacaua

SEQ ID NO: 336283 - RNA, 19 nt, Homo sapiens
  misc_RNA (1)...(19): siRNA sense strand
gcuagaaaucuguugcuau

SEQ ID NO: 336284 - RNA, 19 nt, Homo sapiens
  misc_RNA (1)...(19): siRNA sense strand
ugaaugagcaugauuuuga

SEQ ID NO: 336285 - RNA, 19 nt, Homo sapiens
  misc_RNA (1)...(19): siRNA sense strand
ggcuagaaaucuguugcua

SEQ ID NO: 336286 - RNA, 19 nt, Homo sapiens
  misc_RNA (1)...(19): siRNA sense strand
ugaaacaagcgucucugaa

SEQ ID NO: 336287 - RNA, 19 nt, Homo sapiens
  misc_RNA (1)...(19): siRNA sense strand
aacauaaccugauaaagcu

SEQ ID NO: 336288 - RNA, 19 nt, Homo sapiens
  misc_RNA (1)...(19): siRNA sense strand
ugacccagucuauuaaaga

SEQ ID NO: 336289 - RNA, 19 nt, Homo sapiens
  misc_RNA (1)...(19): siRNA sense strand
gaacuagaagcuguguuag

SEQ ID NO: 336290 - RNA, 19 nt, Homo sapiens
  misc_RNA (1)...(19): siRNA sense strand
gugaaacaagcgucucuga

SEQ ID NO: 336291 - RNA, 19 nt, Homo sapiens
  misc_RNA (1)...(19): siRNA sense strand
ccaacaugcccacagauca

SEQ ID NO: 336292 - RNA, 19 nt, Homo sapiens
  misc_RNA (1)...(19): siRNA sense strand
uaugggcccuucaccaaca

SEQ ID NO: 336293 - RNA, 19 nt, Homo sapiens
  misc_RNA (1)...(19): siRNA sense strand
guccaaagcgagcaagaga

SEQ ID NO: 336294 - RNA, 19 nt, Homo sapiens
  misc_RNA (1)...(19): siRNA sense strand
cagaacaaagcacaucaga

SEQ ID NO: 336295 - RNA, 19 nt, Homo sapiens
  misc_RNA (1)...(19): siRNA sense strand
ccugcgaaauccagaacaa

SEQ ID NO: 336296 - RNA, 19 nt, Homo sapiens
  misc_RNA (1)...(19): siRNA sense strand
gaaaccaccaagguccaaa

SEQ ID NO: 336297 - RNA, 19 nt, Homo sapiens
  misc_RNA (1)...(19): siRNA sense strand
gauaaagcuccagcaggaa

SEQ ID NO: 336298 - RNA, 19 nt, Homo sapiens
  misc_RNA (1)...(19): siRNA sense strand
aaggagcuuucaucauuca

SEQ ID NO: 336299 - RNA, 19 nt, Homo sapiens
  misc_RNA (1)...(19): siRNA sense strand
ggugugagagugaaacaag

SEQ ID NO: 336300 - RNA, 19 nt, Homo sapiens
  misc_RNA (1)...(19): siRNA sense strand
gaaauggcugaacuagaag

SEQ ID NO: 336301 - RNA, 19 nt, Homo sapiens
  misc_RNA (1)...(19): siRNA sense strand
auaaagcuccagcaggaaa

SEQ ID NO: 336302 - RNA, 19 nt, Homo sapiens
  misc_RNA (1)...(19): siRNA sense strand
acccuuccaucauaaguga

SEQ ID NO: 336303 - RNA, 19 nt, Homo sapiens
  misc_RNA (1)...(19): siRNA sense strand
ggugacccagucuauuaaa

SEQ ID NO: 336304 - RNA, 19 nt, Homo sapiens
  misc_RNA (1)...(19): siRNA sense strand
cccagucuauuaaagaaag

SEQ ID NO: 336305 - RNA, 19 nt, Homo sapiens
  misc_RNA (1)...(19): siRNA sense strand
caucugggugugagaguga

SEQ ID NO: 336306 - RNA, 19 nt, Homo sapiens
  misc_RNA (1)...(19): siRNA sense strand
ccagucuauuaaagaaaga

SEQ ID NO: 336307 - RNA, 19 nt, Homo sapiens
  misc_RNA (1)...(19): siRNA sense strand
cgaaauccagaacaaagca

SEQ ID NO: 336308 - RNA, 19 nt, Homo sapiens
  misc_RNA (1)...(19): siRNA sense strand
aagagaaucccaggacaga

SEQ ID NO: 336309 - RNA, 19 nt, Homo sapiens
  misc_RNA (1)...(19): siRNA sense strand
gauguggucaauggaagaa

SEQ ID NO: 336310 - RNA, 19 nt, Homo sapiens
  misc_RNA (1)...(19): siRNA sense strand
ggaccugcgaaauccagaa

SEQ ID NO: 336311 - RNA, 19 nt, Homo sapiens
  misc_RNA (1)...(19): siRNA sense strand
gagcaugauuuugaaguca

SEQ ID NO: 336312 - RNA, 19 nt, Homo sapiens
  misc_RNA (1)...(19): siRNA sense strand
gugacccagucuauuaaag

SEQ ID NO: 336313 - RNA, 19 nt, Homo sapiens
  misc_RNA (1)...(19): siRNA sense strand
agaacaaagcacaucagaa

SEQ ID NO: 336314 - RNA, 19 nt, Homo sapiens
  misc_RNA (1)...(19): siRNA sense strand
uggaagaaaccaccaaggu

SEQ ID NO: 336315 - RNA, 19 nt, Homo sapiens
  misc_RNA (1)...(19): siRNA sense strand
ucaacuggaauggauggua

SEQ ID NO: 336316 - RNA, 19 nt, Homo sapiens
  misc_RNA (1)...(19): siRNA sense strand
ggaaauggcugaacuagaa

SEQ ID NO: 336317 - RNA, 19 nt, Homo sapiens
  misc_RNA (1)...(19): siRNA sense strand
gaacaaagcacaucagaaa

SEQ ID NO: 336318 - RNA, 19 nt, Homo sapiens
  misc_RNA (1)...(19): siRNA sense strand
cagcuacccuuccaucaua

SEQ ID NO: 336319 - RNA, 19 nt, Homo sapiens
  misc_RNA (1)...(19): siRNA sense strand
gggauaccaugcaacauaa

SEQ ID NO: 336320 - RNA, 19 nt, Homo sapiens
  misc_RNA (1)...(19): siRNA sense strand
gaggagauguggucaaugg

SEQ ID NO: 336321 - RNA, 19 nt, Homo sapiens
  misc_RNA (1)...(19): siRNA sense strand
gaaggagcuuucaucauuc

SEQ ID NO: 336322 - RNA, 19 nt, Homo sapiens
  misc_RNA (1)...(19): siRNA sense strand
cuagaaaucuguugcuaug

SEQ ID NO: 336323 - RNA, 19 nt, Homo sapiens
  misc_RNA (1)...(19): siRNA sense strand
gcucagggcuauccucuca

SEQ ID NO: 336324 - RNA, 19 nt, Homo sapiens
  misc_RNA (1)...(19): siRNA sense strand
aaacaagcgucucugaaga

SEQ ID NO: 336325 - RNA, 19 nt, Homo sapiens
  misc_RNA (1)...(19): siRNA sense strand
caacauaaccugauaaagc

SEQ ID NO: 336326 - RNA, 19 nt, Homo sapiens
  misc_RNA (1)...(19): siRNA sense strand
gaaacaagcgucucugaag

SEQ ID NO: 336327 - RNA, 19 nt, Homo sapiens
  misc_RNA (1)...(19): siRNA sense strand
gcagagggauaccaugcaa

SEQ ID NO: 336328 - RNA, 19 nt, Homo sapiens
  misc_RNA (1)...(19): siRNA sense strand
ugaacuagaagcuguguua

SEQ ID NO: 336329 - RNA, 19 nt, Homo sapiens
  misc_RNA (1)...(19): siRNA sense strand
gagaaucccaggacagaaa

SEQ ID NO: 336330 - RNA, 19 nt, Homo sapiens
  misc_RNA (1)...(19): siRNA sense strand
gcccacagaucaacuggaa

SEQ ID NO: 336331 - RNA, 19 nt, Homo sapiens
  misc_RNA (1)...(19): siRNA sense strand
gaagacugcucagggcuau

SEQ ID NO: 336332 - RNA, 19 nt, Homo sapiens
  misc_RNA (1)...(19): siRNA sense strand
gacccagucuauuaaagaa

SEQ ID NO: 336333 - RNA, 19 nt, Homo sapiens
  misc_RNA (1)...(19): siRNA sense strand
acuagaagcuguguuagaa

SEQ ID NO: 336334 - RNA, 19 nt, Homo sapiens
  misc_RNA (1)...(19): siRNA sense strand
caugcaacauaaccugaua

SEQ ID NO: 336335 - RNA, 19 nt, Homo sapiens
  misc_RNA (1)...(19): siRNA sense strand
gcuggacaccuaccugaua

SEQ ID NO: 336336 - RNA, 19 nt, Homo sapiens
  misc_RNA (1)...(19): siRNA sense strand
cagaucaacuggaauggau

SEQ ID NO: 336337 - RNA, 19 nt, Homo sapiens
  misc_RNA (1)...(19): siRNA sense strand
gcaggaaauggcugaacua

SEQ ID NO: 336338 - RNA, 19 nt, Homo sapiens
  misc_RNA (1)...(19): siRNA sense strand
ccacagaucaacuggaaug

SEQ ID NO: 336339 - RNA, 19 nt, Homo sapiens
  misc_RNA (1)...(19): siRNA sense strand
caacaugcccacagaucaa

SEQ ID NO: 336340 - RNA, 19 nt, Homo sapiens
  misc_RNA (1)...(19): siRNA sense strand
ucaccaacaugcccacaga

SEQ ID NO: 336341 - RNA, 19 nt, Homo sapiens
  misc_RNA (1)...(19): siRNA sense strand
cagaggagauguggucaau

SEQ ID NO: 336342 - RNA, 19 nt, Homo sapiens
  misc_RNA (1)...(19): siRNA sense strand
caauugggcagauguguga

SEQ ID NO: 336343 - RNA, 19 nt, Homo sapiens
  misc_RNA (1)...(19): siRNA sense strand
ggagauguggucaauggaa

SEQ ID NO: 336344 - RNA, 19 nt, Homo sapiens
  misc_RNA (1)...(19): siRNA sense strand
guacagcuguguggugcuu

SEQ ID NO: 336345 - RNA, 19 nt, Homo sapiens
  misc_RNA (1)...(19): siRNA sense strand
ccaaagcgagcaagagaau

SEQ ID NO: 336346 - RNA, 19 nt, Homo sapiens
  misc_RNA (1)...(19): siRNA sense strand
gcuaugggcccuucaccaa

SEQ ID NO: 336347 - RNA, 19 nt, Homo sapiens
  misc_RNA (1)...(19): siRNA sense strand
gaaugagcaugauuuugaa

SEQ ID NO: 336348 - RNA, 19 nt, Homo sapiens
  misc_RNA (1)...(19): siRNA sense strand
ucagggcuauccucucaga

SEQ ID NO: 336349 - RNA, 19 nt, Homo sapiens
  misc_RNA (1)...(19): siRNA sense strand
agggauaccaugcaacaua

SEQ ID NO: 336350 - RNA, 19 nt, Homo sapiens
  misc_RNA (1)...(19): siRNA sense strand
gcuagaaaucuguugcuau

SEQ ID NO: 336351 - RNA, 19 nt, Homo sapiens
  misc_RNA (1)...(19): siRNA sense strand
ugaaugagcaugauuuuga

SEQ ID NO: 336352 - RNA, 19 nt, Homo sapiens
  misc_RNA (1)...(19): siRNA sense strand
ggcuagaaaucuguugcua

SEQ ID NO: 336353 - RNA, 19 nt, Homo sapiens
  misc_RNA (1)...(19): siRNA sense strand
ugaaacaagcgucucugaa

SEQ ID NO: 336354 - RNA, 19 nt, Homo sapiens
  misc_RNA (1)...(19): siRNA sense strand
aacauaaccugauaaagcu

SEQ ID NO: 336355 - RNA, 19 nt, Homo sapiens
  misc_RNA (1)...(19): siRNA sense strand
ugacccagucuauuaaaga

SEQ ID NO: 336356 - RNA, 19 nt, Homo sapiens
  misc_RNA (1)...(19): siRNA sense strand
gaacuagaagcuguguuag

SEQ ID NO: 336357 - RNA, 19 nt, Homo sapiens
  misc_RNA (1)...(19): siRNA sense strand
gugaaacaagcgucucuga

SEQ ID NO: 336358 - RNA, 19 nt, Homo sapiens
  misc_RNA (1)...(19): siRNA sense strand
ccaacaugcccacagauca

SEQ ID NO: 336359 - RNA, 19 nt, Homo sapiens
  misc_RNA (1)...(19): siRNA sense strand
uaugggcccuucaccaaca

SEQ ID NO: 336360 - RNA, 19 nt, Homo sapiens
  misc_RNA (1)...(19): siRNA sense strand
guccaaagcgagcaagaga

SEQ ID NO: 336361 - RNA, 19 nt, Homo sapiens
  misc_RNA (1)...(19): siRNA sense strand
cagaacaaagcacaucaga

SEQ ID NO: 336362 - RNA, 19 nt, Homo sapiens
  misc_RNA (1)...(19): siRNA sense strand
ccugcgaaauccagaacaa

SEQ ID NO: 336363 - RNA, 19 nt, Homo sapiens
  misc_RNA (1)...(19): siRNA sense strand
gaaaccaccaagguccaaa

SEQ ID NO: 336364 - RNA, 19 nt, Homo sapiens
  misc_RNA (1)...(19): siRNA sense strand
gauaaagcuccagcaggaa

SEQ ID NO: 336365 - RNA, 19 nt, Homo sapiens
  misc_RNA (1)...(19): siRNA sense strand
aaggagcuuucaucauuca

SEQ ID NO: 336366 - RNA, 19 nt, Homo sapiens
  misc_RNA (1)...(19): siRNA sense strand
ggugugagagugaaacaag

SEQ ID NO: 336367 - RNA, 19 nt, Homo sapiens
  misc_RNA (1)...(19): siRNA sense strand
gaaauggcugaacuagaag

SEQ ID NO: 336368 - RNA, 19 nt, Homo sapiens
  misc_RNA (1)...(19): siRNA sense strand
auaaagcuccagcaggaaa

SEQ ID NO: 336369 - RNA, 19 nt, Homo sapiens
  misc_RNA (1)...(19): siRNA sense strand
acccuuccaucauaaguga

SEQ ID NO: 336370 - RNA, 19 nt, Homo sapiens
  misc_RNA (1)...(19): siRNA sense strand
ggugacccagucuauuaaa

SEQ ID NO: 336371 - RNA, 19 nt, Homo sapiens
  misc_RNA (1)...(19): siRNA sense strand
cccagucuauuaaagaaag

SEQ ID NO: 336372 - RNA, 19 nt, Homo sapiens
  misc_RNA (1)...(19): siRNA sense strand
caucugggugugagaguga

SEQ ID NO: 336373 - RNA, 19 nt, Homo sapiens
  misc_RNA (1)...(19): siRNA sense strand
ccagucuauuaaagaaaga

SEQ ID NO: 336374 - RNA, 19 nt, Homo sapiens
  misc_RNA (1)...(19): siRNA sense strand
cgaaauccagaacaaagca

SEQ ID NO: 336375 - RNA, 19 nt, Homo sapiens
  misc_RNA (1)...(19): siRNA sense strand
aagagaaucccaggacaga

SEQ ID NO: 336376 - RNA, 19 nt, Homo sapiens
  misc_RNA (1)...(19): siRNA sense strand
gauguggucaauggaagaa

SEQ ID NO: 336377 - RNA, 19 nt, Homo sapiens
  misc_RNA (1)...(19): siRNA sense strand
ggaccugcgaaauccagaa

SEQ ID NO: 336378 - RNA, 19 nt, Homo sapiens
  misc_RNA (1)...(19): siRNA sense strand
gagcaugauuuugaaguca

SEQ ID NO: 336379 - RNA, 19 nt, Homo sapiens
  misc_RNA (1)...(19): siRNA sense strand
gugacccagucuauuaaag

SEQ ID NO: 336380 - RNA, 19 nt, Homo sapiens
  misc_RNA (1)...(19): siRNA sense strand
agaacaaagcacaucagaa

SEQ ID NO: 336381 - RNA, 19 nt, Homo sapiens
  misc_RNA (1)...(19): siRNA sense strand
uggaagaaaccaccaaggu

SEQ ID NO: 336382 - RNA, 19 nt, Homo sapiens
  misc_RNA (1)...(19): siRNA sense strand
ucaacuggaauggauggua

SEQ ID NO: 336383 - RNA, 19 nt, Homo sapiens
  misc_RNA (1)...(19): siRNA sense strand
ggaaauggcugaacuagaa

SEQ ID NO: 336384 - RNA, 19 nt, Homo sapiens
  misc_RNA (1)...(19): siRNA sense strand
gaacaaagcacaucagaaa

SEQ ID NO: 336385 - RNA, 19 nt, Homo sapiens
  misc_RNA (1)...(19): siRNA sense strand
cagcuacccuuccaucaua

SEQ ID NO: 336386 - RNA, 19 nt, Homo sapiens
  misc_RNA (1)...(19): siRNA sense strand
gggauaccaugcaacauaa

SEQ ID NO: 336387 - RNA, 19 nt, Homo sapiens
  misc_RNA (1)...(19): siRNA sense strand
gaggagauguggucaaugg

SEQ ID NO: 336388 - RNA, 19 nt, Homo sapiens
  misc_RNA (1)...(19): siRNA sense strand
gaaggagcuuucaucauuc

SEQ ID NO: 336389 - RNA, 19 nt, Homo sapiens
  misc_RNA (1)...(19): siRNA sense strand
cuagaaaucuguugcuaug

SEQ ID NO: 336390 - RNA, 19 nt, Homo sapiens
  misc_RNA (1)...(19): siRNA sense strand
gcucagggcuauccucuca

SEQ ID NO: 336391 - RNA, 19 nt, Homo sapiens
  misc_RNA (1)...(19): siRNA sense strand
aaacaagcgucucugaaga

SEQ ID NO: 336392 - RNA, 19 nt, Homo sapiens
  misc_RNA (1)...(19): siRNA sense strand
caacauaaccugauaaagc

SEQ ID NO: 336393 - RNA, 19 nt, Homo sapiens
  misc_RNA (1)...(19): siRNA sense strand
gaaacaagcgucucugaag

SEQ ID NO: 336394 - RNA, 19 nt, Homo sapiens
  misc_RNA (1)...(19): siRNA sense strand
gcagagggauaccaugcaa

SEQ ID NO: 336395 - RNA, 19 nt, Homo sapiens
  misc_RNA (1)...(19): siRNA sense strand
ugaacuagaagcuguguua

SEQ ID NO: 336396 - RNA, 19 nt, Homo sapiens
  misc_RNA (1)...(19): siRNA sense strand
gagaaucccaggacagaaa

SEQ ID NO: 336397 - RNA, 19 nt, Homo sapiens
  misc_RNA (1)...(19): siRNA sense strand
gcccacagaucaacuggaa

SEQ ID NO: 336398 - RNA, 19 nt, Homo sapiens
  misc_RNA (1)...(19): siRNA sense strand
gaagacugcucagggcuau

SEQ ID NO: 336399 - RNA, 19 nt, Homo sapiens
  misc_RNA (1)...(19): siRNA sense strand
gacccagucuauuaaagaa

SEQ ID NO: 336400 - RNA, 19 nt, Homo sapiens
  misc_RNA (1)...(19): siRNA sense strand
acuagaagcuguguuagaa

SEQ ID NO: 336401 - RNA, 19 nt, Homo sapiens
  misc_RNA (1)...(19): siRNA sense strand
caugcaacauaaccugaua

SEQ ID NO: 336402 - RNA, 19 nt, Homo sapiens
  misc_RNA (1)...(19): siRNA sense strand
gcuggacaccuaccugaua

SEQ ID NO: 336403 - RNA, 19 nt, Homo sapiens
  misc_RNA (1)...(19): siRNA sense strand
cagaucaacuggaauggau

SEQ ID NO: 336404 - RNA, 19 nt, Homo sapiens
  misc_RNA (1)...(19): siRNA sense strand
gcaggaaauggcugaacua

SEQ ID NO: 336405 - RNA, 19 nt, Homo sapiens
  misc_RNA (1)...(19): siRNA sense strand
ccacagaucaacuggaaug

SEQ ID NO: 336406 - RNA, 19 nt, Homo sapiens
  misc_RNA (1)...(19): siRNA sense strand
caacaugcccacagaucaa

SEQ ID NO: 336407 - RNA, 19 nt, Homo sapiens
  misc_RNA (1)...(19): siRNA sense strand
ucaccaacaugcccacaga

SEQ ID NO: 336408 - RNA, 19 nt, Homo sapiens
  misc_RNA (1)...(19): siRNA sense strand
cagaggagauguggucaau

SEQ ID NO: 336409 - RNA, 19 nt, Homo sapiens
  misc_RNA (1)...(19): siRNA sense strand
caauugggcagauguguga

SEQ ID NO: 336410 - RNA, 19 nt, Homo sapiens
  misc_RNA (1)...(19): siRNA sense strand
ggagauguggucaauggaa

SEQ ID NO: 336411 - RNA, 19 nt, Homo sapiens
  misc_RNA (1)...(19): siRNA sense strand
guacagcuguguggugcuu

SEQ ID NO: 336412 - RNA, 19 nt, Homo sapiens
  misc_RNA (1)...(19): siRNA sense strand
ccaaagcgagcaagagaau

SEQ ID NO: 336413 - RNA, 19 nt, Homo sapiens
  misc_RNA (1)...(19): siRNA sense strand
gcuaugggcccuucaccaa

SEQ ID NO: 336414 - RNA, 19 nt, Homo sapiens
  misc_RNA (1)...(19): siRNA sense strand
gaaugagcaugauuuugaa

SEQ ID NO: 336415 - RNA, 19 nt, Homo sapiens
  misc_RNA (1)...(19): siRNA sense strand
ucagggcuauccucucaga

SEQ ID NO: 336416 - RNA, 19 nt, Homo sapiens
  misc_RNA (1)...(19): siRNA sense strand
agggauaccaugcaacaua

SEQ ID NO: 336417 - RNA, 19 nt, Homo sapiens
  misc_RNA (1)...(19): siRNA sense strand
gcuagaaaucuguugcuau

SEQ ID NO: 336418 - RNA, 19 nt, Homo sapiens
  misc_RNA (1)...(19): siRNA sense strand
ugaaugagcaugauuuuga

SEQ ID NO: 336419 - RNA, 19 nt, Homo sapiens
  misc_RNA (1)...(19): siRNA sense strand
ggcuagaaaucuguugcua

SEQ ID NO: 336420 - RNA, 19 nt, Homo sapiens
  misc_RNA (1)...(19): siRNA sense strand
ugaaacaagcgucucugaa

SEQ ID NO: 336421 - RNA, 19 nt, Homo sapiens
  misc_RNA (1)...(19): siRNA sense strand
aacauaaccugauaaagcu

SEQ ID NO: 336422 - RNA, 19 nt, Homo sapiens
  misc_RNA (1)...(19): siRNA sense strand
ugacccagucuauuaaaga

SEQ ID NO: 336423 - RNA, 19 nt, Homo sapiens
  misc_RNA (1)...(19): siRNA sense strand
gaacuagaagcuguguuag

SEQ ID NO: 336424 - RNA, 19 nt, Homo sapiens
  misc_RNA (1)...(19): siRNA sense strand
gugaaacaagcgucucuga

SEQ ID NO: 336425 - RNA, 19 nt, Homo sapiens
  misc_RNA (1)...(19): siRNA sense strand
ccaacaugcccacagauca

SEQ ID NO: 336426 - RNA, 19 nt, Homo sapiens
  misc_RNA (1)...(19): siRNA sense strand
uaugggcccuucaccaaca

SEQ ID NO: 336427 - RNA, 19 nt, Homo sapiens
  misc_RNA (1)...(19): siRNA sense strand
guccaaagcgagcaagaga

SEQ ID NO: 336428 - RNA, 19 nt, Homo sapiens
  misc_RNA (1)...(19): siRNA sense strand
cagaacaaagcacaucaga

SEQ ID NO: 336429 - RNA, 19 nt, Homo sapiens
  misc_RNA (1)...(19): siRNA sense strand
ccugcgaaauccagaacaa

SEQ ID NO: 336430 - RNA, 19 nt, Homo sapiens
  misc_RNA (1)...(19): siRNA sense strand
gaaaccaccaagguccaaa

SEQ ID NO: 336431 - RNA, 19 nt, Homo sapiens
  misc_RNA (1)...(19): siRNA sense strand
gauaaagcuccagcaggaa

SEQ ID NO: 336432 - RNA, 19 nt, Homo sapiens
  misc_RNA (1)...(19): siRNA sense strand
aaggagcuuucaucauuca

SEQ ID NO: 336433 - RNA, 19 nt, Homo sapiens
  misc_RNA (1)...(19): siRNA sense strand
ggugugagagugaaacaag

SEQ ID NO: 336434 - RNA, 19 nt, Homo sapiens
  misc_RNA (1)...(19): siRNA sense strand
gaaauggcugaacuagaag

SEQ ID NO: 336435 - RNA, 19 nt, Homo sapiens
  misc_RNA (1)...(19): siRNA sense strand
auaaagcuccagcaggaaa

SEQ ID NO: 336436 - RNA, 19 nt, Homo sapiens
  misc_RNA (1)...(19): siRNA sense strand
acccuuccaucauaaguga

SEQ ID NO: 336437 - RNA, 19 nt, Homo sapiens
  misc_RNA (1)...(19): siRNA sense strand
ggugacccagucuauuaaa

SEQ ID NO: 336438 - RNA, 19 nt, Homo sapiens
  misc_RNA (1)...(19): siRNA sense strand
cccagucuauuaaagaaag

SEQ ID NO: 336439 - RNA, 19 nt, Homo sapiens
  misc_RNA (1)...(19): siRNA sense strand
caucugggugugagaguga

SEQ ID NO: 336440 - RNA, 19 nt, Homo sapiens
  misc_RNA (1)...(19): siRNA sense strand
ccagucuauuaaagaaaga

SEQ ID NO: 336441 - RNA, 19 nt, Homo sapiens
  misc_RNA (1)...(19): siRNA sense strand
cgaaauccagaacaaagca

SEQ ID NO: 336442 - RNA, 19 nt, Homo sapiens
  misc_RNA (1)...(19): siRNA sense strand
aagagaaucccaggacaga

SEQ ID NO: 336443 - RNA, 19 nt, Homo sapiens
  misc_RNA (1)...(19): siRNA sense strand
gauguggucaauggaagaa

SEQ ID NO: 336444 - RNA, 19 nt, Homo sapiens
  misc_RNA (1)...(19): siRNA sense strand
ggaccugcgaaauccagaa

SEQ ID NO: 336445 - RNA, 19 nt, Homo sapiens
  misc_RNA (1)...(19): siRNA sense strand
gagcaugauuuugaaguca

SEQ ID NO: 336446 - RNA, 19 nt, Homo sapiens
  misc_RNA (1)...(19): siRNA sense strand
gugacccagucuauuaaag

SEQ ID NO: 336447 - RNA, 19 nt, Homo sapiens
  misc_RNA (1)...(19): siRNA sense strand
agaacaaagcacaucagaa

SEQ ID NO: 336448 - RNA, 19 nt, Homo sapiens
  misc_RNA (1)...(19): siRNA sense strand
uggaagaaaccaccaaggu

SEQ ID NO: 336449 - RNA, 19 nt, Homo sapiens
  misc_RNA (1)...(19): siRNA sense strand
ucaacuggaauggauggua

SEQ ID NO: 336450 - RNA, 19 nt, Homo sapiens
  misc_RNA (1)...(19): siRNA sense strand
ggaaauggcugaacuagaa

SEQ ID NO: 336451 - RNA, 19 nt, Homo sapiens
  misc_RNA (1)...(19): siRNA sense strand
gaacaaagcacaucagaaa

SEQ ID NO: 336452 - RNA, 19 nt, Homo sapiens
  misc_RNA (1)...(19): siRNA sense strand
cagcuacccuuccaucaua

SEQ ID NO: 336453 - RNA, 19 nt, Homo sapiens
  misc_RNA (1)...(19): siRNA sense strand
gggauaccaugcaacauaa

SEQ ID NO: 336454 - RNA, 19 nt, Homo sapiens
  misc_RNA (1)...(19): siRNA sense strand
gaggagauguggucaaugg

SEQ ID NO: 336455 - RNA, 19 nt, Homo sapiens
  misc_RNA (1)...(19): siRNA sense strand
gaaggagcuuucaucauuc

SEQ ID NO: 336456 - RNA, 19 nt, Homo sapiens
  misc_RNA (1)...(19): siRNA sense strand
cuagaaaucuguugcuaug

SEQ ID NO: 336457 - RNA, 19 nt, Homo sapiens
  misc_RNA (1)...(19): siRNA sense strand
gcucagggcuauccucuca

SEQ ID NO: 336458 - RNA, 19 nt, Homo sapiens
  misc_RNA (1)...(19): siRNA sense strand
aaacaagcgucucugaaga

SEQ ID NO: 336459 - RNA, 19 nt, Homo sapiens
  misc_RNA (1)...(19): siRNA sense strand
caacauaaccugauaaagc

SEQ ID NO: 336460 - RNA, 19 nt, Homo sapiens
  misc_RNA (1)...(19): siRNA sense strand
gaaacaagcgucucugaag

SEQ ID NO: 336461 - RNA, 19 nt, Homo sapiens
  misc_RNA (1)...(19): siRNA sense strand
gcagagggauaccaugcaa

SEQ ID NO: 336462 - RNA, 19 nt, Homo sapiens
  misc_RNA (1)...(19): siRNA sense strand
ugaacuagaagcuguguua

SEQ ID NO: 336463 - RNA, 19 nt, Homo sapiens
  misc_RNA (1)...(19): siRNA sense strand
gagaaucccaggacagaaa

SEQ ID NO: 336464 - RNA, 19 nt, Homo sapiens
  misc_RNA (1)...(19): siRNA sense strand
gcccacagaucaacuggaa

SEQ ID NO: 336465 - RNA, 19 nt, Homo sapiens
  misc_RNA (1)...(19): siRNA sense strand
gaagacugcucagggcuau

SEQ ID NO: 336466 - RNA, 19 nt, Homo sapiens
  misc_RNA (1)...(19): siRNA sense strand
gacccagucuauuaaagaa

SEQ ID NO: 336467 - RNA, 19 nt, Homo sapiens
  misc_RNA (1)...(19): siRNA sense strand
acuagaagcuguguuagaa

SEQ ID NO: 336468 - RNA, 19 nt, Homo sapiens
  misc_RNA (1)...(19): siRNA sense strand
caugcaacauaaccugaua

SEQ ID NO: 336469 - RNA, 19 nt, Homo sapiens
  misc_RNA (1)...(19): siRNA sense strand
gcuggacaccuaccugaua

SEQ ID NO: 336470 - RNA, 19 nt, Homo sapiens
  misc_RNA (1)...(19): siRNA sense strand
cagaucaacuggaauggau

SEQ ID NO: 336471 - RNA, 19 nt, Homo sapiens
  misc_RNA (1)...(19): siRNA sense strand
gcaggaaauggcugaacua

SEQ ID NO: 336472 - RNA, 19 nt, Homo sapiens
  misc_RNA (1)...(19): siRNA sense strand
ccacagaucaacuggaaug

SEQ ID NO: 336473 - RNA, 19 nt, Homo sapiens
  misc_RNA (1)...(19): siRNA sense strand
caacaugcccacagaucaa

SEQ ID NO: 336474 - RNA, 19 nt, Homo sapiens
  misc_RNA (1)...(19): siRNA sense strand
ucaccaacaugcccacaga

SEQ ID NO: 336475 - RNA, 19 nt, Homo sapiens
  misc_RNA (1)...(19): siRNA sense strand
cagaggagauguggucaau

SEQ ID NO: 336476 - RNA, 19 nt, Homo sapiens
  misc_RNA (1)...(19): siRNA sense strand
caauugggcagauguguga

SEQ ID NO: 336477 - RNA, 19 nt, Homo sapiens
  misc_RNA (1)...(19): siRNA sense strand
ggagauguggucaauggaa

SEQ ID NO: 336478 - RNA, 19 nt, Homo sapiens
  misc_RNA (1)...(19): siRNA sense strand
guacagcuguguggugcuu

SEQ ID NO: 336479 - RNA, 19 nt, Homo sapiens
  misc_RNA (1)...(19): siRNA sense strand
ccaaagcgagcaagagaau

SEQ ID NO: 336480 - RNA, 19 nt, Homo sapiens
  misc_RNA (1)...(19): siRNA sense strand
gcuaugggcccuucaccaa

SEQ ID NO: 336481 - RNA, 19 nt, Homo sapiens
  misc_RNA (1)...(19): siRNA sense strand
gaaugagcaugauuuugaa

SEQ ID NO: 336482 - RNA, 19 nt, Homo sapiens
  misc_RNA (1)...(19): siRNA sense strand
ucagggcuauccucucaga

SEQ ID NO: 336483 - RNA, 19 nt, Homo sapiens
  misc_RNA (1)...(19): siRNA sense strand
agggauaccaugcaacaua

SEQ ID NO: 336484 - RNA, 19 nt, Homo sapiens
  misc_RNA (1)...(19): siRNA sense strand
gcuagaaaucuguugcuau

SEQ ID NO: 336485 - RNA, 19 nt, Homo sapiens
  misc_RNA (1)...(19): siRNA sense strand
ugaaugagcaugauuuuga

SEQ ID NO: 336486 - RNA, 19 nt, Homo sapiens
  misc_RNA (1)...(19): siRNA sense strand
ggcuagaaaucuguugcua

SEQ ID NO: 336487 - RNA, 19 nt, Homo sapiens
  misc_RNA (1)...(19): siRNA sense strand
ugaaacaagcgucucugaa

SEQ ID NO: 336488 - RNA, 19 nt, Homo sapiens
  misc_RNA (1)...(19): siRNA sense strand
aacauaaccugauaaagcu

SEQ ID NO: 336489 - RNA, 19 nt, Homo sapiens
  misc_RNA (1)...(19): siRNA sense strand
ugacccagucuauuaaaga

SEQ ID NO: 336490 - RNA, 19 nt, Homo sapiens
  misc_RNA (1)...(19): siRNA sense strand
gaacuagaagcuguguuag

SEQ ID NO: 336491 - RNA, 19 nt, Homo sapiens
  misc_RNA (1)...(19): siRNA sense strand
gugaaacaagcgucucuga

SEQ ID NO: 336492 - RNA, 19 nt, Homo sapiens
  misc_RNA (1)...(19): siRNA sense strand
ccaacaugcccacagauca

SEQ ID NO: 336493 - RNA, 19 nt, Homo sapiens
  misc_RNA (1)...(19): siRNA sense strand
uaugggcccuucaccaaca

SEQ ID NO: 336494 - RNA, 19 nt, Homo sapiens
  misc_RNA (1)...(19): siRNA sense strand
guccaaagcgagcaagaga

SEQ ID NO: 336495 - RNA, 19 nt, Homo sapiens
  misc_RNA (1)...(19): siRNA sense strand
cagaacaaagcacaucaga

SEQ ID NO: 336496 - RNA, 19 nt, Homo sapiens
  misc_RNA (1)...(19): siRNA sense strand
ccugcgaaauccagaacaa

SEQ ID NO: 336497 - RNA, 19 nt, Homo sapiens
  misc_RNA (1)...(19): siRNA sense strand
gaaaccaccaagguccaaa

SEQ ID NO: 336498 - RNA, 19 nt, Homo sapiens
  misc_RNA (1)...(19): siRNA sense strand
gauaaagcuccagcaggaa

SEQ ID NO: 336499 - RNA, 19 nt, Homo sapiens
  misc_RNA (1)...(19): siRNA sense strand
aaggagcuuucaucauuca

SEQ ID NO: 336500 - RNA, 19 nt, Homo sapiens
  misc_RNA (1)...(19): siRNA sense strand
ggugugagagugaaacaag

SEQ ID NO: 336501 - RNA, 19 nt, Homo sapiens
  misc_RNA (1)...(19): siRNA sense strand
gaaauggcugaacuagaag

SEQ ID NO: 336502 - RNA, 19 nt, Homo sapiens
  misc_RNA (1)...(19): siRNA sense strand
auaaagcuccagcaggaaa

SEQ ID NO: 336503 - RNA, 19 nt, Homo sapiens
  misc_RNA (1)...(19): siRNA sense strand
acccuuccaucauaaguga

SEQ ID NO: 336504 - RNA, 19 nt, Homo sapiens
  misc_RNA (1)...(19): siRNA sense strand
ggugacccagucuauuaaa

SEQ ID NO: 336505 - RNA, 19 nt, Homo sapiens
  misc_RNA (1)...(19): siRNA sense strand
cccagucuauuaaagaaag

SEQ ID NO: 336506 - RNA, 19 nt, Homo sapiens
  misc_RNA (1)...(19): siRNA sense strand
caucugggugugagaguga

SEQ ID NO: 336507 - RNA, 19 nt, Homo sapiens
  misc_RNA (1)...(19): siRNA sense strand
ccagucuauuaaagaaaga

SEQ ID NO: 336508 - RNA, 19 nt, Homo sapiens
  misc_RNA (1)...(19): siRNA sense strand
cgaaauccagaacaaagca

SEQ ID NO: 336509 - RNA, 19 nt, Homo sapiens
  misc_RNA (1)...(19): siRNA sense strand
aagagaaucccaggacaga

SEQ ID NO: 336510 - RNA, 19 nt, Homo sapiens
  misc_RNA (1)...(19): siRNA sense strand
gauguggucaauggaagaa

SEQ ID NO: 336511 - RNA, 19 nt, Homo sapiens
  misc_RNA (1)...(19): siRNA sense strand
ggaccugcgaaauccagaa

SEQ ID NO: 336512 - RNA, 19 nt, Homo sapiens
  misc_RNA (1)...(19): siRNA sense strand
gagcaugauuuugaaguca

SEQ ID NO: 336513 - RNA, 19 nt, Homo sapiens
  misc_RNA (1)...(19): siRNA sense strand
gugacccagucuauuaaag

SEQ ID NO: 336514 - RNA, 19 nt, Homo sapiens
  misc_RNA (1)...(19): siRNA sense strand
agaacaaagcacaucagaa

SEQ ID NO: 336515 - RNA, 19 nt, Homo sapiens
  misc_RNA (1)...(19): siRNA sense strand
uggaagaaaccaccaaggu

SEQ ID NO: 336516 - RNA, 19 nt, Homo sapiens
  misc_RNA (1)...(19): siRNA sense strand
ucaacuggaauggauggua

SEQ ID NO: 336517 - RNA, 19 nt, Homo sapiens
  misc_RNA (1)...(19): siRNA sense strand
ggaaauggcugaacuagaa

SEQ ID NO: 336518 - RNA, 19 nt, Homo sapiens
  misc_RNA (1)...(19): siRNA sense strand
gaacaaagcacaucagaaa

SEQ ID NO: 336519 - RNA, 19 nt, Homo sapiens
  misc_RNA (1)...(19): siRNA sense strand
cagcuacccuuccaucaua

SEQ ID NO: 336520 - RNA, 19 nt, Homo sapiens
  misc_RNA (1)...(19): siRNA sense strand
gggauaccaugcaacauaa

SEQ ID NO: 336521 - RNA, 19 nt, Homo sapiens
  misc_RNA (1)...(19): siRNA sense strand
gaggagauguggucaaugg

SEQ ID NO: 336522 - RNA, 19 nt, Homo sapiens
  misc_RNA (1)...(19): siRNA sense strand
gaaggagcuuucaucauuc

SEQ ID NO: 336523 - RNA, 19 nt, Homo sapiens
  misc_RNA (1)...(19): siRNA sense strand
cuagaaaucuguugcuaug

SEQ ID NO: 336524 - RNA, 19 nt, Homo sapiens
  misc_RNA (1)...(19): siRNA sense strand
gcucagggcuauccucuca

SEQ ID NO: 336525 - RNA, 19 nt, Homo sapiens
  misc_RNA (1)...(19): siRNA sense strand
aaacaagcgucucugaaga

SEQ ID NO: 336526 - RNA, 19 nt, Homo sapiens
  misc_RNA (1)...(19): siRNA sense strand
caacauaaccugauaaagc

SEQ ID NO: 336527 - RNA, 19 nt, Homo sapiens
  misc_RNA (1)...(19): siRNA sense strand
gaaacaagcgucucugaag

SEQ ID NO: 336528 - RNA, 19 nt, Homo sapiens
  misc_RNA (1)...(19): siRNA sense strand
gcagagggauaccaugcaa

SEQ ID NO: 336529 - RNA, 19 nt, Homo sapiens
  misc_RNA (1)...(19): siRNA sense strand
ugaacuagaagcuguguua

SEQ ID NO: 336530 - RNA, 19 nt, Homo sapiens
  misc_RNA (1)...(19): siRNA sense strand
gagaaucccaggacagaaa

SEQ ID NO: 336531 - RNA, 19 nt, Homo sapiens
  misc_RNA (1)...(19): siRNA sense strand
gcccacagaucaacuggaa

SEQ ID NO: 336532 - RNA, 19 nt, Homo sapiens
  misc_RNA (1)...(19): siRNA sense strand
gaagacugcucagggcuau

SEQ ID NO: 336533 - RNA, 19 nt, Homo sapiens
  misc_RNA (1)...(19): siRNA sense strand
gacccagucuauuaaagaa

SEQ ID NO: 336534 - RNA, 19 nt, Homo sapiens
  misc_RNA (1)...(19): siRNA sense strand
acuagaagcuguguuagaa

SEQ ID NO: 336535 - RNA, 19 nt, Homo sapiens
  misc_RNA (1)...(19): siRNA sense strand
caugcaacauaaccugaua

SEQ ID NO: 336536 - RNA, 19 nt, Homo sapiens
  misc_RNA (1)...(19): siRNA sense strand
gcuggacaccuaccugaua

SEQ ID NO: 336537 - RNA, 19 nt, Homo sapiens
  misc_RNA (1)...(19): siRNA sense strand
cagaucaacuggaauggau

SEQ ID NO: 336538 - RNA, 19 nt, Homo sapiens
  misc_RNA (1)...(19): siRNA sense strand
gcaggaaauggcugaacua

SEQ ID NO: 336539 - RNA, 19 nt, Homo sapiens
  misc_RNA (1)...(19): siRNA sense strand
ccacagaucaacuggaaug

SEQ ID NO: 336540 - RNA, 19 nt, Homo sapiens
  misc_RNA (1)...(19): siRNA sense strand
caacaugcccacagaucaa

SEQ ID NO: 336541 - RNA, 19 nt, Homo sapiens
  misc_RNA (1)...(19): siRNA sense strand
ucaccaacaugcccacaga

SEQ ID NO: 336542 - RNA, 19 nt, Homo sapiens
  misc_RNA (1)...(19): siRNA sense strand
cagaggagauguggucaau

SEQ ID NO: 336543 - RNA, 19 nt, Homo sapiens
  misc_RNA (1)...(19): siRNA sense strand
caauugggcagauguguga

SEQ ID NO: 336544 - RNA, 19 nt, Homo sapiens
  misc_RNA (1)...(19): siRNA sense strand
ggagauguggucaauggaa

SEQ ID NO: 336545 - RNA, 19 nt, Homo sapiens
  misc_RNA (1)...(19): siRNA sense strand
guacagcuguguggugcuu

SEQ ID NO: 336546 - RNA, 19 nt, Homo sapiens
  misc_RNA (1)...(19): siRNA sense strand
ccaaagcgagcaagagaau

SEQ ID NO: 336547 - RNA, 19 nt, Homo sapiens
  misc_RNA (1)...(19): siRNA sense strand
gcuaugggcccuucaccaa

SEQ ID NO: 336548 - RNA, 19 nt, Homo sapiens
  misc_RNA (1)...(19): siRNA sense strand
gaaugagcaugauuuugaa

SEQ ID NO: 336549 - RNA, 19 nt, Homo sapiens
  misc_RNA (1)...(19): siRNA sense strand
ucagggcuauccucucaga

SEQ ID NO: 336550 - RNA, 19 nt, Homo sapiens
  misc_RNA (1)...(19): siRNA sense strand
agggauaccaugcaacaua

SEQ ID NO: 336551 - RNA, 19 nt, Homo sapiens
  misc_RNA (1)...(19): siRNA sense strand
gcuagaaaucuguugcuau

SEQ ID NO: 336552 - RNA, 19 nt, Homo sapiens
  misc_RNA (1)...(19): siRNA sense strand
ugaaugagcaugauuuuga

SEQ ID NO: 336553 - RNA, 19 nt, Homo sapiens
  misc_RNA (1)...(19): siRNA sense strand
ggcuagaaaucuguugcua

SEQ ID NO: 336554 - RNA, 19 nt, Homo sapiens
  misc_RNA (1)...(19): siRNA sense strand
ugaaacaagcgucucugaa

SEQ ID NO: 336555 - RNA, 19 nt, Homo sapiens
  misc_RNA (1)...(19): siRNA sense strand
aacauaaccugauaaagcu

SEQ ID NO: 336556 - RNA, 19 nt, Homo sapiens
  misc_RNA (1)...(19): siRNA sense strand
ugacccagucuauuaaaga

SEQ ID NO: 336557 - RNA, 19 nt, Homo sapiens
  misc_RNA (1)...(19): siRNA sense strand
gaacuagaagcuguguuag

SEQ ID NO: 336558 - RNA, 19 nt, Homo sapiens
  misc_RNA (1)...(19): siRNA sense strand
gugaaacaagcgucucuga

SEQ ID NO: 336559 - RNA, 19 nt, Homo sapiens
  misc_RNA (1)...(19): siRNA sense strand
ccaacaugcccacagauca

SEQ ID NO: 336560 - RNA, 19 nt, Homo sapiens
  misc_RNA (1)...(19): siRNA sense strand
uaugggcccuucaccaaca

SEQ ID NO: 336561 - RNA, 19 nt, Homo sapiens
  misc_RNA (1)...(19): siRNA sense strand
guccaaagcgagcaagaga

SEQ ID NO: 336562 - RNA, 19 nt, Homo sapiens
  misc_RNA (1)...(19): siRNA sense strand
cagaacaaagcacaucaga

SEQ ID NO: 336563 - RNA, 19 nt, Homo sapiens
  misc_RNA (1)...(19): siRNA sense strand
ccugcgaaauccagaacaa

SEQ ID NO: 336564 - RNA, 19 nt, Homo sapiens
  misc_RNA (1)...(19): siRNA sense strand
gaaaccaccaagguccaaa

SEQ ID NO: 336565 - RNA, 19 nt, Homo sapiens
  misc_RNA (1)...(19): siRNA sense strand
gauaaagcuccagcaggaa

SEQ ID NO: 336566 - RNA, 19 nt, Homo sapiens
  misc_RNA (1)...(19): siRNA sense strand
aaggagcuuucaucauuca

SEQ ID NO: 336567 - RNA, 19 nt, Homo sapiens
  misc_RNA (1)...(19): siRNA sense strand
ggugugagagugaaacaag

SEQ ID NO: 336568 - RNA, 19 nt, Homo sapiens
  misc_RNA (1)...(19): siRNA sense strand
gaaauggcugaacuagaag

SEQ ID NO: 336569 - RNA, 19 nt, Homo sapiens
  misc_RNA (1)...(19): siRNA sense strand
auaaagcuccagcaggaaa

SEQ ID NO: 336570 - RNA, 19 nt, Homo sapiens
  misc_RNA (1)...(19): siRNA sense strand
acccuuccaucauaaguga

SEQ ID NO: 336571 - RNA, 19 nt, Homo sapiens
  misc_RNA (1)...(19): siRNA sense strand
ggugacccagucuauuaaa

SEQ ID NO: 336572 - RNA, 19 nt, Homo sapiens
  misc_RNA (1)...(19): siRNA sense strand
cccagucuauuaaagaaag

SEQ ID NO: 336573 - RNA, 19 nt, Homo sapiens
  misc_RNA (1)...(19): siRNA sense strand
caucugggugugagaguga

SEQ ID NO: 336574 - RNA, 19 nt, Homo sapiens
  misc_RNA (1)...(19): siRNA sense strand
ccagucuauuaaagaaaga

SEQ ID NO: 336575 - RNA, 19 nt, Homo sapiens
  misc_RNA (1)...(19): siRNA sense strand
cgaaauccagaacaaagca

SEQ ID NO: 336576 - RNA, 19 nt, Homo sapiens
  misc_RNA (1)...(19): siRNA sense strand
aagagaaucccaggacaga

SEQ ID NO: 336577 - RNA, 19 nt, Homo sapiens
  misc_RNA (1)...(19): siRNA sense strand
gauguggucaauggaagaa

SEQ ID NO: 336578 - RNA, 19 nt, Homo sapiens
  misc_RNA (1)...(19): siRNA sense strand
ggaccugcgaaauccagaa

SEQ ID NO: 336579 - RNA, 19 nt, Homo sapiens
  misc_RNA (1)...(19): siRNA sense strand
gagcaugauuuugaaguca

SEQ ID NO: 336580 - RNA, 19 nt, Homo sapiens
  misc_RNA (1)...(19): siRNA sense strand
gugacccagucuauuaaag

SEQ ID NO: 336581 - RNA, 19 nt, Homo sapiens
  misc_RNA (1)...(19): siRNA sense strand
agaacaaagcacaucagaa

SEQ ID NO: 336582 - RNA, 19 nt, Homo sapiens
  misc_RNA (1)...(19): siRNA sense strand
uggaagaaaccaccaaggu

SEQ ID NO: 336583 - RNA, 19 nt, Homo sapiens
  misc_RNA (1)...(19): siRNA sense strand
ucaacuggaauggauggua

SEQ ID NO: 336584 - RNA, 19 nt, Homo sapiens
  misc_RNA (1)...(19): siRNA sense strand
ggaaauggcugaacuagaa

SEQ ID NO: 336585 - RNA, 19 nt, Homo sapiens
  misc_RNA (1)...(19): siRNA sense strand
gaacaaagcacaucagaaa

SEQ ID NO: 336586 - RNA, 19 nt, Homo sapiens
  misc_RNA (1)...(19): siRNA sense strand
cagcuacccuuccaucaua

SEQ ID NO: 336587 - RNA, 19 nt, Homo sapiens
  misc_RNA (1)...(19): siRNA sense strand
gggauaccaugcaacauaa

SEQ ID NO: 336588 - RNA, 19 nt, Homo sapiens
  misc_RNA (1)...(19): siRNA sense strand
gaggagauguggucaaugg

SEQ ID NO: 336589 - RNA, 19 nt, Homo sapiens
  misc_RNA (1)...(19): siRNA sense strand
gaaggagcuuucaucauuc

SEQ ID NO: 336590 - RNA, 19 nt, Homo sapiens
  misc_RNA (1)...(19): siRNA sense strand
cuagaaaucuguugcuaug

SEQ ID NO: 336591 - RNA, 19 nt, Homo sapiens
  misc_RNA (1)...(19): siRNA sense strand
gcucagggcuauccucuca

SEQ ID NO: 336592 - RNA, 19 nt, Homo sapiens
  misc_RNA (1)...(19): siRNA sense strand
aaacaagcgucucugaaga

SEQ ID NO: 336593 - RNA, 19 nt, Homo sapiens
  misc_RNA (1)...(19): siRNA sense strand
caacauaaccugauaaagc

SEQ ID NO: 336594 - RNA, 19 nt, Homo sapiens
  misc_RNA (1)...(19): siRNA sense strand
gaaacaagcgucucugaag

SEQ ID NO: 336595 - RNA, 19 nt, Homo sapiens
  misc_RNA (1)...(19): siRNA sense strand
gcagagggauaccaugcaa

SEQ ID NO: 336596 - RNA, 19 nt, Homo sapiens
  misc_RNA (1)...(19): siRNA sense strand
ugaacuagaagcuguguua

SEQ ID NO: 336597 - RNA, 19 nt, Homo sapiens
  misc_RNA (1)...(19): siRNA sense strand
gagaaucccaggacagaaa

SEQ ID NO: 336598 - RNA, 19 nt, Homo sapiens
  misc_RNA (1)...(19): siRNA sense strand
gcccacagaucaacuggaa

SEQ ID NO: 336599 - RNA, 19 nt, Homo sapiens
  misc_RNA (1)...(19): siRNA sense strand
gaagacugcucagggcuau

SEQ ID NO: 336600 - RNA, 19 nt, Homo sapiens
  misc_RNA (1)...(19): siRNA sense strand
gacccagucuauuaaagaa

SEQ ID NO: 336601 - RNA, 19 nt, Homo sapiens
  misc_RNA (1)...(19): siRNA sense strand
acuagaagcuguguuagaa

SEQ ID NO: 336602 - RNA, 19 nt, Homo sapiens
  misc_RNA (1)...(19): siRNA sense strand
caugcaacauaaccugaua

SEQ ID NO: 336603 - RNA, 19 nt, Homo sapiens
  misc_RNA (1)...(19): siRNA sense strand
gcuggacaccuaccugaua

SEQ ID NO: 336604 - RNA, 19 nt, Homo sapiens
  misc_RNA (1)...(19): siRNA sense strand
cagaucaacuggaauggau

SEQ ID NO: 336605 - RNA, 19 nt, Homo sapiens
  misc_RNA (1)...(19): siRNA sense strand
gcaggaaauggcugaacua

SEQ ID NO: 336606 - RNA, 19 nt, Homo sapiens
  misc_RNA (1)...(19): siRNA sense strand
ccacagaucaacuggaaug

SEQ ID NO: 336607 - RNA, 19 nt, Homo sapiens
  misc_RNA (1)...(19): siRNA sense strand
caacaugcccacagaucaa

SEQ ID NO: 336608 - RNA, 19 nt, Homo sapiens
  misc_RNA (1)...(19): siRNA sense strand
ucaccaacaugcccacaga

SEQ ID NO: 336609 - RNA, 19 nt, Homo sapiens
  misc_RNA (1)...(19): siRNA sense strand
cagaggagauguggucaau

SEQ ID NO: 336610 - RNA, 19 nt, Homo sapiens
  misc_RNA (1)...(19): siRNA sense strand
caauugggcagauguguga

SEQ ID NO: 336611 - RNA, 19 nt, Homo sapiens
  misc_RNA (1)...(19): siRNA sense strand
ggagauguggucaauggaa

SEQ ID NO: 336612 - RNA, 19 nt, Homo sapiens
  misc_RNA (1)...(19): siRNA sense strand
guacagcuguguggugcuu

SEQ ID NO: 336613 - RNA, 19 nt, Homo sapiens
  misc_RNA (1)...(19): siRNA sense strand
ccaaagcgagcaagagaau

SEQ ID NO: 336614 - RNA, 19 nt, Homo sapiens
  misc_RNA (1)...(19): siRNA sense strand
gcuaugggcccuucaccaa

SEQ ID NO: 336615 - RNA, 19 nt, Homo sapiens
  misc_RNA (1)...(19): siRNA sense strand
gaaugagcaugauuuugaa

SEQ ID NO: 336616 - RNA, 19 nt, Homo sapiens
  misc_RNA (1)...(19): siRNA sense strand
ucagggcuauccucucaga

SEQ ID NO: 336617 - RNA, 19 nt, Homo sapiens
  misc_RNA (1)...(19): siRNA sense strand
agggauaccaugcaacaua

SEQ ID NO: 336618 - RNA, 19 nt, Homo sapiens
  misc_RNA (1)...(19): siRNA sense strand
gcuagaaaucuguugcuau

SEQ ID NO: 336619 - RNA, 19 nt, Homo sapiens
  misc_RNA (1)...(19): siRNA sense strand
ugaaugagcaugauuuuga

SEQ ID NO: 336620 - RNA, 19 nt, Homo sapiens
  misc_RNA (1)...(19): siRNA sense strand
ggcuagaaaucuguugcua

SEQ ID NO: 336621 - RNA, 19 nt, Homo sapiens
  misc_RNA (1)...(19): siRNA sense strand
ugaaacaagcgucucugaa

SEQ ID NO: 336622 - RNA, 19 nt, Homo sapiens
  misc_RNA (1)...(19): siRNA sense strand
aacauaaccugauaaagcu

SEQ ID NO: 336623 - RNA, 19 nt, Homo sapiens
  misc_RNA (1)...(19): siRNA sense strand
ugacccagucuauuaaaga

SEQ ID NO: 336624 - RNA, 19 nt, Homo sapiens
  misc_RNA (1)...(19): siRNA sense strand
gaacuagaagcuguguuag

SEQ ID NO: 336625 - RNA, 19 nt, Homo sapiens
  misc_RNA (1)...(19): siRNA sense strand
gugaaacaagcgucucuga

SEQ ID NO: 336626 - RNA, 19 nt, Homo sapiens
  misc_RNA (1)...(19): siRNA sense strand
ccaacaugcccacagauca

SEQ ID NO: 336627 - RNA, 19 nt, Homo sapiens
  misc_RNA (1)...(19): siRNA sense strand
uaugggcccuucaccaaca

SEQ ID NO: 336628 - RNA, 19 nt, Homo sapiens
  misc_RNA (1)...(19): siRNA sense strand
guccaaagcgagcaagaga

SEQ ID NO: 336629 - RNA, 19 nt, Homo sapiens
  misc_RNA (1)...(19): siRNA sense strand
cagaacaaagcacaucaga

SEQ ID NO: 336630 - RNA, 19 nt, Homo sapiens
  misc_RNA (1)...(19): siRNA sense strand
ccugcgaaauccagaacaa

SEQ ID NO: 336631 - RNA, 19 nt, Homo sapiens
  misc_RNA (1)...(19): siRNA sense strand
gaaaccaccaagguccaaa

SEQ ID NO: 336632 - RNA, 19 nt, Homo sapiens
  misc_RNA (1)...(19): siRNA sense strand
gauaaagcuccagcaggaa

SEQ ID NO: 336633 - RNA, 19 nt, Homo sapiens
  misc_RNA (1)...(19): siRNA sense strand
aaggagcuuucaucauuca

SEQ ID NO: 336634 - RNA, 19 nt, Homo sapiens
  misc_RNA (1)...(19): siRNA sense strand
ggugugagagugaaacaag

SEQ ID NO: 336635 - RNA, 19 nt, Homo sapiens
  misc_RNA (1)...(19): siRNA sense strand
gaaauggcugaacuagaag

SEQ ID NO: 336636 - RNA, 19 nt, Homo sapiens
  misc_RNA (1)...(19): siRNA sense strand
auaaagcuccagcaggaaa

SEQ ID NO: 336637 - RNA, 19 nt, Homo sapiens
  misc_RNA (1)...(19): siRNA sense strand
acccuuccaucauaaguga

SEQ ID NO: 336638 - RNA, 19 nt, Homo sapiens
  misc_RNA (1)...(19): siRNA sense strand
ggugacccagucuauuaaa

SEQ ID NO: 336639 - RNA, 19 nt, Homo sapiens
  misc_RNA (1)...(19): siRNA sense strand
cccagucuauuaaagaaag

SEQ ID NO: 336640 - RNA, 19 nt, Homo sapiens
  misc_RNA (1)...(19): siRNA sense strand
caucugggugugagaguga

SEQ ID NO: 336641 - RNA, 19 nt, Homo sapiens
  misc_RNA (1)...(19): siRNA sense strand
ccagucuauuaaagaaaga

SEQ ID NO: 336642 - RNA, 19 nt, Homo sapiens
  misc_RNA (1)...(19): siRNA sense strand
cgaaauccagaacaaagca

SEQ ID NO: 336643 - RNA, 19 nt, Homo sapiens
  misc_RNA (1)...(19): siRNA sense strand
aagagaaucccaggacaga

SEQ ID NO: 336644 - RNA, 19 nt, Homo sapiens
  misc_RNA (1)...(19): siRNA sense strand
gauguggucaauggaagaa

SEQ ID NO: 336645 - RNA, 19 nt, Homo sapiens
  misc_RNA (1)...(19): siRNA sense strand
ggaccugcgaaauccagaa

SEQ ID NO: 336646 - RNA, 19 nt, Homo sapiens
  misc_RNA (1)...(19): siRNA sense strand
gagcaugauuuugaaguca

SEQ ID NO: 336647 - RNA, 19 nt, Homo sapiens
  misc_RNA (1)...(19): siRNA sense strand
gugacccagucuauuaaag

SEQ ID NO: 336648 - RNA, 19 nt, Homo sapiens
  misc_RNA (1)...(19): siRNA sense strand
agaacaaagcacaucagaa

SEQ ID NO: 336649 - RNA, 19 nt, Homo sapiens
  misc_RNA (1)...(19): siRNA sense strand
uggaagaaaccaccaaggu

SEQ ID NO: 336650 - RNA, 19 nt, Homo sapiens
  misc_RNA (1)...(19): siRNA sense strand
ucaacuggaauggauggua

SEQ ID NO: 336651 - RNA, 19 nt, Homo sapiens
  misc_RNA (1)...(19): siRNA sense strand
ggaaauggcugaacuagaa

SEQ ID NO: 336652 - RNA, 19 nt, Homo sapiens
  misc_RNA (1)...(19): siRNA sense strand
gaacaaagcacaucagaaa

SEQ ID NO: 336653 - RNA, 19 nt, Homo sapiens
  misc_RNA (1)...(19): siRNA sense strand
cagcuacccuuccaucaua

SEQ ID NO: 336654 - RNA, 19 nt, Homo sapiens
  misc_RNA (1)...(19): siRNA sense strand
gggauaccaugcaacauaa

SEQ ID NO: 336655 - RNA, 19 nt, Homo sapiens
  misc_RNA (1)...(19): siRNA sense strand
gaggagauguggucaaugg

SEQ ID NO: 336656 - RNA, 19 nt, Homo sapiens
  misc_RNA (1)...(19): siRNA sense strand
gaaggagcuuucaucauuc

SEQ ID NO: 336657 - RNA, 19 nt, Homo sapiens
  misc_RNA (1)...(19): siRNA sense strand
cuagaaaucuguugcuaug

SEQ ID NO: 336658 - RNA, 19 nt, Homo sapiens
  misc_RNA (1)...(19): siRNA sense strand
gcucagggcuauccucuca

SEQ ID NO: 336659 - RNA, 19 nt, Homo sapiens
  misc_RNA (1)...(19): siRNA sense strand
aaacaagcgucucugaaga

SEQ ID NO: 336660 - RNA, 19 nt, Homo sapiens
  misc_RNA (1)...(19): siRNA sense strand
caacauaaccugauaaagc

SEQ ID NO: 336661 - RNA, 19 nt, Homo sapiens
  misc_RNA (1)...(19): siRNA sense strand
gaaacaagcgucucugaag

SEQ ID NO: 336662 - RNA, 19 nt, Homo sapiens
  misc_RNA (1)...(19): siRNA sense strand
gcagagggauaccaugcaa

SEQ ID NO: 336663 - RNA, 19 nt, Homo sapiens
  misc_RNA (1)...(19): siRNA sense strand
ugaacuagaagcuguguua

SEQ ID NO: 336664 - RNA, 19 nt, Homo sapiens
  misc_RNA (1)...(19): siRNA sense strand
gagaaucccaggacagaaa

SEQ ID NO: 336665 - RNA, 19 nt, Homo sapiens
  misc_RNA (1)...(19): siRNA sense strand
gcccacagaucaacuggaa

SEQ ID NO: 336666 - RNA, 19 nt, Homo sapiens
  misc_RNA (1)...(19): siRNA sense strand
gaagacugcucagggcuau

SEQ ID NO: 336667 - RNA, 19 nt, Homo sapiens
  misc_RNA (1)...(19): siRNA sense strand
gacccagucuauuaaagaa

SEQ ID NO: 336668 - RNA, 19 nt, Homo sapiens
  misc_RNA (1)...(19): siRNA sense strand
acuagaagcuguguuagaa

SEQ ID NO: 336669 - RNA, 19 nt, Homo sapiens
  misc_RNA (1)...(19): siRNA sense strand
caugcaacauaaccugaua

SEQ ID NO: 336670 - RNA, 19 nt, Homo sapiens
  misc_RNA (1)...(19): siRNA sense strand
gcuggacaccuaccugaua

SEQ ID NO: 336671 - RNA, 19 nt, Homo sapiens
  misc_RNA (1)...(19): siRNA sense strand
cagaucaacuggaauggau

SEQ ID NO: 336672 - RNA, 19 nt, Homo sapiens
  misc_RNA (1)...(19): siRNA sense strand
gcaggaaauggcugaacua

SEQ ID NO: 336673 - RNA, 19 nt, Homo sapiens
  misc_RNA (1)...(19): siRNA sense strand
ccacagaucaacuggaaug

SEQ ID NO: 336674 - RNA, 19 nt, Homo sapiens
  misc_RNA (1)...(19): siRNA sense strand
caacaugcccacagaucaa

SEQ ID NO: 336675 - RNA, 19 nt, Homo sapiens
  misc_RNA (1)...(19): siRNA sense strand
ucaccaacaugcccacaga

SEQ ID NO: 336676 - RNA, 19 nt, Homo sapiens
  misc_RNA (1)...(19): siRNA sense strand
cagaggagauguggucaau

SEQ ID NO: 336677 - RNA, 19 nt, Homo sapiens
  misc_RNA (1)...(19): siRNA sense strand
caauugggcagauguguga

SEQ ID NO: 336678 - RNA, 19 nt, Homo sapiens
  misc_RNA (1)...(19): siRNA sense strand
ggagauguggucaauggaa

SEQ ID NO: 336679 - RNA, 19 nt, Homo sapiens
  misc_RNA (1)...(19): siRNA sense strand
guacagcuguguggugcuu

SEQ ID NO: 336680 - RNA, 19 nt, Homo sapiens
  misc_RNA (1)...(19): siRNA sense strand
ccaaagcgagcaagagaau

SEQ ID NO: 336681 - RNA, 19 nt, Homo sapiens
  misc_RNA (1)...(19): siRNA sense strand
gcuaugggcccuucaccaa

SEQ ID NO: 336682 - RNA, 19 nt, Homo sapiens
  misc_RNA (1)...(19): siRNA sense strand
gaaugagcaugauuuugaa

SEQ ID NO: 336683 - RNA, 19 nt, Homo sapiens
  misc_RNA (1)...(19): siRNA sense strand
ucagggcuauccucucaga

SEQ ID NO: 336684 - RNA, 19 nt, Homo sapiens
  misc_RNA (1)...(19): siRNA sense strand
agggauaccaugcaacaua

SEQ ID NO: 336685 - RNA, 19 nt, Homo sapiens
  misc_RNA (1)...(19): siRNA sense strand
gcuagaaaucuguugcuau

SEQ ID NO: 336686 - RNA, 19 nt, Homo sapiens
  misc_RNA (1)...(19): siRNA sense strand
ugaaugagcaugauuuuga

SEQ ID NO: 336687 - RNA, 19 nt, Homo sapiens
  misc_RNA (1)...(19): siRNA sense strand
ggcuagaaaucuguugcua

SEQ ID NO: 336688 - RNA, 19 nt, Homo sapiens
  misc_RNA (1)...(19): siRNA sense strand
ugaaacaagcgucucugaa

SEQ ID NO: 336689 - RNA, 19 nt, Homo sapiens
  misc_RNA (1)...(19): siRNA sense strand
aacauaaccugauaaagcu

SEQ ID NO: 336690 - RNA, 19 nt, Homo sapiens
  misc_RNA (1)...(19): siRNA sense strand
ugacccagucuauuaaaga

SEQ ID NO: 336691 - RNA, 19 nt, Homo sapiens
  misc_RNA (1)...(19): siRNA sense strand
gaacuagaagcuguguuag

SEQ ID NO: 336692 - RNA, 19 nt, Homo sapiens
  misc_RNA (1)...(19): siRNA sense strand
gugaaacaagcgucucuga

SEQ ID NO: 336693 - RNA, 19 nt, Homo sapiens
  misc_RNA (1)...(19): siRNA sense strand
ccaacaugcccacagauca

SEQ ID NO: 336694 - RNA, 19 nt, Homo sapiens
  misc_RNA (1)...(19): siRNA sense strand
uaugggcccuucaccaaca

SEQ ID NO: 336695 - RNA, 19 nt, Homo sapiens
  misc_RNA (1)...(19): siRNA sense strand
guccaaagcgagcaagaga

SEQ ID NO: 336696 - RNA, 19 nt, Homo sapiens
  misc_RNA (1)...(19): siRNA sense strand
cagaacaaagcacaucaga

SEQ ID NO: 336697 - RNA, 19 nt, Homo sapiens
  misc_RNA (1)...(19): siRNA sense strand
ccugcgaaauccagaacaa

SEQ ID NO: 336698 - RNA, 19 nt, Homo sapiens
  misc_RNA (1)...(19): siRNA sense strand
gaaaccaccaagguccaaa

SEQ ID NO: 336699 - RNA, 19 nt, Homo sapiens
  misc_RNA (1)...(19): siRNA sense strand
gauaaagcuccagcaggaa

SEQ ID NO: 336700 - RNA, 19 nt, Homo sapiens
  misc_RNA (1)...(19): siRNA sense strand
aaggagcuuucaucauuca

SEQ ID NO: 336701 - RNA, 19 nt, Homo sapiens
  misc_RNA (1)...(19): siRNA sense strand
ggugugagagugaaacaag

SEQ ID NO: 336702 - RNA, 19 nt, Homo sapiens
  misc_RNA (1)...(19): siRNA sense strand
gaaauggcugaacuagaag

SEQ ID NO: 336703 - RNA, 19 nt, Homo sapiens
  misc_RNA (1)...(19): siRNA sense strand
auaaagcuccagcaggaaa

SEQ ID NO: 336704 - RNA, 19 nt, Homo sapiens
  misc_RNA (1)...(19): siRNA sense strand
acccuuccaucauaaguga

SEQ ID NO: 336705 - RNA, 19 nt, Homo sapiens
  misc_RNA (1)...(19): siRNA sense strand
ggugacccagucuauuaaa

SEQ ID NO: 336706 - RNA, 19 nt, Homo sapiens
  misc_RNA (1)...(19): siRNA sense strand
cccagucuauuaaagaaag

SEQ ID NO: 336707 - RNA, 19 nt, Homo sapiens
  misc_RNA (1)...(19): siRNA sense strand
caucugggugugagaguga

SEQ ID NO: 336708 - RNA, 19 nt, Homo sapiens
  misc_RNA (1)...(19): siRNA sense strand
ccagucuauuaaagaaaga

SEQ ID NO: 336709 - RNA, 19 nt, Homo sapiens
  misc_RNA (1)...(19): siRNA sense strand
cgaaauccagaacaaagca

SEQ ID NO: 336710 - RNA, 19 nt, Homo sapiens
  misc_RNA (1)...(19): siRNA sense strand
aagagaaucccaggacaga

SEQ ID NO: 336711 - RNA, 19 nt, Homo sapiens
  misc_RNA (1)...(19): siRNA sense strand
gauguggucaauggaagaa

SEQ ID NO: 336712 - RNA, 19 nt, Homo sapiens
  misc_RNA (1)...(19): siRNA sense strand
ggaccugcgaaauccagaa

SEQ ID NO: 336713 - RNA, 19 nt, Homo sapiens
  misc_RNA (1)...(19): siRNA sense strand
gagcaugauuuugaaguca

SEQ ID NO: 336714 - RNA, 19 nt, Homo sapiens
  misc_RNA (1)...(19): siRNA sense strand
gugacccagucuauuaaag

SEQ ID NO: 336715 - RNA, 19 nt, Homo sapiens
  misc_RNA (1)...(19): siRNA sense strand
agaacaaagcacaucagaa

SEQ ID NO: 336716 - RNA, 19 nt, Homo sapiens
  misc_RNA (1)...(19): siRNA sense strand
uggaagaaaccaccaaggu

SEQ ID NO: 336717 - RNA, 19 nt, Homo sapiens
  misc_RNA (1)...(19): siRNA sense strand
ucaacuggaauggauggua

SEQ ID NO: 336718 - RNA, 19 nt, Homo sapiens
  misc_RNA (1)...(19): siRNA sense strand
ggaaauggcugaacuagaa

SEQ ID NO: 336719 - RNA, 19 nt, Homo sapiens
  misc_RNA (1)...(19): siRNA sense strand
gaacaaagcacaucagaaa

SEQ ID NO: 336720 - RNA, 19 nt, Homo sapiens
  misc_RNA (1)...(19): siRNA sense strand
cagcuacccuuccaucaua

SEQ ID NO: 336721 - RNA, 19 nt, Homo sapiens
  misc_RNA (1)...(19): siRNA sense strand
gggauaccaugcaacauaa

SEQ ID NO: 336722 - RNA, 19 nt, Homo sapiens
  misc_RNA (1)...(19): siRNA sense strand
gaggagauguggucaaugg

SEQ ID NO: 336723 - RNA, 19 nt, Homo sapiens
  misc_RNA (1)...(19): siRNA sense strand
gaaggagcuuucaucauuc

SEQ ID NO: 336724 - RNA, 19 nt, Homo sapiens
  misc_RNA (1)...(19): siRNA sense strand
cuagaaaucuguugcuaug

SEQ ID NO: 336725 - RNA, 19 nt, Homo sapiens
  misc_RNA (1)...(19): siRNA sense strand
gcucagggcuauccucuca

SEQ ID NO: 336726 - RNA, 19 nt, Homo sapiens
  misc_RNA (1)...(19): siRNA sense strand
aaacaagcgucucugaaga

SEQ ID NO: 336727 - RNA, 19 nt, Homo sapiens
  misc_RNA (1)...(19): siRNA sense strand
caacauaaccugauaaagc

SEQ ID NO: 336728 - RNA, 19 nt, Homo sapiens
  misc_RNA (1)...(19): siRNA sense strand
gaaacaagcgucucugaag

SEQ ID NO: 336729 - RNA, 19 nt, Homo sapiens
  misc_RNA (1)...(19): siRNA sense strand
gcagagggauaccaugcaa

SEQ ID NO: 336730 - RNA, 19 nt, Homo sapiens
  misc_RNA (1)...(19): siRNA sense strand
ugaacuagaagcuguguua

SEQ ID NO: 336731 - RNA, 19 nt, Homo sapiens
  misc_RNA (1)...(19): siRNA sense strand
gagaaucccaggacagaaa

SEQ ID NO: 336732 - RNA, 19 nt, Homo sapiens
  misc_RNA (1)...(19): siRNA sense strand
gcccacagaucaacuggaa

SEQ ID NO: 336733 - RNA, 19 nt, Homo sapiens
  misc_RNA (1)...(19): siRNA sense strand
gaagacugcucagggcuau

SEQ ID NO: 336734 - RNA, 19 nt, Homo sapiens
  misc_RNA (1)...(19): siRNA sense strand
gacccagucuauuaaagaa

SEQ ID NO: 336735 - RNA, 19 nt, Homo sapiens
  misc_RNA (1)...(19): siRNA sense strand
acuagaagcuguguuagaa

SEQ ID NO: 336736 - RNA, 19 nt, Homo sapiens
  misc_RNA (1)...(19): siRNA sense strand
caugcaacauaaccugaua

SEQ ID NO: 336737 - RNA, 19 nt, Homo sapiens
  misc_RNA (1)...(19): siRNA sense strand
gcuggacaccuaccugaua

SEQ ID NO: 336738 - RNA, 19 nt, Homo sapiens
  misc_RNA (1)...(19): siRNA sense strand
cagaucaacuggaauggau

SEQ ID NO: 336739 - RNA, 19 nt, Homo sapiens
  misc_RNA (1)...(19): siRNA sense strand
gcaggaaauggcugaacua

SEQ ID NO: 336740 - RNA, 19 nt, Homo sapiens
  misc_RNA (1)...(19): siRNA sense strand
ccacagaucaacuggaaug

SEQ ID NO: 336741 - RNA, 19 nt, Homo sapiens
  misc_RNA (1)...(19): siRNA sense strand
caacaugcccacagaucaa

SEQ ID NO: 336742 - RNA, 19 nt, Homo sapiens
  misc_RNA (1)...(19): siRNA sense strand
ucaccaacaugcccacaga

SEQ ID NO: 336743 - RNA, 19 nt, Homo sapiens
  misc_RNA (1)...(19): siRNA sense strand
cagaggagauguggucaau

SEQ ID NO: 336744 - RNA, 19 nt, Homo sapiens
  misc_RNA (1)...(19): siRNA sense strand
caauugggcagauguguga

SEQ ID NO: 336745 - RNA, 19 nt, Homo sapiens
  misc_RNA (1)...(19): siRNA sense strand
ggagauguggucaauggaa

SEQ ID NO: 336746 - RNA, 19 nt, Homo sapiens
  misc_RNA (1)...(19): siRNA sense strand
guacagcuguguggugcuu

SEQ ID NO: 336747 - RNA, 19 nt, Homo sapiens
  misc_RNA (1)...(19): siRNA sense strand
ccaaagcgagcaagagaau

SEQ ID NO: 336748 - RNA, 19 nt, Homo sapiens
  misc_RNA (1)...(19): siRNA sense strand
gcuaugggcccuucaccaa

SEQ ID NO: 336749 - RNA, 19 nt, Homo sapiens
  misc_RNA (1)...(19): siRNA sense strand
gaaugagcaugauuuugaa

SEQ ID NO: 336750 - RNA, 19 nt, Homo sapiens
  misc_RNA (1)...(19): siRNA sense strand
ucagggcuauccucucaga

SEQ ID NO: 336751 - RNA, 19 nt, Homo sapiens
  misc_RNA (1)...(19): siRNA sense strand
agggauaccaugcaacaua

SEQ ID NO: 336752 - RNA, 19 nt, Homo sapiens
  misc_RNA (1)...(19): siRNA sense strand
gcuagaaaucuguugcuau

SEQ ID NO: 336753 - RNA, 19 nt, Homo sapiens
  misc_RNA (1)...(19): siRNA sense strand
ugaaugagcaugauuuuga

SEQ ID NO: 336754 - RNA, 19 nt, Homo sapiens
  misc_RNA (1)...(19): siRNA sense strand
ggcuagaaaucuguugcua

SEQ ID NO: 336755 - RNA, 19 nt, Homo sapiens
  misc_RNA (1)...(19): siRNA sense strand
ugaaacaagcgucucugaa

SEQ ID NO: 336756 - RNA, 19 nt, Homo sapiens
  misc_RNA (1)...(19): siRNA sense strand
aacauaaccugauaaagcu

SEQ ID NO: 336757 - RNA, 19 nt, Homo sapiens
  misc_RNA (1)...(19): siRNA sense strand
ugacccagucuauuaaaga

SEQ ID NO: 336758 - RNA, 19 nt, Homo sapiens
  misc_RNA (1)...(19): siRNA sense strand
gaacuagaagcuguguuag

SEQ ID NO: 336759 - RNA, 19 nt, Homo sapiens
  misc_RNA (1)...(19): siRNA sense strand
gugaaacaagcgucucuga

SEQ ID NO: 336760 - RNA, 19 nt, Homo sapiens
  misc_RNA (1)...(19): siRNA sense strand
ccaacaugcccacagauca

SEQ ID NO: 336761 - RNA, 19 nt, Homo sapiens
  misc_RNA (1)...(19): siRNA sense strand
uaugggcccuucaccaaca

SEQ ID NO: 336762 - RNA, 19 nt, Homo sapiens
  misc_RNA (1)...(19): siRNA sense strand
guccaaagcgagcaagaga

SEQ ID NO: 336763 - RNA, 19 nt, Homo sapiens
  misc_RNA (1)...(19): siRNA sense strand
cagaacaaagcacaucaga

SEQ ID NO: 336764 - RNA, 19 nt, Homo sapiens
  misc_RNA (1)...(19): siRNA sense strand
ccugcgaaauccagaacaa

SEQ ID NO: 336765 - RNA, 19 nt, Homo sapiens
  misc_RNA (1)...(19): siRNA sense strand
gaaaccaccaagguccaaa

SEQ ID NO: 336766 - RNA, 19 nt, Homo sapiens
  misc_RNA (1)...(19): siRNA sense strand
gauaaagcuccagcaggaa

SEQ ID NO: 336767 - RNA, 19 nt, Homo sapiens
  misc_RNA (1)...(19): siRNA sense strand
aaggagcuuucaucauuca

SEQ ID NO: 336768 - RNA, 19 nt, Homo sapiens
  misc_RNA (1)...(19): siRNA sense strand
ggugugagagugaaacaag

SEQ ID NO: 336769 - RNA, 19 nt, Homo sapiens
  misc_RNA (1)...(19): siRNA sense strand
gaaauggcugaacuagaag

SEQ ID NO: 336770 - RNA, 19 nt, Homo sapiens
  misc_RNA (1)...(19): siRNA sense strand
auaaagcuccagcaggaaa

SEQ ID NO: 336771 - RNA, 19 nt, Homo sapiens
  misc_RNA (1)...(19): siRNA sense strand
acccuuccaucauaaguga

SEQ ID NO: 336772 - RNA, 19 nt, Homo sapiens
  misc_RNA (1)...(19): siRNA sense strand
ggugacccagucuauuaaa

SEQ ID NO: 336773 - RNA, 19 nt, Homo sapiens
  misc_RNA (1)...(19): siRNA sense strand
cccagucuauuaaagaaag

SEQ ID NO: 336774 - RNA, 19 nt, Homo sapiens
  misc_RNA (1)...(19): siRNA sense strand
caucugggugugagaguga

SEQ ID NO: 336775 - RNA, 19 nt, Homo sapiens
  misc_RNA (1)...(19): siRNA sense strand
ccagucuauuaaagaaaga

SEQ ID NO: 336776 - RNA, 19 nt, Homo sapiens
  misc_RNA (1)...(19): siRNA sense strand
cgaaauccagaacaaagca

SEQ ID NO: 336777 - RNA, 19 nt, Homo sapiens
  misc_RNA (1)...(19): siRNA sense strand
aagagaaucccaggacaga

SEQ ID NO: 336778 - RNA, 19 nt, Homo sapiens
  misc_RNA (1)...(19): siRNA sense strand
gauguggucaauggaagaa

SEQ ID NO: 336779 - RNA, 19 nt, Homo sapiens
  misc_RNA (1)...(19): siRNA sense strand
ggaccugcgaaauccagaa

SEQ ID NO: 336780 - RNA, 19 nt, Homo sapiens
  misc_RNA (1)...(19): siRNA sense strand
gagcaugauuuugaaguca

SEQ ID NO: 336781 - RNA, 19 nt, Homo sapiens
  misc_RNA (1)...(19): siRNA sense strand
gugacccagucuauuaaag

SEQ ID NO: 336782 - RNA, 19 nt, Homo sapiens
  misc_RNA (1)...(19): siRNA sense strand
agaacaaagcacaucagaa

SEQ ID NO: 336783 - RNA, 19 nt, Homo sapiens
  misc_RNA (1)...(19): siRNA sense strand
uggaagaaaccaccaaggu

SEQ ID NO: 336784 - RNA, 19 nt, Homo sapiens
  misc_RNA (1)...(19): siRNA sense strand
ucaacuggaauggauggua

SEQ ID NO: 336785 - RNA, 19 nt, Homo sapiens
  misc_RNA (1)...(19): siRNA sense strand
ggaaauggcugaacuagaa

SEQ ID NO: 336786 - RNA, 19 nt, Homo sapiens
  misc_RNA (1)...(19): siRNA sense strand
gaacaaagcacaucagaaa

SEQ ID NO: 336787 - RNA, 19 nt, Homo sapiens
  misc_RNA (1)...(19): siRNA sense strand
cagcuacccuuccaucaua

SEQ ID NO: 336788 - RNA, 19 nt, Homo sapiens
  misc_RNA (1)...(19): siRNA sense strand
gggauaccaugcaacauaa

SEQ ID NO: 336789 - RNA, 19 nt, Homo sapiens
  misc_RNA (1)...(19): siRNA sense strand
gcucagggcuauccucuca

SEQ ID NO: 336790 - RNA, 19 nt, Homo sapiens
  misc_RNA (1)...(19): siRNA sense strand
aaacaagcgucucugaaga

SEQ ID NO: 336791 - RNA, 19 nt, Homo sapiens
  misc_RNA (1)...(19): siRNA sense strand
caacauaaccugauaaagc

SEQ ID NO: 336792 - RNA, 19 nt, Homo sapiens
  misc_RNA (1)...(19): siRNA sense strand
gaaacaagcgucucugaag

SEQ ID NO: 336793 - RNA, 19 nt, Homo sapiens
  misc_RNA (1)...(19): siRNA sense strand
gcagagggauaccaugcaa

SEQ ID NO: 336794 - RNA, 19 nt, Homo sapiens
  misc_RNA (1)...(19): siRNA sense strand
ugaacuagaagcuguguua

SEQ ID NO: 336795 - RNA, 19 nt, Homo sapiens
  misc_RNA (1)...(19): siRNA sense strand
gaagacugcucagggcuau

SEQ ID NO: 336796 - RNA, 19 nt, Homo sapiens
  misc_RNA (1)...(19): siRNA sense strand
acuagaagcuguguuagaa

SEQ ID NO: 336797 - RNA, 19 nt, Homo sapiens
  misc_RNA (1)...(19): siRNA sense strand
caugcaacauaaccugaua

SEQ ID NO: 336798 - RNA, 19 nt, Homo sapiens
  misc_RNA (1)...(19): siRNA sense strand
gcaggaaauggcugaacua

SEQ ID NO: 336799 - RNA, 19 nt, Homo sapiens
  misc_RNA (1)...(19): siRNA sense strand
ucagggcuauccucucaga

SEQ ID NO: 336800 - RNA, 19 nt, Homo sapiens
  misc_RNA (1)...(19): siRNA sense strand
agggauaccaugcaacaua

SEQ ID NO: 336801 - RNA, 19 nt, Homo sapiens
  misc_RNA (1)...(19): siRNA sense strand
ugaaacaagcgucucugaa

SEQ ID NO: 336802 - RNA, 19 nt, Homo sapiens
  misc_RNA (1)...(19): siRNA sense strand
aacauaaccugauaaagcu

SEQ ID NO: 336803 - RNA, 19 nt, Homo sapiens
  misc_RNA (1)...(19): siRNA sense strand
gaacuagaagcuguguuag

SEQ ID NO: 336804 - RNA, 19 nt, Homo sapiens
  misc_RNA (1)...(19): siRNA sense strand
cagaacaaagcacaucaga

SEQ ID NO: 336805 - RNA, 19 nt, Homo sapiens
  misc_RNA (1)...(19): siRNA sense strand
gugaaacaagcgucucuga

SEQ ID NO: 336806 - RNA, 19 nt, Homo sapiens
  misc_RNA (1)...(19): siRNA sense strand
ccugcgaaauccagaacaa

SEQ ID NO: 336807 - RNA, 19 nt, Homo sapiens
  misc_RNA (1)...(19): siRNA sense strand
gauaaagcuccagcaggaa

SEQ ID NO: 336808 - RNA, 19 nt, Homo sapiens
  misc_RNA (1)...(19): siRNA sense strand
ggugugagagugaaacaag

SEQ ID NO: 336809 - RNA, 19 nt, Homo sapiens
  misc_RNA (1)...(19): siRNA sense strand
auaaagcuccagcaggaaa

SEQ ID NO: 336810 - RNA, 19 nt, Homo sapiens
  misc_RNA (1)...(19): siRNA sense strand
acccuuccaucauaaguga

SEQ ID NO: 336811 - RNA, 19 nt, Homo sapiens
  misc_RNA (1)...(19): siRNA sense strand
gaaauggcugaacuagaag

SEQ ID NO: 336812 - RNA, 19 nt, Homo sapiens
  misc_RNA (1)...(19): siRNA sense strand
caucugggugugagaguga

SEQ ID NO: 336813 - RNA, 19 nt, Homo sapiens
  misc_RNA (1)...(19): siRNA sense strand
cgaaauccagaacaaagca

SEQ ID NO: 336814 - RNA, 19 nt, Homo sapiens
  misc_RNA (1)...(19): siRNA sense strand
ggaccugcgaaauccagaa

SEQ ID NO: 336815 - RNA, 19 nt, Homo sapiens
  misc_RNA (1)...(19): siRNA sense strand
agaacaaagcacaucagaa

SEQ ID NO: 336816 - RNA, 19 nt, Homo sapiens
  misc_RNA (1)...(19): siRNA sense strand
ggaaauggcugaacuagaa

SEQ ID NO: 336817 - RNA, 19 nt, Homo sapiens
  misc_RNA (1)...(19): siRNA sense strand
gaacaaagcacaucagaaa

SEQ ID NO: 336818 - RNA, 19 nt, Homo sapiens
  misc_RNA (1)...(19): siRNA sense strand
cagcuacccuuccaucaua

SEQ ID NO: 336819 - RNA, 19 nt, Homo sapiens
  misc_RNA (1)...(19): siRNA sense strand
gggauaccaugcaacauaa

SEQ ID NO: 336820 - RNA, 19 nt, Homo sapiens
  misc_RNA (1)...(19): siRNA sense strand
gaggagauguggucaaugg

SEQ ID NO: 336821 - RNA, 19 nt, Homo sapiens
  misc_RNA (1)...(19): siRNA sense strand
gaaggagcuuucaucauuc

SEQ ID NO: 336822 - RNA, 19 nt, Homo sapiens
  misc_RNA (1)...(19): siRNA sense strand
cuagaaaucuguugcuaug

SEQ ID NO: 336823 - RNA, 19 nt, Homo sapiens
  misc_RNA (1)...(19): siRNA sense strand
gcucagggcuauccucuca

SEQ ID NO: 336824 - RNA, 19 nt, Homo sapiens
  misc_RNA (1)...(19): siRNA sense strand
aaacaagcgucucugaaga

SEQ ID NO: 336825 - RNA, 19 nt, Homo sapiens
  misc_RNA (1)...(19): siRNA sense strand
caacauaaccugauaaagc

SEQ ID NO: 336826 - RNA, 19 nt, Homo sapiens
  misc_RNA (1)...(19): siRNA sense strand
gaaacaagcgucucugaag

SEQ ID NO: 336827 - RNA, 19 nt, Homo sapiens
  misc_RNA (1)...(19): siRNA sense strand
gcagagggauaccaugcaa

SEQ ID NO: 336828 - RNA, 19 nt, Homo sapiens
  misc_RNA (1)...(19): siRNA sense strand
ugaacuagaagcuguguua

SEQ ID NO: 336829 - RNA, 19 nt, Homo sapiens
  misc_RNA (1)...(19): siRNA sense strand
gagaaucccaggacagaaa

SEQ ID NO: 336830 - RNA, 19 nt, Homo sapiens
  misc_RNA (1)...(19): siRNA sense strand
gcccacagaucaacuggaa

SEQ ID NO: 336831 - RNA, 19 nt, Homo sapiens
  misc_RNA (1)...(19): siRNA sense strand
gaagacugcucagggcuau

SEQ ID NO: 336832 - RNA, 19 nt, Homo sapiens
  misc_RNA (1)...(19): siRNA sense strand
gacccagucuauuaaagaa

SEQ ID NO: 336833 - RNA, 19 nt, Homo sapiens
  misc_RNA (1)...(19): siRNA sense strand
acuagaagcuguguuagaa

SEQ ID NO: 336834 - RNA, 19 nt, Homo sapiens
  misc_RNA (1)...(19): siRNA sense strand
caugcaacauaaccugaua

SEQ ID NO: 336835 - RNA, 19 nt, Homo sapiens
  misc_RNA (1)...(19): siRNA sense strand
gcuggacaccuaccugaua

SEQ ID NO: 336836 - RNA, 19 nt, Homo sapiens
  misc_RNA (1)...(19): siRNA sense strand
cagaucaacuggaauggau

SEQ ID NO: 336837 - RNA, 19 nt, Homo sapiens
  misc_RNA (1)...(19): siRNA sense strand
gcaggaaauggcugaacua

SEQ ID NO: 336838 - RNA, 19 nt, Homo sapiens
  misc_RNA (1)...(19): siRNA sense strand
ccacagaucaacuggaaug

SEQ ID NO: 336839 - RNA, 19 nt, Homo sapiens
  misc_RNA (1)...(19): siRNA sense strand
caacaugcccacagaucaa

SEQ ID NO: 336840 - RNA, 19 nt, Homo sapiens
  misc_RNA (1)...(19): siRNA sense strand
ucaccaacaugcccacaga

SEQ ID NO: 336841 - RNA, 19 nt, Homo sapiens
  misc_RNA (1)...(19): siRNA sense strand
cagaggagauguggucaau

SEQ ID NO: 336842 - RNA, 19 nt, Homo sapiens
  misc_RNA (1)...(19): siRNA sense strand
caauugggcagauguguga

SEQ ID NO: 336843 - RNA, 19 nt, Homo sapiens
  misc_RNA (1)...(19): siRNA sense strand
ggagauguggucaauggaa

SEQ ID NO: 336844 - RNA, 19 nt, Homo sapiens
  misc_RNA (1)...(19): siRNA sense strand
guacagcuguguggugcuu

SEQ ID NO: 336845 - RNA, 19 nt, Homo sapiens
  misc_RNA (1)...(19): siRNA sense strand
ccaaagcgagcaagagaau

SEQ ID NO: 336846 - RNA, 19 nt, Homo sapiens
  misc_RNA (1)...(19): siRNA sense strand
gcuaugggcccuucaccaa

SEQ ID NO: 336847 - RNA, 19 nt, Homo sapiens
  misc_RNA (1)...(19): siRNA sense strand
gaaugagcaugauuuugaa

SEQ ID NO: 336848 - RNA, 19 nt, Homo sapiens
  misc_RNA (1)...(19): siRNA sense strand
ucagggcuauccucucaga

SEQ ID NO: 336849 - RNA, 19 nt, Homo sapiens
  misc_RNA (1)...(19): siRNA sense strand
agggauaccaugcaacaua

SEQ ID NO: 336850 - RNA, 19 nt, Homo sapiens
  misc_RNA (1)...(19): siRNA sense strand
gcuagaaaucuguugcuau

SEQ ID NO: 336851 - RNA, 19 nt, Homo sapiens
  misc_RNA (1)...(19): siRNA sense strand
ugaaugagcaugauuuuga

SEQ ID NO: 336852 - RNA, 19 nt, Homo sapiens
  misc_RNA (1)...(19): siRNA sense strand
ggcuagaaaucuguugcua

SEQ ID NO: 336853 - RNA, 19 nt, Homo sapiens
  misc_RNA (1)...(19): siRNA sense strand
ugaaacaagcgucucugaa

SEQ ID NO: 336854 - RNA, 19 nt, Homo sapiens
  misc_RNA (1)...(19): siRNA sense strand
aacauaaccugauaaagcu

SEQ ID NO: 336855 - RNA, 19 nt, Homo sapiens
  misc_RNA (1)...(19): siRNA sense strand
ugacccagucuauuaaaga

SEQ ID NO: 336856 - RNA, 19 nt, Homo sapiens
  misc_RNA (1)...(19): siRNA sense strand
gaacuagaagcuguguuag

SEQ ID NO: 336857 - RNA, 19 nt, Homo sapiens
  misc_RNA (1)...(19): siRNA sense strand
gugaaacaagcgucucuga

SEQ ID NO: 336858 - RNA, 19 nt, Homo sapiens
  misc_RNA (1)...(19): siRNA sense strand
ccaacaugcccacagauca

SEQ ID NO: 336859 - RNA, 19 nt, Homo sapiens
  misc_RNA (1)...(19): siRNA sense strand
uaugggcccuucaccaaca

SEQ ID NO: 336860 - RNA, 19 nt, Homo sapiens
  misc_RNA (1)...(19): siRNA sense strand
guccaaagcgagcaagaga

SEQ ID NO: 336861 - RNA, 19 nt, Homo sapiens
  misc_RNA (1)...(19): siRNA sense strand
cagaacaaagcacaucaga

SEQ ID NO: 336862 - RNA, 19 nt, Homo sapiens
  misc_RNA (1)...(19): siRNA sense strand
ccugcgaaauccagaacaa

SEQ ID NO: 336863 - RNA, 19 nt, Homo sapiens
  misc_RNA (1)...(19): siRNA sense strand
gaaaccaccaagguccaaa

SEQ ID NO: 336864 - RNA, 19 nt, Homo sapiens
  misc_RNA (1)...(19): siRNA sense strand
gauaaagcuccagcaggaa

SEQ ID NO: 336865 - RNA, 19 nt, Homo sapiens
  misc_RNA (1)...(19): siRNA sense strand
aaggagcuuucaucauuca

SEQ ID NO: 336866 - RNA, 19 nt, Homo sapiens
  misc_RNA (1)...(19): siRNA sense strand
ggugugagagugaaacaag

SEQ ID NO: 336867 - RNA, 19 nt, Homo sapiens
  misc_RNA (1)...(19): siRNA sense strand
gaaauggcugaacuagaag

SEQ ID NO: 336868 - RNA, 19 nt, Homo sapiens
  misc_RNA (1)...(19): siRNA sense strand
auaaagcuccagcaggaaa

SEQ ID NO: 336869 - RNA, 19 nt, Homo sapiens
  misc_RNA (1)...(19): siRNA sense strand
acccuuccaucauaaguga

SEQ ID NO: 336870 - RNA, 19 nt, Homo sapiens
  misc_RNA (1)...(19): siRNA sense strand
ggugacccagucuauuaaa

SEQ ID NO: 336871 - RNA, 19 nt, Homo sapiens
  misc_RNA (1)...(19): siRNA sense strand
cccagucuauuaaagaaag

SEQ ID NO: 336872 - RNA, 19 nt, Homo sapiens
  misc_RNA (1)...(19): siRNA sense strand
caucugggugugagaguga

SEQ ID NO: 336873 - RNA, 19 nt, Homo sapiens
  misc_RNA (1)...(19): siRNA sense strand
ccagucuauuaaagaaaga

SEQ ID NO: 336874 - RNA, 19 nt, Homo sapiens
  misc_RNA (1)...(19): siRNA sense strand
cgaaauccagaacaaagca

SEQ ID NO: 336875 - RNA, 19 nt, Homo sapiens
  misc_RNA (1)...(19): siRNA sense strand
aagagaaucccaggacaga

SEQ ID NO: 336876 - RNA, 19 nt, Homo sapiens
  misc_RNA (1)...(19): siRNA sense strand
gauguggucaauggaagaa

SEQ ID NO: 336877 - RNA, 19 nt, Homo sapiens
  misc_RNA (1)...(19): siRNA sense strand
ggaccugcgaaauccagaa

SEQ ID NO: 336878 - RNA, 19 nt, Homo sapiens
  misc_RNA (1)...(19): siRNA sense strand
gagcaugauuuugaaguca

SEQ ID NO: 336879 - RNA, 19 nt, Homo sapiens
  misc_RNA (1)...(19): siRNA sense strand
gugacccagucuauuaaag

SEQ ID NO: 336880 - RNA, 19 nt, Homo sapiens
  misc_RNA (1)...(19): siRNA sense strand
agaacaaagcacaucagaa

SEQ ID NO: 336881 - RNA, 19 nt, Homo sapiens
  misc_RNA (1)...(19): siRNA sense strand
uggaagaaaccaccaaggu

SEQ ID NO: 336882 - RNA, 19 nt, Homo sapiens
  misc_RNA (1)...(19): siRNA sense strand
ucaacuggaauggauggua

SEQ ID NO: 336883 - RNA, 19 nt, Homo sapiens
  misc_RNA (1)...(19): siRNA sense strand
ggaaauggcugaacuagaa

SEQ ID NO: 336884 - RNA, 19 nt, Homo sapiens
  misc_RNA (1)...(19): siRNA sense strand
gaacaaagcacaucagaaa

SEQ ID NO: 336885 - RNA, 19 nt, Homo sapiens
  misc_RNA (1)...(19): siRNA sense strand
cagcuacccuuccaucaua

SEQ ID NO: 336886 - RNA, 19 nt, Homo sapiens
  misc_RNA (1)...(19): siRNA sense strand
gggauaccaugcaacauaa

SEQ ID NO: 336887 - RNA, 19 nt, Homo sapiens
  misc_RNA (1)...(19): siRNA sense strand
gaggagauguggucaaugg

SEQ ID NO: 336888 - RNA, 19 nt, Homo sapiens
  misc_RNA (1)...(19): siRNA sense strand
gaaggagcuuucaucauuc

SEQ ID NO: 336889 - RNA, 19 nt, Homo sapiens
  misc_RNA (1)...(19): siRNA sense strand
cuagaaaucuguugcuaug

SEQ ID NO: 336890 - RNA, 19 nt, Homo sapiens
  misc_RNA (1)...(19): siRNA sense strand
gcucagggcuauccucuca

SEQ ID NO: 336891 - RNA, 19 nt, Homo sapiens
  misc_RNA (1)...(19): siRNA sense strand
aaacaagcgucucugaaga

SEQ ID NO: 336892 - RNA, 19 nt, Homo sapiens
  misc_RNA (1)...(19): siRNA sense strand
caacauaaccugauaaagc

SEQ ID NO: 336893 - RNA, 19 nt, Homo sapiens
  misc_RNA (1)...(19): siRNA sense strand
gaaacaagcgucucugaag

SEQ ID NO: 336894 - RNA, 19 nt, Homo sapiens
  misc_RNA (1)...(19): siRNA sense strand
gcagagggauaccaugcaa

SEQ ID NO: 336895 - RNA, 19 nt, Homo sapiens
  misc_RNA (1)...(19): siRNA sense strand
ugaacuagaagcuguguua

SEQ ID NO: 336896 - RNA, 19 nt, Homo sapiens
  misc_RNA (1)...(19): siRNA sense strand
gagaaucccaggacagaaa

SEQ ID NO: 336897 - RNA, 19 nt, Homo sapiens
  misc_RNA (1)...(19): siRNA sense strand
gcccacagaucaacuggaa

SEQ ID NO: 336898 - RNA, 19 nt, Homo sapiens
  misc_RNA (1)...(19): siRNA sense strand
gaagacugcucagggcuau

SEQ ID NO: 336899 - RNA, 19 nt, Homo sapiens
  misc_RNA (1)...(19): siRNA sense strand
gacccagucuauuaaagaa

SEQ ID NO: 336900 - RNA, 19 nt, Homo sapiens
  misc_RNA (1)...(19): siRNA sense strand
acuagaagcuguguuagaa

SEQ ID NO: 336901 - RNA, 19 nt, Homo sapiens
  misc_RNA (1)...(19): siRNA sense strand
caugcaacauaaccugaua

SEQ ID NO: 336902 - RNA, 19 nt, Homo sapiens
  misc_RNA (1)...(19): siRNA sense strand
gcuggacaccuaccugaua

SEQ ID NO: 336903 - RNA, 19 nt, Homo sapiens
  misc_RNA (1)...(19): siRNA sense strand
cagaucaacuggaauggau

SEQ ID NO: 336904 - RNA, 19 nt, Homo sapiens
  misc_RNA (1)...(19): siRNA sense strand
gcaggaaauggcugaacua

SEQ ID NO: 336905 - RNA, 19 nt, Homo sapiens
  misc_RNA (1)...(19): siRNA sense strand
ccacagaucaacuggaaug

SEQ ID NO: 336906 - RNA, 19 nt, Homo sapiens
  misc_RNA (1)...(19): siRNA sense strand
caacaugcccacagaucaa

SEQ ID NO: 336907 - RNA, 19 nt, Homo sapiens
  misc_RNA (1)...(19): siRNA sense strand
ucaccaacaugcccacaga

SEQ ID NO: 336908 - RNA, 19 nt, Homo sapiens
  misc_RNA (1)...(19): siRNA sense strand
cagaggagauguggucaau

SEQ ID NO: 336909 - RNA, 19 nt, Homo sapiens
  misc_RNA (1)...(19): siRNA sense strand
caauugggcagauguguga

SEQ ID NO: 336910 - RNA, 19 nt, Homo sapiens
  misc_RNA (1)...(19): siRNA sense strand
ggagauguggucaauggaa

SEQ ID NO: 336911 - RNA, 19 nt, Homo sapiens
  misc_RNA (1)...(19): siRNA sense strand
guacagcuguguggugcuu

SEQ ID NO: 336912 - RNA, 19 nt, Homo sapiens
  misc_RNA (1)...(19): siRNA sense strand
ccaaagcgagcaagagaau

SEQ ID NO: 336913 - RNA, 19 nt, Homo sapiens
  misc_RNA (1)...(19): siRNA sense strand
gcuaugggcccuucaccaa

SEQ ID NO: 336914 - RNA, 19 nt, Homo sapiens
  misc_RNA (1)...(19): siRNA sense strand
gaaugagcaugauuuugaa

SEQ ID NO: 336915 - RNA, 19 nt, Homo sapiens
  misc_RNA (1)...(19): siRNA sense strand
ucagggcuauccucucaga

SEQ ID NO: 336916 - RNA, 19 nt, Homo sapiens
  misc_RNA (1)...(19): siRNA sense strand
agggauaccaugcaacaua

SEQ ID NO: 336917 - RNA, 19 nt, Homo sapiens
  misc_RNA (1)...(19): siRNA sense strand
gcuagaaaucuguugcuau

SEQ ID NO: 336918 - RNA, 19 nt, Homo sapiens
  misc_RNA (1)...(19): siRNA sense strand
ugaaugagcaugauuuuga

SEQ ID NO: 336919 - RNA, 19 nt, Homo sapiens
  misc_RNA (1)...(19): siRNA sense strand
ggcuagaaaucuguugcua

SEQ ID NO: 336920 - RNA, 19 nt, Homo sapiens
  misc_RNA (1)...(19): siRNA sense strand
ugaaacaagcgucucugaa

SEQ ID NO: 336921 - RNA, 19 nt, Homo sapiens
  misc_RNA (1)...(19): siRNA sense strand
aacauaaccugauaaagcu

SEQ ID NO: 336922 - RNA, 19 nt, Homo sapiens
  misc_RNA (1)...(19): siRNA sense strand
ugacccagucuauuaaaga

SEQ ID NO: 336923 - RNA, 19 nt, Homo sapiens
  misc_RNA (1)...(19): siRNA sense strand
gaacuagaagcuguguuag

SEQ ID NO: 336924 - RNA, 19 nt, Homo sapiens
  misc_RNA (1)...(19): siRNA sense strand
gugaaacaagcgucucuga

SEQ ID NO: 336925 - RNA, 19 nt, Homo sapiens
  misc_RNA (1)...(19): siRNA sense strand
ccaacaugcccacagauca

SEQ ID NO: 336926 - RNA, 19 nt, Homo sapiens
  misc_RNA (1)...(19): siRNA sense strand
uaugggcccuucaccaaca

SEQ ID NO: 336927 - RNA, 19 nt, Homo sapiens
  misc_RNA (1)...(19): siRNA sense strand
guccaaagcgagcaagaga

SEQ ID NO: 336928 - RNA, 19 nt, Homo sapiens
  misc_RNA (1)...(19): siRNA sense strand
cagaacaaagcacaucaga

SEQ ID NO: 336929 - RNA, 19 nt, Homo sapiens
  misc_RNA (1)...(19): siRNA sense strand
ccugcgaaauccagaacaa

SEQ ID NO: 336930 - RNA, 19 nt, Homo sapiens
  misc_RNA (1)...(19): siRNA sense strand
gaaaccaccaagguccaaa

SEQ ID NO: 336931 - RNA, 19 nt, Homo sapiens
  misc_RNA (1)...(19): siRNA sense strand
gauaaagcuccagcaggaa

SEQ ID NO: 336932 - RNA, 19 nt, Homo sapiens
  misc_RNA (1)...(19): siRNA sense strand
aaggagcuuucaucauuca

SEQ ID NO: 336933 - RNA, 19 nt, Homo sapiens
  misc_RNA (1)...(19): siRNA sense strand
ggugugagagugaaacaag

SEQ ID NO: 336934 - RNA, 19 nt, Homo sapiens
  misc_RNA (1)...(19): siRNA sense strand
gaaauggcugaacuagaag

SEQ ID NO: 336935 - RNA, 19 nt, Homo sapiens
  misc_RNA (1)...(19): siRNA sense strand
auaaagcuccagcaggaaa

SEQ ID NO: 336936 - RNA, 19 nt, Homo sapiens
  misc_RNA (1)...(19): siRNA sense strand
acccuuccaucauaaguga

SEQ ID NO: 336937 - RNA, 19 nt, Homo sapiens
  misc_RNA (1)...(19): siRNA sense strand
ggugacccagucuauuaaa

SEQ ID NO: 336938 - RNA, 19 nt, Homo sapiens
  misc_RNA (1)...(19): siRNA sense strand
cccagucuauuaaagaaag

SEQ ID NO: 336939 - RNA, 19 nt, Homo sapiens
  misc_RNA (1)...(19): siRNA sense strand
caucugggugugagaguga

SEQ ID NO: 336940 - RNA, 19 nt, Homo sapiens
  misc_RNA (1)...(19): siRNA sense strand
ccagucuauuaaagaaaga

SEQ ID NO: 336941 - RNA, 19 nt, Homo sapiens
  misc_RNA (1)...(19): siRNA sense strand
cgaaauccagaacaaagca

SEQ ID NO: 336942 - RNA, 19 nt, Homo sapiens
  misc_RNA (1)...(19): siRNA sense strand
aagagaaucccaggacaga

SEQ ID NO: 336943 - RNA, 19 nt, Homo sapiens
  misc_RNA (1)...(19): siRNA sense strand
gauguggucaauggaagaa

SEQ ID NO: 336944 - RNA, 19 nt, Homo sapiens
  misc_RNA (1)...(19): siRNA sense strand
ggaccugcgaaauccagaa

SEQ ID NO: 336945 - RNA, 19 nt, Homo sapiens
  misc_RNA (1)...(19): siRNA sense strand
gagcaugauuuugaaguca

SEQ ID NO: 336946 - RNA, 19 nt, Homo sapiens
  misc_RNA (1)...(19): siRNA sense strand
gugacccagucuauuaaag

SEQ ID NO: 336947 - RNA, 19 nt, Homo sapiens
  misc_RNA (1)...(19): siRNA sense strand
agaacaaagcacaucagaa

SEQ ID NO: 336948 - RNA, 19 nt, Homo sapiens
  misc_RNA (1)...(19): siRNA sense strand
uggaagaaaccaccaaggu

SEQ ID NO: 336949 - RNA, 19 nt, Homo sapiens
  misc_RNA (1)...(19): siRNA sense strand
ucaacuggaauggauggua

SEQ ID NO: 336950 - RNA, 19 nt, Homo sapiens
  misc_RNA (1)...(19): siRNA sense strand
ggaaauggcugaacuagaa

SEQ ID NO: 336951 - RNA, 19 nt, Homo sapiens
  misc_RNA (1)...(19): siRNA sense strand
gaacaaagcacaucagaaa

SEQ ID NO: 336952 - RNA, 19 nt, Homo sapiens
  misc_RNA (1)...(19): siRNA sense strand
cagcuacccuuccaucaua

SEQ ID NO: 336953 - RNA, 19 nt, Homo sapiens
  misc_RNA (1)...(19): siRNA sense strand
gggauaccaugcaacauaa

SEQ ID NO: 336954 - RNA, 19 nt, Homo sapiens
  misc_RNA (1)...(19): siRNA sense strand
gaggagauguggucaaugg

SEQ ID NO: 336955 - RNA, 19 nt, Homo sapiens
  misc_RNA (1)...(19): siRNA sense strand
gaaggagcuuucaucauuc

SEQ ID NO: 336956 - RNA, 19 nt, Homo sapiens
  misc_RNA (1)...(19): siRNA sense strand
cuagaaaucuguugcuaug

SEQ ID NO: 336957 - RNA, 19 nt, Homo sapiens
  misc_RNA (1)...(19): siRNA sense strand
gcucagggcuauccucuca

SEQ ID NO: 336958 - RNA, 19 nt, Homo sapiens
  misc_RNA (1)...(19): siRNA sense strand
aaacaagcgucucugaaga

SEQ ID NO: 336959 - RNA, 19 nt, Homo sapiens
  misc_RNA (1)...(19): siRNA sense strand
caacauaaccugauaaagc

SEQ ID NO: 336960 - RNA, 19 nt, Homo sapiens
  misc_RNA (1)...(19): siRNA sense strand
gaaacaagcgucucugaag

SEQ ID NO: 336961 - RNA, 19 nt, Homo sapiens
  misc_RNA (1)...(19): siRNA sense strand
gcagagggauaccaugcaa

SEQ ID NO: 336962 - RNA, 19 nt, Homo sapiens
  misc_RNA (1)...(19): siRNA sense strand
ugaacuagaagcuguguua

SEQ ID NO: 336963 - RNA, 19 nt, Homo sapiens
  misc_RNA (1)...(19): siRNA sense strand
gagaaucccaggacagaaa

SEQ ID NO: 336964 - RNA, 19 nt, Homo sapiens
  misc_RNA (1)...(19): siRNA sense strand
gcccacagaucaacuggaa

SEQ ID NO: 336965 - RNA, 19 nt, Homo sapiens
  misc_RNA (1)...(19): siRNA sense strand
gaagacugcucagggcuau

SEQ ID NO: 336966 - RNA, 19 nt, Homo sapiens
  misc_RNA (1)...(19): siRNA sense strand
gacccagucuauuaaagaa

SEQ ID NO: 336967 - RNA, 19 nt, Homo sapiens
  misc_RNA (1)...(19): siRNA sense strand
acuagaagcuguguuagaa

SEQ ID NO: 336968 - RNA, 19 nt, Homo sapiens
  misc_RNA (1)...(19): siRNA sense strand
caugcaacauaaccugaua

SEQ ID NO: 336969 - RNA, 19 nt, Homo sapiens
  misc_RNA (1)...(19): siRNA sense strand
gcuggacaccuaccugaua

SEQ ID NO: 336970 - RNA, 19 nt, Homo sapiens
  misc_RNA (1)...(19): siRNA sense strand
cagaucaacuggaauggau

SEQ ID NO: 336971 - RNA, 19 nt, Homo sapiens
  misc_RNA (1)...(19): siRNA sense strand
gcaggaaauggcugaacua

SEQ ID NO: 336972 - RNA, 19 nt, Homo sapiens
  misc_RNA (1)...(19): siRNA sense strand
ccacagaucaacuggaaug

SEQ ID NO: 336973 - RNA, 19 nt, Homo sapiens
  misc_RNA (1)...(19): siRNA sense strand
caacaugcccacagaucaa

SEQ ID NO: 336974 - RNA, 19 nt, Homo sapiens
  misc_RNA (1)...(19): siRNA sense strand
ucaccaacaugcccacaga

SEQ ID NO: 336975 - RNA, 19 nt, Homo sapiens
  misc_RNA (1)...(19): siRNA sense strand
cagaggagauguggucaau

SEQ ID NO: 336976 - RNA, 19 nt, Homo sapiens
  misc_RNA (1)...(19): siRNA sense strand
caauugggcagauguguga

SEQ ID NO: 336977 - RNA, 19 nt, Homo sapiens
  misc_RNA (1)...(19): siRNA sense strand
ggagauguggucaauggaa

SEQ ID NO: 336978 - RNA, 19 nt, Homo sapiens
  misc_RNA (1)...(19): siRNA sense strand
guacagcuguguggugcuu

SEQ ID NO: 336979 - RNA, 19 nt, Homo sapiens
  misc_RNA (1)...(19): siRNA sense strand
ccaaagcgagcaagagaau

SEQ ID NO: 336980 - RNA, 19 nt, Homo sapiens
  misc_RNA (1)...(19): siRNA sense strand
gcuaugggcccuucaccaa

SEQ ID NO: 336981 - RNA, 19 nt, Homo sapiens
  misc_RNA (1)...(19): siRNA sense strand
gaaugagcaugauuuugaa

SEQ ID NO: 336982 - RNA, 19 nt, Homo sapiens
  misc_RNA (1)...(19): siRNA sense strand
ucagggcuauccucucaga

SEQ ID NO: 336983 - RNA, 19 nt, Homo sapiens
  misc_RNA (1)...(19): siRNA sense strand
agggauaccaugcaacaua

SEQ ID NO: 336984 - RNA, 19 nt, Homo sapiens
  misc_RNA (1)...(19): siRNA sense strand
gcuagaaaucuguugcuau

SEQ ID NO: 336985 - RNA, 19 nt, Homo sapiens
  misc_RNA (1)...(19): siRNA sense strand
ugaaugagcaugauuuuga

SEQ ID NO: 336986 - RNA, 19 nt, Homo sapiens
  misc_RNA (1)...(19): siRNA sense strand
ggcuagaaaucuguugcua

SEQ ID NO: 336987 - RNA, 19 nt, Homo sapiens
  misc_RNA (1)...(19): siRNA sense strand
ugaaacaagcgucucugaa

SEQ ID NO: 336988 - RNA, 19 nt, Homo sapiens
  misc_RNA (1)...(19): siRNA sense strand
aacauaaccugauaaagcu

SEQ ID NO: 336989 - RNA, 19 nt, Homo sapiens
  misc_RNA (1)...(19): siRNA sense strand
ugacccagucuauuaaaga

SEQ ID NO: 336990 - RNA, 19 nt, Homo sapiens
  misc_RNA (1)...(19): siRNA sense strand
gaacuagaagcuguguuag

SEQ ID NO: 336991 - RNA, 19 nt, Homo sapiens
  misc_RNA (1)...(19): siRNA sense strand
gugaaacaagcgucucuga

SEQ ID NO: 336992 - RNA, 19 nt, Homo sapiens
  misc_RNA (1)...(19): siRNA sense strand
ccaacaugcccacagauca

SEQ ID NO: 336993 - RNA, 19 nt, Homo sapiens
  misc_RNA (1)...(19): siRNA sense strand
uaugggcccuucaccaaca

SEQ ID NO: 336994 - RNA, 19 nt, Homo sapiens
  misc_RNA (1)...(19): siRNA sense strand
guccaaagcgagcaagaga

SEQ ID NO: 336995 - RNA, 19 nt, Homo sapiens
  misc_RNA (1)...(19): siRNA sense strand
cagaacaaagcacaucaga

SEQ ID NO: 336996 - RNA, 19 nt, Homo sapiens
  misc_RNA (1)...(19): siRNA sense strand
ccugcgaaauccagaacaa

SEQ ID NO: 336997 - RNA, 19 nt, Homo sapiens
  misc_RNA (1)...(19): siRNA sense strand
gaaaccaccaagguccaaa

SEQ ID NO: 336998 - RNA, 19 nt, Homo sapiens
  misc_RNA (1)...(19): siRNA sense strand
gauaaagcuccagcaggaa

SEQ ID NO: 336999 - RNA, 19 nt, Homo sapiens
  misc_RNA (1)...(19): siRNA sense strand
aaggagcuuucaucauuca

SEQ ID NO: 337000 - RNA, 19 nt, Homo sapiens
  misc_RNA (1)...(19): siRNA sense strand
ggugugagagugaaacaag

SEQ ID NO: 337001 - RNA, 19 nt, Homo sapiens
  misc_RNA (1)...(19): siRNA sense strand
gaaauggcugaacuagaag

SEQ ID NO: 337002 - RNA, 19 nt, Homo sapiens
  misc_RNA (1)...(19): siRNA sense strand
auaaagcuccagcaggaaa

SEQ ID NO: 337003 - RNA, 19 nt, Homo sapiens
  misc_RNA (1)...(19): siRNA sense strand
acccuuccaucauaaguga

SEQ ID NO: 337004 - RNA, 19 nt, Homo sapiens
  misc_RNA (1)...(19): siRNA sense strand
ggugacccagucuauuaaa

SEQ ID NO: 337005 - RNA, 19 nt, Homo sapiens
  misc_RNA (1)...(19): siRNA sense strand
cccagucuauuaaagaaag

SEQ ID NO: 337006 - RNA, 19 nt, Homo sapiens
  misc_RNA (1)...(19): siRNA sense strand
caucugggugugagaguga

SEQ ID NO: 337007 - RNA, 19 nt, Homo sapiens
  misc_RNA (1)...(19): siRNA sense strand
ccagucuauuaaagaaaga

SEQ ID NO: 337008 - RNA, 19 nt, Homo sapiens
  misc_RNA (1)...(19): siRNA sense strand
cgaaauccagaacaaagca

SEQ ID NO: 337009 - RNA, 19 nt, Homo sapiens
  misc_RNA (1)...(19): siRNA sense strand
aagagaaucccaggacaga

SEQ ID NO: 337010 - RNA, 19 nt, Homo sapiens
  misc_RNA (1)...(19): siRNA sense strand
gauguggucaauggaagaa

SEQ ID NO: 337011 - RNA, 19 nt, Homo sapiens
  misc_RNA (1)...(19): siRNA sense strand
ggaccugcgaaauccagaa

SEQ ID NO: 337012 - RNA, 19 nt, Homo sapiens
  misc_RNA (1)...(19): siRNA sense strand
gagcaugauuuugaaguca

SEQ ID NO: 337013 - RNA, 19 nt, Homo sapiens
  misc_RNA (1)...(19): siRNA sense strand
gugacccagucuauuaaag

SEQ ID NO: 337014 - RNA, 19 nt, Homo sapiens
  misc_RNA (1)...(19): siRNA sense strand
agaacaaagcacaucagaa

SEQ ID NO: 337015 - RNA, 19 nt, Homo sapiens
  misc_RNA (1)...(19): siRNA sense strand
uggaagaaaccaccaaggu

SEQ ID NO: 337016 - RNA, 19 nt, Homo sapiens
  misc_RNA (1)...(19): siRNA sense strand
ucaacuggaauggauggua

SEQ ID NO: 337017 - RNA, 19 nt, Homo sapiens
  misc_RNA (1)...(19): siRNA sense strand
ggaaauggcugaacuagaa

SEQ ID NO: 337018 - RNA, 19 nt, Homo sapiens
  misc_RNA (1)...(19): siRNA sense strand
gaacaaagcacaucagaaa

SEQ ID NO: 337019 - RNA, 19 nt, Homo sapiens
  misc_RNA (1)...(19): siRNA sense strand
cagcuacccuuccaucaua

SEQ ID NO: 337020 - RNA, 19 nt, Homo sapiens
  misc_RNA (1)...(19): siRNA sense strand
gggauaccaugcaacauaa

SEQ ID NO: 337021 - RNA, 19 nt, Homo sapiens
  misc_RNA (1)...(19): siRNA sense strand
gaggagauguggucaaugg

SEQ ID NO: 337022 - RNA, 19 nt, Homo sapiens
  misc_RNA (1)...(19): siRNA sense strand
gaaggagcuuucaucauuc

SEQ ID NO: 337023 - RNA, 19 nt, Homo sapiens
  misc_RNA (1)...(19): siRNA sense strand
cuagaaaucuguugcuaug

SEQ ID NO: 337024 - RNA, 19 nt, Homo sapiens
  misc_RNA (1)...(19): siRNA sense strand
gcucagggcuauccucuca

SEQ ID NO: 337025 - RNA, 19 nt, Homo sapiens
  misc_RNA (1)...(19): siRNA sense strand
aaacaagcgucucugaaga

SEQ ID NO: 337026 - RNA, 19 nt, Homo sapiens
  misc_RNA (1)...(19): siRNA sense strand
caacauaaccugauaaagc

SEQ ID NO: 337027 - RNA, 19 nt, Homo sapiens
  misc_RNA (1)...(19): siRNA sense strand
gaaacaagcgucucugaag

SEQ ID NO: 337028 - RNA, 19 nt, Homo sapiens
  misc_RNA (1)...(19): siRNA sense strand
gcagagggauaccaugcaa

SEQ ID NO: 337029 - RNA, 19 nt, Homo sapiens
  misc_RNA (1)...(19): siRNA sense strand
ugaacuagaagcuguguua

SEQ ID NO: 337030 - RNA, 19 nt, Homo sapiens
  misc_RNA (1)...(19): siRNA sense strand
gagaaucccaggacagaaa

SEQ ID NO: 337031 - RNA, 19 nt, Homo sapiens
  misc_RNA (1)...(19): siRNA sense strand
gcccacagaucaacuggaa

SEQ ID NO: 337032 - RNA, 19 nt, Homo sapiens
  misc_RNA (1)...(19): siRNA sense strand
gaagacugcucagggcuau

SEQ ID NO: 337033 - RNA, 19 nt, Homo sapiens
  misc_RNA (1)...(19): siRNA sense strand
gacccagucuauuaaagaa

SEQ ID NO: 337034 - RNA, 19 nt, Homo sapiens
  misc_RNA (1)...(19): siRNA sense strand
acuagaagcuguguuagaa

SEQ ID NO: 337035 - RNA, 19 nt, Homo sapiens
  misc_RNA (1)...(19): siRNA sense strand
caugcaacauaaccugaua

SEQ ID NO: 337036 - RNA, 19 nt, Homo sapiens
  misc_RNA (1)...(19): siRNA sense strand
gcuggacaccuaccugaua

SEQ ID NO: 337037 - RNA, 19 nt, Homo sapiens
  misc_RNA (1)...(19): siRNA sense strand
cagaucaacuggaauggau

SEQ ID NO: 337038 - RNA, 19 nt, Homo sapiens
  misc_RNA (1)...(19): siRNA sense strand
gcaggaaauggcugaacua

SEQ ID NO: 337039 - RNA, 19 nt, Homo sapiens
  misc_RNA (1)...(19): siRNA sense strand
ccacagaucaacuggaaug

SEQ ID NO: 337040 - RNA, 19 nt, Homo sapiens
  misc_RNA (1)...(19): siRNA sense strand
caacaugcccacagaucaa

SEQ ID NO: 337041 - RNA, 19 nt, Homo sapiens
  misc_RNA (1)...(19): siRNA sense strand
ucaccaacaugcccacaga

SEQ ID NO: 337042 - RNA, 19 nt, Homo sapiens
  misc_RNA (1)...(19): siRNA sense strand
cagaggagauguggucaau

SEQ ID NO: 337043 - RNA, 19 nt, Homo sapiens
  misc_RNA (1)...(19): siRNA sense strand
caauugggcagauguguga

SEQ ID NO: 337044 - RNA, 19 nt, Homo sapiens
  misc_RNA (1)...(19): siRNA sense strand
ggagauguggucaauggaa

SEQ ID NO: 337045 - RNA, 19 nt, Homo sapiens
  misc_RNA (1)...(19): siRNA sense strand
guacagcuguguggugcuu

SEQ ID NO: 337046 - RNA, 19 nt, Homo sapiens
  misc_RNA (1)...(19): siRNA sense strand
ccaaagcgagcaagagaau

SEQ ID NO: 337047 - RNA, 19 nt, Homo sapiens
  misc_RNA (1)...(19): siRNA sense strand
gcuaugggcccuucaccaa

SEQ ID NO: 337048 - RNA, 19 nt, Homo sapiens
  misc_RNA (1)...(19): siRNA sense strand
gaaugagcaugauuuugaa

SEQ ID NO: 337049 - RNA, 19 nt, Homo sapiens
  misc_RNA (1)...(19): siRNA sense strand
ucagggcuauccucucaga

SEQ ID NO: 337050 - RNA, 19 nt, Homo sapiens
  misc_RNA (1)...(19): siRNA sense strand
agggauaccaugcaacaua

SEQ ID NO: 337051 - RNA, 19 nt, Homo sapiens
  misc_RNA (1)...(19): siRNA sense strand
gcuagaaaucuguugcuau

SEQ ID NO: 337052 - RNA, 19 nt, Homo sapiens
  misc_RNA (1)...(19): siRNA sense strand
ugaaugagcaugauuuuga

SEQ ID NO: 337053 - RNA, 19 nt, Homo sapiens
  misc_RNA (1)...(19): siRNA sense strand
ggcuagaaaucuguugcua

SEQ ID NO: 337054 - RNA, 19 nt, Homo sapiens
  misc_RNA (1)...(19): siRNA sense strand
ugaaacaagcgucucugaa

SEQ ID NO: 337055 - RNA, 19 nt, Homo sapiens
  misc_RNA (1)...(19): siRNA sense strand
aacauaaccugauaaagcu

SEQ ID NO: 337056 - RNA, 19 nt, Homo sapiens
  misc_RNA (1)...(19): siRNA sense strand
ugacccagucuauuaaaga

SEQ ID NO: 337057 - RNA, 19 nt, Homo sapiens
  misc_RNA (1)...(19): siRNA sense strand
gaacuagaagcuguguuag

SEQ ID NO: 337058 - RNA, 19 nt, Homo sapiens
  misc_RNA (1)...(19): siRNA sense strand
gugaaacaagcgucucuga

SEQ ID NO: 337059 - RNA, 19 nt, Homo sapiens
  misc_RNA (1)...(19): siRNA sense strand
ccaacaugcccacagauca

SEQ ID NO: 337060 - RNA, 19 nt, Homo sapiens
  misc_RNA (1)...(19): siRNA sense strand
uaugggcccuucaccaaca

SEQ ID NO: 337061 - RNA, 19 nt, Homo sapiens
  misc_RNA (1)...(19): siRNA sense strand
guccaaagcgagcaagaga

SEQ ID NO: 337062 - RNA, 19 nt, Homo sapiens
  misc_RNA (1)...(19): siRNA sense strand
cagaacaaagcacaucaga

SEQ ID NO: 337063 - RNA, 19 nt, Homo sapiens
  misc_RNA (1)...(19): siRNA sense strand
ccugcgaaauccagaacaa

SEQ ID NO: 337064 - RNA, 19 nt, Homo sapiens
  misc_RNA (1)...(19): siRNA sense strand
gaaaccaccaagguccaaa

SEQ ID NO: 337065 - RNA, 19 nt, Homo sapiens
  misc_RNA (1)...(19): siRNA sense strand
gauaaagcuccagcaggaa

SEQ ID NO: 337066 - RNA, 19 nt, Homo sapiens
  misc_RNA (1)...(19): siRNA sense strand
aaggagcuuucaucauuca

SEQ ID NO: 337067 - RNA, 19 nt, Homo sapiens
  misc_RNA (1)...(19): siRNA sense strand
ggugugagagugaaacaag

SEQ ID NO: 337068 - RNA, 19 nt, Homo sapiens
  misc_RNA (1)...(19): siRNA sense strand
gaaauggcugaacuagaag

SEQ ID NO: 337069 - RNA, 19 nt, Homo sapiens
  misc_RNA (1)...(19): siRNA sense strand
auaaagcuccagcaggaaa

SEQ ID NO: 337070 - RNA, 19 nt, Homo sapiens
  misc_RNA (1)...(19): siRNA sense strand
acccuuccaucauaaguga

SEQ ID NO: 337071 - RNA, 19 nt, Homo sapiens
  misc_RNA (1)...(19): siRNA sense strand
ggugacccagucuauuaaa

SEQ ID NO: 337072 - RNA, 19 nt, Homo sapiens
  misc_RNA (1)...(19): siRNA sense strand
cccagucuauuaaagaaag

SEQ ID NO: 337073 - RNA, 19 nt, Homo sapiens
  misc_RNA (1)...(19): siRNA sense strand
caucugggugugagaguga

SEQ ID NO: 337074 - RNA, 19 nt, Homo sapiens
  misc_RNA (1)...(19): siRNA sense strand
ccagucuauuaaagaaaga

SEQ ID NO: 337075 - RNA, 19 nt, Homo sapiens
  misc_RNA (1)...(19): siRNA sense strand
cgaaauccagaacaaagca

SEQ ID NO: 337076 - RNA, 19 nt, Homo sapiens
  misc_RNA (1)...(19): siRNA sense strand
aagagaaucccaggacaga

SEQ ID NO: 337077 - RNA, 19 nt, Homo sapiens
  misc_RNA (1)...(19): siRNA sense strand
gauguggucaauggaagaa

SEQ ID NO: 337078 - RNA, 19 nt, Homo sapiens
  misc_RNA (1)...(19): siRNA sense strand
ggaccugcgaaauccagaa

SEQ ID NO: 337079 - RNA, 19 nt, Homo sapiens
  misc_RNA (1)...(19): siRNA sense strand
gagcaugauuuugaaguca

SEQ ID NO: 337080 - RNA, 19 nt, Homo sapiens
  misc_RNA (1)...(19): siRNA sense strand
gugacccagucuauuaaag

SEQ ID NO: 337081 - RNA, 19 nt, Homo sapiens
  misc_RNA (1)...(19): siRNA sense strand
agaacaaagcacaucagaa

SEQ ID NO: 337082 - RNA, 19 nt, Homo sapiens
  misc_RNA (1)...(19): siRNA sense strand
uggaagaaaccaccaaggu

SEQ ID NO: 337083 - RNA, 19 nt, Homo sapiens
  misc_RNA (1)...(19): siRNA sense strand
ucaacuggaauggauggua

SEQ ID NO: 337084 - RNA, 19 nt, Homo sapiens
  misc_RNA (1)...(19): siRNA sense strand
ggaaauggcugaacuagaa

SEQ ID NO: 337085 - RNA, 19 nt, Homo sapiens
  misc_RNA (1)...(19): siRNA sense strand
gaacaaagcacaucagaaa

SEQ ID NO: 337086 - RNA, 19 nt, Homo sapiens
  misc_RNA (1)...(19): siRNA sense strand
cagcuacccuuccaucaua

SEQ ID NO: 337087 - RNA, 19 nt, Homo sapiens
  misc_RNA (1)...(19): siRNA sense strand
gggauaccaugcaacauaa

SEQ ID NO: 337088 - RNA, 19 nt, Homo sapiens
  misc_RNA (1)...(19): siRNA sense strand
gaggagauguggucaaugg

SEQ ID NO: 337089 - RNA, 19 nt, Homo sapiens
  misc_RNA (1)...(19): siRNA sense strand
gaaggagcuuucaucauuc

SEQ ID NO: 337090 - RNA, 19 nt, Homo sapiens
  misc_RNA (1)...(19): siRNA sense strand
cuagaaaucuguugcuaug

SEQ ID NO: 337091 - RNA, 19 nt, Homo sapiens
  misc_RNA (1)...(19): siRNA sense strand
gcucagggcuauccucuca

SEQ ID NO: 337092 - RNA, 19 nt, Homo sapiens
  misc_RNA (1)...(19): siRNA sense strand
aaacaagcgucucugaaga

SEQ ID NO: 337093 - RNA, 19 nt, Homo sapiens
  misc_RNA (1)...(19): siRNA sense strand
caacauaaccugauaaagc

SEQ ID NO: 337094 - RNA, 19 nt, Homo sapiens
  misc_RNA (1)...(19): siRNA sense strand
gaaacaagcgucucugaag

SEQ ID NO: 337095 - RNA, 19 nt, Homo sapiens
  misc_RNA (1)...(19): siRNA sense strand
gcagagggauaccaugcaa

SEQ ID NO: 337096 - RNA, 19 nt, Homo sapiens
  misc_RNA (1)...(19): siRNA sense strand
ugaacuagaagcuguguua

SEQ ID NO: 337097 - RNA, 19 nt, Homo sapiens
  misc_RNA (1)...(19): siRNA sense strand
gagaaucccaggacagaaa

SEQ ID NO: 337098 - RNA, 19 nt, Homo sapiens
  misc_RNA (1)...(19): siRNA sense strand
gcccacagaucaacuggaa

SEQ ID NO: 337099 - RNA, 19 nt, Homo sapiens
  misc_RNA (1)...(19): siRNA sense strand
gaagacugcucagggcuau

SEQ ID NO: 337100 - RNA, 19 nt, Homo sapiens
  misc_RNA (1)...(19): siRNA sense strand
gacccagucuauuaaagaa

SEQ ID NO: 337101 - RNA, 19 nt, Homo sapiens
  misc_RNA (1)...(19): siRNA sense strand
acuagaagcuguguuagaa

SEQ ID NO: 337102 - RNA, 19 nt, Homo sapiens
  misc_RNA (1)...(19): siRNA sense strand
caugcaacauaaccugaua

SEQ ID NO: 337103 - RNA, 19 nt, Homo sapiens
  misc_RNA (1)...(19): siRNA sense strand
gcuggacaccuaccugaua

SEQ ID NO: 337104 - RNA, 19 nt, Homo sapiens
  misc_RNA (1)...(19): siRNA sense strand
cagaucaacuggaauggau

SEQ ID NO: 337105 - RNA, 19 nt, Homo sapiens
  misc_RNA (1)...(19): siRNA sense strand
gcaggaaauggcugaacua

SEQ ID NO: 337106 - RNA, 19 nt, Homo sapiens
  misc_RNA (1)...(19): siRNA sense strand
ccacagaucaacuggaaug

SEQ ID NO: 337107 - RNA, 19 nt, Homo sapiens
  misc_RNA (1)...(19): siRNA sense strand
caacaugcccacagaucaa

SEQ ID NO: 337108 - RNA, 19 nt, Homo sapiens
  misc_RNA (1)...(19): siRNA sense strand
ucaccaacaugcccacaga

SEQ ID NO: 337109 - RNA, 19 nt, Homo sapiens
  misc_RNA (1)...(19): siRNA sense strand
cagaggagauguggucaau

SEQ ID NO: 337110 - RNA, 19 nt, Homo sapiens
  misc_RNA (1)...(19): siRNA sense strand
caauugggcagauguguga

SEQ ID NO: 337111 - RNA, 19 nt, Homo sapiens
  misc_RNA (1)...(19): siRNA sense strand
ggagauguggucaauggaa

SEQ ID NO: 337112 - RNA, 19 nt, Homo sapiens
  misc_RNA (1)...(19): siRNA sense strand
guacagcuguguggugcuu

SEQ ID NO: 337113 - RNA, 19 nt, Homo sapiens
  misc_RNA (1)...(19): siRNA sense strand
ccaaagcgagcaagagaau

SEQ ID NO: 337114 - RNA, 19 nt, Homo sapiens
  misc_RNA (1)...(19): siRNA sense strand
gcuaugggcccuucaccaa

SEQ ID NO: 337115 - RNA, 19 nt, Homo sapiens
  misc_RNA (1)...(19): siRNA sense strand
gaaugagcaugauuuugaa

SEQ ID NO: 337116 - RNA, 19 nt, Homo sapiens
  misc_RNA (1)...(19): siRNA sense strand
ucagggcuauccucucaga

SEQ ID NO: 337117 - RNA, 19 nt, Homo sapiens
  misc_RNA (1)...(19): siRNA sense strand
agggauaccaugcaacaua

SEQ ID NO: 337118 - RNA, 19 nt, Homo sapiens
  misc_RNA (1)...(19): siRNA sense strand
gcuagaaaucuguugcuau

SEQ ID NO: 337119 - RNA, 19 nt, Homo sapiens
  misc_RNA (1)...(19): siRNA sense strand
ugaaugagcaugauuuuga

SEQ ID NO: 337120 - RNA, 19 nt, Homo sapiens
  misc_RNA (1)...(19): siRNA sense strand
ggcuagaaaucuguugcua

SEQ ID NO: 337121 - RNA, 19 nt, Homo sapiens
  misc_RNA (1)...(19): siRNA sense strand
ugaaacaagcgucucugaa

SEQ ID NO: 337122 - RNA, 19 nt, Homo sapiens
  misc_RNA (1)...(19): siRNA sense strand
aacauaaccugauaaagcu

SEQ ID NO: 337123 - RNA, 19 nt, Homo sapiens
  misc_RNA (1)...(19): siRNA sense strand
ugacccagucuauuaaaga

SEQ ID NO: 337124 - RNA, 19 nt, Homo sapiens
  misc_RNA (1)...(19): siRNA sense strand
gaacuagaagcuguguuag

SEQ ID NO: 337125 - RNA, 19 nt, Homo sapiens
  misc_RNA (1)...(19): siRNA sense strand
gugaaacaagcgucucuga

SEQ ID NO: 337126 - RNA, 19 nt, Homo sapiens
  misc_RNA (1)...(19): siRNA sense strand
ccaacaugcccacagauca

SEQ ID NO: 337127 - RNA, 19 nt, Homo sapiens
  misc_RNA (1)...(19): siRNA sense strand
uaugggcccuucaccaaca

SEQ ID NO: 337128 - RNA, 19 nt, Homo sapiens
  misc_RNA (1)...(19): siRNA sense strand
guccaaagcgagcaagaga

SEQ ID NO: 337129 - RNA, 19 nt, Homo sapiens
  misc_RNA (1)...(19): siRNA sense strand
cagaacaaagcacaucaga

SEQ ID NO: 337130 - RNA, 19 nt, Homo sapiens
  misc_RNA (1)...(19): siRNA sense strand
ccugcgaaauccagaacaa

SEQ ID NO: 337131 - RNA, 19 nt, Homo sapiens
  misc_RNA (1)...(19): siRNA sense strand
gaaaccaccaagguccaaa

SEQ ID NO: 337132 - RNA, 19 nt, Homo sapiens
  misc_RNA (1)...(19): siRNA sense strand
gauaaagcuccagcaggaa

SEQ ID NO: 337133 - RNA, 19 nt, Homo sapiens
  misc_RNA (1)...(19): siRNA sense strand
aaggagcuuucaucauuca

SEQ ID NO: 337134 - RNA, 19 nt, Homo sapiens
  misc_RNA (1)...(19): siRNA sense strand
ggugugagagugaaacaag

SEQ ID NO: 337135 - RNA, 19 nt, Homo sapiens
  misc_RNA (1)...(19): siRNA sense strand
gaaauggcugaacuagaag

SEQ ID NO: 337136 - RNA, 19 nt, Homo sapiens
  misc_RNA (1)...(19): siRNA sense strand
auaaagcuccagcaggaaa

SEQ ID NO: 337137 - RNA, 19 nt, Homo sapiens
  misc_RNA (1)...(19): siRNA sense strand
acccuuccaucauaaguga

SEQ ID NO: 337138 - RNA, 19 nt, Homo sapiens
  misc_RNA (1)...(19): siRNA sense strand
ggugacccagucuauuaaa

SEQ ID NO: 337139 - RNA, 19 nt, Homo sapiens
  misc_RNA (1)...(19): siRNA sense strand
cccagucuauuaaagaaag

SEQ ID NO: 337140 - RNA, 19 nt, Homo sapiens
  misc_RNA (1)...(19): siRNA sense strand
caucugggugugagaguga

SEQ ID NO: 337141 - RNA, 19 nt, Homo sapiens
  misc_RNA (1)...(19): siRNA sense strand
ccagucuauuaaagaaaga

SEQ ID NO: 337142 - RNA, 19 nt, Homo sapiens
  misc_RNA (1)...(19): siRNA sense strand
cgaaauccagaacaaagca

SEQ ID NO: 337143 - RNA, 19 nt, Homo sapiens
  misc_RNA (1)...(19): siRNA sense strand
aagagaaucccaggacaga

SEQ ID NO: 337144 - RNA, 19 nt, Homo sapiens
  misc_RNA (1)...(19): siRNA sense strand
gauguggucaauggaagaa

SEQ ID NO: 337145 - RNA, 19 nt, Homo sapiens
  misc_RNA (1)...(19): siRNA sense strand
ggaccugcgaaauccagaa

SEQ ID NO: 337146 - RNA, 19 nt, Homo sapiens
  misc_RNA (1)...(19): siRNA sense strand
gagcaugauuuugaaguca

SEQ ID NO: 337147 - RNA, 19 nt, Homo sapiens
  misc_RNA (1)...(19): siRNA sense strand
gugacccagucuauuaaag

SEQ ID NO: 337148 - RNA, 19 nt, Homo sapiens
  misc_RNA (1)...(19): siRNA sense strand
agaacaaagcacaucagaa

SEQ ID NO: 337149 - RNA, 19 nt, Homo sapiens
  misc_RNA (1)...(19): siRNA sense strand
uggaagaaaccaccaaggu

SEQ ID NO: 337150 - RNA, 19 nt, Homo sapiens
  misc_RNA (1)...(19): siRNA sense strand
ucaacuggaauggauggua

SEQ ID NO: 337151 - RNA, 19 nt, Homo sapiens
  misc_RNA (1)...(19): siRNA sense strand
ggaaauggcugaacuagaa

SEQ ID NO: 337152 - RNA, 19 nt, Homo sapiens
  misc_RNA (1)...(19): siRNA sense strand
gaacaaagcacaucagaaa

SEQ ID NO: 337153 - RNA, 19 nt, Homo sapiens
  misc_RNA (1)...(19): siRNA sense strand
cagcuacccuuccaucaua

SEQ ID NO: 337154 - RNA, 19 nt, Homo sapiens
  misc_RNA (1)...(19): siRNA sense strand
gggauaccaugcaacauaa

SEQ ID NO: 337155 - RNA, 19 nt, Homo sapiens
  misc_RNA (1)...(19): siRNA sense strand
gaggagauguggucaaugg

SEQ ID NO: 337156 - RNA, 19 nt, Homo sapiens
  misc_RNA (1)...(19): siRNA sense strand
gaaggagcuuucaucauuc

SEQ ID NO: 337157 - RNA, 19 nt, Homo sapiens
  misc_RNA (1)...(19): siRNA sense strand
cuagaaaucuguugcuaug

SEQ ID NO: 337158 - RNA, 19 nt, Homo sapiens
  misc_RNA (1)...(19): siRNA sense strand
gcucagggcuauccucuca

SEQ ID NO: 337159 - RNA, 19 nt, Homo sapiens
  misc_RNA (1)...(19): siRNA sense strand
aaacaagcgucucugaaga

SEQ ID NO: 337160 - RNA, 19 nt, Homo sapiens
  misc_RNA (1)...(19): siRNA sense strand
caacauaaccugauaaagc

SEQ ID NO: 337161 - RNA, 19 nt, Homo sapiens
  misc_RNA (1)...(19): siRNA sense strand
gaaacaagcgucucugaag

SEQ ID NO: 337162 - RNA, 19 nt, Homo sapiens
  misc_RNA (1)...(19): siRNA sense strand
gcagagggauaccaugcaa

SEQ ID NO: 337163 - RNA, 19 nt, Homo sapiens
  misc_RNA (1)...(19): siRNA sense strand
ugaacuagaagcuguguua

SEQ ID NO: 337164 - RNA, 19 nt, Homo sapiens
  misc_RNA (1)...(19): siRNA sense strand
gagaaucccaggacagaaa

SEQ ID NO: 337165 - RNA, 19 nt, Homo sapiens
  misc_RNA (1)...(19): siRNA sense strand
gcccacagaucaacuggaa

SEQ ID NO: 337166 - RNA, 19 nt, Homo sapiens
  misc_RNA (1)...(19): siRNA sense strand
gaagacugcucagggcuau

SEQ ID NO: 337167 - RNA, 19 nt, Homo sapiens
  misc_RNA (1)...(19): siRNA sense strand
gacccagucuauuaaagaa

SEQ ID NO: 337168 - RNA, 19 nt, Homo sapiens
  misc_RNA (1)...(19): siRNA sense strand
acuagaagcuguguuagaa

SEQ ID NO: 337169 - RNA, 19 nt, Homo sapiens
  misc_RNA (1)...(19): siRNA sense strand
caugcaacauaaccugaua

SEQ ID NO: 337170 - RNA, 19 nt, Homo sapiens
  misc_RNA (1)...(19): siRNA sense strand
gcuggacaccuaccugaua

SEQ ID NO: 337171 - RNA, 19 nt, Homo sapiens
  misc_RNA (1)...(19): siRNA sense strand
cagaucaacuggaauggau

SEQ ID NO: 337172 - RNA, 19 nt, Homo sapiens
  misc_RNA (1)...(19): siRNA sense strand
gcaggaaauggcugaacua

SEQ ID NO: 337173 - RNA, 19 nt, Homo sapiens
  misc_RNA (1)...(19): siRNA sense strand
ccacagaucaacuggaaug

SEQ ID NO: 337174 - RNA, 19 nt, Homo sapiens
  misc_RNA (1)...(19): siRNA sense strand
caacaugcccacagaucaa

SEQ ID NO: 337175 - RNA, 19 nt, Homo sapiens
  misc_RNA (1)...(19): siRNA sense strand
ucaccaacaugcccacaga

SEQ ID NO: 337176 - RNA, 19 nt, Homo sapiens
  misc_RNA (1)...(19): siRNA sense strand
cagaggagauguggucaau

SEQ ID NO: 337177 - RNA, 19 nt, Homo sapiens
  misc_RNA (1)...(19): siRNA sense strand
caauugggcagauguguga

SEQ ID NO: 337178 - RNA, 19 nt, Homo sapiens
  misc_RNA (1)...(19): siRNA sense strand
ggagauguggucaauggaa

SEQ ID NO: 337179 - RNA, 19 nt, Homo sapiens
  misc_RNA (1)...(19): siRNA sense strand
guacagcuguguggugcuu

SEQ ID NO: 337180 - RNA, 19 nt, Homo sapiens
  misc_RNA (1)...(19): siRNA sense strand
ccaaagcgagcaagagaau

SEQ ID NO: 337181 - RNA, 19 nt, Homo sapiens
  misc_RNA (1)...(19): siRNA sense strand
gcuaugggcccuucaccaa

SEQ ID NO: 337182 - RNA, 19 nt, Homo sapiens
  misc_RNA (1)...(19): siRNA sense strand
gaaugagcaugauuuugaa

SEQ ID NO: 337183 - RNA, 19 nt, Homo sapiens
  misc_RNA (1)...(19): siRNA sense strand
ucagggcuauccucucaga

SEQ ID NO: 337184 - RNA, 19 nt, Homo sapiens
  misc_RNA (1)...(19): siRNA sense strand
agggauaccaugcaacaua

SEQ ID NO: 337185 - RNA, 19 nt, Homo sapiens
  misc_RNA (1)...(19): siRNA sense strand
gcuagaaaucuguugcuau

SEQ ID NO: 337186 - RNA, 19 nt, Homo sapiens
  misc_RNA (1)...(19): siRNA sense strand
ugaaugagcaugauuuuga

SEQ ID NO: 337187 - RNA, 19 nt, Homo sapiens
  misc_RNA (1)...(19): siRNA sense strand
ggcuagaaaucuguugcua

SEQ ID NO: 337188 - RNA, 19 nt, Homo sapiens
  misc_RNA (1)...(19): siRNA sense strand
ugaaacaagcgucucugaa

SEQ ID NO: 337189 - RNA, 19 nt, Homo sapiens
  misc_RNA (1)...(19): siRNA sense strand
aacauaaccugauaaagcu

SEQ ID NO: 337190 - RNA, 19 nt, Homo sapiens
  misc_RNA (1)...(19): siRNA sense strand
ugacccagucuauuaaaga

SEQ ID NO: 337191 - RNA, 19 nt, Homo sapiens
  misc_RNA (1)...(19): siRNA sense strand
gaacuagaagcuguguuag

SEQ ID NO: 337192 - RNA, 19 nt, Homo sapiens
  misc_RNA (1)...(19): siRNA sense strand
gugaaacaagcgucucuga

SEQ ID NO: 337193 - RNA, 19 nt, Homo sapiens
  misc_RNA (1)...(19): siRNA sense strand
ccaacaugcccacagauca

SEQ ID NO: 337194 - RNA, 19 nt, Homo sapiens
  misc_RNA (1)...(19): siRNA sense strand
uaugggcccuucaccaaca

SEQ ID NO: 337195 - RNA, 19 nt, Homo sapiens
  misc_RNA (1)...(19): siRNA sense strand
guccaaagcgagcaagaga

SEQ ID NO: 337196 - RNA, 19 nt, Homo sapiens
  misc_RNA (1)...(19): siRNA sense strand
cagaacaaagcacaucaga

SEQ ID NO: 337197 - RNA, 19 nt, Homo sapiens
  misc_RNA (1)...(19): siRNA sense strand
ccugcgaaauccagaacaa

SEQ ID NO: 337198 - RNA, 19 nt, Homo sapiens
  misc_RNA (1)...(19): siRNA sense strand
gaaaccaccaagguccaaa

SEQ ID NO: 337199 - RNA, 19 nt, Homo sapiens
  misc_RNA (1)...(19): siRNA sense strand
gauaaagcuccagcaggaa

SEQ ID NO: 337200 - RNA, 19 nt, Homo sapiens
  misc_RNA (1)...(19): siRNA sense strand
aaggagcuuucaucauuca

SEQ ID NO: 337201 - RNA, 19 nt, Homo sapiens
  misc_RNA (1)...(19): siRNA sense strand
ggugugagagugaaacaag

SEQ ID NO: 337202 - RNA, 19 nt, Homo sapiens
  misc_RNA (1)...(19): siRNA sense strand
gaaauggcugaacuagaag

SEQ ID NO: 337203 - RNA, 19 nt, Homo sapiens
  misc_RNA (1)...(19): siRNA sense strand
auaaagcuccagcaggaaa

SEQ ID NO: 337204 - RNA, 19 nt, Homo sapiens
  misc_RNA (1)...(19): siRNA sense strand
acccuuccaucauaaguga

SEQ ID NO: 337205 - RNA, 19 nt, Homo sapiens
  misc_RNA (1)...(19): siRNA sense strand
ggugacccagucuauuaaa

SEQ ID NO: 337206 - RNA, 19 nt, Homo sapiens
  misc_RNA (1)...(19): siRNA sense strand
cccagucuauuaaagaaag

SEQ ID NO: 337207 - RNA, 19 nt, Homo sapiens
  misc_RNA (1)...(19): siRNA sense strand
caucugggugugagaguga

SEQ ID NO: 337208 - RNA, 19 nt, Homo sapiens
  misc_RNA (1)...(19): siRNA sense strand
ccagucuauuaaagaaaga

SEQ ID NO: 337209 - RNA, 19 nt, Homo sapiens
  misc_RNA (1)...(19): siRNA sense strand
cgaaauccagaacaaagca

SEQ ID NO: 337210 - RNA, 19 nt, Homo sapiens
  misc_RNA (1)...(19): siRNA sense strand
aagagaaucccaggacaga

SEQ ID NO: 337211 - RNA, 19 nt, Homo sapiens
  misc_RNA (1)...(19): siRNA sense strand
gauguggucaauggaagaa

SEQ ID NO: 337212 - RNA, 19 nt, Homo sapiens
  misc_RNA (1)...(19): siRNA sense strand
ggaccugcgaaauccagaa

SEQ ID NO: 337213 - RNA, 19 nt, Homo sapiens
  misc_RNA (1)...(19): siRNA sense strand
gagcaugauuuugaaguca

SEQ ID NO: 337214 - RNA, 19 nt, Homo sapiens
  misc_RNA (1)...(19): siRNA sense strand
gugacccagucuauuaaag

SEQ ID NO: 337215 - RNA, 19 nt, Homo sapiens
  misc_RNA (1)...(19): siRNA sense strand
agaacaaagcacaucagaa

SEQ ID NO: 337216 - RNA, 19 nt, Homo sapiens
  misc_RNA (1)...(19): siRNA sense strand
uggaagaaaccaccaaggu

SEQ ID NO: 337217 - RNA, 19 nt, Homo sapiens
  misc_RNA (1)...(19): siRNA sense strand
ucaacuggaauggauggua

SEQ ID NO: 337218 - RNA, 19 nt, Homo sapiens
  misc_RNA (1)...(19): siRNA sense strand
ggaaauggcugaacuagaa

SEQ ID NO: 337219 - RNA, 19 nt, Homo sapiens
  misc_RNA (1)...(19): siRNA sense strand
gaacaaagcacaucagaaa

SEQ ID NO: 337220 - RNA, 19 nt, Homo sapiens
  misc_RNA (1)...(19): siRNA sense strand
cagcuacccuuccaucaua

SEQ ID NO: 337221 - RNA, 19 nt, Homo sapiens
  misc_RNA (1)...(19): siRNA sense strand
gggauaccaugcaacauaa

SEQ ID NO: 337222 - RNA, 19 nt, Homo sapiens
  misc_RNA (1)...(19): siRNA sense strand
gaggagauguggucaaugg

SEQ ID NO: 337223 - RNA, 19 nt, Homo sapiens
  misc_RNA (1)...(19): siRNA sense strand
gaaggagcuuucaucauuc

SEQ ID NO: 337224 - RNA, 19 nt, Homo sapiens
  misc_RNA (1)...(19): siRNA sense strand
cuagaaaucuguugcuaug

SEQ ID NO: 337225 - RNA, 19 nt, Homo sapiens
  misc_RNA (1)...(19): siRNA sense strand
gcucagggcuauccucuca

SEQ ID NO: 337226 - RNA, 19 nt, Homo sapiens
  misc_RNA (1)...(19): siRNA sense strand
aaacaagcgucucugaaga

SEQ ID NO: 337227 - RNA, 19 nt, Homo sapiens
  misc_RNA (1)...(19): siRNA sense strand
caacauaaccugauaaagc

SEQ ID NO: 337228 - RNA, 19 nt, Homo sapiens
  misc_RNA (1)...(19): siRNA sense strand
gaaacaagcgucucugaag

SEQ ID NO: 337229 - RNA, 19 nt, Homo sapiens
  misc_RNA (1)...(19): siRNA sense strand
gcagagggauaccaugcaa

SEQ ID NO: 337230 - RNA, 19 nt, Homo sapiens
  misc_RNA (1)...(19): siRNA sense strand
ugaacuagaagcuguguua

SEQ ID NO: 337231 - RNA, 19 nt, Homo sapiens
  misc_RNA (1)...(19): siRNA sense strand
gagaaucccaggacagaaa

SEQ ID NO: 337232 - RNA, 19 nt, Homo sapiens
  misc_RNA (1)...(19): siRNA sense strand
gcccacagaucaacuggaa

SEQ ID NO: 337233 - RNA, 19 nt, Homo sapiens
  misc_RNA (1)...(19): siRNA sense strand
gaagacugcucagggcuau

SEQ ID NO: 337234 - RNA, 19 nt, Homo sapiens
  misc_RNA (1)...(19): siRNA sense strand
gacccagucuauuaaagaa

SEQ ID NO: 337235 - RNA, 19 nt, Homo sapiens
  misc_RNA (1)...(19): siRNA sense strand
acuagaagcuguguuagaa

SEQ ID NO: 337236 - RNA, 19 nt, Homo sapiens
  misc_RNA (1)...(19): siRNA sense strand
caugcaacauaaccugaua

SEQ ID NO: 337237 - RNA, 19 nt, Homo sapiens
  misc_RNA (1)...(19): siRNA sense strand
gcuggacaccuaccugaua

SEQ ID NO: 337238 - RNA, 19 nt, Homo sapiens
  misc_RNA (1)...(19): siRNA sense strand
cagaucaacuggaauggau

SEQ ID NO: 337239 - RNA, 19 nt, Homo sapiens
  misc_RNA (1)...(19): siRNA sense strand
gcaggaaauggcugaacua

SEQ ID NO: 337240 - RNA, 19 nt, Homo sapiens
  misc_RNA (1)...(19): siRNA sense strand
ccacagaucaacuggaaug

SEQ ID NO: 337241 - RNA, 19 nt, Homo sapiens
  misc_RNA (1)...(19): siRNA sense strand
caacaugcccacagaucaa

SEQ ID NO: 337242 - RNA, 19 nt, Homo sapiens
  misc_RNA (1)...(19): siRNA sense strand
ucaccaacaugcccacaga

SEQ ID NO: 337243 - RNA, 19 nt, Homo sapiens
  misc_RNA (1)...(19): siRNA sense strand
cagaggagauguggucaau

SEQ ID NO: 337244 - RNA, 19 nt, Homo sapiens
  misc_RNA (1)...(19): siRNA sense strand
caauugggcagauguguga

SEQ ID NO: 337245 - RNA, 19 nt, Homo sapiens
  misc_RNA (1)...(19): siRNA sense strand
ggagauguggucaauggaa

SEQ ID NO: 337246 - RNA, 19 nt, Homo sapiens
  misc_RNA (1)...(19): siRNA sense strand
guacagcuguguggugcuu

SEQ ID NO: 337247 - RNA, 19 nt, Homo sapiens
  misc_RNA (1)...(19): siRNA sense strand
ccaaagcgagcaagagaau

SEQ ID NO: 337248 - RNA, 19 nt, Homo sapiens
  misc_RNA (1)...(19): siRNA sense strand
gcuaugggcccuucaccaa

SEQ ID NO: 337249 - RNA, 19 nt, Homo sapiens
  misc_RNA (1)...(19): siRNA sense strand
gaaugagcaugauuuugaa

SEQ ID NO: 337250 - RNA, 19 nt, Homo sapiens
  misc_RNA (1)...(19): siRNA sense strand
ucagggcuauccucucaga

SEQ ID NO: 337251 - RNA, 19 nt, Homo sapiens
  misc_RNA (1)...(19): siRNA sense strand
agggauaccaugcaacaua

SEQ ID NO: 337252 - RNA, 19 nt, Homo sapiens
  misc_RNA (1)...(19): siRNA sense strand
gcuagaaaucuguugcuau

SEQ ID NO: 337253 - RNA, 19 nt, Homo sapiens
  misc_RNA (1)...(19): siRNA sense strand
ugaaugagcaugauuuuga

SEQ ID NO: 337254 - RNA, 19 nt, Homo sapiens
  misc_RNA (1)...(19): siRNA sense strand
ggcuagaaaucuguugcua

SEQ ID NO: 337255 - RNA, 19 nt, Homo sapiens
  misc_RNA (1)...(19): siRNA sense strand
ugaaacaagcgucucugaa

SEQ ID NO: 337256 - RNA, 19 nt, Homo sapiens
  misc_RNA (1)...(19): siRNA sense strand
aacauaaccugauaaagcu

SEQ ID NO: 337257 - RNA, 19 nt, Homo sapiens
  misc_RNA (1)...(19): siRNA sense strand
ugacccagucuauuaaaga

SEQ ID NO: 337258 - RNA, 19 nt, Homo sapiens
  misc_RNA (1)...(19): siRNA sense strand
gaacuagaagcuguguuag

SEQ ID NO: 337259 - RNA, 19 nt, Homo sapiens
  misc_RNA (1)...(19): siRNA sense strand
gugaaacaagcgucucuga

SEQ ID NO: 337260 - RNA, 19 nt, Homo sapiens
  misc_RNA (1)...(19): siRNA sense strand
ccaacaugcccacagauca

SEQ ID NO: 337261 - RNA, 19 nt, Homo sapiens
  misc_RNA (1)...(19): siRNA sense strand
uaugggcccuucaccaaca

SEQ ID NO: 337262 - RNA, 19 nt, Homo sapiens
  misc_RNA (1)...(19): siRNA sense strand
guccaaagcgagcaagaga

SEQ ID NO: 337263 - RNA, 19 nt, Homo sapiens
  misc_RNA (1)...(19): siRNA sense strand
cagaacaaagcacaucaga

SEQ ID NO: 337264 - RNA, 19 nt, Homo sapiens
  misc_RNA (1)...(19): siRNA sense strand
ccugcgaaauccagaacaa

SEQ ID NO: 337265 - RNA, 19 nt, Homo sapiens
  misc_RNA (1)...(19): siRNA sense strand
gaaaccaccaagguccaaa

SEQ ID NO: 337266 - RNA, 19 nt, Homo sapiens
  misc_RNA (1)...(19): siRNA sense strand
gauaaagcuccagcaggaa

SEQ ID NO: 337267 - RNA, 19 nt, Homo sapiens
  misc_RNA (1)...(19): siRNA sense strand
aaggagcuuucaucauuca

SEQ ID NO: 337268 - RNA, 19 nt, Homo sapiens
  misc_RNA (1)...(19): siRNA sense strand
ggugugagagugaaacaag

SEQ ID NO: 337269 - RNA, 19 nt, Homo sapiens
  misc_RNA (1)...(19): siRNA sense strand
gaaauggcugaacuagaag

SEQ ID NO: 337270 - RNA, 19 nt, Homo sapiens
  misc_RNA (1)...(19): siRNA sense strand
auaaagcuccagcaggaaa

SEQ ID NO: 337271 - RNA, 19 nt, Homo sapiens
  misc_RNA (1)...(19): siRNA sense strand
acccuuccaucauaaguga

SEQ ID NO: 337272 - RNA, 19 nt, Homo sapiens
  misc_RNA (1)...(19): siRNA sense strand
ggugacccagucuauuaaa

SEQ ID NO: 337273 - RNA, 19 nt, Homo sapiens
  misc_RNA (1)...(19): siRNA sense strand
cccagucuauuaaagaaag

SEQ ID NO: 337274 - RNA, 19 nt, Homo sapiens
  misc_RNA (1)...(19): siRNA sense strand
caucugggugugagaguga

SEQ ID NO: 337275 - RNA, 19 nt, Homo sapiens
  misc_RNA (1)...(19): siRNA sense strand
ccagucuauuaaagaaaga

SEQ ID NO: 337276 - RNA, 19 nt, Homo sapiens
  misc_RNA (1)...(19): siRNA sense strand
cgaaauccagaacaaagca

SEQ ID NO: 337277 - RNA, 19 nt, Homo sapiens
  misc_RNA (1)...(19): siRNA sense strand
aagagaaucccaggacaga

SEQ ID NO: 337278 - RNA, 19 nt, Homo sapiens
  misc_RNA (1)...(19): siRNA sense strand
gauguggucaauggaagaa

SEQ ID NO: 337279 - RNA, 19 nt, Homo sapiens
  misc_RNA (1)...(19): siRNA sense strand
ggaccugcgaaauccagaa

SEQ ID NO: 337280 - RNA, 19 nt, Homo sapiens
  misc_RNA (1)...(19): siRNA sense strand
gagcaugauuuugaaguca

SEQ ID NO: 337281 - RNA, 19 nt, Homo sapiens
  misc_RNA (1)...(19): siRNA sense strand
gugacccagucuauuaaag

SEQ ID NO: 337282 - RNA, 19 nt, Homo sapiens
  misc_RNA (1)...(19): siRNA sense strand
agaacaaagcacaucagaa

SEQ ID NO: 337283 - RNA, 19 nt, Homo sapiens
  misc_RNA (1)...(19): siRNA sense strand
uggaagaaaccaccaaggu

SEQ ID NO: 337284 - RNA, 19 nt, Homo sapiens
  misc_RNA (1)...(19): siRNA sense strand
ucaacuggaauggauggua

SEQ ID NO: 337285 - RNA, 19 nt, Homo sapiens
  misc_RNA (1)...(19): siRNA sense strand
ggaaauggcugaacuagaa

SEQ ID NO: 337286 - RNA, 19 nt, Homo sapiens
  misc_RNA (1)...(19): siRNA sense strand
gaacaaagcacaucagaaa

SEQ ID NO: 337287 - RNA, 19 nt, Homo sapiens
  misc_RNA (1)...(19): siRNA sense strand
cagcuacccuuccaucaua

SEQ ID NO: 337288 - RNA, 19 nt, Homo sapiens
  misc_RNA (1)...(19): siRNA sense strand
gggauaccaugcaacauaa

SEQ ID NO: 337289 - RNA, 19 nt, Homo sapiens
  misc_RNA (1)...(19): siRNA sense strand
gaggagauguggucaaugg

SEQ ID NO: 337290 - RNA, 19 nt, Homo sapiens
  misc_RNA (1)...(19): siRNA sense strand
gaaggagcuuucaucauuc

SEQ ID NO: 337291 - RNA, 19 nt, Homo sapiens
  misc_RNA (1)...(19): siRNA sense strand
cuagaaaucuguugcuaug

SEQ ID NO: 337292 - RNA, 19 nt, Homo sapiens
  misc_RNA (1)...(19): siRNA sense strand
gcucagggcuauccucuca

SEQ ID NO: 337293 - RNA, 19 nt, Homo sapiens
  misc_RNA (1)...(19): siRNA sense strand
aaacaagcgucucugaaga

SEQ ID NO: 337294 - RNA, 19 nt, Homo sapiens
  misc_RNA (1)...(19): siRNA sense strand
caacauaaccugauaaagc

SEQ ID NO: 337295 - RNA, 19 nt, Homo sapiens
  misc_RNA (1)...(19): siRNA sense strand
gaaacaagcgucucugaag

SEQ ID NO: 337296 - RNA, 19 nt, Homo sapiens
  misc_RNA (1)...(19): siRNA sense strand
gcagagggauaccaugcaa

SEQ ID NO: 337297 - RNA, 19 nt, Homo sapiens
  misc_RNA (1)...(19): siRNA sense strand
ugaacuagaagcuguguua

SEQ ID NO: 337298 - RNA, 19 nt, Homo sapiens
  misc_RNA (1)...(19): siRNA sense strand
gagaaucccaggacagaaa

SEQ ID NO: 337299 - RNA, 19 nt, Homo sapiens
  misc_RNA (1)...(19): siRNA sense strand
gcccacagaucaacuggaa

SEQ ID NO: 337300 - RNA, 19 nt, Homo sapiens
  misc_RNA (1)...(19): siRNA sense strand
gaagacugcucagggcuau

SEQ ID NO: 337301 - RNA, 19 nt, Homo sapiens
  misc_RNA (1)...(19): siRNA sense strand
gacccagucuauuaaagaa

SEQ ID NO: 337302 - RNA, 19 nt, Homo sapiens
  misc_RNA (1)...(19): siRNA sense strand
acuagaagcuguguuagaa

SEQ ID NO: 337303 - RNA, 19 nt, Homo sapiens
  misc_RNA (1)...(19): siRNA sense strand
caugcaacauaaccugaua

SEQ ID NO: 337304 - RNA, 19 nt, Homo sapiens
  misc_RNA (1)...(19): siRNA sense strand
gcuggacaccuaccugaua

SEQ ID NO: 337305 - RNA, 19 nt, Homo sapiens
  misc_RNA (1)...(19): siRNA sense strand
cagaucaacuggaauggau

SEQ ID NO: 337306 - RNA, 19 nt, Homo sapiens
  misc_RNA (1)...(19): siRNA sense strand
gcaggaaauggcugaacua

SEQ ID NO: 337307 - RNA, 19 nt, Homo sapiens
  misc_RNA (1)...(19): siRNA sense strand
ccacagaucaacuggaaug

SEQ ID NO: 337308 - RNA, 19 nt, Homo sapiens
  misc_RNA (1)...(19): siRNA sense strand
caacaugcccacagaucaa

SEQ ID NO: 337309 - RNA, 19 nt, Homo sapiens
  misc_RNA (1)...(19): siRNA sense strand
ucaccaacaugcccacaga

SEQ ID NO: 337310 - RNA, 19 nt, Homo sapiens
  misc_RNA (1)...(19): siRNA sense strand
cagaggagauguggucaau

SEQ ID NO: 337311 - RNA, 19 nt, Homo sapiens
  misc_RNA (1)...(19): siRNA sense strand
caauugggcagauguguga

SEQ ID NO: 337312 - RNA, 19 nt, Homo sapiens
  misc_RNA (1)...(19): siRNA sense strand
ggagauguggucaauggaa

SEQ ID NO: 337313 - RNA, 19 nt, Homo sapiens
  misc_RNA (1)...(19): siRNA sense strand
guacagcuguguggugcuu

SEQ ID NO: 337314 - RNA, 19 nt, Homo sapiens
  misc_RNA (1)...(19): siRNA sense strand
ccaaagcgagcaagagaau

SEQ ID NO: 337315 - RNA, 19 nt, Homo sapiens
  misc_RNA (1)...(19): siRNA sense strand
gcuaugggcccuucaccaa

SEQ ID NO: 337316 - RNA, 19 nt, Homo sapiens
  misc_RNA (1)...(19): siRNA sense strand
gaaugagcaugauuuugaa

SEQ ID NO: 337317 - RNA, 19 nt, Homo sapiens
  misc_RNA (1)...(19): siRNA sense strand
ucagggcuauccucucaga

SEQ ID NO: 337318 - RNA, 19 nt, Homo sapiens
  misc_RNA (1)...(19): siRNA sense strand
agggauaccaugcaacaua

SEQ ID NO: 337319 - RNA, 19 nt, Homo sapiens
  misc_RNA (1)...(19): siRNA sense strand
gcuagaaaucuguugcuau

SEQ ID NO: 337320 - RNA, 19 nt, Homo sapiens
  misc_RNA (1)...(19): siRNA sense strand
ugaaugagcaugauuuuga

SEQ ID NO: 337321 - RNA, 19 nt, Homo sapiens
  misc_RNA (1)...(19): siRNA sense strand
ggcuagaaaucuguugcua

SEQ ID NO: 337322 - RNA, 19 nt, Homo sapiens
  misc_RNA (1)...(19): siRNA sense strand
ugaaacaagcgucucugaa

SEQ ID NO: 337323 - RNA, 19 nt, Homo sapiens
  misc_RNA (1)...(19): siRNA sense strand
aacauaaccugauaaagcu

SEQ ID NO: 337324 - RNA, 19 nt, Homo sapiens
  misc_RNA (1)...(19): siRNA sense strand
ugacccagucuauuaaaga

SEQ ID NO: 337325 - RNA, 19 nt, Homo sapiens
  misc_RNA (1)...(19): siRNA sense strand
gaacuagaagcuguguuag

SEQ ID NO: 337326 - RNA, 19 nt, Homo sapiens
  misc_RNA (1)...(19): siRNA sense strand
gugaaacaagcgucucuga

SEQ ID NO: 337327 - RNA, 19 nt, Homo sapiens
  misc_RNA (1)...(19): siRNA sense strand
ccaacaugcccacagauca

SEQ ID NO: 337328 - RNA, 19 nt, Homo sapiens
  misc_RNA (1)...(19): siRNA sense strand
uaugggcccuucaccaaca

SEQ ID NO: 337329 - RNA, 19 nt, Homo sapiens
  misc_RNA (1)...(19): siRNA sense strand
guccaaagcgagcaagaga

SEQ ID NO: 337330 - RNA, 19 nt, Homo sapiens
  misc_RNA (1)...(19): siRNA sense strand
cagaacaaagcacaucaga

SEQ ID NO: 337331 - RNA, 19 nt, Homo sapiens
  misc_RNA (1)...(19): siRNA sense strand
ccugcgaaauccagaacaa

SEQ ID NO: 337332 - RNA, 19 nt, Homo sapiens
  misc_RNA (1)...(19): siRNA sense strand
gaaaccaccaagguccaaa

SEQ ID NO: 337333 - RNA, 19 nt, Homo sapiens
  misc_RNA (1)...(19): siRNA sense strand
gauaaagcuccagcaggaa

SEQ ID NO: 337334 - RNA, 19 nt, Homo sapiens
  misc_RNA (1)...(19): siRNA sense strand
aaggagcuuucaucauuca

SEQ ID NO: 337335 - RNA, 19 nt, Homo sapiens
  misc_RNA (1)...(19): siRNA sense strand
ggugugagagugaaacaag

SEQ ID NO: 337336 - RNA, 19 nt, Homo sapiens
  misc_RNA (1)...(19): siRNA sense strand
gaaauggcugaacuagaag

SEQ ID NO: 337337 - RNA, 19 nt, Homo sapiens
  misc_RNA (1)...(19): siRNA sense strand
auaaagcuccagcaggaaa

SEQ ID NO: 337338 - RNA, 19 nt, Homo sapiens
  misc_RNA (1)...(19): siRNA sense strand
acccuuccaucauaaguga

SEQ ID NO: 337339 - RNA, 19 nt, Homo sapiens
  misc_RNA (1)...(19): siRNA sense strand
ggugacccagucuauuaaa

SEQ ID NO: 337340 - RNA, 19 nt, Homo sapiens
  misc_RNA (1)...(19): siRNA sense strand
cccagucuauuaaagaaag

SEQ ID NO: 337341 - RNA, 19 nt, Homo sapiens
  misc_RNA (1)...(19): siRNA sense strand
caucugggugugagaguga

SEQ ID NO: 337342 - RNA, 19 nt, Homo sapiens
  misc_RNA (1)...(19): siRNA sense strand
ccagucuauuaaagaaaga

SEQ ID NO: 337343 - RNA, 19 nt, Homo sapiens
  misc_RNA (1)...(19): siRNA sense strand
cgaaauccagaacaaagca

SEQ ID NO: 337344 - RNA, 19 nt, Homo sapiens
  misc_RNA (1)...(19): siRNA sense strand
aagagaaucccaggacaga

SEQ ID NO: 337345 - RNA, 19 nt, Homo sapiens
  misc_RNA (1)...(19): siRNA sense strand
gauguggucaauggaagaa

SEQ ID NO: 337346 - RNA, 19 nt, Homo sapiens
  misc_RNA (1)...(19): siRNA sense strand
ggaccugcgaaauccagaa

SEQ ID NO: 337347 - RNA, 19 nt, Homo sapiens
  misc_RNA (1)...(19): siRNA sense strand
gagcaugauuuugaaguca

SEQ ID NO: 337348 - RNA, 19 nt, Homo sapiens
  misc_RNA (1)...(19): siRNA sense strand
gugacccagucuauuaaag

SEQ ID NO: 337349 - RNA, 19 nt, Homo sapiens
  misc_RNA (1)...(19): siRNA sense strand
agaacaaagcacaucagaa

SEQ ID NO: 337350 - RNA, 19 nt, Homo sapiens
  misc_RNA (1)...(19): siRNA sense strand
uggaagaaaccaccaaggu

SEQ ID NO: 337351 - RNA, 19 nt, Homo sapiens
  misc_RNA (1)...(19): siRNA sense strand
ucaacuggaauggauggua

SEQ ID NO: 337352 - RNA, 19 nt, Homo sapiens
  misc_RNA (1)...(19): siRNA sense strand
ggaaauggcugaacuagaa

SEQ ID NO: 337353 - RNA, 19 nt, Homo sapiens
  misc_RNA (1)...(19): siRNA sense strand
gaacaaagcacaucagaaa

SEQ ID NO: 337354 - RNA, 19 nt, Homo sapiens
  misc_RNA (1)...(19): siRNA sense strand
cagcuacccuuccaucaua

SEQ ID NO: 337355 - RNA, 19 nt, Homo sapiens
  misc_RNA (1)...(19): siRNA sense strand
gggauaccaugcaacauaa

SEQ ID NO: 337356 - RNA, 19 nt, Homo sapiens
  misc_RNA (1)...(19): siRNA sense strand
gaggagauguggucaaugg

SEQ ID NO: 337357 - RNA, 19 nt, Homo sapiens
  misc_RNA (1)...(19): siRNA sense strand
gaaggagcuuucaucauuc

SEQ ID NO: 337358 - RNA, 19 nt, Homo sapiens
  misc_RNA (1)...(19): siRNA sense strand
cuagaaaucuguugcuaug

SEQ ID NO: 337359 - RNA, 19 nt, Homo sapiens
  misc_RNA (1)...(19): siRNA sense strand
gcucagggcuauccucuca

SEQ ID NO: 337360 - RNA, 19 nt, Homo sapiens
  misc_RNA (1)...(19): siRNA sense strand
aaacaagcgucucugaaga

SEQ ID NO: 337361 - RNA, 19 nt, Homo sapiens
  misc_RNA (1)...(19): siRNA sense strand
caacauaaccugauaaagc

SEQ ID NO: 337362 - RNA, 19 nt, Homo sapiens
  misc_RNA (1)...(19): siRNA sense strand
gaaacaagcgucucugaag

SEQ ID NO: 337363 - RNA, 19 nt, Homo sapiens
  misc_RNA (1)...(19): siRNA sense strand
gcagagggauaccaugcaa

SEQ ID NO: 337364 - RNA, 19 nt, Homo sapiens
  misc_RNA (1)...(19): siRNA sense strand
ugaacuagaagcuguguua

SEQ ID NO: 337365 - RNA, 19 nt, Homo sapiens
  misc_RNA (1)...(19): siRNA sense strand
gagaaucccaggacagaaa

SEQ ID NO: 337366 - RNA, 19 nt, Homo sapiens
  misc_RNA (1)...(19): siRNA sense strand
gcccacagaucaacuggaa

SEQ ID NO: 337367 - RNA, 19 nt, Homo sapiens
  misc_RNA (1)...(19): siRNA sense strand
gaagacugcucagggcuau

SEQ ID NO: 337368 - RNA, 19 nt, Homo sapiens
  misc_RNA (1)...(19): siRNA sense strand
gacccagucuauuaaagaa

SEQ ID NO: 337369 - RNA, 19 nt, Homo sapiens
  misc_RNA (1)...(19): siRNA sense strand
acuagaagcuguguuagaa

SEQ ID NO: 337370 - RNA, 19 nt, Homo sapiens
  misc_RNA (1)...(19): siRNA sense strand
caugcaacauaaccugaua

SEQ ID NO: 337371 - RNA, 19 nt, Homo sapiens
  misc_RNA (1)...(19): siRNA sense strand
gcuggacaccuaccugaua

SEQ ID NO: 337372 - RNA, 19 nt, Homo sapiens
  misc_RNA (1)...(19): siRNA sense strand
cagaucaacuggaauggau

SEQ ID NO: 337373 - RNA, 19 nt, Homo sapiens
  misc_RNA (1)...(19): siRNA sense strand
gcaggaaauggcugaacua

SEQ ID NO: 337374 - RNA, 19 nt, Homo sapiens
  misc_RNA (1)...(19): siRNA sense strand
ccacagaucaacuggaaug

SEQ ID NO: 337375 - RNA, 19 nt, Homo sapiens
  misc_RNA (1)...(19): siRNA sense strand
caacaugcccacagaucaa

SEQ ID NO: 337376 - RNA, 19 nt, Homo sapiens
  misc_RNA (1)...(19): siRNA sense strand
ucaccaacaugcccacaga

SEQ ID NO: 337377 - RNA, 19 nt, Homo sapiens
  misc_RNA (1)...(19): siRNA sense strand
cagaggagauguggucaau

SEQ ID NO: 337378 - RNA, 19 nt, Homo sapiens
  misc_RNA (1)...(19): siRNA sense strand
caauugggcagauguguga

SEQ ID NO: 337379 - RNA, 19 nt, Homo sapiens
  misc_RNA (1)...(19): siRNA sense strand
ggagauguggucaauggaa

SEQ ID NO: 337380 - RNA, 19 nt, Homo sapiens
  misc_RNA (1)...(19): siRNA sense strand
guacagcuguguggugcuu

SEQ ID NO: 337381 - RNA, 19 nt, Homo sapiens
  misc_RNA (1)...(19): siRNA sense strand
ccaaagcgagcaagagaau

SEQ ID NO: 337382 - RNA, 19 nt, Homo sapiens
  misc_RNA (1)...(19): siRNA sense strand
gcuaugggcccuucaccaa

SEQ ID NO: 337383 - RNA, 19 nt, Homo sapiens
  misc_RNA (1)...(19): siRNA sense strand
gaaugagcaugauuuugaa

SEQ ID NO: 337384 - RNA, 19 nt, Homo sapiens
  misc_RNA (1)...(19): siRNA sense strand
ucagggcuauccucucaga

SEQ ID NO: 337385 - RNA, 19 nt, Homo sapiens
  misc_RNA (1)...(19): siRNA sense strand
agggauaccaugcaacaua

SEQ ID NO: 337386 - RNA, 19 nt, Homo sapiens
  misc_RNA (1)...(19): siRNA sense strand
gcuagaaaucuguugcuau

SEQ ID NO: 337387 - RNA, 19 nt, Homo sapiens
  misc_RNA (1)...(19): siRNA sense strand
ugaaugagcaugauuuuga

SEQ ID NO: 337388 - RNA, 19 nt, Homo sapiens
  misc_RNA (1)...(19): siRNA sense strand
ggcuagaaaucuguugcua

SEQ ID NO: 337389 - RNA, 19 nt, Homo sapiens
  misc_RNA (1)...(19): siRNA sense strand
ugaaacaagcgucucugaa

SEQ ID NO: 337390 - RNA, 19 nt, Homo sapiens
  misc_RNA (1)...(19): siRNA sense strand
aacauaaccugauaaagcu

SEQ ID NO: 337391 - RNA, 19 nt, Homo sapiens
  misc_RNA (1)...(19): siRNA sense strand
ugacccagucuauuaaaga

SEQ ID NO: 337392 - RNA, 19 nt, Homo sapiens
  misc_RNA (1)...(19): siRNA sense strand
gaacuagaagcuguguuag

SEQ ID NO: 337393 - RNA, 19 nt, Homo sapiens
  misc_RNA (1)...(19): siRNA sense strand
gugaaacaagcgucucuga

SEQ ID NO: 337394 - RNA, 19 nt, Homo sapiens
  misc_RNA (1)...(19): siRNA sense strand
ccaacaugcccacagauca

SEQ ID NO: 337395 - RNA, 19 nt, Homo sapiens
  misc_RNA (1)...(19): siRNA sense strand
uaugggcccuucaccaaca

SEQ ID NO: 337396 - RNA, 19 nt, Homo sapiens
  misc_RNA (1)...(19): siRNA sense strand
guccaaagcgagcaagaga

SEQ ID NO: 337397 - RNA, 19 nt, Homo sapiens
  misc_RNA (1)...(19): siRNA sense strand
cagaacaaagcacaucaga

SEQ ID NO: 337398 - RNA, 19 nt, Homo sapiens
  misc_RNA (1)...(19): siRNA sense strand
ccugcgaaauccagaacaa

SEQ ID NO: 337399 - RNA, 19 nt, Homo sapiens
  misc_RNA (1)...(19): siRNA sense strand
gaaaccaccaagguccaaa

SEQ ID NO: 337400 - RNA, 19 nt, Homo sapiens
  misc_RNA (1)...(19): siRNA sense strand
gauaaagcuccagcaggaa

SEQ ID NO: 337401 - RNA, 19 nt, Homo sapiens
  misc_RNA (1)...(19): siRNA sense strand
aaggagcuuucaucauuca

SEQ ID NO: 337402 - RNA, 19 nt, Homo sapiens
  misc_RNA (1)...(19): siRNA sense strand
ggugugagagugaaacaag

SEQ ID NO: 337403 - RNA, 19 nt, Homo sapiens
  misc_RNA (1)...(19): siRNA sense strand
gaaauggcugaacuagaag

SEQ ID NO: 337404 - RNA, 19 nt, Homo sapiens
  misc_RNA (1)...(19): siRNA sense strand
auaaagcuccagcaggaaa

SEQ ID NO: 337405 - RNA, 19 nt, Homo sapiens
  misc_RNA (1)...(19): siRNA sense strand
acccuuccaucauaaguga

SEQ ID NO: 337406 - RNA, 19 nt, Homo sapiens
  misc_RNA (1)...(19): siRNA sense strand
ggugacccagucuauuaaa

SEQ ID NO: 337407 - RNA, 19 nt, Homo sapiens
  misc_RNA (1)...(19): siRNA sense strand
cccagucuauuaaagaaag

SEQ ID NO: 337408 - RNA, 19 nt, Homo sapiens
  misc_RNA (1)...(19): siRNA sense strand
caucugggugugagaguga

SEQ ID NO: 337409 - RNA, 19 nt, Homo sapiens
  misc_RNA (1)...(19): siRNA sense strand
ccagucuauuaaagaaaga

SEQ ID NO: 337410 - RNA, 19 nt, Homo sapiens
  misc_RNA (1)...(19): siRNA sense strand
cgaaauccagaacaaagca

SEQ ID NO: 337411 - RNA, 19 nt, Homo sapiens
  misc_RNA (1)...(19): siRNA sense strand
aagagaaucccaggacaga

SEQ ID NO: 337412 - RNA, 19 nt, Homo sapiens
  misc_RNA (1)...(19): siRNA sense strand
gauguggucaauggaagaa

SEQ ID NO: 337413 - RNA, 19 nt, Homo sapiens
  misc_RNA (1)...(19): siRNA sense strand
ggaccugcgaaauccagaa

SEQ ID NO: 337414 - RNA, 19 nt, Homo sapiens
  misc_RNA (1)...(19): siRNA sense strand
gagcaugauuuugaaguca

SEQ ID NO: 337415 - RNA, 19 nt, Homo sapiens
  misc_RNA (1)...(19): siRNA sense strand
gugacccagucuauuaaag

SEQ ID NO: 337416 - RNA, 19 nt, Homo sapiens
  misc_RNA (1)...(19): siRNA sense strand
agaacaaagcacaucagaa

SEQ ID NO: 337417 - RNA, 19 nt, Homo sapiens
  misc_RNA (1)...(19): siRNA sense strand
uggaagaaaccaccaaggu

SEQ ID NO: 337418 - RNA, 19 nt, Homo sapiens
  misc_RNA (1)...(19): siRNA sense strand
ucaacuggaauggauggua

SEQ ID NO: 337419 - RNA, 19 nt, Homo sapiens
  misc_RNA (1)...(19): siRNA sense strand
ggaaauggcugaacuagaa

SEQ ID NO: 337420 - RNA, 19 nt, Homo sapiens
  misc_RNA (1)...(19): siRNA sense strand
gaacaaagcacaucagaaa

SEQ ID NO: 337421 - RNA, 19 nt, Homo sapiens
  misc_RNA (1)...(19): siRNA sense strand
cagcuacccuuccaucaua

SEQ ID NO: 337422 - RNA, 19 nt, Homo sapiens
  misc_RNA (1)...(19): siRNA sense strand
gggauaccaugcaacauaa

SEQ ID NO: 337423 - RNA, 19 nt, Homo sapiens
  misc_RNA (1)...(19): siRNA sense strand
gaggagauguggucaaugg

SEQ ID NO: 337424 - RNA, 19 nt, Homo sapiens
  misc_RNA (1)...(19): siRNA sense strand
gaaggagcuuucaucauuc

SEQ ID NO: 337425 - RNA, 19 nt, Homo sapiens
  misc_RNA (1)...(19): siRNA sense strand
cuagaaaucuguugcuaug

SEQ ID NO: 337426 - RNA, 19 nt, Homo sapiens
  misc_RNA (1)...(19): siRNA sense strand
gcucagggcuauccucuca

SEQ ID NO: 337427 - RNA, 19 nt, Homo sapiens
  misc_RNA (1)...(19): siRNA sense strand
aaacaagcgucucugaaga

SEQ ID NO: 337428 - RNA, 19 nt, Homo sapiens
  misc_RNA (1)...(19): siRNA sense strand
caacauaaccugauaaagc

SEQ ID NO: 337429 - RNA, 19 nt, Homo sapiens
  misc_RNA (1)...(19): siRNA sense strand
gaaacaagcgucucugaag

SEQ ID NO: 337430 - RNA, 19 nt, Homo sapiens
  misc_RNA (1)...(19): siRNA sense strand
gcagagggauaccaugcaa

SEQ ID NO: 337431 - RNA, 19 nt, Homo sapiens
  misc_RNA (1)...(19): siRNA sense strand
ugaacuagaagcuguguua

SEQ ID NO: 337432 - RNA, 19 nt, Homo sapiens
  misc_RNA (1)...(19): siRNA sense strand
gagaaucccaggacagaaa

SEQ ID NO: 337433 - RNA, 19 nt, Homo sapiens
  misc_RNA (1)...(19): siRNA sense strand
gcccacagaucaacuggaa

SEQ ID NO: 337434 - RNA, 19 nt, Homo sapiens
  misc_RNA (1)...(19): siRNA sense strand
gaagacugcucagggcuau

SEQ ID NO: 337435 - RNA, 19 nt, Homo sapiens
  misc_RNA (1)...(19): siRNA sense strand
gacccagucuauuaaagaa

SEQ ID NO: 337436 - RNA, 19 nt, Homo sapiens
  misc_RNA (1)...(19): siRNA sense strand
acuagaagcuguguuagaa

SEQ ID NO: 337437 - RNA, 19 nt, Homo sapiens
  misc_RNA (1)...(19): siRNA sense strand
caugcaacauaaccugaua

SEQ ID NO: 337438 - RNA, 19 nt, Homo sapiens
  misc_RNA (1)...(19): siRNA sense strand
gcuggacaccuaccugaua

SEQ ID NO: 337439 - RNA, 19 nt, Homo sapiens
  misc_RNA (1)...(19): siRNA sense strand
cagaucaacuggaauggau

SEQ ID NO: 337440 - RNA, 19 nt, Homo sapiens
  misc_RNA (1)...(19): siRNA sense strand
gcaggaaauggcugaacua

SEQ ID NO: 337441 - RNA, 19 nt, Homo sapiens
  misc_RNA (1)...(19): siRNA sense strand
ccacagaucaacuggaaug

SEQ ID NO: 337442 - RNA, 19 nt, Homo sapiens
  misc_RNA (1)...(19): siRNA sense strand
caacaugcccacagaucaa

SEQ ID NO: 337443 - RNA, 19 nt, Homo sapiens
  misc_RNA (1)...(19): siRNA sense strand
ucaccaacaugcccacaga

SEQ ID NO: 337444 - RNA, 19 nt, Homo sapiens
  misc_RNA (1)...(19): siRNA sense strand
cagaggagauguggucaau

SEQ ID NO: 337445 - RNA, 19 nt, Homo sapiens
  misc_RNA (1)...(19): siRNA sense strand
caauugggcagauguguga

SEQ ID NO: 337446 - RNA, 19 nt, Homo sapiens
  misc_RNA (1)...(19): siRNA sense strand
ggagauguggucaauggaa

SEQ ID NO: 337447 - RNA, 19 nt, Homo sapiens
  misc_RNA (1)...(19): siRNA sense strand
guacagcuguguggugcuu

SEQ ID NO: 337448 - RNA, 19 nt, Homo sapiens
  misc_RNA (1)...(19): siRNA sense strand
ccaaagcgagcaagagaau

SEQ ID NO: 337449 - RNA, 19 nt, Homo sapiens
  misc_RNA (1)...(19): siRNA sense strand
gcuaugggcccuucaccaa

SEQ ID NO: 337450 - RNA, 19 nt, Homo sapiens
  misc_RNA (1)...(19): siRNA sense strand
gaaugagcaugauuuugaa

SEQ ID NO: 337451 - RNA, 19 nt, Homo sapiens
  misc_RNA (1)...(19): siRNA sense strand
ucagggcuauccucucaga

SEQ ID NO: 337452 - RNA, 19 nt, Homo sapiens
  misc_RNA (1)...(19): siRNA sense strand
agggauaccaugcaacaua

SEQ ID NO: 337453 - RNA, 19 nt, Homo sapiens
  misc_RNA (1)...(19): siRNA sense strand
gcuagaaaucuguugcuau

SEQ ID NO: 337454 - RNA, 19 nt, Homo sapiens
  misc_RNA (1)...(19): siRNA sense strand
ugaaugagcaugauuuuga

SEQ ID NO: 337455 - RNA, 19 nt, Homo sapiens
  misc_RNA (1)...(19): siRNA sense strand
ggcuagaaaucuguugcua

SEQ ID NO: 337456 - RNA, 19 nt, Homo sapiens
  misc_RNA (1)...(19): siRNA sense strand
ugaaacaagcgucucugaa

SEQ ID NO: 337457 - RNA, 19 nt, Homo sapiens
  misc_RNA (1)...(19): siRNA sense strand
aacauaaccugauaaagcu

SEQ ID NO: 337458 - RNA, 19 nt, Homo sapiens
  misc_RNA (1)...(19): siRNA sense strand
ugacccagucuauuaaaga

SEQ ID NO: 337459 - RNA, 19 nt, Homo sapiens
  misc_RNA (1)...(19): siRNA sense strand
gaacuagaagcuguguuag

SEQ ID NO: 337460 - RNA, 19 nt, Homo sapiens
  misc_RNA (1)...(19): siRNA sense strand
gugaaacaagcgucucuga

SEQ ID NO: 337461 - RNA, 19 nt, Homo sapiens
  misc_RNA (1)...(19): siRNA sense strand
ccaacaugcccacagauca

SEQ ID NO: 337462 - RNA, 19 nt, Homo sapiens
  misc_RNA (1)...(19): siRNA sense strand
uaugggcccuucaccaaca

SEQ ID NO: 337463 - RNA, 19 nt, Homo sapiens
  misc_RNA (1)...(19): siRNA sense strand
guccaaagcgagcaagaga

SEQ ID NO: 337464 - RNA, 19 nt, Homo sapiens
  misc_RNA (1)...(19): siRNA sense strand
cagaacaaagcacaucaga

SEQ ID NO: 337465 - RNA, 19 nt, Homo sapiens
  misc_RNA (1)...(19): siRNA sense strand
ccugcgaaauccagaacaa

SEQ ID NO: 337466 - RNA, 19 nt, Homo sapiens
  misc_RNA (1)...(19): siRNA sense strand
gaaaccaccaagguccaaa

SEQ ID NO: 337467 - RNA, 19 nt, Homo sapiens
  misc_RNA (1)...(19): siRNA sense strand
gauaaagcuccagcaggaa

SEQ ID NO: 337468 - RNA, 19 nt, Homo sapiens
  misc_RNA (1)...(19): siRNA sense strand
aaggagcuuucaucauuca

SEQ ID NO: 337469 - RNA, 19 nt, Homo sapiens
  misc_RNA (1)...(19): siRNA sense strand
ggugugagagugaaacaag

SEQ ID NO: 337470 - RNA, 19 nt, Homo sapiens
  misc_RNA (1)...(19): siRNA sense strand
gaaauggcugaacuagaag

SEQ ID NO: 337471 - RNA, 19 nt, Homo sapiens
  misc_RNA (1)...(19): siRNA sense strand
auaaagcuccagcaggaaa

SEQ ID NO: 337472 - RNA, 19 nt, Homo sapiens
  misc_RNA (1)...(19): siRNA sense strand
acccuuccaucauaaguga

SEQ ID NO: 337473 - RNA, 19 nt, Homo sapiens
  misc_RNA (1)...(19): siRNA sense strand
ggugacccagucuauuaaa

SEQ ID NO: 337474 - RNA, 19 nt, Homo sapiens
  misc_RNA (1)...(19): siRNA sense strand
cccagucuauuaaagaaag

SEQ ID NO: 337475 - RNA, 19 nt, Homo sapiens
  misc_RNA (1)...(19): siRNA sense strand
caucugggugugagaguga

SEQ ID NO: 337476 - RNA, 19 nt, Homo sapiens
  misc_RNA (1)...(19): siRNA sense strand
ccagucuauuaaagaaaga

SEQ ID NO: 337477 - RNA, 19 nt, Homo sapiens
  misc_RNA (1)...(19): siRNA sense strand
cgaaauccagaacaaagca

SEQ ID NO: 337478 - RNA, 19 nt, Homo sapiens
  misc_RNA (1)...(19): siRNA sense strand
aagagaaucccaggacaga

SEQ ID NO: 337479 - RNA, 19 nt, Homo sapiens
  misc_RNA (1)...(19): siRNA sense strand
gauguggucaauggaagaa

SEQ ID NO: 337480 - RNA, 19 nt, Homo sapiens
  misc_RNA (1)...(19): siRNA sense strand
ggaccugcgaaauccagaa

SEQ ID NO: 337481 - RNA, 19 nt, Homo sapiens
  misc_RNA (1)...(19): siRNA sense strand
gagcaugauuuugaaguca

SEQ ID NO: 337482 - RNA, 19 nt, Homo sapiens
  misc_RNA (1)...(19): siRNA sense strand
gugacccagucuauuaaag

SEQ ID NO: 337483 - RNA, 19 nt, Homo sapiens
  misc_RNA (1)...(19): siRNA sense strand
agaacaaagcacaucagaa

SEQ ID NO: 337484 - RNA, 19 nt, Homo sapiens
  misc_RNA (1)...(19): siRNA sense strand
uggaagaaaccaccaaggu

SEQ ID NO: 337485 - RNA, 19 nt, Homo sapiens
  misc_RNA (1)...(19): siRNA sense strand
ucaacuggaauggauggua

SEQ ID NO: 337486 - RNA, 19 nt, Homo sapiens
  misc_RNA (1)...(19): siRNA sense strand
ggaaauggcugaacuagaa

SEQ ID NO: 337487 - RNA, 19 nt, Homo sapiens
  misc_RNA (1)...(19): siRNA sense strand
gaacaaagcacaucagaaa

SEQ ID NO: 337488 - RNA, 19 nt, Homo sapiens
  misc_RNA (1)...(19): siRNA sense strand
cagcuacccuuccaucaua

SEQ ID NO: 337489 - RNA, 19 nt, Homo sapiens
  misc_RNA (1)...(19): siRNA sense strand
gggauaccaugcaacauaa

SEQ ID NO: 337490 - RNA, 19 nt, Homo sapiens
  misc_RNA (1)...(19): siRNA sense strand
gaggagauguggucaaugg

SEQ ID NO: 337491 - RNA, 19 nt, Homo sapiens
  misc_RNA (1)...(19): siRNA sense strand
gaaggagcuuucaucauuc

SEQ ID NO: 337492 - RNA, 19 nt, Homo sapiens
  misc_RNA (1)...(19): siRNA sense strand
cuagaaaucuguugcuaug

SEQ ID NO: 337493 - RNA, 19 nt, Homo sapiens
  misc_RNA (1)...(19): siRNA sense strand
gcucagggcuauccucuca

SEQ ID NO: 337494 - RNA, 19 nt, Homo sapiens
  misc_RNA (1)...(19): siRNA sense strand
aaacaagcgucucugaaga

SEQ ID NO: 337495 - RNA, 19 nt, Homo sapiens
  misc_RNA (1)...(19): siRNA sense strand
caacauaaccugauaaagc

SEQ ID NO: 337496 - RNA, 19 nt, Homo sapiens
  misc_RNA (1)...(19): siRNA sense strand
gaaacaagcgucucugaag

SEQ ID NO: 337497 - RNA, 19 nt, Homo sapiens
  misc_RNA (1)...(19): siRNA sense strand
gcagagggauaccaugcaa

SEQ ID NO: 337498 - RNA, 19 nt, Homo sapiens
  misc_RNA (1)...(19): siRNA sense strand
ugaacuagaagcuguguua

SEQ ID NO: 337499 - RNA, 19 nt, Homo sapiens
  misc_RNA (1)...(19): siRNA sense strand
gagaaucccaggacagaaa

SEQ ID NO: 337500 - RNA, 19 nt, Homo sapiens
  misc_RNA (1)...(19): siRNA sense strand
gcccacagaucaacuggaa

SEQ ID NO: 337501 - RNA, 19 nt, Homo sapiens
  misc_RNA (1)...(19): siRNA sense strand
gaagacugcucagggcuau

SEQ ID NO: 337502 - RNA, 19 nt, Homo sapiens
  misc_RNA (1)...(19): siRNA sense strand
gacccagucuauuaaagaa

SEQ ID NO: 337503 - RNA, 19 nt, Homo sapiens
  misc_RNA (1)...(19): siRNA sense strand
acuagaagcuguguuagaa

SEQ ID NO: 337504 - RNA, 19 nt, Homo sapiens
  misc_RNA (1)...(19): siRNA sense strand
caugcaacauaaccugaua

SEQ ID NO: 337505 - RNA, 19 nt, Homo sapiens
  misc_RNA (1)...(19): siRNA sense strand
gcuggacaccuaccugaua

SEQ ID NO: 337506 - RNA, 19 nt, Homo sapiens
  misc_RNA (1)...(19): siRNA sense strand
cagaucaacuggaauggau

SEQ ID NO: 337507 - RNA, 19 nt, Homo sapiens
  misc_RNA (1)...(19): siRNA sense strand
gcaggaaauggcugaacua

SEQ ID NO: 337508 - RNA, 19 nt, Homo sapiens
  misc_RNA (1)...(19): siRNA sense strand
ccacagaucaacuggaaug

SEQ ID NO: 337509 - RNA, 19 nt, Homo sapiens
  misc_RNA (1)...(19): siRNA sense strand
caacaugcccacagaucaa

SEQ ID NO: 337510 - RNA, 19 nt, Homo sapiens
  misc_RNA (1)...(19): siRNA sense strand
ucaccaacaugcccacaga

SEQ ID NO: 337511 - RNA, 19 nt, Homo sapiens
  misc_RNA (1)...(19): siRNA sense strand
cagaggagauguggucaau

SEQ ID NO: 337512 - RNA, 19 nt, Homo sapiens
  misc_RNA (1)...(19): siRNA sense strand
caauugggcagauguguga

SEQ ID NO: 337513 - RNA, 19 nt, Homo sapiens
  misc_RNA (1)...(19): siRNA sense strand
ggagauguggucaauggaa

SEQ ID NO: 337514 - RNA, 19 nt, Homo sapiens
  misc_RNA (1)...(19): siRNA sense strand
guacagcuguguggugcuu

SEQ ID NO: 337515 - RNA, 19 nt, Homo sapiens
  misc_RNA (1)...(19): siRNA sense strand
ccaaagcgagcaagagaau

SEQ ID NO: 337516 - RNA, 19 nt, Homo sapiens
  misc_RNA (1)...(19): siRNA sense strand
gcuaugggcccuucaccaa

SEQ ID NO: 337517 - RNA, 19 nt, Homo sapiens
  misc_RNA (1)...(19): siRNA sense strand
gaaugagcaugauuuugaa

SEQ ID NO: 337518 - RNA, 19 nt, Homo sapiens
  misc_RNA (1)...(19): siRNA sense strand
ucagggcuauccucucaga

SEQ ID NO: 337519 - RNA, 19 nt, Homo sapiens
  misc_RNA (1)...(19): siRNA sense strand
agggauaccaugcaacaua

SEQ ID NO: 337520 - RNA, 19 nt, Homo sapiens
  misc_RNA (1)...(19): siRNA sense strand
gcuagaaaucuguugcuau

SEQ ID NO: 337521 - RNA, 19 nt, Homo sapiens
  misc_RNA (1)...(19): siRNA sense strand
ugaaugagcaugauuuuga

SEQ ID NO: 337522 - RNA, 19 nt, Homo sapiens
  misc_RNA (1)...(19): siRNA sense strand
ggcuagaaaucuguugcua

SEQ ID NO: 337523 - RNA, 19 nt, Homo sapiens
  misc_RNA (1)...(19): siRNA sense strand
ugaaacaagcgucucugaa

SEQ ID NO: 337524 - RNA, 19 nt, Homo sapiens
  misc_RNA (1)...(19): siRNA sense strand
aacauaaccugauaaagcu

SEQ ID NO: 337525 - RNA, 19 nt, Homo sapiens
  misc_RNA (1)...(19): siRNA sense strand
ugacccagucuauuaaaga

SEQ ID NO: 337526 - RNA, 19 nt, Homo sapiens
  misc_RNA (1)...(19): siRNA sense strand
gaacuagaagcuguguuag

SEQ ID NO: 337527 - RNA, 19 nt, Homo sapiens
  misc_RNA (1)...(19): siRNA sense strand
gugaaacaagcgucucuga

SEQ ID NO: 337528 - RNA, 19 nt, Homo sapiens
  misc_RNA (1)...(19): siRNA sense strand
ccaacaugcccacagauca

SEQ ID NO: 337529 - RNA, 19 nt, Homo sapiens
  misc_RNA (1)...(19): siRNA sense strand
uaugggcccuucaccaaca

SEQ ID NO: 337530 - RNA, 19 nt, Homo sapiens
  misc_RNA (1)...(19): siRNA sense strand
guccaaagcgagcaagaga

SEQ ID NO: 337531 - RNA, 19 nt, Homo sapiens
  misc_RNA (1)...(19): siRNA sense strand
cagaacaaagcacaucaga

SEQ ID NO: 337532 - RNA, 19 nt, Homo sapiens
  misc_RNA (1)...(19): siRNA sense strand
ccugcgaaauccagaacaa

SEQ ID NO: 337533 - RNA, 19 nt, Homo sapiens
  misc_RNA (1)...(19): siRNA sense strand
gaaaccaccaagguccaaa

SEQ ID NO: 337534 - RNA, 19 nt, Homo sapiens
  misc_RNA (1)...(19): siRNA sense strand
gauaaagcuccagcaggaa

SEQ ID NO: 337535 - RNA, 19 nt, Homo sapiens
  misc_RNA (1)...(19): siRNA sense strand
aaggagcuuucaucauuca

SEQ ID NO: 337536 - RNA, 19 nt, Homo sapiens
  misc_RNA (1)...(19): siRNA sense strand
ggugugagagugaaacaag

SEQ ID NO: 337537 - RNA, 19 nt, Homo sapiens
  misc_RNA (1)...(19): siRNA sense strand
gaaauggcugaacuagaag

SEQ ID NO: 337538 - RNA, 19 nt, Homo sapiens
  misc_RNA (1)...(19): siRNA sense strand
auaaagcuccagcaggaaa

SEQ ID NO: 337539 - RNA, 19 nt, Homo sapiens
  misc_RNA (1)...(19): siRNA sense strand
acccuuccaucauaaguga

SEQ ID NO: 337540 - RNA, 19 nt, Homo sapiens
  misc_RNA (1)...(19): siRNA sense strand
ggugacccagucuauuaaa

SEQ ID NO: 337541 - RNA, 19 nt, Homo sapiens
  misc_RNA (1)...(19): siRNA sense strand
cccagucuauuaaagaaag

SEQ ID NO: 337542 - RNA, 19 nt, Homo sapiens
  misc_RNA (1)...(19): siRNA sense strand
caucugggugugagaguga

SEQ ID NO: 337543 - RNA, 19 nt, Homo sapiens
  misc_RNA (1)...(19): siRNA sense strand
ccagucuauuaaagaaaga

SEQ ID NO: 337544 - RNA, 19 nt, Homo sapiens
  misc_RNA (1)...(19): siRNA sense strand
cgaaauccagaacaaagca

SEQ ID NO: 337545 - RNA, 19 nt, Homo sapiens
  misc_RNA (1)...(19): siRNA sense strand
aagagaaucccaggacaga

SEQ ID NO: 337546 - RNA, 19 nt, Homo sapiens
  misc_RNA (1)...(19): siRNA sense strand
gauguggucaauggaagaa

SEQ ID NO: 337547 - RNA, 19 nt, Homo sapiens
  misc_RNA (1)...(19): siRNA sense strand
ggaccugcgaaauccagaa

SEQ ID NO: 337548 - RNA, 19 nt, Homo sapiens
  misc_RNA (1)...(19): siRNA sense strand
gagcaugauuuugaaguca

SEQ ID NO: 337549 - RNA, 19 nt, Homo sapiens
  misc_RNA (1)...(19): siRNA sense strand
gugacccagucuauuaaag

SEQ ID NO: 337550 - RNA, 19 nt, Homo sapiens
  misc_RNA (1)...(19): siRNA sense strand
agaacaaagcacaucagaa

SEQ ID NO: 337551 - RNA, 19 nt, Homo sapiens
  misc_RNA (1)...(19): siRNA sense strand
uggaagaaaccaccaaggu

SEQ ID NO: 337552 - RNA, 19 nt, Homo sapiens
  misc_RNA (1)...(19): siRNA sense strand
ucaacuggaauggauggua

SEQ ID NO: 337553 - RNA, 19 nt, Homo sapiens
  misc_RNA (1)...(19): siRNA sense strand
ggaaauggcugaacuagaa

SEQ ID NO: 337554 - RNA, 19 nt, Homo sapiens
  misc_RNA (1)...(19): siRNA sense strand
gaacaaagcacaucagaaa

SEQ ID NO: 337555 - RNA, 19 nt, Homo sapiens
  misc_RNA (1)...(19): siRNA sense strand
cagcuacccuuccaucaua

SEQ ID NO: 337556 - RNA, 19 nt, Homo sapiens
  misc_RNA (1)...(19): siRNA sense strand
gggauaccaugcaacauaa

SEQ ID NO: 337557 - RNA, 19 nt, Homo sapiens
  misc_RNA (1)...(19): siRNA sense strand
gcucagggcuauccucuca

SEQ ID NO: 337558 - RNA, 19 nt, Homo sapiens
  misc_RNA (1)...(19): siRNA sense strand
aaacaagcgucucugaaga

SEQ ID NO: 337559 - RNA, 19 nt, Homo sapiens
  misc_RNA (1)...(19): siRNA sense strand
caacauaaccugauaaagc

SEQ ID NO: 337560 - RNA, 19 nt, Homo sapiens
  misc_RNA (1)...(19): siRNA sense strand
gaaacaagcgucucugaag

SEQ ID NO: 337561 - RNA, 19 nt, Homo sapiens
  misc_RNA (1)...(19): siRNA sense strand
gcagagggauaccaugcaa

SEQ ID NO: 337562 - RNA, 19 nt, Homo sapiens
  misc_RNA (1)...(19): siRNA sense strand
ugaacuagaagcuguguua

SEQ ID NO: 337563 - RNA, 19 nt, Homo sapiens
  misc_RNA (1)...(19): siRNA sense strand
gaagacugcucagggcuau

SEQ ID NO: 337564 - RNA, 19 nt, Homo sapiens
  misc_RNA (1)...(19): siRNA sense strand
acuagaagcuguguuagaa

SEQ ID NO: 337565 - RNA, 19 nt, Homo sapiens
  misc_RNA (1)...(19): siRNA sense strand
caugcaacauaaccugaua

SEQ ID NO: 337566 - RNA, 19 nt, Homo sapiens
  misc_RNA (1)...(19): siRNA sense strand
gcaggaaauggcugaacua

SEQ ID NO: 337567 - RNA, 19 nt, Homo sapiens
  misc_RNA (1)...(19): siRNA sense strand
ucagggcuauccucucaga

SEQ ID NO: 337568 - RNA, 19 nt, Homo sapiens
  misc_RNA (1)...(19): siRNA sense strand
agggauaccaugcaacaua

SEQ ID NO: 337569 - RNA, 19 nt, Homo sapiens
  misc_RNA (1)...(19): siRNA sense strand
ugaaacaagcgucucugaa

SEQ ID NO: 337570 - RNA, 19 nt, Homo sapiens
  misc_RNA (1)...(19): siRNA sense strand
aacauaaccugauaaagcu

SEQ ID NO: 337571 - RNA, 19 nt, Homo sapiens
  misc_RNA (1)...(19): siRNA sense strand
gaacuagaagcuguguuag

SEQ ID NO: 337572 - RNA, 19 nt, Homo sapiens
  misc_RNA (1)...(19): siRNA sense strand
cagaacaaagcacaucaga

SEQ ID NO: 337573 - RNA, 19 nt, Homo sapiens
  misc_RNA (1)...(19): siRNA sense strand
gugaaacaagcgucucuga

SEQ ID NO: 337574 - RNA, 19 nt, Homo sapiens
  misc_RNA (1)...(19): siRNA sense strand
ccugcgaaauccagaacaa

SEQ ID NO: 337575 - RNA, 19 nt, Homo sapiens
  misc_RNA (1)...(19): siRNA sense strand
gauaaagcuccagcaggaa

SEQ ID NO: 337576 - RNA, 19 nt, Homo sapiens
  misc_RNA (1)...(19): siRNA sense strand
ggugugagagugaaacaag

SEQ ID NO: 337577 - RNA, 19 nt, Homo sapiens
  misc_RNA (1)...(19): siRNA sense strand
auaaagcuccagcaggaaa

SEQ ID NO: 337578 - RNA, 19 nt, Homo sapiens
  misc_RNA (1)...(19): siRNA sense strand
acccuuccaucauaaguga

SEQ ID NO: 337579 - RNA, 19 nt, Homo sapiens
  misc_RNA (1)...(19): siRNA sense strand
gaaauggcugaacuagaag

SEQ ID NO: 337580 - RNA, 19 nt, Homo sapiens
  misc_RNA (1)...(19): siRNA sense strand
caucugggugugagaguga

SEQ ID NO: 337581 - RNA, 19 nt, Homo sapiens
  misc_RNA (1)...(19): siRNA sense strand
cgaaauccagaacaaagca

SEQ ID NO: 337582 - RNA, 19 nt, Homo sapiens
  misc_RNA (1)...(19): siRNA sense strand
ggaccugcgaaauccagaa

SEQ ID NO: 337583 - RNA, 19 nt, Homo sapiens
  misc_RNA (1)...(19): siRNA sense strand
agaacaaagcacaucagaa

SEQ ID NO: 337584 - RNA, 19 nt, Homo sapiens
  misc_RNA (1)...(19): siRNA sense strand
ggaaauggcugaacuagaa

SEQ ID NO: 337585 - RNA, 19 nt, Homo sapiens
  misc_RNA (1)...(19): siRNA sense strand
gaacaaagcacaucagaaa

SEQ ID NO: 337586 - RNA, 19 nt, Homo sapiens
  misc_RNA (1)...(19): siRNA sense strand
cagcuacccuuccaucaua

SEQ ID NO: 337587 - RNA, 19 nt, Homo sapiens
  misc_RNA (1)...(19): siRNA sense strand
gggauaccaugcaacauaa

SEQ ID NO: 337588 - RNA, 19 nt, Homo sapiens
  misc_RNA (1)...(19): siRNA sense strand
gaggagauguggucaaugg

SEQ ID NO: 337589 - RNA, 19 nt, Homo sapiens
  misc_RNA (1)...(19): siRNA sense strand
gaaggagcuuucaucauuc

SEQ ID NO: 337590 - RNA, 19 nt, Homo sapiens
  misc_RNA (1)...(19): siRNA sense strand
cuagaaaucuguugcuaug

SEQ ID NO: 337591 - RNA, 19 nt, Homo sapiens
  misc_RNA (1)...(19): siRNA sense strand
gcucagggcuauccucuca

SEQ ID NO: 337592 - RNA, 19 nt, Homo sapiens
  misc_RNA (1)...(19): siRNA sense strand
aaacaagcgucucugaaga

SEQ ID NO: 337593 - RNA, 19 nt, Homo sapiens
  misc_RNA (1)...(19): siRNA sense strand
caacauaaccugauaaagc

SEQ ID NO: 337594 - RNA, 19 nt, Homo sapiens
  misc_RNA (1)...(19): siRNA sense strand
gaaacaagcgucucugaag

SEQ ID NO: 337595 - RNA, 19 nt, Homo sapiens
  misc_RNA (1)...(19): siRNA sense strand
gcagagggauaccaugcaa

SEQ ID NO: 337596 - RNA, 19 nt, Homo sapiens
  misc_RNA (1)...(19): siRNA sense strand
ugaacuagaagcuguguua

SEQ ID NO: 337597 - RNA, 19 nt, Homo sapiens
  misc_RNA (1)...(19): siRNA sense strand
gagaaucccaggacagaaa

SEQ ID NO: 337598 - RNA, 19 nt, Homo sapiens
  misc_RNA (1)...(19): siRNA sense strand
gcccacagaucaacuggaa

SEQ ID NO: 337599 - RNA, 19 nt, Homo sapiens
  misc_RNA (1)...(19): siRNA sense strand
gaagacugcucagggcuau

SEQ ID NO: 337600 - RNA, 19 nt, Homo sapiens
  misc_RNA (1)...(19): siRNA sense strand
gacccagucuauuaaagaa

SEQ ID NO: 337601 - RNA, 19 nt, Homo sapiens
  misc_RNA (1)...(19): siRNA sense strand
acuagaagcuguguuagaa

SEQ ID NO: 337602 - RNA, 19 nt, Homo sapiens
  misc_RNA (1)...(19): siRNA sense strand
caugcaacauaaccugaua

SEQ ID NO: 337603 - RNA, 19 nt, Homo sapiens
  misc_RNA (1)...(19): siRNA sense strand
gcuggacaccuaccugaua

SEQ ID NO: 337604 - RNA, 19 nt, Homo sapiens
  misc_RNA (1)...(19): siRNA sense strand
cagaucaacuggaauggau

SEQ ID NO: 337605 - RNA, 19 nt, Homo sapiens
  misc_RNA (1)...(19): siRNA sense strand
gcaggaaauggcugaacua

SEQ ID NO: 337606 - RNA, 19 nt, Homo sapiens
  misc_RNA (1)...(19): siRNA sense strand
ccacagaucaacuggaaug

SEQ ID NO: 337607 - RNA, 19 nt, Homo sapiens
  misc_RNA (1)...(19): siRNA sense strand
caacaugcccacagaucaa

SEQ ID NO: 337608 - RNA, 19 nt, Homo sapiens
  misc_RNA (1)...(19): siRNA sense strand
ucaccaacaugcccacaga

SEQ ID NO: 337609 - RNA, 19 nt, Homo sapiens
  misc_RNA (1)...(19): siRNA sense strand
cagaggagauguggucaau

SEQ ID NO: 337610 - RNA, 19 nt, Homo sapiens
  misc_RNA (1)...(19): siRNA sense strand
caauugggcagauguguga

SEQ ID NO: 337611 - RNA, 19 nt, Homo sapiens
  misc_RNA (1)...(19): siRNA sense strand
ggagauguggucaauggaa

SEQ ID NO: 337612 - RNA, 19 nt, Homo sapiens
  misc_RNA (1)...(19): siRNA sense strand
guacagcuguguggugcuu

SEQ ID NO: 337613 - RNA, 19 nt, Homo sapiens
  misc_RNA (1)...(19): siRNA sense strand
ccaaagcgagcaagagaau

SEQ ID NO: 337614 - RNA, 19 nt, Homo sapiens
  misc_RNA (1)...(19): siRNA sense strand
gcuaugggcccuucaccaa

SEQ ID NO: 337615 - RNA, 19 nt, Homo sapiens
  misc_RNA (1)...(19): siRNA sense strand
gaaugagcaugauuuugaa

SEQ ID NO: 337616 - RNA, 19 nt, Homo sapiens
  misc_RNA (1)...(19): siRNA sense strand
ucagggcuauccucucaga

SEQ ID NO: 337617 - RNA, 19 nt, Homo sapiens
  misc_RNA (1)...(19): siRNA sense strand
agggauaccaugcaacaua

SEQ ID NO: 337618 - RNA, 19 nt, Homo sapiens
  misc_RNA (1)...(19): siRNA sense strand
gcuagaaaucuguugcuau

SEQ ID NO: 337619 - RNA, 19 nt, Homo sapiens
  misc_RNA (1)...(19): siRNA sense strand
ugaaugagcaugauuuuga

SEQ ID NO: 337620 - RNA, 19 nt, Homo sapiens
  misc_RNA (1)...(19): siRNA sense strand
ggcuagaaaucuguugcua

SEQ ID NO: 337621 - RNA, 19 nt, Homo sapiens
  misc_RNA (1)...(19): siRNA sense strand
ugaaacaagcgucucugaa

SEQ ID NO: 337622 - RNA, 19 nt, Homo sapiens
  misc_RNA (1)...(19): siRNA sense strand
aacauaaccugauaaagcu

SEQ ID NO: 337623 - RNA, 19 nt, Homo sapiens
  misc_RNA (1)...(19): siRNA sense strand
ugacccagucuauuaaaga

SEQ ID NO: 337624 - RNA, 19 nt, Homo sapiens
  misc_RNA (1)...(19): siRNA sense strand
gaacuagaagcuguguuag

SEQ ID NO: 337625 - RNA, 19 nt, Homo sapiens
  misc_RNA (1)...(19): siRNA sense strand
gugaaacaagcgucucuga

SEQ ID NO: 337626 - RNA, 19 nt, Homo sapiens
  misc_RNA (1)...(19): siRNA sense strand
ccaacaugcccacagauca

SEQ ID NO: 337627 - RNA, 19 nt, Homo sapiens
  misc_RNA (1)...(19): siRNA sense strand
uaugggcccuucaccaaca

SEQ ID NO: 337628 - RNA, 19 nt, Homo sapiens
  misc_RNA (1)...(19): siRNA sense strand
guccaaagcgagcaagaga

SEQ ID NO: 337629 - RNA, 19 nt, Homo sapiens
  misc_RNA (1)...(19): siRNA sense strand
cagaacaaagcacaucaga

SEQ ID NO: 337630 - RNA, 19 nt, Homo sapiens
  misc_RNA (1)...(19): siRNA sense strand
ccugcgaaauccagaacaa

SEQ ID NO: 337631 - RNA, 19 nt, Homo sapiens
  misc_RNA (1)...(19): siRNA sense strand
gaaaccaccaagguccaaa

SEQ ID NO: 337632 - RNA, 19 nt, Homo sapiens
  misc_RNA (1)...(19): siRNA sense strand
gauaaagcuccagcaggaa

SEQ ID NO: 337633 - RNA, 19 nt, Homo sapiens
  misc_RNA (1)...(19): siRNA sense strand
aaggagcuuucaucauuca

SEQ ID NO: 337634 - RNA, 19 nt, Homo sapiens
  misc_RNA (1)...(19): siRNA sense strand
ggugugagagugaaacaag

SEQ ID NO: 337635 - RNA, 19 nt, Homo sapiens
  misc_RNA (1)...(19): siRNA sense strand
gaaauggcugaacuagaag

SEQ ID NO: 337636 - RNA, 19 nt, Homo sapiens
  misc_RNA (1)...(19): siRNA sense strand
auaaagcuccagcaggaaa

SEQ ID NO: 337637 - RNA, 19 nt, Homo sapiens
  misc_RNA (1)...(19): siRNA sense strand
acccuuccaucauaaguga

SEQ ID NO: 337638 - RNA, 19 nt, Homo sapiens
  misc_RNA (1)...(19): siRNA sense strand
ggugacccagucuauuaaa

SEQ ID NO: 337639 - RNA, 19 nt, Homo sapiens
  misc_RNA (1)...(19): siRNA sense strand
cccagucuauuaaagaaag

SEQ ID NO: 337640 - RNA, 19 nt, Homo sapiens
  misc_RNA (1)...(19): siRNA sense strand
caucugggugugagaguga

SEQ ID NO: 337641 - RNA, 19 nt, Homo sapiens
  misc_RNA (1)...(19): siRNA sense strand
ccagucuauuaaagaaaga

SEQ ID NO: 337642 - RNA, 19 nt, Homo sapiens
  misc_RNA (1)...(19): siRNA sense strand
cgaaauccagaacaaagca

SEQ ID NO: 337643 - RNA, 19 nt, Homo sapiens
  misc_RNA (1)...(19): siRNA sense strand
aagagaaucccaggacaga

SEQ ID NO: 337644 - RNA, 19 nt, Homo sapiens
  misc_RNA (1)...(19): siRNA sense strand
gauguggucaauggaagaa

SEQ ID NO: 337645 - RNA, 19 nt, Homo sapiens
  misc_RNA (1)...(19): siRNA sense strand
ggaccugcgaaauccagaa

SEQ ID NO: 337646 - RNA, 19 nt, Homo sapiens
  misc_RNA (1)...(19): siRNA sense strand
gagcaugauuuugaaguca

SEQ ID NO: 337647 - RNA, 19 nt, Homo sapiens
  misc_RNA (1)...(19): siRNA sense strand
gugacccagucuauuaaag

SEQ ID NO: 337648 - RNA, 19 nt, Homo sapiens
  misc_RNA (1)...(19): siRNA sense strand
agaacaaagcacaucagaa

SEQ ID NO: 337649 - RNA, 19 nt, Homo sapiens
  misc_RNA (1)...(19): siRNA sense strand
uggaagaaaccaccaaggu

SEQ ID NO: 337650 - RNA, 19 nt, Homo sapiens
  misc_RNA (1)...(19): siRNA sense strand
ucaacuggaauggauggua

SEQ ID NO: 337651 - RNA, 19 nt, Homo sapiens
  misc_RNA (1)...(19): siRNA sense strand
ggaaauggcugaacuagaa

SEQ ID NO: 337652 - RNA, 19 nt, Homo sapiens
  misc_RNA (1)...(19): siRNA sense strand
gaacaaagcacaucagaaa

SEQ ID NO: 337653 - RNA, 19 nt, Homo sapiens
  misc_RNA (1)...(19): siRNA sense strand
cagcuacccuuccaucaua

SEQ ID NO: 337654 - RNA, 19 nt, Homo sapiens
  misc_RNA (1)...(19): siRNA sense strand
gggauaccaugcaacauaa

SEQ ID NO: 337655 - RNA, 19 nt, Homo sapiens
  misc_RNA (1)...(19): siRNA sense strand
gaggagauguggucaaugg

SEQ ID NO: 337656 - RNA, 19 nt, Homo sapiens
  misc_RNA (1)...(19): siRNA sense strand
gaaggagcuuucaucauuc

SEQ ID NO: 337657 - RNA, 19 nt, Homo sapiens
  misc_RNA (1)...(19): siRNA sense strand
cuagaaaucuguugcuaug

SEQ ID NO: 337658 - RNA, 19 nt, Homo sapiens
  misc_RNA (1)...(19): siRNA sense strand
gcucagggcuauccucuca

SEQ ID NO: 337659 - RNA, 19 nt, Homo sapiens
  misc_RNA (1)...(19): siRNA sense strand
aaacaagcgucucugaaga

SEQ ID NO: 337660 - RNA, 19 nt, Homo sapiens
  misc_RNA (1)...(19): siRNA sense strand
caacauaaccugauaaagc

SEQ ID NO: 337661 - RNA, 19 nt, Homo sapiens
  misc_RNA (1)...(19): siRNA sense strand
gaaacaagcgucucugaag

SEQ ID NO: 337662 - RNA, 19 nt, Homo sapiens
  misc_RNA (1)...(19): siRNA sense strand
gcagagggauaccaugcaa

SEQ ID NO: 337663 - RNA, 19 nt, Homo sapiens
  misc_RNA (1)...(19): siRNA sense strand
ugaacuagaagcuguguua

SEQ ID NO: 337664 - RNA, 19 nt, Homo sapiens
  misc_RNA (1)...(19): siRNA sense strand
gagaaucccaggacagaaa

SEQ ID NO: 337665 - RNA, 19 nt, Homo sapiens
  misc_RNA (1)...(19): siRNA sense strand
gcccacagaucaacuggaa

SEQ ID NO: 337666 - RNA, 19 nt, Homo sapiens
  misc_RNA (1)...(19): siRNA sense strand
gaagacugcucagggcuau

SEQ ID NO: 337667 - RNA, 19 nt, Homo sapiens
  misc_RNA (1)...(19): siRNA sense strand
gacccagucuauuaaagaa

SEQ ID NO: 337668 - RNA, 19 nt, Homo sapiens
  misc_RNA (1)...(19): siRNA sense strand
acuagaagcuguguuagaa

SEQ ID NO: 337669 - RNA, 19 nt, Homo sapiens
  misc_RNA (1)...(19): siRNA sense strand
caugcaacauaaccugaua

SEQ ID NO: 337670 - RNA, 19 nt, Homo sapiens
  misc_RNA (1)...(19): siRNA sense strand
gcuggacaccuaccugaua

SEQ ID NO: 337671 - RNA, 19 nt, Homo sapiens
  misc_RNA (1)...(19): siRNA sense strand
cagaucaacuggaauggau

SEQ ID NO: 337672 - RNA, 19 nt, Homo sapiens
  misc_RNA (1)...(19): siRNA sense strand
gcaggaaauggcugaacua

SEQ ID NO: 337673 - RNA, 19 nt, Homo sapiens
  misc_RNA (1)...(19): siRNA sense strand
ccacagaucaacuggaaug

SEQ ID NO: 337674 - RNA, 19 nt, Homo sapiens
  misc_RNA (1)...(19): siRNA sense strand
caacaugcccacagaucaa

SEQ ID NO: 337675 - RNA, 19 nt, Homo sapiens
  misc_RNA (1)...(19): siRNA sense strand
ucaccaacaugcccacaga

SEQ ID NO: 337676 - RNA, 19 nt, Homo sapiens
  misc_RNA (1)...(19): siRNA sense strand
cagaggagauguggucaau

SEQ ID NO: 337677 - RNA, 19 nt, Homo sapiens
  misc_RNA (1)...(19): siRNA sense strand
caauugggcagauguguga

SEQ ID NO: 337678 - RNA, 19 nt, Homo sapiens
  misc_RNA (1)...(19): siRNA sense strand
ggagauguggucaauggaa

SEQ ID NO: 337679 - RNA, 19 nt, Homo sapiens
  misc_RNA (1)...(19): siRNA sense strand
guacagcuguguggugcuu

SEQ ID NO: 337680 - RNA, 19 nt, Homo sapiens
  misc_RNA (1)...(19): siRNA sense strand
ccaaagcgagcaagagaau

SEQ ID NO: 337681 - RNA, 19 nt, Homo sapiens
  misc_RNA (1)...(19): siRNA sense strand
gcuaugggcccuucaccaa

SEQ ID NO: 337682 - RNA, 19 nt, Homo sapiens
  misc_RNA (1)...(19): siRNA sense strand
gaaugagcaugauuuugaa

SEQ ID NO: 337683 - RNA, 19 nt, Homo sapiens
  misc_RNA (1)...(19): siRNA sense strand
ucagggcuauccucucaga

SEQ ID NO: 337684 - RNA, 19 nt, Homo sapiens
  misc_RNA (1)...(19): siRNA sense strand
agggauaccaugcaacaua

SEQ ID NO: 337685 - RNA, 19 nt, Homo sapiens
  misc_RNA (1)...(19): siRNA sense strand
gcuagaaaucuguugcuau

SEQ ID NO: 337686 - RNA, 19 nt, Homo sapiens
  misc_RNA (1)...(19): siRNA sense strand
ugaaugagcaugauuuuga

SEQ ID NO: 337687 - RNA, 19 nt, Homo sapiens
  misc_RNA (1)...(19): siRNA sense strand
ggcuagaaaucuguugcua

SEQ ID NO: 337688 - RNA, 19 nt, Homo sapiens
  misc_RNA (1)...(19): siRNA sense strand
ugaaacaagcgucucugaa

SEQ ID NO: 337689 - RNA, 19 nt, Homo sapiens
  misc_RNA (1)...(19): siRNA sense strand
aacauaaccugauaaagcu

SEQ ID NO: 337690 - RNA, 19 nt, Homo sapiens
  misc_RNA (1)...(19): siRNA sense strand
ugacccagucuauuaaaga

SEQ ID NO: 337691 - RNA, 19 nt, Homo sapiens
  misc_RNA (1)...(19): siRNA sense strand
gaacuagaagcuguguuag

SEQ ID NO: 337692 - RNA, 19 nt, Homo sapiens
  misc_RNA (1)...(19): siRNA sense strand
gugaaacaagcgucucuga

SEQ ID NO: 337693 - RNA, 19 nt, Homo sapiens
  misc_RNA (1)...(19): siRNA sense strand
ccaacaugcccacagauca

SEQ ID NO: 337694 - RNA, 19 nt, Homo sapiens
  misc_RNA (1)...(19): siRNA sense strand
uaugggcccuucaccaaca

SEQ ID NO: 337695 - RNA, 19 nt, Homo sapiens
  misc_RNA (1)...(19): siRNA sense strand
guccaaagcgagcaagaga

SEQ ID NO: 337696 - RNA, 19 nt, Homo sapiens
  misc_RNA (1)...(19): siRNA sense strand
cagaacaaagcacaucaga

SEQ ID NO: 337697 - RNA, 19 nt, Homo sapiens
  misc_RNA (1)...(19): siRNA sense strand
ccugcgaaauccagaacaa

SEQ ID NO: 337698 - RNA, 19 nt, Homo sapiens
  misc_RNA (1)...(19): siRNA sense strand
gaaaccaccaagguccaaa

SEQ ID NO: 337699 - RNA, 19 nt, Homo sapiens
  misc_RNA (1)...(19): siRNA sense strand
gauaaagcuccagcaggaa

SEQ ID NO: 337700 - RNA, 19 nt, Homo sapiens
  misc_RNA (1)...(19): siRNA sense strand
aaggagcuuucaucauuca

SEQ ID NO: 337701 - RNA, 19 nt, Homo sapiens
  misc_RNA (1)...(19): siRNA sense strand
ggugugagagugaaacaag

SEQ ID NO: 337702 - RNA, 19 nt, Homo sapiens
  misc_RNA (1)...(19): siRNA sense strand
gaaauggcugaacuagaag

SEQ ID NO: 337703 - RNA, 19 nt, Homo sapiens
  misc_RNA (1)...(19): siRNA sense strand
auaaagcuccagcaggaaa

SEQ ID NO: 337704 - RNA, 19 nt, Homo sapiens
  misc_RNA (1)...(19): siRNA sense strand
acccuuccaucauaaguga

SEQ ID NO: 337705 - RNA, 19 nt, Homo sapiens
  misc_RNA (1)...(19): siRNA sense strand
ggugacccagucuauuaaa

SEQ ID NO: 337706 - RNA, 19 nt, Homo sapiens
  misc_RNA (1)...(19): siRNA sense strand
cccagucuauuaaagaaag

SEQ ID NO: 337707 - RNA, 19 nt, Homo sapiens
  misc_RNA (1)...(19): siRNA sense strand
caucugggugugagaguga

SEQ ID NO: 337708 - RNA, 19 nt, Homo sapiens
  misc_RNA (1)...(19): siRNA sense strand
ccagucuauuaaagaaaga

SEQ ID NO: 337709 - RNA, 19 nt, Homo sapiens
  misc_RNA (1)...(19): siRNA sense strand
cgaaauccagaacaaagca

SEQ ID NO: 337710 - RNA, 19 nt, Homo sapiens
  misc_RNA (1)...(19): siRNA sense strand
aagagaaucccaggacaga

SEQ ID NO: 337711 - RNA, 19 nt, Homo sapiens
  misc_RNA (1)...(19): siRNA sense strand
gauguggucaauggaagaa

SEQ ID NO: 337712 - RNA, 19 nt, Homo sapiens
  misc_RNA (1)...(19): siRNA sense strand
ggaccugcgaaauccagaa

SEQ ID NO: 337713 - RNA, 19 nt, Homo sapiens
  misc_RNA (1)...(19): siRNA sense strand
gagcaugauuuugaaguca

SEQ ID NO: 337714 - RNA, 19 nt, Homo sapiens
  misc_RNA (1)...(19): siRNA sense strand
gugacccagucuauuaaag

SEQ ID NO: 337715 - RNA, 19 nt, Homo sapiens
  misc_RNA (1)...(19): siRNA sense strand
agaacaaagcacaucagaa

SEQ ID NO: 337716 - RNA, 19 nt, Homo sapiens
  misc_RNA (1)...(19): siRNA sense strand
uggaagaaaccaccaaggu

SEQ ID NO: 337717 - RNA, 19 nt, Homo sapiens
  misc_RNA (1)...(19): siRNA sense strand
ucaacuggaauggauggua

SEQ ID NO: 337718 - RNA, 19 nt, Homo sapiens
  misc_RNA (1)...(19): siRNA sense strand
ggaaauggcugaacuagaa

SEQ ID NO: 337719 - RNA, 19 nt, Homo sapiens
  misc_RNA (1)...(19): siRNA sense strand
gaacaaagcacaucagaaa

SEQ ID NO: 337720 - RNA, 19 nt, Homo sapiens
  misc_RNA (1)...(19): siRNA sense strand
cagcuacccuuccaucaua

SEQ ID NO: 337721 - RNA, 19 nt, Homo sapiens
  misc_RNA (1)...(19): siRNA sense strand
gggauaccaugcaacauaa

SEQ ID NO: 337722 - RNA, 19 nt, Homo sapiens
  misc_RNA (1)...(19): siRNA sense strand
gaggagauguggucaaugg

SEQ ID NO: 337723 - RNA, 19 nt, Homo sapiens
  misc_RNA (1)...(19): siRNA sense strand
gaaggagcuuucaucauuc

SEQ ID NO: 337724 - RNA, 19 nt, Homo sapiens
  misc_RNA (1)...(19): siRNA sense strand
cuagaaaucuguugcuaug

SEQ ID NO: 337725 - RNA, 19 nt, Homo sapiens
  misc_RNA (1)...(19): siRNA sense strand
gcucagggcuauccucuca

SEQ ID NO: 337726 - RNA, 19 nt, Homo sapiens
  misc_RNA (1)...(19): siRNA sense strand
aaacaagcgucucugaaga

SEQ ID NO: 337727 - RNA, 19 nt, Homo sapiens
  misc_RNA (1)...(19): siRNA sense strand
caacauaaccugauaaagc

SEQ ID NO: 337728 - RNA, 19 nt, Homo sapiens
  misc_RNA (1)...(19): siRNA sense strand
gaaacaagcgucucugaag

SEQ ID NO: 337729 - RNA, 19 nt, Homo sapiens
  misc_RNA (1)...(19): siRNA sense strand
gcagagggauaccaugcaa

SEQ ID NO: 337730 - RNA, 19 nt, Homo sapiens
  misc_RNA (1)...(19): siRNA sense strand
ugaacuagaagcuguguua

SEQ ID NO: 337731 - RNA, 19 nt, Homo sapiens
  misc_RNA (1)...(19): siRNA sense strand
gagaaucccaggacagaaa

SEQ ID NO: 337732 - RNA, 19 nt, Homo sapiens
  misc_RNA (1)...(19): siRNA sense strand
gcccacagaucaacuggaa

SEQ ID NO: 337733 - RNA, 19 nt, Homo sapiens
  misc_RNA (1)...(19): siRNA sense strand
gaagacugcucagggcuau

SEQ ID NO: 337734 - RNA, 19 nt, Homo sapiens
  misc_RNA (1)...(19): siRNA sense strand
gacccagucuauuaaagaa

SEQ ID NO: 337735 - RNA, 19 nt, Homo sapiens
  misc_RNA (1)...(19): siRNA sense strand
acuagaagcuguguuagaa

SEQ ID NO: 337736 - RNA, 19 nt, Homo sapiens
  misc_RNA (1)...(19): siRNA sense strand
caugcaacauaaccugaua

SEQ ID NO: 337737 - RNA, 19 nt, Homo sapiens
  misc_RNA (1)...(19): siRNA sense strand
gcuggacaccuaccugaua

SEQ ID NO: 337738 - RNA, 19 nt, Homo sapiens
  misc_RNA (1)...(19): siRNA sense strand
cagaucaacuggaauggau

SEQ ID NO: 337739 - RNA, 19 nt, Homo sapiens
  misc_RNA (1)...(19): siRNA sense strand
gcaggaaauggcugaacua

SEQ ID NO: 337740 - RNA, 19 nt, Homo sapiens
  misc_RNA (1)...(19): siRNA sense strand
ccacagaucaacuggaaug

SEQ ID NO: 337741 - RNA, 19 nt, Homo sapiens
  misc_RNA (1)...(19): siRNA sense strand
caacaugcccacagaucaa

SEQ ID NO: 337742 - RNA, 19 nt, Homo sapiens
  misc_RNA (1)...(19): siRNA sense strand
ucaccaacaugcccacaga

SEQ ID NO: 337743 - RNA, 19 nt, Homo sapiens
  misc_RNA (1)...(19): siRNA sense strand
cagaggagauguggucaau

SEQ ID NO: 337744 - RNA, 19 nt, Homo sapiens
  misc_RNA (1)...(19): siRNA sense strand
caauugggcagauguguga

SEQ ID NO: 337745 - RNA, 19 nt, Homo sapiens
  misc_RNA (1)...(19): siRNA sense strand
ggagauguggucaauggaa

SEQ ID NO: 337746 - RNA, 19 nt, Homo sapiens
  misc_RNA (1)...(19): siRNA sense strand
guacagcuguguggugcuu

SEQ ID NO: 337747 - RNA, 19 nt, Homo sapiens
  misc_RNA (1)...(19): siRNA sense strand
ccaaagcgagcaagagaau

SEQ ID NO: 337748 - RNA, 19 nt, Homo sapiens
  misc_RNA (1)...(19): siRNA sense strand
gcuaugggcccuucaccaa

SEQ ID NO: 337749 - RNA, 19 nt, Homo sapiens
  misc_RNA (1)...(19): siRNA sense strand
gaaugagcaugauuuugaa

SEQ ID NO: 337750 - RNA, 19 nt, Homo sapiens
  misc_RNA (1)...(19): siRNA sense strand
ucagggcuauccucucaga

SEQ ID NO: 337751 - RNA, 19 nt, Homo sapiens
  misc_RNA (1)...(19): siRNA sense strand
agggauaccaugcaacaua

SEQ ID NO: 337752 - RNA, 19 nt, Homo sapiens
  misc_RNA (1)...(19): siRNA sense strand
gcuagaaaucuguugcuau

SEQ ID NO: 337753 - RNA, 19 nt, Homo sapiens
  misc_RNA (1)...(19): siRNA sense strand
ugaaugagcaugauuuuga

SEQ ID NO: 337754 - RNA, 19 nt, Homo sapiens
  misc_RNA (1)...(19): siRNA sense strand
ggcuagaaaucuguugcua

SEQ ID NO: 337755 - RNA, 19 nt, Homo sapiens
  misc_RNA (1)...(19): siRNA sense strand
ugaaacaagcgucucugaa

SEQ ID NO: 337756 - RNA, 19 nt, Homo sapiens
  misc_RNA (1)...(19): siRNA sense strand
aacauaaccugauaaagcu

SEQ ID NO: 337757 - RNA, 19 nt, Homo sapiens
  misc_RNA (1)...(19): siRNA sense strand
ugacccagucuauuaaaga

SEQ ID NO: 337758 - RNA, 19 nt, Homo sapiens
  misc_RNA (1)...(19): siRNA sense strand
gaacuagaagcuguguuag

SEQ ID NO: 337759 - RNA, 19 nt, Homo sapiens
  misc_RNA (1)...(19): siRNA sense strand
gugaaacaagcgucucuga

SEQ ID NO: 337760 - RNA, 19 nt, Homo sapiens
  misc_RNA (1)...(19): siRNA sense strand
ccaacaugcccacagauca

SEQ ID NO: 337761 - RNA, 19 nt, Homo sapiens
  misc_RNA (1)...(19): siRNA sense strand
uaugggcccuucaccaaca

SEQ ID NO: 337762 - RNA, 19 nt, Homo sapiens
  misc_RNA (1)...(19): siRNA sense strand
guccaaagcgagcaagaga

SEQ ID NO: 337763 - RNA, 19 nt, Homo sapiens
  misc_RNA (1)...(19): siRNA sense strand
cagaacaaagcacaucaga

SEQ ID NO: 337764 - RNA, 19 nt, Homo sapiens
  misc_RNA (1)...(19): siRNA sense strand
ccugcgaaauccagaacaa

SEQ ID NO: 337765 - RNA, 19 nt, Homo sapiens
  misc_RNA (1)...(19): siRNA sense strand
gaaaccaccaagguccaaa

SEQ ID NO: 337766 - RNA, 19 nt, Homo sapiens
  misc_RNA (1)...(19): siRNA sense strand
gauaaagcuccagcaggaa

SEQ ID NO: 337767 - RNA, 19 nt, Homo sapiens
  misc_RNA (1)...(19): siRNA sense strand
aaggagcuuucaucauuca

SEQ ID NO: 337768 - RNA, 19 nt, Homo sapiens
  misc_RNA (1)...(19): siRNA sense strand
ggugugagagugaaacaag

SEQ ID NO: 337769 - RNA, 19 nt, Homo sapiens
  misc_RNA (1)...(19): siRNA sense strand
gaaauggcugaacuagaag

SEQ ID NO: 337770 - RNA, 19 nt, Homo sapiens
  misc_RNA (1)...(19): siRNA sense strand
auaaagcuccagcaggaaa

SEQ ID NO: 337771 - RNA, 19 nt, Homo sapiens
  misc_RNA (1)...(19): siRNA sense strand
acccuuccaucauaaguga

SEQ ID NO: 337772 - RNA, 19 nt, Homo sapiens
  misc_RNA (1)...(19): siRNA sense strand
ggugacccagucuauuaaa

SEQ ID NO: 337773 - RNA, 19 nt, Homo sapiens
  misc_RNA (1)...(19): siRNA sense strand
cccagucuauuaaagaaag

SEQ ID NO: 337774 - RNA, 19 nt, Homo sapiens
  misc_RNA (1)...(19): siRNA sense strand
caucugggugugagaguga

SEQ ID NO: 337775 - RNA, 19 nt, Homo sapiens
  misc_RNA (1)...(19): siRNA sense strand
ccagucuauuaaagaaaga

SEQ ID NO: 337776 - RNA, 19 nt, Homo sapiens
  misc_RNA (1)...(19): siRNA sense strand
cgaaauccagaacaaagca

SEQ ID NO: 337777 - RNA, 19 nt, Homo sapiens
  misc_RNA (1)...(19): siRNA sense strand
aagagaaucccaggacaga

SEQ ID NO: 337778 - RNA, 19 nt, Homo sapiens
  misc_RNA (1)...(19): siRNA sense strand
gauguggucaauggaagaa

SEQ ID NO: 337779 - RNA, 19 nt, Homo sapiens
  misc_RNA (1)...(19): siRNA sense strand
ggaccugcgaaauccagaa

SEQ ID NO: 337780 - RNA, 19 nt, Homo sapiens
  misc_RNA (1)...(19): siRNA sense strand
gagcaugauuuugaaguca

SEQ ID NO: 337781 - RNA, 19 nt, Homo sapiens
  misc_RNA (1)...(19): siRNA sense strand
gugacccagucuauuaaag

SEQ ID NO: 337782 - RNA, 19 nt, Homo sapiens
  misc_RNA (1)...(19): siRNA sense strand
agaacaaagcacaucagaa

SEQ ID NO: 337783 - RNA, 19 nt, Homo sapiens
  misc_RNA (1)...(19): siRNA sense strand
uggaagaaaccaccaaggu

SEQ ID NO: 337784 - RNA, 19 nt, Homo sapiens
  misc_RNA (1)...(19): siRNA sense strand
ucaacuggaauggauggua

SEQ ID NO: 337785 - RNA, 19 nt, Homo sapiens
  misc_RNA (1)...(19): siRNA sense strand
ggaaauggcugaacuagaa

SEQ ID NO: 337786 - RNA, 19 nt, Homo sapiens
  misc_RNA (1)...(19): siRNA sense strand
gaacaaagcacaucagaaa

SEQ ID NO: 337787 - RNA, 19 nt, Homo sapiens
  misc_RNA (1)...(19): siRNA sense strand
cagcuacccuuccaucaua

SEQ ID NO: 337788 - RNA, 19 nt, Homo sapiens
  misc_RNA (1)...(19): siRNA sense strand
gggauaccaugcaacauaa

SEQ ID NO: 337789 - RNA, 19 nt, Homo sapiens
  misc_RNA (1)...(19): siRNA sense strand
gaggagauguggucaaugg

SEQ ID NO: 337790 - RNA, 19 nt, Homo sapiens
  misc_RNA (1)...(19): siRNA sense strand
gaaggagcuuucaucauuc

SEQ ID NO: 337791 - RNA, 19 nt, Homo sapiens
  misc_RNA (1)...(19): siRNA sense strand
cuagaaaucuguugcuaug

SEQ ID NO: 337792 - RNA, 19 nt, Homo sapiens
  misc_RNA (1)...(19): siRNA sense strand
gcucagggcuauccucuca

SEQ ID NO: 337793 - RNA, 19 nt, Homo sapiens
  misc_RNA (1)...(19): siRNA sense strand
aaacaagcgucucugaaga

SEQ ID NO: 337794 - RNA, 19 nt, Homo sapiens
  misc_RNA (1)...(19): siRNA sense strand
caacauaaccugauaaagc

SEQ ID NO: 337795 - RNA, 19 nt, Homo sapiens
  misc_RNA (1)...(19): siRNA sense strand
gaaacaagcgucucugaag

SEQ ID NO: 337796 - RNA, 19 nt, Homo sapiens
  misc_RNA (1)...(19): siRNA sense strand
gcagagggauaccaugcaa

SEQ ID NO: 337797 - RNA, 19 nt, Homo sapiens
  misc_RNA (1)...(19): siRNA sense strand
ugaacuagaagcuguguua

SEQ ID NO: 337798 - RNA, 19 nt, Homo sapiens
  misc_RNA (1)...(19): siRNA sense strand
gagaaucccaggacagaaa

SEQ ID NO: 337799 - RNA, 19 nt, Homo sapiens
  misc_RNA (1)...(19): siRNA sense strand
gcccacagaucaacuggaa

SEQ ID NO: 337800 - RNA, 19 nt, Homo sapiens
  misc_RNA (1)...(19): siRNA sense strand
gaagacugcucagggcuau

SEQ ID NO: 337801 - RNA, 19 nt, Homo sapiens
  misc_RNA (1)...(19): siRNA sense strand
gacccagucuauuaaagaa

SEQ ID NO: 337802 - RNA, 19 nt, Homo sapiens
  misc_RNA (1)...(19): siRNA sense strand
acuagaagcuguguuagaa

SEQ ID NO: 337803 - RNA, 19 nt, Homo sapiens
  misc_RNA (1)...(19): siRNA sense strand
caugcaacauaaccugaua

SEQ ID NO: 337804 - RNA, 19 nt, Homo sapiens
  misc_RNA (1)...(19): siRNA sense strand
gcuggacaccuaccugaua

SEQ ID NO: 337805 - RNA, 19 nt, Homo sapiens
  misc_RNA (1)...(19): siRNA sense strand
cagaucaacuggaauggau

SEQ ID NO: 337806 - RNA, 19 nt, Homo sapiens
  misc_RNA (1)...(19): siRNA sense strand
gcaggaaauggcugaacua

SEQ ID NO: 337807 - RNA, 19 nt, Homo sapiens
  misc_RNA (1)...(19): siRNA sense strand
ccacagaucaacuggaaug

SEQ ID NO: 337808 - RNA, 19 nt, Homo sapiens
  misc_RNA (1)...(19): siRNA sense strand
caacaugcccacagaucaa

SEQ ID NO: 337809 - RNA, 19 nt, Homo sapiens
  misc_RNA (1)...(19): siRNA sense strand
ucaccaacaugcccacaga

SEQ ID NO: 337810 - RNA, 19 nt, Homo sapiens
  misc_RNA (1)...(19): siRNA sense strand
cagaggagauguggucaau

SEQ ID NO: 337811 - RNA, 19 nt, Homo sapiens
  misc_RNA (1)...(19): siRNA sense strand
caauugggcagauguguga

SEQ ID NO: 337812 - RNA, 19 nt, Homo sapiens
  misc_RNA (1)...(19): siRNA sense strand
ggagauguggucaauggaa

SEQ ID NO: 337813 - RNA, 19 nt, Homo sapiens
  misc_RNA (1)...(19): siRNA sense strand
guacagcuguguggugcuu

SEQ ID NO: 337814 - RNA, 19 nt, Homo sapiens
  misc_RNA (1)...(19): siRNA sense strand
ccaaagcgagcaagagaau

SEQ ID NO: 337815 - RNA, 19 nt, Homo sapiens
  misc_RNA (1)...(19): siRNA sense strand
gcuaugggcccuucaccaa

SEQ ID NO: 337816 - RNA, 19 nt, Homo sapiens
  misc_RNA (1)...(19): siRNA sense strand
gaaugagcaugauuuugaa

SEQ ID NO: 337817 - RNA, 19 nt, Homo sapiens
  misc_RNA (1)...(19): siRNA sense strand
ucagggcuauccucucaga

SEQ ID NO: 337818 - RNA, 19 nt, Homo sapiens
  misc_RNA (1)...(19): siRNA sense strand
agggauaccaugcaacaua

SEQ ID NO: 337819 - RNA, 19 nt, Homo sapiens
  misc_RNA (1)...(19): siRNA sense strand
gcuagaaaucuguugcuau

SEQ ID NO: 337820 - RNA, 19 nt, Homo sapiens
  misc_RNA (1)...(19): siRNA sense strand
ugaaugagcaugauuuuga

SEQ ID NO: 337821 - RNA, 19 nt, Homo sapiens
  misc_RNA (1)...(19): siRNA sense strand
ggcuagaaaucuguugcua

SEQ ID NO: 337822 - RNA, 19 nt, Homo sapiens
  misc_RNA (1)...(19): siRNA sense strand
ugaaacaagcgucucugaa

SEQ ID NO: 337823 - RNA, 19 nt, Homo sapiens
  misc_RNA (1)...(19): siRNA sense strand
aacauaaccugauaaagcu

SEQ ID NO: 337824 - RNA, 19 nt, Homo sapiens
  misc_RNA (1)...(19): siRNA sense strand
ugacccagucuauuaaaga

SEQ ID NO: 337825 - RNA, 19 nt, Homo sapiens
  misc_RNA (1)...(19): siRNA sense strand
gaacuagaagcuguguuag

SEQ ID NO: 337826 - RNA, 19 nt, Homo sapiens
  misc_RNA (1)...(19): siRNA sense strand
gugaaacaagcgucucuga

SEQ ID NO: 337827 - RNA, 19 nt, Homo sapiens
  misc_RNA (1)...(19): siRNA sense strand
ccaacaugcccacagauca

SEQ ID NO: 337828 - RNA, 19 nt, Homo sapiens
  misc_RNA (1)...(19): siRNA sense strand
uaugggcccuucaccaaca

SEQ ID NO: 337829 - RNA, 19 nt, Homo sapiens
  misc_RNA (1)...(19): siRNA sense strand
guccaaagcgagcaagaga

SEQ ID NO: 337830 - RNA, 19 nt, Homo sapiens
  misc_RNA (1)...(19): siRNA sense strand
cagaacaaagcacaucaga

SEQ ID NO: 337831 - RNA, 19 nt, Homo sapiens
  misc_RNA (1)...(19): siRNA sense strand
ccugcgaaauccagaacaa

SEQ ID NO: 337832 - RNA, 19 nt, Homo sapiens
  misc_RNA (1)...(19): siRNA sense strand
gaaaccaccaagguccaaa

SEQ ID NO: 337833 - RNA, 19 nt, Homo sapiens
  misc_RNA (1)...(19): siRNA sense strand
gauaaagcuccagcaggaa

SEQ ID NO: 337834 - RNA, 19 nt, Homo sapiens
  misc_RNA (1)...(19): siRNA sense strand
aaggagcuuucaucauuca

SEQ ID NO: 337835 - RNA, 19 nt, Homo sapiens
  misc_RNA (1)...(19): siRNA sense strand
ggugugagagugaaacaag

SEQ ID NO: 337836 - RNA, 19 nt, Homo sapiens
  misc_RNA (1)...(19): siRNA sense strand
gaaauggcugaacuagaag

SEQ ID NO: 337837 - RNA, 19 nt, Homo sapiens
  misc_RNA (1)...(19): siRNA sense strand
auaaagcuccagcaggaaa

SEQ ID NO: 337838 - RNA, 19 nt, Homo sapiens
  misc_RNA (1)...(19): siRNA sense strand
acccuuccaucauaaguga

SEQ ID NO: 337839 - RNA, 19 nt, Homo sapiens
  misc_RNA (1)...(19): siRNA sense strand
ggugacccagucuauuaaa

SEQ ID NO: 337840 - RNA, 19 nt, Homo sapiens
  misc_RNA (1)...(19): siRNA sense strand
cccagucuauuaaagaaag

SEQ ID NO: 337841 - RNA, 19 nt, Homo sapiens
  misc_RNA (1)...(19): siRNA sense strand
caucugggugugagaguga

SEQ ID NO: 337842 - RNA, 19 nt, Homo sapiens
  misc_RNA (1)...(19): siRNA sense strand
ccagucuauuaaagaaaga

SEQ ID NO: 337843 - RNA, 19 nt, Homo sapiens
  misc_RNA (1)...(19): siRNA sense strand
cgaaauccagaacaaagca

SEQ ID NO: 337844 - RNA, 19 nt, Homo sapiens
  misc_RNA (1)...(19): siRNA sense strand
aagagaaucccaggacaga

SEQ ID NO: 337845 - RNA, 19 nt, Homo sapiens
  misc_RNA (1)...(19): siRNA sense strand
gauguggucaauggaagaa

SEQ ID NO: 337846 - RNA, 19 nt, Homo sapiens
  misc_RNA (1)...(19): siRNA sense strand
ggaccugcgaaauccagaa

SEQ ID NO: 337847 - RNA, 19 nt, Homo sapiens
  misc_RNA (1)...(19): siRNA sense strand
gagcaugauuuugaaguca

SEQ ID NO: 337848 - RNA, 19 nt, Homo sapiens
  misc_RNA (1)...(19): siRNA sense strand
gugacccagucuauuaaag

SEQ ID NO: 337849 - RNA, 19 nt, Homo sapiens
  misc_RNA (1)...(19): siRNA sense strand
agaacaaagcacaucagaa

SEQ ID NO: 337850 - RNA, 19 nt, Homo sapiens
  misc_RNA (1)...(19): siRNA sense strand
uggaagaaaccaccaaggu

SEQ ID NO: 337851 - RNA, 19 nt, Homo sapiens
  misc_RNA (1)...(19): siRNA sense strand
ucaacuggaauggauggua

SEQ ID NO: 337852 - RNA, 19 nt, Homo sapiens
  misc_RNA (1)...(19): siRNA sense strand
ggaaauggcugaacuagaa

SEQ ID NO: 337853 - RNA, 19 nt, Homo sapiens
  misc_RNA (1)...(19): siRNA sense strand
gaacaaagcacaucagaaa

SEQ ID NO: 337854 - RNA, 19 nt, Homo sapiens
  misc_RNA (1)...(19): siRNA sense strand
cagcuacccuuccaucaua

SEQ ID NO: 337855 - RNA, 19 nt, Homo sapiens
  misc_RNA (1)...(19): siRNA sense strand
gggauaccaugcaacauaa

SEQ ID NO: 337856 - RNA, 19 nt, Homo sapiens
  misc_RNA (1)...(19): siRNA sense strand
gaggagauguggucaaugg

SEQ ID NO: 337857 - RNA, 19 nt, Homo sapiens
  misc_RNA (1)...(19): siRNA sense strand
gaaggagcuuucaucauuc

SEQ ID NO: 337858 - RNA, 19 nt, Homo sapiens
  misc_RNA (1)...(19): siRNA sense strand
cuagaaaucuguugcuaug

SEQ ID NO: 337859 - RNA, 19 nt, Homo sapiens
  misc_RNA (1)...(19): siRNA sense strand
gcucagggcuauccucuca

SEQ ID NO: 337860 - RNA, 19 nt, Homo sapiens
  misc_RNA (1)...(19): siRNA sense strand
aaacaagcgucucugaaga

SEQ ID NO: 337861 - RNA, 19 nt, Homo sapiens
  misc_RNA (1)...(19): siRNA sense strand
caacauaaccugauaaagc

SEQ ID NO: 337862 - RNA, 19 nt, Homo sapiens
  misc_RNA (1)...(19): siRNA sense strand
gaaacaagcgucucugaag

SEQ ID NO: 337863 - RNA, 19 nt, Homo sapiens
  misc_RNA (1)...(19): siRNA sense strand
gcagagggauaccaugcaa

SEQ ID NO: 337864 - RNA, 19 nt, Homo sapiens
  misc_RNA (1)...(19): siRNA sense strand
ugaacuagaagcuguguua

SEQ ID NO: 337865 - RNA, 19 nt, Homo sapiens
  misc_RNA (1)...(19): siRNA sense strand
gagaaucccaggacagaaa

SEQ ID NO: 337866 - RNA, 19 nt, Homo sapiens
  misc_RNA (1)...(19): siRNA sense strand
gcccacagaucaacuggaa

SEQ ID NO: 337867 - RNA, 19 nt, Homo sapiens
  misc_RNA (1)...(19): siRNA sense strand
gaagacugcucagggcuau

SEQ ID NO: 337868 - RNA, 19 nt, Homo sapiens
  misc_RNA (1)...(19): siRNA sense strand
gacccagucuauuaaagaa

SEQ ID NO: 337869 - RNA, 19 nt, Homo sapiens
  misc_RNA (1)...(19): siRNA sense strand
acuagaagcuguguuagaa

SEQ ID NO: 337870 - RNA, 19 nt, Homo sapiens
  misc_RNA (1)...(19): siRNA sense strand
caugcaacauaaccugaua

SEQ ID NO: 337871 - RNA, 19 nt, Homo sapiens
  misc_RNA (1)...(19): siRNA sense strand
gcuggacaccuaccugaua

SEQ ID NO: 337872 - RNA, 19 nt, Homo sapiens
  misc_RNA (1)...(19): siRNA sense strand
cagaucaacuggaauggau

SEQ ID NO: 337873 - RNA, 19 nt, Homo sapiens
  misc_RNA (1)...(19): siRNA sense strand
gcaggaaauggcugaacua

SEQ ID NO: 337874 - RNA, 19 nt, Homo sapiens
  misc_RNA (1)...(19): siRNA sense strand
ccacagaucaacuggaaug

SEQ ID NO: 337875 - RNA, 19 nt, Homo sapiens
  misc_RNA (1)...(19): siRNA sense strand
caacaugcccacagaucaa

SEQ ID NO: 337876 - RNA, 19 nt, Homo sapiens
  misc_RNA (1)...(19): siRNA sense strand
ucaccaacaugcccacaga

SEQ ID NO: 337877 - RNA, 19 nt, Homo sapiens
  misc_RNA (1)...(19): siRNA sense strand
cagaggagauguggucaau

SEQ ID NO: 337878 - RNA, 19 nt, Homo sapiens
  misc_RNA (1)...(19): siRNA sense strand
caauugggcagauguguga

SEQ ID NO: 337879 - RNA, 19 nt, Homo sapiens
  misc_RNA (1)...(19): siRNA sense strand
ggagauguggucaauggaa

SEQ ID NO: 337880 - RNA, 19 nt, Homo sapiens
  misc_RNA (1)...(19): siRNA sense strand
guacagcuguguggugcuu

SEQ ID NO: 337881 - RNA, 19 nt, Homo sapiens
  misc_RNA (1)...(19): siRNA sense strand
ccaaagcgagcaagagaau

SEQ ID NO: 337882 - RNA, 19 nt, Homo sapiens
  misc_RNA (1)...(19): siRNA sense strand
gcuaugggcccuucaccaa

SEQ ID NO: 337883 - RNA, 19 nt, Homo sapiens
  misc_RNA (1)...(19): siRNA sense strand
gaaugagcaugauuuugaa

SEQ ID NO: 337884 - RNA, 19 nt, Homo sapiens
  misc_RNA (1)...(19): siRNA sense strand
ucagggcuauccucucaga

SEQ ID NO: 337885 - RNA, 19 nt, Homo sapiens
  misc_RNA (1)...(19): siRNA sense strand
agggauaccaugcaacaua

SEQ ID NO: 337886 - RNA, 19 nt, Homo sapiens
  misc_RNA (1)...(19): siRNA sense strand
gcuagaaaucuguugcuau

SEQ ID NO: 337887 - RNA, 19 nt, Homo sapiens
  misc_RNA (1)...(19): siRNA sense strand
ugaaugagcaugauuuuga

SEQ ID NO: 337888 - RNA, 19 nt, Homo sapiens
  misc_RNA (1)...(19): siRNA sense strand
ggcuagaaaucuguugcua

SEQ ID NO: 337889 - RNA, 19 nt, Homo sapiens
  misc_RNA (1)...(19): siRNA sense strand
ugaaacaagcgucucugaa

SEQ ID NO: 337890 - RNA, 19 nt, Homo sapiens
  misc_RNA (1)...(19): siRNA sense strand
aacauaaccugauaaagcu

SEQ ID NO: 337891 - RNA, 19 nt, Homo sapiens
  misc_RNA (1)...(19): siRNA sense strand
ugacccagucuauuaaaga

SEQ ID NO: 337892 - RNA, 19 nt, Homo sapiens
  misc_RNA (1)...(19): siRNA sense strand
gaacuagaagcuguguuag

SEQ ID NO: 337893 - RNA, 19 nt, Homo sapiens
  misc_RNA (1)...(19): siRNA sense strand
gugaaacaagcgucucuga

SEQ ID NO: 337894 - RNA, 19 nt, Homo sapiens
  misc_RNA (1)...(19): siRNA sense strand
ccaacaugcccacagauca

SEQ ID NO: 337895 - RNA, 19 nt, Homo sapiens
  misc_RNA (1)...(19): siRNA sense strand
uaugggcccuucaccaaca

SEQ ID NO: 337896 - RNA, 19 nt, Homo sapiens
  misc_RNA (1)...(19): siRNA sense strand
guccaaagcgagcaagaga

SEQ ID NO: 337897 - RNA, 19 nt, Homo sapiens
  misc_RNA (1)...(19): siRNA sense strand
cagaacaaagcacaucaga

SEQ ID NO: 337898 - RNA, 19 nt, Homo sapiens
  misc_RNA (1)...(19): siRNA sense strand
ccugcgaaauccagaacaa

SEQ ID NO: 337899 - RNA, 19 nt, Homo sapiens
  misc_RNA (1)...(19): siRNA sense strand
gaaaccaccaagguccaaa

SEQ ID NO: 337900 - RNA, 19 nt, Homo sapiens
  misc_RNA (1)...(19): siRNA sense strand
gauaaagcuccagcaggaa

SEQ ID NO: 337901 - RNA, 19 nt, Homo sapiens
  misc_RNA (1)...(19): siRNA sense strand
aaggagcuuucaucauuca

SEQ ID NO: 337902 - RNA, 19 nt, Homo sapiens
  misc_RNA (1)...(19): siRNA sense strand
ggugugagagugaaacaag

SEQ ID NO: 337903 - RNA, 19 nt, Homo sapiens
  misc_RNA (1)...(19): siRNA sense strand
gaaauggcugaacuagaag

SEQ ID NO: 337904 - RNA, 19 nt, Homo sapiens
  misc_RNA (1)...(19): siRNA sense strand
auaaagcuccagcaggaaa

SEQ ID NO: 337905 - RNA, 19 nt, Homo sapiens
  misc_RNA (1)...(19): siRNA sense strand
acccuuccaucauaaguga

SEQ ID NO: 337906 - RNA, 19 nt, Homo sapiens
  misc_RNA (1)...(19): siRNA sense strand
ggugacccagucuauuaaa

SEQ ID NO: 337907 - RNA, 19 nt, Homo sapiens
  misc_RNA (1)...(19): siRNA sense strand
cccagucuauuaaagaaag

SEQ ID NO: 337908 - RNA, 19 nt, Homo sapiens
  misc_RNA (1)...(19): siRNA sense strand
caucugggugugagaguga

SEQ ID NO: 337909 - RNA, 19 nt, Homo sapiens
  misc_RNA (1)...(19): siRNA sense strand
ccagucuauuaaagaaaga

SEQ ID NO: 337910 - RNA, 19 nt, Homo sapiens
  misc_RNA (1)...(19): siRNA sense strand
cgaaauccagaacaaagca

SEQ ID NO: 337911 - RNA, 19 nt, Homo sapiens
  misc_RNA (1)...(19): siRNA sense strand
aagagaaucccaggacaga

SEQ ID NO: 337912 - RNA, 19 nt, Homo sapiens
  misc_RNA (1)...(19): siRNA sense strand
gauguggucaauggaagaa

SEQ ID NO: 337913 - RNA, 19 nt, Homo sapiens
  misc_RNA (1)...(19): siRNA sense strand
ggaccugcgaaauccagaa

SEQ ID NO: 337914 - RNA, 19 nt, Homo sapiens
  misc_RNA (1)...(19): siRNA sense strand
gagcaugauuuugaaguca

SEQ ID NO: 337915 - RNA, 19 nt, Homo sapiens
  misc_RNA (1)...(19): siRNA sense strand
gugacccagucuauuaaag

SEQ ID NO: 337916 - RNA, 19 nt, Homo sapiens
  misc_RNA (1)...(19): siRNA sense strand
agaacaaagcacaucagaa

SEQ ID NO: 337917 - RNA, 19 nt, Homo sapiens
  misc_RNA (1)...(19): siRNA sense strand
uggaagaaaccaccaaggu

SEQ ID NO: 337918 - RNA, 19 nt, Homo sapiens
  misc_RNA (1)...(19): siRNA sense strand
ucaacuggaauggauggua

SEQ ID NO: 337919 - RNA, 19 nt, Homo sapiens
  misc_RNA (1)...(19): siRNA sense strand
ggaaauggcugaacuagaa

SEQ ID NO: 337920 - RNA, 19 nt, Homo sapiens
  misc_RNA (1)...(19): siRNA sense strand
gaacaaagcacaucagaaa

SEQ ID NO: 337921 - RNA, 19 nt, Homo sapiens
  misc_RNA (1)...(19): siRNA sense strand
cagcuacccuuccaucaua

SEQ ID NO: 337922 - RNA, 19 nt, Homo sapiens
  misc_RNA (1)...(19): siRNA sense strand
gggauaccaugcaacauaa

SEQ ID NO: 337923 - RNA, 19 nt, Homo sapiens
  misc_RNA (1)...(19): siRNA sense strand
gaggagauguggucaaugg

SEQ ID NO: 337924 - RNA, 19 nt, Homo sapiens
  misc_RNA (1)...(19): siRNA sense strand
gaaggagcuuucaucauuc

SEQ ID NO: 337925 - RNA, 19 nt, Homo sapiens
  misc_RNA (1)...(19): siRNA sense strand
cuagaaaucuguugcuaug

SEQ ID NO: 337926 - RNA, 19 nt, Homo sapiens
  misc_RNA (1)...(19): siRNA sense strand
gcucagggcuauccucuca

SEQ ID NO: 337927 - RNA, 19 nt, Homo sapiens
  misc_RNA (1)...(19): siRNA sense strand
aaacaagcgucucugaaga

SEQ ID NO: 337928 - RNA, 19 nt, Homo sapiens
  misc_RNA (1)...(19): siRNA sense strand
caacauaaccugauaaagc

SEQ ID NO: 337929 - RNA, 19 nt, Homo sapiens
  misc_RNA (1)...(19): siRNA sense strand
gaaacaagcgucucugaag

SEQ ID NO: 337930 - RNA, 19 nt, Homo sapiens
  misc_RNA (1)...(19): siRNA sense strand
gcagagggauaccaugcaa

SEQ ID NO: 337931 - RNA, 19 nt, Homo sapiens
  misc_RNA (1)...(19): siRNA sense strand
ugaacuagaagcuguguua

SEQ ID NO: 337932 - RNA, 19 nt, Homo sapiens
  misc_RNA (1)...(19): siRNA sense strand
gagaaucccaggacagaaa

SEQ ID NO: 337933 - RNA, 19 nt, Homo sapiens
  misc_RNA (1)...(19): siRNA sense strand
gcccacagaucaacuggaa

SEQ ID NO: 337934 - RNA, 19 nt, Homo sapiens
  misc_RNA (1)...(19): siRNA sense strand
gaagacugcucagggcuau

SEQ ID NO: 337935 - RNA, 19 nt, Homo sapiens
  misc_RNA (1)...(19): siRNA sense strand
gacccagucuauuaaagaa

SEQ ID NO: 337936 - RNA, 19 nt, Homo sapiens
  misc_RNA (1)...(19): siRNA sense strand
acuagaagcuguguuagaa

SEQ ID NO: 337937 - RNA, 19 nt, Homo sapiens
  misc_RNA (1)...(19): siRNA sense strand
caugcaacauaaccugaua

SEQ ID NO: 337938 - RNA, 19 nt, Homo sapiens
  misc_RNA (1)...(19): siRNA sense strand
gcuggacaccuaccugaua

SEQ ID NO: 337939 - RNA, 19 nt, Homo sapiens
  misc_RNA (1)...(19): siRNA sense strand
cagaucaacuggaauggau

SEQ ID NO: 337940 - RNA, 19 nt, Homo sapiens
  misc_RNA (1)...(19): siRNA sense strand
gcaggaaauggcugaacua

SEQ ID NO: 337941 - RNA, 19 nt, Homo sapiens
  misc_RNA (1)...(19): siRNA sense strand
ccacagaucaacuggaaug

SEQ ID NO: 337942 - RNA, 19 nt, Homo sapiens
  misc_RNA (1)...(19): siRNA sense strand
caacaugcccacagaucaa

SEQ ID NO: 337943 - RNA, 19 nt, Homo sapiens
  misc_RNA (1)...(19): siRNA sense strand
ucaccaacaugcccacaga

SEQ ID NO: 337944 - RNA, 19 nt, Homo sapiens
  misc_RNA (1)...(19): siRNA sense strand
cagaggagauguggucaau

SEQ ID NO: 337945 - RNA, 19 nt, Homo sapiens
  misc_RNA (1)...(19): siRNA sense strand
caauugggcagauguguga

SEQ ID NO: 337946 - RNA, 19 nt, Homo sapiens
  misc_RNA (1)...(19): siRNA sense strand
ggagauguggucaauggaa

SEQ ID NO: 337947 - RNA, 19 nt, Homo sapiens
  misc_RNA (1)...(19): siRNA sense strand
guacagcuguguggugcuu

SEQ ID NO: 337948 - RNA, 19 nt, Homo sapiens
  misc_RNA (1)...(19): siRNA sense strand
ccaaagcgagcaagagaau

SEQ ID NO: 337949 - RNA, 19 nt, Homo sapiens
  misc_RNA (1)...(19): siRNA sense strand
gcuaugggcccuucaccaa

SEQ ID NO: 337950 - RNA, 19 nt, Homo sapiens
  misc_RNA (1)...(19): siRNA sense strand
gaaugagcaugauuuugaa

SEQ ID NO: 337951 - RNA, 19 nt, Homo sapiens
  misc_RNA (1)...(19): siRNA sense strand
ucagggcuauccucucaga

SEQ ID NO: 337952 - RNA, 19 nt, Homo sapiens
  misc_RNA (1)...(19): siRNA sense strand
agggauaccaugcaacaua

SEQ ID NO: 337953 - RNA, 19 nt, Homo sapiens
  misc_RNA (1)...(19): siRNA sense strand
gcuagaaaucuguugcuau

SEQ ID NO: 337954 - RNA, 19 nt, Homo sapiens
  misc_RNA (1)...(19): siRNA sense strand
ugaaugagcaugauuuuga

SEQ ID NO: 337955 - RNA, 19 nt, Homo sapiens
  misc_RNA (1)...(19): siRNA sense strand
ggcuagaaaucuguugcua

SEQ ID NO: 337956 - RNA, 19 nt, Homo sapiens
  misc_RNA (1)...(19): siRNA sense strand
ugaaacaagcgucucugaa

SEQ ID NO: 337957 - RNA, 19 nt, Homo sapiens
  misc_RNA (1)...(19): siRNA sense strand
aacauaaccugauaaagcu

SEQ ID NO: 337958 - RNA, 19 nt, Homo sapiens
  misc_RNA (1)...(19): siRNA sense strand
ugacccagucuauuaaaga

SEQ ID NO: 337959 - RNA, 19 nt, Homo sapiens
  misc_RNA (1)...(19): siRNA sense strand
gaacuagaagcuguguuag

SEQ ID NO: 337960 - RNA, 19 nt, Homo sapiens
  misc_RNA (1)...(19): siRNA sense strand
gugaaacaagcgucucuga

SEQ ID NO: 337961 - RNA, 19 nt, Homo sapiens
  misc_RNA (1)...(19): siRNA sense strand
ccaacaugcccacagauca

SEQ ID NO: 337962 - RNA, 19 nt, Homo sapiens
  misc_RNA (1)...(19): siRNA sense strand
uaugggcccuucaccaaca

SEQ ID NO: 337963 - RNA, 19 nt, Homo sapiens
  misc_RNA (1)...(19): siRNA sense strand
guccaaagcgagcaagaga

SEQ ID NO: 337964 - RNA, 19 nt, Homo sapiens
  misc_RNA (1)...(19): siRNA sense strand
cagaacaaagcacaucaga

SEQ ID NO: 337965 - RNA, 19 nt, Homo sapiens
  misc_RNA (1)...(19): siRNA sense strand
ccugcgaaauccagaacaa

SEQ ID NO: 337966 - RNA, 19 nt, Homo sapiens
  misc_RNA (1)...(19): siRNA sense strand
gaaaccaccaagguccaaa

SEQ ID NO: 337967 - RNA, 19 nt, Homo sapiens
  misc_RNA (1)...(19): siRNA sense strand
gauaaagcuccagcaggaa

SEQ ID NO: 337968 - RNA, 19 nt, Homo sapiens
  misc_RNA (1)...(19): siRNA sense strand
aaggagcuuucaucauuca

SEQ ID NO: 337969 - RNA, 19 nt, Homo sapiens
  misc_RNA (1)...(19): siRNA sense strand
ggugugagagugaaacaag

SEQ ID NO: 337970 - RNA, 19 nt, Homo sapiens
  misc_RNA (1)...(19): siRNA sense strand
gaaauggcugaacuagaag

SEQ ID NO: 337971 - RNA, 19 nt, Homo sapiens
  misc_RNA (1)...(19): siRNA sense strand
auaaagcuccagcaggaaa

SEQ ID NO: 337972 - RNA, 19 nt, Homo sapiens
  misc_RNA (1)...(19): siRNA sense strand
acccuuccaucauaaguga

SEQ ID NO: 337973 - RNA, 19 nt, Homo sapiens
  misc_RNA (1)...(19): siRNA sense strand
ggugacccagucuauuaaa

SEQ ID NO: 337974 - RNA, 19 nt, Homo sapiens
  misc_RNA (1)...(19): siRNA sense strand
cccagucuauuaaagaaag

SEQ ID NO: 337975 - RNA, 19 nt, Homo sapiens
  misc_RNA (1)...(19): siRNA sense strand
caucugggugugagaguga

SEQ ID NO: 337976 - RNA, 19 nt, Homo sapiens
  misc_RNA (1)...(19): siRNA sense strand
ccagucuauuaaagaaaga

SEQ ID NO: 337977 - RNA, 19 nt, Homo sapiens
  misc_RNA (1)...(19): siRNA sense strand
cgaaauccagaacaaagca

SEQ ID NO: 337978 - RNA, 19 nt, Homo sapiens
  misc_RNA (1)...(19): siRNA sense strand
aagagaaucccaggacaga

SEQ ID NO: 337979 - RNA, 19 nt, Homo sapiens
  misc_RNA (1)...(19): siRNA sense strand
gauguggucaauggaagaa

SEQ ID NO: 337980 - RNA, 19 nt, Homo sapiens
  misc_RNA (1)...(19): siRNA sense strand
ggaccugcgaaauccagaa

SEQ ID NO: 337981 - RNA, 19 nt, Homo sapiens
  misc_RNA (1)...(19): siRNA sense strand
gagcaugauuuugaaguca

SEQ ID NO: 337982 - RNA, 19 nt, Homo sapiens
  misc_RNA (1)...(19): siRNA sense strand
gugacccagucuauuaaag

SEQ ID NO: 337983 - RNA, 19 nt, Homo sapiens
  misc_RNA (1)...(19): siRNA sense strand
agaacaaagcacaucagaa

SEQ ID NO: 337984 - RNA, 19 nt, Homo sapiens
  misc_RNA (1)...(19): siRNA sense strand
uggaagaaaccaccaaggu

SEQ ID NO: 337985 - RNA, 19 nt, Homo sapiens
  misc_RNA (1)...(19): siRNA sense strand
ucaacuggaauggauggua

SEQ ID NO: 337986 - RNA, 19 nt, Homo sapiens
  misc_RNA (1)...(19): siRNA sense strand
ggaaauggcugaacuagaa

SEQ ID NO: 337987 - RNA, 19 nt, Homo sapiens
  misc_RNA (1)...(19): siRNA sense strand
gaacaaagcacaucagaaa

SEQ ID NO: 337988 - RNA, 19 nt, Homo sapiens
  misc_RNA (1)...(19): siRNA sense strand
cagcuacccuuccaucaua

SEQ ID NO: 337989 - RNA, 19 nt, Homo sapiens
  misc_RNA (1)...(19): siRNA sense strand
gggauaccaugcaacauaa

SEQ ID NO: 337990 - RNA, 19 nt, Homo sapiens
  misc_RNA (1)...(19): siRNA sense strand
gaggagauguggucaaugg

SEQ ID NO: 337991 - RNA, 19 nt, Homo sapiens
  misc_RNA (1)...(19): siRNA sense strand
gaaggagcuuucaucauuc

SEQ ID NO: 337992 - RNA, 19 nt, Homo sapiens
  misc_RNA (1)...(19): siRNA sense strand
cuagaaaucuguugcuaug

SEQ ID NO: 337993 - RNA, 19 nt, Homo sapiens
  misc_RNA (1)...(19): siRNA sense strand
gcucagggcuauccucuca

SEQ ID NO: 337994 - RNA, 19 nt, Homo sapiens
  misc_RNA (1)...(19): siRNA sense strand
aaacaagcgucucugaaga

SEQ ID NO: 337995 - RNA, 19 nt, Homo sapiens
  misc_RNA (1)...(19): siRNA sense strand
caacauaaccugauaaagc

SEQ ID NO: 337996 - RNA, 19 nt, Homo sapiens
  misc_RNA (1)...(19): siRNA sense strand
gaaacaagcgucucugaag

SEQ ID NO: 337997 - RNA, 19 nt, Homo sapiens
  misc_RNA (1)...(19): siRNA sense strand
gcagagggauaccaugcaa

SEQ ID NO: 337998 - RNA, 19 nt, Homo sapiens
  misc_RNA (1)...(19): siRNA sense strand
ugaacuagaagcuguguua

SEQ ID NO: 337999 - RNA, 19 nt, Homo sapiens
  misc_RNA (1)...(19): siRNA sense strand
gagaaucccaggacagaaa

SEQ ID NO: 338000 - RNA, 19 nt, Homo sapiens
  misc_RNA (1)...(19): siRNA sense strand
gcccacagaucaacuggaa

SEQ ID NO: 338001 - RNA, 19 nt, Homo sapiens
  misc_RNA (1)...(19): siRNA sense strand
gaagacugcucagggcuau

SEQ ID NO: 338002 - RNA, 19 nt, Homo sapiens
  misc_RNA (1)...(19): siRNA sense strand
gacccagucuauuaaagaa

SEQ ID NO: 338003 - RNA, 19 nt, Homo sapiens
  misc_RNA (1)...(19): siRNA sense strand
acuagaagcuguguuagaa

SEQ ID NO: 338004 - RNA, 19 nt, Homo sapiens
  misc_RNA (1)...(19): siRNA sense strand
caugcaacauaaccugaua

SEQ ID NO: 338005 - RNA, 19 nt, Homo sapiens
  misc_RNA (1)...(19): siRNA sense strand
gcuggacaccuaccugaua

SEQ ID NO: 338006 - RNA, 19 nt, Homo sapiens
  misc_RNA (1)...(19): siRNA sense strand
cagaucaacuggaauggau

SEQ ID NO: 338007 - RNA, 19 nt, Homo sapiens
  misc_RNA (1)...(19): siRNA sense strand
gcaggaaauggcugaacua

SEQ ID NO: 338008 - RNA, 19 nt, Homo sapiens
  misc_RNA (1)...(19): siRNA sense strand
ccacagaucaacuggaaug

SEQ ID NO: 338009 - RNA, 19 nt, Homo sapiens
  misc_RNA (1)...(19): siRNA sense strand
caacaugcccacagaucaa

SEQ ID NO: 338010 - RNA, 19 nt, Homo sapiens
  misc_RNA (1)...(19): siRNA sense strand
ucaccaacaugcccacaga

SEQ ID NO: 338011 - RNA, 19 nt, Homo sapiens
  misc_RNA (1)...(19): siRNA sense strand
cagaggagauguggucaau

SEQ ID NO: 338012 - RNA, 19 nt, Homo sapiens
  misc_RNA (1)...(19): siRNA sense strand
caauugggcagauguguga

SEQ ID NO: 338013 - RNA, 19 nt, Homo sapiens
  misc_RNA (1)...(19): siRNA sense strand
ggagauguggucaauggaa

SEQ ID NO: 338014 - RNA, 19 nt, Homo sapiens
  misc_RNA (1)...(19): siRNA sense strand
guacagcuguguggugcuu

SEQ ID NO: 338015 - RNA, 19 nt, Homo sapiens
  misc_RNA (1)...(19): siRNA sense strand
ccaaagcgagcaagagaau

SEQ ID NO: 338016 - RNA, 19 nt, Homo sapiens
  misc_RNA (1)...(19): siRNA sense strand
gcuaugggcccuucaccaa

SEQ ID NO: 338017 - RNA, 19 nt, Homo sapiens
  misc_RNA (1)...(19): siRNA sense strand
gaaugagcaugauuuugaa

SEQ ID NO: 338018 - RNA, 19 nt, Homo sapiens
  misc_RNA (1)...(19): siRNA sense strand
ucagggcuauccucucaga

SEQ ID NO: 338019 - RNA, 19 nt, Homo sapiens
  misc_RNA (1)...(19): siRNA sense strand
agggauaccaugcaacaua

SEQ ID NO: 338020 - RNA, 19 nt, Homo sapiens
  misc_RNA (1)...(19): siRNA sense strand
gcuagaaaucuguugcuau

SEQ ID NO: 338021 - RNA, 19 nt, Homo sapiens
  misc_RNA (1)...(19): siRNA sense strand
ugaaugagcaugauuuuga

SEQ ID NO: 338022 - RNA, 19 nt, Homo sapiens
  misc_RNA (1)...(19): siRNA sense strand
ggcuagaaaucuguugcua

SEQ ID NO: 338023 - RNA, 19 nt, Homo sapiens
  misc_RNA (1)...(19): siRNA sense strand
ugaaacaagcgucucugaa

SEQ ID NO: 338024 - RNA, 19 nt, Homo sapiens
  misc_RNA (1)...(19): siRNA sense strand
aacauaaccugauaaagcu

SEQ ID NO: 338025 - RNA, 19 nt, Homo sapiens
  misc_RNA (1)...(19): siRNA sense strand
ugacccagucuauuaaaga

SEQ ID NO: 338026 - RNA, 19 nt, Homo sapiens
  misc_RNA (1)...(19): siRNA sense strand
gaacuagaagcuguguuag

SEQ ID NO: 338027 - RNA, 19 nt, Homo sapiens
  misc_RNA (1)...(19): siRNA sense strand
gugaaacaagcgucucuga

SEQ ID NO: 338028 - RNA, 19 nt, Homo sapiens
  misc_RNA (1)...(19): siRNA sense strand
ccaacaugcccacagauca

SEQ ID NO: 338029 - RNA, 19 nt, Homo sapiens
  misc_RNA (1)...(19): siRNA sense strand
uaugggcccuucaccaaca

SEQ ID NO: 338030 - RNA, 19 nt, Homo sapiens
  misc_RNA (1)...(19): siRNA sense strand
guccaaagcgagcaagaga

SEQ ID NO: 338031 - RNA, 19 nt, Homo sapiens
  misc_RNA (1)...(19): siRNA sense strand
cagaacaaagcacaucaga

SEQ ID NO: 338032 - RNA, 19 nt, Homo sapiens
  misc_RNA (1)...(19): siRNA sense strand
ccugcgaaauccagaacaa

SEQ ID NO: 338033 - RNA, 19 nt, Homo sapiens
  misc_RNA (1)...(19): siRNA sense strand
gaaaccaccaagguccaaa

SEQ ID NO: 338034 - RNA, 19 nt, Homo sapiens
  misc_RNA (1)...(19): siRNA sense strand
gauaaagcuccagcaggaa

SEQ ID NO: 338035 - RNA, 19 nt, Homo sapiens
  misc_RNA (1)...(19): siRNA sense strand
aaggagcuuucaucauuca

SEQ ID NO: 338036 - RNA, 19 nt, Homo sapiens
  misc_RNA (1)...(19): siRNA sense strand
ggugugagagugaaacaag

SEQ ID NO: 338037 - RNA, 19 nt, Homo sapiens
  misc_RNA (1)...(19): siRNA sense strand
gaaauggcugaacuagaag

SEQ ID NO: 338038 - RNA, 19 nt, Homo sapiens
  misc_RNA (1)...(19): siRNA sense strand
auaaagcuccagcaggaaa

SEQ ID NO: 338039 - RNA, 19 nt, Homo sapiens
  misc_RNA (1)...(19): siRNA sense strand
acccuuccaucauaaguga

SEQ ID NO: 338040 - RNA, 19 nt, Homo sapiens
  misc_RNA (1)...(19): siRNA sense strand
ggugacccagucuauuaaa

SEQ ID NO: 338041 - RNA, 19 nt, Homo sapiens
  misc_RNA (1)...(19): siRNA sense strand
cccagucuauuaaagaaag

SEQ ID NO: 338042 - RNA, 19 nt, Homo sapiens
  misc_RNA (1)...(19): siRNA sense strand
caucugggugugagaguga

SEQ ID NO: 338043 - RNA, 19 nt, Homo sapiens
  misc_RNA (1)...(19): siRNA sense strand
ccagucuauuaaagaaaga

SEQ ID NO: 338044 - RNA, 19 nt, Homo sapiens
  misc_RNA (1)...(19): siRNA sense strand
cgaaauccagaacaaagca

SEQ ID NO: 338045 - RNA, 19 nt, Homo sapiens
  misc_RNA (1)...(19): siRNA sense strand
aagagaaucccaggacaga

SEQ ID NO: 338046 - RNA, 19 nt, Homo sapiens
  misc_RNA (1)...(19): siRNA sense strand
gauguggucaauggaagaa

SEQ ID NO: 338047 - RNA, 19 nt, Homo sapiens
  misc_RNA (1)...(19): siRNA sense strand
ggaccugcgaaauccagaa

SEQ ID NO: 338048 - RNA, 19 nt, Homo sapiens
  misc_RNA (1)...(19): siRNA sense strand
gagcaugauuuugaaguca

SEQ ID NO: 338049 - RNA, 19 nt, Homo sapiens
  misc_RNA (1)...(19): siRNA sense strand
gugacccagucuauuaaag

SEQ ID NO: 338050 - RNA, 19 nt, Homo sapiens
  misc_RNA (1)...(19): siRNA sense strand
agaacaaagcacaucagaa

SEQ ID NO: 338051 - RNA, 19 nt, Homo sapiens
  misc_RNA (1)...(19): siRNA sense strand
uggaagaaaccaccaaggu

SEQ ID NO: 338052 - RNA, 19 nt, Homo sapiens
  misc_RNA (1)...(19): siRNA sense strand
ucaacuggaauggauggua

SEQ ID NO: 338053 - RNA, 19 nt, Homo sapiens
  misc_RNA (1)...(19): siRNA sense strand
ggaaauggcugaacuagaa

SEQ ID NO: 338054 - RNA, 19 nt, Homo sapiens
  misc_RNA (1)...(19): siRNA sense strand
gaacaaagcacaucagaaa

SEQ ID NO: 338055 - RNA, 19 nt, Homo sapiens
  misc_RNA (1)...(19): siRNA sense strand
cagcuacccuuccaucaua

SEQ ID NO: 338056 - RNA, 19 nt, Homo sapiens
  misc_RNA (1)...(19): siRNA sense strand
gggauaccaugcaacauaa

SEQ ID NO: 338057 - RNA, 19 nt, Homo sapiens
  misc_RNA (1)...(19): siRNA sense strand
gaggagauguggucaaugg

SEQ ID NO: 338058 - RNA, 19 nt, Homo sapiens
  misc_RNA (1)...(19): siRNA sense strand
gaaggagcuuucaucauuc

SEQ ID NO: 338059 - RNA, 19 nt, Homo sapiens
  misc_RNA (1)...(19): siRNA sense strand
cuagaaaucuguugcuaug

SEQ ID NO: 338060 - RNA, 19 nt, Homo sapiens
  misc_RNA (1)...(19): siRNA sense strand
gcucagggcuauccucuca

SEQ ID NO: 338061 - RNA, 19 nt, Homo sapiens
  misc_RNA (1)...(19): siRNA sense strand
aaacaagcgucucugaaga

SEQ ID NO: 338062 - RNA, 19 nt, Homo sapiens
  misc_RNA (1)...(19): siRNA sense strand
caacauaaccugauaaagc

SEQ ID NO: 338063 - RNA, 19 nt, Homo sapiens
  misc_RNA (1)...(19): siRNA sense strand
gaaacaagcgucucugaag

SEQ ID NO: 338064 - RNA, 19 nt, Homo sapiens
  misc_RNA (1)...(19): siRNA sense strand
gcagagggauaccaugcaa

SEQ ID NO: 338065 - RNA, 19 nt, Homo sapiens
  misc_RNA (1)...(19): siRNA sense strand
ugaacuagaagcuguguua

SEQ ID NO: 338066 - RNA, 19 nt, Homo sapiens
  misc_RNA (1)...(19): siRNA sense strand
gagaaucccaggacagaaa

SEQ ID NO: 338067 - RNA, 19 nt, Homo sapiens
  misc_RNA (1)...(19): siRNA sense strand
gcccacagaucaacuggaa

SEQ ID NO: 338068 - RNA, 19 nt, Homo sapiens
  misc_RNA (1)...(19): siRNA sense strand
gaagacugcucagggcuau

SEQ ID NO: 338069 - RNA, 19 nt, Homo sapiens
  misc_RNA (1)...(19): siRNA sense strand
gacccagucuauuaaagaa

SEQ ID NO: 338070 - RNA, 19 nt, Homo sapiens
  misc_RNA (1)...(19): siRNA sense strand
acuagaagcuguguuagaa

SEQ ID NO: 338071 - RNA, 19 nt, Homo sapiens
  misc_RNA (1)...(19): siRNA sense strand
caugcaacauaaccugaua

SEQ ID NO: 338072 - RNA, 19 nt, Homo sapiens
  misc_RNA (1)...(19): siRNA sense strand
gcuggacaccuaccugaua

SEQ ID NO: 338073 - RNA, 19 nt, Homo sapiens
  misc_RNA (1)...(19): siRNA sense strand
cagaucaacuggaauggau

SEQ ID NO: 338074 - RNA, 19 nt, Homo sapiens
  misc_RNA (1)...(19): siRNA sense strand
gcaggaaauggcugaacua

SEQ ID NO: 338075 - RNA, 19 nt, Homo sapiens
  misc_RNA (1)...(19): siRNA sense strand
ccacagaucaacuggaaug

SEQ ID NO: 338076 - RNA, 19 nt, Homo sapiens
  misc_RNA (1)...(19): siRNA sense strand
caacaugcccacagaucaa

SEQ ID NO: 338077 - RNA, 19 nt, Homo sapiens
  misc_RNA (1)...(19): siRNA sense strand
ucaccaacaugcccacaga

SEQ ID NO: 338078 - RNA, 19 nt, Homo sapiens
  misc_RNA (1)...(19): siRNA sense strand
cagaggagauguggucaau

SEQ ID NO: 338079 - RNA, 19 nt, Homo sapiens
  misc_RNA (1)...(19): siRNA sense strand
caauugggcagauguguga

SEQ ID NO: 338080 - RNA, 19 nt, Homo sapiens
  misc_RNA (1)...(19): siRNA sense strand
ggagauguggucaauggaa

SEQ ID NO: 338081 - RNA, 19 nt, Homo sapiens
  misc_RNA (1)...(19): siRNA sense strand
guacagcuguguggugcuu

SEQ ID NO: 338082 - RNA, 19 nt, Homo sapiens
  misc_RNA (1)...(19): siRNA sense strand
ccaaagcgagcaagagaau

SEQ ID NO: 338083 - RNA, 19 nt, Homo sapiens
  misc_RNA (1)...(19): siRNA sense strand
gcuaugggcccuucaccaa

SEQ ID NO: 338084 - RNA, 19 nt, Homo sapiens
  misc_RNA (1)...(19): siRNA sense strand
gaaugagcaugauuuugaa

SEQ ID NO: 338085 - RNA, 19 nt, Homo sapiens
  misc_RNA (1)...(19): siRNA sense strand
ucagggcuauccucucaga

SEQ ID NO: 338086 - RNA, 19 nt, Homo sapiens
  misc_RNA (1)...(19): siRNA sense strand
agggauaccaugcaacaua

SEQ ID NO: 338087 - RNA, 19 nt, Homo sapiens
  misc_RNA (1)...(19): siRNA sense strand
gcuagaaaucuguugcuau

SEQ ID NO: 338088 - RNA, 19 nt, Homo sapiens
  misc_RNA (1)...(19): siRNA sense strand
ugaaugagcaugauuuuga

SEQ ID NO: 338089 - RNA, 19 nt, Homo sapiens
  misc_RNA (1)...(19): siRNA sense strand
ggcuagaaaucuguugcua

SEQ ID NO: 338090 - RNA, 19 nt, Homo sapiens
  misc_RNA (1)...(19): siRNA sense strand
ugaaacaagcgucucugaa

SEQ ID NO: 338091 - RNA, 19 nt, Homo sapiens
  misc_RNA (1)...(19): siRNA sense strand
aacauaaccugauaaagcu

SEQ ID NO: 338092 - RNA, 19 nt, Homo sapiens
  misc_RNA (1)...(19): siRNA sense strand
ugacccagucuauuaaaga

SEQ ID NO: 338093 - RNA, 19 nt, Homo sapiens
  misc_RNA (1)...(19): siRNA sense strand
gaacuagaagcuguguuag

SEQ ID NO: 338094 - RNA, 19 nt, Homo sapiens
  misc_RNA (1)...(19): siRNA sense strand
gugaaacaagcgucucuga

SEQ ID NO: 338095 - RNA, 19 nt, Homo sapiens
  misc_RNA (1)...(19): siRNA sense strand
ccaacaugcccacagauca

SEQ ID NO: 338096 - RNA, 19 nt, Homo sapiens
  misc_RNA (1)...(19): siRNA sense strand
uaugggcccuucaccaaca

SEQ ID NO: 338097 - RNA, 19 nt, Homo sapiens
  misc_RNA (1)...(19): siRNA sense strand
guccaaagcgagcaagaga

SEQ ID NO: 338098 - RNA, 19 nt, Homo sapiens
  misc_RNA (1)...(19): siRNA sense strand
cagaacaaagcacaucaga

SEQ ID NO: 338099 - RNA, 19 nt, Homo sapiens
  misc_RNA (1)...(19): siRNA sense strand
ccugcgaaauccagaacaa

SEQ ID NO: 338100 - RNA, 19 nt, Homo sapiens
  misc_RNA (1)...(19): siRNA sense strand
gaaaccaccaagguccaaa

SEQ ID NO: 338101 - RNA, 19 nt, Homo sapiens
  misc_RNA (1)...(19): siRNA sense strand
gauaaagcuccagcaggaa

SEQ ID NO: 338102 - RNA, 19 nt, Homo sapiens
  misc_RNA (1)...(19): siRNA sense strand
aaggagcuuucaucauuca

SEQ ID NO: 338103 - RNA, 19 nt, Homo sapiens
  misc_RNA (1)...(19): siRNA sense strand
ggugugagagugaaacaag

SEQ ID NO: 338104 - RNA, 19 nt, Homo sapiens
  misc_RNA (1)...(19): siRNA sense strand
gaaauggcugaacuagaag

SEQ ID NO: 338105 - RNA, 19 nt, Homo sapiens
  misc_RNA (1)...(19): siRNA sense strand
auaaagcuccagcaggaaa

SEQ ID NO: 338106 - RNA, 19 nt, Homo sapiens
  misc_RNA (1)...(19): siRNA sense strand
acccuuccaucauaaguga

SEQ ID NO: 338107 - RNA, 19 nt, Homo sapiens
  misc_RNA (1)...(19): siRNA sense strand
ggugacccagucuauuaaa

SEQ ID NO: 338108 - RNA, 19 nt, Homo sapiens
  misc_RNA (1)...(19): siRNA sense strand
cccagucuauuaaagaaag

SEQ ID NO: 338109 - RNA, 19 nt, Homo sapiens
  misc_RNA (1)...(19): siRNA sense strand
caucugggugugagaguga

SEQ ID NO: 338110 - RNA, 19 nt, Homo sapiens
  misc_RNA (1)...(19): siRNA sense strand
ccagucuauuaaagaaaga

SEQ ID NO: 338111 - RNA, 19 nt, Homo sapiens
  misc_RNA (1)...(19): siRNA sense strand
cgaaauccagaacaaagca

SEQ ID NO: 338112 - RNA, 19 nt, Homo sapiens
  misc_RNA (1)...(19): siRNA sense strand
aagagaaucccaggacaga

SEQ ID NO: 338113 - RNA, 19 nt, Homo sapiens
  misc_RNA (1)...(19): siRNA sense strand
gauguggucaauggaagaa

SEQ ID NO: 338114 - RNA, 19 nt, Homo sapiens
  misc_RNA (1)...(19): siRNA sense strand
ggaccugcgaaauccagaa

SEQ ID NO: 338115 - RNA, 19 nt, Homo sapiens
  misc_RNA (1)...(19): siRNA sense strand
gagcaugauuuugaaguca

SEQ ID NO: 338116 - RNA, 19 nt, Homo sapiens
  misc_RNA (1)...(19): siRNA sense strand
gugacccagucuauuaaag

SEQ ID NO: 338117 - RNA, 19 nt, Homo sapiens
  misc_RNA (1)...(19): siRNA sense strand
agaacaaagcacaucagaa

SEQ ID NO: 338118 - RNA, 19 nt, Homo sapiens
  misc_RNA (1)...(19): siRNA sense strand
uggaagaaaccaccaaggu

SEQ ID NO: 338119 - RNA, 19 nt, Homo sapiens
  misc_RNA (1)...(19): siRNA sense strand
ucaacuggaauggauggua

SEQ ID NO: 338120 - RNA, 19 nt, Homo sapiens
  misc_RNA (1)...(19): siRNA sense strand
ggaaauggcugaacuagaa

SEQ ID NO: 338121 - RNA, 19 nt, Homo sapiens
  misc_RNA (1)...(19): siRNA sense strand
gaacaaagcacaucagaaa

SEQ ID NO: 338122 - RNA, 19 nt, Homo sapiens
  misc_RNA (1)...(19): siRNA sense strand
cagcuacccuuccaucaua

SEQ ID NO: 338123 - RNA, 19 nt, Homo sapiens
  misc_RNA (1)...(19): siRNA sense strand
gggauaccaugcaacauaa

SEQ ID NO: 338124 - RNA, 19 nt, Homo sapiens
  misc_RNA (1)...(19): siRNA sense strand
gaggagauguggucaaugg

SEQ ID NO: 338125 - RNA, 19 nt, Homo sapiens
  misc_RNA (1)...(19): siRNA sense strand
gaaggagcuuucaucauuc

SEQ ID NO: 338126 - RNA, 19 nt, Homo sapiens
  misc_RNA (1)...(19): siRNA sense strand
cuagaaaucuguugcuaug

SEQ ID NO: 338127 - RNA, 19 nt, Homo sapiens
  misc_RNA (1)...(19): siRNA sense strand
gcucagggcuauccucuca

SEQ ID NO: 338128 - RNA, 19 nt, Homo sapiens
  misc_RNA (1)...(19): siRNA sense strand
aaacaagcgucucugaaga

SEQ ID NO: 338129 - RNA, 19 nt, Homo sapiens
  misc_RNA (1)...(19): siRNA sense strand
caacauaaccugauaaagc

SEQ ID NO: 338130 - RNA, 19 nt, Homo sapiens
  misc_RNA (1)...(19): siRNA sense strand
gaaacaagcgucucugaag

SEQ ID NO: 338131 - RNA, 19 nt, Homo sapiens
  misc_RNA (1)...(19): siRNA sense strand
gcagagggauaccaugcaa

SEQ ID NO: 338132 - RNA, 19 nt, Homo sapiens
  misc_RNA (1)...(19): siRNA sense strand
ugaacuagaagcuguguua

SEQ ID NO: 338133 - RNA, 19 nt, Homo sapiens
  misc_RNA (1)...(19): siRNA sense strand
gagaaucccaggacagaaa

SEQ ID NO: 338134 - RNA, 19 nt, Homo sapiens
  misc_RNA (1)...(19): siRNA sense strand
gcccacagaucaacuggaa

SEQ ID NO: 338135 - RNA, 19 nt, Homo sapiens
  misc_RNA (1)...(19): siRNA sense strand
gaagacugcucagggcuau

SEQ ID NO: 338136 - RNA, 19 nt, Homo sapiens
  misc_RNA (1)...(19): siRNA sense strand
gacccagucuauuaaagaa

SEQ ID NO: 338137 - RNA, 19 nt, Homo sapiens
  misc_RNA (1)...(19): siRNA sense strand
acuagaagcuguguuagaa

SEQ ID NO: 338138 - RNA, 19 nt, Homo sapiens
  misc_RNA (1)...(19): siRNA sense strand
caugcaacauaaccugaua

SEQ ID NO: 338139 - RNA, 19 nt, Homo sapiens
  misc_RNA (1)...(19): siRNA sense strand
gcuggacaccuaccugaua

SEQ ID NO: 338140 - RNA, 19 nt, Homo sapiens
  misc_RNA (1)...(19): siRNA sense strand
cagaucaacuggaauggau

SEQ ID NO: 338141 - RNA, 19 nt, Homo sapiens
  misc_RNA (1)...(19): siRNA sense strand
gcaggaaauggcugaacua

SEQ ID NO: 338142 - RNA, 19 nt, Homo sapiens
  misc_RNA (1)...(19): siRNA sense strand
ccacagaucaacuggaaug

SEQ ID NO: 338143 - RNA, 19 nt, Homo sapiens
  misc_RNA (1)...(19): siRNA sense strand
caacaugcccacagaucaa

SEQ ID NO: 338144 - RNA, 19 nt, Homo sapiens
  misc_RNA (1)...(19): siRNA sense strand
ucaccaacaugcccacaga

SEQ ID NO: 338145 - RNA, 19 nt, Homo sapiens
  misc_RNA (1)...(19): siRNA sense strand
cagaggagauguggucaau

SEQ ID NO: 338146 - RNA, 19 nt, Homo sapiens
  misc_RNA (1)...(19): siRNA sense strand
caauugggcagauguguga

SEQ ID NO: 338147 - RNA, 19 nt, Homo sapiens
  misc_RNA (1)...(19): siRNA sense strand
ggagauguggucaauggaa

SEQ ID NO: 338148 - RNA, 19 nt, Homo sapiens
  misc_RNA (1)...(19): siRNA sense strand
guacagcuguguggugcuu

SEQ ID NO: 338149 - RNA, 19 nt, Homo sapiens
  misc_RNA (1)...(19): siRNA sense strand
ccaaagcgagcaagagaau

SEQ ID NO: 338150 - RNA, 19 nt, Homo sapiens
  misc_RNA (1)...(19): siRNA sense strand
gcuaugggcccuucaccaa

SEQ ID NO: 338151 - RNA, 19 nt, Homo sapiens
  misc_RNA (1)...(19): siRNA sense strand
gaaugagcaugauuuugaa

SEQ ID NO: 338152 - RNA, 19 nt, Homo sapiens
  misc_RNA (1)...(19): siRNA sense strand
ucagggcuauccucucaga

SEQ ID NO: 338153 - RNA, 19 nt, Homo sapiens
  misc_RNA (1)...(19): siRNA sense strand
agggauaccaugcaacaua

SEQ ID NO: 338154 - RNA, 19 nt, Homo sapiens
  misc_RNA (1)...(19): siRNA sense strand
gcuagaaaucuguugcuau

SEQ ID NO: 338155 - RNA, 19 nt, Homo sapiens
  misc_RNA (1)...(19): siRNA sense strand
ugaaugagcaugauuuuga

SEQ ID NO: 338156 - RNA, 19 nt, Homo sapiens
  misc_RNA (1)...(19): siRNA sense strand
ggcuagaaaucuguugcua

SEQ ID NO: 338157 - RNA, 19 nt, Homo sapiens
  misc_RNA (1)...(19): siRNA sense strand
ugaaacaagcgucucugaa

SEQ ID NO: 338158 - RNA, 19 nt, Homo sapiens
  misc_RNA (1)...(19): siRNA sense strand
aacauaaccugauaaagcu

SEQ ID NO: 338159 - RNA, 19 nt, Homo sapiens
  misc_RNA (1)...(19): siRNA sense strand
ugacccagucuauuaaaga

SEQ ID NO: 338160 - RNA, 19 nt, Homo sapiens
  misc_RNA (1)...(19): siRNA sense strand
gaacuagaagcuguguuag

SEQ ID NO: 338161 - RNA, 19 nt, Homo sapiens
  misc_RNA (1)...(19): siRNA sense strand
gugaaacaagcgucucuga

SEQ ID NO: 338162 - RNA, 19 nt, Homo sapiens
  misc_RNA (1)...(19): siRNA sense strand
ccaacaugcccacagauca

SEQ ID NO: 338163 - RNA, 19 nt, Homo sapiens
  misc_RNA (1)...(19): siRNA sense strand
uaugggcccuucaccaaca

SEQ ID NO: 338164 - RNA, 19 nt, Homo sapiens
  misc_RNA (1)...(19): siRNA sense strand
guccaaagcgagcaagaga

SEQ ID NO: 338165 - RNA, 19 nt, Homo sapiens
  misc_RNA (1)...(19): siRNA sense strand
cagaacaaagcacaucaga

SEQ ID NO: 338166 - RNA, 19 nt, Homo sapiens
  misc_RNA (1)...(19): siRNA sense strand
ccugcgaaauccagaacaa

SEQ ID NO: 338167 - RNA, 19 nt, Homo sapiens
  misc_RNA (1)...(19): siRNA sense strand
gaaaccaccaagguccaaa

SEQ ID NO: 338168 - RNA, 19 nt, Homo sapiens
  misc_RNA (1)...(19): siRNA sense strand
gauaaagcuccagcaggaa

SEQ ID NO: 338169 - RNA, 19 nt, Homo sapiens
  misc_RNA (1)...(19): siRNA sense strand
aaggagcuuucaucauuca

SEQ ID NO: 338170 - RNA, 19 nt, Homo sapiens
  misc_RNA (1)...(19): siRNA sense strand
ggugugagagugaaacaag

SEQ ID NO: 338171 - RNA, 19 nt, Homo sapiens
  misc_RNA (1)...(19): siRNA sense strand
gaaauggcugaacuagaag

SEQ ID NO: 338172 - RNA, 19 nt, Homo sapiens
  misc_RNA (1)...(19): siRNA sense strand
auaaagcuccagcaggaaa

SEQ ID NO: 338173 - RNA, 19 nt, Homo sapiens
  misc_RNA (1)...(19): siRNA sense strand
acccuuccaucauaaguga

SEQ ID NO: 338174 - RNA, 19 nt, Homo sapiens
  misc_RNA (1)...(19): siRNA sense strand
ggugacccagucuauuaaa

SEQ ID NO: 338175 - RNA, 19 nt, Homo sapiens
  misc_RNA (1)...(19): siRNA sense strand
cccagucuauuaaagaaag

SEQ ID NO: 338176 - RNA, 19 nt, Homo sapiens
  misc_RNA (1)...(19): siRNA sense strand
caucugggugugagaguga

SEQ ID NO: 338177 - RNA, 19 nt, Homo sapiens
  misc_RNA (1)...(19): siRNA sense strand
ccagucuauuaaagaaaga

SEQ ID NO: 338178 - RNA, 19 nt, Homo sapiens
  misc_RNA (1)...(19): siRNA sense strand
cgaaauccagaacaaagca

SEQ ID NO: 338179 - RNA, 19 nt, Homo sapiens
  misc_RNA (1)...(19): siRNA sense strand
aagagaaucccaggacaga

SEQ ID NO: 338180 - RNA, 19 nt, Homo sapiens
  misc_RNA (1)...(19): siRNA sense strand
gauguggucaauggaagaa

SEQ ID NO: 338181 - RNA, 19 nt, Homo sapiens
  misc_RNA (1)...(19): siRNA sense strand
ggaccugcgaaauccagaa

SEQ ID NO: 338182 - RNA, 19 nt, Homo sapiens
  misc_RNA (1)...(19): siRNA sense strand
gagcaugauuuugaaguca

SEQ ID NO: 338183 - RNA, 19 nt, Homo sapiens
  misc_RNA (1)...(19): siRNA sense strand
gugacccagucuauuaaag

SEQ ID NO: 338184 - RNA, 19 nt, Homo sapiens
  misc_RNA (1)...(19): siRNA sense strand
agaacaaagcacaucagaa

SEQ ID NO: 338185 - RNA, 19 nt, Homo sapiens
  misc_RNA (1)...(19): siRNA sense strand
uggaagaaaccaccaaggu

SEQ ID NO: 338186 - RNA, 19 nt, Homo sapiens
  misc_RNA (1)...(19): siRNA sense strand
ucaacuggaauggauggua

SEQ ID NO: 338187 - RNA, 19 nt, Homo sapiens
  misc_RNA (1)...(19): siRNA sense strand
ggaaauggcugaacuagaa

SEQ ID NO: 338188 - RNA, 19 nt, Homo sapiens
  misc_RNA (1)...(19): siRNA sense strand
gaacaaagcacaucagaaa

SEQ ID NO: 338189 - RNA, 19 nt, Homo sapiens
  misc_RNA (1)...(19): siRNA sense strand
cagcuacccuuccaucaua

SEQ ID NO: 338190 - RNA, 19 nt, Homo sapiens
  misc_RNA (1)...(19): siRNA sense strand
gggauaccaugcaacauaa

SEQ ID NO: 338191 - RNA, 19 nt, Homo sapiens
  misc_RNA (1)...(19): siRNA sense strand
gaggagauguggucaaugg

SEQ ID NO: 338192 - RNA, 19 nt, Homo sapiens
  misc_RNA (1)...(19): siRNA sense strand
gaaggagcuuucaucauuc

SEQ ID NO: 338193 - RNA, 19 nt, Homo sapiens
  misc_RNA (1)...(19): siRNA sense strand
cuagaaaucuguugcuaug

SEQ ID NO: 338194 - RNA, 19 nt, Homo sapiens
  misc_RNA (1)...(19): siRNA sense strand
gcucagggcuauccucuca

SEQ ID NO: 338195 - RNA, 19 nt, Homo sapiens
  misc_RNA (1)...(19): siRNA sense strand
aaacaagcgucucugaaga

SEQ ID NO: 338196 - RNA, 19 nt, Homo sapiens
  misc_RNA (1)...(19): siRNA sense strand
caacauaaccugauaaagc

SEQ ID NO: 338197 - RNA, 19 nt, Homo sapiens
  misc_RNA (1)...(19): siRNA sense strand
gaaacaagcgucucugaag

SEQ ID NO: 338198 - RNA, 19 nt, Homo sapiens
  misc_RNA (1)...(19): siRNA sense strand
gcagagggauaccaugcaa

SEQ ID NO: 338199 - RNA, 19 nt, Homo sapiens
  misc_RNA (1)...(19): siRNA sense strand
ugaacuagaagcuguguua

SEQ ID NO: 338200 - RNA, 19 nt, Homo sapiens
  misc_RNA (1)...(19): siRNA sense strand
gagaaucccaggacagaaa

SEQ ID NO: 338201 - RNA, 19 nt, Homo sapiens
  misc_RNA (1)...(19): siRNA sense strand
gcccacagaucaacuggaa

SEQ ID NO: 338202 - RNA, 19 nt, Homo sapiens
  misc_RNA (1)...(19): siRNA sense strand
gaagacugcucagggcuau

SEQ ID NO: 338203 - RNA, 19 nt, Homo sapiens
  misc_RNA (1)...(19): siRNA sense strand
gacccagucuauuaaagaa

SEQ ID NO: 338204 - RNA, 19 nt, Homo sapiens
  misc_RNA (1)...(19): siRNA sense strand
acuagaagcuguguuagaa

SEQ ID NO: 338205 - RNA, 19 nt, Homo sapiens
  misc_RNA (1)...(19): siRNA sense strand
caugcaacauaaccugaua

SEQ ID NO: 338206 - RNA, 19 nt, Homo sapiens
  misc_RNA (1)...(19): siRNA sense strand
gcuggacaccuaccugaua

SEQ ID NO: 338207 - RNA, 19 nt, Homo sapiens
  misc_RNA (1)...(19): siRNA sense strand
cagaucaacuggaauggau

SEQ ID NO: 338208 - RNA, 19 nt, Homo sapiens
  misc_RNA (1)...(19): siRNA sense strand
gcaggaaauggcugaacua

SEQ ID NO: 338209 - RNA, 19 nt, Homo sapiens
  misc_RNA (1)...(19): siRNA sense strand
ccacagaucaacuggaaug

SEQ ID NO: 338210 - RNA, 19 nt, Homo sapiens
  misc_RNA (1)...(19): siRNA sense strand
caacaugcccacagaucaa

SEQ ID NO: 338211 - RNA, 19 nt, Homo sapiens
  misc_RNA (1)...(19): siRNA sense strand
ucaccaacaugcccacaga

SEQ ID NO: 338212 - RNA, 19 nt, Homo sapiens
  misc_RNA (1)...(19): siRNA sense strand
cagaggagauguggucaau

SEQ ID NO: 338213 - RNA, 19 nt, Homo sapiens
  misc_RNA (1)...(19): siRNA sense strand
caauugggcagauguguga

SEQ ID NO: 338214 - RNA, 19 nt, Homo sapiens
  misc_RNA (1)...(19): siRNA sense strand
ggagauguggucaauggaa

SEQ ID NO: 338215 - RNA, 19 nt, Homo sapiens
  misc_RNA (1)...(19): siRNA sense strand
guacagcuguguggugcuu

SEQ ID NO: 338216 - RNA, 19 nt, Homo sapiens
  misc_RNA (1)...(19): siRNA sense strand
ccaaagcgagcaagagaau

SEQ ID NO: 338217 - RNA, 19 nt, Homo sapiens
  misc_RNA (1)...(19): siRNA sense strand
gcuaugggcccuucaccaa

SEQ ID NO: 338218 - RNA, 19 nt, Homo sapiens
  misc_RNA (1)...(19): siRNA sense strand
gaaugagcaugauuuugaa

SEQ ID NO: 338219 - RNA, 19 nt, Homo sapiens
  misc_RNA (1)...(19): siRNA sense strand
ucagggcuauccucucaga

SEQ ID NO: 338220 - RNA, 19 nt, Homo sapiens
  misc_RNA (1)...(19): siRNA sense strand
agggauaccaugcaacaua

SEQ ID NO: 338221 - RNA, 19 nt, Homo sapiens
  misc_RNA (1)...(19): siRNA sense strand
gcuagaaaucuguugcuau

SEQ ID NO: 338222 - RNA, 19 nt, Homo sapiens
  misc_RNA (1)...(19): siRNA sense strand
ugaaugagcaugauuuuga

SEQ ID NO: 338223 - RNA, 19 nt, Homo sapiens
  misc_RNA (1)...(19): siRNA sense strand
ggcuagaaaucuguugcua

SEQ ID NO: 338224 - RNA, 19 nt, Homo sapiens
  misc_RNA (1)...(19): siRNA sense strand
ugaaacaagcgucucugaa

SEQ ID NO: 338225 - RNA, 19 nt, Homo sapiens
  misc_RNA (1)...(19): siRNA sense strand
aacauaaccugauaaagcu

SEQ ID NO: 338226 - RNA, 19 nt, Homo sapiens
  misc_RNA (1)...(19): siRNA sense strand
ugacccagucuauuaaaga

SEQ ID NO: 338227 - RNA, 19 nt, Homo sapiens
  misc_RNA (1)...(19): siRNA sense strand
gaacuagaagcuguguuag

SEQ ID NO: 338228 - RNA, 19 nt, Homo sapiens
  misc_RNA (1)...(19): siRNA sense strand
gugaaacaagcgucucuga

SEQ ID NO: 338229 - RNA, 19 nt, Homo sapiens
  misc_RNA (1)...(19): siRNA sense strand
ccaacaugcccacagauca

SEQ ID NO: 338230 - RNA, 19 nt, Homo sapiens
  misc_RNA (1)...(19): siRNA sense strand
uaugggcccuucaccaaca

SEQ ID NO: 338231 - RNA, 19 nt, Homo sapiens
  misc_RNA (1)...(19): siRNA sense strand
guccaaagcgagcaagaga

SEQ ID NO: 338232 - RNA, 19 nt, Homo sapiens
  misc_RNA (1)...(19): siRNA sense strand
cagaacaaagcacaucaga

SEQ ID NO: 338233 - RNA, 19 nt, Homo sapiens
  misc_RNA (1)...(19): siRNA sense strand
ccugcgaaauccagaacaa

SEQ ID NO: 338234 - RNA, 19 nt, Homo sapiens
  misc_RNA (1)...(19): siRNA sense strand
gaaaccaccaagguccaaa

SEQ ID NO: 338235 - RNA, 19 nt, Homo sapiens
  misc_RNA (1)...(19): siRNA sense strand
gauaaagcuccagcaggaa

SEQ ID NO: 338236 - RNA, 19 nt, Homo sapiens
  misc_RNA (1)...(19): siRNA sense strand
aaggagcuuucaucauuca

SEQ ID NO: 338237 - RNA, 19 nt, Homo sapiens
  misc_RNA (1)...(19): siRNA sense strand
ggugugagagugaaacaag

SEQ ID NO: 338238 - RNA, 19 nt, Homo sapiens
  misc_RNA (1)...(19): siRNA sense strand
gaaauggcugaacuagaag

SEQ ID NO: 338239 - RNA, 19 nt, Homo sapiens
  misc_RNA (1)...(19): siRNA sense strand
auaaagcuccagcaggaaa

SEQ ID NO: 338240 - RNA, 19 nt, Homo sapiens
  misc_RNA (1)...(19): siRNA sense strand
acccuuccaucauaaguga

SEQ ID NO: 338241 - RNA, 19 nt, Homo sapiens
  misc_RNA (1)...(19): siRNA sense strand
ggugacccagucuauuaaa

SEQ ID NO: 338242 - RNA, 19 nt, Homo sapiens
  misc_RNA (1)...(19): siRNA sense strand
cccagucuauuaaagaaag

SEQ ID NO: 338243 - RNA, 19 nt, Homo sapiens
  misc_RNA (1)...(19): siRNA sense strand
caucugggugugagaguga

SEQ ID NO: 338244 - RNA, 19 nt, Homo sapiens
  misc_RNA (1)...(19): siRNA sense strand
ccagucuauuaaagaaaga

SEQ ID NO: 338245 - RNA, 19 nt, Homo sapiens
  misc_RNA (1)...(19): siRNA sense strand
cgaaauccagaacaaagca

SEQ ID NO: 338246 - RNA, 19 nt, Homo sapiens
  misc_RNA (1)...(19): siRNA sense strand
aagagaaucccaggacaga

SEQ ID NO: 338247 - RNA, 19 nt, Homo sapiens
  misc_RNA (1)...(19): siRNA sense strand
gauguggucaauggaagaa

SEQ ID NO: 338248 - RNA, 19 nt, Homo sapiens
  misc_RNA (1)...(19): siRNA sense strand
ggaccugcgaaauccagaa

SEQ ID NO: 338249 - RNA, 19 nt, Homo sapiens
  misc_RNA (1)...(19): siRNA sense strand
gagcaugauuuugaaguca

SEQ ID NO: 338250 - RNA, 19 nt, Homo sapiens
  misc_RNA (1)...(19): siRNA sense strand
gugacccagucuauuaaag

SEQ ID NO: 338251 - RNA, 19 nt, Homo sapiens
  misc_RNA (1)...(19): siRNA sense strand
agaacaaagcacaucagaa

SEQ ID NO: 338252 - RNA, 19 nt, Homo sapiens
  misc_RNA (1)...(19): siRNA sense strand
uggaagaaaccaccaaggu

SEQ ID NO: 338253 - RNA, 19 nt, Homo sapiens
  misc_RNA (1)...(19): siRNA sense strand
ucaacuggaauggauggua

SEQ ID NO: 338254 - RNA, 19 nt, Homo sapiens
  misc_RNA (1)...(19): siRNA sense strand
ggaaauggcugaacuagaa

SEQ ID NO: 338255 - RNA, 19 nt, Homo sapiens
  misc_RNA (1)...(19): siRNA sense strand
gaacaaagcacaucagaaa

SEQ ID NO: 338256 - RNA, 19 nt, Homo sapiens
  misc_RNA (1)...(19): siRNA sense strand
cagcuacccuuccaucaua

SEQ ID NO: 338257 - RNA, 19 nt, Homo sapiens
  misc_RNA (1)...(19): siRNA sense strand
gggauaccaugcaacauaa

SEQ ID NO: 338258 - RNA, 19 nt, Homo sapiens
  misc_RNA (1)...(19): siRNA sense strand
gaggagauguggucaaugg

SEQ ID NO: 338259 - RNA, 19 nt, Homo sapiens
  misc_RNA (1)...(19): siRNA sense strand
gaaggagcuuucaucauuc

SEQ ID NO: 338260 - RNA, 19 nt, Homo sapiens
  misc_RNA (1)...(19): siRNA sense strand
cuagaaaucuguugcuaug

SEQ ID NO: 338261 - RNA, 19 nt, Homo sapiens
  misc_RNA (1)...(19): siRNA sense strand
gcucagggcuauccucuca

SEQ ID NO: 338262 - RNA, 19 nt, Homo sapiens
  misc_RNA (1)...(19): siRNA sense strand
aaacaagcgucucugaaga

SEQ ID NO: 338263 - RNA, 19 nt, Homo sapiens
  misc_RNA (1)...(19): siRNA sense strand
caacauaaccugauaaagc

SEQ ID NO: 338264 - RNA, 19 nt, Homo sapiens
  misc_RNA (1)...(19): siRNA sense strand
gaaacaagcgucucugaag

SEQ ID NO: 338265 - RNA, 19 nt, Homo sapiens
  misc_RNA (1)...(19): siRNA sense strand
gcagagggauaccaugcaa

SEQ ID NO: 338266 - RNA, 19 nt, Homo sapiens
  misc_RNA (1)...(19): siRNA sense strand
ugaacuagaagcuguguua

SEQ ID NO: 338267 - RNA, 19 nt, Homo sapiens
  misc_RNA (1)...(19): siRNA sense strand
gagaaucccaggacagaaa

SEQ ID NO: 338268 - RNA, 19 nt, Homo sapiens
  misc_RNA (1)...(19): siRNA sense strand
gcccacagaucaacuggaa

SEQ ID NO: 338269 - RNA, 19 nt, Homo sapiens
  misc_RNA (1)...(19): siRNA sense strand
gaagacugcucagggcuau

SEQ ID NO: 338270 - RNA, 19 nt, Homo sapiens
  misc_RNA (1)...(19): siRNA sense strand
gacccagucuauuaaagaa

SEQ ID NO: 338271 - RNA, 19 nt, Homo sapiens
  misc_RNA (1)...(19): siRNA sense strand
acuagaagcuguguuagaa

SEQ ID NO: 338272 - RNA, 19 nt, Homo sapiens
  misc_RNA (1)...(19): siRNA sense strand
caugcaacauaaccugaua

SEQ ID NO: 338273 - RNA, 19 nt, Homo sapiens
  misc_RNA (1)...(19): siRNA sense strand
gcuggacaccuaccugaua

SEQ ID NO: 338274 - RNA, 19 nt, Homo sapiens
  misc_RNA (1)...(19): siRNA sense strand
cagaucaacuggaauggau

SEQ ID NO: 338275 - RNA, 19 nt, Homo sapiens
  misc_RNA (1)...(19): siRNA sense strand
gcaggaaauggcugaacua

SEQ ID NO: 338276 - RNA, 19 nt, Homo sapiens
  misc_RNA (1)...(19): siRNA sense strand
ccacagaucaacuggaaug

SEQ ID NO: 338277 - RNA, 19 nt, Homo sapiens
  misc_RNA (1)...(19): siRNA sense strand
caacaugcccacagaucaa

SEQ ID NO: 338278 - RNA, 19 nt, Homo sapiens
  misc_RNA (1)...(19): siRNA sense strand
ucaccaacaugcccacaga

SEQ ID NO: 338279 - RNA, 19 nt, Homo sapiens
  misc_RNA (1)...(19): siRNA sense strand
cagaggagauguggucaau

SEQ ID NO: 338280 - RNA, 19 nt, Homo sapiens
  misc_RNA (1)...(19): siRNA sense strand
caauugggcagauguguga

SEQ ID NO: 338281 - RNA, 19 nt, Homo sapiens
  misc_RNA (1)...(19): siRNA sense strand
ggagauguggucaauggaa

SEQ ID NO: 338282 - RNA, 19 nt, Homo sapiens
  misc_RNA (1)...(19): siRNA sense strand
guacagcuguguggugcuu

SEQ ID NO: 338283 - RNA, 19 nt, Homo sapiens
  misc_RNA (1)...(19): siRNA sense strand
ccaaagcgagcaagagaau

SEQ ID NO: 338284 - RNA, 19 nt, Homo sapiens
  misc_RNA (1)...(19): siRNA sense strand
gcuaugggcccuucaccaa

SEQ ID NO: 338285 - RNA, 19 nt, Homo sapiens
  misc_RNA (1)...(19): siRNA sense strand
gaaugagcaugauuuugaa

SEQ ID NO: 338286 - RNA, 19 nt, Homo sapiens
  misc_RNA (1)...(19): siRNA sense strand
ucagggcuauccucucaga

SEQ ID NO: 338287 - RNA, 19 nt, Homo sapiens
  misc_RNA (1)...(19): siRNA sense strand
agggauaccaugcaacaua

SEQ ID NO: 338288 - RNA, 19 nt, Homo sapiens
  misc_RNA (1)...(19): siRNA sense strand
gcuagaaaucuguugcuau

SEQ ID NO: 338289 - RNA, 19 nt, Homo sapiens
  misc_RNA (1)...(19): siRNA sense strand
ugaaugagcaugauuuuga

SEQ ID NO: 338290 - RNA, 19 nt, Homo sapiens
  misc_RNA (1)...(19): siRNA sense strand
ggcuagaaaucuguugcua

SEQ ID NO: 338291 - RNA, 19 nt, Homo sapiens
  misc_RNA (1)...(19): siRNA sense strand
ugaaacaagcgucucugaa

SEQ ID NO: 338292 - RNA, 19 nt, Homo sapiens
  misc_RNA (1)...(19): siRNA sense strand
aacauaaccugauaaagcu

SEQ ID NO: 338293 - RNA, 19 nt, Homo sapiens
  misc_RNA (1)...(19): siRNA sense strand
ugacccagucuauuaaaga

SEQ ID NO: 338294 - RNA, 19 nt, Homo sapiens
  misc_RNA (1)...(19): siRNA sense strand
gaacuagaagcuguguuag

SEQ ID NO: 338295 - RNA, 19 nt, Homo sapiens
  misc_RNA (1)...(19): siRNA sense strand
gugaaacaagcgucucuga

SEQ ID NO: 338296 - RNA, 19 nt, Homo sapiens
  misc_RNA (1)...(19): siRNA sense strand
ccaacaugcccacagauca

SEQ ID NO: 338297 - RNA, 19 nt, Homo sapiens
  misc_RNA (1)...(19): siRNA sense strand
uaugggcccuucaccaaca

SEQ ID NO: 338298 - RNA, 19 nt, Homo sapiens
  misc_RNA (1)...(19): siRNA sense strand
guccaaagcgagcaagaga

SEQ ID NO: 338299 - RNA, 19 nt, Homo sapiens
  misc_RNA (1)...(19): siRNA sense strand
cagaacaaagcacaucaga

SEQ ID NO: 338300 - RNA, 19 nt, Homo sapiens
  misc_RNA (1)...(19): siRNA sense strand
ccugcgaaauccagaacaa

SEQ ID NO: 338301 - RNA, 19 nt, Homo sapiens
  misc_RNA (1)...(19): siRNA sense strand
gaaaccaccaagguccaaa

SEQ ID NO: 338302 - RNA, 19 nt, Homo sapiens
  misc_RNA (1)...(19): siRNA sense strand
gauaaagcuccagcaggaa

SEQ ID NO: 338303 - RNA, 19 nt, Homo sapiens
  misc_RNA (1)...(19): siRNA sense strand
aaggagcuuucaucauuca

SEQ ID NO: 338304 - RNA, 19 nt, Homo sapiens
  misc_RNA (1)...(19): siRNA sense strand
ggugugagagugaaacaag

SEQ ID NO: 338305 - RNA, 19 nt, Homo sapiens
  misc_RNA (1)...(19): siRNA sense strand
gaaauggcugaacuagaag

SEQ ID NO: 338306 - RNA, 19 nt, Homo sapiens
  misc_RNA (1)...(19): siRNA sense strand
auaaagcuccagcaggaaa

SEQ ID NO: 338307 - RNA, 19 nt, Homo sapiens
  misc_RNA (1)...(19): siRNA sense strand
acccuuccaucauaaguga

SEQ ID NO: 338308 - RNA, 19 nt, Homo sapiens
  misc_RNA (1)...(19): siRNA sense strand
ggugacccagucuauuaaa

SEQ ID NO: 338309 - RNA, 19 nt, Homo sapiens
  misc_RNA (1)...(19): siRNA sense strand
cccagucuauuaaagaaag

SEQ ID NO: 338310 - RNA, 19 nt, Homo sapiens
  misc_RNA (1)...(19): siRNA sense strand
caucugggugugagaguga

SEQ ID NO: 338311 - RNA, 19 nt, Homo sapiens
  misc_RNA (1)...(19): siRNA sense strand
ccagucuauuaaagaaaga

SEQ ID NO: 338312 - RNA, 19 nt, Homo sapiens
  misc_RNA (1)...(19): siRNA sense strand
cgaaauccagaacaaagca

SEQ ID NO: 338313 - RNA, 19 nt, Homo sapiens
  misc_RNA (1)...(19): siRNA sense strand
aagagaaucccaggacaga

SEQ ID NO: 338314 - RNA, 19 nt, Homo sapiens
  misc_RNA (1)...(19): siRNA sense strand
gauguggucaauggaagaa

SEQ ID NO: 338315 - RNA, 19 nt, Homo sapiens
  misc_RNA (1)...(19): siRNA sense strand
ggaccugcgaaauccagaa

SEQ ID NO: 338316 - RNA, 19 nt, Homo sapiens
  misc_RNA (1)...(19): siRNA sense strand
gagcaugauuuugaaguca

SEQ ID NO: 338317 - RNA, 19 nt, Homo sapiens
  misc_RNA (1)...(19): siRNA sense strand
gugacccagucuauuaaag

SEQ ID NO: 338318 - RNA, 19 nt, Homo sapiens
  misc_RNA (1)...(19): siRNA sense strand
agaacaaagcacaucagaa

SEQ ID NO: 338319 - RNA, 19 nt, Homo sapiens
  misc_RNA (1)...(19): siRNA sense strand
uggaagaaaccaccaaggu

SEQ ID NO: 338320 - RNA, 19 nt, Homo sapiens
  misc_RNA (1)...(19): siRNA sense strand
ucaacuggaauggauggua

SEQ ID NO: 338321 - RNA, 19 nt, Homo sapiens
  misc_RNA (1)...(19): siRNA sense strand
ggaaauggcugaacuagaa

SEQ ID NO: 338322 - RNA, 19 nt, Homo sapiens
  misc_RNA (1)...(19): siRNA sense strand
gaacaaagcacaucagaaa

SEQ ID NO: 338323 - RNA, 19 nt, Homo sapiens
  misc_RNA (1)...(19): siRNA sense strand
cagcuacccuuccaucaua

SEQ ID NO: 338324 - RNA, 19 nt, Homo sapiens
  misc_RNA (1)...(19): siRNA sense strand
gggauaccaugcaacauaa

SEQ ID NO: 338325 - RNA, 19 nt, Homo sapiens
  misc_RNA (1)...(19): siRNA sense strand
gcucagggcuauccucuca

SEQ ID NO: 338326 - RNA, 19 nt, Homo sapiens
  misc_RNA (1)...(19): siRNA sense strand
aaacaagcgucucugaaga

SEQ ID NO: 338327 - RNA, 19 nt, Homo sapiens
  misc_RNA (1)...(19): siRNA sense strand
caacauaaccugauaaagc

SEQ ID NO: 338328 - RNA, 19 nt, Homo sapiens
  misc_RNA (1)...(19): siRNA sense strand
gaaacaagcgucucugaag

SEQ ID NO: 338329 - RNA, 19 nt, Homo sapiens
  misc_RNA (1)...(19): siRNA sense strand
gcagagggauaccaugcaa

SEQ ID NO: 338330 - RNA, 19 nt, Homo sapiens
  misc_RNA (1)...(19): siRNA sense strand
ugaacuagaagcuguguua

SEQ ID NO: 338331 - RNA, 19 nt, Homo sapiens
  misc_RNA (1)...(19): siRNA sense strand
gaagacugcucagggcuau

SEQ ID NO: 338332 - RNA, 19 nt, Homo sapiens
  misc_RNA (1)...(19): siRNA sense strand
acuagaagcuguguuagaa

SEQ ID NO: 338333 - RNA, 19 nt, Homo sapiens
  misc_RNA (1)...(19): siRNA sense strand
caugcaacauaaccugaua

SEQ ID NO: 338334 - RNA, 19 nt, Homo sapiens
  misc_RNA (1)...(19): siRNA sense strand
gcaggaaauggcugaacua

SEQ ID NO: 338335 - RNA, 19 nt, Homo sapiens
  misc_RNA (1)...(19): siRNA sense strand
ucagggcuauccucucaga

SEQ ID NO: 338336 - RNA, 19 nt, Homo sapiens
  misc_RNA (1)...(19): siRNA sense strand
agggauaccaugcaacaua

SEQ ID NO: 338337 - RNA, 19 nt, Homo sapiens
  misc_RNA (1)...(19): siRNA sense strand
ugaaacaagcgucucugaa

SEQ ID NO: 338338 - RNA, 19 nt, Homo sapiens
  misc_RNA (1)...(19): siRNA sense strand
aacauaaccugauaaagcu

SEQ ID NO: 338339 - RNA, 19 nt, Homo sapiens
  misc_RNA (1)...(19): siRNA sense strand
gaacuagaagcuguguuag

SEQ ID NO: 338340 - RNA, 19 nt, Homo sapiens
  misc_RNA (1)...(19): siRNA sense strand
cagaacaaagcacaucaga

SEQ ID NO: 338341 - RNA, 19 nt, Homo sapiens
  misc_RNA (1)...(19): siRNA sense strand
gugaaacaagcgucucuga

SEQ ID NO: 338342 - RNA, 19 nt, Homo sapiens
  misc_RNA (1)...(19): siRNA sense strand
ccugcgaaauccagaacaa

SEQ ID NO: 338343 - RNA, 19 nt, Homo sapiens
  misc_RNA (1)...(19): siRNA sense strand
gauaaagcuccagcaggaa

SEQ ID NO: 338344 - RNA, 19 nt, Homo sapiens
  misc_RNA (1)...(19): siRNA sense strand
ggugugagagugaaacaag

SEQ ID NO: 338345 - RNA, 19 nt, Homo sapiens
  misc_RNA (1)...(19): siRNA sense strand
auaaagcuccagcaggaaa

SEQ ID NO: 338346 - RNA, 19 nt, Homo sapiens
  misc_RNA (1)...(19): siRNA sense strand
acccuuccaucauaaguga

SEQ ID NO: 338347 - RNA, 19 nt, Homo sapiens
  misc_RNA (1)...(19): siRNA sense strand
gaaauggcugaacuagaag

SEQ ID NO: 338348 - RNA, 19 nt, Homo sapiens
  misc_RNA (1)...(19): siRNA sense strand
caucugggugugagaguga

SEQ ID NO: 338349 - RNA, 19 nt, Homo sapiens
  misc_RNA (1)...(19): siRNA sense strand
cgaaauccagaacaaagca

SEQ ID NO: 338350 - RNA, 19 nt, Homo sapiens
  misc_RNA (1)...(19): siRNA sense strand
ggaccugcgaaauccagaa

SEQ ID NO: 338351 - RNA, 19 nt, Homo sapiens
  misc_RNA (1)...(19): siRNA sense strand
agaacaaagcacaucagaa

SEQ ID NO: 338352 - RNA, 19 nt, Homo sapiens
  misc_RNA (1)...(19): siRNA sense strand
ggaaauggcugaacuagaa

SEQ ID NO: 338353 - RNA, 19 nt, Homo sapiens
  misc_RNA (1)...(19): siRNA sense strand
gaacaaagcacaucagaaa

SEQ ID NO: 338354 - RNA, 19 nt, Homo sapiens
  misc_RNA (1)...(19): siRNA sense strand
cagcuacccuuccaucaua

SEQ ID NO: 338355 - RNA, 19 nt, Homo sapiens
  misc_RNA (1)...(19): siRNA sense strand
gggauaccaugcaacauaa

SEQ ID NO: 338356 - RNA, 19 nt, Homo sapiens
  misc_RNA (1)...(19): siRNA sense strand
gaggagauguggucaaugg

SEQ ID NO: 338357 - RNA, 19 nt, Homo sapiens
  misc_RNA (1)...(19): siRNA sense strand
gaaggagcuuucaucauuc

SEQ ID NO: 338358 - RNA, 19 nt, Homo sapiens
  misc_RNA (1)...(19): siRNA sense strand
cuagaaaucuguugcuaug

SEQ ID NO: 338359 - RNA, 19 nt, Homo sapiens
  misc_RNA (1)...(19): siRNA sense strand
gcucagggcuauccucuca

SEQ ID NO: 338360 - RNA, 19 nt, Homo sapiens
  misc_RNA (1)...(19): siRNA sense strand
aaacaagcgucucugaaga

SEQ ID NO: 338361 - RNA, 19 nt, Homo sapiens
  misc_RNA (1)...(19): siRNA sense strand
caacauaaccugauaaagc

SEQ ID NO: 338362 - RNA, 19 nt, Homo sapiens
  misc_RNA (1)...(19): siRNA sense strand
gaaacaagcgucucugaag

SEQ ID NO: 338363 - RNA, 19 nt, Homo sapiens
  misc_RNA (1)...(19): siRNA sense strand
gcagagggauaccaugcaa

SEQ ID NO: 338364 - RNA, 19 nt, Homo sapiens
  misc_RNA (1)...(19): siRNA sense strand
ugaacuagaagcuguguua

SEQ ID NO: 338365 - RNA, 19 nt, Homo sapiens
  misc_RNA (1)...(19): siRNA sense strand
gagaaucccaggacagaaa

SEQ ID NO: 338366 - RNA, 19 nt, Homo sapiens
  misc_RNA (1)...(19): siRNA sense strand
gcccacagaucaacuggaa

SEQ ID NO: 338367 - RNA, 19 nt, Homo sapiens
  misc_RNA (1)...(19): siRNA sense strand
gaagacugcucagggcuau

SEQ ID NO: 338368 - RNA, 19 nt, Homo sapiens
  misc_RNA (1)...(19): siRNA sense strand
gacccagucuauuaaagaa

SEQ ID NO: 338369 - RNA, 19 nt, Homo sapiens
  misc_RNA (1)...(19): siRNA sense strand
acuagaagcuguguuagaa

SEQ ID NO: 338370 - RNA, 19 nt, Homo sapiens
  misc_RNA (1)...(19): siRNA sense strand
caugcaacauaaccugaua

SEQ ID NO: 338371 - RNA, 19 nt, Homo sapiens
  misc_RNA (1)...(19): siRNA sense strand
gcuggacaccuaccugaua

SEQ ID NO: 338372 - RNA, 19 nt, Homo sapiens
  misc_RNA (1)...(19): siRNA sense strand
cagaucaacuggaauggau

SEQ ID NO: 338373 - RNA, 19 nt, Homo sapiens
  misc_RNA (1)...(19): siRNA sense strand
gcaggaaauggcugaacua

SEQ ID NO: 338374 - RNA, 19 nt, Homo sapiens
  misc_RNA (1)...(19): siRNA sense strand
ccacagaucaacuggaaug

SEQ ID NO: 338375 - RNA, 19 nt, Homo sapiens
  misc_RNA (1)...(19): siRNA sense strand
caacaugcccacagaucaa

SEQ ID NO: 338376 - RNA, 19 nt, Homo sapiens
  misc_RNA (1)...(19): siRNA sense strand
ucaccaacaugcccacaga

SEQ ID NO: 338377 - RNA, 19 nt, Homo sapiens
  misc_RNA (1)...(19): siRNA sense strand
cagaggagauguggucaau

SEQ ID NO: 338378 - RNA, 19 nt, Homo sapiens
  misc_RNA (1)...(19): siRNA sense strand
caauugggcagauguguga

SEQ ID NO: 338379 - RNA, 19 nt, Homo sapiens
  misc_RNA (1)...(19): siRNA sense strand
ggagauguggucaauggaa

SEQ ID NO: 338380 - RNA, 19 nt, Homo sapiens
  misc_RNA (1)...(19): siRNA sense strand
guacagcuguguggugcuu

SEQ ID NO: 338381 - RNA, 19 nt, Homo sapiens
  misc_RNA (1)...(19): siRNA sense strand
ccaaagcgagcaagagaau

SEQ ID NO: 338382 - RNA, 19 nt, Homo sapiens
  misc_RNA (1)...(19): siRNA sense strand
gcuaugggcccuucaccaa

SEQ ID NO: 338383 - RNA, 19 nt, Homo sapiens
  misc_RNA (1)...(19): siRNA sense strand
gaaugagcaugauuuugaa

SEQ ID NO: 338384 - RNA, 19 nt, Homo sapiens
  misc_RNA (1)...(19): siRNA sense strand
ucagggcuauccucucaga

SEQ ID NO: 338385 - RNA, 19 nt, Homo sapiens
  misc_RNA (1)...(19): siRNA sense strand
agggauaccaugcaacaua

SEQ ID NO: 338386 - RNA, 19 nt, Homo sapiens
  misc_RNA (1)...(19): siRNA sense strand
gcuagaaaucuguugcuau

SEQ ID NO: 338387 - RNA, 19 nt, Homo sapiens
  misc_RNA (1)...(19): siRNA sense strand
ugaaugagcaugauuuuga

SEQ ID NO: 338388 - RNA, 19 nt, Homo sapiens
  misc_RNA (1)...(19): siRNA sense strand
ggcuagaaaucuguugcua

SEQ ID NO: 338389 - RNA, 19 nt, Homo sapiens
  misc_RNA (1)...(19): siRNA sense strand
ugaaacaagcgucucugaa

SEQ ID NO: 338390 - RNA, 19 nt, Homo sapiens
  misc_RNA (1)...(19): siRNA sense strand
aacauaaccugauaaagcu

SEQ ID NO: 338391 - RNA, 19 nt, Homo sapiens
  misc_RNA (1)...(19): siRNA sense strand
ugacccagucuauuaaaga

SEQ ID NO: 338392 - RNA, 19 nt, Homo sapiens
  misc_RNA (1)...(19): siRNA sense strand
gaacuagaagcuguguuag

SEQ ID NO: 338393 - RNA, 19 nt, Homo sapiens
  misc_RNA (1)...(19): siRNA sense strand
gugaaacaagcgucucuga

SEQ ID NO: 338394 - RNA, 19 nt, Homo sapiens
  misc_RNA (1)...(19): siRNA sense strand
ccaacaugcccacagauca

SEQ ID NO: 338395 - RNA, 19 nt, Homo sapiens
  misc_RNA (1)...(19): siRNA sense strand
uaugggcccuucaccaaca

SEQ ID NO: 338396 - RNA, 19 nt, Homo sapiens
  misc_RNA (1)...(19): siRNA sense strand
guccaaagcgagcaagaga

SEQ ID NO: 338397 - RNA, 19 nt, Homo sapiens
  misc_RNA (1)...(19): siRNA sense strand
cagaacaaagcacaucaga

SEQ ID NO: 338398 - RNA, 19 nt, Homo sapiens
  misc_RNA (1)...(19): siRNA sense strand
ccugcgaaauccagaacaa

SEQ ID NO: 338399 - RNA, 19 nt, Homo sapiens
  misc_RNA (1)...(19): siRNA sense strand
gaaaccaccaagguccaaa

SEQ ID NO: 338400 - RNA, 19 nt, Homo sapiens
  misc_RNA (1)...(19): siRNA sense strand
gauaaagcuccagcaggaa

SEQ ID NO: 338401 - RNA, 19 nt, Homo sapiens
  misc_RNA (1)...(19): siRNA sense strand
aaggagcuuucaucauuca

SEQ ID NO: 338402 - RNA, 19 nt, Homo sapiens
  misc_RNA (1)...(19): siRNA sense strand
ggugugagagugaaacaag

SEQ ID NO: 338403 - RNA, 19 nt, Homo sapiens
  misc_RNA (1)...(19): siRNA sense strand
gaaauggcugaacuagaag

SEQ ID NO: 338404 - RNA, 19 nt, Homo sapiens
  misc_RNA (1)...(19): siRNA sense strand
auaaagcuccagcaggaaa

SEQ ID NO: 338405 - RNA, 19 nt, Homo sapiens
  misc_RNA (1)...(19): siRNA sense strand
acccuuccaucauaaguga

SEQ ID NO: 338406 - RNA, 19 nt, Homo sapiens
  misc_RNA (1)...(19): siRNA sense strand
ggugacccagucuauuaaa

SEQ ID NO: 338407 - RNA, 19 nt, Homo sapiens
  misc_RNA (1)...(19): siRNA sense strand
cccagucuauuaaagaaag

SEQ ID NO: 338408 - RNA, 19 nt, Homo sapiens
  misc_RNA (1)...(19): siRNA sense strand
caucugggugugagaguga

SEQ ID NO: 338409 - RNA, 19 nt, Homo sapiens
  misc_RNA (1)...(19): siRNA sense strand
ccagucuauuaaagaaaga

SEQ ID NO: 338410 - RNA, 19 nt, Homo sapiens
  misc_RNA (1)...(19): siRNA sense strand
cgaaauccagaacaaagca

SEQ ID NO: 338411 - RNA, 19 nt, Homo sapiens
  misc_RNA (1)...(19): siRNA sense strand
aagagaaucccaggacaga

SEQ ID NO: 338412 - RNA, 19 nt, Homo sapiens
  misc_RNA (1)...(19): siRNA sense strand
gauguggucaauggaagaa

SEQ ID NO: 338413 - RNA, 19 nt, Homo sapiens
  misc_RNA (1)...(19): siRNA sense strand
ggaccugcgaaauccagaa

SEQ ID NO: 338414 - RNA, 19 nt, Homo sapiens
  misc_RNA (1)...(19): siRNA sense strand
gagcaugauuuugaaguca

SEQ ID NO: 338415 - RNA, 19 nt, Homo sapiens
  misc_RNA (1)...(19): siRNA sense strand
gugacccagucuauuaaag

SEQ ID NO: 338416 - RNA, 19 nt, Homo sapiens
  misc_RNA (1)...(19): siRNA sense strand
agaacaaagcacaucagaa

SEQ ID NO: 338417 - RNA, 19 nt, Homo sapiens
  misc_RNA (1)...(19): siRNA sense strand
uggaagaaaccaccaaggu

SEQ ID NO: 338418 - RNA, 19 nt, Homo sapiens
  misc_RNA (1)...(19): siRNA sense strand
ucaacuggaauggauggua

SEQ ID NO: 338419 - RNA, 19 nt, Homo sapiens
  misc_RNA (1)...(19): siRNA sense strand
ggaaauggcugaacuagaa

SEQ ID NO: 338420 - RNA, 19 nt, Homo sapiens
  misc_RNA (1)...(19): siRNA sense strand
gaacaaagcacaucagaaa

SEQ ID NO: 338421 - RNA, 19 nt, Homo sapiens
  misc_RNA (1)...(19): siRNA sense strand
cagcuacccuuccaucaua

SEQ ID NO: 338422 - RNA, 19 nt, Homo sapiens
  misc_RNA (1)...(19): siRNA sense strand
gggauaccaugcaacauaa

SEQ ID NO: 338423 - RNA, 19 nt, Homo sapiens
  misc_RNA (1)...(19): siRNA sense strand
gaggagauguggucaaugg

SEQ ID NO: 338424 - RNA, 19 nt, Homo sapiens
  misc_RNA (1)...(19): siRNA sense strand
gaaggagcuuucaucauuc

SEQ ID NO: 338425 - RNA, 19 nt, Homo sapiens
  misc_RNA (1)...(19): siRNA sense strand
cuagaaaucuguugcuaug

SEQ ID NO: 338426 - RNA, 19 nt, Homo sapiens
  misc_RNA (1)...(19): siRNA sense strand
gcucagggcuauccucuca

SEQ ID NO: 338427 - RNA, 19 nt, Homo sapiens
  misc_RNA (1)...(19): siRNA sense strand
aaacaagcgucucugaaga

SEQ ID NO: 338428 - RNA, 19 nt, Homo sapiens
  misc_RNA (1)...(19): siRNA sense strand
caacauaaccugauaaagc

SEQ ID NO: 338429 - RNA, 19 nt, Homo sapiens
  misc_RNA (1)...(19): siRNA sense strand
gaaacaagcgucucugaag

SEQ ID NO: 338430 - RNA, 19 nt, Homo sapiens
  misc_RNA (1)...(19): siRNA sense strand
gcagagggauaccaugcaa

SEQ ID NO: 338431 - RNA, 19 nt, Homo sapiens
  misc_RNA (1)...(19): siRNA sense strand
ugaacuagaagcuguguua

SEQ ID NO: 338432 - RNA, 19 nt, Homo sapiens
  misc_RNA (1)...(19): siRNA sense strand
gagaaucccaggacagaaa

SEQ ID NO: 338433 - RNA, 19 nt, Homo sapiens
  misc_RNA (1)...(19): siRNA sense strand
gcccacagaucaacuggaa

SEQ ID NO: 338434 - RNA, 19 nt, Homo sapiens
  misc_RNA (1)...(19): siRNA sense strand
gaagacugcucagggcuau

SEQ ID NO: 338435 - RNA, 19 nt, Homo sapiens
  misc_RNA (1)...(19): siRNA sense strand
gacccagucuauuaaagaa

SEQ ID NO: 338436 - RNA, 19 nt, Homo sapiens
  misc_RNA (1)...(19): siRNA sense strand
acuagaagcuguguuagaa

SEQ ID NO: 338437 - RNA, 19 nt, Homo sapiens
  misc_RNA (1)...(19): siRNA sense strand
caugcaacauaaccugaua

SEQ ID NO: 338438 - RNA, 19 nt, Homo sapiens
  misc_RNA (1)...(19): siRNA sense strand
gcuggacaccuaccugaua

SEQ ID NO: 338439 - RNA, 19 nt, Homo sapiens
  misc_RNA (1)...(19): siRNA sense strand
cagaucaacuggaauggau

SEQ ID NO: 338440 - RNA, 19 nt, Homo sapiens
  misc_RNA (1)...(19): siRNA sense strand
gcaggaaauggcugaacua

SEQ ID NO: 338441 - RNA, 19 nt, Homo sapiens
  misc_RNA (1)...(19): siRNA sense strand
ccacagaucaacuggaaug

SEQ ID NO: 338442 - RNA, 19 nt, Homo sapiens
  misc_RNA (1)...(19): siRNA sense strand
caacaugcccacagaucaa

SEQ ID NO: 338443 - RNA, 19 nt, Homo sapiens
  misc_RNA (1)...(19): siRNA sense strand
ucaccaacaugcccacaga

SEQ ID NO: 338444 - RNA, 19 nt, Homo sapiens
  misc_RNA (1)...(19): siRNA sense strand
cagaggagauguggucaau

SEQ ID NO: 338445 - RNA, 19 nt, Homo sapiens
  misc_RNA (1)...(19): siRNA sense strand
caauugggcagauguguga

SEQ ID NO: 338446 - RNA, 19 nt, Homo sapiens
  misc_RNA (1)...(19): siRNA sense strand
ggagauguggucaauggaa

SEQ ID NO: 338447 - RNA, 19 nt, Homo sapiens
  misc_RNA (1)...(19): siRNA sense strand
guacagcuguguggugcuu

SEQ ID NO: 338448 - RNA, 19 nt, Homo sapiens
  misc_RNA (1)...(19): siRNA sense strand
ccaaagcgagcaagagaau

SEQ ID NO: 338449 - RNA, 19 nt, Homo sapiens
  misc_RNA (1)...(19): siRNA sense strand
gcuaugggcccuucaccaa

SEQ ID NO: 338450 - RNA, 19 nt, Homo sapiens
  misc_RNA (1)...(19): siRNA sense strand
gaaugagcaugauuuugaa

SEQ ID NO: 338451 - RNA, 19 nt, Homo sapiens
  misc_RNA (1)...(19): siRNA sense strand
ucagggcuauccucucaga

SEQ ID NO: 338452 - RNA, 19 nt, Homo sapiens
  misc_RNA (1)...(19): siRNA sense strand
agggauaccaugcaacaua

SEQ ID NO: 338453 - RNA, 19 nt, Homo sapiens
  misc_RNA (1)...(19): siRNA sense strand
gcuagaaaucuguugcuau

SEQ ID NO: 338454 - RNA, 19 nt, Homo sapiens
  misc_RNA (1)...(19): siRNA sense strand
ugaaugagcaugauuuuga

SEQ ID NO: 338455 - RNA, 19 nt, Homo sapiens
  misc_RNA (1)...(19): siRNA sense strand
ggcuagaaaucuguugcua

SEQ ID NO: 338456 - RNA, 19 nt, Homo sapiens
  misc_RNA (1)...(19): siRNA sense strand
ugaaacaagcgucucugaa

SEQ ID NO: 338457 - RNA, 19 nt, Homo sapiens
  misc_RNA (1)...(19): siRNA sense strand
aacauaaccugauaaagcu

SEQ ID NO: 338458 - RNA, 19 nt, Homo sapiens
  misc_RNA (1)...(19): siRNA sense strand
ugacccagucuauuaaaga

SEQ ID NO: 338459 - RNA, 19 nt, Homo sapiens
  misc_RNA (1)...(19): siRNA sense strand
gaacuagaagcuguguuag

SEQ ID NO: 338460 - RNA, 19 nt, Homo sapiens
  misc_RNA (1)...(19): siRNA sense strand
gugaaacaagcgucucuga

SEQ ID NO: 338461 - RNA, 19 nt, Homo sapiens
  misc_RNA (1)...(19): siRNA sense strand
ccaacaugcccacagauca

SEQ ID NO: 338462 - RNA, 19 nt, Homo sapiens
  misc_RNA (1)...(19): siRNA sense strand
uaugggcccuucaccaaca

SEQ ID NO: 338463 - RNA, 19 nt, Homo sapiens
  misc_RNA (1)...(19): siRNA sense strand
guccaaagcgagcaagaga

SEQ ID NO: 338464 - RNA, 19 nt, Homo sapiens
  misc_RNA (1)...(19): siRNA sense strand
cagaacaaagcacaucaga

SEQ ID NO: 338465 - RNA, 19 nt, Homo sapiens
  misc_RNA (1)...(19): siRNA sense strand
ccugcgaaauccagaacaa

SEQ ID NO: 338466 - RNA, 19 nt, Homo sapiens
  misc_RNA (1)...(19): siRNA sense strand
gaaaccaccaagguccaaa

SEQ ID NO: 338467 - RNA, 19 nt, Homo sapiens
  misc_RNA (1)...(19): siRNA sense strand
gauaaagcuccagcaggaa

SEQ ID NO: 338468 - RNA, 19 nt, Homo sapiens
  misc_RNA (1)...(19): siRNA sense strand
aaggagcuuucaucauuca

SEQ ID NO: 338469 - RNA, 19 nt, Homo sapiens
  misc_RNA (1)...(19): siRNA sense strand
ggugugagagugaaacaag

SEQ ID NO: 338470 - RNA, 19 nt, Homo sapiens
  misc_RNA (1)...(19): siRNA sense strand
gaaauggcugaacuagaag

SEQ ID NO: 338471 - RNA, 19 nt, Homo sapiens
  misc_RNA (1)...(19): siRNA sense strand
auaaagcuccagcaggaaa

SEQ ID NO: 338472 - RNA, 19 nt, Homo sapiens
  misc_RNA (1)...(19): siRNA sense strand
acccuuccaucauaaguga

SEQ ID NO: 338473 - RNA, 19 nt, Homo sapiens
  misc_RNA (1)...(19): siRNA sense strand
ggugacccagucuauuaaa

SEQ ID NO: 338474 - RNA, 19 nt, Homo sapiens
  misc_RNA (1)...(19): siRNA sense strand
cccagucuauuaaagaaag

SEQ ID NO: 338475 - RNA, 19 nt, Homo sapiens
  misc_RNA (1)...(19): siRNA sense strand
caucugggugugagaguga

SEQ ID NO: 338476 - RNA, 19 nt, Homo sapiens
  misc_RNA (1)...(19): siRNA sense strand
ccagucuauuaaagaaaga

SEQ ID NO: 338477 - RNA, 19 nt, Homo sapiens
  misc_RNA (1)...(19): siRNA sense strand
cgaaauccagaacaaagca

SEQ ID NO: 338478 - RNA, 19 nt, Homo sapiens
  misc_RNA (1)...(19): siRNA sense strand
aagagaaucccaggacaga

SEQ ID NO: 338479 - RNA, 19 nt, Homo sapiens
  misc_RNA (1)...(19): siRNA sense strand
gauguggucaauggaagaa

SEQ ID NO: 338480 - RNA, 19 nt, Homo sapiens
  misc_RNA (1)...(19): siRNA sense strand
ggaccugcgaaauccagaa

SEQ ID NO: 338481 - RNA, 19 nt, Homo sapiens
  misc_RNA (1)...(19): siRNA sense strand
gagcaugauuuugaaguca

SEQ ID NO: 338482 - RNA, 19 nt, Homo sapiens
  misc_RNA (1)...(19): siRNA sense strand
gugacccagucuauuaaag

SEQ ID NO: 338483 - RNA, 19 nt, Homo sapiens
  misc_RNA (1)...(19): siRNA sense strand
agaacaaagcacaucagaa

SEQ ID NO: 338484 - RNA, 19 nt, Homo sapiens
  misc_RNA (1)...(19): siRNA sense strand
uggaagaaaccaccaaggu

SEQ ID NO: 338485 - RNA, 19 nt, Homo sapiens
  misc_RNA (1)...(19): siRNA sense strand
ucaacuggaauggauggua

SEQ ID NO: 338486 - RNA, 19 nt, Homo sapiens
  misc_RNA (1)...(19): siRNA sense strand
ggaaauggcugaacuagaa

SEQ ID NO: 338487 - RNA, 19 nt, Homo sapiens
  misc_RNA (1)...(19): siRNA sense strand
gaacaaagcacaucagaaa

SEQ ID NO: 338488 - RNA, 19 nt, Homo sapiens
  misc_RNA (1)...(19): siRNA sense strand
cagcuacccuuccaucaua

SEQ ID NO: 338489 - RNA, 19 nt, Homo sapiens
  misc_RNA (1)...(19): siRNA sense strand
gggauaccaugcaacauaa

SEQ ID NO: 338490 - RNA, 19 nt, Homo sapiens
  misc_RNA (1)...(19): siRNA sense strand
gaggagauguggucaaugg

SEQ ID NO: 338491 - RNA, 19 nt, Homo sapiens
  misc_RNA (1)...(19): siRNA sense strand
gaaggagcuuucaucauuc

SEQ ID NO: 338492 - RNA, 19 nt, Homo sapiens
  misc_RNA (1)...(19): siRNA sense strand
cuagaaaucuguugcuaug

SEQ ID NO: 338493 - RNA, 19 nt, Homo sapiens
  misc_RNA (1)...(19): siRNA sense strand
gcucagggcuauccucuca

SEQ ID NO: 338494 - RNA, 19 nt, Homo sapiens
  misc_RNA (1)...(19): siRNA sense strand
aaacaagcgucucugaaga

SEQ ID NO: 338495 - RNA, 19 nt, Homo sapiens
  misc_RNA (1)...(19): siRNA sense strand
caacauaaccugauaaagc

SEQ ID NO: 338496 - RNA, 19 nt, Homo sapiens
  misc_RNA (1)...(19): siRNA sense strand
gaaacaagcgucucugaag

SEQ ID NO: 338497 - RNA, 19 nt, Homo sapiens
  misc_RNA (1)...(19): siRNA sense strand
gcagagggauaccaugcaa

SEQ ID NO: 338498 - RNA, 19 nt, Homo sapiens
  misc_RNA (1)...(19): siRNA sense strand
ugaacuagaagcuguguua

SEQ ID NO: 338499 - RNA, 19 nt, Homo sapiens
  misc_RNA (1)...(19): siRNA sense strand
gagaaucccaggacagaaa

SEQ ID NO: 338500 - RNA, 19 nt, Homo sapiens
  misc_RNA (1)...(19): siRNA sense strand
gcccacagaucaacuggaa

SEQ ID NO: 338501 - RNA, 19 nt, Homo sapiens
  misc_RNA (1)...(19): siRNA sense strand
gaagacugcucagggcuau

SEQ ID NO: 338502 - RNA, 19 nt, Homo sapiens
  misc_RNA (1)...(19): siRNA sense strand
gacccagucuauuaaagaa

SEQ ID NO: 338503 - RNA, 19 nt, Homo sapiens
  misc_RNA (1)...(19): siRNA sense strand
acuagaagcuguguuagaa

SEQ ID NO: 338504 - RNA, 19 nt, Homo sapiens
  misc_RNA (1)...(19): siRNA sense strand
caugcaacauaaccugaua

SEQ ID NO: 338505 - RNA, 19 nt, Homo sapiens
  misc_RNA (1)...(19): siRNA sense strand
gcuggacaccuaccugaua

SEQ ID NO: 338506 - RNA, 19 nt, Homo sapiens
  misc_RNA (1)...(19): siRNA sense strand
cagaucaacuggaauggau

SEQ ID NO: 338507 - RNA, 19 nt, Homo sapiens
  misc_RNA (1)...(19): siRNA sense strand
gcaggaaauggcugaacua

SEQ ID NO: 338508 - RNA, 19 nt, Homo sapiens
  misc_RNA (1)...(19): siRNA sense strand
ccacagaucaacuggaaug

SEQ ID NO: 338509 - RNA, 19 nt, Homo sapiens
  misc_RNA (1)...(19): siRNA sense strand
caacaugcccacagaucaa

SEQ ID NO: 338510 - RNA, 19 nt, Homo sapiens
  misc_RNA (1)...(19): siRNA sense strand
ucaccaacaugcccacaga

SEQ ID NO: 338511 - RNA, 19 nt, Homo sapiens
  misc_RNA (1)...(19): siRNA sense strand
cagaggagauguggucaau

SEQ ID NO: 338512 - RNA, 19 nt, Homo sapiens
  misc_RNA (1)...(19): siRNA sense strand
caauugggcagauguguga

SEQ ID NO: 338513 - RNA, 19 nt, Homo sapiens
  misc_RNA (1)...(19): siRNA sense strand
ggagauguggucaauggaa

SEQ ID NO: 338514 - RNA, 19 nt, Homo sapiens
  misc_RNA (1)...(19): siRNA sense strand
guacagcuguguggugcuu

SEQ ID NO: 338515 - RNA, 19 nt, Homo sapiens
  misc_RNA (1)...(19): siRNA sense strand
ccaaagcgagcaagagaau

SEQ ID NO: 338516 - RNA, 19 nt, Homo sapiens
  misc_RNA (1)...(19): siRNA sense strand
gcuaugggcccuucaccaa

SEQ ID NO: 338517 - RNA, 19 nt, Homo sapiens
  misc_RNA (1)...(19): siRNA sense strand
gaaugagcaugauuuugaa

SEQ ID NO: 338518 - RNA, 19 nt, Homo sapiens
  misc_RNA (1)...(19): siRNA sense strand
ucagggcuauccucucaga

SEQ ID NO: 338519 - RNA, 19 nt, Homo sapiens
  misc_RNA (1)...(19): siRNA sense strand
agggauaccaugcaacaua

SEQ ID NO: 338520 - RNA, 19 nt, Homo sapiens
  misc_RNA (1)...(19): siRNA sense strand
gcuagaaaucuguugcuau

SEQ ID NO: 338521 - RNA, 19 nt, Homo sapiens
  misc_RNA (1)...(19): siRNA sense strand
ugaaugagcaugauuuuga

SEQ ID NO: 338522 - RNA, 19 nt, Homo sapiens
  misc_RNA (1)...(19): siRNA sense strand
ggcuagaaaucuguugcua

SEQ ID NO: 338523 - RNA, 19 nt, Homo sapiens
  misc_RNA (1)...(19): siRNA sense strand
ugaaacaagcgucucugaa

SEQ ID NO: 338524 - RNA, 19 nt, Homo sapiens
  misc_RNA (1)...(19): siRNA sense strand
aacauaaccugauaaagcu

SEQ ID NO: 338525 - RNA, 19 nt, Homo sapiens
  misc_RNA (1)...(19): siRNA sense strand
ugacccagucuauuaaaga

SEQ ID NO: 338526 - RNA, 19 nt, Homo sapiens
  misc_RNA (1)...(19): siRNA sense strand
gaacuagaagcuguguuag

SEQ ID NO: 338527 - RNA, 19 nt, Homo sapiens
  misc_RNA (1)...(19): siRNA sense strand
gugaaacaagcgucucuga

SEQ ID NO: 338528 - RNA, 19 nt, Homo sapiens
  misc_RNA (1)...(19): siRNA sense strand
ccaacaugcccacagauca

SEQ ID NO: 338529 - RNA, 19 nt, Homo sapiens
  misc_RNA (1)...(19): siRNA sense strand
uaugggcccuucaccaaca

SEQ ID NO: 338530 - RNA, 19 nt, Homo sapiens
  misc_RNA (1)...(19): siRNA sense strand
guccaaagcgagcaagaga

SEQ ID NO: 338531 - RNA, 19 nt, Homo sapiens
  misc_RNA (1)...(19): siRNA sense strand
cagaacaaagcacaucaga

SEQ ID NO: 338532 - RNA, 19 nt, Homo sapiens
  misc_RNA (1)...(19): siRNA sense strand
ccugcgaaauccagaacaa

SEQ ID NO: 338533 - RNA, 19 nt, Homo sapiens
  misc_RNA (1)...(19): siRNA sense strand
gaaaccaccaagguccaaa

SEQ ID NO: 338534 - RNA, 19 nt, Homo sapiens
  misc_RNA (1)...(19): siRNA sense strand
gauaaagcuccagcaggaa

SEQ ID NO: 338535 - RNA, 19 nt, Homo sapiens
  misc_RNA (1)...(19): siRNA sense strand
aaggagcuuucaucauuca

SEQ ID NO: 338536 - RNA, 19 nt, Homo sapiens
  misc_RNA (1)...(19): siRNA sense strand
ggugugagagugaaacaag

SEQ ID NO: 338537 - RNA, 19 nt, Homo sapiens
  misc_RNA (1)...(19): siRNA sense strand
gaaauggcugaacuagaag

SEQ ID NO: 338538 - RNA, 19 nt, Homo sapiens
  misc_RNA (1)...(19): siRNA sense strand
auaaagcuccagcaggaaa

SEQ ID NO: 338539 - RNA, 19 nt, Homo sapiens
  misc_RNA (1)...(19): siRNA sense strand
acccuuccaucauaaguga

SEQ ID NO: 338540 - RNA, 19 nt, Homo sapiens
  misc_RNA (1)...(19): siRNA sense strand
ggugacccagucuauuaaa

SEQ ID NO: 338541 - RNA, 19 nt, Homo sapiens
  misc_RNA (1)...(19): siRNA sense strand
cccagucuauuaaagaaag

SEQ ID NO: 338542 - RNA, 19 nt, Homo sapiens
  misc_RNA (1)...(19): siRNA sense strand
caucugggugugagaguga

SEQ ID NO: 338543 - RNA, 19 nt, Homo sapiens
  misc_RNA (1)...(19): siRNA sense strand
ccagucuauuaaagaaaga

SEQ ID NO: 338544 - RNA, 19 nt, Homo sapiens
  misc_RNA (1)...(19): siRNA sense strand
cgaaauccagaacaaagca

SEQ ID NO: 338545 - RNA, 19 nt, Homo sapiens
  misc_RNA (1)...(19): siRNA sense strand
aagagaaucccaggacaga

SEQ ID NO: 338546 - RNA, 19 nt, Homo sapiens
  misc_RNA (1)...(19): siRNA sense strand
gauguggucaauggaagaa

SEQ ID NO: 338547 - RNA, 19 nt, Homo sapiens
  misc_RNA (1)...(19): siRNA sense strand
ggaccugcgaaauccagaa

SEQ ID NO: 338548 - RNA, 19 nt, Homo sapiens
  misc_RNA (1)...(19): siRNA sense strand
gagcaugauuuugaaguca

SEQ ID NO: 338549 - RNA, 19 nt, Homo sapiens
  misc_RNA (1)...(19): siRNA sense strand
gugacccagucuauuaaag

SEQ ID NO: 338550 - RNA, 19 nt, Homo sapiens
  misc_RNA (1)...(19): siRNA sense strand
agaacaaagcacaucagaa

SEQ ID NO: 338551 - RNA, 19 nt, Homo sapiens
  misc_RNA (1)...(19): siRNA sense strand
uggaagaaaccaccaaggu

SEQ ID NO: 338552 - RNA, 19 nt, Homo sapiens
  misc_RNA (1)...(19): siRNA sense strand
ucaacuggaauggauggua

SEQ ID NO: 338553 - RNA, 19 nt, Homo sapiens
  misc_RNA (1)...(19): siRNA sense strand
ggaaauggcugaacuagaa

SEQ ID NO: 338554 - RNA, 19 nt, Homo sapiens
  misc_RNA (1)...(19): siRNA sense strand
gaacaaagcacaucagaaa

SEQ ID NO: 338555 - RNA, 19 nt, Homo sapiens
  misc_RNA (1)...(19): siRNA sense strand
cagcuacccuuccaucaua

SEQ ID NO: 338556 - RNA, 19 nt, Homo sapiens
  misc_RNA (1)...(19): siRNA sense strand
gggauaccaugcaacauaa

SEQ ID NO: 338557 - RNA, 19 nt, Homo sapiens
  misc_RNA (1)...(19): siRNA sense strand
gaggagauguggucaaugg

SEQ ID NO: 338558 - RNA, 19 nt, Homo sapiens
  misc_RNA (1)...(19): siRNA sense strand
gaaggagcuuucaucauuc

SEQ ID NO: 338559 - RNA, 19 nt, Homo sapiens
  misc_RNA (1)...(19): siRNA sense strand
cuagaaaucuguugcuaug

SEQ ID NO: 338560 - RNA, 19 nt, Homo sapiens
  misc_RNA (1)...(19): siRNA sense strand
gcucagggcuauccucuca

SEQ ID NO: 338561 - RNA, 19 nt, Homo sapiens
  misc_RNA (1)...(19): siRNA sense strand
aaacaagcgucucugaaga

SEQ ID NO: 338562 - RNA, 19 nt, Homo sapiens
  misc_RNA (1)...(19): siRNA sense strand
caacauaaccugauaaagc

SEQ ID NO: 338563 - RNA, 19 nt, Homo sapiens
  misc_RNA (1)...(19): siRNA sense strand
gaaacaagcgucucugaag

SEQ ID NO: 338564 - RNA, 19 nt, Homo sapiens
  misc_RNA (1)...(19): siRNA sense strand
gcagagggauaccaugcaa

SEQ ID NO: 338565 - RNA, 19 nt, Homo sapiens
  misc_RNA (1)...(19): siRNA sense strand
ugaacuagaagcuguguua

SEQ ID NO: 338566 - RNA, 19 nt, Homo sapiens
  misc_RNA (1)...(19): siRNA sense strand
gagaaucccaggacagaaa

SEQ ID NO: 338567 - RNA, 19 nt, Homo sapiens
  misc_RNA (1)...(19): siRNA sense strand
gcccacagaucaacuggaa

SEQ ID NO: 338568 - RNA, 19 nt, Homo sapiens
  misc_RNA (1)...(19): siRNA sense strand
gaagacugcucagggcuau

SEQ ID NO: 338569 - RNA, 19 nt, Homo sapiens
  misc_RNA (1)...(19): siRNA sense strand
gacccagucuauuaaagaa

SEQ ID NO: 338570 - RNA, 19 nt, Homo sapiens
  misc_RNA (1)...(19): siRNA sense strand
acuagaagcuguguuagaa

SEQ ID NO: 338571 - RNA, 19 nt, Homo sapiens
  misc_RNA (1)...(19): siRNA sense strand
caugcaacauaaccugaua

SEQ ID NO: 338572 - RNA, 19 nt, Homo sapiens
  misc_RNA (1)...(19): siRNA sense strand
gcuggacaccuaccugaua

SEQ ID NO: 338573 - RNA, 19 nt, Homo sapiens
  misc_RNA (1)...(19): siRNA sense strand
cagaucaacuggaauggau

SEQ ID NO: 338574 - RNA, 19 nt, Homo sapiens
  misc_RNA (1)...(19): siRNA sense strand
gcaggaaauggcugaacua

SEQ ID NO: 338575 - RNA, 19 nt, Homo sapiens
  misc_RNA (1)...(19): siRNA sense strand
ccacagaucaacuggaaug

SEQ ID NO: 338576 - RNA, 19 nt, Homo sapiens
  misc_RNA (1)...(19): siRNA sense strand
caacaugcccacagaucaa

SEQ ID NO: 338577 - RNA, 19 nt, Homo sapiens
  misc_RNA (1)...(19): siRNA sense strand
ucaccaacaugcccacaga

SEQ ID NO: 338578 - RNA, 19 nt, Homo sapiens
  misc_RNA (1)...(19): siRNA sense strand
cagaggagauguggucaau

SEQ ID NO: 338579 - RNA, 19 nt, Homo sapiens
  misc_RNA (1)...(19): siRNA sense strand
caauugggcagauguguga

SEQ ID NO: 338580 - RNA, 19 nt, Homo sapiens
  misc_RNA (1)...(19): siRNA sense strand
ggagauguggucaauggaa

SEQ ID NO: 338581 - RNA, 19 nt, Homo sapiens
  misc_RNA (1)...(19): siRNA sense strand
guacagcuguguggugcuu

SEQ ID NO: 338582 - RNA, 19 nt, Homo sapiens
  misc_RNA (1)...(19): siRNA sense strand
ccaaagcgagcaagagaau

SEQ ID NO: 338583 - RNA, 19 nt, Homo sapiens
  misc_RNA (1)...(19): siRNA sense strand
gcuaugggcccuucaccaa

SEQ ID NO: 338584 - RNA, 19 nt, Homo sapiens
  misc_RNA (1)...(19): siRNA sense strand
gaaugagcaugauuuugaa

SEQ ID NO: 338585 - RNA, 19 nt, Homo sapiens
  misc_RNA (1)...(19): siRNA sense strand
ucagggcuauccucucaga

SEQ ID NO: 338586 - RNA, 19 nt, Homo sapiens
  misc_RNA (1)...(19): siRNA sense strand
agggauaccaugcaacaua

SEQ ID NO: 338587 - RNA, 19 nt, Homo sapiens
  misc_RNA (1)...(19): siRNA sense strand
gcuagaaaucuguugcuau

SEQ ID NO: 338588 - RNA, 19 nt, Homo sapiens
  misc_RNA (1)...(19): siRNA sense strand
ugaaugagcaugauuuuga

SEQ ID NO: 338589 - RNA, 19 nt, Homo sapiens
  misc_RNA (1)...(19): siRNA sense strand
ggcuagaaaucuguugcua

SEQ ID NO: 338590 - RNA, 19 nt, Homo sapiens
  misc_RNA (1)...(19): siRNA sense strand
ugaaacaagcgucucugaa

SEQ ID NO: 338591 - RNA, 19 nt, Homo sapiens
  misc_RNA (1)...(19): siRNA sense strand
aacauaaccugauaaagcu

SEQ ID NO: 338592 - RNA, 19 nt, Homo sapiens
  misc_RNA (1)...(19): siRNA sense strand
ugacccagucuauuaaaga

SEQ ID NO: 338593 - RNA, 19 nt, Homo sapiens
  misc_RNA (1)...(19): siRNA sense strand
gaacuagaagcuguguuag

SEQ ID NO: 338594 - RNA, 19 nt, Homo sapiens
  misc_RNA (1)...(19): siRNA sense strand
gugaaacaagcgucucuga

SEQ ID NO: 338595 - RNA, 19 nt, Homo sapiens
  misc_RNA (1)...(19): siRNA sense strand
ccaacaugcccacagauca

SEQ ID NO: 338596 - RNA, 19 nt, Homo sapiens
  misc_RNA (1)...(19): siRNA sense strand
uaugggcccuucaccaaca

SEQ ID NO: 338597 - RNA, 19 nt, Homo sapiens
  misc_RNA (1)...(19): siRNA sense strand
guccaaagcgagcaagaga

SEQ ID NO: 338598 - RNA, 19 nt, Homo sapiens
  misc_RNA (1)...(19): siRNA sense strand
cagaacaaagcacaucaga

SEQ ID NO: 338599 - RNA, 19 nt, Homo sapiens
  misc_RNA (1)...(19): siRNA sense strand
ccugcgaaauccagaacaa

SEQ ID NO: 338600 - RNA, 19 nt, Homo sapiens
  misc_RNA (1)...(19): siRNA sense strand
gaaaccaccaagguccaaa

SEQ ID NO: 338601 - RNA, 19 nt, Homo sapiens
  misc_RNA (1)...(19): siRNA sense strand
gauaaagcuccagcaggaa

SEQ ID NO: 338602 - RNA, 19 nt, Homo sapiens
  misc_RNA (1)...(19): siRNA sense strand
aaggagcuuucaucauuca

SEQ ID NO: 338603 - RNA, 19 nt, Homo sapiens
  misc_RNA (1)...(19): siRNA sense strand
ggugugagagugaaacaag

SEQ ID NO: 338604 - RNA, 19 nt, Homo sapiens
  misc_RNA (1)...(19): siRNA sense strand
gaaauggcugaacuagaag

SEQ ID NO: 338605 - RNA, 19 nt, Homo sapiens
  misc_RNA (1)...(19): siRNA sense strand
auaaagcuccagcaggaaa

SEQ ID NO: 338606 - RNA, 19 nt, Homo sapiens
  misc_RNA (1)...(19): siRNA sense strand
acccuuccaucauaaguga

SEQ ID NO: 338607 - RNA, 19 nt, Homo sapiens
  misc_RNA (1)...(19): siRNA sense strand
ggugacccagucuauuaaa

SEQ ID NO: 338608 - RNA, 19 nt, Homo sapiens
  misc_RNA (1)...(19): siRNA sense strand
cccagucuauuaaagaaag

SEQ ID NO: 338609 - RNA, 19 nt, Homo sapiens
  misc_RNA (1)...(19): siRNA sense strand
caucugggugugagaguga

SEQ ID NO: 338610 - RNA, 19 nt, Homo sapiens
  misc_RNA (1)...(19): siRNA sense strand
ccagucuauuaaagaaaga

SEQ ID NO: 338611 - RNA, 19 nt, Homo sapiens
  misc_RNA (1)...(19): siRNA sense strand
cgaaauccagaacaaagca

SEQ ID NO: 338612 - RNA, 19 nt, Homo sapiens
  misc_RNA (1)...(19): siRNA sense strand
aagagaaucccaggacaga

SEQ ID NO: 338613 - RNA, 19 nt, Homo sapiens
  misc_RNA (1)...(19): siRNA sense strand
gauguggucaauggaagaa

SEQ ID NO: 338614 - RNA, 19 nt, Homo sapiens
  misc_RNA (1)...(19): siRNA sense strand
ggaccugcgaaauccagaa

SEQ ID NO: 338615 - RNA, 19 nt, Homo sapiens
  misc_RNA (1)...(19): siRNA sense strand
gagcaugauuuugaaguca

SEQ ID NO: 338616 - RNA, 19 nt, Homo sapiens
  misc_RNA (1)...(19): siRNA sense strand
gugacccagucuauuaaag

SEQ ID NO: 338617 - RNA, 19 nt, Homo sapiens
  misc_RNA (1)...(19): siRNA sense strand
agaacaaagcacaucagaa

SEQ ID NO: 338618 - RNA, 19 nt, Homo sapiens
  misc_RNA (1)...(19): siRNA sense strand
uggaagaaaccaccaaggu

SEQ ID NO: 338619 - RNA, 19 nt, Homo sapiens
  misc_RNA (1)...(19): siRNA sense strand
ucaacuggaauggauggua

SEQ ID NO: 338620 - RNA, 19 nt, Homo sapiens
  misc_RNA (1)...(19): siRNA sense strand
ggaaauggcugaacuagaa

SEQ ID NO: 338621 - RNA, 19 nt, Homo sapiens
  misc_RNA (1)...(19): siRNA sense strand
gaacaaagcacaucagaaa

SEQ ID NO: 338622 - RNA, 19 nt, Homo sapiens
  misc_RNA (1)...(19): siRNA sense strand
cagcuacccuuccaucaua

SEQ ID NO: 338623 - RNA, 19 nt, Homo sapiens
  misc_RNA (1)...(19): siRNA sense strand
gggauaccaugcaacauaa

SEQ ID NO: 338624 - RNA, 19 nt, Homo sapiens
  misc_RNA (1)...(19): siRNA sense strand
gaggagauguggucaaugg

SEQ ID NO: 338625 - RNA, 19 nt, Homo sapiens
  misc_RNA (1)...(19): siRNA sense strand
gaaggagcuuucaucauuc

SEQ ID NO: 338626 - RNA, 19 nt, Homo sapiens
  misc_RNA (1)...(19): siRNA sense strand
cuagaaaucuguugcuaug

SEQ ID NO: 338627 - RNA, 19 nt, Homo sapiens
  misc_RNA (1)...(19): siRNA sense strand
gcucagggcuauccucuca

SEQ ID NO: 338628 - RNA, 19 nt, Homo sapiens
  misc_RNA (1)...(19): siRNA sense strand
aaacaagcgucucugaaga

SEQ ID NO: 338629 - RNA, 19 nt, Homo sapiens
  misc_RNA (1)...(19): siRNA sense strand
caacauaaccugauaaagc

SEQ ID NO: 338630 - RNA, 19 nt, Homo sapiens
  misc_RNA (1)...(19): siRNA sense strand
gaaacaagcgucucugaag

SEQ ID NO: 338631 - RNA, 19 nt, Homo sapiens
  misc_RNA (1)...(19): siRNA sense strand
gcagagggauaccaugcaa

SEQ ID NO: 338632 - RNA, 19 nt, Homo sapiens
  misc_RNA (1)...(19): siRNA sense strand
ugaacuagaagcuguguua

SEQ ID NO: 338633 - RNA, 19 nt, Homo sapiens
  misc_RNA (1)...(19): siRNA sense strand
gagaaucccaggacagaaa

SEQ ID NO: 338634 - RNA, 19 nt, Homo sapiens
  misc_RNA (1)...(19): siRNA sense strand
gcccacagaucaacuggaa

SEQ ID NO: 338635 - RNA, 19 nt, Homo sapiens
  misc_RNA (1)...(19): siRNA sense strand
gaagacugcucagggcuau

SEQ ID NO: 338636 - RNA, 19 nt, Homo sapiens
  misc_RNA (1)...(19): siRNA sense strand
gacccagucuauuaaagaa

SEQ ID NO: 338637 - RNA, 19 nt, Homo sapiens
  misc_RNA (1)...(19): siRNA sense strand
acuagaagcuguguuagaa

SEQ ID NO: 338638 - RNA, 19 nt, Homo sapiens
  misc_RNA (1)...(19): siRNA sense strand
caugcaacauaaccugaua

SEQ ID NO: 338639 - RNA, 19 nt, Homo sapiens
  misc_RNA (1)...(19): siRNA sense strand
gcuggacaccuaccugaua

SEQ ID NO: 338640 - RNA, 19 nt, Homo sapiens
  misc_RNA (1)...(19): siRNA sense strand
cagaucaacuggaauggau

SEQ ID NO: 338641 - RNA, 19 nt, Homo sapiens
  misc_RNA (1)...(19): siRNA sense strand
gcaggaaauggcugaacua

SEQ ID NO: 338642 - RNA, 19 nt, Homo sapiens
  misc_RNA (1)...(19): siRNA sense strand
ccacagaucaacuggaaug

SEQ ID NO: 338643 - RNA, 19 nt, Homo sapiens
  misc_RNA (1)...(19): siRNA sense strand
caacaugcccacagaucaa

SEQ ID NO: 338644 - RNA, 19 nt, Homo sapiens
  misc_RNA (1)...(19): siRNA sense strand
ucaccaacaugcccacaga

SEQ ID NO: 338645 - RNA, 19 nt, Homo sapiens
  misc_RNA (1)...(19): siRNA sense strand
cagaggagauguggucaau

SEQ ID NO: 338646 - RNA, 19 nt, Homo sapiens
  misc_RNA (1)...(19): siRNA sense strand
caauugggcagauguguga

SEQ ID NO: 338647 - RNA, 19 nt, Homo sapiens
  misc_RNA (1)...(19): siRNA sense strand
ggagauguggucaauggaa

SEQ ID NO: 338648 - RNA, 19 nt, Homo sapiens
  misc_RNA (1)...(19): siRNA sense strand
guacagcuguguggugcuu

SEQ ID NO: 338649 - RNA, 19 nt, Homo sapiens
  misc_RNA (1)...(19): siRNA sense strand
ccaaagcgagcaagagaau

SEQ ID NO: 338650 - RNA, 19 nt, Homo sapiens
  misc_RNA (1)...(19): siRNA sense strand
gcuaugggcccuucaccaa

SEQ ID NO: 338651 - RNA, 19 nt, Homo sapiens
  misc_RNA (1)...(19): siRNA sense strand
gaaugagcaugauuuugaa

SEQ ID NO: 338652 - RNA, 19 nt, Homo sapiens
  misc_RNA (1)...(19): siRNA sense strand
ucagggcuauccucucaga

SEQ ID NO: 338653 - RNA, 19 nt, Homo sapiens
  misc_RNA (1)...(19): siRNA sense strand
agggauaccaugcaacaua

SEQ ID NO: 338654 - RNA, 19 nt, Homo sapiens
  misc_RNA (1)...(19): siRNA sense strand
gcuagaaaucuguugcuau

SEQ ID NO: 338655 - RNA, 19 nt, Homo sapiens
  misc_RNA (1)...(19): siRNA sense strand
ugaaugagcaugauuuuga

SEQ ID NO: 338656 - RNA, 19 nt, Homo sapiens
  misc_RNA (1)...(19): siRNA sense strand
ggcuagaaaucuguugcua

SEQ ID NO: 338657 - RNA, 19 nt, Homo sapiens
  misc_RNA (1)...(19): siRNA sense strand
ugaaacaagcgucucugaa

SEQ ID NO: 338658 - RNA, 19 nt, Homo sapiens
  misc_RNA (1)...(19): siRNA sense strand
aacauaaccugauaaagcu

SEQ ID NO: 338659 - RNA, 19 nt, Homo sapiens
  misc_RNA (1)...(19): siRNA sense strand
ugacccagucuauuaaaga

SEQ ID NO: 338660 - RNA, 19 nt, Homo sapiens
  misc_RNA (1)...(19): siRNA sense strand
gaacuagaagcuguguuag

SEQ ID NO: 338661 - RNA, 19 nt, Homo sapiens
  misc_RNA (1)...(19): siRNA sense strand
gugaaacaagcgucucuga

SEQ ID NO: 338662 - RNA, 19 nt, Homo sapiens
  misc_RNA (1)...(19): siRNA sense strand
ccaacaugcccacagauca

SEQ ID NO: 338663 - RNA, 19 nt, Homo sapiens
  misc_RNA (1)...(19): siRNA sense strand
uaugggcccuucaccaaca

SEQ ID NO: 338664 - RNA, 19 nt, Homo sapiens
  misc_RNA (1)...(19): siRNA sense strand
guccaaagcgagcaagaga

SEQ ID NO: 338665 - RNA, 19 nt, Homo sapiens
  misc_RNA (1)...(19): siRNA sense strand
cagaacaaagcacaucaga

SEQ ID NO: 338666 - RNA, 19 nt, Homo sapiens
  misc_RNA (1)...(19): siRNA sense strand
ccugcgaaauccagaacaa

SEQ ID NO: 338667 - RNA, 19 nt, Homo sapiens
  misc_RNA (1)...(19): siRNA sense strand
gaaaccaccaagguccaaa

SEQ ID NO: 338668 - RNA, 19 nt, Homo sapiens
  misc_RNA (1)...(19): siRNA sense strand
gauaaagcuccagcaggaa

SEQ ID NO: 338669 - RNA, 19 nt, Homo sapiens
  misc_RNA (1)...(19): siRNA sense strand
aaggagcuuucaucauuca

SEQ ID NO: 338670 - RNA, 19 nt, Homo sapiens
  misc_RNA (1)...(19): siRNA sense strand
ggugugagagugaaacaag

SEQ ID NO: 338671 - RNA, 19 nt, Homo sapiens
  misc_RNA (1)...(19): siRNA sense strand
gaaauggcugaacuagaag

SEQ ID NO: 338672 - RNA, 19 nt, Homo sapiens
  misc_RNA (1)...(19): siRNA sense strand
auaaagcuccagcaggaaa

SEQ ID NO: 338673 - RNA, 19 nt, Homo sapiens
  misc_RNA (1)...(19): siRNA sense strand
acccuuccaucauaaguga

SEQ ID NO: 338674 - RNA, 19 nt, Homo sapiens
  misc_RNA (1)...(19): siRNA sense strand
ggugacccagucuauuaaa

SEQ ID NO: 338675 - RNA, 19 nt, Homo sapiens
  misc_RNA (1)...(19): siRNA sense strand
cccagucuauuaaagaaag

SEQ ID NO: 338676 - RNA, 19 nt, Homo sapiens
  misc_RNA (1)...(19): siRNA sense strand
caucugggugugagaguga

SEQ ID NO: 338677 - RNA, 19 nt, Homo sapiens
  misc_RNA (1)...(19): siRNA sense strand
ccagucuauuaaagaaaga

SEQ ID NO: 338678 - RNA, 19 nt, Homo sapiens
  misc_RNA (1)...(19): siRNA sense strand
cgaaauccagaacaaagca

SEQ ID NO: 338679 - RNA, 19 nt, Homo sapiens
  misc_RNA (1)...(19): siRNA sense strand
aagagaaucccaggacaga

SEQ ID NO: 338680 - RNA, 19 nt, Homo sapiens
  misc_RNA (1)...(19): siRNA sense strand
gauguggucaauggaagaa

SEQ ID NO: 338681 - RNA, 19 nt, Homo sapiens
  misc_RNA (1)...(19): siRNA sense strand
ggaccugcgaaauccagaa

SEQ ID NO: 338682 - RNA, 19 nt, Homo sapiens
  misc_RNA (1)...(19): siRNA sense strand
gagcaugauuuugaaguca

SEQ ID NO: 338683 - RNA, 19 nt, Homo sapiens
  misc_RNA (1)...(19): siRNA sense strand
gugacccagucuauuaaag

SEQ ID NO: 338684 - RNA, 19 nt, Homo sapiens
  misc_RNA (1)...(19): siRNA sense strand
agaacaaagcacaucagaa

SEQ ID NO: 338685 - RNA, 19 nt, Homo sapiens
  misc_RNA (1)...(19): siRNA sense strand
uggaagaaaccaccaaggu

SEQ ID NO: 338686 - RNA, 19 nt, Homo sapiens
  misc_RNA (1)...(19): siRNA sense strand
ucaacuggaauggauggua

SEQ ID NO: 338687 - RNA, 19 nt, Homo sapiens
  misc_RNA (1)...(19): siRNA sense strand
ggaaauggcugaacuagaa

SEQ ID NO: 338688 - RNA, 19 nt, Homo sapiens
  misc_RNA (1)...(19): siRNA sense strand
gaacaaagcacaucagaaa

SEQ ID NO: 338689 - RNA, 19 nt, Homo sapiens
  misc_RNA (1)...(19): siRNA sense strand
cagcuacccuuccaucaua

SEQ ID NO: 338690 - RNA, 19 nt, Homo sapiens
  misc_RNA (1)...(19): siRNA sense strand
gggauaccaugcaacauaa

SEQ ID NO: 338691 - RNA, 19 nt, Homo sapiens
  misc_RNA (1)...(19): siRNA sense strand
gaggagauguggucaaugg

SEQ ID NO: 338692 - RNA, 19 nt, Homo sapiens
  misc_RNA (1)...(19): siRNA sense strand
gaaggagcuuucaucauuc

SEQ ID NO: 338693 - RNA, 19 nt, Homo sapiens
  misc_RNA (1)...(19): siRNA sense strand
cuagaaaucuguugcuaug

SEQ ID NO: 338694 - RNA, 19 nt, Homo sapiens
  misc_RNA (1)...(19): siRNA sense strand
gcucagggcuauccucuca

SEQ ID NO: 338695 - RNA, 19 nt, Homo sapiens
  misc_RNA (1)...(19): siRNA sense strand
aaacaagcgucucugaaga

SEQ ID NO: 338696 - RNA, 19 nt, Homo sapiens
  misc_RNA (1)...(19): siRNA sense strand
caacauaaccugauaaagc

SEQ ID NO: 338697 - RNA, 19 nt, Homo sapiens
  misc_RNA (1)...(19): siRNA sense strand
gaaacaagcgucucugaag

SEQ ID NO: 338698 - RNA, 19 nt, Homo sapiens
  misc_RNA (1)...(19): siRNA sense strand
gcagagggauaccaugcaa

SEQ ID NO: 338699 - RNA, 19 nt, Homo sapiens
  misc_RNA (1)...(19): siRNA sense strand
ugaacuagaagcuguguua

SEQ ID NO: 338700 - RNA, 19 nt, Homo sapiens
  misc_RNA (1)...(19): siRNA sense strand
gagaaucccaggacagaaa

SEQ ID NO: 338701 - RNA, 19 nt, Homo sapiens
  misc_RNA (1)...(19): siRNA sense strand
gcccacagaucaacuggaa

SEQ ID NO: 338702 - RNA, 19 nt, Homo sapiens
  misc_RNA (1)...(19): siRNA sense strand
gaagacugcucagggcuau

SEQ ID NO: 338703 - RNA, 19 nt, Homo sapiens
  misc_RNA (1)...(19): siRNA sense strand
gacccagucuauuaaagaa

SEQ ID NO: 338704 - RNA, 19 nt, Homo sapiens
  misc_RNA (1)...(19): siRNA sense strand
acuagaagcuguguuagaa

SEQ ID NO: 338705 - RNA, 19 nt, Homo sapiens
  misc_RNA (1)...(19): siRNA sense strand
caugcaacauaaccugaua

SEQ ID NO: 338706 - RNA, 19 nt, Homo sapiens
  misc_RNA (1)...(19): siRNA sense strand
gcuggacaccuaccugaua

SEQ ID NO: 338707 - RNA, 19 nt, Homo sapiens
  misc_RNA (1)...(19): siRNA sense strand
cagaucaacuggaauggau

SEQ ID NO: 338708 - RNA, 19 nt, Homo sapiens
  misc_RNA (1)...(19): siRNA sense strand
gcaggaaauggcugaacua

SEQ ID NO: 338709 - RNA, 19 nt, Homo sapiens
  misc_RNA (1)...(19): siRNA sense strand
ccacagaucaacuggaaug

SEQ ID NO: 338710 - RNA, 19 nt, Homo sapiens
  misc_RNA (1)...(19): siRNA sense strand
caacaugcccacagaucaa

SEQ ID NO: 338711 - RNA, 19 nt, Homo sapiens
  misc_RNA (1)...(19): siRNA sense strand
ucaccaacaugcccacaga

SEQ ID NO: 338712 - RNA, 19 nt, Homo sapiens
  misc_RNA (1)...(19): siRNA sense strand
cagaggagauguggucaau

SEQ ID NO: 338713 - RNA, 19 nt, Homo sapiens
  misc_RNA (1)...(19): siRNA sense strand
caauugggcagauguguga

SEQ ID NO: 338714 - RNA, 19 nt, Homo sapiens
  misc_RNA (1)...(19): siRNA sense strand
ggagauguggucaauggaa

SEQ ID NO: 338715 - RNA, 19 nt, Homo sapiens
  misc_RNA (1)...(19): siRNA sense strand
guacagcuguguggugcuu

SEQ ID NO: 338716 - RNA, 19 nt, Homo sapiens
  misc_RNA (1)...(19): siRNA sense strand
ccaaagcgagcaagagaau

SEQ ID NO: 338717 - RNA, 19 nt, Homo sapiens
  misc_RNA (1)...(19): siRNA sense strand
gcuaugggcccuucaccaa

SEQ ID NO: 338718 - RNA, 19 nt, Homo sapiens
  misc_RNA (1)...(19): siRNA sense strand
gaaugagcaugauuuugaa

SEQ ID NO: 338719 - RNA, 19 nt, Homo sapiens
  misc_RNA (1)...(19): siRNA sense strand
ucagggcuauccucucaga

SEQ ID NO: 338720 - RNA, 19 nt, Homo sapiens
  misc_RNA (1)...(19): siRNA sense strand
agggauaccaugcaacaua

SEQ ID NO: 338721 - RNA, 19 nt, Homo sapiens
  misc_RNA (1)...(19): siRNA sense strand
gcuagaaaucuguugcuau

SEQ ID NO: 338722 - RNA, 19 nt, Homo sapiens
  misc_RNA (1)...(19): siRNA sense strand
ugaaugagcaugauuuuga

SEQ ID NO: 338723 - RNA, 19 nt, Homo sapiens
  misc_RNA (1)...(19): siRNA sense strand
ggcuagaaaucuguugcua

SEQ ID NO: 338724 - RNA, 19 nt, Homo sapiens
  misc_RNA (1)...(19): siRNA sense strand
ugaaacaagcgucucugaa

SEQ ID NO: 338725 - RNA, 19 nt, Homo sapiens
  misc_RNA (1)...(19): siRNA sense strand
aacauaaccugauaaagcu

SEQ ID NO: 338726 - RNA, 19 nt, Homo sapiens
  misc_RNA (1)...(19): siRNA sense strand
ugacccagucuauuaaaga

SEQ ID NO: 338727 - RNA, 19 nt, Homo sapiens
  misc_RNA (1)...(19): siRNA sense strand
gaacuagaagcuguguuag

SEQ ID NO: 338728 - RNA, 19 nt, Homo sapiens
  misc_RNA (1)...(19): siRNA sense strand
gugaaacaagcgucucuga

SEQ ID NO: 338729 - RNA, 19 nt, Homo sapiens
  misc_RNA (1)...(19): siRNA sense strand
ccaacaugcccacagauca

SEQ ID NO: 338730 - RNA, 19 nt, Homo sapiens
  misc_RNA (1)...(19): siRNA sense strand
uaugggcccuucaccaaca

SEQ ID NO: 338731 - RNA, 19 nt, Homo sapiens
  misc_RNA (1)...(19): siRNA sense strand
guccaaagcgagcaagaga

SEQ ID NO: 338732 - RNA, 19 nt, Homo sapiens
  misc_RNA (1)...(19): siRNA sense strand
cagaacaaagcacaucaga

SEQ ID NO: 338733 - RNA, 19 nt, Homo sapiens
  misc_RNA (1)...(19): siRNA sense strand
ccugcgaaauccagaacaa

SEQ ID NO: 338734 - RNA, 19 nt, Homo sapiens
  misc_RNA (1)...(19): siRNA sense strand
gaaaccaccaagguccaaa

SEQ ID NO: 338735 - RNA, 19 nt, Homo sapiens
  misc_RNA (1)...(19): siRNA sense strand
gauaaagcuccagcaggaa

SEQ ID NO: 338736 - RNA, 19 nt, Homo sapiens
  misc_RNA (1)...(19): siRNA sense strand
aaggagcuuucaucauuca

SEQ ID NO: 338737 - RNA, 19 nt, Homo sapiens
  misc_RNA (1)...(19): siRNA sense strand
ggugugagagugaaacaag

SEQ ID NO: 338738 - RNA, 19 nt, Homo sapiens
  misc_RNA (1)...(19): siRNA sense strand
gaaauggcugaacuagaag

SEQ ID NO: 338739 - RNA, 19 nt, Homo sapiens
  misc_RNA (1)...(19): siRNA sense strand
auaaagcuccagcaggaaa

SEQ ID NO: 338740 - RNA, 19 nt, Homo sapiens
  misc_RNA (1)...(19): siRNA sense strand
acccuuccaucauaaguga

SEQ ID NO: 338741 - RNA, 19 nt, Homo sapiens
  misc_RNA (1)...(19): siRNA sense strand
ggugacccagucuauuaaa

SEQ ID NO: 338742 - RNA, 19 nt, Homo sapiens
  misc_RNA (1)...(19): siRNA sense strand
cccagucuauuaaagaaag

SEQ ID NO: 338743 - RNA, 19 nt, Homo sapiens
  misc_RNA (1)...(19): siRNA sense strand
caucugggugugagaguga

SEQ ID NO: 338744 - RNA, 19 nt, Homo sapiens
  misc_RNA (1)...(19): siRNA sense strand
ccagucuauuaaagaaaga

SEQ ID NO: 338745 - RNA, 19 nt, Homo sapiens
  misc_RNA (1)...(19): siRNA sense strand
cgaaauccagaacaaagca

SEQ ID NO: 338746 - RNA, 19 nt, Homo sapiens
  misc_RNA (1)...(19): siRNA sense strand
aagagaaucccaggacaga

SEQ ID NO: 338747 - RNA, 19 nt, Homo sapiens
  misc_RNA (1)...(19): siRNA sense strand
gauguggucaauggaagaa

SEQ ID NO: 338748 - RNA, 19 nt, Homo sapiens
  misc_RNA (1)...(19): siRNA sense strand
ggaccugcgaaauccagaa

SEQ ID NO: 338749 - RNA, 19 nt, Homo sapiens
  misc_RNA (1)...(19): siRNA sense strand
gagcaugauuuugaaguca

SEQ ID NO: 338750 - RNA, 19 nt, Homo sapiens
  misc_RNA (1)...(19): siRNA sense strand
gugacccagucuauuaaag

SEQ ID NO: 338751 - RNA, 19 nt, Homo sapiens
  misc_RNA (1)...(19): siRNA sense strand
agaacaaagcacaucagaa

SEQ ID NO: 338752 - RNA, 19 nt, Homo sapiens
  misc_RNA (1)...(19): siRNA sense strand
uggaagaaaccaccaaggu

SEQ ID NO: 338753 - RNA, 19 nt, Homo sapiens
  misc_RNA (1)...(19): siRNA sense strand
ucaacuggaauggauggua

SEQ ID NO: 338754 - RNA, 19 nt, Homo sapiens
  misc_RNA (1)...(19): siRNA sense strand
ggaaauggcugaacuagaa

SEQ ID NO: 338755 - RNA, 19 nt, Homo sapiens
  misc_RNA (1)...(19): siRNA sense strand
gaacaaagcacaucagaaa

SEQ ID NO: 338756 - RNA, 19 nt, Homo sapiens
  misc_RNA (1)...(19): siRNA sense strand
cagcuacccuuccaucaua

SEQ ID NO: 338757 - RNA, 19 nt, Homo sapiens
  misc_RNA (1)...(19): siRNA sense strand
gggauaccaugcaacauaa

SEQ ID NO: 338758 - RNA, 19 nt, Homo sapiens
  misc_RNA (1)...(19): siRNA sense strand
gaggagauguggucaaugg

SEQ ID NO: 338759 - RNA, 19 nt, Homo sapiens
  misc_RNA (1)...(19): siRNA sense strand
gaaggagcuuucaucauuc

SEQ ID NO: 338760 - RNA, 19 nt, Homo sapiens
  misc_RNA (1)...(19): siRNA sense strand
cuagaaaucuguugcuaug

SEQ ID NO: 338761 - RNA, 19 nt, Homo sapiens
  misc_RNA (1)...(19): siRNA sense strand
gcucagggcuauccucuca

SEQ ID NO: 338762 - RNA, 19 nt, Homo sapiens
  misc_RNA (1)...(19): siRNA sense strand
aaacaagcgucucugaaga

SEQ ID NO: 338763 - RNA, 19 nt, Homo sapiens
  misc_RNA (1)...(19): siRNA sense strand
caacauaaccugauaaagc

SEQ ID NO: 338764 - RNA, 19 nt, Homo sapiens
  misc_RNA (1)...(19): siRNA sense strand
gaaacaagcgucucugaag

SEQ ID NO: 338765 - RNA, 19 nt, Homo sapiens
  misc_RNA (1)...(19): siRNA sense strand
gcagagggauaccaugcaa

SEQ ID NO: 338766 - RNA, 19 nt, Homo sapiens
  misc_RNA (1)...(19): siRNA sense strand
ugaacuagaagcuguguua

SEQ ID NO: 338767 - RNA, 19 nt, Homo sapiens
  misc_RNA (1)...(19): siRNA sense strand
gagaaucccaggacagaaa

SEQ ID NO: 338768 - RNA, 19 nt, Homo sapiens
  misc_RNA (1)...(19): siRNA sense strand
gcccacagaucaacuggaa

SEQ ID NO: 338769 - RNA, 19 nt, Homo sapiens
  misc_RNA (1)...(19): siRNA sense strand
gaagacugcucagggcuau

SEQ ID NO: 338770 - RNA, 19 nt, Homo sapiens
  misc_RNA (1)...(19): siRNA sense strand
gacccagucuauuaaagaa

SEQ ID NO: 338771 - RNA, 19 nt, Homo sapiens
  misc_RNA (1)...(19): siRNA sense strand
acuagaagcuguguuagaa

SEQ ID NO: 338772 - RNA, 19 nt, Homo sapiens
  misc_RNA (1)...(19): siRNA sense strand
caugcaacauaaccugaua

SEQ ID NO: 338773 - RNA, 19 nt, Homo sapiens
  misc_RNA (1)...(19): siRNA sense strand
gcuggacaccuaccugaua

SEQ ID NO: 338774 - RNA, 19 nt, Homo sapiens
  misc_RNA (1)...(19): siRNA sense strand
cagaucaacuggaauggau

SEQ ID NO: 338775 - RNA, 19 nt, Homo sapiens
  misc_RNA (1)...(19): siRNA sense strand
gcaggaaauggcugaacua

SEQ ID NO: 338776 - RNA, 19 nt, Homo sapiens
  misc_RNA (1)...(19): siRNA sense strand
ccacagaucaacuggaaug

SEQ ID NO: 338777 - RNA, 19 nt, Homo sapiens
  misc_RNA (1)...(19): siRNA sense strand
caacaugcccacagaucaa

SEQ ID NO: 338778 - RNA, 19 nt, Homo sapiens
  misc_RNA (1)...(19): siRNA sense strand
ucaccaacaugcccacaga

SEQ ID NO: 338779 - RNA, 19 nt, Homo sapiens
  misc_RNA (1)...(19): siRNA sense strand
cagaggagauguggucaau

SEQ ID NO: 338780 - RNA, 19 nt, Homo sapiens
  misc_RNA (1)...(19): siRNA sense strand
caauugggcagauguguga

SEQ ID NO: 338781 - RNA, 19 nt, Homo sapiens
  misc_RNA (1)...(19): siRNA sense strand
ggagauguggucaauggaa

SEQ ID NO: 338782 - RNA, 19 nt, Homo sapiens
  misc_RNA (1)...(19): siRNA sense strand
guacagcuguguggugcuu

SEQ ID NO: 338783 - RNA, 19 nt, Homo sapiens
  misc_RNA (1)...(19): siRNA sense strand
ccaaagcgagcaagagaau

SEQ ID NO: 338784 - RNA, 19 nt, Homo sapiens
  misc_RNA (1)...(19): siRNA sense strand
gcuaugggcccuucaccaa

SEQ ID NO: 338785 - RNA, 19 nt, Homo sapiens
  misc_RNA (1)...(19): siRNA sense strand
gaaugagcaugauuuugaa

SEQ ID NO: 338786 - RNA, 19 nt, Homo sapiens
  misc_RNA (1)...(19): siRNA sense strand
ucagggcuauccucucaga

SEQ ID NO: 338787 - RNA, 19 nt, Homo sapiens
  misc_RNA (1)...(19): siRNA sense strand
agggauaccaugcaacaua

SEQ ID NO: 338788 - RNA, 19 nt, Homo sapiens
  misc_RNA (1)...(19): siRNA sense strand
gcuagaaaucuguugcuau

SEQ ID NO: 338789 - RNA, 19 nt, Homo sapiens
  misc_RNA (1)...(19): siRNA sense strand
ugaaugagcaugauuuuga

SEQ ID NO: 338790 - RNA, 19 nt, Homo sapiens
  misc_RNA (1)...(19): siRNA sense strand
ggcuagaaaucuguugcua

SEQ ID NO: 338791 - RNA, 19 nt, Homo sapiens
  misc_RNA (1)...(19): siRNA sense strand
ugaaacaagcgucucugaa

SEQ ID NO: 338792 - RNA, 19 nt, Homo sapiens
  misc_RNA (1)...(19): siRNA sense strand
aacauaaccugauaaagcu

SEQ ID NO: 338793 - RNA, 19 nt, Homo sapiens
  misc_RNA (1)...(19): siRNA sense strand
ugacccagucuauuaaaga

SEQ ID NO: 338794 - RNA, 19 nt, Homo sapiens
  misc_RNA (1)...(19): siRNA sense strand
gaacuagaagcuguguuag

SEQ ID NO: 338795 - RNA, 19 nt, Homo sapiens
  misc_RNA (1)...(19): siRNA sense strand
gugaaacaagcgucucuga

SEQ ID NO: 338796 - RNA, 19 nt, Homo sapiens
  misc_RNA (1)...(19): siRNA sense strand
ccaacaugcccacagauca

SEQ ID NO: 338797 - RNA, 19 nt, Homo sapiens
  misc_RNA (1)...(19): siRNA sense strand
uaugggcccuucaccaaca

SEQ ID NO: 338798 - RNA, 19 nt, Homo sapiens
  misc_RNA (1)...(19): siRNA sense strand
guccaaagcgagcaagaga

SEQ ID NO: 338799 - RNA, 19 nt, Homo sapiens
  misc_RNA (1)...(19): siRNA sense strand
cagaacaaagcacaucaga

SEQ ID NO: 338800 - RNA, 19 nt, Homo sapiens
  misc_RNA (1)...(19): siRNA sense strand
ccugcgaaauccagaacaa

SEQ ID NO: 338801 - RNA, 19 nt, Homo sapiens
  misc_RNA (1)...(19): siRNA sense strand
gaaaccaccaagguccaaa

SEQ ID NO: 338802 - RNA, 19 nt, Homo sapiens
  misc_RNA (1)...(19): siRNA sense strand
gauaaagcuccagcaggaa

SEQ ID NO: 338803 - RNA, 19 nt, Homo sapiens
  misc_RNA (1)...(19): siRNA sense strand
aaggagcuuucaucauuca

SEQ ID NO: 338804 - RNA, 19 nt, Homo sapiens
  misc_RNA (1)...(19): siRNA sense strand
ggugugagagugaaacaag

SEQ ID NO: 338805 - RNA, 19 nt, Homo sapiens
  misc_RNA (1)...(19): siRNA sense strand
gaaauggcugaacuagaag

SEQ ID NO: 338806 - RNA, 19 nt, Homo sapiens
  misc_RNA (1)...(19): siRNA sense strand
auaaagcuccagcaggaaa

SEQ ID NO: 338807 - RNA, 19 nt, Homo sapiens
  misc_RNA (1)...(19): siRNA sense strand
acccuuccaucauaaguga

SEQ ID NO: 338808 - RNA, 19 nt, Homo sapiens
  misc_RNA (1)...(19): siRNA sense strand
ggugacccagucuauuaaa

SEQ ID NO: 338809 - RNA, 19 nt, Homo sapiens
  misc_RNA (1)...(19): siRNA sense strand
cccagucuauuaaagaaag

SEQ ID NO: 338810 - RNA, 19 nt, Homo sapiens
  misc_RNA (1)...(19): siRNA sense strand
caucugggugugagaguga

SEQ ID NO: 338811 - RNA, 19 nt, Homo sapiens
  misc_RNA (1)...(19): siRNA sense strand
ccagucuauuaaagaaaga

SEQ ID NO: 338812 - RNA, 19 nt, Homo sapiens
  misc_RNA (1)...(19): siRNA sense strand
cgaaauccagaacaaagca

SEQ ID NO: 338813 - RNA, 19 nt, Homo sapiens
  misc_RNA (1)...(19): siRNA sense strand
aagagaaucccaggacaga

SEQ ID NO: 338814 - RNA, 19 nt, Homo sapiens
  misc_RNA (1)...(19): siRNA sense strand
gauguggucaauggaagaa

SEQ ID NO: 338815 - RNA, 19 nt, Homo sapiens
  misc_RNA (1)...(19): siRNA sense strand
ggaccugcgaaauccagaa

SEQ ID NO: 338816 - RNA, 19 nt, Homo sapiens
  misc_RNA (1)...(19): siRNA sense strand
gagcaugauuuugaaguca

SEQ ID NO: 338817 - RNA, 19 nt, Homo sapiens
  misc_RNA (1)...(19): siRNA sense strand
gugacccagucuauuaaag

SEQ ID NO: 338818 - RNA, 19 nt, Homo sapiens
  misc_RNA (1)...(19): siRNA sense strand
agaacaaagcacaucagaa

SEQ ID NO: 338819 - RNA, 19 nt, Homo sapiens
  misc_RNA (1)...(19): siRNA sense strand
uggaagaaaccaccaaggu

SEQ ID NO: 338820 - RNA, 19 nt, Homo sapiens
  misc_RNA (1)...(19): siRNA sense strand
ucaacuggaauggauggua

SEQ ID NO: 338821 - RNA, 19 nt, Homo sapiens
  misc_RNA (1)...(19): siRNA sense strand
ggaaauggcugaacuagaa

SEQ ID NO: 338822 - RNA, 19 nt, Homo sapiens
  misc_RNA (1)...(19): siRNA sense strand
gaacaaagcacaucagaaa

SEQ ID NO: 338823 - RNA, 19 nt, Homo sapiens
  misc_RNA (1)...(19): siRNA sense strand
cagcuacccuuccaucaua

SEQ ID NO: 338824 - RNA, 19 nt, Homo sapiens
  misc_RNA (1)...(19): siRNA sense strand
gggauaccaugcaacauaa

SEQ ID NO: 338825 - RNA, 19 nt, Homo sapiens
  misc_RNA (1)...(19): siRNA sense strand
gaggagauguggucaaugg

SEQ ID NO: 338826 - RNA, 19 nt, Homo sapiens
  misc_RNA (1)...(19): siRNA sense strand
gaaggagcuuucaucauuc

SEQ ID NO: 338827 - RNA, 19 nt, Homo sapiens
  misc_RNA (1)...(19): siRNA sense strand
cuagaaaucuguugcuaug

SEQ ID NO: 338828 - RNA, 19 nt, Homo sapiens
  misc_RNA (1)...(19): siRNA sense strand
gcucagggcuauccucuca

SEQ ID NO: 338829 - RNA, 19 nt, Homo sapiens
  misc_RNA (1)...(19): siRNA sense strand
aaacaagcgucucugaaga

SEQ ID NO: 338830 - RNA, 19 nt, Homo sapiens
  misc_RNA (1)...(19): siRNA sense strand
caacauaaccugauaaagc

SEQ ID NO: 338831 - RNA, 19 nt, Homo sapiens
  misc_RNA (1)...(19): siRNA sense strand
gaaacaagcgucucugaag

SEQ ID NO: 338832 - RNA, 19 nt, Homo sapiens
  misc_RNA (1)...(19): siRNA sense strand
gcagagggauaccaugcaa

SEQ ID NO: 338833 - RNA, 19 nt, Homo sapiens
  misc_RNA (1)...(19): siRNA sense strand
ugaacuagaagcuguguua

SEQ ID NO: 338834 - RNA, 19 nt, Homo sapiens
  misc_RNA (1)...(19): siRNA sense strand
gagaaucccaggacagaaa

SEQ ID NO: 338835 - RNA, 19 nt, Homo sapiens
  misc_RNA (1)...(19): siRNA sense strand
gcccacagaucaacuggaa

SEQ ID NO: 338836 - RNA, 19 nt, Homo sapiens
  misc_RNA (1)...(19): siRNA sense strand
gaagacugcucagggcuau

SEQ ID NO: 338837 - RNA, 19 nt, Homo sapiens
  misc_RNA (1)...(19): siRNA sense strand
gacccagucuauuaaagaa

SEQ ID NO: 338838 - RNA, 19 nt, Homo sapiens
  misc_RNA (1)...(19): siRNA sense strand
acuagaagcuguguuagaa

SEQ ID NO: 338839 - RNA, 19 nt, Homo sapiens
  misc_RNA (1)...(19): siRNA sense strand
caugcaacauaaccugaua

SEQ ID NO: 338840 - RNA, 19 nt, Homo sapiens
  misc_RNA (1)...(19): siRNA sense strand
gcuggacaccuaccugaua

SEQ ID NO: 338841 - RNA, 19 nt, Homo sapiens
  misc_RNA (1)...(19): siRNA sense strand
cagaucaacuggaauggau

SEQ ID NO: 338842 - RNA, 19 nt, Homo sapiens
  misc_RNA (1)...(19): siRNA sense strand
gcaggaaauggcugaacua

SEQ ID NO: 338843 - RNA, 19 nt, Homo sapiens
  misc_RNA (1)...(19): siRNA sense strand
ccacagaucaacuggaaug

SEQ ID NO: 338844 - RNA, 19 nt, Homo sapiens
  misc_RNA (1)...(19): siRNA sense strand
caacaugcccacagaucaa

SEQ ID NO: 338845 - RNA, 19 nt, Homo sapiens
  misc_RNA (1)...(19): siRNA sense strand
ucaccaacaugcccacaga

SEQ ID NO: 338846 - RNA, 19 nt, Homo sapiens
  misc_RNA (1)...(19): siRNA sense strand
cagaggagauguggucaau

SEQ ID NO: 338847 - RNA, 19 nt, Homo sapiens
  misc_RNA (1)...(19): siRNA sense strand
caauugggcagauguguga

SEQ ID NO: 338848 - RNA, 19 nt, Homo sapiens
  misc_RNA (1)...(19): siRNA sense strand
ggagauguggucaauggaa

SEQ ID NO: 338849 - RNA, 19 nt, Homo sapiens
  misc_RNA (1)...(19): siRNA sense strand
guacagcuguguggugcuu

SEQ ID NO: 338850 - RNA, 19 nt, Homo sapiens
  misc_RNA (1)...(19): siRNA sense strand
ccaaagcgagcaagagaau

SEQ ID NO: 338851 - RNA, 19 nt, Homo sapiens
  misc_RNA (1)...(19): siRNA sense strand
gcuaugggcccuucaccaa

SEQ ID NO: 338852 - RNA, 19 nt, Homo sapiens
  misc_RNA (1)...(19): siRNA sense strand
gaaugagcaugauuuugaa

SEQ ID NO: 338853 - RNA, 19 nt, Homo sapiens
  misc_RNA (1)...(19): siRNA sense strand
ucagggcuauccucucaga

SEQ ID NO: 338854 - RNA, 19 nt, Homo sapiens
  misc_RNA (1)...(19): siRNA sense strand
agggauaccaugcaacaua

SEQ ID NO: 338855 - RNA, 19 nt, Homo sapiens
  misc_RNA (1)...(19): siRNA sense strand
gcuagaaaucuguugcuau

SEQ ID NO: 338856 - RNA, 19 nt, Homo sapiens
  misc_RNA (1)...(19): siRNA sense strand
ugaaugagcaugauuuuga

SEQ ID NO: 338857 - RNA, 19 nt, Homo sapiens
  misc_RNA (1)...(19): siRNA sense strand
ggcuagaaaucuguugcua

SEQ ID NO: 338858 - RNA, 19 nt, Homo sapiens
  misc_RNA (1)...(19): siRNA sense strand
ugaaacaagcgucucugaa

SEQ ID NO: 338859 - RNA, 19 nt, Homo sapiens
  misc_RNA (1)...(19): siRNA sense strand
aacauaaccugauaaagcu

SEQ ID NO: 338860 - RNA, 19 nt, Homo sapiens
  misc_RNA (1)...(19): siRNA sense strand
ugacccagucuauuaaaga

SEQ ID NO: 338861 - RNA, 19 nt, Homo sapiens
  misc_RNA (1)...(19): siRNA sense strand
gaacuagaagcuguguuag

SEQ ID NO: 338862 - RNA, 19 nt, Homo sapiens
  misc_RNA (1)...(19): siRNA sense strand
gugaaacaagcgucucuga

SEQ ID NO: 338863 - RNA, 19 nt, Homo sapiens
  misc_RNA (1)...(19): siRNA sense strand
ccaacaugcccacagauca

SEQ ID NO: 338864 - RNA, 19 nt, Homo sapiens
  misc_RNA (1)...(19): siRNA sense strand
uaugggcccuucaccaaca

SEQ ID NO: 338865 - RNA, 19 nt, Homo sapiens
  misc_RNA (1)...(19): siRNA sense strand
guccaaagcgagcaagaga

SEQ ID NO: 338866 - RNA, 19 nt, Homo sapiens
  misc_RNA (1)...(19): siRNA sense strand
cagaacaaagcacaucaga

SEQ ID NO: 338867 - RNA, 19 nt, Homo sapiens
  misc_RNA (1)...(19): siRNA sense strand
ccugcgaaauccagaacaa

SEQ ID NO: 338868 - RNA, 19 nt, Homo sapiens
  misc_RNA (1)...(19): siRNA sense strand
gaaaccaccaagguccaaa

SEQ ID NO: 338869 - RNA, 19 nt, Homo sapiens
  misc_RNA (1)...(19): siRNA sense strand
gauaaagcuccagcaggaa

SEQ ID NO: 338870 - RNA, 19 nt, Homo sapiens
  misc_RNA (1)...(19): siRNA sense strand
aaggagcuuucaucauuca

SEQ ID NO: 338871 - RNA, 19 nt, Homo sapiens
  misc_RNA (1)...(19): siRNA sense strand
ggugugagagugaaacaag

SEQ ID NO: 338872 - RNA, 19 nt, Homo sapiens
  misc_RNA (1)...(19): siRNA sense strand
gaaauggcugaacuagaag

SEQ ID NO: 338873 - RNA, 19 nt, Homo sapiens
  misc_RNA (1)...(19): siRNA sense strand
auaaagcuccagcaggaaa

SEQ ID NO: 338874 - RNA, 19 nt, Homo sapiens
  misc_RNA (1)...(19): siRNA sense strand
acccuuccaucauaaguga

SEQ ID NO: 338875 - RNA, 19 nt, Homo sapiens
  misc_RNA (1)...(19): siRNA sense strand
ggugacccagucuauuaaa

SEQ ID NO: 338876 - RNA, 19 nt, Homo sapiens
  misc_RNA (1)...(19): siRNA sense strand
cccagucuauuaaagaaag

SEQ ID NO: 338877 - RNA, 19 nt, Homo sapiens
  misc_RNA (1)...(19): siRNA sense strand
caucugggugugagaguga

SEQ ID NO: 338878 - RNA, 19 nt, Homo sapiens
  misc_RNA (1)...(19): siRNA sense strand
ccagucuauuaaagaaaga

SEQ ID NO: 338879 - RNA, 19 nt, Homo sapiens
  misc_RNA (1)...(19): siRNA sense strand
cgaaauccagaacaaagca

SEQ ID NO: 338880 - RNA, 19 nt, Homo sapiens
  misc_RNA (1)...(19): siRNA sense strand
aagagaaucccaggacaga

SEQ ID NO: 338881 - RNA, 19 nt, Homo sapiens
  misc_RNA (1)...(19): siRNA sense strand
gauguggucaauggaagaa

SEQ ID NO: 338882 - RNA, 19 nt, Homo sapiens
  misc_RNA (1)...(19): siRNA sense strand
ggaccugcgaaauccagaa

SEQ ID NO: 338883 - RNA, 19 nt, Homo sapiens
  misc_RNA (1)...(19): siRNA sense strand
gagcaugauuuugaaguca

SEQ ID NO: 338884 - RNA, 19 nt, Homo sapiens
  misc_RNA (1)...(19): siRNA sense strand
gugacccagucuauuaaag

SEQ ID NO: 338885 - RNA, 19 nt, Homo sapiens
  misc_RNA (1)...(19): siRNA sense strand
agaacaaagcacaucagaa

SEQ ID NO: 338886 - RNA, 19 nt, Homo sapiens
  misc_RNA (1)...(19): siRNA sense strand
uggaagaaaccaccaaggu

SEQ ID NO: 338887 - RNA, 19 nt, Homo sapiens
  misc_RNA (1)...(19): siRNA sense strand
ucaacuggaauggauggua

SEQ ID NO: 338888 - RNA, 19 nt, Homo sapiens
  misc_RNA (1)...(19): siRNA sense strand
ggaaauggcugaacuagaa

SEQ ID NO: 338889 - RNA, 19 nt, Homo sapiens
  misc_RNA (1)...(19): siRNA sense strand
gaacaaagcacaucagaaa

SEQ ID NO: 338890 - RNA, 19 nt, Homo sapiens
  misc_RNA (1)...(19): siRNA sense strand
cagcuacccuuccaucaua

SEQ ID NO: 338891 - RNA, 19 nt, Homo sapiens
  misc_RNA (1)...(19): siRNA sense strand
gggauaccaugcaacauaa

SEQ ID NO: 338892 - RNA, 19 nt, Homo sapiens
  misc_RNA (1)...(19): siRNA sense strand
gaggagauguggucaaugg

SEQ ID NO: 338893 - RNA, 19 nt, Homo sapiens
  misc_RNA (1)...(19): siRNA sense strand
gaaggagcuuucaucauuc

SEQ ID NO: 338894 - RNA, 19 nt, Homo sapiens
  misc_RNA (1)...(19): siRNA sense strand
cuagaaaucuguugcuaug

SEQ ID NO: 338895 - RNA, 19 nt, Homo sapiens
  misc_RNA (1)...(19): siRNA sense strand
gcucagggcuauccucuca

SEQ ID NO: 338896 - RNA, 19 nt, Homo sapiens
  misc_RNA (1)...(19): siRNA sense strand
aaacaagcgucucugaaga

SEQ ID NO: 338897 - RNA, 19 nt, Homo sapiens
  misc_RNA (1)...(19): siRNA sense strand
caacauaaccugauaaagc

SEQ ID NO: 338898 - RNA, 19 nt, Homo sapiens
  misc_RNA (1)...(19): siRNA sense strand
gaaacaagcgucucugaag

SEQ ID NO: 338899 - RNA, 19 nt, Homo sapiens
  misc_RNA (1)...(19): siRNA sense strand
gcagagggauaccaugcaa

SEQ ID NO: 338900 - RNA, 19 nt, Homo sapiens
  misc_RNA (1)...(19): siRNA sense strand
ugaacuagaagcuguguua

SEQ ID NO: 338901 - RNA, 19 nt, Homo sapiens
  misc_RNA (1)...(19): siRNA sense strand
gagaaucccaggacagaaa

SEQ ID NO: 338902 - RNA, 19 nt, Homo sapiens
  misc_RNA (1)...(19): siRNA sense strand
gcccacagaucaacuggaa

SEQ ID NO: 338903 - RNA, 19 nt, Homo sapiens
  misc_RNA (1)...(19): siRNA sense strand
gaagacugcucagggcuau

SEQ ID NO: 338904 - RNA, 19 nt, Homo sapiens
  misc_RNA (1)...(19): siRNA sense strand
gacccagucuauuaaagaa

SEQ ID NO: 338905 - RNA, 19 nt, Homo sapiens
  misc_RNA (1)...(19): siRNA sense strand
acuagaagcuguguuagaa

SEQ ID NO: 338906 - RNA, 19 nt, Homo sapiens
  misc_RNA (1)...(19): siRNA sense strand
caugcaacauaaccugaua

SEQ ID NO: 338907 - RNA, 19 nt, Homo sapiens
  misc_RNA (1)...(19): siRNA sense strand
gcuggacaccuaccugaua

SEQ ID NO: 338908 - RNA, 19 nt, Homo sapiens
  misc_RNA (1)...(19): siRNA sense strand
cagaucaacuggaauggau

SEQ ID NO: 338909 - RNA, 19 nt, Homo sapiens
  misc_RNA (1)...(19): siRNA sense strand
gcaggaaauggcugaacua

SEQ ID NO: 338910 - RNA, 19 nt, Homo sapiens
  misc_RNA (1)...(19): siRNA sense strand
ccacagaucaacuggaaug

SEQ ID NO: 338911 - RNA, 19 nt, Homo sapiens
  misc_RNA (1)...(19): siRNA sense strand
caacaugcccacagaucaa

SEQ ID NO: 338912 - RNA, 19 nt, Homo sapiens
  misc_RNA (1)...(19): siRNA sense strand
ucaccaacaugcccacaga

SEQ ID NO: 338913 - RNA, 19 nt, Homo sapiens
  misc_RNA (1)...(19): siRNA sense strand
cagaggagauguggucaau

SEQ ID NO: 338914 - RNA, 19 nt, Homo sapiens
  misc_RNA (1)...(19): siRNA sense strand
caauugggcagauguguga

SEQ ID NO: 338915 - RNA, 19 nt, Homo sapiens
  misc_RNA (1)...(19): siRNA sense strand
ggagauguggucaauggaa

SEQ ID NO: 338916 - RNA, 19 nt, Homo sapiens
  misc_RNA (1)...(19): siRNA sense strand
guacagcuguguggugcuu

SEQ ID NO: 338917 - RNA, 19 nt, Homo sapiens
  misc_RNA (1)...(19): siRNA sense strand
ccaaagcgagcaagagaau

SEQ ID NO: 338918 - RNA, 19 nt, Homo sapiens
  misc_RNA (1)...(19): siRNA sense strand
gcuaugggcccuucaccaa

SEQ ID NO: 338919 - RNA, 19 nt, Homo sapiens
  misc_RNA (1)...(19): siRNA sense strand
gaaugagcaugauuuugaa

SEQ ID NO: 338920 - RNA, 19 nt, Homo sapiens
  misc_RNA (1)...(19): siRNA sense strand
ucagggcuauccucucaga

SEQ ID NO: 338921 - RNA, 19 nt, Homo sapiens
  misc_RNA (1)...(19): siRNA sense strand
agggauaccaugcaacaua

SEQ ID NO: 338922 - RNA, 19 nt, Homo sapiens
  misc_RNA (1)...(19): siRNA sense strand
gcuagaaaucuguugcuau

SEQ ID NO: 338923 - RNA, 19 nt, Homo sapiens
  misc_RNA (1)...(19): siRNA sense strand
ugaaugagcaugauuuuga

SEQ ID NO: 338924 - RNA, 19 nt, Homo sapiens
  misc_RNA (1)...(19): siRNA sense strand
ggcuagaaaucuguugcua

SEQ ID NO: 338925 - RNA, 19 nt, Homo sapiens
  misc_RNA (1)...(19): siRNA sense strand
ugaaacaagcgucucugaa

SEQ ID NO: 338926 - RNA, 19 nt, Homo sapiens
  misc_RNA (1)...(19): siRNA sense strand
aacauaaccugauaaagcu

SEQ ID NO: 338927 - RNA, 19 nt, Homo sapiens
  misc_RNA (1)...(19): siRNA sense strand
ugacccagucuauuaaaga

SEQ ID NO: 338928 - RNA, 19 nt, Homo sapiens
  misc_RNA (1)...(19): siRNA sense strand
gaacuagaagcuguguuag

SEQ ID NO: 338929 - RNA, 19 nt, Homo sapiens
  misc_RNA (1)...(19): siRNA sense strand
gugaaacaagcgucucuga

SEQ ID NO: 338930 - RNA, 19 nt, Homo sapiens
  misc_RNA (1)...(19): siRNA sense strand
ccaacaugcccacagauca

SEQ ID NO: 338931 - RNA, 19 nt, Homo sapiens
  misc_RNA (1)...(19): siRNA sense strand
uaugggcccuucaccaaca

SEQ ID NO: 338932 - RNA, 19 nt, Homo sapiens
  misc_RNA (1)...(19): siRNA sense strand
guccaaagcgagcaagaga

SEQ ID NO: 338933 - RNA, 19 nt, Homo sapiens
  misc_RNA (1)...(19): siRNA sense strand
cagaacaaagcacaucaga

SEQ ID NO: 338934 - RNA, 19 nt, Homo sapiens
  misc_RNA (1)...(19): siRNA sense strand
ccugcgaaauccagaacaa

SEQ ID NO: 338935 - RNA, 19 nt, Homo sapiens
  misc_RNA (1)...(19): siRNA sense strand
gaaaccaccaagguccaaa

SEQ ID NO: 338936 - RNA, 19 nt, Homo sapiens
  misc_RNA (1)...(19): siRNA sense strand
gauaaagcuccagcaggaa

SEQ ID NO: 338937 - RNA, 19 nt, Homo sapiens
  misc_RNA (1)...(19): siRNA sense strand
aaggagcuuucaucauuca

SEQ ID NO: 338938 - RNA, 19 nt, Homo sapiens
  misc_RNA (1)...(19): siRNA sense strand
ggugugagagugaaacaag

SEQ ID NO: 338939 - RNA, 19 nt, Homo sapiens
  misc_RNA (1)...(19): siRNA sense strand
gaaauggcugaacuagaag

SEQ ID NO: 338940 - RNA, 19 nt, Homo sapiens
  misc_RNA (1)...(19): siRNA sense strand
auaaagcuccagcaggaaa

SEQ ID NO: 338941 - RNA, 19 nt, Homo sapiens
  misc_RNA (1)...(19): siRNA sense strand
acccuuccaucauaaguga

SEQ ID NO: 338942 - RNA, 19 nt, Homo sapiens
  misc_RNA (1)...(19): siRNA sense strand
ggugacccagucuauuaaa

SEQ ID NO: 338943 - RNA, 19 nt, Homo sapiens
  misc_RNA (1)...(19): siRNA sense strand
cccagucuauuaaagaaag

SEQ ID NO: 338944 - RNA, 19 nt, Homo sapiens
  misc_RNA (1)...(19): siRNA sense strand
caucugggugugagaguga

SEQ ID NO: 338945 - RNA, 19 nt, Homo sapiens
  misc_RNA (1)...(19): siRNA sense strand
ccagucuauuaaagaaaga

SEQ ID NO: 338946 - RNA, 19 nt, Homo sapiens
  misc_RNA (1)...(19): siRNA sense strand
cgaaauccagaacaaagca

SEQ ID NO: 338947 - RNA, 19 nt, Homo sapiens
  misc_RNA (1)...(19): siRNA sense strand
aagagaaucccaggacaga

SEQ ID NO: 338948 - RNA, 19 nt, Homo sapiens
  misc_RNA (1)...(19): siRNA sense strand
gauguggucaauggaagaa

SEQ ID NO: 338949 - RNA, 19 nt, Homo sapiens
  misc_RNA (1)...(19): siRNA sense strand
ggaccugcgaaauccagaa

SEQ ID NO: 338950 - RNA, 19 nt, Homo sapiens
  misc_RNA (1)...(19): siRNA sense strand
gagcaugauuuugaaguca

SEQ ID NO: 338951 - RNA, 19 nt, Homo sapiens
  misc_RNA (1)...(19): siRNA sense strand
gugacccagucuauuaaag

SEQ ID NO: 338952 - RNA, 19 nt, Homo sapiens
  misc_RNA (1)...(19): siRNA sense strand
agaacaaagcacaucagaa

SEQ ID NO: 338953 - RNA, 19 nt, Homo sapiens
  misc_RNA (1)...(19): siRNA sense strand
uggaagaaaccaccaaggu

SEQ ID NO: 338954 - RNA, 19 nt, Homo sapiens
  misc_RNA (1)...(19): siRNA sense strand
ucaacuggaauggauggua

SEQ ID NO: 338955 - RNA, 19 nt, Homo sapiens
  misc_RNA (1)...(19): siRNA sense strand
ggaaauggcugaacuagaa

SEQ ID NO: 338956 - RNA, 19 nt, Homo sapiens
  misc_RNA (1)...(19): siRNA sense strand
gaacaaagcacaucagaaa

SEQ ID NO: 338957 - RNA, 19 nt, Homo sapiens
  misc_RNA (1)...(19): siRNA sense strand
cagcuacccuuccaucaua

SEQ ID NO: 338958 - RNA, 19 nt, Homo sapiens
  misc_RNA (1)...(19): siRNA sense strand
gggauaccaugcaacauaa

SEQ ID NO: 338959 - RNA, 19 nt, Homo sapiens
  misc_RNA (1)...(19): siRNA sense strand
gaggagauguggucaaugg

SEQ ID NO: 338960 - RNA, 19 nt, Homo sapiens
  misc_RNA (1)...(19): siRNA sense strand
gaaggagcuuucaucauuc

SEQ ID NO: 338961 - RNA, 19 nt, Homo sapiens
  misc_RNA (1)...(19): siRNA sense strand
cuagaaaucuguugcuaug

SEQ ID NO: 338962 - RNA, 19 nt, Homo sapiens
  misc_RNA (1)...(19): siRNA sense strand
gcucagggcuauccucuca

SEQ ID NO: 338963 - RNA, 19 nt, Homo sapiens
  misc_RNA (1)...(19): siRNA sense strand
aaacaagcgucucugaaga

SEQ ID NO: 338964 - RNA, 19 nt, Homo sapiens
  misc_RNA (1)...(19): siRNA sense strand
caacauaaccugauaaagc

SEQ ID NO: 338965 - RNA, 19 nt, Homo sapiens
  misc_RNA (1)...(19): siRNA sense strand
gaaacaagcgucucugaag

SEQ ID NO: 338966 - RNA, 19 nt, Homo sapiens
  misc_RNA (1)...(19): siRNA sense strand
gcagagggauaccaugcaa

SEQ ID NO: 338967 - RNA, 19 nt, Homo sapiens
  misc_RNA (1)...(19): siRNA sense strand
ugaacuagaagcuguguua

SEQ ID NO: 338968 - RNA, 19 nt, Homo sapiens
  misc_RNA (1)...(19): siRNA sense strand
gagaaucccaggacagaaa

SEQ ID NO: 338969 - RNA, 19 nt, Homo sapiens
  misc_RNA (1)...(19): siRNA sense strand
gcccacagaucaacuggaa

SEQ ID NO: 338970 - RNA, 19 nt, Homo sapiens
  misc_RNA (1)...(19): siRNA sense strand
gaagacugcucagggcuau

SEQ ID NO: 338971 - RNA, 19 nt, Homo sapiens
  misc_RNA (1)...(19): siRNA sense strand
gacccagucuauuaaagaa

SEQ ID NO: 338972 - RNA, 19 nt, Homo sapiens
  misc_RNA (1)...(19): siRNA sense strand
acuagaagcuguguuagaa

SEQ ID NO: 338973 - RNA, 19 nt, Homo sapiens
  misc_RNA (1)...(19): siRNA sense strand
caugcaacauaaccugaua

SEQ ID NO: 338974 - RNA, 19 nt, Homo sapiens
  misc_RNA (1)...(19): siRNA sense strand
gcuggacaccuaccugaua

SEQ ID NO: 338975 - RNA, 19 nt, Homo sapiens
  misc_RNA (1)...(19): siRNA sense strand
cagaucaacuggaauggau

SEQ ID NO: 338976 - RNA, 19 nt, Homo sapiens
  misc_RNA (1)...(19): siRNA sense strand
gcaggaaauggcugaacua

SEQ ID NO: 338977 - RNA, 19 nt, Homo sapiens
  misc_RNA (1)...(19): siRNA sense strand
ccacagaucaacuggaaug

SEQ ID NO: 338978 - RNA, 19 nt, Homo sapiens
  misc_RNA (1)...(19): siRNA sense strand
caacaugcccacagaucaa

SEQ ID NO: 338979 - RNA, 19 nt, Homo sapiens
  misc_RNA (1)...(19): siRNA sense strand
ucaccaacaugcccacaga

SEQ ID NO: 338980 - RNA, 19 nt, Homo sapiens
  misc_RNA (1)...(19): siRNA sense strand
cagaggagauguggucaau

SEQ ID NO: 338981 - RNA, 19 nt, Homo sapiens
  misc_RNA (1)...(19): siRNA sense strand
caauugggcagauguguga

SEQ ID NO: 338982 - RNA, 19 nt, Homo sapiens
  misc_RNA (1)...(19): siRNA sense strand
ggagauguggucaauggaa

SEQ ID NO: 338983 - RNA, 19 nt, Homo sapiens
  misc_RNA (1)...(19): siRNA sense strand
guacagcuguguggugcuu

SEQ ID NO: 338984 - RNA, 19 nt, Homo sapiens
  misc_RNA (1)...(19): siRNA sense strand
ccaaagcgagcaagagaau

SEQ ID NO: 338985 - RNA, 19 nt, Homo sapiens
  misc_RNA (1)...(19): siRNA sense strand
gcuaugggcccuucaccaa

SEQ ID NO: 338986 - RNA, 19 nt, Homo sapiens
  misc_RNA (1)...(19): siRNA sense strand
gaaugagcaugauuuugaa

SEQ ID NO: 338987 - RNA, 19 nt, Homo sapiens
  misc_RNA (1)...(19): siRNA sense strand
ucagggcuauccucucaga

SEQ ID NO: 338988 - RNA, 19 nt, Homo sapiens
  misc_RNA (1)...(19): siRNA sense strand
agggauaccaugcaacaua

SEQ ID NO: 338989 - RNA, 19 nt, Homo sapiens
  misc_RNA (1)...(19): siRNA sense strand
gcuagaaaucuguugcuau

SEQ ID NO: 338990 - RNA, 19 nt, Homo sapiens
  misc_RNA (1)...(19): siRNA sense strand
ugaaugagcaugauuuuga

SEQ ID NO: 338991 - RNA, 19 nt, Homo sapiens
  misc_RNA (1)...(19): siRNA sense strand
ggcuagaaaucuguugcua

SEQ ID NO: 338992 - RNA, 19 nt, Homo sapiens
  misc_RNA (1)...(19): siRNA sense strand
ugaaacaagcgucucugaa

SEQ ID NO: 338993 - RNA, 19 nt, Homo sapiens
  misc_RNA (1)...(19): siRNA sense strand
aacauaaccugauaaagcu

SEQ ID NO: 338994 - RNA, 19 nt, Homo sapiens
  misc_RNA (1)...(19): siRNA sense strand
ugacccagucuauuaaaga

SEQ ID NO: 338995 - RNA, 19 nt, Homo sapiens
  misc_RNA (1)...(19): siRNA sense strand
gaacuagaagcuguguuag

SEQ ID NO: 338996 - RNA, 19 nt, Homo sapiens
  misc_RNA (1)...(19): siRNA sense strand
gugaaacaagcgucucuga

SEQ ID NO: 338997 - RNA, 19 nt, Homo sapiens
  misc_RNA (1)...(19): siRNA sense strand
ccaacaugcccacagauca

SEQ ID NO: 338998 - RNA, 19 nt, Homo sapiens
  misc_RNA (1)...(19): siRNA sense strand
uaugggcccuucaccaaca

SEQ ID NO: 338999 - RNA, 19 nt, Homo sapiens
  misc_RNA (1)...(19): siRNA sense strand
guccaaagcgagcaagaga

SEQ ID NO: 339000 - RNA, 19 nt, Homo sapiens
  misc_RNA (1)...(19): siRNA sense strand
cagaacaaagcacaucaga

SEQ ID NO: 339001 - RNA, 19 nt, Homo sapiens
  misc_RNA (1)...(19): siRNA sense strand
ccugcgaaauccagaacaa

SEQ ID NO: 339002 - RNA, 19 nt, Homo sapiens
  misc_RNA (1)...(19): siRNA sense strand
gaaaccaccaagguccaaa

SEQ ID NO: 339003 - RNA, 19 nt, Homo sapiens
  misc_RNA (1)...(19): siRNA sense strand
gauaaagcuccagcaggaa

SEQ ID NO: 339004 - RNA, 19 nt, Homo sapiens
  misc_RNA (1)...(19): siRNA sense strand
aaggagcuuucaucauuca

SEQ ID NO: 339005 - RNA, 19 nt, Homo sapiens
  misc_RNA (1)...(19): siRNA sense strand
ggugugagagugaaacaag

SEQ ID NO: 339006 - RNA, 19 nt, Homo sapiens
  misc_RNA (1)...(19): siRNA sense strand
gaaauggcugaacuagaag

SEQ ID NO: 339007 - RNA, 19 nt, Homo sapiens
  misc_RNA (1)...(19): siRNA sense strand
auaaagcuccagcaggaaa

SEQ ID NO: 339008 - RNA, 19 nt, Homo sapiens
  misc_RNA (1)...(19): siRNA sense strand
acccuuccaucauaaguga

SEQ ID NO: 339009 - RNA, 19 nt, Homo sapiens
  misc_RNA (1)...(19): siRNA sense strand
ggugacccagucuauuaaa

SEQ ID NO: 339010 - RNA, 19 nt, Homo sapiens
  misc_RNA (1)...(19): siRNA sense strand
cccagucuauuaaagaaag

SEQ ID NO: 339011 - RNA, 19 nt, Homo sapiens
  misc_RNA (1)...(19): siRNA sense strand
caucugggugugagaguga

SEQ ID NO: 339012 - RNA, 19 nt, Homo sapiens
  misc_RNA (1)...(19): siRNA sense strand
ccagucuauuaaagaaaga

SEQ ID NO: 339013 - RNA, 19 nt, Homo sapiens
  misc_RNA (1)...(19): siRNA sense strand
cgaaauccagaacaaagca

SEQ ID NO: 339014 - RNA, 19 nt, Homo sapiens
  misc_RNA (1)...(19): siRNA sense strand
aagagaaucccaggacaga

SEQ ID NO: 339015 - RNA, 19 nt, Homo sapiens
  misc_RNA (1)...(19): siRNA sense strand
gauguggucaauggaagaa

SEQ ID NO: 339016 - RNA, 19 nt, Homo sapiens
  misc_RNA (1)...(19): siRNA sense strand
ggaccugcgaaauccagaa

SEQ ID NO: 339017 - RNA, 19 nt, Homo sapiens
  misc_RNA (1)...(19): siRNA sense strand
gagcaugauuuugaaguca

SEQ ID NO: 339018 - RNA, 19 nt, Homo sapiens
  misc_RNA (1)...(19): siRNA sense strand
gugacccagucuauuaaag

SEQ ID NO: 339019 - RNA, 19 nt, Homo sapiens
  misc_RNA (1)...(19): siRNA sense strand
agaacaaagcacaucagaa

SEQ ID NO: 339020 - RNA, 19 nt, Homo sapiens
  misc_RNA (1)...(19): siRNA sense strand
uggaagaaaccaccaaggu

SEQ ID NO: 339021 - RNA, 19 nt, Homo sapiens
  misc_RNA (1)...(19): siRNA sense strand
ucaacuggaauggauggua

SEQ ID NO: 339022 - RNA, 19 nt, Homo sapiens
  misc_RNA (1)...(19): siRNA sense strand
ggaaauggcugaacuagaa

SEQ ID NO: 339023 - RNA, 19 nt, Homo sapiens
  misc_RNA (1)...(19): siRNA sense strand
gaacaaagcacaucagaaa

SEQ ID NO: 339024 - RNA, 19 nt, Homo sapiens
  misc_RNA (1)...(19): siRNA sense strand
cagcuacccuuccaucaua

SEQ ID NO: 339025 - RNA, 19 nt, Homo sapiens
  misc_RNA (1)...(19): siRNA sense strand
gggauaccaugcaacauaa

SEQ ID NO: 339026 - RNA, 19 nt, Homo sapiens
  misc_RNA (1)...(19): siRNA sense strand
gaggagauguggucaaugg

SEQ ID NO: 339027 - RNA, 19 nt, Homo sapiens
  misc_RNA (1)...(19): siRNA sense strand
gaaggagcuuucaucauuc

SEQ ID NO: 339028 - RNA, 19 nt, Homo sapiens
  misc_RNA (1)...(19): siRNA sense strand
cuagaaaucuguugcuaug

SEQ ID NO: 339029 - RNA, 19 nt, Homo sapiens
  misc_RNA (1)...(19): siRNA sense strand
gcucagggcuauccucuca

SEQ ID NO: 339030 - RNA, 19 nt, Homo sapiens
  misc_RNA (1)...(19): siRNA sense strand
aaacaagcgucucugaaga

SEQ ID NO: 339031 - RNA, 19 nt, Homo sapiens
  misc_RNA (1)...(19): siRNA sense strand
caacauaaccugauaaagc

SEQ ID NO: 339032 - RNA, 19 nt, Homo sapiens
  misc_RNA (1)...(19): siRNA sense strand
gaaacaagcgucucugaag

SEQ ID NO: 339033 - RNA, 19 nt, Homo sapiens
  misc_RNA (1)...(19): siRNA sense strand
gcagagggauaccaugcaa

SEQ ID NO: 339034 - RNA, 19 nt, Homo sapiens
  misc_RNA (1)...(19): siRNA sense strand
ugaacuagaagcuguguua

SEQ ID NO: 339035 - RNA, 19 nt, Homo sapiens
  misc_RNA (1)...(19): siRNA sense strand
gagaaucccaggacagaaa

SEQ ID NO: 339036 - RNA, 19 nt, Homo sapiens
  misc_RNA (1)...(19): siRNA sense strand
gcccacagaucaacuggaa

SEQ ID NO: 339037 - RNA, 19 nt, Homo sapiens
  misc_RNA (1)...(19): siRNA sense strand
gaagacugcucagggcuau

SEQ ID NO: 339038 - RNA, 19 nt, Homo sapiens
  misc_RNA (1)...(19): siRNA sense strand
gacccagucuauuaaagaa

SEQ ID NO: 339039 - RNA, 19 nt, Homo sapiens
  misc_RNA (1)...(19): siRNA sense strand
acuagaagcuguguuagaa

SEQ ID NO: 339040 - RNA, 19 nt, Homo sapiens
  misc_RNA (1)...(19): siRNA sense strand
caugcaacauaaccugaua

SEQ ID NO: 339041 - RNA, 19 nt, Homo sapiens
  misc_RNA (1)...(19): siRNA sense strand
gcuggacaccuaccugaua

SEQ ID NO: 339042 - RNA, 19 nt, Homo sapiens
  misc_RNA (1)...(19): siRNA sense strand
cagaucaacuggaauggau

SEQ ID NO: 339043 - RNA, 19 nt, Homo sapiens
  misc_RNA (1)...(19): siRNA sense strand
gcaggaaauggcugaacua

SEQ ID NO: 339044 - RNA, 19 nt, Homo sapiens
  misc_RNA (1)...(19): siRNA sense strand
ccacagaucaacuggaaug

SEQ ID NO: 339045 - RNA, 19 nt, Homo sapiens
  misc_RNA (1)...(19): siRNA sense strand
caacaugcccacagaucaa

SEQ ID NO: 339046 - RNA, 19 nt, Homo sapiens
  misc_RNA (1)...(19): siRNA sense strand
ucaccaacaugcccacaga

SEQ ID NO: 339047 - RNA, 19 nt, Homo sapiens
  misc_RNA (1)...(19): siRNA sense strand
cagaggagauguggucaau

SEQ ID NO: 339048 - RNA, 19 nt, Homo sapiens
  misc_RNA (1)...(19): siRNA sense strand
caauugggcagauguguga

SEQ ID NO: 339049 - RNA, 19 nt, Homo sapiens
  misc_RNA (1)...(19): siRNA sense strand
ggagauguggucaauggaa

SEQ ID NO: 339050 - RNA, 19 nt, Homo sapiens
  misc_RNA (1)...(19): siRNA sense strand
guacagcuguguggugcuu

SEQ ID NO: 339051 - RNA, 19 nt, Homo sapiens
  misc_RNA (1)...(19): siRNA sense strand
ccaaagcgagcaagagaau

SEQ ID NO: 339052 - RNA, 19 nt, Homo sapiens
  misc_RNA (1)...(19): siRNA sense strand
gcuaugggcccuucaccaa

SEQ ID NO: 339053 - RNA, 19 nt, Homo sapiens
  misc_RNA (1)...(19): siRNA sense strand
gaaugagcaugauuuugaa

SEQ ID NO: 339054 - RNA, 19 nt, Homo sapiens
  misc_RNA (1)...(19): siRNA sense strand
ucagggcuauccucucaga

SEQ ID NO: 339055 - RNA, 19 nt, Homo sapiens
  misc_RNA (1)...(19): siRNA sense strand
agggauaccaugcaacaua

SEQ ID NO: 339056 - RNA, 19 nt, Homo sapiens
  misc_RNA (1)...(19): siRNA sense strand
gcuagaaaucuguugcuau

SEQ ID NO: 339057 - RNA, 19 nt, Homo sapiens
  misc_RNA (1)...(19): siRNA sense strand
ugaaugagcaugauuuuga

SEQ ID NO: 339058 - RNA, 19 nt, Homo sapiens
  misc_RNA (1)...(19): siRNA sense strand
ggcuagaaaucuguugcua

SEQ ID NO: 339059 - RNA, 19 nt, Homo sapiens
  misc_RNA (1)...(19): siRNA sense strand
ugaaacaagcgucucugaa

SEQ ID NO: 339060 - RNA, 19 nt, Homo sapiens
  misc_RNA (1)...(19): siRNA sense strand
aacauaaccugauaaagcu

SEQ ID NO: 339061 - RNA, 19 nt, Homo sapiens
  misc_RNA (1)...(19): siRNA sense strand
ugacccagucuauuaaaga

SEQ ID NO: 339062 - RNA, 19 nt, Homo sapiens
  misc_RNA (1)...(19): siRNA sense strand
gaacuagaagcuguguuag

SEQ ID NO: 339063 - RNA, 19 nt, Homo sapiens
  misc_RNA (1)...(19): siRNA sense strand
gugaaacaagcgucucuga

SEQ ID NO: 339064 - RNA, 19 nt, Homo sapiens
  misc_RNA (1)...(19): siRNA sense strand
ccaacaugcccacagauca

SEQ ID NO: 339065 - RNA, 19 nt, Homo sapiens
  misc_RNA (1)...(19): siRNA sense strand
uaugggcccuucaccaaca

SEQ ID NO: 339066 - RNA, 19 nt, Homo sapiens
  misc_RNA (1)...(19): siRNA sense strand
guccaaagcgagcaagaga

SEQ ID NO: 339067 - RNA, 19 nt, Homo sapiens
  misc_RNA (1)...(19): siRNA sense strand
cagaacaaagcacaucaga

SEQ ID NO: 339068 - RNA, 19 nt, Homo sapiens
  misc_RNA (1)...(19): siRNA sense strand
ccugcgaaauccagaacaa

SEQ ID NO: 339069 - RNA, 19 nt, Homo sapiens
  misc_RNA (1)...(19): siRNA sense strand
gaaaccaccaagguccaaa

SEQ ID NO: 339070 - RNA, 19 nt, Homo sapiens
  misc_RNA (1)...(19): siRNA sense strand
gauaaagcuccagcaggaa

SEQ ID NO: 339071 - RNA, 19 nt, Homo sapiens
  misc_RNA (1)...(19): siRNA sense strand
aaggagcuuucaucauuca

SEQ ID NO: 339072 - RNA, 19 nt, Homo sapiens
  misc_RNA (1)...(19): siRNA sense strand
ggugugagagugaaacaag

SEQ ID NO: 339073 - RNA, 19 nt, Homo sapiens
  misc_RNA (1)...(19): siRNA sense strand
gaaauggcugaacuagaag

SEQ ID NO: 339074 - RNA, 19 nt, Homo sapiens
  misc_RNA (1)...(19): siRNA sense strand
auaaagcuccagcaggaaa

SEQ ID NO: 339075 - RNA, 19 nt, Homo sapiens
  misc_RNA (1)...(19): siRNA sense strand
acccuuccaucauaaguga

SEQ ID NO: 339076 - RNA, 19 nt, Homo sapiens
  misc_RNA (1)...(19): siRNA sense strand
ggugacccagucuauuaaa

SEQ ID NO: 339077 - RNA, 19 nt, Homo sapiens
  misc_RNA (1)...(19): siRNA sense strand
cccagucuauuaaagaaag

SEQ ID NO: 339078 - RNA, 19 nt, Homo sapiens
  misc_RNA (1)...(19): siRNA sense strand
caucugggugugagaguga

SEQ ID NO: 339079 - RNA, 19 nt, Homo sapiens
  misc_RNA (1)...(19): siRNA sense strand
ccagucuauuaaagaaaga

SEQ ID NO: 339080 - RNA, 19 nt, Homo sapiens
  misc_RNA (1)...(19): siRNA sense strand
cgaaauccagaacaaagca

SEQ ID NO: 339081 - RNA, 19 nt, Homo sapiens
  misc_RNA (1)...(19): siRNA sense strand
aagagaaucccaggacaga

SEQ ID NO: 339082 - RNA, 19 nt, Homo sapiens
  misc_RNA (1)...(19): siRNA sense strand
gauguggucaauggaagaa

SEQ ID NO: 339083 - RNA, 19 nt, Homo sapiens
  misc_RNA (1)...(19): siRNA sense strand
ggaccugcgaaauccagaa

SEQ ID NO: 339084 - RNA, 19 nt, Homo sapiens
  misc_RNA (1)...(19): siRNA sense strand
gagcaugauuuugaaguca

SEQ ID NO: 339085 - RNA, 19 nt, Homo sapiens
  misc_RNA (1)...(19): siRNA sense strand
gugacccagucuauuaaag

SEQ ID NO: 339086 - RNA, 19 nt, Homo sapiens
  misc_RNA (1)...(19): siRNA sense strand
agaacaaagcacaucagaa

SEQ ID NO: 339087 - RNA, 19 nt, Homo sapiens
  misc_RNA (1)...(19): siRNA sense strand
uggaagaaaccaccaaggu

SEQ ID NO: 339088 - RNA, 19 nt, Homo sapiens
  misc_RNA (1)...(19): siRNA sense strand
ucaacuggaauggauggua

SEQ ID NO: 339089 - RNA, 19 nt, Homo sapiens
  misc_RNA (1)...(19): siRNA sense strand
ggaaauggcugaacuagaa

SEQ ID NO: 339090 - RNA, 19 nt, Homo sapiens
  misc_RNA (1)...(19): siRNA sense strand
gaacaaagcacaucagaaa

SEQ ID NO: 339091 - RNA, 19 nt, Homo sapiens
  misc_RNA (1)...(19): siRNA sense strand
cagcuacccuuccaucaua

SEQ ID NO: 339092 - RNA, 19 nt, Homo sapiens
  misc_RNA (1)...(19): siRNA sense strand
gggauaccaugcaacauaa

SEQ ID NO: 339093 - RNA, 19 nt, Homo sapiens
  misc_RNA (1)...(19): siRNA sense strand
gcucagggcuauccucuca

SEQ ID NO: 339094 - RNA, 19 nt, Homo sapiens
  misc_RNA (1)...(19): siRNA sense strand
aaacaagcgucucugaaga

SEQ ID NO: 339095 - RNA, 19 nt, Homo sapiens
  misc_RNA (1)...(19): siRNA sense strand
caacauaaccugauaaagc

SEQ ID NO: 339096 - RNA, 19 nt, Homo sapiens
  misc_RNA (1)...(19): siRNA sense strand
gaaacaagcgucucugaag

SEQ ID NO: 339097 - RNA, 19 nt, Homo sapiens
  misc_RNA (1)...(19): siRNA sense strand
gcagagggauaccaugcaa

SEQ ID NO: 339098 - RNA, 19 nt, Homo sapiens
  misc_RNA (1)...(19): siRNA sense strand
ugaacuagaagcuguguua

SEQ ID NO: 339099 - RNA, 19 nt, Homo sapiens
  misc_RNA (1)...(19): siRNA sense strand
gaagacugcucagggcuau

SEQ ID NO: 339100 - RNA, 19 nt, Homo sapiens
  misc_RNA (1)...(19): siRNA sense strand
acuagaagcuguguuagaa

SEQ ID NO: 339101 - RNA, 19 nt, Homo sapiens
  misc_RNA (1)...(19): siRNA sense strand
caugcaacauaaccugaua

SEQ ID NO: 339102 - RNA, 19 nt, Homo sapiens
  misc_RNA (1)...(19): siRNA sense strand
gcaggaaauggcugaacua

SEQ ID NO: 339103 - RNA, 19 nt, Homo sapiens
  misc_RNA (1)...(19): siRNA sense strand
ucagggcuauccucucaga

SEQ ID NO: 339104 - RNA, 19 nt, Homo sapiens
  misc_RNA (1)...(19): siRNA sense strand
agggauaccaugcaacaua

SEQ ID NO: 339105 - RNA, 19 nt, Homo sapiens
  misc_RNA (1)...(19): siRNA sense strand
ugaaacaagcgucucugaa

SEQ ID NO: 339106 - RNA, 19 nt, Homo sapiens
  misc_RNA (1)...(19): siRNA sense strand
aacauaaccugauaaagcu

SEQ ID NO: 339107 - RNA, 19 nt, Homo sapiens
  misc_RNA (1)...(19): siRNA sense strand
gaacuagaagcuguguuag

SEQ ID NO: 339108 - RNA, 19 nt, Homo sapiens
  misc_RNA (1)...(19): siRNA sense strand
cagaacaaagcacaucaga

SEQ ID NO: 339109 - RNA, 19 nt, Homo sapiens
  misc_RNA (1)...(19): siRNA sense strand
gugaaacaagcgucucuga

SEQ ID NO: 339110 - RNA, 19 nt, Homo sapiens
  misc_RNA (1)...(19): siRNA sense strand
ccugcgaaauccagaacaa

SEQ ID NO: 339111 - RNA, 19 nt, Homo sapiens
  misc_RNA (1)...(19): siRNA sense strand
gauaaagcuccagcaggaa

SEQ ID NO: 339112 - RNA, 19 nt, Homo sapiens
  misc_RNA (1)...(19): siRNA sense strand
ggugugagagugaaacaag

SEQ ID NO: 339113 - RNA, 19 nt, Homo sapiens
  misc_RNA (1)...(19): siRNA sense strand
auaaagcuccagcaggaaa

SEQ ID NO: 339114 - RNA, 19 nt, Homo sapiens
  misc_RNA (1)...(19): siRNA sense strand
acccuuccaucauaaguga

SEQ ID NO: 339115 - RNA, 19 nt, Homo sapiens
  misc_RNA (1)...(19): siRNA sense strand
gaaauggcugaacuagaag

SEQ ID NO: 339116 - RNA, 19 nt, Homo sapiens
  misc_RNA (1)...(19): siRNA sense strand
caucugggugugagaguga

SEQ ID NO: 339117 - RNA, 19 nt, Homo sapiens
  misc_RNA (1)...(19): siRNA sense strand
cgaaauccagaacaaagca

SEQ ID NO: 339118 - RNA, 19 nt, Homo sapiens
  misc_RNA (1)...(19): siRNA sense strand
ggaccugcgaaauccagaa

SEQ ID NO: 339119 - RNA, 19 nt, Homo sapiens
  misc_RNA (1)...(19): siRNA sense strand
agaacaaagcacaucagaa

SEQ ID NO: 339120 - RNA, 19 nt, Homo sapiens
  misc_RNA (1)...(19): siRNA sense strand
ggaaauggcugaacuagaa

SEQ ID NO: 339121 - RNA, 19 nt, Homo sapiens
  misc_RNA (1)...(19): siRNA sense strand
gaacaaagcacaucagaaa

SEQ ID NO: 339122 - RNA, 19 nt, Homo sapiens
  misc_RNA (1)...(19): siRNA sense strand
cagcuacccuuccaucaua

SEQ ID NO: 339123 - RNA, 19 nt, Homo sapiens
  misc_RNA (1)...(19): siRNA sense strand
gggauaccaugcaacauaa

SEQ ID NO: 339124 - RNA, 19 nt, Homo sapiens
  misc_RNA (1)...(19): siRNA sense strand
gaggagauguggucaaugg

SEQ ID NO: 339125 - RNA, 19 nt, Homo sapiens
  misc_RNA (1)...(19): siRNA sense strand
gaaggagcuuucaucauuc

SEQ ID NO: 339126 - RNA, 19 nt, Homo sapiens
  misc_RNA (1)...(19): siRNA sense strand
cuagaaaucuguugcuaug

SEQ ID NO: 339127 - RNA, 19 nt, Homo sapiens
  misc_RNA (1)...(19): siRNA sense strand
gcucagggcuauccucuca

SEQ ID NO: 339128 - RNA, 19 nt, Homo sapiens
  misc_RNA (1)...(19): siRNA sense strand
aaacaagcgucucugaaga

SEQ ID NO: 339129 - RNA, 19 nt, Homo sapiens
  misc_RNA (1)...(19): siRNA sense strand
caacauaaccugauaaagc

SEQ ID NO: 339130 - RNA, 19 nt, Homo sapiens
  misc_RNA (1)...(19): siRNA sense strand
gaaacaagcgucucugaag

SEQ ID NO: 339131 - RNA, 19 nt, Homo sapiens
  misc_RNA (1)...(19): siRNA sense strand
gcagagggauaccaugcaa

SEQ ID NO: 339132 - RNA, 19 nt, Homo sapiens
  misc_RNA (1)...(19): siRNA sense strand
ugaacuagaagcuguguua

SEQ ID NO: 339133 - RNA, 19 nt, Homo sapiens
  misc_RNA (1)...(19): siRNA sense strand
gagaaucccaggacagaaa

SEQ ID NO: 339134 - RNA, 19 nt, Homo sapiens
  misc_RNA (1)...(19): siRNA sense strand
gcccacagaucaacuggaa

SEQ ID NO: 339135 - RNA, 19 nt, Homo sapiens
  misc_RNA (1)...(19): siRNA sense strand
gaagacugcucagggcuau

SEQ ID NO: 339136 - RNA, 19 nt, Homo sapiens
  misc_RNA (1)...(19): siRNA sense strand
gacccagucuauuaaagaa

SEQ ID NO: 339137 - RNA, 19 nt, Homo sapiens
  misc_RNA (1)...(19): siRNA sense strand
acuagaagcuguguuagaa

SEQ ID NO: 339138 - RNA, 19 nt, Homo sapiens
  misc_RNA (1)...(19): siRNA sense strand
caugcaacauaaccugaua

SEQ ID NO: 339139 - RNA, 19 nt, Homo sapiens
  misc_RNA (1)...(19): siRNA sense strand
gcuggacaccuaccugaua

SEQ ID NO: 339140 - RNA, 19 nt, Homo sapiens
  misc_RNA (1)...(19): siRNA sense strand
cagaucaacuggaauggau

SEQ ID NO: 339141 - RNA, 19 nt, Homo sapiens
  misc_RNA (1)...(19): siRNA sense strand
gcaggaaauggcugaacua

SEQ ID NO: 339142 - RNA, 19 nt, Homo sapiens
  misc_RNA (1)...(19): siRNA sense strand
ccacagaucaacuggaaug

SEQ ID NO: 339143 - RNA, 19 nt, Homo sapiens
  misc_RNA (1)...(19): siRNA sense strand
caacaugcccacagaucaa

SEQ ID NO: 339144 - RNA, 19 nt, Homo sapiens
  misc_RNA (1)...(19): siRNA sense strand
ucaccaacaugcccacaga

SEQ ID NO: 339145 - RNA, 19 nt, Homo sapiens
  misc_RNA (1)...(19): siRNA sense strand
cagaggagauguggucaau

SEQ ID NO: 339146 - RNA, 19 nt, Homo sapiens
  misc_RNA (1)...(19): siRNA sense strand
caauugggcagauguguga

SEQ ID NO: 339147 - RNA, 19 nt, Homo sapiens
  misc_RNA (1)...(19): siRNA sense strand
ggagauguggucaauggaa

SEQ ID NO: 339148 - RNA, 19 nt, Homo sapiens
  misc_RNA (1)...(19): siRNA sense strand
guacagcuguguggugcuu

SEQ ID NO: 339149 - RNA, 19 nt, Homo sapiens
  misc_RNA (1)...(19): siRNA sense strand
ccaaagcgagcaagagaau

SEQ ID NO: 339150 - RNA, 19 nt, Homo sapiens
  misc_RNA (1)...(19): siRNA sense strand
gcuaugggcccuucaccaa

SEQ ID NO: 339151 - RNA, 19 nt, Homo sapiens
  misc_RNA (1)...(19): siRNA sense strand
gaaugagcaugauuuugaa

SEQ ID NO: 339152 - RNA, 19 nt, Homo sapiens
  misc_RNA (1)...(19): siRNA sense strand
ucagggcuauccucucaga

SEQ ID NO: 339153 - RNA, 19 nt, Homo sapiens
  misc_RNA (1)...(19): siRNA sense strand
agggauaccaugcaacaua

SEQ ID NO: 339154 - RNA, 19 nt, Homo sapiens
  misc_RNA (1)...(19): siRNA sense strand
gcuagaaaucuguugcuau

SEQ ID NO: 339155 - RNA, 19 nt, Homo sapiens
  misc_RNA (1)...(19): siRNA sense strand
ugaaugagcaugauuuuga

SEQ ID NO: 339156 - RNA, 19 nt, Homo sapiens
  misc_RNA (1)...(19): siRNA sense strand
ggcuagaaaucuguugcua

SEQ ID NO: 339157 - RNA, 19 nt, Homo sapiens
  misc_RNA (1)...(19): siRNA sense strand
ugaaacaagcgucucugaa

SEQ ID NO: 339158 - RNA, 19 nt, Homo sapiens
  misc_RNA (1)...(19): siRNA sense strand
aacauaaccugauaaagcu

SEQ ID NO: 339159 - RNA, 19 nt, Homo sapiens
  misc_RNA (1)...(19): siRNA sense strand
ugacccagucuauuaaaga

SEQ ID NO: 339160 - RNA, 19 nt, Homo sapiens
  misc_RNA (1)...(19): siRNA sense strand
gaacuagaagcuguguuag

SEQ ID NO: 339161 - RNA, 19 nt, Homo sapiens
  misc_RNA (1)...(19): siRNA sense strand
gugaaacaagcgucucuga

SEQ ID NO: 339162 - RNA, 19 nt, Homo sapiens
  misc_RNA (1)...(19): siRNA sense strand
ccaacaugcccacagauca

SEQ ID NO: 339163 - RNA, 19 nt, Homo sapiens
  misc_RNA (1)...(19): siRNA sense strand
uaugggcccuucaccaaca

SEQ ID NO: 339164 - RNA, 19 nt, Homo sapiens
  misc_RNA (1)...(19): siRNA sense strand
guccaaagcgagcaagaga

SEQ ID NO: 339165 - RNA, 19 nt, Homo sapiens
  misc_RNA (1)...(19): siRNA sense strand
cagaacaaagcacaucaga

SEQ ID NO: 339166 - RNA, 19 nt, Homo sapiens
  misc_RNA (1)...(19): siRNA sense strand
ccugcgaaauccagaacaa

SEQ ID NO: 339167 - RNA, 19 nt, Homo sapiens
  misc_RNA (1)...(19): siRNA sense strand
gaaaccaccaagguccaaa

SEQ ID NO: 339168 - RNA, 19 nt, Homo sapiens
  misc_RNA (1)...(19): siRNA sense strand
gauaaagcuccagcaggaa

SEQ ID NO: 339169 - RNA, 19 nt, Homo sapiens
  misc_RNA (1)...(19): siRNA sense strand
aaggagcuuucaucauuca

SEQ ID NO: 339170 - RNA, 19 nt, Homo sapiens
  misc_RNA (1)...(19): siRNA sense strand
ggugugagagugaaacaag

SEQ ID NO: 339171 - RNA, 19 nt, Homo sapiens
  misc_RNA (1)...(19): siRNA sense strand
gaaauggcugaacuagaag

SEQ ID NO: 339172 - RNA, 19 nt, Homo sapiens
  misc_RNA (1)...(19): siRNA sense strand
auaaagcuccagcaggaaa

SEQ ID NO: 339173 - RNA, 19 nt, Homo sapiens
  misc_RNA (1)...(19): siRNA sense strand
acccuuccaucauaaguga

SEQ ID NO: 339174 - RNA, 19 nt, Homo sapiens
  misc_RNA (1)...(19): siRNA sense strand
ggugacccagucuauuaaa

SEQ ID NO: 339175 - RNA, 19 nt, Homo sapiens
  misc_RNA (1)...(19): siRNA sense strand
cccagucuauuaaagaaag

SEQ ID NO: 339176 - RNA, 19 nt, Homo sapiens
  misc_RNA (1)...(19): siRNA sense strand
caucugggugugagaguga

SEQ ID NO: 339177 - RNA, 19 nt, Homo sapiens
  misc_RNA (1)...(19): siRNA sense strand
ccagucuauuaaagaaaga

SEQ ID NO: 339178 - RNA, 19 nt, Homo sapiens
  misc_RNA (1)...(19): siRNA sense strand
cgaaauccagaacaaagca

SEQ ID NO: 339179 - RNA, 19 nt, Homo sapiens
  misc_RNA (1)...(19): siRNA sense strand
aagagaaucccaggacaga

SEQ ID NO: 339180 - RNA, 19 nt, Homo sapiens
  misc_RNA (1)...(19): siRNA sense strand
gauguggucaauggaagaa

SEQ ID NO: 339181 - RNA, 19 nt, Homo sapiens
  misc_RNA (1)...(19): siRNA sense strand
ggaccugcgaaauccagaa

SEQ ID NO: 339182 - RNA, 19 nt, Homo sapiens
  misc_RNA (1)...(19): siRNA sense strand
gagcaugauuuugaaguca

SEQ ID NO: 339183 - RNA, 19 nt, Homo sapiens
  misc_RNA (1)...(19): siRNA sense strand
gugacccagucuauuaaag

SEQ ID NO: 339184 - RNA, 19 nt, Homo sapiens
  misc_RNA (1)...(19): siRNA sense strand
agaacaaagcacaucagaa

SEQ ID NO: 339185 - RNA, 19 nt, Homo sapiens
  misc_RNA (1)...(19): siRNA sense strand
uggaagaaaccaccaaggu

SEQ ID NO: 339186 - RNA, 19 nt, Homo sapiens
  misc_RNA (1)...(19): siRNA sense strand
ucaacuggaauggauggua

SEQ ID NO: 339187 - RNA, 19 nt, Homo sapiens
  misc_RNA (1)...(19): siRNA sense strand
ggaaauggcugaacuagaa

SEQ ID NO: 339188 - RNA, 19 nt, Homo sapiens
  misc_RNA (1)...(19): siRNA sense strand
gaacaaagcacaucagaaa

SEQ ID NO: 339189 - RNA, 19 nt, Homo sapiens
  misc_RNA (1)...(19): siRNA sense strand
cagcuacccuuccaucaua

SEQ ID NO: 339190 - RNA, 19 nt, Homo sapiens
  misc_RNA (1)...(19): siRNA sense strand
gggauaccaugcaacauaa

SEQ ID NO: 339191 - RNA, 19 nt, Homo sapiens
  misc_RNA (1)...(19): siRNA sense strand
gaggagauguggucaaugg

SEQ ID NO: 339192 - RNA, 19 nt, Homo sapiens
  misc_RNA (1)...(19): siRNA sense strand
gaaggagcuuucaucauuc

SEQ ID NO: 339193 - RNA, 19 nt, Homo sapiens
  misc_RNA (1)...(19): siRNA sense strand
cuagaaaucuguugcuaug

SEQ ID NO: 339194 - RNA, 19 nt, Homo sapiens
  misc_RNA (1)...(19): siRNA sense strand
gcucagggcuauccucuca

SEQ ID NO: 339195 - RNA, 19 nt, Homo sapiens
  misc_RNA (1)...(19): siRNA sense strand
aaacaagcgucucugaaga

SEQ ID NO: 339196 - RNA, 19 nt, Homo sapiens
  misc_RNA (1)...(19): siRNA sense strand
caacauaaccugauaaagc

SEQ ID NO: 339197 - RNA, 19 nt, Homo sapiens
  misc_RNA (1)...(19): siRNA sense strand
gaaacaagcgucucugaag

SEQ ID NO: 339198 - RNA, 19 nt, Homo sapiens
  misc_RNA (1)...(19): siRNA sense strand
gcagagggauaccaugcaa

SEQ ID NO: 339199 - RNA, 19 nt, Homo sapiens
  misc_RNA (1)...(19): siRNA sense strand
ugaacuagaagcuguguua

SEQ ID NO: 339200 - RNA, 19 nt, Homo sapiens
  misc_RNA (1)...(19): siRNA sense strand
gagaaucccaggacagaaa

SEQ ID NO: 339201 - RNA, 19 nt, Homo sapiens
  misc_RNA (1)...(19): siRNA sense strand
gcccacagaucaacuggaa

SEQ ID NO: 339202 - RNA, 19 nt, Homo sapiens
  misc_RNA (1)...(19): siRNA sense strand
gaagacugcucagggcuau

SEQ ID NO: 339203 - RNA, 19 nt, Homo sapiens
  misc_RNA (1)...(19): siRNA sense strand
gacccagucuauuaaagaa

SEQ ID NO: 339204 - RNA, 19 nt, Homo sapiens
  misc_RNA (1)...(19): siRNA sense strand
acuagaagcuguguuagaa

SEQ ID NO: 339205 - RNA, 19 nt, Homo sapiens
  misc_RNA (1)...(19): siRNA sense strand
caugcaacauaaccugaua

SEQ ID NO: 339206 - RNA, 19 nt, Homo sapiens
  misc_RNA (1)...(19): siRNA sense strand
gcuggacaccuaccugaua

SEQ ID NO: 339207 - RNA, 19 nt, Homo sapiens
  misc_RNA (1)...(19): siRNA sense strand
cagaucaacuggaauggau

SEQ ID NO: 339208 - RNA, 19 nt, Homo sapiens
  misc_RNA (1)...(19): siRNA sense strand
gcaggaaauggcugaacua

SEQ ID NO: 339209 - RNA, 19 nt, Homo sapiens
  misc_RNA (1)...(19): siRNA sense strand
ccacagaucaacuggaaug

SEQ ID NO: 339210 - RNA, 19 nt, Homo sapiens
  misc_RNA (1)...(19): siRNA sense strand
caacaugcccacagaucaa

SEQ ID NO: 339211 - RNA, 19 nt, Homo sapiens
  misc_RNA (1)...(19): siRNA sense strand
ucaccaacaugcccacaga

SEQ ID NO: 339212 - RNA, 19 nt, Homo sapiens
  misc_RNA (1)...(19): siRNA sense strand
cagaggagauguggucaau

SEQ ID NO: 339213 - RNA, 19 nt, Homo sapiens
  misc_RNA (1)...(19): siRNA sense strand
caauugggcagauguguga

SEQ ID NO: 339214 - RNA, 19 nt, Homo sapiens
  misc_RNA (1)...(19): siRNA sense strand
ggagauguggucaauggaa

SEQ ID NO: 339215 - RNA, 19 nt, Homo sapiens
  misc_RNA (1)...(19): siRNA sense strand
guacagcuguguggugcuu

SEQ ID NO: 339216 - RNA, 19 nt, Homo sapiens
  misc_RNA (1)...(19): siRNA sense strand
ccaaagcgagcaagagaau

SEQ ID NO: 339217 - RNA, 19 nt, Homo sapiens
  misc_RNA (1)...(19): siRNA sense strand
gcuaugggcccuucaccaa

SEQ ID NO: 339218 - RNA, 19 nt, Homo sapiens
  misc_RNA (1)...(19): siRNA sense strand
gaaugagcaugauuuugaa

SEQ ID NO: 339219 - RNA, 19 nt, Homo sapiens
  misc_RNA (1)...(19): siRNA sense strand
ucagggcuauccucucaga

SEQ ID NO: 339220 - RNA, 19 nt, Homo sapiens
  misc_RNA (1)...(19): siRNA sense strand
agggauaccaugcaacaua

SEQ ID NO: 339221 - RNA, 19 nt, Homo sapiens
  misc_RNA (1)...(19): siRNA sense strand
gcuagaaaucuguugcuau

SEQ ID NO: 339222 - RNA, 19 nt, Homo sapiens
  misc_RNA (1)...(19): siRNA sense strand
ugaaugagcaugauuuuga

SEQ ID NO: 339223 - RNA, 19 nt, Homo sapiens
  misc_RNA (1)...(19): siRNA sense strand
ggcuagaaaucuguugcua

SEQ ID NO: 339224 - RNA, 19 nt, Homo sapiens
  misc_RNA (1)...(19): siRNA sense strand
ugaaacaagcgucucugaa

SEQ ID NO: 339225 - RNA, 19 nt, Homo sapiens
  misc_RNA (1)...(19): siRNA sense strand
aacauaaccugauaaagcu

SEQ ID NO: 339226 - RNA, 19 nt, Homo sapiens
  misc_RNA (1)...(19): siRNA sense strand
ugacccagucuauuaaaga

SEQ ID NO: 339227 - RNA, 19 nt, Homo sapiens
  misc_RNA (1)...(19): siRNA sense strand
gaacuagaagcuguguuag

SEQ ID NO: 339228 - RNA, 19 nt, Homo sapiens
  misc_RNA (1)...(19): siRNA sense strand
gugaaacaagcgucucuga

SEQ ID NO: 339229 - RNA, 19 nt, Homo sapiens
  misc_RNA (1)...(19): siRNA sense strand
ccaacaugcccacagauca

SEQ ID NO: 339230 - RNA, 19 nt, Homo sapiens
  misc_RNA (1)...(19): siRNA sense strand
uaugggcccuucaccaaca

SEQ ID NO: 339231 - RNA, 19 nt, Homo sapiens
  misc_RNA (1)...(19): siRNA sense strand
guccaaagcgagcaagaga

SEQ ID NO: 339232 - RNA, 19 nt, Homo sapiens
  misc_RNA (1)...(19): siRNA sense strand
cagaacaaagcacaucaga

SEQ ID NO: 339233 - RNA, 19 nt, Homo sapiens
  misc_RNA (1)...(19): siRNA sense strand
ccugcgaaauccagaacaa

SEQ ID NO: 339234 - RNA, 19 nt, Homo sapiens
  misc_RNA (1)...(19): siRNA sense strand
gaaaccaccaagguccaaa

SEQ ID NO: 339235 - RNA, 19 nt, Homo sapiens
  misc_RNA (1)...(19): siRNA sense strand
gauaaagcuccagcaggaa

SEQ ID NO: 339236 - RNA, 19 nt, Homo sapiens
  misc_RNA (1)...(19): siRNA sense strand
aaggagcuuucaucauuca

SEQ ID NO: 339237 - RNA, 19 nt, Homo sapiens
  misc_RNA (1)...(19): siRNA sense strand
ggugugagagugaaacaag

SEQ ID NO: 339238 - RNA, 19 nt, Homo sapiens
  misc_RNA (1)...(19): siRNA sense strand
gaaauggcugaacuagaag

SEQ ID NO: 339239 - RNA, 19 nt, Homo sapiens
  misc_RNA (1)...(19): siRNA sense strand
auaaagcuccagcaggaaa

SEQ ID NO: 339240 - RNA, 19 nt, Homo sapiens
  misc_RNA (1)...(19): siRNA sense strand
acccuuccaucauaaguga

SEQ ID NO: 339241 - RNA, 19 nt, Homo sapiens
  misc_RNA (1)...(19): siRNA sense strand
ggugacccagucuauuaaa

SEQ ID NO: 339242 - RNA, 19 nt, Homo sapiens
  misc_RNA (1)...(19): siRNA sense strand
cccagucuauuaaagaaag

SEQ ID NO: 339243 - RNA, 19 nt, Homo sapiens
  misc_RNA (1)...(19): siRNA sense strand
caucugggugugagaguga

SEQ ID NO: 339244 - RNA, 19 nt, Homo sapiens
  misc_RNA (1)...(19): siRNA sense strand
ccagucuauuaaagaaaga

SEQ ID NO: 339245 - RNA, 19 nt, Homo sapiens
  misc_RNA (1)...(19): siRNA sense strand
cgaaauccagaacaaagca

SEQ ID NO: 339246 - RNA, 19 nt, Homo sapiens
  misc_RNA (1)...(19): siRNA sense strand
aagagaaucccaggacaga

SEQ ID NO: 339247 - RNA, 19 nt, Homo sapiens
  misc_RNA (1)...(19): siRNA sense strand
gauguggucaauggaagaa

SEQ ID NO: 339248 - RNA, 19 nt, Homo sapiens
  misc_RNA (1)...(19): siRNA sense strand
ggaccugcgaaauccagaa

SEQ ID NO: 339249 - RNA, 19 nt, Homo sapiens
  misc_RNA (1)...(19): siRNA sense strand
gagcaugauuuugaaguca

SEQ ID NO: 339250 - RNA, 19 nt, Homo sapiens
  misc_RNA (1)...(19): siRNA sense strand
gugacccagucuauuaaag

SEQ ID NO: 339251 - RNA, 19 nt, Homo sapiens
  misc_RNA (1)...(19): siRNA sense strand
agaacaaagcacaucagaa

SEQ ID NO: 339252 - RNA, 19 nt, Homo sapiens
  misc_RNA (1)...(19): siRNA sense strand
uggaagaaaccaccaaggu

SEQ ID NO: 339253 - RNA, 19 nt, Homo sapiens
  misc_RNA (1)...(19): siRNA sense strand
ucaacuggaauggauggua

SEQ ID NO: 339254 - RNA, 19 nt, Homo sapiens
  misc_RNA (1)...(19): siRNA sense strand
ggaaauggcugaacuagaa

SEQ ID NO: 339255 - RNA, 19 nt, Homo sapiens
  misc_RNA (1)...(19): siRNA sense strand
gaacaaagcacaucagaaa

SEQ ID NO: 339256 - RNA, 19 nt, Homo sapiens
  misc_RNA (1)...(19): siRNA sense strand
cagcuacccuuccaucaua

SEQ ID NO: 339257 - RNA, 19 nt, Homo sapiens
  misc_RNA (1)...(19): siRNA sense strand
gggauaccaugcaacauaa

SEQ ID NO: 339258 - RNA, 19 nt, Homo sapiens
  misc_RNA (1)...(19): siRNA sense strand
gaggagauguggucaaugg

SEQ ID NO: 339259 - RNA, 19 nt, Homo sapiens
  misc_RNA (1)...(19): siRNA sense strand
gaaggagcuuucaucauuc

SEQ ID NO: 339260 - RNA, 19 nt, Homo sapiens
  misc_RNA (1)...(19): siRNA sense strand
cuagaaaucuguugcuaug

SEQ ID NO: 339261 - RNA, 19 nt, Homo sapiens
  misc_RNA (1)...(19): siRNA sense strand
gcucagggcuauccucuca

SEQ ID NO: 339262 - RNA, 19 nt, Homo sapiens
  misc_RNA (1)...(19): siRNA sense strand
aaacaagcgucucugaaga

SEQ ID NO: 339263 - RNA, 19 nt, Homo sapiens
  misc_RNA (1)...(19): siRNA sense strand
caacauaaccugauaaagc

SEQ ID NO: 339264 - RNA, 19 nt, Homo sapiens
  misc_RNA (1)...(19): siRNA sense strand
gaaacaagcgucucugaag

SEQ ID NO: 339265 - RNA, 19 nt, Homo sapiens
  misc_RNA (1)...(19): siRNA sense strand
gcagagggauaccaugcaa

SEQ ID NO: 339266 - RNA, 19 nt, Homo sapiens
  misc_RNA (1)...(19): siRNA sense strand
ugaacuagaagcuguguua

SEQ ID NO: 339267 - RNA, 19 nt, Homo sapiens
  misc_RNA (1)...(19): siRNA sense strand
gagaaucccaggacagaaa

SEQ ID NO: 339268 - RNA, 19 nt, Homo sapiens
  misc_RNA (1)...(19): siRNA sense strand
gcccacagaucaacuggaa

SEQ ID NO: 339269 - RNA, 19 nt, Homo sapiens
  misc_RNA (1)...(19): siRNA sense strand
gaagacugcucagggcuau

SEQ ID NO: 339270 - RNA, 19 nt, Homo sapiens
  misc_RNA (1)...(19): siRNA sense strand
gacccagucuauuaaagaa

SEQ ID NO: 339271 - RNA, 19 nt, Homo sapiens
  misc_RNA (1)...(19): siRNA sense strand
acuagaagcuguguuagaa

SEQ ID NO: 339272 - RNA, 19 nt, Homo sapiens
  misc_RNA (1)...(19): siRNA sense strand
caugcaacauaaccugaua

SEQ ID NO: 339273 - RNA, 19 nt, Homo sapiens
  misc_RNA (1)...(19): siRNA sense strand
gcuggacaccuaccugaua

SEQ ID NO: 339274 - RNA, 19 nt, Homo sapiens
  misc_RNA (1)...(19): siRNA sense strand
cagaucaacuggaauggau

SEQ ID NO: 339275 - RNA, 19 nt, Homo sapiens
  misc_RNA (1)...(19): siRNA sense strand
gcaggaaauggcugaacua

SEQ ID NO: 339276 - RNA, 19 nt, Homo sapiens
  misc_RNA (1)...(19): siRNA sense strand
ccacagaucaacuggaaug

SEQ ID NO: 339277 - RNA, 19 nt, Homo sapiens
  misc_RNA (1)...(19): siRNA sense strand
caacaugcccacagaucaa

SEQ ID NO: 339278 - RNA, 19 nt, Homo sapiens
  misc_RNA (1)...(19): siRNA sense strand
ucaccaacaugcccacaga

SEQ ID NO: 339279 - RNA, 19 nt, Homo sapiens
  misc_RNA (1)...(19): siRNA sense strand
cagaggagauguggucaau

SEQ ID NO: 339280 - RNA, 19 nt, Homo sapiens
  misc_RNA (1)...(19): siRNA sense strand
caauugggcagauguguga

SEQ ID NO: 339281 - RNA, 19 nt, Homo sapiens
  misc_RNA (1)...(19): siRNA sense strand
ggagauguggucaauggaa

SEQ ID NO: 339282 - RNA, 19 nt, Homo sapiens
  misc_RNA (1)...(19): siRNA sense strand
guacagcuguguggugcuu

SEQ ID NO: 339283 - RNA, 19 nt, Homo sapiens
  misc_RNA (1)...(19): siRNA sense strand
ccaaagcgagcaagagaau

SEQ ID NO: 339284 - RNA, 19 nt, Homo sapiens
  misc_RNA (1)...(19): siRNA sense strand
gcuaugggcccuucaccaa

SEQ ID NO: 339285 - RNA, 19 nt, Homo sapiens
  misc_RNA (1)...(19): siRNA sense strand
gaaugagcaugauuuugaa

SEQ ID NO: 339286 - RNA, 19 nt, Homo sapiens
  misc_RNA (1)...(19): siRNA sense strand
ucagggcuauccucucaga

SEQ ID NO: 339287 - RNA, 19 nt, Homo sapiens
  misc_RNA (1)...(19): siRNA sense strand
agggauaccaugcaacaua

SEQ ID NO: 339288 - RNA, 19 nt, Homo sapiens
  misc_RNA (1)...(19): siRNA sense strand
gcuagaaaucuguugcuau

SEQ ID NO: 339289 - RNA, 19 nt, Homo sapiens
  misc_RNA (1)...(19): siRNA sense strand
ugaaugagcaugauuuuga

SEQ ID NO: 339290 - RNA, 19 nt, Homo sapiens
  misc_RNA (1)...(19): siRNA sense strand
ggcuagaaaucuguugcua

SEQ ID NO: 339291 - RNA, 19 nt, Homo sapiens
  misc_RNA (1)...(19): siRNA sense strand
ugaaacaagcgucucugaa

SEQ ID NO: 339292 - RNA, 19 nt, Homo sapiens
  misc_RNA (1)...(19): siRNA sense strand
aacauaaccugauaaagcu

SEQ ID NO: 339293 - RNA, 19 nt, Homo sapiens
  misc_RNA (1)...(19): siRNA sense strand
ugacccagucuauuaaaga

SEQ ID NO: 339294 - RNA, 19 nt, Homo sapiens
  misc_RNA (1)...(19): siRNA sense strand
gaacuagaagcuguguuag

SEQ ID NO: 339295 - RNA, 19 nt, Homo sapiens
  misc_RNA (1)...(19): siRNA sense strand
gugaaacaagcgucucuga

SEQ ID NO: 339296 - RNA, 19 nt, Homo sapiens
  misc_RNA (1)...(19): siRNA sense strand
ccaacaugcccacagauca

SEQ ID NO: 339297 - RNA, 19 nt, Homo sapiens
  misc_RNA (1)...(19): siRNA sense strand
uaugggcccuucaccaaca

SEQ ID NO: 339298 - RNA, 19 nt, Homo sapiens
  misc_RNA (1)...(19): siRNA sense strand
guccaaagcgagcaagaga

SEQ ID NO: 339299 - RNA, 19 nt, Homo sapiens
  misc_RNA (1)...(19): siRNA sense strand
cagaacaaagcacaucaga

SEQ ID NO: 339300 - RNA, 19 nt, Homo sapiens
  misc_RNA (1)...(19): siRNA sense strand
ccugcgaaauccagaacaa

SEQ ID NO: 339301 - RNA, 19 nt, Homo sapiens
  misc_RNA (1)...(19): siRNA sense strand
gaaaccaccaagguccaaa

SEQ ID NO: 339302 - RNA, 19 nt, Homo sapiens
  misc_RNA (1)...(19): siRNA sense strand
gauaaagcuccagcaggaa

SEQ ID NO: 339303 - RNA, 19 nt, Homo sapiens
  misc_RNA (1)...(19): siRNA sense strand
aaggagcuuucaucauuca

SEQ ID NO: 339304 - RNA, 19 nt, Homo sapiens
  misc_RNA (1)...(19): siRNA sense strand
ggugugagagugaaacaag

SEQ ID NO: 339305 - RNA, 19 nt, Homo sapiens
  misc_RNA (1)...(19): siRNA sense strand
gaaauggcugaacuagaag

SEQ ID NO: 339306 - RNA, 19 nt, Homo sapiens
  misc_RNA (1)...(19): siRNA sense strand
auaaagcuccagcaggaaa

SEQ ID NO: 339307 - RNA, 19 nt, Homo sapiens
  misc_RNA (1)...(19): siRNA sense strand
acccuuccaucauaaguga

SEQ ID NO: 339308 - RNA, 19 nt, Homo sapiens
  misc_RNA (1)...(19): siRNA sense strand
ggugacccagucuauuaaa

SEQ ID NO: 339309 - RNA, 19 nt, Homo sapiens
  misc_RNA (1)...(19): siRNA sense strand
cccagucuauuaaagaaag

SEQ ID NO: 339310 - RNA, 19 nt, Homo sapiens
  misc_RNA (1)...(19): siRNA sense strand
caucugggugugagaguga

SEQ ID NO: 339311 - RNA, 19 nt, Homo sapiens
  misc_RNA (1)...(19): siRNA sense strand
ccagucuauuaaagaaaga

SEQ ID NO: 339312 - RNA, 19 nt, Homo sapiens
  misc_RNA (1)...(19): siRNA sense strand
cgaaauccagaacaaagca

SEQ ID NO: 339313 - RNA, 19 nt, Homo sapiens
  misc_RNA (1)...(19): siRNA sense strand
aagagaaucccaggacaga

SEQ ID NO: 339314 - RNA, 19 nt, Homo sapiens
  misc_RNA (1)...(19): siRNA sense strand
gauguggucaauggaagaa

SEQ ID NO: 339315 - RNA, 19 nt, Homo sapiens
  misc_RNA (1)...(19): siRNA sense strand
ggaccugcgaaauccagaa

SEQ ID NO: 339316 - RNA, 19 nt, Homo sapiens
  misc_RNA (1)...(19): siRNA sense strand
gagcaugauuuugaaguca

SEQ ID NO: 339317 - RNA, 19 nt, Homo sapiens
  misc_RNA (1)...(19): siRNA sense strand
gugacccagucuauuaaag

SEQ ID NO: 339318 - RNA, 19 nt, Homo sapiens
  misc_RNA (1)...(19): siRNA sense strand
agaacaaagcacaucagaa

SEQ ID NO: 339319 - RNA, 19 nt, Homo sapiens
  misc_RNA (1)...(19): siRNA sense strand
uggaagaaaccaccaaggu

SEQ ID NO: 339320 - RNA, 19 nt, Homo sapiens
  misc_RNA (1)...(19): siRNA sense strand
ucaacuggaauggauggua

SEQ ID NO: 339321 - RNA, 19 nt, Homo sapiens
  misc_RNA (1)...(19): siRNA sense strand
ggaaauggcugaacuagaa

SEQ ID NO: 339322 - RNA, 19 nt, Homo sapiens
  misc_RNA (1)...(19): siRNA sense strand
gaacaaagcacaucagaaa

SEQ ID NO: 339323 - RNA, 19 nt, Homo sapiens
  misc_RNA (1)...(19): siRNA sense strand
cagcuacccuuccaucaua

SEQ ID NO: 339324 - RNA, 19 nt, Homo sapiens
  misc_RNA (1)...(19): siRNA sense strand
gggauaccaugcaacauaa

SEQ ID NO: 339325 - RNA, 19 nt, Homo sapiens
  misc_RNA (1)...(19): siRNA sense strand
gaggagauguggucaaugg

SEQ ID NO: 339326 - RNA, 19 nt, Homo sapiens
  misc_RNA (1)...(19): siRNA sense strand
gaaggagcuuucaucauuc

SEQ ID NO: 339327 - RNA, 19 nt, Homo sapiens
  misc_RNA (1)...(19): siRNA sense strand
cuagaaaucuguugcuaug

SEQ ID NO: 339328 - RNA, 19 nt, Homo sapiens
  misc_RNA (1)...(19): siRNA sense strand
gcucagggcuauccucuca

SEQ ID NO: 339329 - RNA, 19 nt, Homo sapiens
  misc_RNA (1)...(19): siRNA sense strand
aaacaagcgucucugaaga

SEQ ID NO: 339330 - RNA, 19 nt, Homo sapiens
  misc_RNA (1)...(19): siRNA sense strand
caacauaaccugauaaagc

SEQ ID NO: 339331 - RNA, 19 nt, Homo sapiens
  misc_RNA (1)...(19): siRNA sense strand
gaaacaagcgucucugaag

SEQ ID NO: 339332 - RNA, 19 nt, Homo sapiens
  misc_RNA (1)...(19): siRNA sense strand
gcagagggauaccaugcaa

SEQ ID NO: 339333 - RNA, 19 nt, Homo sapiens
  misc_RNA (1)...(19): siRNA sense strand
ugaacuagaagcuguguua

SEQ ID NO: 339334 - RNA, 19 nt, Homo sapiens
  misc_RNA (1)...(19): siRNA sense strand
gagaaucccaggacagaaa

SEQ ID NO: 339335 - RNA, 19 nt, Homo sapiens
  misc_RNA (1)...(19): siRNA sense strand
gcccacagaucaacuggaa

SEQ ID NO: 339336 - RNA, 19 nt, Homo sapiens
  misc_RNA (1)...(19): siRNA sense strand
gaagacugcucagggcuau

SEQ ID NO: 339337 - RNA, 19 nt, Homo sapiens
  misc_RNA (1)...(19): siRNA sense strand
gacccagucuauuaaagaa

SEQ ID NO: 339338 - RNA, 19 nt, Homo sapiens
  misc_RNA (1)...(19): siRNA sense strand
acuagaagcuguguuagaa

SEQ ID NO: 339339 - RNA, 19 nt, Homo sapiens
  misc_RNA (1)...(19): siRNA sense strand
caugcaacauaaccugaua

SEQ ID NO: 339340 - RNA, 19 nt, Homo sapiens
  misc_RNA (1)...(19): siRNA sense strand
gcuggacaccuaccugaua

SEQ ID NO: 339341 - RNA, 19 nt, Homo sapiens
  misc_RNA (1)...(19): siRNA sense strand
cagaucaacuggaauggau

SEQ ID NO: 339342 - RNA, 19 nt, Homo sapiens
  misc_RNA (1)...(19): siRNA sense strand
gcaggaaauggcugaacua

SEQ ID NO: 339343 - RNA, 19 nt, Homo sapiens
  misc_RNA (1)...(19): siRNA sense strand
ccacagaucaacuggaaug

SEQ ID NO: 339344 - RNA, 19 nt, Homo sapiens
  misc_RNA (1)...(19): siRNA sense strand
caacaugcccacagaucaa

SEQ ID NO: 339345 - RNA, 19 nt, Homo sapiens
  misc_RNA (1)...(19): siRNA sense strand
ucaccaacaugcccacaga

SEQ ID NO: 339346 - RNA, 19 nt, Homo sapiens
  misc_RNA (1)...(19): siRNA sense strand
cagaggagauguggucaau

SEQ ID NO: 339347 - RNA, 19 nt, Homo sapiens
  misc_RNA (1)...(19): siRNA sense strand
caauugggcagauguguga

SEQ ID NO: 339348 - RNA, 19 nt, Homo sapiens
  misc_RNA (1)...(19): siRNA sense strand
ggagauguggucaauggaa

SEQ ID NO: 339349 - RNA, 19 nt, Homo sapiens
  misc_RNA (1)...(19): siRNA sense strand
guacagcuguguggugcuu

SEQ ID NO: 339350 - RNA, 19 nt, Homo sapiens
  misc_RNA (1)...(19): siRNA sense strand
ccaaagcgagcaagagaau

SEQ ID NO: 339351 - RNA, 19 nt, Homo sapiens
  misc_RNA (1)...(19): siRNA sense strand
gcuaugggcccuucaccaa

SEQ ID NO: 339352 - RNA, 19 nt, Homo sapiens
  misc_RNA (1)...(19): siRNA sense strand
gaaugagcaugauuuugaa

SEQ ID NO: 339353 - RNA, 19 nt, Homo sapiens
  misc_RNA (1)...(19): siRNA sense strand
ucagggcuauccucucaga

SEQ ID NO: 339354 - RNA, 19 nt, Homo sapiens
  misc_RNA (1)...(19): siRNA sense strand
agggauaccaugcaacaua

SEQ ID NO: 339355 - RNA, 19 nt, Homo sapiens
  misc_RNA (1)...(19): siRNA sense strand
gcuagaaaucuguugcuau

SEQ ID NO: 339356 - RNA, 19 nt, Homo sapiens
  misc_RNA (1)...(19): siRNA sense strand
ugaaugagcaugauuuuga

SEQ ID NO: 339357 - RNA, 19 nt, Homo sapiens
  misc_RNA (1)...(19): siRNA sense strand
ggcuagaaaucuguugcua

SEQ ID NO: 339358 - RNA, 19 nt, Homo sapiens
  misc_RNA (1)...(19): siRNA sense strand
ugaaacaagcgucucugaa

SEQ ID NO: 339359 - RNA, 19 nt, Homo sapiens
  misc_RNA (1)...(19): siRNA sense strand
aacauaaccugauaaagcu

SEQ ID NO: 339360 - RNA, 19 nt, Homo sapiens
  misc_RNA (1)...(19): siRNA sense strand
ugacccagucuauuaaaga

SEQ ID NO: 339361 - RNA, 19 nt, Homo sapiens
  misc_RNA (1)...(19): siRNA sense strand
gaacuagaagcuguguuag

SEQ ID NO: 339362 - RNA, 19 nt, Homo sapiens
  misc_RNA (1)...(19): siRNA sense strand
gugaaacaagcgucucuga

SEQ ID NO: 339363 - RNA, 19 nt, Homo sapiens
  misc_RNA (1)...(19): siRNA sense strand
ccaacaugcccacagauca

SEQ ID NO: 339364 - RNA, 19 nt, Homo sapiens
  misc_RNA (1)...(19): siRNA sense strand
uaugggcccuucaccaaca

SEQ ID NO: 339365 - RNA, 19 nt, Homo sapiens
  misc_RNA (1)...(19): siRNA sense strand
guccaaagcgagcaagaga

SEQ ID NO: 339366 - RNA, 19 nt, Homo sapiens
  misc_RNA (1)...(19): siRNA sense strand
cagaacaaagcacaucaga

SEQ ID NO: 339367 - RNA, 19 nt, Homo sapiens
  misc_RNA (1)...(19): siRNA sense strand
ccugcgaaauccagaacaa

SEQ ID NO: 339368 - RNA, 19 nt, Homo sapiens
  misc_RNA (1)...(19): siRNA sense strand
gaaaccaccaagguccaaa

SEQ ID NO: 339369 - RNA, 19 nt, Homo sapiens
  misc_RNA (1)...(19): siRNA sense strand
gauaaagcuccagcaggaa

SEQ ID NO: 339370 - RNA, 19 nt, Homo sapiens
  misc_RNA (1)...(19): siRNA sense strand
aaggagcuuucaucauuca

SEQ ID NO: 339371 - RNA, 19 nt, Homo sapiens
  misc_RNA (1)...(19): siRNA sense strand
ggugugagagugaaacaag

SEQ ID NO: 339372 - RNA, 19 nt, Homo sapiens
  misc_RNA (1)...(19): siRNA sense strand
gaaauggcugaacuagaag

SEQ ID NO: 339373 - RNA, 19 nt, Homo sapiens
  misc_RNA (1)...(19): siRNA sense strand
auaaagcuccagcaggaaa

SEQ ID NO: 339374 - RNA, 19 nt, Homo sapiens
  misc_RNA (1)...(19): siRNA sense strand
acccuuccaucauaaguga

SEQ ID NO: 339375 - RNA, 19 nt, Homo sapiens
  misc_RNA (1)...(19): siRNA sense strand
ggugacccagucuauuaaa

SEQ ID NO: 339376 - RNA, 19 nt, Homo sapiens
  misc_RNA (1)...(19): siRNA sense strand
cccagucuauuaaagaaag

SEQ ID NO: 339377 - RNA, 19 nt, Homo sapiens
  misc_RNA (1)...(19): siRNA sense strand
caucugggugugagaguga

SEQ ID NO: 339378 - RNA, 19 nt, Homo sapiens
  misc_RNA (1)...(19): siRNA sense strand
ccagucuauuaaagaaaga

SEQ ID NO: 339379 - RNA, 19 nt, Homo sapiens
  misc_RNA (1)...(19): siRNA sense strand
cgaaauccagaacaaagca

SEQ ID NO: 339380 - RNA, 19 nt, Homo sapiens
  misc_RNA (1)...(19): siRNA sense strand
aagagaaucccaggacaga

SEQ ID NO: 339381 - RNA, 19 nt, Homo sapiens
  misc_RNA (1)...(19): siRNA sense strand
gauguggucaauggaagaa

SEQ ID NO: 339382 - RNA, 19 nt, Homo sapiens
  misc_RNA (1)...(19): siRNA sense strand
ggaccugcgaaauccagaa

SEQ ID NO: 339383 - RNA, 19 nt, Homo sapiens
  misc_RNA (1)...(19): siRNA sense strand
gagcaugauuuugaaguca

SEQ ID NO: 339384 - RNA, 19 nt, Homo sapiens
  misc_RNA (1)...(19): siRNA sense strand
gugacccagucuauuaaag

SEQ ID NO: 339385 - RNA, 19 nt, Homo sapiens
  misc_RNA (1)...(19): siRNA sense strand
agaacaaagcacaucagaa

SEQ ID NO: 339386 - RNA, 19 nt, Homo sapiens
  misc_RNA (1)...(19): siRNA sense strand
uggaagaaaccaccaaggu

SEQ ID NO: 339387 - RNA, 19 nt, Homo sapiens
  misc_RNA (1)...(19): siRNA sense strand
ucaacuggaauggauggua

SEQ ID NO: 339388 - RNA, 19 nt, Homo sapiens
  misc_RNA (1)...(19): siRNA sense strand
ggaaauggcugaacuagaa

SEQ ID NO: 339389 - RNA, 19 nt, Homo sapiens
  misc_RNA (1)...(19): siRNA sense strand
gaacaaagcacaucagaaa

SEQ ID NO: 339390 - RNA, 19 nt, Homo sapiens
  misc_RNA (1)...(19): siRNA sense strand
cagcuacccuuccaucaua

SEQ ID NO: 339391 - RNA, 19 nt, Homo sapiens
  misc_RNA (1)...(19): siRNA sense strand
gggauaccaugcaacauaa

SEQ ID NO: 339392 - RNA, 19 nt, Homo sapiens
  misc_RNA (1)...(19): siRNA sense strand
gaggagauguggucaaugg

SEQ ID NO: 339393 - RNA, 19 nt, Homo sapiens
  misc_RNA (1)...(19): siRNA sense strand
gaaggagcuuucaucauuc

SEQ ID NO: 339394 - RNA, 19 nt, Homo sapiens
  misc_RNA (1)...(19): siRNA sense strand
cuagaaaucuguugcuaug

SEQ ID NO: 339395 - RNA, 19 nt, Homo sapiens
  misc_RNA (1)...(19): siRNA sense strand
gcucagggcuauccucuca

SEQ ID NO: 339396 - RNA, 19 nt, Homo sapiens
  misc_RNA (1)...(19): siRNA sense strand
aaacaagcgucucugaaga

SEQ ID NO: 339397 - RNA, 19 nt, Homo sapiens
  misc_RNA (1)...(19): siRNA sense strand
caacauaaccugauaaagc

SEQ ID NO: 339398 - RNA, 19 nt, Homo sapiens
  misc_RNA (1)...(19): siRNA sense strand
gaaacaagcgucucugaag

SEQ ID NO: 339399 - RNA, 19 nt, Homo sapiens
  misc_RNA (1)...(19): siRNA sense strand
gcagagggauaccaugcaa

SEQ ID NO: 339400 - RNA, 19 nt, Homo sapiens
  misc_RNA (1)...(19): siRNA sense strand
ugaacuagaagcuguguua

SEQ ID NO: 339401 - RNA, 19 nt, Homo sapiens
  misc_RNA (1)...(19): siRNA sense strand
gagaaucccaggacagaaa

SEQ ID NO: 339402 - RNA, 19 nt, Homo sapiens
  misc_RNA (1)...(19): siRNA sense strand
gcccacagaucaacuggaa

SEQ ID NO: 339403 - RNA, 19 nt, Homo sapiens
  misc_RNA (1)...(19): siRNA sense strand
gaagacugcucagggcuau

SEQ ID NO: 339404 - RNA, 19 nt, Homo sapiens
  misc_RNA (1)...(19): siRNA sense strand
gacccagucuauuaaagaa

SEQ ID NO: 339405 - RNA, 19 nt, Homo sapiens
  misc_RNA (1)...(19): siRNA sense strand
acuagaagcuguguuagaa

SEQ ID NO: 339406 - RNA, 19 nt, Homo sapiens
  misc_RNA (1)...(19): siRNA sense strand
caugcaacauaaccugaua

SEQ ID NO: 339407 - RNA, 19 nt, Homo sapiens
  misc_RNA (1)...(19): siRNA sense strand
gcuggacaccuaccugaua

SEQ ID NO: 339408 - RNA, 19 nt, Homo sapiens
  misc_RNA (1)...(19): siRNA sense strand
cagaucaacuggaauggau

SEQ ID NO: 339409 - RNA, 19 nt, Homo sapiens
  misc_RNA (1)...(19): siRNA sense strand
gcaggaaauggcugaacua

SEQ ID NO: 339410 - RNA, 19 nt, Homo sapiens
  misc_RNA (1)...(19): siRNA sense strand
ccacagaucaacuggaaug

SEQ ID NO: 339411 - RNA, 19 nt, Homo sapiens
  misc_RNA (1)...(19): siRNA sense strand
caacaugcccacagaucaa

SEQ ID NO: 339412 - RNA, 19 nt, Homo sapiens
  misc_RNA (1)...(19): siRNA sense strand
ucaccaacaugcccacaga

SEQ ID NO: 339413 - RNA, 19 nt, Homo sapiens
  misc_RNA (1)...(19): siRNA sense strand
cagaggagauguggucaau

SEQ ID NO: 339414 - RNA, 19 nt, Homo sapiens
  misc_RNA (1)...(19): siRNA sense strand
caauugggcagauguguga

SEQ ID NO: 339415 - RNA, 19 nt, Homo sapiens
  misc_RNA (1)...(19): siRNA sense strand
ggagauguggucaauggaa

SEQ ID NO: 339416 - RNA, 19 nt, Homo sapiens
  misc_RNA (1)...(19): siRNA sense strand
guacagcuguguggugcuu

SEQ ID NO: 339417 - RNA, 19 nt, Homo sapiens
  misc_RNA (1)...(19): siRNA sense strand
ccaaagcgagcaagagaau

SEQ ID NO: 339418 - RNA, 19 nt, Homo sapiens
  misc_RNA (1)...(19): siRNA sense strand
gcuaugggcccuucaccaa

SEQ ID NO: 339419 - RNA, 19 nt, Homo sapiens
  misc_RNA (1)...(19): siRNA sense strand
gaaugagcaugauuuugaa

SEQ ID NO: 339420 - RNA, 19 nt, Homo sapiens
  misc_RNA (1)...(19): siRNA sense strand
ucagggcuauccucucaga

SEQ ID NO: 339421 - RNA, 19 nt, Homo sapiens
  misc_RNA (1)...(19): siRNA sense strand
agggauaccaugcaacaua

SEQ ID NO: 339422 - RNA, 19 nt, Homo sapiens
  misc_RNA (1)...(19): siRNA sense strand
gcuagaaaucuguugcuau

SEQ ID NO: 339423 - RNA, 19 nt, Homo sapiens
  misc_RNA (1)...(19): siRNA sense strand
ugaaugagcaugauuuuga

SEQ ID NO: 339424 - RNA, 19 nt, Homo sapiens
  misc_RNA (1)...(19): siRNA sense strand
ggcuagaaaucuguugcua

SEQ ID NO: 339425 - RNA, 19 nt, Homo sapiens
  misc_RNA (1)...(19): siRNA sense strand
ugaaacaagcgucucugaa

SEQ ID NO: 339426 - RNA, 19 nt, Homo sapiens
  misc_RNA (1)...(19): siRNA sense strand
aacauaaccugauaaagcu

SEQ ID NO: 339427 - RNA, 19 nt, Homo sapiens
  misc_RNA (1)...(19): siRNA sense strand
ugacccagucuauuaaaga

SEQ ID NO: 339428 - RNA, 19 nt, Homo sapiens
  misc_RNA (1)...(19): siRNA sense strand
gaacuagaagcuguguuag

SEQ ID NO: 339429 - RNA, 19 nt, Homo sapiens
  misc_RNA (1)...(19): siRNA sense strand
gugaaacaagcgucucuga

SEQ ID NO: 339430 - RNA, 19 nt, Homo sapiens
  misc_RNA (1)...(19): siRNA sense strand
ccaacaugcccacagauca

SEQ ID NO: 339431 - RNA, 19 nt, Homo sapiens
  misc_RNA (1)...(19): siRNA sense strand
uaugggcccuucaccaaca

SEQ ID NO: 339432 - RNA, 19 nt, Homo sapiens
  misc_RNA (1)...(19): siRNA sense strand
guccaaagcgagcaagaga

SEQ ID NO: 339433 - RNA, 19 nt, Homo sapiens
  misc_RNA (1)...(19): siRNA sense strand
cagaacaaagcacaucaga

SEQ ID NO: 339434 - RNA, 19 nt, Homo sapiens
  misc_RNA (1)...(19): siRNA sense strand
ccugcgaaauccagaacaa

SEQ ID NO: 339435 - RNA, 19 nt, Homo sapiens
  misc_RNA (1)...(19): siRNA sense strand
gaaaccaccaagguccaaa

SEQ ID NO: 339436 - RNA, 19 nt, Homo sapiens
  misc_RNA (1)...(19): siRNA sense strand
gauaaagcuccagcaggaa

SEQ ID NO: 339437 - RNA, 19 nt, Homo sapiens
  misc_RNA (1)...(19): siRNA sense strand
aaggagcuuucaucauuca

SEQ ID NO: 339438 - RNA, 19 nt, Homo sapiens
  misc_RNA (1)...(19): siRNA sense strand
ggugugagagugaaacaag

SEQ ID NO: 339439 - RNA, 19 nt, Homo sapiens
  misc_RNA (1)...(19): siRNA sense strand
gaaauggcugaacuagaag

SEQ ID NO: 339440 - RNA, 19 nt, Homo sapiens
  misc_RNA (1)...(19): siRNA sense strand
auaaagcuccagcaggaaa

SEQ ID NO: 339441 - RNA, 19 nt, Homo sapiens
  misc_RNA (1)...(19): siRNA sense strand
acccuuccaucauaaguga

SEQ ID NO: 339442 - RNA, 19 nt, Homo sapiens
  misc_RNA (1)...(19): siRNA sense strand
ggugacccagucuauuaaa

SEQ ID NO: 339443 - RNA, 19 nt, Homo sapiens
  misc_RNA (1)...(19): siRNA sense strand
cccagucuauuaaagaaag

SEQ ID NO: 339444 - RNA, 19 nt, Homo sapiens
  misc_RNA (1)...(19): siRNA sense strand
caucugggugugagaguga

SEQ ID NO: 339445 - RNA, 19 nt, Homo sapiens
  misc_RNA (1)...(19): siRNA sense strand
ccagucuauuaaagaaaga

SEQ ID NO: 339446 - RNA, 19 nt, Homo sapiens
  misc_RNA (1)...(19): siRNA sense strand
cgaaauccagaacaaagca

SEQ ID NO: 339447 - RNA, 19 nt, Homo sapiens
  misc_RNA (1)...(19): siRNA sense strand
aagagaaucccaggacaga

SEQ ID NO: 339448 - RNA, 19 nt, Homo sapiens
  misc_RNA (1)...(19): siRNA sense strand
gauguggucaauggaagaa

SEQ ID NO: 339449 - RNA, 19 nt, Homo sapiens
  misc_RNA (1)...(19): siRNA sense strand
ggaccugcgaaauccagaa

SEQ ID NO: 339450 - RNA, 19 nt, Homo sapiens
  misc_RNA (1)...(19): siRNA sense strand
gagcaugauuuugaaguca

SEQ ID NO: 339451 - RNA, 19 nt, Homo sapiens
  misc_RNA (1)...(19): siRNA sense strand
gugacccagucuauuaaag

SEQ ID NO: 339452 - RNA, 19 nt, Homo sapiens
  misc_RNA (1)...(19): siRNA sense strand
agaacaaagcacaucagaa

SEQ ID NO: 339453 - RNA, 19 nt, Homo sapiens
  misc_RNA (1)...(19): siRNA sense strand
uggaagaaaccaccaaggu

SEQ ID NO: 339454 - RNA, 19 nt, Homo sapiens
  misc_RNA (1)...(19): siRNA sense strand
ucaacuggaauggauggua

SEQ ID NO: 339455 - RNA, 19 nt, Homo sapiens
  misc_RNA (1)...(19): siRNA sense strand
ggaaauggcugaacuagaa

SEQ ID NO: 339456 - RNA, 19 nt, Homo sapiens
  misc_RNA (1)...(19): siRNA sense strand
gaacaaagcacaucagaaa

SEQ ID NO: 339457 - RNA, 19 nt, Homo sapiens
  misc_RNA (1)...(19): siRNA sense strand
cagcuacccuuccaucaua

SEQ ID NO: 339458 - RNA, 19 nt, Homo sapiens
  misc_RNA (1)...(19): siRNA sense strand
gggauaccaugcaacauaa

SEQ ID NO: 339459 - RNA, 19 nt, Homo sapiens
  misc_RNA (1)...(19): siRNA sense strand
gaggagauguggucaaugg

SEQ ID NO: 339460 - RNA, 19 nt, Homo sapiens
  misc_RNA (1)...(19): siRNA sense strand
gaaggagcuuucaucauuc

SEQ ID NO: 339461 - RNA, 19 nt, Homo sapiens
  misc_RNA (1)...(19): siRNA sense strand
cuagaaaucuguugcuaug

SEQ ID NO: 339462 - RNA, 19 nt, Homo sapiens
  misc_RNA (1)...(19): siRNA sense strand
gcucagggcuauccucuca

SEQ ID NO: 339463 - RNA, 19 nt, Homo sapiens
  misc_RNA (1)...(19): siRNA sense strand
aaacaagcgucucugaaga

SEQ ID NO: 339464 - RNA, 19 nt, Homo sapiens
  misc_RNA (1)...(19): siRNA sense strand
caacauaaccugauaaagc

SEQ ID NO: 339465 - RNA, 19 nt, Homo sapiens
  misc_RNA (1)...(19): siRNA sense strand
gaaacaagcgucucugaag

SEQ ID NO: 339466 - RNA, 19 nt, Homo sapiens
  misc_RNA (1)...(19): siRNA sense strand
gcagagggauaccaugcaa

SEQ ID NO: 339467 - RNA, 19 nt, Homo sapiens
  misc_RNA (1)...(19): siRNA sense strand
ugaacuagaagcuguguua

SEQ ID NO: 339468 - RNA, 19 nt, Homo sapiens
  misc_RNA (1)...(19): siRNA sense strand
gagaaucccaggacagaaa

SEQ ID NO: 339469 - RNA, 19 nt, Homo sapiens
  misc_RNA (1)...(19): siRNA sense strand
gcccacagaucaacuggaa

SEQ ID NO: 339470 - RNA, 19 nt, Homo sapiens
  misc_RNA (1)...(19): siRNA sense strand
gaagacugcucagggcuau

SEQ ID NO: 339471 - RNA, 19 nt, Homo sapiens
  misc_RNA (1)...(19): siRNA sense strand
gacccagucuauuaaagaa

SEQ ID NO: 339472 - RNA, 19 nt, Homo sapiens
  misc_RNA (1)...(19): siRNA sense strand
acuagaagcuguguuagaa

SEQ ID NO: 339473 - RNA, 19 nt, Homo sapiens
  misc_RNA (1)...(19): siRNA sense strand
caugcaacauaaccugaua

SEQ ID NO: 339474 - RNA, 19 nt, Homo sapiens
  misc_RNA (1)...(19): siRNA sense strand
gcuggacaccuaccugaua

SEQ ID NO: 339475 - RNA, 19 nt, Homo sapiens
  misc_RNA (1)...(19): siRNA sense strand
cagaucaacuggaauggau

SEQ ID NO: 339476 - RNA, 19 nt, Homo sapiens
  misc_RNA (1)...(19): siRNA sense strand
gcaggaaauggcugaacua

SEQ ID NO: 339477 - RNA, 19 nt, Homo sapiens
  misc_RNA (1)...(19): siRNA sense strand
ccacagaucaacuggaaug

SEQ ID NO: 339478 - RNA, 19 nt, Homo sapiens
  misc_RNA (1)...(19): siRNA sense strand
caacaugcccacagaucaa

SEQ ID NO: 339479 - RNA, 19 nt, Homo sapiens
  misc_RNA (1)...(19): siRNA sense strand
ucaccaacaugcccacaga

SEQ ID NO: 339480 - RNA, 19 nt, Homo sapiens
  misc_RNA (1)...(19): siRNA sense strand
cagaggagauguggucaau

SEQ ID NO: 339481 - RNA, 19 nt, Homo sapiens
  misc_RNA (1)...(19): siRNA sense strand
caauugggcagauguguga

SEQ ID NO: 339482 - RNA, 19 nt, Homo sapiens
  misc_RNA (1)...(19): siRNA sense strand
ggagauguggucaauggaa

SEQ ID NO: 339483 - RNA, 19 nt, Homo sapiens
  misc_RNA (1)...(19): siRNA sense strand
guacagcuguguggugcuu

SEQ ID NO: 339484 - RNA, 19 nt, Homo sapiens
  misc_RNA (1)...(19): siRNA sense strand
ccaaagcgagcaagagaau

SEQ ID NO: 339485 - RNA, 19 nt, Homo sapiens
  misc_RNA (1)...(19): siRNA sense strand
gcuaugggcccuucaccaa

SEQ ID NO: 339486 - RNA, 19 nt, Homo sapiens
  misc_RNA (1)...(19): siRNA sense strand
gaaugagcaugauuuugaa

SEQ ID NO: 339487 - RNA, 19 nt, Homo sapiens
  misc_RNA (1)...(19): siRNA sense strand
ucagggcuauccucucaga

SEQ ID NO: 339488 - RNA, 19 nt, Homo sapiens
  misc_RNA (1)...(19): siRNA sense strand
agggauaccaugcaacaua

SEQ ID NO: 339489 - RNA, 19 nt, Homo sapiens
  misc_RNA (1)...(19): siRNA sense strand
gcuagaaaucuguugcuau

SEQ ID NO: 339490 - RNA, 19 nt, Homo sapiens
  misc_RNA (1)...(19): siRNA sense strand
ugaaugagcaugauuuuga

SEQ ID NO: 339491 - RNA, 19 nt, Homo sapiens
  misc_RNA (1)...(19): siRNA sense strand
ggcuagaaaucuguugcua

SEQ ID NO: 339492 - RNA, 19 nt, Homo sapiens
  misc_RNA (1)...(19): siRNA sense strand
ugaaacaagcgucucugaa

SEQ ID NO: 339493 - RNA, 19 nt, Homo sapiens
  misc_RNA (1)...(19): siRNA sense strand
aacauaaccugauaaagcu

SEQ ID NO: 339494 - RNA, 19 nt, Homo sapiens
  misc_RNA (1)...(19): siRNA sense strand
ugacccagucuauuaaaga

SEQ ID NO: 339495 - RNA, 19 nt, Homo sapiens
  misc_RNA (1)...(19): siRNA sense strand
gaacuagaagcuguguuag

SEQ ID NO: 339496 - RNA, 19 nt, Homo sapiens
  misc_RNA (1)...(19): siRNA sense strand
gugaaacaagcgucucuga

SEQ ID NO: 339497 - RNA, 19 nt, Homo sapiens
  misc_RNA (1)...(19): siRNA sense strand
ccaacaugcccacagauca

SEQ ID NO: 339498 - RNA, 19 nt, Homo sapiens
  misc_RNA (1)...(19): siRNA sense strand
uaugggcccuucaccaaca

SEQ ID NO: 339499 - RNA, 19 nt, Homo sapiens
  misc_RNA (1)...(19): siRNA sense strand
guccaaagcgagcaagaga

SEQ ID NO: 339500 - RNA, 19 nt, Homo sapiens
  misc_RNA (1)...(19): siRNA sense strand
cagaacaaagcacaucaga

SEQ ID NO: 339501 - RNA, 19 nt, Homo sapiens
  misc_RNA (1)...(19): siRNA sense strand
ccugcgaaauccagaacaa

SEQ ID NO: 339502 - RNA, 19 nt, Homo sapiens
  misc_RNA (1)...(19): siRNA sense strand
gaaaccaccaagguccaaa

SEQ ID NO: 339503 - RNA, 19 nt, Homo sapiens
  misc_RNA (1)...(19): siRNA sense strand
gauaaagcuccagcaggaa

SEQ ID NO: 339504 - RNA, 19 nt, Homo sapiens
  misc_RNA (1)...(19): siRNA sense strand
aaggagcuuucaucauuca

SEQ ID NO: 339505 - RNA, 19 nt, Homo sapiens
  misc_RNA (1)...(19): siRNA sense strand
ggugugagagugaaacaag

SEQ ID NO: 339506 - RNA, 19 nt, Homo sapiens
  misc_RNA (1)...(19): siRNA sense strand
gaaauggcugaacuagaag

SEQ ID NO: 339507 - RNA, 19 nt, Homo sapiens
  misc_RNA (1)...(19): siRNA sense strand
auaaagcuccagcaggaaa

SEQ ID NO: 339508 - RNA, 19 nt, Homo sapiens
  misc_RNA (1)...(19): siRNA sense strand
acccuuccaucauaaguga

SEQ ID NO: 339509 - RNA, 19 nt, Homo sapiens
  misc_RNA (1)...(19): siRNA sense strand
ggugacccagucuauuaaa

SEQ ID NO: 339510 - RNA, 19 nt, Homo sapiens
  misc_RNA (1)...(19): siRNA sense strand
cccagucuauuaaagaaag

SEQ ID NO: 339511 - RNA, 19 nt, Homo sapiens
  misc_RNA (1)...(19): siRNA sense strand
caucugggugugagaguga

SEQ ID NO: 339512 - RNA, 19 nt, Homo sapiens
  misc_RNA (1)...(19): siRNA sense strand
ccagucuauuaaagaaaga

SEQ ID NO: 339513 - RNA, 19 nt, Homo sapiens
  misc_RNA (1)...(19): siRNA sense strand
cgaaauccagaacaaagca

SEQ ID NO: 339514 - RNA, 19 nt, Homo sapiens
  misc_RNA (1)...(19): siRNA sense strand
aagagaaucccaggacaga

SEQ ID NO: 339515 - RNA, 19 nt, Homo sapiens
  misc_RNA (1)...(19): siRNA sense strand
gauguggucaauggaagaa

SEQ ID NO: 339516 - RNA, 19 nt, Homo sapiens
  misc_RNA (1)...(19): siRNA sense strand
ggaccugcgaaauccagaa

SEQ ID NO: 339517 - RNA, 19 nt, Homo sapiens
  misc_RNA (1)...(19): siRNA sense strand
gagcaugauuuugaaguca

SEQ ID NO: 339518 - RNA, 19 nt, Homo sapiens
  misc_RNA (1)...(19): siRNA sense strand
gugacccagucuauuaaag

SEQ ID NO: 339519 - RNA, 19 nt, Homo sapiens
  misc_RNA (1)...(19): siRNA sense strand
agaacaaagcacaucagaa

SEQ ID NO: 339520 - RNA, 19 nt, Homo sapiens
  misc_RNA (1)...(19): siRNA sense strand
uggaagaaaccaccaaggu

SEQ ID NO: 339521 - RNA, 19 nt, Homo sapiens
  misc_RNA (1)...(19): siRNA sense strand
ucaacuggaauggauggua

SEQ ID NO: 339522 - RNA, 19 nt, Homo sapiens
  misc_RNA (1)...(19): siRNA sense strand
ggaaauggcugaacuagaa

SEQ ID NO: 339523 - RNA, 19 nt, Homo sapiens
  misc_RNA (1)...(19): siRNA sense strand
gaacaaagcacaucagaaa

SEQ ID NO: 339524 - RNA, 19 nt, Homo sapiens
  misc_RNA (1)...(19): siRNA sense strand
cagcuacccuuccaucaua

SEQ ID NO: 339525 - RNA, 19 nt, Homo sapiens
  misc_RNA (1)...(19): siRNA sense strand
gggauaccaugcaacauaa

SEQ ID NO: 339526 - RNA, 19 nt, Homo sapiens
  misc_RNA (1)...(19): siRNA sense strand
gaggagauguggucaaugg

SEQ ID NO: 339527 - RNA, 19 nt, Homo sapiens
  misc_RNA (1)...(19): siRNA sense strand
gaaggagcuuucaucauuc

SEQ ID NO: 339528 - RNA, 19 nt, Homo sapiens
  misc_RNA (1)...(19): siRNA sense strand
cuagaaaucuguugcuaug

SEQ ID NO: 339529 - RNA, 19 nt, Homo sapiens
  misc_RNA (1)...(19): siRNA sense strand
gcucagggcuauccucuca

SEQ ID NO: 339530 - RNA, 19 nt, Homo sapiens
  misc_RNA (1)...(19): siRNA sense strand
aaacaagcgucucugaaga

SEQ ID NO: 339531 - RNA, 19 nt, Homo sapiens
  misc_RNA (1)...(19): siRNA sense strand
caacauaaccugauaaagc

SEQ ID NO: 339532 - RNA, 19 nt, Homo sapiens
  misc_RNA (1)...(19): siRNA sense strand
gaaacaagcgucucugaag

SEQ ID NO: 339533 - RNA, 19 nt, Homo sapiens
  misc_RNA (1)...(19): siRNA sense strand
gcagagggauaccaugcaa

SEQ ID NO: 339534 - RNA, 19 nt, Homo sapiens
  misc_RNA (1)...(19): siRNA sense strand
ugaacuagaagcuguguua

SEQ ID NO: 339535 - RNA, 19 nt, Homo sapiens
  misc_RNA (1)...(19): siRNA sense strand
gagaaucccaggacagaaa

SEQ ID NO: 339536 - RNA, 19 nt, Homo sapiens
  misc_RNA (1)...(19): siRNA sense strand
gcccacagaucaacuggaa

SEQ ID NO: 339537 - RNA, 19 nt, Homo sapiens
  misc_RNA (1)...(19): siRNA sense strand
gaagacugcucagggcuau

SEQ ID NO: 339538 - RNA, 19 nt, Homo sapiens
  misc_RNA (1)...(19): siRNA sense strand
gacccagucuauuaaagaa

SEQ ID NO: 339539 - RNA, 19 nt, Homo sapiens
  misc_RNA (1)...(19): siRNA sense strand
acuagaagcuguguuagaa

SEQ ID NO: 339540 - RNA, 19 nt, Homo sapiens
  misc_RNA (1)...(19): siRNA sense strand
caugcaacauaaccugaua

SEQ ID NO: 339541 - RNA, 19 nt, Homo sapiens
  misc_RNA (1)...(19): siRNA sense strand
gcuggacaccuaccugaua

SEQ ID NO: 339542 - RNA, 19 nt, Homo sapiens
  misc_RNA (1)...(19): siRNA sense strand
cagaucaacuggaauggau

SEQ ID NO: 339543 - RNA, 19 nt, Homo sapiens
  misc_RNA (1)...(19): siRNA sense strand
gcaggaaauggcugaacua

SEQ ID NO: 339544 - RNA, 19 nt, Homo sapiens
  misc_RNA (1)...(19): siRNA sense strand
ccacagaucaacuggaaug

SEQ ID NO: 339545 - RNA, 19 nt, Homo sapiens
  misc_RNA (1)...(19): siRNA sense strand
caacaugcccacagaucaa

SEQ ID NO: 339546 - RNA, 19 nt, Homo sapiens
  misc_RNA (1)...(19): siRNA sense strand
ucaccaacaugcccacaga

SEQ ID NO: 339547 - RNA, 19 nt, Homo sapiens
  misc_RNA (1)...(19): siRNA sense strand
cagaggagauguggucaau

SEQ ID NO: 339548 - RNA, 19 nt, Homo sapiens
  misc_RNA (1)...(19): siRNA sense strand
caauugggcagauguguga

SEQ ID NO: 339549 - RNA, 19 nt, Homo sapiens
  misc_RNA (1)...(19): siRNA sense strand
ggagauguggucaauggaa

SEQ ID NO: 339550 - RNA, 19 nt, Homo sapiens
  misc_RNA (1)...(19): siRNA sense strand
guacagcuguguggugcuu

SEQ ID NO: 339551 - RNA, 19 nt, Homo sapiens
  misc_RNA (1)...(19): siRNA sense strand
ccaaagcgagcaagagaau

SEQ ID NO: 339552 - RNA, 19 nt, Homo sapiens
  misc_RNA (1)...(19): siRNA sense strand
gcuaugggcccuucaccaa

SEQ ID NO: 339553 - RNA, 19 nt, Homo sapiens
  misc_RNA (1)...(19): siRNA sense strand
gaaugagcaugauuuugaa

SEQ ID NO: 339554 - RNA, 19 nt, Homo sapiens
  misc_RNA (1)...(19): siRNA sense strand
ucagggcuauccucucaga

SEQ ID NO: 339555 - RNA, 19 nt, Homo sapiens
  misc_RNA (1)...(19): siRNA sense strand
agggauaccaugcaacaua

SEQ ID NO: 339556 - RNA, 19 nt, Homo sapiens
  misc_RNA (1)...(19): siRNA sense strand
gcuagaaaucuguugcuau

SEQ ID NO: 339557 - RNA, 19 nt, Homo sapiens
  misc_RNA (1)...(19): siRNA sense strand
ugaaugagcaugauuuuga

SEQ ID NO: 339558 - RNA, 19 nt, Homo sapiens
  misc_RNA (1)...(19): siRNA sense strand
ggcuagaaaucuguugcua

SEQ ID NO: 339559 - RNA, 19 nt, Homo sapiens
  misc_RNA (1)...(19): siRNA sense strand
ugaaacaagcgucucugaa

SEQ ID NO: 339560 - RNA, 19 nt, Homo sapiens
  misc_RNA (1)...(19): siRNA sense strand
aacauaaccugauaaagcu

SEQ ID NO: 339561 - RNA, 19 nt, Homo sapiens
  misc_RNA (1)...(19): siRNA sense strand
ugacccagucuauuaaaga

SEQ ID NO: 339562 - RNA, 19 nt, Homo sapiens
  misc_RNA (1)...(19): siRNA sense strand
gaacuagaagcuguguuag

SEQ ID NO: 339563 - RNA, 19 nt, Homo sapiens
  misc_RNA (1)...(19): siRNA sense strand
gugaaacaagcgucucuga

SEQ ID NO: 339564 - RNA, 19 nt, Homo sapiens
  misc_RNA (1)...(19): siRNA sense strand
ccaacaugcccacagauca

SEQ ID NO: 339565 - RNA, 19 nt, Homo sapiens
  misc_RNA (1)...(19): siRNA sense strand
uaugggcccuucaccaaca

SEQ ID NO: 339566 - RNA, 19 nt, Homo sapiens
  misc_RNA (1)...(19): siRNA sense strand
guccaaagcgagcaagaga

SEQ ID NO: 339567 - RNA, 19 nt, Homo sapiens
  misc_RNA (1)...(19): siRNA sense strand
cagaacaaagcacaucaga

SEQ ID NO: 339568 - RNA, 19 nt, Homo sapiens
  misc_RNA (1)...(19): siRNA sense strand
ccugcgaaauccagaacaa

SEQ ID NO: 339569 - RNA, 19 nt, Homo sapiens
  misc_RNA (1)...(19): siRNA sense strand
gaaaccaccaagguccaaa

SEQ ID NO: 339570 - RNA, 19 nt, Homo sapiens
  misc_RNA (1)...(19): siRNA sense strand
gauaaagcuccagcaggaa

SEQ ID NO: 339571 - RNA, 19 nt, Homo sapiens
  misc_RNA (1)...(19): siRNA sense strand
aaggagcuuucaucauuca

SEQ ID NO: 339572 - RNA, 19 nt, Homo sapiens
  misc_RNA (1)...(19): siRNA sense strand
ggugugagagugaaacaag

SEQ ID NO: 339573 - RNA, 19 nt, Homo sapiens
  misc_RNA (1)...(19): siRNA sense strand
gaaauggcugaacuagaag

SEQ ID NO: 339574 - RNA, 19 nt, Homo sapiens
  misc_RNA (1)...(19): siRNA sense strand
auaaagcuccagcaggaaa

SEQ ID NO: 339575 - RNA, 19 nt, Homo sapiens
  misc_RNA (1)...(19): siRNA sense strand
acccuuccaucauaaguga

SEQ ID NO: 339576 - RNA, 19 nt, Homo sapiens
  misc_RNA (1)...(19): siRNA sense strand
ggugacccagucuauuaaa

SEQ ID NO: 339577 - RNA, 19 nt, Homo sapiens
  misc_RNA (1)...(19): siRNA sense strand
cccagucuauuaaagaaag

SEQ ID NO: 339578 - RNA, 19 nt, Homo sapiens
  misc_RNA (1)...(19): siRNA sense strand
caucugggugugagaguga

SEQ ID NO: 339579 - RNA, 19 nt, Homo sapiens
  misc_RNA (1)...(19): siRNA sense strand
ccagucuauuaaagaaaga

SEQ ID NO: 339580 - RNA, 19 nt, Homo sapiens
  misc_RNA (1)...(19): siRNA sense strand
cgaaauccagaacaaagca

SEQ ID NO: 339581 - RNA, 19 nt, Homo sapiens
  misc_RNA (1)...(19): siRNA sense strand
aagagaaucccaggacaga

SEQ ID NO: 339582 - RNA, 19 nt, Homo sapiens
  misc_RNA (1)...(19): siRNA sense strand
gauguggucaauggaagaa

SEQ ID NO: 339583 - RNA, 19 nt, Homo sapiens
  misc_RNA (1)...(19): siRNA sense strand
ggaccugcgaaauccagaa

SEQ ID NO: 339584 - RNA, 19 nt, Homo sapiens
  misc_RNA (1)...(19): siRNA sense strand
gagcaugauuuugaaguca

SEQ ID NO: 339585 - RNA, 19 nt, Homo sapiens
  misc_RNA (1)...(19): siRNA sense strand
gugacccagucuauuaaag

SEQ ID NO: 339586 - RNA, 19 nt, Homo sapiens
  misc_RNA (1)...(19): siRNA sense strand
agaacaaagcacaucagaa

SEQ ID NO: 339587 - RNA, 19 nt, Homo sapiens
  misc_RNA (1)...(19): siRNA sense strand
uggaagaaaccaccaaggu

SEQ ID NO: 339588 - RNA, 19 nt, Homo sapiens
  misc_RNA (1)...(19): siRNA sense strand
ucaacuggaauggauggua

SEQ ID NO: 339589 - RNA, 19 nt, Homo sapiens
  misc_RNA (1)...(19): siRNA sense strand
ggaaauggcugaacuagaa

SEQ ID NO: 339590 - RNA, 19 nt, Homo sapiens
  misc_RNA (1)...(19): siRNA sense strand
gaacaaagcacaucagaaa

SEQ ID NO: 339591 - RNA, 19 nt, Homo sapiens
  misc_RNA (1)...(19): siRNA sense strand
cagcuacccuuccaucaua

SEQ ID NO: 339592 - RNA, 19 nt, Homo sapiens
  misc_RNA (1)...(19): siRNA sense strand
gggauaccaugcaacauaa

SEQ ID NO: 339593 - RNA, 19 nt, Homo sapiens
  misc_RNA (1)...(19): siRNA sense strand
gaggagauguggucaaugg

SEQ ID NO: 339594 - RNA, 19 nt, Homo sapiens
  misc_RNA (1)...(19): siRNA sense strand
gaaggagcuuucaucauuc

SEQ ID NO: 339595 - RNA, 19 nt, Homo sapiens
  misc_RNA (1)...(19): siRNA sense strand
cuagaaaucuguugcuaug

SEQ ID NO: 339596 - RNA, 19 nt, Homo sapiens
  misc_RNA (1)...(19): siRNA sense strand
gcucagggcuauccucuca

SEQ ID NO: 339597 - RNA, 19 nt, Homo sapiens
  misc_RNA (1)...(19): siRNA sense strand
aaacaagcgucucugaaga

SEQ ID NO: 339598 - RNA, 19 nt, Homo sapiens
  misc_RNA (1)...(19): siRNA sense strand
caacauaaccugauaaagc

SEQ ID NO: 339599 - RNA, 19 nt, Homo sapiens
  misc_RNA (1)...(19): siRNA sense strand
gaaacaagcgucucugaag

SEQ ID NO: 339600 - RNA, 19 nt, Homo sapiens
  misc_RNA (1)...(19): siRNA sense strand
gcagagggauaccaugcaa

SEQ ID NO: 339601 - RNA, 19 nt, Homo sapiens
  misc_RNA (1)...(19): siRNA sense strand
ugaacuagaagcuguguua

SEQ ID NO: 339602 - RNA, 19 nt, Homo sapiens
  misc_RNA (1)...(19): siRNA sense strand
gagaaucccaggacagaaa

SEQ ID NO: 339603 - RNA, 19 nt, Homo sapiens
  misc_RNA (1)...(19): siRNA sense strand
gcccacagaucaacuggaa

SEQ ID NO: 339604 - RNA, 19 nt, Homo sapiens
  misc_RNA (1)...(19): siRNA sense strand
gaagacugcucagggcuau

SEQ ID NO: 339605 - RNA, 19 nt, Homo sapiens
  misc_RNA (1)...(19): siRNA sense strand
gacccagucuauuaaagaa

SEQ ID NO: 339606 - RNA, 19 nt, Homo sapiens
  misc_RNA (1)...(19): siRNA sense strand
acuagaagcuguguuagaa

SEQ ID NO: 339607 - RNA, 19 nt, Homo sapiens
  misc_RNA (1)...(19): siRNA sense strand
caugcaacauaaccugaua

SEQ ID NO: 339608 - RNA, 19 nt, Homo sapiens
  misc_RNA (1)...(19): siRNA sense strand
gcuggacaccuaccugaua

SEQ ID NO: 339609 - RNA, 19 nt, Homo sapiens
  misc_RNA (1)...(19): siRNA sense strand
cagaucaacuggaauggau

SEQ ID NO: 339610 - RNA, 19 nt, Homo sapiens
  misc_RNA (1)...(19): siRNA sense strand
gcaggaaauggcugaacua

SEQ ID NO: 339611 - RNA, 19 nt, Homo sapiens
  misc_RNA (1)...(19): siRNA sense strand
ccacagaucaacuggaaug

SEQ ID NO: 339612 - RNA, 19 nt, Homo sapiens
  misc_RNA (1)...(19): siRNA sense strand
caacaugcccacagaucaa

SEQ ID NO: 339613 - RNA, 19 nt, Homo sapiens
  misc_RNA (1)...(19): siRNA sense strand
ucaccaacaugcccacaga

SEQ ID NO: 339614 - RNA, 19 nt, Homo sapiens
  misc_RNA (1)...(19): siRNA sense strand
cagaggagauguggucaau

SEQ ID NO: 339615 - RNA, 19 nt, Homo sapiens
  misc_RNA (1)...(19): siRNA sense strand
caauugggcagauguguga

SEQ ID NO: 339616 - RNA, 19 nt, Homo sapiens
  misc_RNA (1)...(19): siRNA sense strand
ggagauguggucaauggaa

SEQ ID NO: 339617 - RNA, 19 nt, Homo sapiens
  misc_RNA (1)...(19): siRNA sense strand
guacagcuguguggugcuu

SEQ ID NO: 339618 - RNA, 19 nt, Homo sapiens
  misc_RNA (1)...(19): siRNA sense strand
ccaaagcgagcaagagaau

SEQ ID NO: 339619 - RNA, 19 nt, Homo sapiens
  misc_RNA (1)...(19): siRNA sense strand
gcuaugggcccuucaccaa

SEQ ID NO: 339620 - RNA, 19 nt, Homo sapiens
  misc_RNA (1)...(19): siRNA sense strand
gaaugagcaugauuuugaa

SEQ ID NO: 339621 - RNA, 19 nt, Homo sapiens
  misc_RNA (1)...(19): siRNA sense strand
ucagggcuauccucucaga

SEQ ID NO: 339622 - RNA, 19 nt, Homo sapiens
  misc_RNA (1)...(19): siRNA sense strand
agggauaccaugcaacaua

SEQ ID NO: 339623 - RNA, 19 nt, Homo sapiens
  misc_RNA (1)...(19): siRNA sense strand
gcuagaaaucuguugcuau

SEQ ID NO: 339624 - RNA, 19 nt, Homo sapiens
  misc_RNA (1)...(19): siRNA sense strand
ugaaugagcaugauuuuga

SEQ ID NO: 339625 - RNA, 19 nt, Homo sapiens
  misc_RNA (1)...(19): siRNA sense strand
ggcuagaaaucuguugcua

SEQ ID NO: 339626 - RNA, 19 nt, Homo sapiens
  misc_RNA (1)...(19): siRNA sense strand
ugaaacaagcgucucugaa

SEQ ID NO: 339627 - RNA, 19 nt, Homo sapiens
  misc_RNA (1)...(19): siRNA sense strand
aacauaaccugauaaagcu

SEQ ID NO: 339628 - RNA, 19 nt, Homo sapiens
  misc_RNA (1)...(19): siRNA sense strand
ugacccagucuauuaaaga

SEQ ID NO: 339629 - RNA, 19 nt, Homo sapiens
  misc_RNA (1)...(19): siRNA sense strand
gaacuagaagcuguguuag

SEQ ID NO: 339630 - RNA, 19 nt, Homo sapiens
  misc_RNA (1)...(19): siRNA sense strand
gugaaacaagcgucucuga

SEQ ID NO: 339631 - RNA, 19 nt, Homo sapiens
  misc_RNA (1)...(19): siRNA sense strand
ccaacaugcccacagauca

SEQ ID NO: 339632 - RNA, 19 nt, Homo sapiens
  misc_RNA (1)...(19): siRNA sense strand
uaugggcccuucaccaaca

SEQ ID NO: 339633 - RNA, 19 nt, Homo sapiens
  misc_RNA (1)...(19): siRNA sense strand
guccaaagcgagcaagaga

SEQ ID NO: 339634 - RNA, 19 nt, Homo sapiens
  misc_RNA (1)...(19): siRNA sense strand
cagaacaaagcacaucaga

SEQ ID NO: 339635 - RNA, 19 nt, Homo sapiens
  misc_RNA (1)...(19): siRNA sense strand
ccugcgaaauccagaacaa

SEQ ID NO: 339636 - RNA, 19 nt, Homo sapiens
  misc_RNA (1)...(19): siRNA sense strand
gaaaccaccaagguccaaa

SEQ ID NO: 339637 - RNA, 19 nt, Homo sapiens
  misc_RNA (1)...(19): siRNA sense strand
gauaaagcuccagcaggaa

SEQ ID NO: 339638 - RNA, 19 nt, Homo sapiens
  misc_RNA (1)...(19): siRNA sense strand
aaggagcuuucaucauuca

SEQ ID NO: 339639 - RNA, 19 nt, Homo sapiens
  misc_RNA (1)...(19): siRNA sense strand
ggugugagagugaaacaag

SEQ ID NO: 339640 - RNA, 19 nt, Homo sapiens
  misc_RNA (1)...(19): siRNA sense strand
gaaauggcugaacuagaag

SEQ ID NO: 339641 - RNA, 19 nt, Homo sapiens
  misc_RNA (1)...(19): siRNA sense strand
auaaagcuccagcaggaaa

SEQ ID NO: 339642 - RNA, 19 nt, Homo sapiens
  misc_RNA (1)...(19): siRNA sense strand
acccuuccaucauaaguga

SEQ ID NO: 339643 - RNA, 19 nt, Homo sapiens
  misc_RNA (1)...(19): siRNA sense strand
ggugacccagucuauuaaa

SEQ ID NO: 339644 - RNA, 19 nt, Homo sapiens
  misc_RNA (1)...(19): siRNA sense strand
cccagucuauuaaagaaag

SEQ ID NO: 339645 - RNA, 19 nt, Homo sapiens
  misc_RNA (1)...(19): siRNA sense strand
caucugggugugagaguga

SEQ ID NO: 339646 - RNA, 19 nt, Homo sapiens
  misc_RNA (1)...(19): siRNA sense strand
ccagucuauuaaagaaaga

SEQ ID NO: 339647 - RNA, 19 nt, Homo sapiens
  misc_RNA (1)...(19): siRNA sense strand
cgaaauccagaacaaagca

SEQ ID NO: 339648 - RNA, 19 nt, Homo sapiens
  misc_RNA (1)...(19): siRNA sense strand
aagagaaucccaggacaga

SEQ ID NO: 339649 - RNA, 19 nt, Homo sapiens
  misc_RNA (1)...(19): siRNA sense strand
gauguggucaauggaagaa

SEQ ID NO: 339650 - RNA, 19 nt, Homo sapiens
  misc_RNA (1)...(19): siRNA sense strand
ggaccugcgaaauccagaa

SEQ ID NO: 339651 - RNA, 19 nt, Homo sapiens
  misc_RNA (1)...(19): siRNA sense strand
gagcaugauuuugaaguca

SEQ ID NO: 339652 - RNA, 19 nt, Homo sapiens
  misc_RNA (1)...(19): siRNA sense strand
gugacccagucuauuaaag

SEQ ID NO: 339653 - RNA, 19 nt, Homo sapiens
  misc_RNA (1)...(19): siRNA sense strand
agaacaaagcacaucagaa

SEQ ID NO: 339654 - RNA, 19 nt, Homo sapiens
  misc_RNA (1)...(19): siRNA sense strand
uggaagaaaccaccaaggu

SEQ ID NO: 339655 - RNA, 19 nt, Homo sapiens
  misc_RNA (1)...(19): siRNA sense strand
ucaacuggaauggauggua

SEQ ID NO: 339656 - RNA, 19 nt, Homo sapiens
  misc_RNA (1)...(19): siRNA sense strand
ggaaauggcugaacuagaa

SEQ ID NO: 339657 - RNA, 19 nt, Homo sapiens
  misc_RNA (1)...(19): siRNA sense strand
gaacaaagcacaucagaaa

SEQ ID NO: 339658 - RNA, 19 nt, Homo sapiens
  misc_RNA (1)...(19): siRNA sense strand
cagcuacccuuccaucaua

SEQ ID NO: 339659 - RNA, 19 nt, Homo sapiens
  misc_RNA (1)...(19): siRNA sense strand
gggauaccaugcaacauaa

SEQ ID NO: 339660 - RNA, 19 nt, Homo sapiens
  misc_RNA (1)...(19): siRNA sense strand
gaggagauguggucaaugg

SEQ ID NO: 339661 - RNA, 19 nt, Homo sapiens
  misc_RNA (1)...(19): siRNA sense strand
gaaggagcuuucaucauuc

SEQ ID NO: 339662 - RNA, 19 nt, Homo sapiens
  misc_RNA (1)...(19): siRNA sense strand
cuagaaaucuguugcuaug

SEQ ID NO: 339663 - RNA, 19 nt, Homo sapiens
  misc_RNA (1)...(19): siRNA sense strand
gcucagggcuauccucuca

SEQ ID NO: 339664 - RNA, 19 nt, Homo sapiens
  misc_RNA (1)...(19): siRNA sense strand
aaacaagcgucucugaaga

SEQ ID NO: 339665 - RNA, 19 nt, Homo sapiens
  misc_RNA (1)...(19): siRNA sense strand
caacauaaccugauaaagc

SEQ ID NO: 339666 - RNA, 19 nt, Homo sapiens
  misc_RNA (1)...(19): siRNA sense strand
gaaacaagcgucucugaag

SEQ ID NO: 339667 - RNA, 19 nt, Homo sapiens
  misc_RNA (1)...(19): siRNA sense strand
gcagagggauaccaugcaa

SEQ ID NO: 339668 - RNA, 19 nt, Homo sapiens
  misc_RNA (1)...(19): siRNA sense strand
ugaacuagaagcuguguua

SEQ ID NO: 339669 - RNA, 19 nt, Homo sapiens
  misc_RNA (1)...(19): siRNA sense strand
gagaaucccaggacagaaa

SEQ ID NO: 339670 - RNA, 19 nt, Homo sapiens
  misc_RNA (1)...(19): siRNA sense strand
gcccacagaucaacuggaa

SEQ ID NO: 339671 - RNA, 19 nt, Homo sapiens
  misc_RNA (1)...(19): siRNA sense strand
gaagacugcucagggcuau

SEQ ID NO: 339672 - RNA, 19 nt, Homo sapiens
  misc_RNA (1)...(19): siRNA sense strand
gacccagucuauuaaagaa

SEQ ID NO: 339673 - RNA, 19 nt, Homo sapiens
  misc_RNA (1)...(19): siRNA sense strand
acuagaagcuguguuagaa

SEQ ID NO: 339674 - RNA, 19 nt, Homo sapiens
  misc_RNA (1)...(19): siRNA sense strand
caugcaacauaaccugaua

SEQ ID NO: 339675 - RNA, 19 nt, Homo sapiens
  misc_RNA (1)...(19): siRNA sense strand
gcuggacaccuaccugaua

SEQ ID NO: 339676 - RNA, 19 nt, Homo sapiens
  misc_RNA (1)...(19): siRNA sense strand
cagaucaacuggaauggau

SEQ ID NO: 339677 - RNA, 19 nt, Homo sapiens
  misc_RNA (1)...(19): siRNA sense strand
gcaggaaauggcugaacua

SEQ ID NO: 339678 - RNA, 19 nt, Homo sapiens
  misc_RNA (1)...(19): siRNA sense strand
ccacagaucaacuggaaug

SEQ ID NO: 339679 - RNA, 19 nt, Homo sapiens
  misc_RNA (1)...(19): siRNA sense strand
caacaugcccacagaucaa

SEQ ID NO: 339680 - RNA, 19 nt, Homo sapiens
  misc_RNA (1)...(19): siRNA sense strand
ucaccaacaugcccacaga

SEQ ID NO: 339681 - RNA, 19 nt, Homo sapiens
  misc_RNA (1)...(19): siRNA sense strand
cagaggagauguggucaau

SEQ ID NO: 339682 - RNA, 19 nt, Homo sapiens
  misc_RNA (1)...(19): siRNA sense strand
caauugggcagauguguga

SEQ ID NO: 339683 - RNA, 19 nt, Homo sapiens
  misc_RNA (1)...(19): siRNA sense strand
ggagauguggucaauggaa

SEQ ID NO: 339684 - RNA, 19 nt, Homo sapiens
  misc_RNA (1)...(19): siRNA sense strand
guacagcuguguggugcuu

SEQ ID NO: 339685 - RNA, 19 nt, Homo sapiens
  misc_RNA (1)...(19): siRNA sense strand
ccaaagcgagcaagagaau

SEQ ID NO: 339686 - RNA, 19 nt, Homo sapiens
  misc_RNA (1)...(19): siRNA sense strand
gcuaugggcccuucaccaa

SEQ ID NO: 339687 - RNA, 19 nt, Homo sapiens
  misc_RNA (1)...(19): siRNA sense strand
gaaugagcaugauuuugaa

SEQ ID NO: 339688 - RNA, 19 nt, Homo sapiens
  misc_RNA (1)...(19): siRNA sense strand
ucagggcuauccucucaga

SEQ ID NO: 339689 - RNA, 19 nt, Homo sapiens
  misc_RNA (1)...(19): siRNA sense strand
agggauaccaugcaacaua

SEQ ID NO: 339690 - RNA, 19 nt, Homo sapiens
  misc_RNA (1)...(19): siRNA sense strand
gcuagaaaucuguugcuau

SEQ ID NO: 339691 - RNA, 19 nt, Homo sapiens
  misc_RNA (1)...(19): siRNA sense strand
ugaaugagcaugauuuuga

SEQ ID NO: 339692 - RNA, 19 nt, Homo sapiens
  misc_RNA (1)...(19): siRNA sense strand
ggcuagaaaucuguugcua

SEQ ID NO: 339693 - RNA, 19 nt, Homo sapiens
  misc_RNA (1)...(19): siRNA sense strand
ugaaacaagcgucucugaa

SEQ ID NO: 339694 - RNA, 19 nt, Homo sapiens
  misc_RNA (1)...(19): siRNA sense strand
aacauaaccugauaaagcu

SEQ ID NO: 339695 - RNA, 19 nt, Homo sapiens
  misc_RNA (1)...(19): siRNA sense strand
ugacccagucuauuaaaga

SEQ ID NO: 339696 - RNA, 19 nt, Homo sapiens
  misc_RNA (1)...(19): siRNA sense strand
gaacuagaagcuguguuag

SEQ ID NO: 339697 - RNA, 19 nt, Homo sapiens
  misc_RNA (1)...(19): siRNA sense strand
gugaaacaagcgucucuga

SEQ ID NO: 339698 - RNA, 19 nt, Homo sapiens
  misc_RNA (1)...(19): siRNA sense strand
ccaacaugcccacagauca

SEQ ID NO: 339699 - RNA, 19 nt, Homo sapiens
  misc_RNA (1)...(19): siRNA sense strand
uaugggcccuucaccaaca

SEQ ID NO: 339700 - RNA, 19 nt, Homo sapiens
  misc_RNA (1)...(19): siRNA sense strand
guccaaagcgagcaagaga

SEQ ID NO: 339701 - RNA, 19 nt, Homo sapiens
  misc_RNA (1)...(19): siRNA sense strand
cagaacaaagcacaucaga

SEQ ID NO: 339702 - RNA, 19 nt, Homo sapiens
  misc_RNA (1)...(19): siRNA sense strand
ccugcgaaauccagaacaa

SEQ ID NO: 339703 - RNA, 19 nt, Homo sapiens
  misc_RNA (1)...(19): siRNA sense strand
gaaaccaccaagguccaaa

SEQ ID NO: 339704 - RNA, 19 nt, Homo sapiens
  misc_RNA (1)...(19): siRNA sense strand
gauaaagcuccagcaggaa

SEQ ID NO: 339705 - RNA, 19 nt, Homo sapiens
  misc_RNA (1)...(19): siRNA sense strand
aaggagcuuucaucauuca

SEQ ID NO: 339706 - RNA, 19 nt, Homo sapiens
  misc_RNA (1)...(19): siRNA sense strand
ggugugagagugaaacaag

SEQ ID NO: 339707 - RNA, 19 nt, Homo sapiens
  misc_RNA (1)...(19): siRNA sense strand
gaaauggcugaacuagaag

SEQ ID NO: 339708 - RNA, 19 nt, Homo sapiens
  misc_RNA (1)...(19): siRNA sense strand
auaaagcuccagcaggaaa

SEQ ID NO: 339709 - RNA, 19 nt, Homo sapiens
  misc_RNA (1)...(19): siRNA sense strand
acccuuccaucauaaguga

SEQ ID NO: 339710 - RNA, 19 nt, Homo sapiens
  misc_RNA (1)...(19): siRNA sense strand
ggugacccagucuauuaaa

SEQ ID NO: 339711 - RNA, 19 nt, Homo sapiens
  misc_RNA (1)...(19): siRNA sense strand
cccagucuauuaaagaaag

SEQ ID NO: 339712 - RNA, 19 nt, Homo sapiens
  misc_RNA (1)...(19): siRNA sense strand
caucugggugugagaguga

SEQ ID NO: 339713 - RNA, 19 nt, Homo sapiens
  misc_RNA (1)...(19): siRNA sense strand
ccagucuauuaaagaaaga

SEQ ID NO: 339714 - RNA, 19 nt, Homo sapiens
  misc_RNA (1)...(19): siRNA sense strand
cgaaauccagaacaaagca

SEQ ID NO: 339715 - RNA, 19 nt, Homo sapiens
  misc_RNA (1)...(19): siRNA sense strand
aagagaaucccaggacaga

SEQ ID NO: 339716 - RNA, 19 nt, Homo sapiens
  misc_RNA (1)...(19): siRNA sense strand
gauguggucaauggaagaa

SEQ ID NO: 339717 - RNA, 19 nt, Homo sapiens
  misc_RNA (1)...(19): siRNA sense strand
ggaccugcgaaauccagaa

SEQ ID NO: 339718 - RNA, 19 nt, Homo sapiens
  misc_RNA (1)...(19): siRNA sense strand
gagcaugauuuugaaguca

SEQ ID NO: 339719 - RNA, 19 nt, Homo sapiens
  misc_RNA (1)...(19): siRNA sense strand
gugacccagucuauuaaag

SEQ ID NO: 339720 - RNA, 19 nt, Homo sapiens
  misc_RNA (1)...(19): siRNA sense strand
agaacaaagcacaucagaa

SEQ ID NO: 339721 - RNA, 19 nt, Homo sapiens
  misc_RNA (1)...(19): siRNA sense strand
uggaagaaaccaccaaggu

SEQ ID NO: 339722 - RNA, 19 nt, Homo sapiens
  misc_RNA (1)...(19): siRNA sense strand
ucaacuggaauggauggua

SEQ ID NO: 339723 - RNA, 19 nt, Homo sapiens
  misc_RNA (1)...(19): siRNA sense strand
ggaaauggcugaacuagaa

SEQ ID NO: 339724 - RNA, 19 nt, Homo sapiens
  misc_RNA (1)...(19): siRNA sense strand
gaacaaagcacaucagaaa

SEQ ID NO: 339725 - RNA, 19 nt, Homo sapiens
  misc_RNA (1)...(19): siRNA sense strand
cagcuacccuuccaucaua

SEQ ID NO: 339726 - RNA, 19 nt, Homo sapiens
  misc_RNA (1)...(19): siRNA sense strand
gggauaccaugcaacauaa

SEQ ID NO: 339727 - RNA, 19 nt, Homo sapiens
  misc_RNA (1)...(19): siRNA sense strand
gaggagauguggucaaugg

SEQ ID NO: 339728 - RNA, 19 nt, Homo sapiens
  misc_RNA (1)...(19): siRNA sense strand
gaaggagcuuucaucauuc

SEQ ID NO: 339729 - RNA, 19 nt, Homo sapiens
  misc_RNA (1)...(19): siRNA sense strand
cuagaaaucuguugcuaug

SEQ ID NO: 339730 - RNA, 19 nt, Homo sapiens
  misc_RNA (1)...(19): siRNA sense strand
gcucagggcuauccucuca

SEQ ID NO: 339731 - RNA, 19 nt, Homo sapiens
  misc_RNA (1)...(19): siRNA sense strand
aaacaagcgucucugaaga

SEQ ID NO: 339732 - RNA, 19 nt, Homo sapiens
  misc_RNA (1)...(19): siRNA sense strand
caacauaaccugauaaagc

SEQ ID NO: 339733 - RNA, 19 nt, Homo sapiens
  misc_RNA (1)...(19): siRNA sense strand
gaaacaagcgucucugaag

SEQ ID NO: 339734 - RNA, 19 nt, Homo sapiens
  misc_RNA (1)...(19): siRNA sense strand
gcagagggauaccaugcaa

SEQ ID NO: 339735 - RNA, 19 nt, Homo sapiens
  misc_RNA (1)...(19): siRNA sense strand
ugaacuagaagcuguguua

SEQ ID NO: 339736 - RNA, 19 nt, Homo sapiens
  misc_RNA (1)...(19): siRNA sense strand
gagaaucccaggacagaaa

SEQ ID NO: 339737 - RNA, 19 nt, Homo sapiens
  misc_RNA (1)...(19): siRNA sense strand
gcccacagaucaacuggaa

SEQ ID NO: 339738 - RNA, 19 nt, Homo sapiens
  misc_RNA (1)...(19): siRNA sense strand
gaagacugcucagggcuau

SEQ ID NO: 339739 - RNA, 19 nt, Homo sapiens
  misc_RNA (1)...(19): siRNA sense strand
gacccagucuauuaaagaa

SEQ ID NO: 339740 - RNA, 19 nt, Homo sapiens
  misc_RNA (1)...(19): siRNA sense strand
acuagaagcuguguuagaa

SEQ ID NO: 339741 - RNA, 19 nt, Homo sapiens
  misc_RNA (1)...(19): siRNA sense strand
caugcaacauaaccugaua

SEQ ID NO: 339742 - RNA, 19 nt, Homo sapiens
  misc_RNA (1)...(19): siRNA sense strand
gcuggacaccuaccugaua

SEQ ID NO: 339743 - RNA, 19 nt, Homo sapiens
  misc_RNA (1)...(19): siRNA sense strand
cagaucaacuggaauggau

SEQ ID NO: 339744 - RNA, 19 nt, Homo sapiens
  misc_RNA (1)...(19): siRNA sense strand
gcaggaaauggcugaacua

SEQ ID NO: 339745 - RNA, 19 nt, Homo sapiens
  misc_RNA (1)...(19): siRNA sense strand
ccacagaucaacuggaaug

SEQ ID NO: 339746 - RNA, 19 nt, Homo sapiens
  misc_RNA (1)...(19): siRNA sense strand
caacaugcccacagaucaa

SEQ ID NO: 339747 - RNA, 19 nt, Homo sapiens
  misc_RNA (1)...(19): siRNA sense strand
ucaccaacaugcccacaga

SEQ ID NO: 339748 - RNA, 19 nt, Homo sapiens
  misc_RNA (1)...(19): siRNA sense strand
cagaggagauguggucaau

SEQ ID NO: 339749 - RNA, 19 nt, Homo sapiens
  misc_RNA (1)...(19): siRNA sense strand
caauugggcagauguguga

SEQ ID NO: 339750 - RNA, 19 nt, Homo sapiens
  misc_RNA (1)...(19): siRNA sense strand
ggagauguggucaauggaa

SEQ ID NO: 339751 - RNA, 19 nt, Homo sapiens
  misc_RNA (1)...(19): siRNA sense strand
guacagcuguguggugcuu

SEQ ID NO: 339752 - RNA, 19 nt, Homo sapiens
  misc_RNA (1)...(19): siRNA sense strand
ccaaagcgagcaagagaau

SEQ ID NO: 339753 - RNA, 19 nt, Homo sapiens
  misc_RNA (1)...(19): siRNA sense strand
gcuaugggcccuucaccaa

SEQ ID NO: 339754 - RNA, 19 nt, Homo sapiens
  misc_RNA (1)...(19): siRNA sense strand
gaaugagcaugauuuugaa

SEQ ID NO: 339755 - RNA, 19 nt, Homo sapiens
  misc_RNA (1)...(19): siRNA sense strand
ucagggcuauccucucaga

SEQ ID NO: 339756 - RNA, 19 nt, Homo sapiens
  misc_RNA (1)...(19): siRNA sense strand
agggauaccaugcaacaua

SEQ ID NO: 339757 - RNA, 19 nt, Homo sapiens
  misc_RNA (1)...(19): siRNA sense strand
gcuagaaaucuguugcuau

SEQ ID NO: 339758 - RNA, 19 nt, Homo sapiens
  misc_RNA (1)...(19): siRNA sense strand
ugaaugagcaugauuuuga

SEQ ID NO: 339759 - RNA, 19 nt, Homo sapiens
  misc_RNA (1)...(19): siRNA sense strand
ggcuagaaaucuguugcua

SEQ ID NO: 339760 - RNA, 19 nt, Homo sapiens
  misc_RNA (1)...(19): siRNA sense strand
ugaaacaagcgucucugaa

SEQ ID NO: 339761 - RNA, 19 nt, Homo sapiens
  misc_RNA (1)...(19): siRNA sense strand
aacauaaccugauaaagcu

SEQ ID NO: 339762 - RNA, 19 nt, Homo sapiens
  misc_RNA (1)...(19): siRNA sense strand
ugacccagucuauuaaaga

SEQ ID NO: 339763 - RNA, 19 nt, Homo sapiens
  misc_RNA (1)...(19): siRNA sense strand
gaacuagaagcuguguuag

SEQ ID NO: 339764 - RNA, 19 nt, Homo sapiens
  misc_RNA (1)...(19): siRNA sense strand
gugaaacaagcgucucuga

SEQ ID NO: 339765 - RNA, 19 nt, Homo sapiens
  misc_RNA (1)...(19): siRNA sense strand
ccaacaugcccacagauca

SEQ ID NO: 339766 - RNA, 19 nt, Homo sapiens
  misc_RNA (1)...(19): siRNA sense strand
uaugggcccuucaccaaca

SEQ ID NO: 339767 - RNA, 19 nt, Homo sapiens
  misc_RNA (1)...(19): siRNA sense strand
guccaaagcgagcaagaga

SEQ ID NO: 339768 - RNA, 19 nt, Homo sapiens
  misc_RNA (1)...(19): siRNA sense strand
cagaacaaagcacaucaga

SEQ ID NO: 339769 - RNA, 19 nt, Homo sapiens
  misc_RNA (1)...(19): siRNA sense strand
ccugcgaaauccagaacaa

SEQ ID NO: 339770 - RNA, 19 nt, Homo sapiens
  misc_RNA (1)...(19): siRNA sense strand
gaaaccaccaagguccaaa

SEQ ID NO: 339771 - RNA, 19 nt, Homo sapiens
  misc_RNA (1)...(19): siRNA sense strand
gauaaagcuccagcaggaa

SEQ ID NO: 339772 - RNA, 19 nt, Homo sapiens
  misc_RNA (1)...(19): siRNA sense strand
aaggagcuuucaucauuca

SEQ ID NO: 339773 - RNA, 19 nt, Homo sapiens
  misc_RNA (1)...(19): siRNA sense strand
ggugugagagugaaacaag

SEQ ID NO: 339774 - RNA, 19 nt, Homo sapiens
  misc_RNA (1)...(19): siRNA sense strand
gaaauggcugaacuagaag

SEQ ID NO: 339775 - RNA, 19 nt, Homo sapiens
  misc_RNA (1)...(19): siRNA sense strand
auaaagcuccagcaggaaa

SEQ ID NO: 339776 - RNA, 19 nt, Homo sapiens
  misc_RNA (1)...(19): siRNA sense strand
acccuuccaucauaaguga

SEQ ID NO: 339777 - RNA, 19 nt, Homo sapiens
  misc_RNA (1)...(19): siRNA sense strand
ggugacccagucuauuaaa

SEQ ID NO: 339778 - RNA, 19 nt, Homo sapiens
  misc_RNA (1)...(19): siRNA sense strand
cccagucuauuaaagaaag

SEQ ID NO: 339779 - RNA, 19 nt, Homo sapiens
  misc_RNA (1)...(19): siRNA sense strand
caucugggugugagaguga

SEQ ID NO: 339780 - RNA, 19 nt, Homo sapiens
  misc_RNA (1)...(19): siRNA sense strand
ccagucuauuaaagaaaga

SEQ ID NO: 339781 - RNA, 19 nt, Homo sapiens
  misc_RNA (1)...(19): siRNA sense strand
cgaaauccagaacaaagca

SEQ ID NO: 339782 - RNA, 19 nt, Homo sapiens
  misc_RNA (1)...(19): siRNA sense strand
aagagaaucccaggacaga

SEQ ID NO: 339783 - RNA, 19 nt, Homo sapiens
  misc_RNA (1)...(19): siRNA sense strand
gauguggucaauggaagaa

SEQ ID NO: 339784 - RNA, 19 nt, Homo sapiens
  misc_RNA (1)...(19): siRNA sense strand
ggaccugcgaaauccagaa

SEQ ID NO: 339785 - RNA, 19 nt, Homo sapiens
  misc_RNA (1)...(19): siRNA sense strand
gagcaugauuuugaaguca

SEQ ID NO: 339786 - RNA, 19 nt, Homo sapiens
  misc_RNA (1)...(19): siRNA sense strand
gugacccagucuauuaaag

SEQ ID NO: 339787 - RNA, 19 nt, Homo sapiens
  misc_RNA (1)...(19): siRNA sense strand
agaacaaagcacaucagaa

SEQ ID NO: 339788 - RNA, 19 nt, Homo sapiens
  misc_RNA (1)...(19): siRNA sense strand
uggaagaaaccaccaaggu

SEQ ID NO: 339789 - RNA, 19 nt, Homo sapiens
  misc_RNA (1)...(19): siRNA sense strand
ucaacuggaauggauggua

SEQ ID NO: 339790 - RNA, 19 nt, Homo sapiens
  misc_RNA (1)...(19): siRNA sense strand
ggaaauggcugaacuagaa

SEQ ID NO: 339791 - RNA, 19 nt, Homo sapiens
  misc_RNA (1)...(19): siRNA sense strand
gaacaaagcacaucagaaa

SEQ ID NO: 339792 - RNA, 19 nt, Homo sapiens
  misc_RNA (1)...(19): siRNA sense strand
cagcuacccuuccaucaua

SEQ ID NO: 339793 - RNA, 19 nt, Homo sapiens
  misc_RNA (1)...(19): siRNA sense strand
gggauaccaugcaacauaa

SEQ ID NO: 339794 - RNA, 19 nt, Homo sapiens
  misc_RNA (1)...(19): siRNA sense strand
gaggagauguggucaaugg

SEQ ID NO: 339795 - RNA, 19 nt, Homo sapiens
  misc_RNA (1)...(19): siRNA sense strand
gaaggagcuuucaucauuc

SEQ ID NO: 339796 - RNA, 19 nt, Homo sapiens
  misc_RNA (1)...(19): siRNA sense strand
cuagaaaucuguugcuaug

SEQ ID NO: 339797 - RNA, 19 nt, Homo sapiens
  misc_RNA (1)...(19): siRNA sense strand
gcucagggcuauccucuca

SEQ ID NO: 339798 - RNA, 19 nt, Homo sapiens
  misc_RNA (1)...(19): siRNA sense strand
aaacaagcgucucugaaga

SEQ ID NO: 339799 - RNA, 19 nt, Homo sapiens
  misc_RNA (1)...(19): siRNA sense strand
caacauaaccugauaaagc

SEQ ID NO: 339800 - RNA, 19 nt, Homo sapiens
  misc_RNA (1)...(19): siRNA sense strand
gaaacaagcgucucugaag

SEQ ID NO: 339801 - RNA, 19 nt, Homo sapiens
  misc_RNA (1)...(19): siRNA sense strand
gcagagggauaccaugcaa

SEQ ID NO: 339802 - RNA, 19 nt, Homo sapiens
  misc_RNA (1)...(19): siRNA sense strand
ugaacuagaagcuguguua

SEQ ID NO: 339803 - RNA, 19 nt, Homo sapiens
  misc_RNA (1)...(19): siRNA sense strand
gagaaucccaggacagaaa

SEQ ID NO: 339804 - RNA, 19 nt, Homo sapiens
  misc_RNA (1)...(19): siRNA sense strand
gcccacagaucaacuggaa

SEQ ID NO: 339805 - RNA, 19 nt, Homo sapiens
  misc_RNA (1)...(19): siRNA sense strand
gaagacugcucagggcuau

SEQ ID NO: 339806 - RNA, 19 nt, Homo sapiens
  misc_RNA (1)...(19): siRNA sense strand
gacccagucuauuaaagaa

SEQ ID NO: 339807 - RNA, 19 nt, Homo sapiens
  misc_RNA (1)...(19): siRNA sense strand
acuagaagcuguguuagaa

SEQ ID NO: 339808 - RNA, 19 nt, Homo sapiens
  misc_RNA (1)...(19): siRNA sense strand
caugcaacauaaccugaua

SEQ ID NO: 339809 - RNA, 19 nt, Homo sapiens
  misc_RNA (1)...(19): siRNA sense strand
gcuggacaccuaccugaua

SEQ ID NO: 339810 - RNA, 19 nt, Homo sapiens
  misc_RNA (1)...(19): siRNA sense strand
cagaucaacuggaauggau

SEQ ID NO: 339811 - RNA, 19 nt, Homo sapiens
  misc_RNA (1)...(19): siRNA sense strand
gcaggaaauggcugaacua

SEQ ID NO: 339812 - RNA, 19 nt, Homo sapiens
  misc_RNA (1)...(19): siRNA sense strand
ccacagaucaacuggaaug

SEQ ID NO: 339813 - RNA, 19 nt, Homo sapiens
  misc_RNA (1)...(19): siRNA sense strand
caacaugcccacagaucaa

SEQ ID NO: 339814 - RNA, 19 nt, Homo sapiens
  misc_RNA (1)...(19): siRNA sense strand
ucaccaacaugcccacaga

SEQ ID NO: 339815 - RNA, 19 nt, Homo sapiens
  misc_RNA (1)...(19): siRNA sense strand
cagaggagauguggucaau

SEQ ID NO: 339816 - RNA, 19 nt, Homo sapiens
  misc_RNA (1)...(19): siRNA sense strand
caauugggcagauguguga

SEQ ID NO: 339817 - RNA, 19 nt, Homo sapiens
  misc_RNA (1)...(19): siRNA sense strand
ggagauguggucaauggaa

SEQ ID NO: 339818 - RNA, 19 nt, Homo sapiens
  misc_RNA (1)...(19): siRNA sense strand
guacagcuguguggugcuu

SEQ ID NO: 339819 - RNA, 19 nt, Homo sapiens
  misc_RNA (1)...(19): siRNA sense strand
ccaaagcgagcaagagaau

SEQ ID NO: 339820 - RNA, 19 nt, Homo sapiens
  misc_RNA (1)...(19): siRNA sense strand
gcuaugggcccuucaccaa

SEQ ID NO: 339821 - RNA, 19 nt, Homo sapiens
  misc_RNA (1)...(19): siRNA sense strand
gaaugagcaugauuuugaa

SEQ ID NO: 339822 - RNA, 19 nt, Homo sapiens
  misc_RNA (1)...(19): siRNA sense strand
ucagggcuauccucucaga

SEQ ID NO: 339823 - RNA, 19 nt, Homo sapiens
  misc_RNA (1)...(19): siRNA sense strand
agggauaccaugcaacaua

SEQ ID NO: 339824 - RNA, 19 nt, Homo sapiens
  misc_RNA (1)...(19): siRNA sense strand
gcuagaaaucuguugcuau

SEQ ID NO: 339825 - RNA, 19 nt, Homo sapiens
  misc_RNA (1)...(19): siRNA sense strand
ugaaugagcaugauuuuga

SEQ ID NO: 339826 - RNA, 19 nt, Homo sapiens
  misc_RNA (1)...(19): siRNA sense strand
ggcuagaaaucuguugcua

SEQ ID NO: 339827 - RNA, 19 nt, Homo sapiens
  misc_RNA (1)...(19): siRNA sense strand
ugaaacaagcgucucugaa

SEQ ID NO: 339828 - RNA, 19 nt, Homo sapiens
  misc_RNA (1)...(19): siRNA sense strand
aacauaaccugauaaagcu

SEQ ID NO: 339829 - RNA, 19 nt, Homo sapiens
  misc_RNA (1)...(19): siRNA sense strand
ugacccagucuauuaaaga

SEQ ID NO: 339830 - RNA, 19 nt, Homo sapiens
  misc_RNA (1)...(19): siRNA sense strand
gaacuagaagcuguguuag

SEQ ID NO: 339831 - RNA, 19 nt, Homo sapiens
  misc_RNA (1)...(19): siRNA sense strand
gugaaacaagcgucucuga

SEQ ID NO: 339832 - RNA, 19 nt, Homo sapiens
  misc_RNA (1)...(19): siRNA sense strand
ccaacaugcccacagauca

SEQ ID NO: 339833 - RNA, 19 nt, Homo sapiens
  misc_RNA (1)...(19): siRNA sense strand
uaugggcccuucaccaaca

SEQ ID NO: 339834 - RNA, 19 nt, Homo sapiens
  misc_RNA (1)...(19): siRNA sense strand
guccaaagcgagcaagaga

SEQ ID NO: 339835 - RNA, 19 nt, Homo sapiens
  misc_RNA (1)...(19): siRNA sense strand
cagaacaaagcacaucaga

SEQ ID NO: 339836 - RNA, 19 nt, Homo sapiens
  misc_RNA (1)...(19): siRNA sense strand
ccugcgaaauccagaacaa

SEQ ID NO: 339837 - RNA, 19 nt, Homo sapiens
  misc_RNA (1)...(19): siRNA sense strand
gaaaccaccaagguccaaa

SEQ ID NO: 339838 - RNA, 19 nt, Homo sapiens
  misc_RNA (1)...(19): siRNA sense strand
gauaaagcuccagcaggaa

SEQ ID NO: 339839 - RNA, 19 nt, Homo sapiens
  misc_RNA (1)...(19): siRNA sense strand
aaggagcuuucaucauuca

SEQ ID NO: 339840 - RNA, 19 nt, Homo sapiens
  misc_RNA (1)...(19): siRNA sense strand
ggugugagagugaaacaag

SEQ ID NO: 339841 - RNA, 19 nt, Homo sapiens
  misc_RNA (1)...(19): siRNA sense strand
gaaauggcugaacuagaag

SEQ ID NO: 339842 - RNA, 19 nt, Homo sapiens
  misc_RNA (1)...(19): siRNA sense strand
auaaagcuccagcaggaaa

SEQ ID NO: 339843 - RNA, 19 nt, Homo sapiens
  misc_RNA (1)...(19): siRNA sense strand
acccuuccaucauaaguga

SEQ ID NO: 339844 - RNA, 19 nt, Homo sapiens
  misc_RNA (1)...(19): siRNA sense strand
ggugacccagucuauuaaa

SEQ ID NO: 339845 - RNA, 19 nt, Homo sapiens
  misc_RNA (1)...(19): siRNA sense strand
cccagucuauuaaagaaag

SEQ ID NO: 339846 - RNA, 19 nt, Homo sapiens
  misc_RNA (1)...(19): siRNA sense strand
caucugggugugagaguga

SEQ ID NO: 339847 - RNA, 19 nt, Homo sapiens
  misc_RNA (1)...(19): siRNA sense strand
ccagucuauuaaagaaaga

SEQ ID NO: 339848 - RNA, 19 nt, Homo sapiens
  misc_RNA (1)...(19): siRNA sense strand
cgaaauccagaacaaagca

SEQ ID NO: 339849 - RNA, 19 nt, Homo sapiens
  misc_RNA (1)...(19): siRNA sense strand
aagagaaucccaggacaga

SEQ ID NO: 339850 - RNA, 19 nt, Homo sapiens
  misc_RNA (1)...(19): siRNA sense strand
gauguggucaauggaagaa

SEQ ID NO: 339851 - RNA, 19 nt, Homo sapiens
  misc_RNA (1)...(19): siRNA sense strand
ggaccugcgaaauccagaa

SEQ ID NO: 339852 - RNA, 19 nt, Homo sapiens
  misc_RNA (1)...(19): siRNA sense strand
gagcaugauuuugaaguca

SEQ ID NO: 339853 - RNA, 19 nt, Homo sapiens
  misc_RNA (1)...(19): siRNA sense strand
gugacccagucuauuaaag

SEQ ID NO: 339854 - RNA, 19 nt, Homo sapiens
  misc_RNA (1)...(19): siRNA sense strand
agaacaaagcacaucagaa

SEQ ID NO: 339855 - RNA, 19 nt, Homo sapiens
  misc_RNA (1)...(19): siRNA sense strand
uggaagaaaccaccaaggu

SEQ ID NO: 339856 - RNA, 19 nt, Homo sapiens
  misc_RNA (1)...(19): siRNA sense strand
ucaacuggaauggauggua

SEQ ID NO: 339857 - RNA, 19 nt, Homo sapiens
  misc_RNA (1)...(19): siRNA sense strand
ggaaauggcugaacuagaa

SEQ ID NO: 339858 - RNA, 19 nt, Homo sapiens
  misc_RNA (1)...(19): siRNA sense strand
gaacaaagcacaucagaaa

SEQ ID NO: 339859 - RNA, 19 nt, Homo sapiens
  misc_RNA (1)...(19): siRNA sense strand
cagcuacccuuccaucaua

SEQ ID NO: 339860 - RNA, 19 nt, Homo sapiens
  misc_RNA (1)...(19): siRNA sense strand
gggauaccaugcaacauaa

SEQ ID NO: 339861 - RNA, 19 nt, Homo sapiens
  misc_RNA (1)...(19): siRNA sense strand
gcucagggcuauccucuca

SEQ ID NO: 339862 - RNA, 19 nt, Homo sapiens
  misc_RNA (1)...(19): siRNA sense strand
aaacaagcgucucugaaga

SEQ ID NO: 339863 - RNA, 19 nt, Homo sapiens
  misc_RNA (1)...(19): siRNA sense strand
caacauaaccugauaaagc

SEQ ID NO: 339864 - RNA, 19 nt, Homo sapiens
  misc_RNA (1)...(19): siRNA sense strand
gaaacaagcgucucugaag

SEQ ID NO: 339865 - RNA, 19 nt, Homo sapiens
  misc_RNA (1)...(19): siRNA sense strand
gcagagggauaccaugcaa

SEQ ID NO: 339866 - RNA, 19 nt, Homo sapiens
  misc_RNA (1)...(19): siRNA sense strand
ugaacuagaagcuguguua

SEQ ID NO: 339867 - RNA, 19 nt, Homo sapiens
  misc_RNA (1)...(19): siRNA sense strand
gaagacugcucagggcuau

SEQ ID NO: 339868 - RNA, 19 nt, Homo sapiens
  misc_RNA (1)...(19): siRNA sense strand
acuagaagcuguguuagaa

SEQ ID NO: 339869 - RNA, 19 nt, Homo sapiens
  misc_RNA (1)...(19): siRNA sense strand
caugcaacauaaccugaua

SEQ ID NO: 339870 - RNA, 19 nt, Homo sapiens
  misc_RNA (1)...(19): siRNA sense strand
gcaggaaauggcugaacua

SEQ ID NO: 339871 - RNA, 19 nt, Homo sapiens
  misc_RNA (1)...(19): siRNA sense strand
ucagggcuauccucucaga

SEQ ID NO: 339872 - RNA, 19 nt, Homo sapiens
  misc_RNA (1)...(19): siRNA sense strand
agggauaccaugcaacaua

SEQ ID NO: 339873 - RNA, 19 nt, Homo sapiens
  misc_RNA (1)...(19): siRNA sense strand
ugaaacaagcgucucugaa

SEQ ID NO: 339874 - RNA, 19 nt, Homo sapiens
  misc_RNA (1)...(19): siRNA sense strand
aacauaaccugauaaagcu

SEQ ID NO: 339875 - RNA, 19 nt, Homo sapiens
  misc_RNA (1)...(19): siRNA sense strand
gaacuagaagcuguguuag

SEQ ID NO: 339876 - RNA, 19 nt, Homo sapiens
  misc_RNA (1)...(19): siRNA sense strand
cagaacaaagcacaucaga

SEQ ID NO: 339877 - RNA, 19 nt, Homo sapiens
  misc_RNA (1)...(19): siRNA sense strand
gugaaacaagcgucucuga

SEQ ID NO: 339878 - RNA, 19 nt, Homo sapiens
  misc_RNA (1)...(19): siRNA sense strand
ccugcgaaauccagaacaa

SEQ ID NO: 339879 - RNA, 19 nt, Homo sapiens
  misc_RNA (1)...(19): siRNA sense strand
gauaaagcuccagcaggaa

SEQ ID NO: 339880 - RNA, 19 nt, Homo sapiens
  misc_RNA (1)...(19): siRNA sense strand
ggugugagagugaaacaag

SEQ ID NO: 339881 - RNA, 19 nt, Homo sapiens
  misc_RNA (1)...(19): siRNA sense strand
auaaagcuccagcaggaaa

SEQ ID NO: 339882 - RNA, 19 nt, Homo sapiens
  misc_RNA (1)...(19): siRNA sense strand
acccuuccaucauaaguga

SEQ ID NO: 339883 - RNA, 19 nt, Homo sapiens
  misc_RNA (1)...(19): siRNA sense strand
gaaauggcugaacuagaag

SEQ ID NO: 339884 - RNA, 19 nt, Homo sapiens
  misc_RNA (1)...(19): siRNA sense strand
caucugggugugagaguga

SEQ ID NO: 339885 - RNA, 19 nt, Homo sapiens
  misc_RNA (1)...(19): siRNA sense strand
cgaaauccagaacaaagca

SEQ ID NO: 339886 - RNA, 19 nt, Homo sapiens
  misc_RNA (1)...(19): siRNA sense strand
ggaccugcgaaauccagaa

SEQ ID NO: 339887 - RNA, 19 nt, Homo sapiens
  misc_RNA (1)...(19): siRNA sense strand
agaacaaagcacaucagaa

SEQ ID NO: 339888 - RNA, 19 nt, Homo sapiens
  misc_RNA (1)...(19): siRNA sense strand
ggaaauggcugaacuagaa

SEQ ID NO: 339889 - RNA, 19 nt, Homo sapiens
  misc_RNA (1)...(19): siRNA sense strand
gaacaaagcacaucagaaa

SEQ ID NO: 339890 - RNA, 19 nt, Homo sapiens
  misc_RNA (1)...(19): siRNA sense strand
cagcuacccuuccaucaua

SEQ ID NO: 339891 - RNA, 19 nt, Homo sapiens
  misc_RNA (1)...(19): siRNA sense strand
gggauaccaugcaacauaa

SEQ ID NO: 339892 - RNA, 19 nt, Homo sapiens
  misc_RNA (1)...(19): siRNA sense strand
gaggagauguggucaaugg

SEQ ID NO: 339893 - RNA, 19 nt, Homo sapiens
  misc_RNA (1)...(19): siRNA sense strand
gaaggagcuuucaucauuc

SEQ ID NO: 339894 - RNA, 19 nt, Homo sapiens
  misc_RNA (1)...(19): siRNA sense strand
cuagaaaucuguugcuaug

SEQ ID NO: 339895 - RNA, 19 nt, Homo sapiens
  misc_RNA (1)...(19): siRNA sense strand
gcucagggcuauccucuca

SEQ ID NO: 339896 - RNA, 19 nt, Homo sapiens
  misc_RNA (1)...(19): siRNA sense strand
aaacaagcgucucugaaga

SEQ ID NO: 339897 - RNA, 19 nt, Homo sapiens
  misc_RNA (1)...(19): siRNA sense strand
caacauaaccugauaaagc

SEQ ID NO: 339898 - RNA, 19 nt, Homo sapiens
  misc_RNA (1)...(19): siRNA sense strand
gaaacaagcgucucugaag

SEQ ID NO: 339899 - RNA, 19 nt, Homo sapiens
  misc_RNA (1)...(19): siRNA sense strand
gcagagggauaccaugcaa

SEQ ID NO: 339900 - RNA, 19 nt, Homo sapiens
  misc_RNA (1)...(19): siRNA sense strand
ugaacuagaagcuguguua

SEQ ID NO: 339901 - RNA, 19 nt, Homo sapiens
  misc_RNA (1)...(19): siRNA sense strand
gagaaucccaggacagaaa

SEQ ID NO: 339902 - RNA, 19 nt, Homo sapiens
  misc_RNA (1)...(19): siRNA sense strand
gcccacagaucaacuggaa

SEQ ID NO: 339903 - RNA, 19 nt, Homo sapiens
  misc_RNA (1)...(19): siRNA sense strand
gaagacugcucagggcuau

SEQ ID NO: 339904 - RNA, 19 nt, Homo sapiens
  misc_RNA (1)...(19): siRNA sense strand
gacccagucuauuaaagaa

SEQ ID NO: 339905 - RNA, 19 nt, Homo sapiens
  misc_RNA (1)...(19): siRNA sense strand
acuagaagcuguguuagaa

SEQ ID NO: 339906 - RNA, 19 nt, Homo sapiens
  misc_RNA (1)...(19): siRNA sense strand
caugcaacauaaccugaua

SEQ ID NO: 339907 - RNA, 19 nt, Homo sapiens
  misc_RNA (1)...(19): siRNA sense strand
gcuggacaccuaccugaua

SEQ ID NO: 339908 - RNA, 19 nt, Homo sapiens
  misc_RNA (1)...(19): siRNA sense strand
cagaucaacuggaauggau

SEQ ID NO: 339909 - RNA, 19 nt, Homo sapiens
  misc_RNA (1)...(19): siRNA sense strand
gcaggaaauggcugaacua

SEQ ID NO: 339910 - RNA, 19 nt, Homo sapiens
  misc_RNA (1)...(19): siRNA sense strand
ccacagaucaacuggaaug

SEQ ID NO: 339911 - RNA, 19 nt, Homo sapiens
  misc_RNA (1)...(19): siRNA sense strand
caacaugcccacagaucaa

SEQ ID NO: 339912 - RNA, 19 nt, Homo sapiens
  misc_RNA (1)...(19): siRNA sense strand
ucaccaacaugcccacaga

SEQ ID NO: 339913 - RNA, 19 nt, Homo sapiens
  misc_RNA (1)...(19): siRNA sense strand
cagaggagauguggucaau

SEQ ID NO: 339914 - RNA, 19 nt, Homo sapiens
  misc_RNA (1)...(19): siRNA sense strand
caauugggcagauguguga

SEQ ID NO: 339915 - RNA, 19 nt, Homo sapiens
  misc_RNA (1)...(19): siRNA sense strand
ggagauguggucaauggaa

SEQ ID NO: 339916 - RNA, 19 nt, Homo sapiens
  misc_RNA (1)...(19): siRNA sense strand
guacagcuguguggugcuu

SEQ ID NO: 339917 - RNA, 19 nt, Homo sapiens
  misc_RNA (1)...(19): siRNA sense strand
ccaaagcgagcaagagaau

SEQ ID NO: 339918 - RNA, 19 nt, Homo sapiens
  misc_RNA (1)...(19): siRNA sense strand
gcuaugggcccuucaccaa

SEQ ID NO: 339919 - RNA, 19 nt, Homo sapiens
  misc_RNA (1)...(19): siRNA sense strand
gaaugagcaugauuuugaa

SEQ ID NO: 339920 - RNA, 19 nt, Homo sapiens
  misc_RNA (1)...(19): siRNA sense strand
ucagggcuauccucucaga

SEQ ID NO: 339921 - RNA, 19 nt, Homo sapiens
  misc_RNA (1)...(19): siRNA sense strand
agggauaccaugcaacaua

SEQ ID NO: 339922 - RNA, 19 nt, Homo sapiens
  misc_RNA (1)...(19): siRNA sense strand
gcuagaaaucuguugcuau

SEQ ID NO: 339923 - RNA, 19 nt, Homo sapiens
  misc_RNA (1)...(19): siRNA sense strand
ugaaugagcaugauuuuga

SEQ ID NO: 339924 - RNA, 19 nt, Homo sapiens
  misc_RNA (1)...(19): siRNA sense strand
ggcuagaaaucuguugcua

SEQ ID NO: 339925 - RNA, 19 nt, Homo sapiens
  misc_RNA (1)...(19): siRNA sense strand
ugaaacaagcgucucugaa

SEQ ID NO: 339926 - RNA, 19 nt, Homo sapiens
  misc_RNA (1)...(19): siRNA sense strand
aacauaaccugauaaagcu

SEQ ID NO: 339927 - RNA, 19 nt, Homo sapiens
  misc_RNA (1)...(19): siRNA sense strand
ugacccagucuauuaaaga

SEQ ID NO: 339928 - RNA, 19 nt, Homo sapiens
  misc_RNA (1)...(19): siRNA sense strand
gaacuagaagcuguguuag

SEQ ID NO: 339929 - RNA, 19 nt, Homo sapiens
  misc_RNA (1)...(19): siRNA sense strand
gugaaacaagcgucucuga

SEQ ID NO: 339930 - RNA, 19 nt, Homo sapiens
  misc_RNA (1)...(19): siRNA sense strand
ccaacaugcccacagauca

SEQ ID NO: 339931 - RNA, 19 nt, Homo sapiens
  misc_RNA (1)...(19): siRNA sense strand
uaugggcccuucaccaaca

SEQ ID NO: 339932 - RNA, 19 nt, Homo sapiens
  misc_RNA (1)...(19): siRNA sense strand
guccaaagcgagcaagaga

SEQ ID NO: 339933 - RNA, 19 nt, Homo sapiens
  misc_RNA (1)...(19): siRNA sense strand
cagaacaaagcacaucaga

SEQ ID NO: 339934 - RNA, 19 nt, Homo sapiens
  misc_RNA (1)...(19): siRNA sense strand
ccugcgaaauccagaacaa

SEQ ID NO: 339935 - RNA, 19 nt, Homo sapiens
  misc_RNA (1)...(19): siRNA sense strand
gaaaccaccaagguccaaa

SEQ ID NO: 339936 - RNA, 19 nt, Homo sapiens
  misc_RNA (1)...(19): siRNA sense strand
gauaaagcuccagcaggaa

SEQ ID NO: 339937 - RNA, 19 nt, Homo sapiens
  misc_RNA (1)...(19): siRNA sense strand
aaggagcuuucaucauuca

SEQ ID NO: 339938 - RNA, 19 nt, Homo sapiens
  misc_RNA (1)...(19): siRNA sense strand
ggugugagagugaaacaag

SEQ ID NO: 339939 - RNA, 19 nt, Homo sapiens
  misc_RNA (1)...(19): siRNA sense strand
gaaauggcugaacuagaag

SEQ ID NO: 339940 - RNA, 19 nt, Homo sapiens
  misc_RNA (1)...(19): siRNA sense strand
auaaagcuccagcaggaaa

SEQ ID NO: 339941 - RNA, 19 nt, Homo sapiens
  misc_RNA (1)...(19): siRNA sense strand
acccuuccaucauaaguga

SEQ ID NO: 339942 - RNA, 19 nt, Homo sapiens
  misc_RNA (1)...(19): siRNA sense strand
ggugacccagucuauuaaa

SEQ ID NO: 339943 - RNA, 19 nt, Homo sapiens
  misc_RNA (1)...(19): siRNA sense strand
cccagucuauuaaagaaag

SEQ ID NO: 339944 - RNA, 19 nt, Homo sapiens
  misc_RNA (1)...(19): siRNA sense strand
caucugggugugagaguga

SEQ ID NO: 339945 - RNA, 19 nt, Homo sapiens
  misc_RNA (1)...(19): siRNA sense strand
ccagucuauuaaagaaaga

SEQ ID NO: 339946 - RNA, 19 nt, Homo sapiens
  misc_RNA (1)...(19): siRNA sense strand
cgaaauccagaacaaagca

SEQ ID NO: 339947 - RNA, 19 nt, Homo sapiens
  misc_RNA (1)...(19): siRNA sense strand
aagagaaucccaggacaga

SEQ ID NO: 339948 - RNA, 19 nt, Homo sapiens
  misc_RNA (1)...(19): siRNA sense strand
gauguggucaauggaagaa

SEQ ID NO: 339949 - RNA, 19 nt, Homo sapiens
  misc_RNA (1)...(19): siRNA sense strand
ggaccugcgaaauccagaa

SEQ ID NO: 339950 - RNA, 19 nt, Homo sapiens
  misc_RNA (1)...(19): siRNA sense strand
gagcaugauuuugaaguca

SEQ ID NO: 339951 - RNA, 19 nt, Homo sapiens
  misc_RNA (1)...(19): siRNA sense strand
gugacccagucuauuaaag

SEQ ID NO: 339952 - RNA, 19 nt, Homo sapiens
  misc_RNA (1)...(19): siRNA sense strand
agaacaaagcacaucagaa

SEQ ID NO: 339953 - RNA, 19 nt, Homo sapiens
  misc_RNA (1)...(19): siRNA sense strand
uggaagaaaccaccaaggu

SEQ ID NO: 339954 - RNA, 19 nt, Homo sapiens
  misc_RNA (1)...(19): siRNA sense strand
ucaacuggaauggauggua

SEQ ID NO: 339955 - RNA, 19 nt, Homo sapiens
  misc_RNA (1)...(19): siRNA sense strand
ggaaauggcugaacuagaa

SEQ ID NO: 339956 - RNA, 19 nt, Homo sapiens
  misc_RNA (1)...(19): siRNA sense strand
gaacaaagcacaucagaaa

SEQ ID NO: 339957 - RNA, 19 nt, Homo sapiens
  misc_RNA (1)...(19): siRNA sense strand
cagcuacccuuccaucaua

SEQ ID NO: 339958 - RNA, 19 nt, Homo sapiens
  misc_RNA (1)...(19): siRNA sense strand
gggauaccaugcaacauaa

SEQ ID NO: 339959 - RNA, 19 nt, Homo sapiens
  misc_RNA (1)...(19): siRNA sense strand
gaggagauguggucaaugg

SEQ ID NO: 339960 - RNA, 19 nt, Homo sapiens
  misc_RNA (1)...(19): siRNA sense strand
gaaggagcuuucaucauuc

SEQ ID NO: 339961 - RNA, 19 nt, Homo sapiens
  misc_RNA (1)...(19): siRNA sense strand
cuagaaaucuguugcuaug

SEQ ID NO: 339962 - RNA, 19 nt, Homo sapiens
  misc_RNA (1)...(19): siRNA sense strand
gcucagggcuauccucuca

SEQ ID NO: 339963 - RNA, 19 nt, Homo sapiens
  misc_RNA (1)...(19): siRNA sense strand
aaacaagcgucucugaaga

SEQ ID NO: 339964 - RNA, 19 nt, Homo sapiens
  misc_RNA (1)...(19): siRNA sense strand
caacauaaccugauaaagc

SEQ ID NO: 339965 - RNA, 19 nt, Homo sapiens
  misc_RNA (1)...(19): siRNA sense strand
gaaacaagcgucucugaag

SEQ ID NO: 339966 - RNA, 19 nt, Homo sapiens
  misc_RNA (1)...(19): siRNA sense strand
gcagagggauaccaugcaa

SEQ ID NO: 339967 - RNA, 19 nt, Homo sapiens
  misc_RNA (1)...(19): siRNA sense strand
ugaacuagaagcuguguua

SEQ ID NO: 339968 - RNA, 19 nt, Homo sapiens
  misc_RNA (1)...(19): siRNA sense strand
gagaaucccaggacagaaa

SEQ ID NO: 339969 - RNA, 19 nt, Homo sapiens
  misc_RNA (1)...(19): siRNA sense strand
gcccacagaucaacuggaa

SEQ ID NO: 339970 - RNA, 19 nt, Homo sapiens
  misc_RNA (1)...(19): siRNA sense strand
gaagacugcucagggcuau

SEQ ID NO: 339971 - RNA, 19 nt, Homo sapiens
  misc_RNA (1)...(19): siRNA sense strand
gacccagucuauuaaagaa

SEQ ID NO: 339972 - RNA, 19 nt, Homo sapiens
  misc_RNA (1)...(19): siRNA sense strand
acuagaagcuguguuagaa

SEQ ID NO: 339973 - RNA, 19 nt, Homo sapiens
  misc_RNA (1)...(19): siRNA sense strand
caugcaacauaaccugaua

SEQ ID NO: 339974 - RNA, 19 nt, Homo sapiens
  misc_RNA (1)...(19): siRNA sense strand
gcuggacaccuaccugaua

SEQ ID NO: 339975 - RNA, 19 nt, Homo sapiens
  misc_RNA (1)...(19): siRNA sense strand
cagaucaacuggaauggau

SEQ ID NO: 339976 - RNA, 19 nt, Homo sapiens
  misc_RNA (1)...(19): siRNA sense strand
gcaggaaauggcugaacua

SEQ ID NO: 339977 - RNA, 19 nt, Homo sapiens
  misc_RNA (1)...(19): siRNA sense strand
ccacagaucaacuggaaug

SEQ ID NO: 339978 - RNA, 19 nt, Homo sapiens
  misc_RNA (1)...(19): siRNA sense strand
caacaugcccacagaucaa

SEQ ID NO: 339979 - RNA, 19 nt, Homo sapiens
  misc_RNA (1)...(19): siRNA sense strand
ucaccaacaugcccacaga

SEQ ID NO: 339980 - RNA, 19 nt, Homo sapiens
  misc_RNA (1)...(19): siRNA sense strand
cagaggagauguggucaau

SEQ ID NO: 339981 - RNA, 19 nt, Homo sapiens
  misc_RNA (1)...(19): siRNA sense strand
caauugggcagauguguga

SEQ ID NO: 339982 - RNA, 19 nt, Homo sapiens
  misc_RNA (1)...(19): siRNA sense strand
ggagauguggucaauggaa

SEQ ID NO: 339983 - RNA, 19 nt, Homo sapiens
  misc_RNA (1)...(19): siRNA sense strand
guacagcuguguggugcuu

SEQ ID NO: 339984 - RNA, 19 nt, Homo sapiens
  misc_RNA (1)...(19): siRNA sense strand
ccaaagcgagcaagagaau

SEQ ID NO: 339985 - RNA, 19 nt, Homo sapiens
  misc_RNA (1)...(19): siRNA sense strand
gcuaugggcccuucaccaa

SEQ ID NO: 339986 - RNA, 19 nt, Homo sapiens
  misc_RNA (1)...(19): siRNA sense strand
gaaugagcaugauuuugaa

SEQ ID NO: 339987 - RNA, 19 nt, Homo sapiens
  misc_RNA (1)...(19): siRNA sense strand
ucagggcuauccucucaga

SEQ ID NO: 339988 - RNA, 19 nt, Homo sapiens
  misc_RNA (1)...(19): siRNA sense strand
agggauaccaugcaacaua

SEQ ID NO: 339989 - RNA, 19 nt, Homo sapiens
  misc_RNA (1)...(19): siRNA sense strand
gcuagaaaucuguugcuau

SEQ ID NO: 339990 - RNA, 19 nt, Homo sapiens
  misc_RNA (1)...(19): siRNA sense strand
ugaaugagcaugauuuuga

SEQ ID NO: 339991 - RNA, 19 nt, Homo sapiens
  misc_RNA (1)...(19): siRNA sense strand
ggcuagaaaucuguugcua

SEQ ID NO: 339992 - RNA, 19 nt, Homo sapiens
  misc_RNA (1)...(19): siRNA sense strand
ugaaacaagcgucucugaa

SEQ ID NO: 339993 - RNA, 19 nt, Homo sapiens
  misc_RNA (1)...(19): siRNA sense strand
aacauaaccugauaaagcu

SEQ ID NO: 339994 - RNA, 19 nt, Homo sapiens
  misc_RNA (1)...(19): siRNA sense strand
ugacccagucuauuaaaga

SEQ ID NO: 339995 - RNA, 19 nt, Homo sapiens
  misc_RNA (1)...(19): siRNA sense strand
gaacuagaagcuguguuag

SEQ ID NO: 339996 - RNA, 19 nt, Homo sapiens
  misc_RNA (1)...(19): siRNA sense strand
gugaaacaagcgucucuga

SEQ ID NO: 339997 - RNA, 19 nt, Homo sapiens
  misc_RNA (1)...(19): siRNA sense strand
ccaacaugcccacagauca

SEQ ID NO: 339998 - RNA, 19 nt, Homo sapiens
  misc_RNA (1)...(19): siRNA sense strand
uaugggcccuucaccaaca

SEQ ID NO: 339999 - RNA, 19 nt, Homo sapiens
  misc_RNA (1)...(19): siRNA sense strand
guccaaagcgagcaagaga

SEQ ID NO: 340000 - RNA, 19 nt, Homo sapiens
  misc_RNA (1)...(19): siRNA sense strand
cagaacaaagcacaucaga

SEQ ID NO: 340001 - RNA, 19 nt, Homo sapiens
  misc_RNA (1)...(19): siRNA sense strand
ccugcgaaauccagaacaa

SEQ ID NO: 340002 - RNA, 19 nt, Homo sapiens
  misc_RNA (1)...(19): siRNA sense strand
gaaaccaccaagguccaaa

SEQ ID NO: 340003 - RNA, 19 nt, Homo sapiens
  misc_RNA (1)...(19): siRNA sense strand
gauaaagcuccagcaggaa

SEQ ID NO: 340004 - RNA, 19 nt, Homo sapiens
  misc_RNA (1)...(19): siRNA sense strand
aaggagcuuucaucauuca

SEQ ID NO: 340005 - RNA, 19 nt, Homo sapiens
  misc_RNA (1)...(19): siRNA sense strand
ggugugagagugaaacaag

SEQ ID NO: 340006 - RNA, 19 nt, Homo sapiens
  misc_RNA (1)...(19): siRNA sense strand
gaaauggcugaacuagaag

SEQ ID NO: 340007 - RNA, 19 nt, Homo sapiens
  misc_RNA (1)...(19): siRNA sense strand
auaaagcuccagcaggaaa

SEQ ID NO: 340008 - RNA, 19 nt, Homo sapiens
  misc_RNA (1)...(19): siRNA sense strand
acccuuccaucauaaguga

SEQ ID NO: 340009 - RNA, 19 nt, Homo sapiens
  misc_RNA (1)...(19): siRNA sense strand
ggugacccagucuauuaaa

SEQ ID NO: 340010 - RNA, 19 nt, Homo sapiens
  misc_RNA (1)...(19): siRNA sense strand
cccagucuauuaaagaaag

SEQ ID NO: 340011 - RNA, 19 nt, Homo sapiens
  misc_RNA (1)...(19): siRNA sense strand
caucugggugugagaguga

SEQ ID NO: 340012 - RNA, 19 nt, Homo sapiens
  misc_RNA (1)...(19): siRNA sense strand
ccagucuauuaaagaaaga

SEQ ID NO: 340013 - RNA, 19 nt, Homo sapiens
  misc_RNA (1)...(19): siRNA sense strand
cgaaauccagaacaaagca

SEQ ID NO: 340014 - RNA, 19 nt, Homo sapiens
  misc_RNA (1)...(19): siRNA sense strand
aagagaaucccaggacaga

SEQ ID NO: 340015 - RNA, 19 nt, Homo sapiens
  misc_RNA (1)...(19): siRNA sense strand
gauguggucaauggaagaa

SEQ ID NO: 340016 - RNA, 19 nt, Homo sapiens
  misc_RNA (1)...(19): siRNA sense strand
ggaccugcgaaauccagaa

SEQ ID NO: 340017 - RNA, 19 nt, Homo sapiens
  misc_RNA (1)...(19): siRNA sense strand
gagcaugauuuugaaguca

SEQ ID NO: 340018 - RNA, 19 nt, Homo sapiens
  misc_RNA (1)...(19): siRNA sense strand
gugacccagucuauuaaag

SEQ ID NO: 340019 - RNA, 19 nt, Homo sapiens
  misc_RNA (1)...(19): siRNA sense strand
agaacaaagcacaucagaa

SEQ ID NO: 340020 - RNA, 19 nt, Homo sapiens
  misc_RNA (1)...(19): siRNA sense strand
uggaagaaaccaccaaggu

SEQ ID NO: 340021 - RNA, 19 nt, Homo sapiens
  misc_RNA (1)...(19): siRNA sense strand
ucaacuggaauggauggua

SEQ ID NO: 340022 - RNA, 19 nt, Homo sapiens
  misc_RNA (1)...(19): siRNA sense strand
ggaaauggcugaacuagaa

SEQ ID NO: 340023 - RNA, 19 nt, Homo sapiens
  misc_RNA (1)...(19): siRNA sense strand
gaacaaagcacaucagaaa

SEQ ID NO: 340024 - RNA, 19 nt, Homo sapiens
  misc_RNA (1)...(19): siRNA sense strand
cagcuacccuuccaucaua

SEQ ID NO: 340025 - RNA, 19 nt, Homo sapiens
  misc_RNA (1)...(19): siRNA sense strand
gggauaccaugcaacauaa

SEQ ID NO: 340026 - RNA, 19 nt, Homo sapiens
  misc_RNA (1)...(19): siRNA sense strand
gaggagauguggucaaugg

SEQ ID NO: 340027 - RNA, 19 nt, Homo sapiens
  misc_RNA (1)...(19): siRNA sense strand
gaaggagcuuucaucauuc

SEQ ID NO: 340028 - RNA, 19 nt, Homo sapiens
  misc_RNA (1)...(19): siRNA sense strand
cuagaaaucuguugcuaug

SEQ ID NO: 340029 - RNA, 19 nt, Homo sapiens
  misc_RNA (1)...(19): siRNA sense strand
gcucagggcuauccucuca

SEQ ID NO: 340030 - RNA, 19 nt, Homo sapiens
  misc_RNA (1)...(19): siRNA sense strand
aaacaagcgucucugaaga

SEQ ID NO: 340031 - RNA, 19 nt, Homo sapiens
  misc_RNA (1)...(19): siRNA sense strand
caacauaaccugauaaagc

SEQ ID NO: 340032 - RNA, 19 nt, Homo sapiens
  misc_RNA (1)...(19): siRNA sense strand
gaaacaagcgucucugaag

SEQ ID NO: 340033 - RNA, 19 nt, Homo sapiens
  misc_RNA (1)...(19): siRNA sense strand
gcagagggauaccaugcaa

SEQ ID NO: 340034 - RNA, 19 nt, Homo sapiens
  misc_RNA (1)...(19): siRNA sense strand
ugaacuagaagcuguguua

SEQ ID NO: 340035 - RNA, 19 nt, Homo sapiens
  misc_RNA (1)...(19): siRNA sense strand
gagaaucccaggacagaaa

SEQ ID NO: 340036 - RNA, 19 nt, Homo sapiens
  misc_RNA (1)...(19): siRNA sense strand
gcccacagaucaacuggaa

SEQ ID NO: 340037 - RNA, 19 nt, Homo sapiens
  misc_RNA (1)...(19): siRNA sense strand
gaagacugcucagggcuau

SEQ ID NO: 340038 - RNA, 19 nt, Homo sapiens
  misc_RNA (1)...(19): siRNA sense strand
gacccagucuauuaaagaa

SEQ ID NO: 340039 - RNA, 19 nt, Homo sapiens
  misc_RNA (1)...(19): siRNA sense strand
acuagaagcuguguuagaa

SEQ ID NO: 340040 - RNA, 19 nt, Homo sapiens
  misc_RNA (1)...(19): siRNA sense strand
caugcaacauaaccugaua

SEQ ID NO: 340041 - RNA, 19 nt, Homo sapiens
  misc_RNA (1)...(19): siRNA sense strand
gcuggacaccuaccugaua

SEQ ID NO: 340042 - RNA, 19 nt, Homo sapiens
  misc_RNA (1)...(19): siRNA sense strand
cagaucaacuggaauggau

SEQ ID NO: 340043 - RNA, 19 nt, Homo sapiens
  misc_RNA (1)...(19): siRNA sense strand
gcaggaaauggcugaacua

SEQ ID NO: 340044 - RNA, 19 nt, Homo sapiens
  misc_RNA (1)...(19): siRNA sense strand
ccacagaucaacuggaaug

SEQ ID NO: 340045 - RNA, 19 nt, Homo sapiens
  misc_RNA (1)...(19): siRNA sense strand
caacaugcccacagaucaa

SEQ ID NO: 340046 - RNA, 19 nt, Homo sapiens
  misc_RNA (1)...(19): siRNA sense strand
ucaccaacaugcccacaga

SEQ ID NO: 340047 - RNA, 19 nt, Homo sapiens
  misc_RNA (1)...(19): siRNA sense strand
cagaggagauguggucaau

SEQ ID NO: 340048 - RNA, 19 nt, Homo sapiens
  misc_RNA (1)...(19): siRNA sense strand
caauugggcagauguguga

SEQ ID NO: 340049 - RNA, 19 nt, Homo sapiens
  misc_RNA (1)...(19): siRNA sense strand
ggagauguggucaauggaa

SEQ ID NO: 340050 - RNA, 19 nt, Homo sapiens
  misc_RNA (1)...(19): siRNA sense strand
guacagcuguguggugcuu

SEQ ID NO: 340051 - RNA, 19 nt, Homo sapiens
  misc_RNA (1)...(19): siRNA sense strand
ccaaagcgagcaagagaau

SEQ ID NO: 340052 - RNA, 19 nt, Homo sapiens
  misc_RNA (1)...(19): siRNA sense strand
gcuaugggcccuucaccaa

SEQ ID NO: 340053 - RNA, 19 nt, Homo sapiens
  misc_RNA (1)...(19): siRNA sense strand
gaaugagcaugauuuugaa

SEQ ID NO: 340054 - RNA, 19 nt, Homo sapiens
  misc_RNA (1)...(19): siRNA sense strand
ucagggcuauccucucaga

SEQ ID NO: 340055 - RNA, 19 nt, Homo sapiens
  misc_RNA (1)...(19): siRNA sense strand
agggauaccaugcaacaua

SEQ ID NO: 340056 - RNA, 19 nt, Homo sapiens
  misc_RNA (1)...(19): siRNA sense strand
gcuagaaaucuguugcuau

SEQ ID NO: 340057 - RNA, 19 nt, Homo sapiens
  misc_RNA (1)...(19): siRNA sense strand
ugaaugagcaugauuuuga

SEQ ID NO: 340058 - RNA, 19 nt, Homo sapiens
  misc_RNA (1)...(19): siRNA sense strand
ggcuagaaaucuguugcua

SEQ ID NO: 340059 - RNA, 19 nt, Homo sapiens
  misc_RNA (1)...(19): siRNA sense strand
ugaaacaagcgucucugaa

SEQ ID NO: 340060 - RNA, 19 nt, Homo sapiens
  misc_RNA (1)...(19): siRNA sense strand
aacauaaccugauaaagcu

SEQ ID NO: 340061 - RNA, 19 nt, Homo sapiens
  misc_RNA (1)...(19): siRNA sense strand
ugacccagucuauuaaaga

SEQ ID NO: 340062 - RNA, 19 nt, Homo sapiens
  misc_RNA (1)...(19): siRNA sense strand
gaacuagaagcuguguuag

SEQ ID NO: 340063 - RNA, 19 nt, Homo sapiens
  misc_RNA (1)...(19): siRNA sense strand
gugaaacaagcgucucuga

SEQ ID NO: 340064 - RNA, 19 nt, Homo sapiens
  misc_RNA (1)...(19): siRNA sense strand
ccaacaugcccacagauca

SEQ ID NO: 340065 - RNA, 19 nt, Homo sapiens
  misc_RNA (1)...(19): siRNA sense strand
uaugggcccuucaccaaca

SEQ ID NO: 340066 - RNA, 19 nt, Homo sapiens
  misc_RNA (1)...(19): siRNA sense strand
guccaaagcgagcaagaga

SEQ ID NO: 340067 - RNA, 19 nt, Homo sapiens
  misc_RNA (1)...(19): siRNA sense strand
cagaacaaagcacaucaga

SEQ ID NO: 340068 - RNA, 19 nt, Homo sapiens
  misc_RNA (1)...(19): siRNA sense strand
ccugcgaaauccagaacaa

SEQ ID NO: 340069 - RNA, 19 nt, Homo sapiens
  misc_RNA (1)...(19): siRNA sense strand
gaaaccaccaagguccaaa

SEQ ID NO: 340070 - RNA, 19 nt, Homo sapiens
  misc_RNA (1)...(19): siRNA sense strand
gauaaagcuccagcaggaa

SEQ ID NO: 340071 - RNA, 19 nt, Homo sapiens
  misc_RNA (1)...(19): siRNA sense strand
aaggagcuuucaucauuca

SEQ ID NO: 340072 - RNA, 19 nt, Homo sapiens
  misc_RNA (1)...(19): siRNA sense strand
ggugugagagugaaacaag

SEQ ID NO: 340073 - RNA, 19 nt, Homo sapiens
  misc_RNA (1)...(19): siRNA sense strand
gaaauggcugaacuagaag

SEQ ID NO: 340074 - RNA, 19 nt, Homo sapiens
  misc_RNA (1)...(19): siRNA sense strand
auaaagcuccagcaggaaa

SEQ ID NO: 340075 - RNA, 19 nt, Homo sapiens
  misc_RNA (1)...(19): siRNA sense strand
acccuuccaucauaaguga

SEQ ID NO: 340076 - RNA, 19 nt, Homo sapiens
  misc_RNA (1)...(19): siRNA sense strand
ggugacccagucuauuaaa

SEQ ID NO: 340077 - RNA, 19 nt, Homo sapiens
  misc_RNA (1)...(19): siRNA sense strand
cccagucuauuaaagaaag

SEQ ID NO: 340078 - RNA, 19 nt, Homo sapiens
  misc_RNA (1)...(19): siRNA sense strand
caucugggugugagaguga

SEQ ID NO: 340079 - RNA, 19 nt, Homo sapiens
  misc_RNA (1)...(19): siRNA sense strand
ccagucuauuaaagaaaga

SEQ ID NO: 340080 - RNA, 19 nt, Homo sapiens
  misc_RNA (1)...(19): siRNA sense strand
cgaaauccagaacaaagca

SEQ ID NO: 340081 - RNA, 19 nt, Homo sapiens
  misc_RNA (1)...(19): siRNA sense strand
aagagaaucccaggacaga

SEQ ID NO: 340082 - RNA, 19 nt, Homo sapiens
  misc_RNA (1)...(19): siRNA sense strand
gauguggucaauggaagaa

SEQ ID NO: 340083 - RNA, 19 nt, Homo sapiens
  misc_RNA (1)...(19): siRNA sense strand
ggaccugcgaaauccagaa

SEQ ID NO: 340084 - RNA, 19 nt, Homo sapiens
  misc_RNA (1)...(19): siRNA sense strand
gagcaugauuuugaaguca

SEQ ID NO: 340085 - RNA, 19 nt, Homo sapiens
  misc_RNA (1)...(19): siRNA sense strand
gugacccagucuauuaaag

SEQ ID NO: 340086 - RNA, 19 nt, Homo sapiens
  misc_RNA (1)...(19): siRNA sense strand
agaacaaagcacaucagaa

SEQ ID NO: 340087 - RNA, 19 nt, Homo sapiens
  misc_RNA (1)...(19): siRNA sense strand
uggaagaaaccaccaaggu

SEQ ID NO: 340088 - RNA, 19 nt, Homo sapiens
  misc_RNA (1)...(19): siRNA sense strand
ucaacuggaauggauggua

SEQ ID NO: 340089 - RNA, 19 nt, Homo sapiens
  misc_RNA (1)...(19): siRNA sense strand
ggaaauggcugaacuagaa

SEQ ID NO: 340090 - RNA, 19 nt, Homo sapiens
  misc_RNA (1)...(19): siRNA sense strand
gaacaaagcacaucagaaa

SEQ ID NO: 340091 - RNA, 19 nt, Homo sapiens
  misc_RNA (1)...(19): siRNA sense strand
cagcuacccuuccaucaua

SEQ ID NO: 340092 - RNA, 19 nt, Homo sapiens
  misc_RNA (1)...(19): siRNA sense strand
gggauaccaugcaacauaa

SEQ ID NO: 340093 - RNA, 19 nt, Homo sapiens
  misc_RNA (1)...(19): siRNA sense strand
gaggagauguggucaaugg

SEQ ID NO: 340094 - RNA, 19 nt, Homo sapiens
  misc_RNA (1)...(19): siRNA sense strand
gaaggagcuuucaucauuc

SEQ ID NO: 340095 - RNA, 19 nt, Homo sapiens
  misc_RNA (1)...(19): siRNA sense strand
cuagaaaucuguugcuaug

SEQ ID NO: 340096 - RNA, 19 nt, Homo sapiens
  misc_RNA (1)...(19): siRNA sense strand
gcucagggcuauccucuca

SEQ ID NO: 340097 - RNA, 19 nt, Homo sapiens
  misc_RNA (1)...(19): siRNA sense strand
aaacaagcgucucugaaga

SEQ ID NO: 340098 - RNA, 19 nt, Homo sapiens
  misc_RNA (1)...(19): siRNA sense strand
caacauaaccugauaaagc

SEQ ID NO: 340099 - RNA, 19 nt, Homo sapiens
  misc_RNA (1)...(19): siRNA sense strand
gaaacaagcgucucugaag

SEQ ID NO: 340100 - RNA, 19 nt, Homo sapiens
  misc_RNA (1)...(19): siRNA sense strand
gcagagggauaccaugcaa

SEQ ID NO: 340101 - RNA, 19 nt, Homo sapiens
  misc_RNA (1)...(19): siRNA sense strand
ugaacuagaagcuguguua

SEQ ID NO: 340102 - RNA, 19 nt, Homo sapiens
  misc_RNA (1)...(19): siRNA sense strand
gagaaucccaggacagaaa

SEQ ID NO: 340103 - RNA, 19 nt, Homo sapiens
  misc_RNA (1)...(19): siRNA sense strand
gcccacagaucaacuggaa

SEQ ID NO: 340104 - RNA, 19 nt, Homo sapiens
  misc_RNA (1)...(19): siRNA sense strand
gaagacugcucagggcuau

SEQ ID NO: 340105 - RNA, 19 nt, Homo sapiens
  misc_RNA (1)...(19): siRNA sense strand
gacccagucuauuaaagaa

SEQ ID NO: 340106 - RNA, 19 nt, Homo sapiens
  misc_RNA (1)...(19): siRNA sense strand
acuagaagcuguguuagaa

SEQ ID NO: 340107 - RNA, 19 nt, Homo sapiens
  misc_RNA (1)...(19): siRNA sense strand
caugcaacauaaccugaua

SEQ ID NO: 340108 - RNA, 19 nt, Homo sapiens
  misc_RNA (1)...(19): siRNA sense strand
gcuggacaccuaccugaua

SEQ ID NO: 340109 - RNA, 19 nt, Homo sapiens
  misc_RNA (1)...(19): siRNA sense strand
cagaucaacuggaauggau

SEQ ID NO: 340110 - RNA, 19 nt, Homo sapiens
  misc_RNA (1)...(19): siRNA sense strand
gcaggaaauggcugaacua

SEQ ID NO: 340111 - RNA, 19 nt, Homo sapiens
  misc_RNA (1)...(19): siRNA sense strand
ccacagaucaacuggaaug

SEQ ID NO: 340112 - RNA, 19 nt, Homo sapiens
  misc_RNA (1)...(19): siRNA sense strand
caacaugcccacagaucaa

SEQ ID NO: 340113 - RNA, 19 nt, Homo sapiens
  misc_RNA (1)...(19): siRNA sense strand
ucaccaacaugcccacaga

SEQ ID NO: 340114 - RNA, 19 nt, Homo sapiens
  misc_RNA (1)...(19): siRNA sense strand
cagaggagauguggucaau

SEQ ID NO: 340115 - RNA, 19 nt, Homo sapiens
  misc_RNA (1)...(19): siRNA sense strand
caauugggcagauguguga

SEQ ID NO: 340116 - RNA, 19 nt, Homo sapiens
  misc_RNA (1)...(19): siRNA sense strand
ggagauguggucaauggaa

SEQ ID NO: 340117 - RNA, 19 nt, Homo sapiens
  misc_RNA (1)...(19): siRNA sense strand
guacagcuguguggugcuu

SEQ ID NO: 340118 - RNA, 19 nt, Homo sapiens
  misc_RNA (1)...(19): siRNA sense strand
ccaaagcgagcaagagaau

SEQ ID NO: 340119 - RNA, 19 nt, Homo sapiens
  misc_RNA (1)...(19): siRNA sense strand
gcuaugggcccuucaccaa

SEQ ID NO: 340120 - RNA, 19 nt, Homo sapiens
  misc_RNA (1)...(19): siRNA sense strand
gaaugagcaugauuuugaa

SEQ ID NO: 340121 - RNA, 19 nt, Homo sapiens
  misc_RNA (1)...(19): siRNA sense strand
ucagggcuauccucucaga

SEQ ID NO: 340122 - RNA, 19 nt, Homo sapiens
  misc_RNA (1)...(19): siRNA sense strand
agggauaccaugcaacaua

SEQ ID NO: 340123 - RNA, 19 nt, Homo sapiens
  misc_RNA (1)...(19): siRNA sense strand
gcuagaaaucuguugcuau

SEQ ID NO: 340124 - RNA, 19 nt, Homo sapiens
  misc_RNA (1)...(19): siRNA sense strand
ugaaugagcaugauuuuga

SEQ ID NO: 340125 - RNA, 19 nt, Homo sapiens
  misc_RNA (1)...(19): siRNA sense strand
ggcuagaaaucuguugcua

SEQ ID NO: 340126 - RNA, 19 nt, Homo sapiens
  misc_RNA (1)...(19): siRNA sense strand
ugaaacaagcgucucugaa

SEQ ID NO: 340127 - RNA, 19 nt, Homo sapiens
  misc_RNA (1)...(19): siRNA sense strand
aacauaaccugauaaagcu

SEQ ID NO: 340128 - RNA, 19 nt, Homo sapiens
  misc_RNA (1)...(19): siRNA sense strand
ugacccagucuauuaaaga

SEQ ID NO: 340129 - RNA, 19 nt, Homo sapiens
  misc_RNA (1)...(19): siRNA sense strand
gaacuagaagcuguguuag

SEQ ID NO: 340130 - RNA, 19 nt, Homo sapiens
  misc_RNA (1)...(19): siRNA sense strand
gugaaacaagcgucucuga

SEQ ID NO: 340131 - RNA, 19 nt, Homo sapiens
  misc_RNA (1)...(19): siRNA sense strand
ccaacaugcccacagauca

SEQ ID NO: 340132 - RNA, 19 nt, Homo sapiens
  misc_RNA (1)...(19): siRNA sense strand
uaugggcccuucaccaaca

SEQ ID NO: 340133 - RNA, 19 nt, Homo sapiens
  misc_RNA (1)...(19): siRNA sense strand
guccaaagcgagcaagaga

SEQ ID NO: 340134 - RNA, 19 nt, Homo sapiens
  misc_RNA (1)...(19): siRNA sense strand
cagaacaaagcacaucaga

SEQ ID NO: 340135 - RNA, 19 nt, Homo sapiens
  misc_RNA (1)...(19): siRNA sense strand
ccugcgaaauccagaacaa

SEQ ID NO: 340136 - RNA, 19 nt, Homo sapiens
  misc_RNA (1)...(19): siRNA sense strand
gaaaccaccaagguccaaa

SEQ ID NO: 340137 - RNA, 19 nt, Homo sapiens
  misc_RNA (1)...(19): siRNA sense strand
gauaaagcuccagcaggaa

SEQ ID NO: 340138 - RNA, 19 nt, Homo sapiens
  misc_RNA (1)...(19): siRNA sense strand
aaggagcuuucaucauuca

SEQ ID NO: 340139 - RNA, 19 nt, Homo sapiens
  misc_RNA (1)...(19): siRNA sense strand
ggugugagagugaaacaag

SEQ ID NO: 340140 - RNA, 19 nt, Homo sapiens
  misc_RNA (1)...(19): siRNA sense strand
gaaauggcugaacuagaag

SEQ ID NO: 340141 - RNA, 19 nt, Homo sapiens
  misc_RNA (1)...(19): siRNA sense strand
auaaagcuccagcaggaaa

SEQ ID NO: 340142 - RNA, 19 nt, Homo sapiens
  misc_RNA (1)...(19): siRNA sense strand
acccuuccaucauaaguga

SEQ ID NO: 340143 - RNA, 19 nt, Homo sapiens
  misc_RNA (1)...(19): siRNA sense strand
ggugacccagucuauuaaa

SEQ ID NO: 340144 - RNA, 19 nt, Homo sapiens
  misc_RNA (1)...(19): siRNA sense strand
cccagucuauuaaagaaag

SEQ ID NO: 340145 - RNA, 19 nt, Homo sapiens
  misc_RNA (1)...(19): siRNA sense strand
caucugggugugagaguga

SEQ ID NO: 340146 - RNA, 19 nt, Homo sapiens
  misc_RNA (1)...(19): siRNA sense strand
ccagucuauuaaagaaaga

SEQ ID NO: 340147 - RNA, 19 nt, Homo sapiens
  misc_RNA (1)...(19): siRNA sense strand
cgaaauccagaacaaagca

SEQ ID NO: 340148 - RNA, 19 nt, Homo sapiens
  misc_RNA (1)...(19): siRNA sense strand
aagagaaucccaggacaga

SEQ ID NO: 340149 - RNA, 19 nt, Homo sapiens
  misc_RNA (1)...(19): siRNA sense strand
gauguggucaauggaagaa

SEQ ID NO: 340150 - RNA, 19 nt, Homo sapiens
  misc_RNA (1)...(19): siRNA sense strand
ggaccugcgaaauccagaa

SEQ ID NO: 340151 - RNA, 19 nt, Homo sapiens
  misc_RNA (1)...(19): siRNA sense strand
gagcaugauuuugaaguca

SEQ ID NO: 340152 - RNA, 19 nt, Homo sapiens
  misc_RNA (1)...(19): siRNA sense strand
gugacccagucuauuaaag

SEQ ID NO: 340153 - RNA, 19 nt, Homo sapiens
  misc_RNA (1)...(19): siRNA sense strand
agaacaaagcacaucagaa

SEQ ID NO: 340154 - RNA, 19 nt, Homo sapiens
  misc_RNA (1)...(19): siRNA sense strand
uggaagaaaccaccaaggu

SEQ ID NO: 340155 - RNA, 19 nt, Homo sapiens
  misc_RNA (1)...(19): siRNA sense strand
ucaacuggaauggauggua

SEQ ID NO: 340156 - RNA, 19 nt, Homo sapiens
  misc_RNA (1)...(19): siRNA sense strand
ggaaauggcugaacuagaa

SEQ ID NO: 340157 - RNA, 19 nt, Homo sapiens
  misc_RNA (1)...(19): siRNA sense strand
gaacaaagcacaucagaaa

SEQ ID NO: 340158 - RNA, 19 nt, Homo sapiens
  misc_RNA (1)...(19): siRNA sense strand
cagcuacccuuccaucaua

SEQ ID NO: 340159 - RNA, 19 nt, Homo sapiens
  misc_RNA (1)...(19): siRNA sense strand
gggauaccaugcaacauaa

SEQ ID NO: 340160 - RNA, 19 nt, Homo sapiens
  misc_RNA (1)...(19): siRNA sense strand
gaggagauguggucaaugg

SEQ ID NO: 340161 - RNA, 19 nt, Homo sapiens
  misc_RNA (1)...(19): siRNA sense strand
gaaggagcuuucaucauuc

SEQ ID NO: 340162 - RNA, 19 nt, Homo sapiens
  misc_RNA (1)...(19): siRNA sense strand
cuagaaaucuguugcuaug

SEQ ID NO: 340163 - RNA, 19 nt, Homo sapiens
  misc_RNA (1)...(19): siRNA sense strand
gcucagggcuauccucuca

SEQ ID NO: 340164 - RNA, 19 nt, Homo sapiens
  misc_RNA (1)...(19): siRNA sense strand
aaacaagcgucucugaaga

SEQ ID NO: 340165 - RNA, 19 nt, Homo sapiens
  misc_RNA (1)...(19): siRNA sense strand
caacauaaccugauaaagc

SEQ ID NO: 340166 - RNA, 19 nt, Homo sapiens
  misc_RNA (1)...(19): siRNA sense strand
gaaacaagcgucucugaag

SEQ ID NO: 340167 - RNA, 19 nt, Homo sapiens
  misc_RNA (1)...(19): siRNA sense strand
gcagagggauaccaugcaa

SEQ ID NO: 340168 - RNA, 19 nt, Homo sapiens
  misc_RNA (1)...(19): siRNA sense strand
ugaacuagaagcuguguua

SEQ ID NO: 340169 - RNA, 19 nt, Homo sapiens
  misc_RNA (1)...(19): siRNA sense strand
gagaaucccaggacagaaa

SEQ ID NO: 340170 - RNA, 19 nt, Homo sapiens
  misc_RNA (1)...(19): siRNA sense strand
gcccacagaucaacuggaa

SEQ ID NO: 340171 - RNA, 19 nt, Homo sapiens
  misc_RNA (1)...(19): siRNA sense strand
gaagacugcucagggcuau

SEQ ID NO: 340172 - RNA, 19 nt, Homo sapiens
  misc_RNA (1)...(19): siRNA sense strand
gacccagucuauuaaagaa

SEQ ID NO: 340173 - RNA, 19 nt, Homo sapiens
  misc_RNA (1)...(19): siRNA sense strand
acuagaagcuguguuagaa

SEQ ID NO: 340174 - RNA, 19 nt, Homo sapiens
  misc_RNA (1)...(19): siRNA sense strand
caugcaacauaaccugaua

SEQ ID NO: 340175 - RNA, 19 nt, Homo sapiens
  misc_RNA (1)...(19): siRNA sense strand
gcuggacaccuaccugaua

SEQ ID NO: 340176 - RNA, 19 nt, Homo sapiens
  misc_RNA (1)...(19): siRNA sense strand
cagaucaacuggaauggau

SEQ ID NO: 340177 - RNA, 19 nt, Homo sapiens
  misc_RNA (1)...(19): siRNA sense strand
gcaggaaauggcugaacua

SEQ ID NO: 340178 - RNA, 19 nt, Homo sapiens
  misc_RNA (1)...(19): siRNA sense strand
ccacagaucaacuggaaug

SEQ ID NO: 340179 - RNA, 19 nt, Homo sapiens
  misc_RNA (1)...(19): siRNA sense strand
caacaugcccacagaucaa

SEQ ID NO: 340180 - RNA, 19 nt, Homo sapiens
  misc_RNA (1)...(19): siRNA sense strand
ucaccaacaugcccacaga

SEQ ID NO: 340181 - RNA, 19 nt, Homo sapiens
  misc_RNA (1)...(19): siRNA sense strand
cagaggagauguggucaau

SEQ ID NO: 340182 - RNA, 19 nt, Homo sapiens
  misc_RNA (1)...(19): siRNA sense strand
caauugggcagauguguga

SEQ ID NO: 340183 - RNA, 19 nt, Homo sapiens
  misc_RNA (1)...(19): siRNA sense strand
ggagauguggucaauggaa

SEQ ID NO: 340184 - RNA, 19 nt, Homo sapiens
  misc_RNA (1)...(19): siRNA sense strand
guacagcuguguggugcuu

SEQ ID NO: 340185 - RNA, 19 nt, Homo sapiens
  misc_RNA (1)...(19): siRNA sense strand
ccaaagcgagcaagagaau

SEQ ID NO: 340186 - RNA, 19 nt, Homo sapiens
  misc_RNA (1)...(19): siRNA sense strand
gcuaugggcccuucaccaa

SEQ ID NO: 340187 - RNA, 19 nt, Homo sapiens
  misc_RNA (1)...(19): siRNA sense strand
gaaugagcaugauuuugaa

SEQ ID NO: 340188 - RNA, 19 nt, Homo sapiens
  misc_RNA (1)...(19): siRNA sense strand
ucagggcuauccucucaga

SEQ ID NO: 340189 - RNA, 19 nt, Homo sapiens
  misc_RNA (1)...(19): siRNA sense strand
agggauaccaugcaacaua

SEQ ID NO: 340190 - RNA, 19 nt, Homo sapiens
  misc_RNA (1)...(19): siRNA sense strand
gcuagaaaucuguugcuau

SEQ ID NO: 340191 - RNA, 19 nt, Homo sapiens
  misc_RNA (1)...(19): siRNA sense strand
ugaaugagcaugauuuuga

SEQ ID NO: 340192 - RNA, 19 nt, Homo sapiens
  misc_RNA (1)...(19): siRNA sense strand
ggcuagaaaucuguugcua

SEQ ID NO: 340193 - RNA, 19 nt, Homo sapiens
  misc_RNA (1)...(19): siRNA sense strand
ugaaacaagcgucucugaa

SEQ ID NO: 340194 - RNA, 19 nt, Homo sapiens
  misc_RNA (1)...(19): siRNA sense strand
aacauaaccugauaaagcu

SEQ ID NO: 340195 - RNA, 19 nt, Homo sapiens
  misc_RNA (1)...(19): siRNA sense strand
ugacccagucuauuaaaga

SEQ ID NO: 340196 - RNA, 19 nt, Homo sapiens
  misc_RNA (1)...(19): siRNA sense strand
gaacuagaagcuguguuag

SEQ ID NO: 340197 - RNA, 19 nt, Homo sapiens
  misc_RNA (1)...(19): siRNA sense strand
gugaaacaagcgucucuga

SEQ ID NO: 340198 - RNA, 19 nt, Homo sapiens
  misc_RNA (1)...(19): siRNA sense strand
ccaacaugcccacagauca

SEQ ID NO: 340199 - RNA, 19 nt, Homo sapiens
  misc_RNA (1)...(19): siRNA sense strand
uaugggcccuucaccaaca

SEQ ID NO: 340200 - RNA, 19 nt, Homo sapiens
  misc_RNA (1)...(19): siRNA sense strand
guccaaagcgagcaagaga

SEQ ID NO: 340201 - RNA, 19 nt, Homo sapiens
  misc_RNA (1)...(19): siRNA sense strand
cagaacaaagcacaucaga

SEQ ID NO: 340202 - RNA, 19 nt, Homo sapiens
  misc_RNA (1)...(19): siRNA sense strand
ccugcgaaauccagaacaa

SEQ ID NO: 340203 - RNA, 19 nt, Homo sapiens
  misc_RNA (1)...(19): siRNA sense strand
gaaaccaccaagguccaaa

SEQ ID NO: 340204 - RNA, 19 nt, Homo sapiens
  misc_RNA (1)...(19): siRNA sense strand
gauaaagcuccagcaggaa

SEQ ID NO: 340205 - RNA, 19 nt, Homo sapiens
  misc_RNA (1)...(19): siRNA sense strand
aaggagcuuucaucauuca

SEQ ID NO: 340206 - RNA, 19 nt, Homo sapiens
  misc_RNA (1)...(19): siRNA sense strand
ggugugagagugaaacaag

SEQ ID NO: 340207 - RNA, 19 nt, Homo sapiens
  misc_RNA (1)...(19): siRNA sense strand
gaaauggcugaacuagaag

SEQ ID NO: 340208 - RNA, 19 nt, Homo sapiens
  misc_RNA (1)...(19): siRNA sense strand
auaaagcuccagcaggaaa

SEQ ID NO: 340209 - RNA, 19 nt, Homo sapiens
  misc_RNA (1)...(19): siRNA sense strand
acccuuccaucauaaguga

SEQ ID NO: 340210 - RNA, 19 nt, Homo sapiens
  misc_RNA (1)...(19): siRNA sense strand
ggugacccagucuauuaaa

SEQ ID NO: 340211 - RNA, 19 nt, Homo sapiens
  misc_RNA (1)...(19): siRNA sense strand
cccagucuauuaaagaaag

SEQ ID NO: 340212 - RNA, 19 nt, Homo sapiens
  misc_RNA (1)...(19): siRNA sense strand
caucugggugugagaguga

SEQ ID NO: 340213 - RNA, 19 nt, Homo sapiens
  misc_RNA (1)...(19): siRNA sense strand
ccagucuauuaaagaaaga

SEQ ID NO: 340214 - RNA, 19 nt, Homo sapiens
  misc_RNA (1)...(19): siRNA sense strand
cgaaauccagaacaaagca

SEQ ID NO: 340215 - RNA, 19 nt, Homo sapiens
  misc_RNA (1)...(19): siRNA sense strand
aagagaaucccaggacaga

SEQ ID NO: 340216 - RNA, 19 nt, Homo sapiens
  misc_RNA (1)...(19): siRNA sense strand
gauguggucaauggaagaa

SEQ ID NO: 340217 - RNA, 19 nt, Homo sapiens
  misc_RNA (1)...(19): siRNA sense strand
ggaccugcgaaauccagaa

SEQ ID NO: 340218 - RNA, 19 nt, Homo sapiens
  misc_RNA (1)...(19): siRNA sense strand
gagcaugauuuugaaguca

SEQ ID NO: 340219 - RNA, 19 nt, Homo sapiens
  misc_RNA (1)...(19): siRNA sense strand
gugacccagucuauuaaag

SEQ ID NO: 340220 - RNA, 19 nt, Homo sapiens
  misc_RNA (1)...(19): siRNA sense strand
agaacaaagcacaucagaa

SEQ ID NO: 340221 - RNA, 19 nt, Homo sapiens
  misc_RNA (1)...(19): siRNA sense strand
uggaagaaaccaccaaggu

SEQ ID NO: 340222 - RNA, 19 nt, Homo sapiens
  misc_RNA (1)...(19): siRNA sense strand
ucaacuggaauggauggua

SEQ ID NO: 340223 - RNA, 19 nt, Homo sapiens
  misc_RNA (1)...(19): siRNA sense strand
ggaaauggcugaacuagaa

SEQ ID NO: 340224 - RNA, 19 nt, Homo sapiens
  misc_RNA (1)...(19): siRNA sense strand
gaacaaagcacaucagaaa

SEQ ID NO: 340225 - RNA, 19 nt, Homo sapiens
  misc_RNA (1)...(19): siRNA sense strand
cagcuacccuuccaucaua

SEQ ID NO: 340226 - RNA, 19 nt, Homo sapiens
  misc_RNA (1)...(19): siRNA sense strand
gggauaccaugcaacauaa

SEQ ID NO: 340227 - RNA, 19 nt, Homo sapiens
  misc_RNA (1)...(19): siRNA sense strand
gaggagauguggucaaugg

SEQ ID NO: 340228 - RNA, 19 nt, Homo sapiens
  misc_RNA (1)...(19): siRNA sense strand
gaaggagcuuucaucauuc

SEQ ID NO: 340229 - RNA, 19 nt, Homo sapiens
  misc_RNA (1)...(19): siRNA sense strand
cuagaaaucuguugcuaug

SEQ ID NO: 340230 - RNA, 19 nt, Homo sapiens
  misc_RNA (1)...(19): siRNA sense strand
gcucagggcuauccucuca

SEQ ID NO: 340231 - RNA, 19 nt, Homo sapiens
  misc_RNA (1)...(19): siRNA sense strand
aaacaagcgucucugaaga

SEQ ID NO: 340232 - RNA, 19 nt, Homo sapiens
  misc_RNA (1)...(19): siRNA sense strand
caacauaaccugauaaagc

SEQ ID NO: 340233 - RNA, 19 nt, Homo sapiens
  misc_RNA (1)...(19): siRNA sense strand
gaaacaagcgucucugaag

SEQ ID NO: 340234 - RNA, 19 nt, Homo sapiens
  misc_RNA (1)...(19): siRNA sense strand
gcagagggauaccaugcaa

SEQ ID NO: 340235 - RNA, 19 nt, Homo sapiens
  misc_RNA (1)...(19): siRNA sense strand
ugaacuagaagcuguguua

SEQ ID NO: 340236 - RNA, 19 nt, Homo sapiens
  misc_RNA (1)...(19): siRNA sense strand
gagaaucccaggacagaaa

SEQ ID NO: 340237 - RNA, 19 nt, Homo sapiens
  misc_RNA (1)...(19): siRNA sense strand
gcccacagaucaacuggaa

SEQ ID NO: 340238 - RNA, 19 nt, Homo sapiens
  misc_RNA (1)...(19): siRNA sense strand
gaagacugcucagggcuau

SEQ ID NO: 340239 - RNA, 19 nt, Homo sapiens
  misc_RNA (1)...(19): siRNA sense strand
gacccagucuauuaaagaa

SEQ ID NO: 340240 - RNA, 19 nt, Homo sapiens
  misc_RNA (1)...(19): siRNA sense strand
acuagaagcuguguuagaa

SEQ ID NO: 340241 - RNA, 19 nt, Homo sapiens
  misc_RNA (1)...(19): siRNA sense strand
caugcaacauaaccugaua

SEQ ID NO: 340242 - RNA, 19 nt, Homo sapiens
  misc_RNA (1)...(19): siRNA sense strand
gcuggacaccuaccugaua

SEQ ID NO: 340243 - RNA, 19 nt, Homo sapiens
  misc_RNA (1)...(19): siRNA sense strand
cagaucaacuggaauggau

SEQ ID NO: 340244 - RNA, 19 nt, Homo sapiens
  misc_RNA (1)...(19): siRNA sense strand
gcaggaaauggcugaacua

SEQ ID NO: 340245 - RNA, 19 nt, Homo sapiens
  misc_RNA (1)...(19): siRNA sense strand
ccacagaucaacuggaaug

SEQ ID NO: 340246 - RNA, 19 nt, Homo sapiens
  misc_RNA (1)...(19): siRNA sense strand
caacaugcccacagaucaa

SEQ ID NO: 340247 - RNA, 19 nt, Homo sapiens
  misc_RNA (1)...(19): siRNA sense strand
ucaccaacaugcccacaga

SEQ ID NO: 340248 - RNA, 19 nt, Homo sapiens
  misc_RNA (1)...(19): siRNA sense strand
cagaggagauguggucaau

SEQ ID NO: 340249 - RNA, 19 nt, Homo sapiens
  misc_RNA (1)...(19): siRNA sense strand
caauugggcagauguguga

SEQ ID NO: 340250 - RNA, 19 nt, Homo sapiens
  misc_RNA (1)...(19): siRNA sense strand
ggagauguggucaauggaa

SEQ ID NO: 340251 - RNA, 19 nt, Homo sapiens
  misc_RNA (1)...(19): siRNA sense strand
guacagcuguguggugcuu

SEQ ID NO: 340252 - RNA, 19 nt, Homo sapiens
  misc_RNA (1)...(19): siRNA sense strand
ccaaagcgagcaagagaau

SEQ ID NO: 340253 - RNA, 19 nt, Homo sapiens
  misc_RNA (1)...(19): siRNA sense strand
gcuaugggcccuucaccaa

SEQ ID NO: 340254 - RNA, 19 nt, Homo sapiens
  misc_RNA (1)...(19): siRNA sense strand
gaaugagcaugauuuugaa

SEQ ID NO: 340255 - RNA, 19 nt, Homo sapiens
  misc_RNA (1)...(19): siRNA sense strand
ucagggcuauccucucaga

SEQ ID NO: 340256 - RNA, 19 nt, Homo sapiens
  misc_RNA (1)...(19): siRNA sense strand
agggauaccaugcaacaua

SEQ ID NO: 340257 - RNA, 19 nt, Homo sapiens
  misc_RNA (1)...(19): siRNA sense strand
gcuagaaaucuguugcuau

SEQ ID NO: 340258 - RNA, 19 nt, Homo sapiens
  misc_RNA (1)...(19): siRNA sense strand
ugaaugagcaugauuuuga

SEQ ID NO: 340259 - RNA, 19 nt, Homo sapiens
  misc_RNA (1)...(19): siRNA sense strand
ggcuagaaaucuguugcua

SEQ ID NO: 340260 - RNA, 19 nt, Homo sapiens
  misc_RNA (1)...(19): siRNA sense strand
ugaaacaagcgucucugaa

SEQ ID NO: 340261 - RNA, 19 nt, Homo sapiens
  misc_RNA (1)...(19): siRNA sense strand
aacauaaccugauaaagcu

SEQ ID NO: 340262 - RNA, 19 nt, Homo sapiens
  misc_RNA (1)...(19): siRNA sense strand
ugacccagucuauuaaaga

SEQ ID NO: 340263 - RNA, 19 nt, Homo sapiens
  misc_RNA (1)...(19): siRNA sense strand
gaacuagaagcuguguuag

SEQ ID NO: 340264 - RNA, 19 nt, Homo sapiens
  misc_RNA (1)...(19): siRNA sense strand
gugaaacaagcgucucuga

SEQ ID NO: 340265 - RNA, 19 nt, Homo sapiens
  misc_RNA (1)...(19): siRNA sense strand
ccaacaugcccacagauca

SEQ ID NO: 340266 - RNA, 19 nt, Homo sapiens
  misc_RNA (1)...(19): siRNA sense strand
uaugggcccuucaccaaca

SEQ ID NO: 340267 - RNA, 19 nt, Homo sapiens
  misc_RNA (1)...(19): siRNA sense strand
guccaaagcgagcaagaga

SEQ ID NO: 340268 - RNA, 19 nt, Homo sapiens
  misc_RNA (1)...(19): siRNA sense strand
cagaacaaagcacaucaga

SEQ ID NO: 340269 - RNA, 19 nt, Homo sapiens
  misc_RNA (1)...(19): siRNA sense strand
ccugcgaaauccagaacaa

SEQ ID NO: 340270 - RNA, 19 nt, Homo sapiens
  misc_RNA (1)...(19): siRNA sense strand
gaaaccaccaagguccaaa

SEQ ID NO: 340271 - RNA, 19 nt, Homo sapiens
  misc_RNA (1)...(19): siRNA sense strand
gauaaagcuccagcaggaa

SEQ ID NO: 340272 - RNA, 19 nt, Homo sapiens
  misc_RNA (1)...(19): siRNA sense strand
aaggagcuuucaucauuca

SEQ ID NO: 340273 - RNA, 19 nt, Homo sapiens
  misc_RNA (1)...(19): siRNA sense strand
ggugugagagugaaacaag

SEQ ID NO: 340274 - RNA, 19 nt, Homo sapiens
  misc_RNA (1)...(19): siRNA sense strand
gaaauggcugaacuagaag

SEQ ID NO: 340275 - RNA, 19 nt, Homo sapiens
  misc_RNA (1)...(19): siRNA sense strand
auaaagcuccagcaggaaa

SEQ ID NO: 340276 - RNA, 19 nt, Homo sapiens
  misc_RNA (1)...(19): siRNA sense strand
acccuuccaucauaaguga

SEQ ID NO: 340277 - RNA, 19 nt, Homo sapiens
  misc_RNA (1)...(19): siRNA sense strand
ggugacccagucuauuaaa

SEQ ID NO: 340278 - RNA, 19 nt, Homo sapiens
  misc_RNA (1)...(19): siRNA sense strand
cccagucuauuaaagaaag

SEQ ID NO: 340279 - RNA, 19 nt, Homo sapiens
  misc_RNA (1)...(19): siRNA sense strand
caucugggugugagaguga

SEQ ID NO: 340280 - RNA, 19 nt, Homo sapiens
  misc_RNA (1)...(19): siRNA sense strand
ccagucuauuaaagaaaga

SEQ ID NO: 340281 - RNA, 19 nt, Homo sapiens
  misc_RNA (1)...(19): siRNA sense strand
cgaaauccagaacaaagca

SEQ ID NO: 340282 - RNA, 19 nt, Homo sapiens
  misc_RNA (1)...(19): siRNA sense strand
aagagaaucccaggacaga

SEQ ID NO: 340283 - RNA, 19 nt, Homo sapiens
  misc_RNA (1)...(19): siRNA sense strand
gauguggucaauggaagaa

SEQ ID NO: 340284 - RNA, 19 nt, Homo sapiens
  misc_RNA (1)...(19): siRNA sense strand
ggaccugcgaaauccagaa

SEQ ID NO: 340285 - RNA, 19 nt, Homo sapiens
  misc_RNA (1)...(19): siRNA sense strand
gagcaugauuuugaaguca

SEQ ID NO: 340286 - RNA, 19 nt, Homo sapiens
  misc_RNA (1)...(19): siRNA sense strand
gugacccagucuauuaaag

SEQ ID NO: 340287 - RNA, 19 nt, Homo sapiens
  misc_RNA (1)...(19): siRNA sense strand
agaacaaagcacaucagaa

SEQ ID NO: 340288 - RNA, 19 nt, Homo sapiens
  misc_RNA (1)...(19): siRNA sense strand
uggaagaaaccaccaaggu

SEQ ID NO: 340289 - RNA, 19 nt, Homo sapiens
  misc_RNA (1)...(19): siRNA sense strand
ucaacuggaauggauggua

SEQ ID NO: 340290 - RNA, 19 nt, Homo sapiens
  misc_RNA (1)...(19): siRNA sense strand
ggaaauggcugaacuagaa

SEQ ID NO: 340291 - RNA, 19 nt, Homo sapiens
  misc_RNA (1)...(19): siRNA sense strand
gaacaaagcacaucagaaa

SEQ ID NO: 340292 - RNA, 19 nt, Homo sapiens
  misc_RNA (1)...(19): siRNA sense strand
cagcuacccuuccaucaua

SEQ ID NO: 340293 - RNA, 19 nt, Homo sapiens
  misc_RNA (1)...(19): siRNA sense strand
gggauaccaugcaacauaa

SEQ ID NO: 340294 - RNA, 19 nt, Homo sapiens
  misc_RNA (1)...(19): siRNA sense strand
gaggagauguggucaaugg

SEQ ID NO: 340295 - RNA, 19 nt, Homo sapiens
  misc_RNA (1)...(19): siRNA sense strand
gaaggagcuuucaucauuc

SEQ ID NO: 340296 - RNA, 19 nt, Homo sapiens
  misc_RNA (1)...(19): siRNA sense strand
cuagaaaucuguugcuaug

SEQ ID NO: 340297 - RNA, 19 nt, Homo sapiens
  misc_RNA (1)...(19): siRNA sense strand
gcucagggcuauccucuca

SEQ ID NO: 340298 - RNA, 19 nt, Homo sapiens
  misc_RNA (1)...(19): siRNA sense strand
aaacaagcgucucugaaga

SEQ ID NO: 340299 - RNA, 19 nt, Homo sapiens
  misc_RNA (1)...(19): siRNA sense strand
caacauaaccugauaaagc

SEQ ID NO: 340300 - RNA, 19 nt, Homo sapiens
  misc_RNA (1)...(19): siRNA sense strand
gaaacaagcgucucugaag

SEQ ID NO: 340301 - RNA, 19 nt, Homo sapiens
  misc_RNA (1)...(19): siRNA sense strand
gcagagggauaccaugcaa

SEQ ID NO: 340302 - RNA, 19 nt, Homo sapiens
  misc_RNA (1)...(19): siRNA sense strand
ugaacuagaagcuguguua

SEQ ID NO: 340303 - RNA, 19 nt, Homo sapiens
  misc_RNA (1)...(19): siRNA sense strand
gagaaucccaggacagaaa

SEQ ID NO: 340304 - RNA, 19 nt, Homo sapiens
  misc_RNA (1)...(19): siRNA sense strand
gcccacagaucaacuggaa

SEQ ID NO: 340305 - RNA, 19 nt, Homo sapiens
  misc_RNA (1)...(19): siRNA sense strand
gaagacugcucagggcuau

SEQ ID NO: 340306 - RNA, 19 nt, Homo sapiens
  misc_RNA (1)...(19): siRNA sense strand
gacccagucuauuaaagaa

SEQ ID NO: 340307 - RNA, 19 nt, Homo sapiens
  misc_RNA (1)...(19): siRNA sense strand
acuagaagcuguguuagaa

SEQ ID NO: 340308 - RNA, 19 nt, Homo sapiens
  misc_RNA (1)...(19): siRNA sense strand
caugcaacauaaccugaua

SEQ ID NO: 340309 - RNA, 19 nt, Homo sapiens
  misc_RNA (1)...(19): siRNA sense strand
gcuggacaccuaccugaua

SEQ ID NO: 340310 - RNA, 19 nt, Homo sapiens
  misc_RNA (1)...(19): siRNA sense strand
cagaucaacuggaauggau

SEQ ID NO: 340311 - RNA, 19 nt, Homo sapiens
  misc_RNA (1)...(19): siRNA sense strand
gcaggaaauggcugaacua

SEQ ID NO: 340312 - RNA, 19 nt, Homo sapiens
  misc_RNA (1)...(19): siRNA sense strand
ccacagaucaacuggaaug

SEQ ID NO: 340313 - RNA, 19 nt, Homo sapiens
  misc_RNA (1)...(19): siRNA sense strand
caacaugcccacagaucaa

SEQ ID NO: 340314 - RNA, 19 nt, Homo sapiens
  misc_RNA (1)...(19): siRNA sense strand
ucaccaacaugcccacaga

SEQ ID NO: 340315 - RNA, 19 nt, Homo sapiens
  misc_RNA (1)...(19): siRNA sense strand
cagaggagauguggucaau

SEQ ID NO: 340316 - RNA, 19 nt, Homo sapiens
  misc_RNA (1)...(19): siRNA sense strand
caauugggcagauguguga

SEQ ID NO: 340317 - RNA, 19 nt, Homo sapiens
  misc_RNA (1)...(19): siRNA sense strand
ggagauguggucaauggaa

SEQ ID NO: 340318 - RNA, 19 nt, Homo sapiens
  misc_RNA (1)...(19): siRNA sense strand
guacagcuguguggugcuu

SEQ ID NO: 340319 - RNA, 19 nt, Homo sapiens
  misc_RNA (1)...(19): siRNA sense strand
ccaaagcgagcaagagaau

SEQ ID NO: 340320 - RNA, 19 nt, Homo sapiens
  misc_RNA (1)...(19): siRNA sense strand
gcuaugggcccuucaccaa

SEQ ID NO: 340321 - RNA, 19 nt, Homo sapiens
  misc_RNA (1)...(19): siRNA sense strand
gaaugagcaugauuuugaa

SEQ ID NO: 340322 - RNA, 19 nt, Homo sapiens
  misc_RNA (1)...(19): siRNA sense strand
ucagggcuauccucucaga

SEQ ID NO: 340323 - RNA, 19 nt, Homo sapiens
  misc_RNA (1)...(19): siRNA sense strand
agggauaccaugcaacaua

SEQ ID NO: 340324 - RNA, 19 nt, Homo sapiens
  misc_RNA (1)...(19): siRNA sense strand
gcuagaaaucuguugcuau

SEQ ID NO: 340325 - RNA, 19 nt, Homo sapiens
  misc_RNA (1)...(19): siRNA sense strand
ugaaugagcaugauuuuga

SEQ ID NO: 340326 - RNA, 19 nt, Homo sapiens
  misc_RNA (1)...(19): siRNA sense strand
ggcuagaaaucuguugcua

SEQ ID NO: 340327 - RNA, 19 nt, Homo sapiens
  misc_RNA (1)...(19): siRNA sense strand
ugaaacaagcgucucugaa

SEQ ID NO: 340328 - RNA, 19 nt, Homo sapiens
  misc_RNA (1)...(19): siRNA sense strand
aacauaaccugauaaagcu

SEQ ID NO: 340329 - RNA, 19 nt, Homo sapiens
  misc_RNA (1)...(19): siRNA sense strand
ugacccagucuauuaaaga

SEQ ID NO: 340330 - RNA, 19 nt, Homo sapiens
  misc_RNA (1)...(19): siRNA sense strand
gaacuagaagcuguguuag

SEQ ID NO: 340331 - RNA, 19 nt, Homo sapiens
  misc_RNA (1)...(19): siRNA sense strand
gugaaacaagcgucucuga

SEQ ID NO: 340332 - RNA, 19 nt, Homo sapiens
  misc_RNA (1)...(19): siRNA sense strand
ccaacaugcccacagauca

SEQ ID NO: 340333 - RNA, 19 nt, Homo sapiens
  misc_RNA (1)...(19): siRNA sense strand
uaugggcccuucaccaaca

SEQ ID NO: 340334 - RNA, 19 nt, Homo sapiens
  misc_RNA (1)...(19): siRNA sense strand
guccaaagcgagcaagaga

SEQ ID NO: 340335 - RNA, 19 nt, Homo sapiens
  misc_RNA (1)...(19): siRNA sense strand
cagaacaaagcacaucaga

SEQ ID NO: 340336 - RNA, 19 nt, Homo sapiens
  misc_RNA (1)...(19): siRNA sense strand
ccugcgaaauccagaacaa

SEQ ID NO: 340337 - RNA, 19 nt, Homo sapiens
  misc_RNA (1)...(19): siRNA sense strand
gaaaccaccaagguccaaa

SEQ ID NO: 340338 - RNA, 19 nt, Homo sapiens
  misc_RNA (1)...(19): siRNA sense strand
gauaaagcuccagcaggaa

SEQ ID NO: 340339 - RNA, 19 nt, Homo sapiens
  misc_RNA (1)...(19): siRNA sense strand
aaggagcuuucaucauuca

SEQ ID NO: 340340 - RNA, 19 nt, Homo sapiens
  misc_RNA (1)...(19): siRNA sense strand
ggugugagagugaaacaag

SEQ ID NO: 340341 - RNA, 19 nt, Homo sapiens
  misc_RNA (1)...(19): siRNA sense strand
gaaauggcugaacuagaag

SEQ ID NO: 340342 - RNA, 19 nt, Homo sapiens
  misc_RNA (1)...(19): siRNA sense strand
auaaagcuccagcaggaaa

SEQ ID NO: 340343 - RNA, 19 nt, Homo sapiens
  misc_RNA (1)...(19): siRNA sense strand
acccuuccaucauaaguga

SEQ ID NO: 340344 - RNA, 19 nt, Homo sapiens
  misc_RNA (1)...(19): siRNA sense strand
ggugacccagucuauuaaa

SEQ ID NO: 340345 - RNA, 19 nt, Homo sapiens
  misc_RNA (1)...(19): siRNA sense strand
cccagucuauuaaagaaag

SEQ ID NO: 340346 - RNA, 19 nt, Homo sapiens
  misc_RNA (1)...(19): siRNA sense strand
caucugggugugagaguga

SEQ ID NO: 340347 - RNA, 19 nt, Homo sapiens
  misc_RNA (1)...(19): siRNA sense strand
ccagucuauuaaagaaaga

SEQ ID NO: 340348 - RNA, 19 nt, Homo sapiens
  misc_RNA (1)...(19): siRNA sense strand
cgaaauccagaacaaagca

SEQ ID NO: 340349 - RNA, 19 nt, Homo sapiens
  misc_RNA (1)...(19): siRNA sense strand
aagagaaucccaggacaga

SEQ ID NO: 340350 - RNA, 19 nt, Homo sapiens
  misc_RNA (1)...(19): siRNA sense strand
gauguggucaauggaagaa

SEQ ID NO: 340351 - RNA, 19 nt, Homo sapiens
  misc_RNA (1)...(19): siRNA sense strand
ggaccugcgaaauccagaa

SEQ ID NO: 340352 - RNA, 19 nt, Homo sapiens
  misc_RNA (1)...(19): siRNA sense strand
gagcaugauuuugaaguca

SEQ ID NO: 340353 - RNA, 19 nt, Homo sapiens
  misc_RNA (1)...(19): siRNA sense strand
gugacccagucuauuaaag

SEQ ID NO: 340354 - RNA, 19 nt, Homo sapiens
  misc_RNA (1)...(19): siRNA sense strand
agaacaaagcacaucagaa

SEQ ID NO: 340355 - RNA, 19 nt, Homo sapiens
  misc_RNA (1)...(19): siRNA sense strand
uggaagaaaccaccaaggu

SEQ ID NO: 340356 - RNA, 19 nt, Homo sapiens
  misc_RNA (1)...(19): siRNA sense strand
ucaacuggaauggauggua

SEQ ID NO: 340357 - RNA, 19 nt, Homo sapiens
  misc_RNA (1)...(19): siRNA sense strand
ggaaauggcugaacuagaa

SEQ ID NO: 340358 - RNA, 19 nt, Homo sapiens
  misc_RNA (1)...(19): siRNA sense strand
gaacaaagcacaucagaaa

SEQ ID NO: 340359 - RNA, 19 nt, Homo sapiens
  misc_RNA (1)...(19): siRNA sense strand
cagcuacccuuccaucaua

SEQ ID NO: 340360 - RNA, 19 nt, Homo sapiens
  misc_RNA (1)...(19): siRNA sense strand
gggauaccaugcaacauaa

SEQ ID NO: 340361 - RNA, 19 nt, Homo sapiens
  misc_RNA (1)...(19): siRNA sense strand
gaggagauguggucaaugg

SEQ ID NO: 340362 - RNA, 19 nt, Homo sapiens
  misc_RNA (1)...(19): siRNA sense strand
gaaggagcuuucaucauuc

SEQ ID NO: 340363 - RNA, 19 nt, Homo sapiens
  misc_RNA (1)...(19): siRNA sense strand
cuagaaaucuguugcuaug

SEQ ID NO: 340364 - RNA, 19 nt, Homo sapiens
  misc_RNA (1)...(19): siRNA sense strand
gcucagggcuauccucuca

SEQ ID NO: 340365 - RNA, 19 nt, Homo sapiens
  misc_RNA (1)...(19): siRNA sense strand
aaacaagcgucucugaaga

SEQ ID NO: 340366 - RNA, 19 nt, Homo sapiens
  misc_RNA (1)...(19): siRNA sense strand
caacauaaccugauaaagc

SEQ ID NO: 340367 - RNA, 19 nt, Homo sapiens
  misc_RNA (1)...(19): siRNA sense strand
gaaacaagcgucucugaag

SEQ ID NO: 340368 - RNA, 19 nt, Homo sapiens
  misc_RNA (1)...(19): siRNA sense strand
gcagagggauaccaugcaa

SEQ ID NO: 340369 - RNA, 19 nt, Homo sapiens
  misc_RNA (1)...(19): siRNA sense strand
ugaacuagaagcuguguua

SEQ ID NO: 340370 - RNA, 19 nt, Homo sapiens
  misc_RNA (1)...(19): siRNA sense strand
gagaaucccaggacagaaa

SEQ ID NO: 340371 - RNA, 19 nt, Homo sapiens
  misc_RNA (1)...(19): siRNA sense strand
gcccacagaucaacuggaa

SEQ ID NO: 340372 - RNA, 19 nt, Homo sapiens
  misc_RNA (1)...(19): siRNA sense strand
gaagacugcucagggcuau

SEQ ID NO: 340373 - RNA, 19 nt, Homo sapiens
  misc_RNA (1)...(19): siRNA sense strand
gacccagucuauuaaagaa

SEQ ID NO: 340374 - RNA, 19 nt, Homo sapiens
  misc_RNA (1)...(19): siRNA sense strand
acuagaagcuguguuagaa

SEQ ID NO: 340375 - RNA, 19 nt, Homo sapiens
  misc_RNA (1)...(19): siRNA sense strand
caugcaacauaaccugaua

SEQ ID NO: 340376 - RNA, 19 nt, Homo sapiens
  misc_RNA (1)...(19): siRNA sense strand
gcuggacaccuaccugaua

SEQ ID NO: 340377 - RNA, 19 nt, Homo sapiens
  misc_RNA (1)...(19): siRNA sense strand
cagaucaacuggaauggau

SEQ ID NO: 340378 - RNA, 19 nt, Homo sapiens
  misc_RNA (1)...(19): siRNA sense strand
gcaggaaauggcugaacua

SEQ ID NO: 340379 - RNA, 19 nt, Homo sapiens
  misc_RNA (1)...(19): siRNA sense strand
ccacagaucaacuggaaug

SEQ ID NO: 340380 - RNA, 19 nt, Homo sapiens
  misc_RNA (1)...(19): siRNA sense strand
caacaugcccacagaucaa

SEQ ID NO: 340381 - RNA, 19 nt, Homo sapiens
  misc_RNA (1)...(19): siRNA sense strand
ucaccaacaugcccacaga

SEQ ID NO: 340382 - RNA, 19 nt, Homo sapiens
  misc_RNA (1)...(19): siRNA sense strand
cagaggagauguggucaau

SEQ ID NO: 340383 - RNA, 19 nt, Homo sapiens
  misc_RNA (1)...(19): siRNA sense strand
caauugggcagauguguga

SEQ ID NO: 340384 - RNA, 19 nt, Homo sapiens
  misc_RNA (1)...(19): siRNA sense strand
ggagauguggucaauggaa

SEQ ID NO: 340385 - RNA, 19 nt, Homo sapiens
  misc_RNA (1)...(19): siRNA sense strand
guacagcuguguggugcuu

SEQ ID NO: 340386 - RNA, 19 nt, Homo sapiens
  misc_RNA (1)...(19): siRNA sense strand
ccaaagcgagcaagagaau

SEQ ID NO: 340387 - RNA, 19 nt, Homo sapiens
  misc_RNA (1)...(19): siRNA sense strand
gcuaugggcccuucaccaa

SEQ ID NO: 340388 - RNA, 19 nt, Homo sapiens
  misc_RNA (1)...(19): siRNA sense strand
gaaugagcaugauuuugaa

SEQ ID NO: 340389 - RNA, 19 nt, Homo sapiens
  misc_RNA (1)...(19): siRNA sense strand
ucagggcuauccucucaga

SEQ ID NO: 340390 - RNA, 19 nt, Homo sapiens
  misc_RNA (1)...(19): siRNA sense strand
agggauaccaugcaacaua

SEQ ID NO: 340391 - RNA, 19 nt, Homo sapiens
  misc_RNA (1)...(19): siRNA sense strand
gcuagaaaucuguugcuau

SEQ ID NO: 340392 - RNA, 19 nt, Homo sapiens
  misc_RNA (1)...(19): siRNA sense strand
ugaaugagcaugauuuuga

SEQ ID NO: 340393 - RNA, 19 nt, Homo sapiens
  misc_RNA (1)...(19): siRNA sense strand
ggcuagaaaucuguugcua

SEQ ID NO: 340394 - RNA, 19 nt, Homo sapiens
  misc_RNA (1)...(19): siRNA sense strand
ugaaacaagcgucucugaa

SEQ ID NO: 340395 - RNA, 19 nt, Homo sapiens
  misc_RNA (1)...(19): siRNA sense strand
aacauaaccugauaaagcu

SEQ ID NO: 340396 - RNA, 19 nt, Homo sapiens
  misc_RNA (1)...(19): siRNA sense strand
ugacccagucuauuaaaga

SEQ ID NO: 340397 - RNA, 19 nt, Homo sapiens
  misc_RNA (1)...(19): siRNA sense strand
gaacuagaagcuguguuag

SEQ ID NO: 340398 - RNA, 19 nt, Homo sapiens
  misc_RNA (1)...(19): siRNA sense strand
gugaaacaagcgucucuga

SEQ ID NO: 340399 - RNA, 19 nt, Homo sapiens
  misc_RNA (1)...(19): siRNA sense strand
ccaacaugcccacagauca

SEQ ID NO: 340400 - RNA, 19 nt, Homo sapiens
  misc_RNA (1)...(19): siRNA sense strand
uaugggcccuucaccaaca

SEQ ID NO: 340401 - RNA, 19 nt, Homo sapiens
  misc_RNA (1)...(19): siRNA sense strand
guccaaagcgagcaagaga

SEQ ID NO: 340402 - RNA, 19 nt, Homo sapiens
  misc_RNA (1)...(19): siRNA sense strand
cagaacaaagcacaucaga

SEQ ID NO: 340403 - RNA, 19 nt, Homo sapiens
  misc_RNA (1)...(19): siRNA sense strand
ccugcgaaauccagaacaa

SEQ ID NO: 340404 - RNA, 19 nt, Homo sapiens
  misc_RNA (1)...(19): siRNA sense strand
gaaaccaccaagguccaaa

SEQ ID NO: 340405 - RNA, 19 nt, Homo sapiens
  misc_RNA (1)...(19): siRNA sense strand
gauaaagcuccagcaggaa

SEQ ID NO: 340406 - RNA, 19 nt, Homo sapiens
  misc_RNA (1)...(19): siRNA sense strand
aaggagcuuucaucauuca

SEQ ID NO: 340407 - RNA, 19 nt, Homo sapiens
  misc_RNA (1)...(19): siRNA sense strand
ggugugagagugaaacaag

SEQ ID NO: 340408 - RNA, 19 nt, Homo sapiens
  misc_RNA (1)...(19): siRNA sense strand
gaaauggcugaacuagaag

SEQ ID NO: 340409 - RNA, 19 nt, Homo sapiens
  misc_RNA (1)...(19): siRNA sense strand
auaaagcuccagcaggaaa

SEQ ID NO: 340410 - RNA, 19 nt, Homo sapiens
  misc_RNA (1)...(19): siRNA sense strand
acccuuccaucauaaguga

SEQ ID NO: 340411 - RNA, 19 nt, Homo sapiens
  misc_RNA (1)...(19): siRNA sense strand
ggugacccagucuauuaaa

SEQ ID NO: 340412 - RNA, 19 nt, Homo sapiens
  misc_RNA (1)...(19): siRNA sense strand
cccagucuauuaaagaaag

SEQ ID NO: 340413 - RNA, 19 nt, Homo sapiens
  misc_RNA (1)...(19): siRNA sense strand
caucugggugugagaguga

SEQ ID NO: 340414 - RNA, 19 nt, Homo sapiens
  misc_RNA (1)...(19): siRNA sense strand
ccagucuauuaaagaaaga

SEQ ID NO: 340415 - RNA, 19 nt, Homo sapiens
  misc_RNA (1)...(19): siRNA sense strand
cgaaauccagaacaaagca

SEQ ID NO: 340416 - RNA, 19 nt, Homo sapiens
  misc_RNA (1)...(19): siRNA sense strand
aagagaaucccaggacaga

SEQ ID NO: 340417 - RNA, 19 nt, Homo sapiens
  misc_RNA (1)...(19): siRNA sense strand
gauguggucaauggaagaa

SEQ ID NO: 340418 - RNA, 19 nt, Homo sapiens
  misc_RNA (1)...(19): siRNA sense strand
ggaccugcgaaauccagaa

SEQ ID NO: 340419 - RNA, 19 nt, Homo sapiens
  misc_RNA (1)...(19): siRNA sense strand
gagcaugauuuugaaguca

SEQ ID NO: 340420 - RNA, 19 nt, Homo sapiens
  misc_RNA (1)...(19): siRNA sense strand
gugacccagucuauuaaag

SEQ ID NO: 340421 - RNA, 19 nt, Homo sapiens
  misc_RNA (1)...(19): siRNA sense strand
agaacaaagcacaucagaa

SEQ ID NO: 340422 - RNA, 19 nt, Homo sapiens
  misc_RNA (1)...(19): siRNA sense strand
uggaagaaaccaccaaggu

SEQ ID NO: 340423 - RNA, 19 nt, Homo sapiens
  misc_RNA (1)...(19): siRNA sense strand
ucaacuggaauggauggua

SEQ ID NO: 340424 - RNA, 19 nt, Homo sapiens
  misc_RNA (1)...(19): siRNA sense strand
ggaaauggcugaacuagaa

SEQ ID NO: 340425 - RNA, 19 nt, Homo sapiens
  misc_RNA (1)...(19): siRNA sense strand
gaacaaagcacaucagaaa

SEQ ID NO: 340426 - RNA, 19 nt, Homo sapiens
  misc_RNA (1)...(19): siRNA sense strand
cagcuacccuuccaucaua

SEQ ID NO: 340427 - RNA, 19 nt, Homo sapiens
  misc_RNA (1)...(19): siRNA sense strand
gggauaccaugcaacauaa

SEQ ID NO: 340428 - RNA, 19 nt, Homo sapiens
  misc_RNA (1)...(19): siRNA sense strand
gaggagauguggucaaugg

SEQ ID NO: 340429 - RNA, 19 nt, Homo sapiens
  misc_RNA (1)...(19): siRNA sense strand
gaaggagcuuucaucauuc

SEQ ID NO: 340430 - RNA, 19 nt, Homo sapiens
  misc_RNA (1)...(19): siRNA sense strand
cuagaaaucuguugcuaug

SEQ ID NO: 340431 - RNA, 19 nt, Homo sapiens
  misc_RNA (1)...(19): siRNA sense strand
gcucagggcuauccucuca

SEQ ID NO: 340432 - RNA, 19 nt, Homo sapiens
  misc_RNA (1)...(19): siRNA sense strand
aaacaagcgucucugaaga

SEQ ID NO: 340433 - RNA, 19 nt, Homo sapiens
  misc_RNA (1)...(19): siRNA sense strand
caacauaaccugauaaagc

SEQ ID NO: 340434 - RNA, 19 nt, Homo sapiens
  misc_RNA (1)...(19): siRNA sense strand
gaaacaagcgucucugaag

SEQ ID NO: 340435 - RNA, 19 nt, Homo sapiens
  misc_RNA (1)...(19): siRNA sense strand
gcagagggauaccaugcaa

SEQ ID NO: 340436 - RNA, 19 nt, Homo sapiens
  misc_RNA (1)...(19): siRNA sense strand
ugaacuagaagcuguguua

SEQ ID NO: 340437 - RNA, 19 nt, Homo sapiens
  misc_RNA (1)...(19): siRNA sense strand
gagaaucccaggacagaaa

SEQ ID NO: 340438 - RNA, 19 nt, Homo sapiens
  misc_RNA (1)...(19): siRNA sense strand
gcccacagaucaacuggaa

SEQ ID NO: 340439 - RNA, 19 nt, Homo sapiens
  misc_RNA (1)...(19): siRNA sense strand
gaagacugcucagggcuau

SEQ ID NO: 340440 - RNA, 19 nt, Homo sapiens
  misc_RNA (1)...(19): siRNA sense strand
gacccagucuauuaaagaa

SEQ ID NO: 340441 - RNA, 19 nt, Homo sapiens
  misc_RNA (1)...(19): siRNA sense strand
acuagaagcuguguuagaa

SEQ ID NO: 340442 - RNA, 19 nt, Homo sapiens
  misc_RNA (1)...(19): siRNA sense strand
caugcaacauaaccugaua

SEQ ID NO: 340443 - RNA, 19 nt, Homo sapiens
  misc_RNA (1)...(19): siRNA sense strand
gcuggacaccuaccugaua

SEQ ID NO: 340444 - RNA, 19 nt, Homo sapiens
  misc_RNA (1)...(19): siRNA sense strand
cagaucaacuggaauggau

SEQ ID NO: 340445 - RNA, 19 nt, Homo sapiens
  misc_RNA (1)...(19): siRNA sense strand
gcaggaaauggcugaacua

SEQ ID NO: 340446 - RNA, 19 nt, Homo sapiens
  misc_RNA (1)...(19): siRNA sense strand
ccacagaucaacuggaaug

SEQ ID NO: 340447 - RNA, 19 nt, Homo sapiens
  misc_RNA (1)...(19): siRNA sense strand
caacaugcccacagaucaa

SEQ ID NO: 340448 - RNA, 19 nt, Homo sapiens
  misc_RNA (1)...(19): siRNA sense strand
ucaccaacaugcccacaga

SEQ ID NO: 340449 - RNA, 19 nt, Homo sapiens
  misc_RNA (1)...(19): siRNA sense strand
cagaggagauguggucaau

SEQ ID NO: 340450 - RNA, 19 nt, Homo sapiens
  misc_RNA (1)...(19): siRNA sense strand
caauugggcagauguguga

SEQ ID NO: 340451 - RNA, 19 nt, Homo sapiens
  misc_RNA (1)...(19): siRNA sense strand
ggagauguggucaauggaa

SEQ ID NO: 340452 - RNA, 19 nt, Homo sapiens
  misc_RNA (1)...(19): siRNA sense strand
guacagcuguguggugcuu

SEQ ID NO: 340453 - RNA, 19 nt, Homo sapiens
  misc_RNA (1)...(19): siRNA sense strand
ccaaagcgagcaagagaau

SEQ ID NO: 340454 - RNA, 19 nt, Homo sapiens
  misc_RNA (1)...(19): siRNA sense strand
gcuaugggcccuucaccaa

SEQ ID NO: 340455 - RNA, 19 nt, Homo sapiens
  misc_RNA (1)...(19): siRNA sense strand
gaaugagcaugauuuugaa

SEQ ID NO: 340456 - RNA, 19 nt, Homo sapiens
  misc_RNA (1)...(19): siRNA sense strand
ucagggcuauccucucaga

SEQ ID NO: 340457 - RNA, 19 nt, Homo sapiens
  misc_RNA (1)...(19): siRNA sense strand
agggauaccaugcaacaua

SEQ ID NO: 340458 - RNA, 19 nt, Homo sapiens
  misc_RNA (1)...(19): siRNA sense strand
gcuagaaaucuguugcuau

SEQ ID NO: 340459 - RNA, 19 nt, Homo sapiens
  misc_RNA (1)...(19): siRNA sense strand
ugaaugagcaugauuuuga

SEQ ID NO: 340460 - RNA, 19 nt, Homo sapiens
  misc_RNA (1)...(19): siRNA sense strand
ggcuagaaaucuguugcua

SEQ ID NO: 340461 - RNA, 19 nt, Homo sapiens
  misc_RNA (1)...(19): siRNA sense strand
ugaaacaagcgucucugaa

SEQ ID NO: 340462 - RNA, 19 nt, Homo sapiens
  misc_RNA (1)...(19): siRNA sense strand
aacauaaccugauaaagcu

SEQ ID NO: 340463 - RNA, 19 nt, Homo sapiens
  misc_RNA (1)...(19): siRNA sense strand
ugacccagucuauuaaaga

SEQ ID NO: 340464 - RNA, 19 nt, Homo sapiens
  misc_RNA (1)...(19): siRNA sense strand
gaacuagaagcuguguuag

SEQ ID NO: 340465 - RNA, 19 nt, Homo sapiens
  misc_RNA (1)...(19): siRNA sense strand
gugaaacaagcgucucuga

SEQ ID NO: 340466 - RNA, 19 nt, Homo sapiens
  misc_RNA (1)...(19): siRNA sense strand
ccaacaugcccacagauca

SEQ ID NO: 340467 - RNA, 19 nt, Homo sapiens
  misc_RNA (1)...(19): siRNA sense strand
uaugggcccuucaccaaca

SEQ ID NO: 340468 - RNA, 19 nt, Homo sapiens
  misc_RNA (1)...(19): siRNA sense strand
guccaaagcgagcaagaga

SEQ ID NO: 340469 - RNA, 19 nt, Homo sapiens
  misc_RNA (1)...(19): siRNA sense strand
cagaacaaagcacaucaga

SEQ ID NO: 340470 - RNA, 19 nt, Homo sapiens
  misc_RNA (1)...(19): siRNA sense strand
ccugcgaaauccagaacaa

SEQ ID NO: 340471 - RNA, 19 nt, Homo sapiens
  misc_RNA (1)...(19): siRNA sense strand
gaaaccaccaagguccaaa

SEQ ID NO: 340472 - RNA, 19 nt, Homo sapiens
  misc_RNA (1)...(19): siRNA sense strand
gauaaagcuccagcaggaa

SEQ ID NO: 340473 - RNA, 19 nt, Homo sapiens
  misc_RNA (1)...(19): siRNA sense strand
aaggagcuuucaucauuca

SEQ ID NO: 340474 - RNA, 19 nt, Homo sapiens
  misc_RNA (1)...(19): siRNA sense strand
ggugugagagugaaacaag

SEQ ID NO: 340475 - RNA, 19 nt, Homo sapiens
  misc_RNA (1)...(19): siRNA sense strand
gaaauggcugaacuagaag

SEQ ID NO: 340476 - RNA, 19 nt, Homo sapiens
  misc_RNA (1)...(19): siRNA sense strand
auaaagcuccagcaggaaa

SEQ ID NO: 340477 - RNA, 19 nt, Homo sapiens
  misc_RNA (1)...(19): siRNA sense strand
acccuuccaucauaaguga

SEQ ID NO: 340478 - RNA, 19 nt, Homo sapiens
  misc_RNA (1)...(19): siRNA sense strand
ggugacccagucuauuaaa

SEQ ID NO: 340479 - RNA, 19 nt, Homo sapiens
  misc_RNA (1)...(19): siRNA sense strand
cccagucuauuaaagaaag

SEQ ID NO: 340480 - RNA, 19 nt, Homo sapiens
  misc_RNA (1)...(19): siRNA sense strand
caucugggugugagaguga

SEQ ID NO: 340481 - RNA, 19 nt, Homo sapiens
  misc_RNA (1)...(19): siRNA sense strand
ccagucuauuaaagaaaga

SEQ ID NO: 340482 - RNA, 19 nt, Homo sapiens
  misc_RNA (1)...(19): siRNA sense strand
cgaaauccagaacaaagca

SEQ ID NO: 340483 - RNA, 19 nt, Homo sapiens
  misc_RNA (1)...(19): siRNA sense strand
aagagaaucccaggacaga

SEQ ID NO: 340484 - RNA, 19 nt, Homo sapiens
  misc_RNA (1)...(19): siRNA sense strand
gauguggucaauggaagaa

SEQ ID NO: 340485 - RNA, 19 nt, Homo sapiens
  misc_RNA (1)...(19): siRNA sense strand
ggaccugcgaaauccagaa

SEQ ID NO: 340486 - RNA, 19 nt, Homo sapiens
  misc_RNA (1)...(19): siRNA sense strand
gagcaugauuuugaaguca

SEQ ID NO: 340487 - RNA, 19 nt, Homo sapiens
  misc_RNA (1)...(19): siRNA sense strand
gugacccagucuauuaaag

SEQ ID NO: 340488 - RNA, 19 nt, Homo sapiens
  misc_RNA (1)...(19): siRNA sense strand
agaacaaagcacaucagaa

SEQ ID NO: 340489 - RNA, 19 nt, Homo sapiens
  misc_RNA (1)...(19): siRNA sense strand
uggaagaaaccaccaaggu

SEQ ID NO: 340490 - RNA, 19 nt, Homo sapiens
  misc_RNA (1)...(19): siRNA sense strand
ucaacuggaauggauggua

SEQ ID NO: 340491 - RNA, 19 nt, Homo sapiens
  misc_RNA (1)...(19): siRNA sense strand
ggaaauggcugaacuagaa

SEQ ID NO: 340492 - RNA, 19 nt, Homo sapiens
  misc_RNA (1)...(19): siRNA sense strand
gaacaaagcacaucagaaa

SEQ ID NO: 340493 - RNA, 19 nt, Homo sapiens
  misc_RNA (1)...(19): siRNA sense strand
cagcuacccuuccaucaua

SEQ ID NO: 340494 - RNA, 19 nt, Homo sapiens
  misc_RNA (1)...(19): siRNA sense strand
gggauaccaugcaacauaa

SEQ ID NO: 340495 - RNA, 19 nt, Homo sapiens
  misc_RNA (1)...(19): siRNA sense strand
gaggagauguggucaaugg

SEQ ID NO: 340496 - RNA, 19 nt, Homo sapiens
  misc_RNA (1)...(19): siRNA sense strand
gaaggagcuuucaucauuc

SEQ ID NO: 340497 - RNA, 19 nt, Homo sapiens
  misc_RNA (1)...(19): siRNA sense strand
cuagaaaucuguugcuaug

SEQ ID NO: 340498 - RNA, 19 nt, Homo sapiens
  misc_RNA (1)...(19): siRNA sense strand
gcucagggcuauccucuca

SEQ ID NO: 340499 - RNA, 19 nt, Homo sapiens
  misc_RNA (1)...(19): siRNA sense strand
aaacaagcgucucugaaga

SEQ ID NO: 340500 - RNA, 19 nt, Homo sapiens
  misc_RNA (1)...(19): siRNA sense strand
caacauaaccugauaaagc

SEQ ID NO: 340501 - RNA, 19 nt, Homo sapiens
  misc_RNA (1)...(19): siRNA sense strand
gaaacaagcgucucugaag

SEQ ID NO: 340502 - RNA, 19 nt, Homo sapiens
  misc_RNA (1)...(19): siRNA sense strand
gcagagggauaccaugcaa

SEQ ID NO: 340503 - RNA, 19 nt, Homo sapiens
  misc_RNA (1)...(19): siRNA sense strand
ugaacuagaagcuguguua

SEQ ID NO: 340504 - RNA, 19 nt, Homo sapiens
  misc_RNA (1)...(19): siRNA sense strand
gagaaucccaggacagaaa

SEQ ID NO: 340505 - RNA, 19 nt, Homo sapiens
  misc_RNA (1)...(19): siRNA sense strand
gcccacagaucaacuggaa

SEQ ID NO: 340506 - RNA, 19 nt, Homo sapiens
  misc_RNA (1)...(19): siRNA sense strand
gaagacugcucagggcuau

SEQ ID NO: 340507 - RNA, 19 nt, Homo sapiens
  misc_RNA (1)...(19): siRNA sense strand
gacccagucuauuaaagaa

SEQ ID NO: 340508 - RNA, 19 nt, Homo sapiens
  misc_RNA (1)...(19): siRNA sense strand
acuagaagcuguguuagaa

SEQ ID NO: 340509 - RNA, 19 nt, Homo sapiens
  misc_RNA (1)...(19): siRNA sense strand
caugcaacauaaccugaua

SEQ ID NO: 340510 - RNA, 19 nt, Homo sapiens
  misc_RNA (1)...(19): siRNA sense strand
gcuggacaccuaccugaua

SEQ ID NO: 340511 - RNA, 19 nt, Homo sapiens
  misc_RNA (1)...(19): siRNA sense strand
cagaucaacuggaauggau

SEQ ID NO: 340512 - RNA, 19 nt, Homo sapiens
  misc_RNA (1)...(19): siRNA sense strand
gcaggaaauggcugaacua

SEQ ID NO: 340513 - RNA, 19 nt, Homo sapiens
  misc_RNA (1)...(19): siRNA sense strand
ccacagaucaacuggaaug

SEQ ID NO: 340514 - RNA, 19 nt, Homo sapiens
  misc_RNA (1)...(19): siRNA sense strand
caacaugcccacagaucaa

SEQ ID NO: 340515 - RNA, 19 nt, Homo sapiens
  misc_RNA (1)...(19): siRNA sense strand
ucaccaacaugcccacaga

SEQ ID NO: 340516 - RNA, 19 nt, Homo sapiens
  misc_RNA (1)...(19): siRNA sense strand
cagaggagauguggucaau

SEQ ID NO: 340517 - RNA, 19 nt, Homo sapiens
  misc_RNA (1)...(19): siRNA sense strand
caauugggcagauguguga

SEQ ID NO: 340518 - RNA, 19 nt, Homo sapiens
  misc_RNA (1)...(19): siRNA sense strand
ggagauguggucaauggaa

SEQ ID NO: 340519 - RNA, 19 nt, Homo sapiens
  misc_RNA (1)...(19): siRNA sense strand
guacagcuguguggugcuu

SEQ ID NO: 340520 - RNA, 19 nt, Homo sapiens
  misc_RNA (1)...(19): siRNA sense strand
ccaaagcgagcaagagaau

SEQ ID NO: 340521 - RNA, 19 nt, Homo sapiens
  misc_RNA (1)...(19): siRNA sense strand
gcuaugggcccuucaccaa

SEQ ID NO: 340522 - RNA, 19 nt, Homo sapiens
  misc_RNA (1)...(19): siRNA sense strand
gaaugagcaugauuuugaa

SEQ ID NO: 340523 - RNA, 19 nt, Homo sapiens
  misc_RNA (1)...(19): siRNA sense strand
ucagggcuauccucucaga

SEQ ID NO: 340524 - RNA, 19 nt, Homo sapiens
  misc_RNA (1)...(19): siRNA sense strand
agggauaccaugcaacaua

SEQ ID NO: 340525 - RNA, 19 nt, Homo sapiens
  misc_RNA (1)...(19): siRNA sense strand
gcuagaaaucuguugcuau

SEQ ID NO: 340526 - RNA, 19 nt, Homo sapiens
  misc_RNA (1)...(19): siRNA sense strand
ugaaugagcaugauuuuga

SEQ ID NO: 340527 - RNA, 19 nt, Homo sapiens
  misc_RNA (1)...(19): siRNA sense strand
ggcuagaaaucuguugcua

SEQ ID NO: 340528 - RNA, 19 nt, Homo sapiens
  misc_RNA (1)...(19): siRNA sense strand
ugaaacaagcgucucugaa

SEQ ID NO: 340529 - RNA, 19 nt, Homo sapiens
  misc_RNA (1)...(19): siRNA sense strand
aacauaaccugauaaagcu

SEQ ID NO: 340530 - RNA, 19 nt, Homo sapiens
  misc_RNA (1)...(19): siRNA sense strand
ugacccagucuauuaaaga

SEQ ID NO: 340531 - RNA, 19 nt, Homo sapiens
  misc_RNA (1)...(19): siRNA sense strand
gaacuagaagcuguguuag

SEQ ID NO: 340532 - RNA, 19 nt, Homo sapiens
  misc_RNA (1)...(19): siRNA sense strand
gugaaacaagcgucucuga

SEQ ID NO: 340533 - RNA, 19 nt, Homo sapiens
  misc_RNA (1)...(19): siRNA sense strand
ccaacaugcccacagauca

SEQ ID NO: 340534 - RNA, 19 nt, Homo sapiens
  misc_RNA (1)...(19): siRNA sense strand
uaugggcccuucaccaaca

SEQ ID NO: 340535 - RNA, 19 nt, Homo sapiens
  misc_RNA (1)...(19): siRNA sense strand
guccaaagcgagcaagaga

SEQ ID NO: 340536 - RNA, 19 nt, Homo sapiens
  misc_RNA (1)...(19): siRNA sense strand
cagaacaaagcacaucaga

SEQ ID NO: 340537 - RNA, 19 nt, Homo sapiens
  misc_RNA (1)...(19): siRNA sense strand
ccugcgaaauccagaacaa

SEQ ID NO: 340538 - RNA, 19 nt, Homo sapiens
  misc_RNA (1)...(19): siRNA sense strand
gaaaccaccaagguccaaa

SEQ ID NO: 340539 - RNA, 19 nt, Homo sapiens
  misc_RNA (1)...(19): siRNA sense strand
gauaaagcuccagcaggaa

SEQ ID NO: 340540 - RNA, 19 nt, Homo sapiens
  misc_RNA (1)...(19): siRNA sense strand
aaggagcuuucaucauuca

SEQ ID NO: 340541 - RNA, 19 nt, Homo sapiens
  misc_RNA (1)...(19): siRNA sense strand
ggugugagagugaaacaag

SEQ ID NO: 340542 - RNA, 19 nt, Homo sapiens
  misc_RNA (1)...(19): siRNA sense strand
gaaauggcugaacuagaag

SEQ ID NO: 340543 - RNA, 19 nt, Homo sapiens
  misc_RNA (1)...(19): siRNA sense strand
auaaagcuccagcaggaaa

SEQ ID NO: 340544 - RNA, 19 nt, Homo sapiens
  misc_RNA (1)...(19): siRNA sense strand
acccuuccaucauaaguga

SEQ ID NO: 340545 - RNA, 19 nt, Homo sapiens
  misc_RNA (1)...(19): siRNA sense strand
ggugacccagucuauuaaa

SEQ ID NO: 340546 - RNA, 19 nt, Homo sapiens
  misc_RNA (1)...(19): siRNA sense strand
cccagucuauuaaagaaag

SEQ ID NO: 340547 - RNA, 19 nt, Homo sapiens
  misc_RNA (1)...(19): siRNA sense strand
caucugggugugagaguga

SEQ ID NO: 340548 - RNA, 19 nt, Homo sapiens
  misc_RNA (1)...(19): siRNA sense strand
ccagucuauuaaagaaaga

SEQ ID NO: 340549 - RNA, 19 nt, Homo sapiens
  misc_RNA (1)...(19): siRNA sense strand
cgaaauccagaacaaagca

SEQ ID NO: 340550 - RNA, 19 nt, Homo sapiens
  misc_RNA (1)...(19): siRNA sense strand
aagagaaucccaggacaga

SEQ ID NO: 340551 - RNA, 19 nt, Homo sapiens
  misc_RNA (1)...(19): siRNA sense strand
gauguggucaauggaagaa

SEQ ID NO: 340552 - RNA, 19 nt, Homo sapiens
  misc_RNA (1)...(19): siRNA sense strand
ggaccugcgaaauccagaa

SEQ ID NO: 340553 - RNA, 19 nt, Homo sapiens
  misc_RNA (1)...(19): siRNA sense strand
gagcaugauuuugaaguca

SEQ ID NO: 340554 - RNA, 19 nt, Homo sapiens
  misc_RNA (1)...(19): siRNA sense strand
gugacccagucuauuaaag

SEQ ID NO: 340555 - RNA, 19 nt, Homo sapiens
  misc_RNA (1)...(19): siRNA sense strand
agaacaaagcacaucagaa

SEQ ID NO: 340556 - RNA, 19 nt, Homo sapiens
  misc_RNA (1)...(19): siRNA sense strand
uggaagaaaccaccaaggu

SEQ ID NO: 340557 - RNA, 19 nt, Homo sapiens
  misc_RNA (1)...(19): siRNA sense strand
ucaacuggaauggauggua

SEQ ID NO: 340558 - RNA, 19 nt, Homo sapiens
  misc_RNA (1)...(19): siRNA sense strand
ggaaauggcugaacuagaa

SEQ ID NO: 340559 - RNA, 19 nt, Homo sapiens
  misc_RNA (1)...(19): siRNA sense strand
gaacaaagcacaucagaaa

SEQ ID NO: 340560 - RNA, 19 nt, Homo sapiens
  misc_RNA (1)...(19): siRNA sense strand
cagcuacccuuccaucaua

SEQ ID NO: 340561 - RNA, 19 nt, Homo sapiens
  misc_RNA (1)...(19): siRNA sense strand
gggauaccaugcaacauaa

SEQ ID NO: 340562 - RNA, 19 nt, Homo sapiens
  misc_RNA (1)...(19): siRNA sense strand
gaggagauguggucaaugg

SEQ ID NO: 340563 - RNA, 19 nt, Homo sapiens
  misc_RNA (1)...(19): siRNA sense strand
gaaggagcuuucaucauuc

SEQ ID NO: 340564 - RNA, 19 nt, Homo sapiens
  misc_RNA (1)...(19): siRNA sense strand
cuagaaaucuguugcuaug

SEQ ID NO: 340565 - RNA, 19 nt, Homo sapiens
  misc_RNA (1)...(19): siRNA sense strand
gcucagggcuauccucuca

SEQ ID NO: 340566 - RNA, 19 nt, Homo sapiens
  misc_RNA (1)...(19): siRNA sense strand
aaacaagcgucucugaaga

SEQ ID NO: 340567 - RNA, 19 nt, Homo sapiens
  misc_RNA (1)...(19): siRNA sense strand
caacauaaccugauaaagc

SEQ ID NO: 340568 - RNA, 19 nt, Homo sapiens
  misc_RNA (1)...(19): siRNA sense strand
gaaacaagcgucucugaag

SEQ ID NO: 340569 - RNA, 19 nt, Homo sapiens
  misc_RNA (1)...(19): siRNA sense strand
gcagagggauaccaugcaa

SEQ ID NO: 340570 - RNA, 19 nt, Homo sapiens
  misc_RNA (1)...(19): siRNA sense strand
ugaacuagaagcuguguua

SEQ ID NO: 340571 - RNA, 19 nt, Homo sapiens
  misc_RNA (1)...(19): siRNA sense strand
gagaaucccaggacagaaa

SEQ ID NO: 340572 - RNA, 19 nt, Homo sapiens
  misc_RNA (1)...(19): siRNA sense strand
gcccacagaucaacuggaa

SEQ ID NO: 340573 - RNA, 19 nt, Homo sapiens
  misc_RNA (1)...(19): siRNA sense strand
gaagacugcucagggcuau

SEQ ID NO: 340574 - RNA, 19 nt, Homo sapiens
  misc_RNA (1)...(19): siRNA sense strand
gacccagucuauuaaagaa

SEQ ID NO: 340575 - RNA, 19 nt, Homo sapiens
  misc_RNA (1)...(19): siRNA sense strand
acuagaagcuguguuagaa

SEQ ID NO: 340576 - RNA, 19 nt, Homo sapiens
  misc_RNA (1)...(19): siRNA sense strand
caugcaacauaaccugaua

SEQ ID NO: 340577 - RNA, 19 nt, Homo sapiens
  misc_RNA (1)...(19): siRNA sense strand
gcuggacaccuaccugaua

SEQ ID NO: 340578 - RNA, 19 nt, Homo sapiens
  misc_RNA (1)...(19): siRNA sense strand
cagaucaacuggaauggau

SEQ ID NO: 340579 - RNA, 19 nt, Homo sapiens
  misc_RNA (1)...(19): siRNA sense strand
gcaggaaauggcugaacua

SEQ ID NO: 340580 - RNA, 19 nt, Homo sapiens
  misc_RNA (1)...(19): siRNA sense strand
ccacagaucaacuggaaug

SEQ ID NO: 340581 - RNA, 19 nt, Homo sapiens
  misc_RNA (1)...(19): siRNA sense strand
caacaugcccacagaucaa

SEQ ID NO: 340582 - RNA, 19 nt, Homo sapiens
  misc_RNA (1)...(19): siRNA sense strand
ucaccaacaugcccacaga

SEQ ID NO: 340583 - RNA, 19 nt, Homo sapiens
  misc_RNA (1)...(19): siRNA sense strand
cagaggagauguggucaau

SEQ ID NO: 340584 - RNA, 19 nt, Homo sapiens
  misc_RNA (1)...(19): siRNA sense strand
caauugggcagauguguga

SEQ ID NO: 340585 - RNA, 19 nt, Homo sapiens
  misc_RNA (1)...(19): siRNA sense strand
ggagauguggucaauggaa

SEQ ID NO: 340586 - RNA, 19 nt, Homo sapiens
  misc_RNA (1)...(19): siRNA sense strand
guacagcuguguggugcuu

SEQ ID NO: 340587 - RNA, 19 nt, Homo sapiens
  misc_RNA (1)...(19): siRNA sense strand
ccaaagcgagcaagagaau

SEQ ID NO: 340588 - RNA, 19 nt, Homo sapiens
  misc_RNA (1)...(19): siRNA sense strand
gcuaugggcccuucaccaa

SEQ ID NO: 340589 - RNA, 19 nt, Homo sapiens
  misc_RNA (1)...(19): siRNA sense strand
gaaugagcaugauuuugaa

SEQ ID NO: 340590 - RNA, 19 nt, Homo sapiens
  misc_RNA (1)...(19): siRNA sense strand
ucagggcuauccucucaga

SEQ ID NO: 340591 - RNA, 19 nt, Homo sapiens
  misc_RNA (1)...(19): siRNA sense strand
agggauaccaugcaacaua

SEQ ID NO: 340592 - RNA, 19 nt, Homo sapiens
  misc_RNA (1)...(19): siRNA sense strand
gcuagaaaucuguugcuau

SEQ ID NO: 340593 - RNA, 19 nt, Homo sapiens
  misc_RNA (1)...(19): siRNA sense strand
ugaaugagcaugauuuuga

SEQ ID NO: 340594 - RNA, 19 nt, Homo sapiens
  misc_RNA (1)...(19): siRNA sense strand
ggcuagaaaucuguugcua

SEQ ID NO: 340595 - RNA, 19 nt, Homo sapiens
  misc_RNA (1)...(19): siRNA sense strand
ugaaacaagcgucucugaa

SEQ ID NO: 340596 - RNA, 19 nt, Homo sapiens
  misc_RNA (1)...(19): siRNA sense strand
aacauaaccugauaaagcu

SEQ ID NO: 340597 - RNA, 19 nt, Homo sapiens
  misc_RNA (1)...(19): siRNA sense strand
ugacccagucuauuaaaga

SEQ ID NO: 340598 - RNA, 19 nt, Homo sapiens
  misc_RNA (1)...(19): siRNA sense strand
gaacuagaagcuguguuag

SEQ ID NO: 340599 - RNA, 19 nt, Homo sapiens
  misc_RNA (1)...(19): siRNA sense strand
gugaaacaagcgucucuga

SEQ ID NO: 340600 - RNA, 19 nt, Homo sapiens
  misc_RNA (1)...(19): siRNA sense strand
ccaacaugcccacagauca

SEQ ID NO: 340601 - RNA, 19 nt, Homo sapiens
  misc_RNA (1)...(19): siRNA sense strand
uaugggcccuucaccaaca

SEQ ID NO: 340602 - RNA, 19 nt, Homo sapiens
  misc_RNA (1)...(19): siRNA sense strand
guccaaagcgagcaagaga

SEQ ID NO: 340603 - RNA, 19 nt, Homo sapiens
  misc_RNA (1)...(19): siRNA sense strand
cagaacaaagcacaucaga

SEQ ID NO: 340604 - RNA, 19 nt, Homo sapiens
  misc_RNA (1)...(19): siRNA sense strand
ccugcgaaauccagaacaa

SEQ ID NO: 340605 - RNA, 19 nt, Homo sapiens
  misc_RNA (1)...(19): siRNA sense strand
gaaaccaccaagguccaaa

SEQ ID NO: 340606 - RNA, 19 nt, Homo sapiens
  misc_RNA (1)...(19): siRNA sense strand
gauaaagcuccagcaggaa

SEQ ID NO: 340607 - RNA, 19 nt, Homo sapiens
  misc_RNA (1)...(19): siRNA sense strand
aaggagcuuucaucauuca

SEQ ID NO: 340608 - RNA, 19 nt, Homo sapiens
  misc_RNA (1)...(19): siRNA sense strand
ggugugagagugaaacaag

SEQ ID NO: 340609 - RNA, 19 nt, Homo sapiens
  misc_RNA (1)...(19): siRNA sense strand
gaaauggcugaacuagaag

SEQ ID NO: 340610 - RNA, 19 nt, Homo sapiens
  misc_RNA (1)...(19): siRNA sense strand
auaaagcuccagcaggaaa

SEQ ID NO: 340611 - RNA, 19 nt, Homo sapiens
  misc_RNA (1)...(19): siRNA sense strand
acccuuccaucauaaguga

SEQ ID NO: 340612 - RNA, 19 nt, Homo sapiens
  misc_RNA (1)...(19): siRNA sense strand
ggugacccagucuauuaaa

SEQ ID NO: 340613 - RNA, 19 nt, Homo sapiens
  misc_RNA (1)...(19): siRNA sense strand
cccagucuauuaaagaaag

SEQ ID NO: 340614 - RNA, 19 nt, Homo sapiens
  misc_RNA (1)...(19): siRNA sense strand
caucugggugugagaguga

SEQ ID NO: 340615 - RNA, 19 nt, Homo sapiens
  misc_RNA (1)...(19): siRNA sense strand
ccagucuauuaaagaaaga

SEQ ID NO: 340616 - RNA, 19 nt, Homo sapiens
  misc_RNA (1)...(19): siRNA sense strand
cgaaauccagaacaaagca

SEQ ID NO: 340617 - RNA, 19 nt, Homo sapiens
  misc_RNA (1)...(19): siRNA sense strand
aagagaaucccaggacaga

SEQ ID NO: 340618 - RNA, 19 nt, Homo sapiens
  misc_RNA (1)...(19): siRNA sense strand
gauguggucaauggaagaa

SEQ ID NO: 340619 - RNA, 19 nt, Homo sapiens
  misc_RNA (1)...(19): siRNA sense strand
ggaccugcgaaauccagaa

SEQ ID NO: 340620 - RNA, 19 nt, Homo sapiens
  misc_RNA (1)...(19): siRNA sense strand
gagcaugauuuugaaguca

SEQ ID NO: 340621 - RNA, 19 nt, Homo sapiens
  misc_RNA (1)...(19): siRNA sense strand
gugacccagucuauuaaag

SEQ ID NO: 340622 - RNA, 19 nt, Homo sapiens
  misc_RNA (1)...(19): siRNA sense strand
agaacaaagcacaucagaa

SEQ ID NO: 340623 - RNA, 19 nt, Homo sapiens
  misc_RNA (1)...(19): siRNA sense strand
uggaagaaaccaccaaggu

SEQ ID NO: 340624 - RNA, 19 nt, Homo sapiens
  misc_RNA (1)...(19): siRNA sense strand
ucaacuggaauggauggua

SEQ ID NO: 340625 - RNA, 19 nt, Homo sapiens
  misc_RNA (1)...(19): siRNA sense strand
ggaaauggcugaacuagaa

SEQ ID NO: 340626 - RNA, 19 nt, Homo sapiens
  misc_RNA (1)...(19): siRNA sense strand
gaacaaagcacaucagaaa

SEQ ID NO: 340627 - RNA, 19 nt, Homo sapiens
  misc_RNA (1)...(19): siRNA sense strand
cagcuacccuuccaucaua

SEQ ID NO: 340628 - RNA, 19 nt, Homo sapiens
  misc_RNA (1)...(19): siRNA sense strand
gggauaccaugcaacauaa

SEQ ID NO: 340629 - RNA, 19 nt, Homo sapiens
  misc_RNA (1)...(19): siRNA sense strand
gcucagggcuauccucuca

SEQ ID NO: 340630 - RNA, 19 nt, Homo sapiens
  misc_RNA (1)...(19): siRNA sense strand
aaacaagcgucucugaaga

SEQ ID NO: 340631 - RNA, 19 nt, Homo sapiens
  misc_RNA (1)...(19): siRNA sense strand
caacauaaccugauaaagc

SEQ ID NO: 340632 - RNA, 19 nt, Homo sapiens
  misc_RNA (1)...(19): siRNA sense strand
gaaacaagcgucucugaag

SEQ ID NO: 340633 - RNA, 19 nt, Homo sapiens
  misc_RNA (1)...(19): siRNA sense strand
gcagagggauaccaugcaa

SEQ ID NO: 340634 - RNA, 19 nt, Homo sapiens
  misc_RNA (1)...(19): siRNA sense strand
ugaacuagaagcuguguua

SEQ ID NO: 340635 - RNA, 19 nt, Homo sapiens
  misc_RNA (1)...(19): siRNA sense strand
gaagacugcucagggcuau

SEQ ID NO: 340636 - RNA, 19 nt, Homo sapiens
  misc_RNA (1)...(19): siRNA sense strand
acuagaagcuguguuagaa

SEQ ID NO: 340637 - RNA, 19 nt, Homo sapiens
  misc_RNA (1)...(19): siRNA sense strand
caugcaacauaaccugaua

SEQ ID NO: 340638 - RNA, 19 nt, Homo sapiens
  misc_RNA (1)...(19): siRNA sense strand
gcaggaaauggcugaacua

SEQ ID NO: 340639 - RNA, 19 nt, Homo sapiens
  misc_RNA (1)...(19): siRNA sense strand
ucagggcuauccucucaga

SEQ ID NO: 340640 - RNA, 19 nt, Homo sapiens
  misc_RNA (1)...(19): siRNA sense strand
agggauaccaugcaacaua

SEQ ID NO: 340641 - RNA, 19 nt, Homo sapiens
  misc_RNA (1)...(19): siRNA sense strand
ugaaacaagcgucucugaa

SEQ ID NO: 340642 - RNA, 19 nt, Homo sapiens
  misc_RNA (1)...(19): siRNA sense strand
aacauaaccugauaaagcu

SEQ ID NO: 340643 - RNA, 19 nt, Homo sapiens
  misc_RNA (1)...(19): siRNA sense strand
gaacuagaagcuguguuag

SEQ ID NO: 340644 - RNA, 19 nt, Homo sapiens
  misc_RNA (1)...(19): siRNA sense strand
cagaacaaagcacaucaga

SEQ ID NO: 340645 - RNA, 19 nt, Homo sapiens
  misc_RNA (1)...(19): siRNA sense strand
gugaaacaagcgucucuga

SEQ ID NO: 340646 - RNA, 19 nt, Homo sapiens
  misc_RNA (1)...(19): siRNA sense strand
ccugcgaaauccagaacaa

SEQ ID NO: 340647 - RNA, 19 nt, Homo sapiens
  misc_RNA (1)...(19): siRNA sense strand
gauaaagcuccagcaggaa

SEQ ID NO: 340648 - RNA, 19 nt, Homo sapiens
  misc_RNA (1)...(19): siRNA sense strand
ggugugagagugaaacaag

SEQ ID NO: 340649 - RNA, 19 nt, Homo sapiens
  misc_RNA (1)...(19): siRNA sense strand
auaaagcuccagcaggaaa

SEQ ID NO: 340650 - RNA, 19 nt, Homo sapiens
  misc_RNA (1)...(19): siRNA sense strand
acccuuccaucauaaguga

SEQ ID NO: 340651 - RNA, 19 nt, Homo sapiens
  misc_RNA (1)...(19): siRNA sense strand
gaaauggcugaacuagaag

SEQ ID NO: 340652 - RNA, 19 nt, Homo sapiens
  misc_RNA (1)...(19): siRNA sense strand
caucugggugugagaguga

SEQ ID NO: 340653 - RNA, 19 nt, Homo sapiens
  misc_RNA (1)...(19): siRNA sense strand
cgaaauccagaacaaagca

SEQ ID NO: 340654 - RNA, 19 nt, Homo sapiens
  misc_RNA (1)...(19): siRNA sense strand
ggaccugcgaaauccagaa

SEQ ID NO: 340655 - RNA, 19 nt, Homo sapiens
  misc_RNA (1)...(19): siRNA sense strand
agaacaaagcacaucagaa

SEQ ID NO: 340656 - RNA, 19 nt, Homo sapiens
  misc_RNA (1)...(19): siRNA sense strand
ggaaauggcugaacuagaa

SEQ ID NO: 340657 - RNA, 19 nt, Homo sapiens
  misc_RNA (1)...(19): siRNA sense strand
gaacaaagcacaucagaaa

SEQ ID NO: 340658 - RNA, 19 nt, Homo sapiens
  misc_RNA (1)...(19): siRNA sense strand
cagcuacccuuccaucaua

SEQ ID NO: 340659 - RNA, 19 nt, Homo sapiens
  misc_RNA (1)...(19): siRNA sense strand
gggauaccaugcaacauaa

SEQ ID NO: 340660 - RNA, 19 nt, Homo sapiens
  misc_RNA (1)...(19): siRNA sense strand
gaggagauguggucaaugg

SEQ ID NO: 340661 - RNA, 19 nt, Homo sapiens
  misc_RNA (1)...(19): siRNA sense strand
gaaggagcuuucaucauuc

SEQ ID NO: 340662 - RNA, 19 nt, Homo sapiens
  misc_RNA (1)...(19): siRNA sense strand
cuagaaaucuguugcuaug

SEQ ID NO: 340663 - RNA, 19 nt, Homo sapiens
  misc_RNA (1)...(19): siRNA sense strand
gcucagggcuauccucuca

SEQ ID NO: 340664 - RNA, 19 nt, Homo sapiens
  misc_RNA (1)...(19): siRNA sense strand
aaacaagcgucucugaaga

SEQ ID NO: 340665 - RNA, 19 nt, Homo sapiens
  misc_RNA (1)...(19): siRNA sense strand
caacauaaccugauaaagc

SEQ ID NO: 340666 - RNA, 19 nt, Homo sapiens
  misc_RNA (1)...(19): siRNA sense strand
gaaacaagcgucucugaag

SEQ ID NO: 340667 - RNA, 19 nt, Homo sapiens
  misc_RNA (1)...(19): siRNA sense strand
gcagagggauaccaugcaa

SEQ ID NO: 340668 - RNA, 19 nt, Homo sapiens
  misc_RNA (1)...(19): siRNA sense strand
ugaacuagaagcuguguua

SEQ ID NO: 340669 - RNA, 19 nt, Homo sapiens
  misc_RNA (1)...(19): siRNA sense strand
gagaaucccaggacagaaa

SEQ ID NO: 340670 - RNA, 19 nt, Homo sapiens
  misc_RNA (1)...(19): siRNA sense strand
gcccacagaucaacuggaa

SEQ ID NO: 340671 - RNA, 19 nt, Homo sapiens
  misc_RNA (1)...(19): siRNA sense strand
gaagacugcucagggcuau

SEQ ID NO: 340672 - RNA, 19 nt, Homo sapiens
  misc_RNA (1)...(19): siRNA sense strand
gacccagucuauuaaagaa

SEQ ID NO: 340673 - RNA, 19 nt, Homo sapiens
  misc_RNA (1)...(19): siRNA sense strand
acuagaagcuguguuagaa

SEQ ID NO: 340674 - RNA, 19 nt, Homo sapiens
  misc_RNA (1)...(19): siRNA sense strand
caugcaacauaaccugaua

SEQ ID NO: 340675 - RNA, 19 nt, Homo sapiens
  misc_RNA (1)...(19): siRNA sense strand
gcuggacaccuaccugaua

SEQ ID NO: 340676 - RNA, 19 nt, Homo sapiens
  misc_RNA (1)...(19): siRNA sense strand
cagaucaacuggaauggau

SEQ ID NO: 340677 - RNA, 19 nt, Homo sapiens
  misc_RNA (1)...(19): siRNA sense strand
gcaggaaauggcugaacua

SEQ ID NO: 340678 - RNA, 19 nt, Homo sapiens
  misc_RNA (1)...(19): siRNA sense strand
ccacagaucaacuggaaug

SEQ ID NO: 340679 - RNA, 19 nt, Homo sapiens
  misc_RNA (1)...(19): siRNA sense strand
caacaugcccacagaucaa

SEQ ID NO: 340680 - RNA, 19 nt, Homo sapiens
  misc_RNA (1)...(19): siRNA sense strand
ucaccaacaugcccacaga

SEQ ID NO: 340681 - RNA, 19 nt, Homo sapiens
  misc_RNA (1)...(19): siRNA sense strand
cagaggagauguggucaau

SEQ ID NO: 340682 - RNA, 19 nt, Homo sapiens
  misc_RNA (1)...(19): siRNA sense strand
caauugggcagauguguga

SEQ ID NO: 340683 - RNA, 19 nt, Homo sapiens
  misc_RNA (1)...(19): siRNA sense strand
ggagauguggucaauggaa

SEQ ID NO: 340684 - RNA, 19 nt, Homo sapiens
  misc_RNA (1)...(19): siRNA sense strand
guacagcuguguggugcuu

SEQ ID NO: 340685 - RNA, 19 nt, Homo sapiens
  misc_RNA (1)...(19): siRNA sense strand
ccaaagcgagcaagagaau

SEQ ID NO: 340686 - RNA, 19 nt, Homo sapiens
  misc_RNA (1)...(19): siRNA sense strand
gcuaugggcccuucaccaa

SEQ ID NO: 340687 - RNA, 19 nt, Homo sapiens
  misc_RNA (1)...(19): siRNA sense strand
gaaugagcaugauuuugaa

SEQ ID NO: 340688 - RNA, 19 nt, Homo sapiens
  misc_RNA (1)...(19): siRNA sense strand
ucagggcuauccucucaga

SEQ ID NO: 340689 - RNA, 19 nt, Homo sapiens
  misc_RNA (1)...(19): siRNA sense strand
agggauaccaugcaacaua

SEQ ID NO: 340690 - RNA, 19 nt, Homo sapiens
  misc_RNA (1)...(19): siRNA sense strand
gcuagaaaucuguugcuau

SEQ ID NO: 340691 - RNA, 19 nt, Homo sapiens
  misc_RNA (1)...(19): siRNA sense strand
ugaaugagcaugauuuuga

SEQ ID NO: 340692 - RNA, 19 nt, Homo sapiens
  misc_RNA (1)...(19): siRNA sense strand
ggcuagaaaucuguugcua

SEQ ID NO: 340693 - RNA, 19 nt, Homo sapiens
  misc_RNA (1)...(19): siRNA sense strand
ugaaacaagcgucucugaa

SEQ ID NO: 340694 - RNA, 19 nt, Homo sapiens
  misc_RNA (1)...(19): siRNA sense strand
aacauaaccugauaaagcu

SEQ ID NO: 340695 - RNA, 19 nt, Homo sapiens
  misc_RNA (1)...(19): siRNA sense strand
ugacccagucuauuaaaga

SEQ ID NO: 340696 - RNA, 19 nt, Homo sapiens
  misc_RNA (1)...(19): siRNA sense strand
gaacuagaagcuguguuag

SEQ ID NO: 340697 - RNA, 19 nt, Homo sapiens
  misc_RNA (1)...(19): siRNA sense strand
gugaaacaagcgucucuga

SEQ ID NO: 340698 - RNA, 19 nt, Homo sapiens
  misc_RNA (1)...(19): siRNA sense strand
ccaacaugcccacagauca

SEQ ID NO: 340699 - RNA, 19 nt, Homo sapiens
  misc_RNA (1)...(19): siRNA sense strand
uaugggcccuucaccaaca

SEQ ID NO: 340700 - RNA, 19 nt, Homo sapiens
  misc_RNA (1)...(19): siRNA sense strand
guccaaagcgagcaagaga

SEQ ID NO: 340701 - RNA, 19 nt, Homo sapiens
  misc_RNA (1)...(19): siRNA sense strand
cagaacaaagcacaucaga

SEQ ID NO: 340702 - RNA, 19 nt, Homo sapiens
  misc_RNA (1)...(19): siRNA sense strand
ccugcgaaauccagaacaa

SEQ ID NO: 340703 - RNA, 19 nt, Homo sapiens
  misc_RNA (1)...(19): siRNA sense strand
gaaaccaccaagguccaaa

SEQ ID NO: 340704 - RNA, 19 nt, Homo sapiens
  misc_RNA (1)...(19): siRNA sense strand
gauaaagcuccagcaggaa

SEQ ID NO: 340705 - RNA, 19 nt, Homo sapiens
  misc_RNA (1)...(19): siRNA sense strand
aaggagcuuucaucauuca

SEQ ID NO: 340706 - RNA, 19 nt, Homo sapiens
  misc_RNA (1)...(19): siRNA sense strand
ggugugagagugaaacaag

SEQ ID NO: 340707 - RNA, 19 nt, Homo sapiens
  misc_RNA (1)...(19): siRNA sense strand
gaaauggcugaacuagaag

SEQ ID NO: 340708 - RNA, 19 nt, Homo sapiens
  misc_RNA (1)...(19): siRNA sense strand
auaaagcuccagcaggaaa

SEQ ID NO: 340709 - RNA, 19 nt, Homo sapiens
  misc_RNA (1)...(19): siRNA sense strand
acccuuccaucauaaguga

SEQ ID NO: 340710 - RNA, 19 nt, Homo sapiens
  misc_RNA (1)...(19): siRNA sense strand
ggugacccagucuauuaaa

SEQ ID NO: 340711 - RNA, 19 nt, Homo sapiens
  misc_RNA (1)...(19): siRNA sense strand
cccagucuauuaaagaaag

SEQ ID NO: 340712 - RNA, 19 nt, Homo sapiens
  misc_RNA (1)...(19): siRNA sense strand
caucugggugugagaguga

SEQ ID NO: 340713 - RNA, 19 nt, Homo sapiens
  misc_RNA (1)...(19): siRNA sense strand
ccagucuauuaaagaaaga

SEQ ID NO: 340714 - RNA, 19 nt, Homo sapiens
  misc_RNA (1)...(19): siRNA sense strand
cgaaauccagaacaaagca

SEQ ID NO: 340715 - RNA, 19 nt, Homo sapiens
  misc_RNA (1)...(19): siRNA sense strand
aagagaaucccaggacaga

SEQ ID NO: 340716 - RNA, 19 nt, Homo sapiens
  misc_RNA (1)...(19): siRNA sense strand
gauguggucaauggaagaa

SEQ ID NO: 340717 - RNA, 19 nt, Homo sapiens
  misc_RNA (1)...(19): siRNA sense strand
ggaccugcgaaauccagaa

SEQ ID NO: 340718 - RNA, 19 nt, Homo sapiens
  misc_RNA (1)...(19): siRNA sense strand
gagcaugauuuugaaguca

SEQ ID NO: 340719 - RNA, 19 nt, Homo sapiens
  misc_RNA (1)...(19): siRNA sense strand
gugacccagucuauuaaag

SEQ ID NO: 340720 - RNA, 19 nt, Homo sapiens
  misc_RNA (1)...(19): siRNA sense strand
agaacaaagcacaucagaa

SEQ ID NO: 340721 - RNA, 19 nt, Homo sapiens
  misc_RNA (1)...(19): siRNA sense strand
uggaagaaaccaccaaggu

SEQ ID NO: 340722 - RNA, 19 nt, Homo sapiens
  misc_RNA (1)...(19): siRNA sense strand
ucaacuggaauggauggua

SEQ ID NO: 340723 - RNA, 19 nt, Homo sapiens
  misc_RNA (1)...(19): siRNA sense strand
ggaaauggcugaacuagaa

SEQ ID NO: 340724 - RNA, 19 nt, Homo sapiens
  misc_RNA (1)...(19): siRNA sense strand
gaacaaagcacaucagaaa

SEQ ID NO: 340725 - RNA, 19 nt, Homo sapiens
  misc_RNA (1)...(19): siRNA sense strand
cagcuacccuuccaucaua

SEQ ID NO: 340726 - RNA, 19 nt, Homo sapiens
  misc_RNA (1)...(19): siRNA sense strand
gggauaccaugcaacauaa

SEQ ID NO: 340727 - RNA, 19 nt, Homo sapiens
  misc_RNA (1)...(19): siRNA sense strand
gaggagauguggucaaugg

SEQ ID NO: 340728 - RNA, 19 nt, Homo sapiens
  misc_RNA (1)...(19): siRNA sense strand
gaaggagcuuucaucauuc

SEQ ID NO: 340729 - RNA, 19 nt, Homo sapiens
  misc_RNA (1)...(19): siRNA sense strand
cuagaaaucuguugcuaug

SEQ ID NO: 340730 - RNA, 19 nt, Homo sapiens
  misc_RNA (1)...(19): siRNA sense strand
gcucagggcuauccucuca

SEQ ID NO: 340731 - RNA, 19 nt, Homo sapiens
  misc_RNA (1)...(19): siRNA sense strand
aaacaagcgucucugaaga

SEQ ID NO: 340732 - RNA, 19 nt, Homo sapiens
  misc_RNA (1)...(19): siRNA sense strand
caacauaaccugauaaagc

SEQ ID NO: 340733 - RNA, 19 nt, Homo sapiens
  misc_RNA (1)...(19): siRNA sense strand
gaaacaagcgucucugaag

SEQ ID NO: 340734 - RNA, 19 nt, Homo sapiens
  misc_RNA (1)...(19): siRNA sense strand
gcagagggauaccaugcaa

SEQ ID NO: 340735 - RNA, 19 nt, Homo sapiens
  misc_RNA (1)...(19): siRNA sense strand
ugaacuagaagcuguguua

SEQ ID NO: 340736 - RNA, 19 nt, Homo sapiens
  misc_RNA (1)...(19): siRNA sense strand
gagaaucccaggacagaaa

SEQ ID NO: 340737 - RNA, 19 nt, Homo sapiens
  misc_RNA (1)...(19): siRNA sense strand
gcccacagaucaacuggaa

SEQ ID NO: 340738 - RNA, 19 nt, Homo sapiens
  misc_RNA (1)...(19): siRNA sense strand
gaagacugcucagggcuau

SEQ ID NO: 340739 - RNA, 19 nt, Homo sapiens
  misc_RNA (1)...(19): siRNA sense strand
gacccagucuauuaaagaa

SEQ ID NO: 340740 - RNA, 19 nt, Homo sapiens
  misc_RNA (1)...(19): siRNA sense strand
acuagaagcuguguuagaa

SEQ ID NO: 340741 - RNA, 19 nt, Homo sapiens
  misc_RNA (1)...(19): siRNA sense strand
caugcaacauaaccugaua

SEQ ID NO: 340742 - RNA, 19 nt, Homo sapiens
  misc_RNA (1)...(19): siRNA sense strand
gcuggacaccuaccugaua

SEQ ID NO: 340743 - RNA, 19 nt, Homo sapiens
  misc_RNA (1)...(19): siRNA sense strand
cagaucaacuggaauggau

SEQ ID NO: 340744 - RNA, 19 nt, Homo sapiens
  misc_RNA (1)...(19): siRNA sense strand
gcaggaaauggcugaacua

SEQ ID NO: 340745 - RNA, 19 nt, Homo sapiens
  misc_RNA (1)...(19): siRNA sense strand
ccacagaucaacuggaaug

SEQ ID NO: 340746 - RNA, 19 nt, Homo sapiens
  misc_RNA (1)...(19): siRNA sense strand
caacaugcccacagaucaa

SEQ ID NO: 340747 - RNA, 19 nt, Homo sapiens
  misc_RNA (1)...(19): siRNA sense strand
ucaccaacaugcccacaga

SEQ ID NO: 340748 - RNA, 19 nt, Homo sapiens
  misc_RNA (1)...(19): siRNA sense strand
cagaggagauguggucaau

SEQ ID NO: 340749 - RNA, 19 nt, Homo sapiens
  misc_RNA (1)...(19): siRNA sense strand
caauugggcagauguguga

SEQ ID NO: 340750 - RNA, 19 nt, Homo sapiens
  misc_RNA (1)...(19): siRNA sense strand
ggagauguggucaauggaa

SEQ ID NO: 340751 - RNA, 19 nt, Homo sapiens
  misc_RNA (1)...(19): siRNA sense strand
guacagcuguguggugcuu

SEQ ID NO: 340752 - RNA, 19 nt, Homo sapiens
  misc_RNA (1)...(19): siRNA sense strand
ccaaagcgagcaagagaau

SEQ ID NO: 340753 - RNA, 19 nt, Homo sapiens
  misc_RNA (1)...(19): siRNA sense strand
gcuaugggcccuucaccaa

SEQ ID NO: 340754 - RNA, 19 nt, Homo sapiens
  misc_RNA (1)...(19): siRNA sense strand
gaaugagcaugauuuugaa

SEQ ID NO: 340755 - RNA, 19 nt, Homo sapiens
  misc_RNA (1)...(19): siRNA sense strand
ucagggcuauccucucaga

SEQ ID NO: 340756 - RNA, 19 nt, Homo sapiens
  misc_RNA (1)...(19): siRNA sense strand
agggauaccaugcaacaua

SEQ ID NO: 340757 - RNA, 19 nt, Homo sapiens
  misc_RNA (1)...(19): siRNA sense strand
gcuagaaaucuguugcuau

SEQ ID NO: 340758 - RNA, 19 nt, Homo sapiens
  misc_RNA (1)...(19): siRNA sense strand
ugaaugagcaugauuuuga

SEQ ID NO: 340759 - RNA, 19 nt, Homo sapiens
  misc_RNA (1)...(19): siRNA sense strand
ggcuagaaaucuguugcua

SEQ ID NO: 340760 - RNA, 19 nt, Homo sapiens
  misc_RNA (1)...(19): siRNA sense strand
ugaaacaagcgucucugaa

SEQ ID NO: 340761 - RNA, 19 nt, Homo sapiens
  misc_RNA (1)...(19): siRNA sense strand
aacauaaccugauaaagcu

SEQ ID NO: 340762 - RNA, 19 nt, Homo sapiens
  misc_RNA (1)...(19): siRNA sense strand
ugacccagucuauuaaaga

SEQ ID NO: 340763 - RNA, 19 nt, Homo sapiens
  misc_RNA (1)...(19): siRNA sense strand
gaacuagaagcuguguuag

SEQ ID NO: 340764 - RNA, 19 nt, Homo sapiens
  misc_RNA (1)...(19): siRNA sense strand
gugaaacaagcgucucuga

SEQ ID NO: 340765 - RNA, 19 nt, Homo sapiens
  misc_RNA (1)...(19): siRNA sense strand
ccaacaugcccacagauca

SEQ ID NO: 340766 - RNA, 19 nt, Homo sapiens
  misc_RNA (1)...(19): siRNA sense strand
uaugggcccuucaccaaca

SEQ ID NO: 340767 - RNA, 19 nt, Homo sapiens
  misc_RNA (1)...(19): siRNA sense strand
guccaaagcgagcaagaga

SEQ ID NO: 340768 - RNA, 19 nt, Homo sapiens
  misc_RNA (1)...(19): siRNA sense strand
cagaacaaagcacaucaga

SEQ ID NO: 340769 - RNA, 19 nt, Homo sapiens
  misc_RNA (1)...(19): siRNA sense strand
ccugcgaaauccagaacaa

SEQ ID NO: 340770 - RNA, 19 nt, Homo sapiens
  misc_RNA (1)...(19): siRNA sense strand
gaaaccaccaagguccaaa

SEQ ID NO: 340771 - RNA, 19 nt, Homo sapiens
  misc_RNA (1)...(19): siRNA sense strand
gauaaagcuccagcaggaa

SEQ ID NO: 340772 - RNA, 19 nt, Homo sapiens
  misc_RNA (1)...(19): siRNA sense strand
aaggagcuuucaucauuca

SEQ ID NO: 340773 - RNA, 19 nt, Homo sapiens
  misc_RNA (1)...(19): siRNA sense strand
ggugugagagugaaacaag

SEQ ID NO: 340774 - RNA, 19 nt, Homo sapiens
  misc_RNA (1)...(19): siRNA sense strand
gaaauggcugaacuagaag

SEQ ID NO: 340775 - RNA, 19 nt, Homo sapiens
  misc_RNA (1)...(19): siRNA sense strand
auaaagcuccagcaggaaa

SEQ ID NO: 340776 - RNA, 19 nt, Homo sapiens
  misc_RNA (1)...(19): siRNA sense strand
acccuuccaucauaaguga

SEQ ID NO: 340777 - RNA, 19 nt, Homo sapiens
  misc_RNA (1)...(19): siRNA sense strand
ggugacccagucuauuaaa

SEQ ID NO: 340778 - RNA, 19 nt, Homo sapiens
  misc_RNA (1)...(19): siRNA sense strand
cccagucuauuaaagaaag

SEQ ID NO: 340779 - RNA, 19 nt, Homo sapiens
  misc_RNA (1)...(19): siRNA sense strand
caucugggugugagaguga

SEQ ID NO: 340780 - RNA, 19 nt, Homo sapiens
  misc_RNA (1)...(19): siRNA sense strand
ccagucuauuaaagaaaga

SEQ ID NO: 340781 - RNA, 19 nt, Homo sapiens
  misc_RNA (1)...(19): siRNA sense strand
cgaaauccagaacaaagca

SEQ ID NO: 340782 - RNA, 19 nt, Homo sapiens
  misc_RNA (1)...(19): siRNA sense strand
aagagaaucccaggacaga

SEQ ID NO: 340783 - RNA, 19 nt, Homo sapiens
  misc_RNA (1)...(19): siRNA sense strand
gauguggucaauggaagaa

SEQ ID NO: 340784 - RNA, 19 nt, Homo sapiens
  misc_RNA (1)...(19): siRNA sense strand
ggaccugcgaaauccagaa

SEQ ID NO: 340785 - RNA, 19 nt, Homo sapiens
  misc_RNA (1)...(19): siRNA sense strand
gagcaugauuuugaaguca

SEQ ID NO: 340786 - RNA, 19 nt, Homo sapiens
  misc_RNA (1)...(19): siRNA sense strand
gugacccagucuauuaaag

SEQ ID NO: 340787 - RNA, 19 nt, Homo sapiens
  misc_RNA (1)...(19): siRNA sense strand
agaacaaagcacaucagaa

SEQ ID NO: 340788 - RNA, 19 nt, Homo sapiens
  misc_RNA (1)...(19): siRNA sense strand
uggaagaaaccaccaaggu

SEQ ID NO: 340789 - RNA, 19 nt, Homo sapiens
  misc_RNA (1)...(19): siRNA sense strand
ucaacuggaauggauggua

SEQ ID NO: 340790 - RNA, 19 nt, Homo sapiens
  misc_RNA (1)...(19): siRNA sense strand
ggaaauggcugaacuagaa

SEQ ID NO: 340791 - RNA, 19 nt, Homo sapiens
  misc_RNA (1)...(19): siRNA sense strand
gaacaaagcacaucagaaa

SEQ ID NO: 340792 - RNA, 19 nt, Homo sapiens
  misc_RNA (1)...(19): siRNA sense strand
cagcuacccuuccaucaua

SEQ ID NO: 340793 - RNA, 19 nt, Homo sapiens
  misc_RNA (1)...(19): siRNA sense strand
gggauaccaugcaacauaa

SEQ ID NO: 340794 - RNA, 19 nt, Homo sapiens
  misc_RNA (1)...(19): siRNA sense strand
gaggagauguggucaaugg

SEQ ID NO: 340795 - RNA, 19 nt, Homo sapiens
  misc_RNA (1)...(19): siRNA sense strand
gaaggagcuuucaucauuc

SEQ ID NO: 340796 - RNA, 19 nt, Homo sapiens
  misc_RNA (1)...(19): siRNA sense strand
cuagaaaucuguugcuaug

SEQ ID NO: 340797 - RNA, 19 nt, Homo sapiens
  misc_RNA (1)...(19): siRNA sense strand
gcucagggcuauccucuca

SEQ ID NO: 340798 - RNA, 19 nt, Homo sapiens
  misc_RNA (1)...(19): siRNA sense strand
aaacaagcgucucugaaga

SEQ ID NO: 340799 - RNA, 19 nt, Homo sapiens
  misc_RNA (1)...(19): siRNA sense strand
caacauaaccugauaaagc

SEQ ID NO: 340800 - RNA, 19 nt, Homo sapiens
  misc_RNA (1)...(19): siRNA sense strand
gaaacaagcgucucugaag

SEQ ID NO: 340801 - RNA, 19 nt, Homo sapiens
  misc_RNA (1)...(19): siRNA sense strand
gcagagggauaccaugcaa

SEQ ID NO: 340802 - RNA, 19 nt, Homo sapiens
  misc_RNA (1)...(19): siRNA sense strand
ugaacuagaagcuguguua

SEQ ID NO: 340803 - RNA, 19 nt, Homo sapiens
  misc_RNA (1)...(19): siRNA sense strand
gagaaucccaggacagaaa

SEQ ID NO: 340804 - RNA, 19 nt, Homo sapiens
  misc_RNA (1)...(19): siRNA sense strand
gcccacagaucaacuggaa

SEQ ID NO: 340805 - RNA, 19 nt, Homo sapiens
  misc_RNA (1)...(19): siRNA sense strand
gaagacugcucagggcuau

SEQ ID NO: 340806 - RNA, 19 nt, Homo sapiens
  misc_RNA (1)...(19): siRNA sense strand
gacccagucuauuaaagaa

SEQ ID NO: 340807 - RNA, 19 nt, Homo sapiens
  misc_RNA (1)...(19): siRNA sense strand
acuagaagcuguguuagaa

SEQ ID NO: 340808 - RNA, 19 nt, Homo sapiens
  misc_RNA (1)...(19): siRNA sense strand
caugcaacauaaccugaua

SEQ ID NO: 340809 - RNA, 19 nt, Homo sapiens
  misc_RNA (1)...(19): siRNA sense strand
gcuggacaccuaccugaua

SEQ ID NO: 340810 - RNA, 19 nt, Homo sapiens
  misc_RNA (1)...(19): siRNA sense strand
cagaucaacuggaauggau

SEQ ID NO: 340811 - RNA, 19 nt, Homo sapiens
  misc_RNA (1)...(19): siRNA sense strand
gcaggaaauggcugaacua

SEQ ID NO: 340812 - RNA, 19 nt, Homo sapiens
  misc_RNA (1)...(19): siRNA sense strand
ccacagaucaacuggaaug

SEQ ID NO: 340813 - RNA, 19 nt, Homo sapiens
  misc_RNA (1)...(19): siRNA sense strand
caacaugcccacagaucaa

SEQ ID NO: 340814 - RNA, 19 nt, Homo sapiens
  misc_RNA (1)...(19): siRNA sense strand
ucaccaacaugcccacaga

SEQ ID NO: 340815 - RNA, 19 nt, Homo sapiens
  misc_RNA (1)...(19): siRNA sense strand
cagaggagauguggucaau

SEQ ID NO: 340816 - RNA, 19 nt, Homo sapiens
  misc_RNA (1)...(19): siRNA sense strand
caauugggcagauguguga

SEQ ID NO: 340817 - RNA, 19 nt, Homo sapiens
  misc_RNA (1)...(19): siRNA sense strand
ggagauguggucaauggaa

SEQ ID NO: 340818 - RNA, 19 nt, Homo sapiens
  misc_RNA (1)...(19): siRNA sense strand
guacagcuguguggugcuu

SEQ ID NO: 340819 - RNA, 19 nt, Homo sapiens
  misc_RNA (1)...(19): siRNA sense strand
ccaaagcgagcaagagaau

SEQ ID NO: 340820 - RNA, 19 nt, Homo sapiens
  misc_RNA (1)...(19): siRNA sense strand
gcuaugggcccuucaccaa

SEQ ID NO: 340821 - RNA, 19 nt, Homo sapiens
  misc_RNA (1)...(19): siRNA sense strand
gaaugagcaugauuuugaa

SEQ ID NO: 340822 - RNA, 19 nt, Homo sapiens
  misc_RNA (1)...(19): siRNA sense strand
ucagggcuauccucucaga

SEQ ID NO: 340823 - RNA, 19 nt, Homo sapiens
  misc_RNA (1)...(19): siRNA sense strand
agggauaccaugcaacaua

SEQ ID NO: 340824 - RNA, 19 nt, Homo sapiens
  misc_RNA (1)...(19): siRNA sense strand
gcuagaaaucuguugcuau

SEQ ID NO: 340825 - RNA, 19 nt, Homo sapiens
  misc_RNA (1)...(19): siRNA sense strand
ugaaugagcaugauuuuga

SEQ ID NO: 340826 - RNA, 19 nt, Homo sapiens
  misc_RNA (1)...(19): siRNA sense strand
ggcuagaaaucuguugcua

SEQ ID NO: 340827 - RNA, 19 nt, Homo sapiens
  misc_RNA (1)...(19): siRNA sense strand
ugaaacaagcgucucugaa

SEQ ID NO: 340828 - RNA, 19 nt, Homo sapiens
  misc_RNA (1)...(19): siRNA sense strand
aacauaaccugauaaagcu

SEQ ID NO: 340829 - RNA, 19 nt, Homo sapiens
  misc_RNA (1)...(19): siRNA sense strand
ugacccagucuauuaaaga

SEQ ID NO: 340830 - RNA, 19 nt, Homo sapiens
  misc_RNA (1)...(19): siRNA sense strand
gaacuagaagcuguguuag

SEQ ID NO: 340831 - RNA, 19 nt, Homo sapiens
  misc_RNA (1)...(19): siRNA sense strand
gugaaacaagcgucucuga

SEQ ID NO: 340832 - RNA, 19 nt, Homo sapiens
  misc_RNA (1)...(19): siRNA sense strand
ccaacaugcccacagauca

SEQ ID NO: 340833 - RNA, 19 nt, Homo sapiens
  misc_RNA (1)...(19): siRNA sense strand
uaugggcccuucaccaaca

SEQ ID NO: 340834 - RNA, 19 nt, Homo sapiens
  misc_RNA (1)...(19): siRNA sense strand
guccaaagcgagcaagaga

SEQ ID NO: 340835 - RNA, 19 nt, Homo sapiens
  misc_RNA (1)...(19): siRNA sense strand
cagaacaaagcacaucaga

SEQ ID NO: 340836 - RNA, 19 nt, Homo sapiens
  misc_RNA (1)...(19): siRNA sense strand
ccugcgaaauccagaacaa

SEQ ID NO: 340837 - RNA, 19 nt, Homo sapiens
  misc_RNA (1)...(19): siRNA sense strand
gaaaccaccaagguccaaa

SEQ ID NO: 340838 - RNA, 19 nt, Homo sapiens
  misc_RNA (1)...(19): siRNA sense strand
gauaaagcuccagcaggaa

SEQ ID NO: 340839 - RNA, 19 nt, Homo sapiens
  misc_RNA (1)...(19): siRNA sense strand
aaggagcuuucaucauuca

SEQ ID NO: 340840 - RNA, 19 nt, Homo sapiens
  misc_RNA (1)...(19): siRNA sense strand
ggugugagagugaaacaag

SEQ ID NO: 340841 - RNA, 19 nt, Homo sapiens
  misc_RNA (1)...(19): siRNA sense strand
gaaauggcugaacuagaag

SEQ ID NO: 340842 - RNA, 19 nt, Homo sapiens
  misc_RNA (1)...(19): siRNA sense strand
auaaagcuccagcaggaaa

SEQ ID NO: 340843 - RNA, 19 nt, Homo sapiens
  misc_RNA (1)...(19): siRNA sense strand
acccuuccaucauaaguga

SEQ ID NO: 340844 - RNA, 19 nt, Homo sapiens
  misc_RNA (1)...(19): siRNA sense strand
ggugacccagucuauuaaa

SEQ ID NO: 340845 - RNA, 19 nt, Homo sapiens
  misc_RNA (1)...(19): siRNA sense strand
cccagucuauuaaagaaag

SEQ ID NO: 340846 - RNA, 19 nt, Homo sapiens
  misc_RNA (1)...(19): siRNA sense strand
caucugggugugagaguga

SEQ ID NO: 340847 - RNA, 19 nt, Homo sapiens
  misc_RNA (1)...(19): siRNA sense strand
ccagucuauuaaagaaaga

SEQ ID NO: 340848 - RNA, 19 nt, Homo sapiens
  misc_RNA (1)...(19): siRNA sense strand
cgaaauccagaacaaagca

SEQ ID NO: 340849 - RNA, 19 nt, Homo sapiens
  misc_RNA (1)...(19): siRNA sense strand
aagagaaucccaggacaga

SEQ ID NO: 340850 - RNA, 19 nt, Homo sapiens
  misc_RNA (1)...(19): siRNA sense strand
gauguggucaauggaagaa

SEQ ID NO: 340851 - RNA, 19 nt, Homo sapiens
  misc_RNA (1)...(19): siRNA sense strand
ggaccugcgaaauccagaa

SEQ ID NO: 340852 - RNA, 19 nt, Homo sapiens
  misc_RNA (1)...(19): siRNA sense strand
gagcaugauuuugaaguca

SEQ ID NO: 340853 - RNA, 19 nt, Homo sapiens
  misc_RNA (1)...(19): siRNA sense strand
gugacccagucuauuaaag

SEQ ID NO: 340854 - RNA, 19 nt, Homo sapiens
  misc_RNA (1)...(19): siRNA sense strand
agaacaaagcacaucagaa

SEQ ID NO: 340855 - RNA, 19 nt, Homo sapiens
  misc_RNA (1)...(19): siRNA sense strand
uggaagaaaccaccaaggu

SEQ ID NO: 340856 - RNA, 19 nt, Homo sapiens
  misc_RNA (1)...(19): siRNA sense strand
ucaacuggaauggauggua

SEQ ID NO: 340857 - RNA, 19 nt, Homo sapiens
  misc_RNA (1)...(19): siRNA sense strand
ggaaauggcugaacuagaa

SEQ ID NO: 340858 - RNA, 19 nt, Homo sapiens
  misc_RNA (1)...(19): siRNA sense strand
gaacaaagcacaucagaaa

SEQ ID NO: 340859 - RNA, 19 nt, Homo sapiens
  misc_RNA (1)...(19): siRNA sense strand
cagcuacccuuccaucaua

SEQ ID NO: 340860 - RNA, 19 nt, Homo sapiens
  misc_RNA (1)...(19): siRNA sense strand
gggauaccaugcaacauaa

SEQ ID NO: 340861 - RNA, 19 nt, Homo sapiens
  misc_RNA (1)...(19): siRNA sense strand
gaggagauguggucaaugg

SEQ ID NO: 340862 - RNA, 19 nt, Homo sapiens
  misc_RNA (1)...(19): siRNA sense strand
gaaggagcuuucaucauuc

SEQ ID NO: 340863 - RNA, 19 nt, Homo sapiens
  misc_RNA (1)...(19): siRNA sense strand
cuagaaaucuguugcuaug

SEQ ID NO: 340864 - RNA, 19 nt, Homo sapiens
  misc_RNA (1)...(19): siRNA sense strand
gcucagggcuauccucuca

SEQ ID NO: 340865 - RNA, 19 nt, Homo sapiens
  misc_RNA (1)...(19): siRNA sense strand
aaacaagcgucucugaaga

SEQ ID NO: 340866 - RNA, 19 nt, Homo sapiens
  misc_RNA (1)...(19): siRNA sense strand
caacauaaccugauaaagc

SEQ ID NO: 340867 - RNA, 19 nt, Homo sapiens
  misc_RNA (1)...(19): siRNA sense strand
gaaacaagcgucucugaag

SEQ ID NO: 340868 - RNA, 19 nt, Homo sapiens
  misc_RNA (1)...(19): siRNA sense strand
gcagagggauaccaugcaa

SEQ ID NO: 340869 - RNA, 19 nt, Homo sapiens
  misc_RNA (1)...(19): siRNA sense strand
ugaacuagaagcuguguua

SEQ ID NO: 340870 - RNA, 19 nt, Homo sapiens
  misc_RNA (1)...(19): siRNA sense strand
gagaaucccaggacagaaa

SEQ ID NO: 340871 - RNA, 19 nt, Homo sapiens
  misc_RNA (1)...(19): siRNA sense strand
gcccacagaucaacuggaa

SEQ ID NO: 340872 - RNA, 19 nt, Homo sapiens
  misc_RNA (1)...(19): siRNA sense strand
gaagacugcucagggcuau

SEQ ID NO: 340873 - RNA, 19 nt, Homo sapiens
  misc_RNA (1)...(19): siRNA sense strand
gacccagucuauuaaagaa

SEQ ID NO: 340874 - RNA, 19 nt, Homo sapiens
  misc_RNA (1)...(19): siRNA sense strand
acuagaagcuguguuagaa

SEQ ID NO: 340875 - RNA, 19 nt, Homo sapiens
  misc_RNA (1)...(19): siRNA sense strand
caugcaacauaaccugaua

SEQ ID NO: 340876 - RNA, 19 nt, Homo sapiens
  misc_RNA (1)...(19): siRNA sense strand
gcuggacaccuaccugaua

SEQ ID NO: 340877 - RNA, 19 nt, Homo sapiens
  misc_RNA (1)...(19): siRNA sense strand
cagaucaacuggaauggau

SEQ ID NO: 340878 - RNA, 19 nt, Homo sapiens
  misc_RNA (1)...(19): siRNA sense strand
gcaggaaauggcugaacua

SEQ ID NO: 340879 - RNA, 19 nt, Homo sapiens
  misc_RNA (1)...(19): siRNA sense strand
ccacagaucaacuggaaug

SEQ ID NO: 340880 - RNA, 19 nt, Homo sapiens
  misc_RNA (1)...(19): siRNA sense strand
caacaugcccacagaucaa

SEQ ID NO: 340881 - RNA, 19 nt, Homo sapiens
  misc_RNA (1)...(19): siRNA sense strand
ucaccaacaugcccacaga

SEQ ID NO: 340882 - RNA, 19 nt, Homo sapiens
  misc_RNA (1)...(19): siRNA sense strand
cagaggagauguggucaau

SEQ ID NO: 340883 - RNA, 19 nt, Homo sapiens
  misc_RNA (1)...(19): siRNA sense strand
caauugggcagauguguga

SEQ ID NO: 340884 - RNA, 19 nt, Homo sapiens
  misc_RNA (1)...(19): siRNA sense strand
ggagauguggucaauggaa

SEQ ID NO: 340885 - RNA, 19 nt, Homo sapiens
  misc_RNA (1)...(19): siRNA sense strand
guacagcuguguggugcuu

SEQ ID NO: 340886 - RNA, 19 nt, Homo sapiens
  misc_RNA (1)...(19): siRNA sense strand
ccaaagcgagcaagagaau

SEQ ID NO: 340887 - RNA, 19 nt, Homo sapiens
  misc_RNA (1)...(19): siRNA sense strand
gcuaugggcccuucaccaa

SEQ ID NO: 340888 - RNA, 19 nt, Homo sapiens
  misc_RNA (1)...(19): siRNA sense strand
gaaugagcaugauuuugaa

SEQ ID NO: 340889 - RNA, 19 nt, Homo sapiens
  misc_RNA (1)...(19): siRNA sense strand
ucagggcuauccucucaga

SEQ ID NO: 340890 - RNA, 19 nt, Homo sapiens
  misc_RNA (1)...(19): siRNA sense strand
agggauaccaugcaacaua

SEQ ID NO: 340891 - RNA, 19 nt, Homo sapiens
  misc_RNA (1)...(19): siRNA sense strand
gcuagaaaucuguugcuau

SEQ ID NO: 340892 - RNA, 19 nt, Homo sapiens
  misc_RNA (1)...(19): siRNA sense strand
ugaaugagcaugauuuuga

SEQ ID NO: 340893 - RNA, 19 nt, Homo sapiens
  misc_RNA (1)...(19): siRNA sense strand
ggcuagaaaucuguugcua

SEQ ID NO: 340894 - RNA, 19 nt, Homo sapiens
  misc_RNA (1)...(19): siRNA sense strand
ugaaacaagcgucucugaa

SEQ ID NO: 340895 - RNA, 19 nt, Homo sapiens
  misc_RNA (1)...(19): siRNA sense strand
aacauaaccugauaaagcu

SEQ ID NO: 340896 - RNA, 19 nt, Homo sapiens
  misc_RNA (1)...(19): siRNA sense strand
ugacccagucuauuaaaga

SEQ ID NO: 340897 - RNA, 19 nt, Homo sapiens
  misc_RNA (1)...(19): siRNA sense strand
gaacuagaagcuguguuag

SEQ ID NO: 340898 - RNA, 19 nt, Homo sapiens
  misc_RNA (1)...(19): siRNA sense strand
gugaaacaagcgucucuga

SEQ ID NO: 340899 - RNA, 19 nt, Homo sapiens
  misc_RNA (1)...(19): siRNA sense strand
ccaacaugcccacagauca

SEQ ID NO: 340900 - RNA, 19 nt, Homo sapiens
  misc_RNA (1)...(19): siRNA sense strand
uaugggcccuucaccaaca

SEQ ID NO: 340901 - RNA, 19 nt, Homo sapiens
  misc_RNA (1)...(19): siRNA sense strand
guccaaagcgagcaagaga

SEQ ID NO: 340902 - RNA, 19 nt, Homo sapiens
  misc_RNA (1)...(19): siRNA sense strand
cagaacaaagcacaucaga

SEQ ID NO: 340903 - RNA, 19 nt, Homo sapiens
  misc_RNA (1)...(19): siRNA sense strand
ccugcgaaauccagaacaa

SEQ ID NO: 340904 - RNA, 19 nt, Homo sapiens
  misc_RNA (1)...(19): siRNA sense strand
gaaaccaccaagguccaaa

SEQ ID NO: 340905 - RNA, 19 nt, Homo sapiens
  misc_RNA (1)...(19): siRNA sense strand
gauaaagcuccagcaggaa

SEQ ID NO: 340906 - RNA, 19 nt, Homo sapiens
  misc_RNA (1)...(19): siRNA sense strand
aaggagcuuucaucauuca

SEQ ID NO: 340907 - RNA, 19 nt, Homo sapiens
  misc_RNA (1)...(19): siRNA sense strand
ggugugagagugaaacaag

SEQ ID NO: 340908 - RNA, 19 nt, Homo sapiens
  misc_RNA (1)...(19): siRNA sense strand
gaaauggcugaacuagaag

SEQ ID NO: 340909 - RNA, 19 nt, Homo sapiens
  misc_RNA (1)...(19): siRNA sense strand
auaaagcuccagcaggaaa

SEQ ID NO: 340910 - RNA, 19 nt, Homo sapiens
  misc_RNA (1)...(19): siRNA sense strand
acccuuccaucauaaguga

SEQ ID NO: 340911 - RNA, 19 nt, Homo sapiens
  misc_RNA (1)...(19): siRNA sense strand
ggugacccagucuauuaaa

SEQ ID NO: 340912 - RNA, 19 nt, Homo sapiens
  misc_RNA (1)...(19): siRNA sense strand
cccagucuauuaaagaaag

SEQ ID NO: 340913 - RNA, 19 nt, Homo sapiens
  misc_RNA (1)...(19): siRNA sense strand
caucugggugugagaguga

SEQ ID NO: 340914 - RNA, 19 nt, Homo sapiens
  misc_RNA (1)...(19): siRNA sense strand
ccagucuauuaaagaaaga

SEQ ID NO: 340915 - RNA, 19 nt, Homo sapiens
  misc_RNA (1)...(19): siRNA sense strand
cgaaauccagaacaaagca

SEQ ID NO: 340916 - RNA, 19 nt, Homo sapiens
  misc_RNA (1)...(19): siRNA sense strand
aagagaaucccaggacaga

SEQ ID NO: 340917 - RNA, 19 nt, Homo sapiens
  misc_RNA (1)...(19): siRNA sense strand
gauguggucaauggaagaa

SEQ ID NO: 340918 - RNA, 19 nt, Homo sapiens
  misc_RNA (1)...(19): siRNA sense strand
ggaccugcgaaauccagaa

SEQ ID NO: 340919 - RNA, 19 nt, Homo sapiens
  misc_RNA (1)...(19): siRNA sense strand
gagcaugauuuugaaguca

SEQ ID NO: 340920 - RNA, 19 nt, Homo sapiens
  misc_RNA (1)...(19): siRNA sense strand
gugacccagucuauuaaag

SEQ ID NO: 340921 - RNA, 19 nt, Homo sapiens
  misc_RNA (1)...(19): siRNA sense strand
agaacaaagcacaucagaa

SEQ ID NO: 340922 - RNA, 19 nt, Homo sapiens
  misc_RNA (1)...(19): siRNA sense strand
uggaagaaaccaccaaggu

SEQ ID NO: 340923 - RNA, 19 nt, Homo sapiens
  misc_RNA (1)...(19): siRNA sense strand
ucaacuggaauggauggua

SEQ ID NO: 340924 - RNA, 19 nt, Homo sapiens
  misc_RNA (1)...(19): siRNA sense strand
ggaaauggcugaacuagaa

SEQ ID NO: 340925 - RNA, 19 nt, Homo sapiens
  misc_RNA (1)...(19): siRNA sense strand
gaacaaagcacaucagaaa

SEQ ID NO: 340926 - RNA, 19 nt, Homo sapiens
  misc_RNA (1)...(19): siRNA sense strand
cagcuacccuuccaucaua

SEQ ID NO: 340927 - RNA, 19 nt, Homo sapiens
  misc_RNA (1)...(19): siRNA sense strand
gggauaccaugcaacauaa

SEQ ID NO: 340928 - RNA, 19 nt, Homo sapiens
  misc_RNA (1)...(19): siRNA sense strand
gaggagauguggucaaugg

SEQ ID NO: 340929 - RNA, 19 nt, Homo sapiens
  misc_RNA (1)...(19): siRNA sense strand
gaaggagcuuucaucauuc

SEQ ID NO: 340930 - RNA, 19 nt, Homo sapiens
  misc_RNA (1)...(19): siRNA sense strand
cuagaaaucuguugcuaug

SEQ ID NO: 340931 - RNA, 19 nt, Homo sapiens
  misc_RNA (1)...(19): siRNA sense strand
gcucagggcuauccucuca

SEQ ID NO: 340932 - RNA, 19 nt, Homo sapiens
  misc_RNA (1)...(19): siRNA sense strand
aaacaagcgucucugaaga

SEQ ID NO: 340933 - RNA, 19 nt, Homo sapiens
  misc_RNA (1)...(19): siRNA sense strand
caacauaaccugauaaagc

SEQ ID NO: 340934 - RNA, 19 nt, Homo sapiens
  misc_RNA (1)...(19): siRNA sense strand
gaaacaagcgucucugaag

SEQ ID NO: 340935 - RNA, 19 nt, Homo sapiens
  misc_RNA (1)...(19): siRNA sense strand
gcagagggauaccaugcaa

SEQ ID NO: 340936 - RNA, 19 nt, Homo sapiens
  misc_RNA (1)...(19): siRNA sense strand
ugaacuagaagcuguguua

SEQ ID NO: 340937 - RNA, 19 nt, Homo sapiens
  misc_RNA (1)...(19): siRNA sense strand
gagaaucccaggacagaaa

SEQ ID NO: 340938 - RNA, 19 nt, Homo sapiens
  misc_RNA (1)...(19): siRNA sense strand
gcccacagaucaacuggaa

SEQ ID NO: 340939 - RNA, 19 nt, Homo sapiens
  misc_RNA (1)...(19): siRNA sense strand
gaagacugcucagggcuau

SEQ ID NO: 340940 - RNA, 19 nt, Homo sapiens
  misc_RNA (1)...(19): siRNA sense strand
gacccagucuauuaaagaa

SEQ ID NO: 340941 - RNA, 19 nt, Homo sapiens
  misc_RNA (1)...(19): siRNA sense strand
acuagaagcuguguuagaa

SEQ ID NO: 340942 - RNA, 19 nt, Homo sapiens
  misc_RNA (1)...(19): siRNA sense strand
caugcaacauaaccugaua

SEQ ID NO: 340943 - RNA, 19 nt, Homo sapiens
  misc_RNA (1)...(19): siRNA sense strand
gcuggacaccuaccugaua

SEQ ID NO: 340944 - RNA, 19 nt, Homo sapiens
  misc_RNA (1)...(19): siRNA sense strand
cagaucaacuggaauggau

SEQ ID NO: 340945 - RNA, 19 nt, Homo sapiens
  misc_RNA (1)...(19): siRNA sense strand
gcaggaaauggcugaacua

SEQ ID NO: 340946 - RNA, 19 nt, Homo sapiens
  misc_RNA (1)...(19): siRNA sense strand
ccacagaucaacuggaaug

SEQ ID NO: 340947 - RNA, 19 nt, Homo sapiens
  misc_RNA (1)...(19): siRNA sense strand
caacaugcccacagaucaa

SEQ ID NO: 340948 - RNA, 19 nt, Homo sapiens
  misc_RNA (1)...(19): siRNA sense strand
ucaccaacaugcccacaga

SEQ ID NO: 340949 - RNA, 19 nt, Homo sapiens
  misc_RNA (1)...(19): siRNA sense strand
cagaggagauguggucaau

SEQ ID NO: 340950 - RNA, 19 nt, Homo sapiens
  misc_RNA (1)...(19): siRNA sense strand
caauugggcagauguguga

SEQ ID NO: 340951 - RNA, 19 nt, Homo sapiens
  misc_RNA (1)...(19): siRNA sense strand
ggagauguggucaauggaa

SEQ ID NO: 340952 - RNA, 19 nt, Homo sapiens
  misc_RNA (1)...(19): siRNA sense strand
guacagcuguguggugcuu

SEQ ID NO: 340953 - RNA, 19 nt, Homo sapiens
  misc_RNA (1)...(19): siRNA sense strand
ccaaagcgagcaagagaau

SEQ ID NO: 340954 - RNA, 19 nt, Homo sapiens
  misc_RNA (1)...(19): siRNA sense strand
gcuaugggcccuucaccaa

SEQ ID NO: 340955 - RNA, 19 nt, Homo sapiens
  misc_RNA (1)...(19): siRNA sense strand
gaaugagcaugauuuugaa

SEQ ID NO: 340956 - RNA, 19 nt, Homo sapiens
  misc_RNA (1)...(19): siRNA sense strand
ucagggcuauccucucaga

SEQ ID NO: 340957 - RNA, 19 nt, Homo sapiens
  misc_RNA (1)...(19): siRNA sense strand
agggauaccaugcaacaua

SEQ ID NO: 340958 - RNA, 19 nt, Homo sapiens
  misc_RNA (1)...(19): siRNA sense strand
gcuagaaaucuguugcuau

SEQ ID NO: 340959 - RNA, 19 nt, Homo sapiens
  misc_RNA (1)...(19): siRNA sense strand
ugaaugagcaugauuuuga

SEQ ID NO: 340960 - RNA, 19 nt, Homo sapiens
  misc_RNA (1)...(19): siRNA sense strand
ggcuagaaaucuguugcua

SEQ ID NO: 340961 - RNA, 19 nt, Homo sapiens
  misc_RNA (1)...(19): siRNA sense strand
ugaaacaagcgucucugaa

SEQ ID NO: 340962 - RNA, 19 nt, Homo sapiens
  misc_RNA (1)...(19): siRNA sense strand
aacauaaccugauaaagcu

SEQ ID NO: 340963 - RNA, 19 nt, Homo sapiens
  misc_RNA (1)...(19): siRNA sense strand
ugacccagucuauuaaaga

SEQ ID NO: 340964 - RNA, 19 nt, Homo sapiens
  misc_RNA (1)...(19): siRNA sense strand
gaacuagaagcuguguuag

SEQ ID NO: 340965 - RNA, 19 nt, Homo sapiens
  misc_RNA (1)...(19): siRNA sense strand
gugaaacaagcgucucuga

SEQ ID NO: 340966 - RNA, 19 nt, Homo sapiens
  misc_RNA (1)...(19): siRNA sense strand
ccaacaugcccacagauca

SEQ ID NO: 340967 - RNA, 19 nt, Homo sapiens
  misc_RNA (1)...(19): siRNA sense strand
uaugggcccuucaccaaca

SEQ ID NO: 340968 - RNA, 19 nt, Homo sapiens
  misc_RNA (1)...(19): siRNA sense strand
guccaaagcgagcaagaga

SEQ ID NO: 340969 - RNA, 19 nt, Homo sapiens
  misc_RNA (1)...(19): siRNA sense strand
cagaacaaagcacaucaga

SEQ ID NO: 340970 - RNA, 19 nt, Homo sapiens
  misc_RNA (1)...(19): siRNA sense strand
ccugcgaaauccagaacaa

SEQ ID NO: 340971 - RNA, 19 nt, Homo sapiens
  misc_RNA (1)...(19): siRNA sense strand
gaaaccaccaagguccaaa

SEQ ID NO: 340972 - RNA, 19 nt, Homo sapiens
  misc_RNA (1)...(19): siRNA sense strand
gauaaagcuccagcaggaa

SEQ ID NO: 340973 - RNA, 19 nt, Homo sapiens
  misc_RNA (1)...(19): siRNA sense strand
aaggagcuuucaucauuca

SEQ ID NO: 340974 - RNA, 19 nt, Homo sapiens
  misc_RNA (1)...(19): siRNA sense strand
ggugugagagugaaacaag

SEQ ID NO: 340975 - RNA, 19 nt, Homo sapiens
  misc_RNA (1)...(19): siRNA sense strand
gaaauggcugaacuagaag

SEQ ID NO: 340976 - RNA, 19 nt, Homo sapiens
  misc_RNA (1)...(19): siRNA sense strand
auaaagcuccagcaggaaa

SEQ ID NO: 340977 - RNA, 19 nt, Homo sapiens
  misc_RNA (1)...(19): siRNA sense strand
acccuuccaucauaaguga

SEQ ID NO: 340978 - RNA, 19 nt, Homo sapiens
  misc_RNA (1)...(19): siRNA sense strand
ggugacccagucuauuaaa

SEQ ID NO: 340979 - RNA, 19 nt, Homo sapiens
  misc_RNA (1)...(19): siRNA sense strand
cccagucuauuaaagaaag

SEQ ID NO: 340980 - RNA, 19 nt, Homo sapiens
  misc_RNA (1)...(19): siRNA sense strand
caucugggugugagaguga

SEQ ID NO: 340981 - RNA, 19 nt, Homo sapiens
  misc_RNA (1)...(19): siRNA sense strand
ccagucuauuaaagaaaga

SEQ ID NO: 340982 - RNA, 19 nt, Homo sapiens
  misc_RNA (1)...(19): siRNA sense strand
cgaaauccagaacaaagca

SEQ ID NO: 340983 - RNA, 19 nt, Homo sapiens
  misc_RNA (1)...(19): siRNA sense strand
aagagaaucccaggacaga

SEQ ID NO: 340984 - RNA, 19 nt, Homo sapiens
  misc_RNA (1)...(19): siRNA sense strand
gauguggucaauggaagaa

SEQ ID NO: 340985 - RNA, 19 nt, Homo sapiens
  misc_RNA (1)...(19): siRNA sense strand
ggaccugcgaaauccagaa

SEQ ID NO: 340986 - RNA, 19 nt, Homo sapiens
  misc_RNA (1)...(19): siRNA sense strand
gagcaugauuuugaaguca

SEQ ID NO: 340987 - RNA, 19 nt, Homo sapiens
  misc_RNA (1)...(19): siRNA sense strand
gugacccagucuauuaaag

SEQ ID NO: 340988 - RNA, 19 nt, Homo sapiens
  misc_RNA (1)...(19): siRNA sense strand
agaacaaagcacaucagaa

SEQ ID NO: 340989 - RNA, 19 nt, Homo sapiens
  misc_RNA (1)...(19): siRNA sense strand
uggaagaaaccaccaaggu

SEQ ID NO: 340990 - RNA, 19 nt, Homo sapiens
  misc_RNA (1)...(19): siRNA sense strand
ucaacuggaauggauggua

SEQ ID NO: 340991 - RNA, 19 nt, Homo sapiens
  misc_RNA (1)...(19): siRNA sense strand
ggaaauggcugaacuagaa

SEQ ID NO: 340992 - RNA, 19 nt, Homo sapiens
  misc_RNA (1)...(19): siRNA sense strand
gaacaaagcacaucagaaa

SEQ ID NO: 340993 - RNA, 19 nt, Homo sapiens
  misc_RNA (1)...(19): siRNA sense strand
cagcuacccuuccaucaua

SEQ ID NO: 340994 - RNA, 19 nt, Homo sapiens
  misc_RNA (1)...(19): siRNA sense strand
gggauaccaugcaacauaa

SEQ ID NO: 340995 - RNA, 19 nt, Homo sapiens
  misc_RNA (1)...(19): siRNA sense strand
gaggagauguggucaaugg

SEQ ID NO: 340996 - RNA, 19 nt, Homo sapiens
  misc_RNA (1)...(19): siRNA sense strand
gaaggagcuuucaucauuc

SEQ ID NO: 340997 - RNA, 19 nt, Homo sapiens
  misc_RNA (1)...(19): siRNA sense strand
cuagaaaucuguugcuaug

SEQ ID NO: 340998 - RNA, 19 nt, Homo sapiens
  misc_RNA (1)...(19): siRNA sense strand
gcucagggcuauccucuca

SEQ ID NO: 340999 - RNA, 19 nt, Homo sapiens
  misc_RNA (1)...(19): siRNA sense strand
aaacaagcgucucugaaga

SEQ ID NO: 341000 - RNA, 19 nt, Homo sapiens
  misc_RNA (1)...(19): siRNA sense strand
caacauaaccugauaaagc

SEQ ID NO: 341001 - RNA, 19 nt, Homo sapiens
  misc_RNA (1)...(19): siRNA sense strand
gaaacaagcgucucugaag

SEQ ID NO: 341002 - RNA, 19 nt, Homo sapiens
  misc_RNA (1)...(19): siRNA sense strand
gcagagggauaccaugcaa

SEQ ID NO: 341003 - RNA, 19 nt, Homo sapiens
  misc_RNA (1)...(19): siRNA sense strand
ugaacuagaagcuguguua

SEQ ID NO: 341004 - RNA, 19 nt, Homo sapiens
  misc_RNA (1)...(19): siRNA sense strand
gagaaucccaggacagaaa

SEQ ID NO: 341005 - RNA, 19 nt, Homo sapiens
  misc_RNA (1)...(19): siRNA sense strand
gcccacagaucaacuggaa

SEQ ID NO: 341006 - RNA, 19 nt, Homo sapiens
  misc_RNA (1)...(19): siRNA sense strand
gaagacugcucagggcuau

SEQ ID NO: 341007 - RNA, 19 nt, Homo sapiens
  misc_RNA (1)...(19): siRNA sense strand
gacccagucuauuaaagaa

SEQ ID NO: 341008 - RNA, 19 nt, Homo sapiens
  misc_RNA (1)...(19): siRNA sense strand
acuagaagcuguguuagaa

SEQ ID NO: 341009 - RNA, 19 nt, Homo sapiens
  misc_RNA (1)...(19): siRNA sense strand
caugcaacauaaccugaua

SEQ ID NO: 341010 - RNA, 19 nt, Homo sapiens
  misc_RNA (1)...(19): siRNA sense strand
gcuggacaccuaccugaua

SEQ ID NO: 341011 - RNA, 19 nt, Homo sapiens
  misc_RNA (1)...(19): siRNA sense strand
cagaucaacuggaauggau

SEQ ID NO: 341012 - RNA, 19 nt, Homo sapiens
  misc_RNA (1)...(19): siRNA sense strand
gcaggaaauggcugaacua

SEQ ID NO: 341013 - RNA, 19 nt, Homo sapiens
  misc_RNA (1)...(19): siRNA sense strand
ccacagaucaacuggaaug

SEQ ID NO: 341014 - RNA, 19 nt, Homo sapiens
  misc_RNA (1)...(19): siRNA sense strand
caacaugcccacagaucaa

SEQ ID NO: 341015 - RNA, 19 nt, Homo sapiens
  misc_RNA (1)...(19): siRNA sense strand
ucaccaacaugcccacaga

SEQ ID NO: 341016 - RNA, 19 nt, Homo sapiens
  misc_RNA (1)...(19): siRNA sense strand
cagaggagauguggucaau

SEQ ID NO: 341017 - RNA, 19 nt, Homo sapiens
  misc_RNA (1)...(19): siRNA sense strand
caauugggcagauguguga

SEQ ID NO: 341018 - RNA, 19 nt, Homo sapiens
  misc_RNA (1)...(19): siRNA sense strand
ggagauguggucaauggaa

SEQ ID NO: 341019 - RNA, 19 nt, Homo sapiens
  misc_RNA (1)...(19): siRNA sense strand
guacagcuguguggugcuu

SEQ ID NO: 341020 - RNA, 19 nt, Homo sapiens
  misc_RNA (1)...(19): siRNA sense strand
ccaaagcgagcaagagaau

SEQ ID NO: 341021 - RNA, 19 nt, Homo sapiens
  misc_RNA (1)...(19): siRNA sense strand
gcuaugggcccuucaccaa

SEQ ID NO: 341022 - RNA, 19 nt, Homo sapiens
  misc_RNA (1)...(19): siRNA sense strand
gaaugagcaugauuuugaa

SEQ ID NO: 341023 - RNA, 19 nt, Homo sapiens
  misc_RNA (1)...(19): siRNA sense strand
ucagggcuauccucucaga

SEQ ID NO: 341024 - RNA, 19 nt, Homo sapiens
  misc_RNA (1)...(19): siRNA sense strand
agggauaccaugcaacaua

SEQ ID NO: 341025 - RNA, 19 nt, Homo sapiens
  misc_RNA (1)...(19): siRNA sense strand
gcuagaaaucuguugcuau

SEQ ID NO: 341026 - RNA, 19 nt, Homo sapiens
  misc_RNA (1)...(19): siRNA sense strand
ugaaugagcaugauuuuga

SEQ ID NO: 341027 - RNA, 19 nt, Homo sapiens
  misc_RNA (1)...(19): siRNA sense strand
ggcuagaaaucuguugcua

SEQ ID NO: 341028 - RNA, 19 nt, Homo sapiens
  misc_RNA (1)...(19): siRNA sense strand
ugaaacaagcgucucugaa

SEQ ID NO: 341029 - RNA, 19 nt, Homo sapiens
  misc_RNA (1)...(19): siRNA sense strand
aacauaaccugauaaagcu

SEQ ID NO: 341030 - RNA, 19 nt, Homo sapiens
  misc_RNA (1)...(19): siRNA sense strand
ugacccagucuauuaaaga

SEQ ID NO: 341031 - RNA, 19 nt, Homo sapiens
  misc_RNA (1)...(19): siRNA sense strand
gaacuagaagcuguguuag

SEQ ID NO: 341032 - RNA, 19 nt, Homo sapiens
  misc_RNA (1)...(19): siRNA sense strand
gugaaacaagcgucucuga

SEQ ID NO: 341033 - RNA, 19 nt, Homo sapiens
  misc_RNA (1)...(19): siRNA sense strand
ccaacaugcccacagauca

SEQ ID NO: 341034 - RNA, 19 nt, Homo sapiens
  misc_RNA (1)...(19): siRNA sense strand
uaugggcccuucaccaaca

SEQ ID NO: 341035 - RNA, 19 nt, Homo sapiens
  misc_RNA (1)...(19): siRNA sense strand
guccaaagcgagcaagaga

SEQ ID NO: 341036 - RNA, 19 nt, Homo sapiens
  misc_RNA (1)...(19): siRNA sense strand
cagaacaaagcacaucaga

SEQ ID NO: 341037 - RNA, 19 nt, Homo sapiens
  misc_RNA (1)...(19): siRNA sense strand
ccugcgaaauccagaacaa

SEQ ID NO: 341038 - RNA, 19 nt, Homo sapiens
  misc_RNA (1)...(19): siRNA sense strand
gaaaccaccaagguccaaa

SEQ ID NO: 341039 - RNA, 19 nt, Homo sapiens
  misc_RNA (1)...(19): siRNA sense strand
gauaaagcuccagcaggaa

SEQ ID NO: 341040 - RNA, 19 nt, Homo sapiens
  misc_RNA (1)...(19): siRNA sense strand
aaggagcuuucaucauuca

SEQ ID NO: 341041 - RNA, 19 nt, Homo sapiens
  misc_RNA (1)...(19): siRNA sense strand
ggugugagagugaaacaag

SEQ ID NO: 341042 - RNA, 19 nt, Homo sapiens
  misc_RNA (1)...(19): siRNA sense strand
gaaauggcugaacuagaag

SEQ ID NO: 341043 - RNA, 19 nt, Homo sapiens
  misc_RNA (1)...(19): siRNA sense strand
auaaagcuccagcaggaaa

SEQ ID NO: 341044 - RNA, 19 nt, Homo sapiens
  misc_RNA (1)...(19): siRNA sense strand
acccuuccaucauaaguga

SEQ ID NO: 341045 - RNA, 19 nt, Homo sapiens
  misc_RNA (1)...(19): siRNA sense strand
ggugacccagucuauuaaa

SEQ ID NO: 341046 - RNA, 19 nt, Homo sapiens
  misc_RNA (1)...(19): siRNA sense strand
cccagucuauuaaagaaag

SEQ ID NO: 341047 - RNA, 19 nt, Homo sapiens
  misc_RNA (1)...(19): siRNA sense strand
caucugggugugagaguga

SEQ ID NO: 341048 - RNA, 19 nt, Homo sapiens
  misc_RNA (1)...(19): siRNA sense strand
ccagucuauuaaagaaaga

SEQ ID NO: 341049 - RNA, 19 nt, Homo sapiens
  misc_RNA (1)...(19): siRNA sense strand
cgaaauccagaacaaagca

SEQ ID NO: 341050 - RNA, 19 nt, Homo sapiens
  misc_RNA (1)...(19): siRNA sense strand
aagagaaucccaggacaga

SEQ ID NO: 341051 - RNA, 19 nt, Homo sapiens
  misc_RNA (1)...(19): siRNA sense strand
gauguggucaauggaagaa

SEQ ID NO: 341052 - RNA, 19 nt, Homo sapiens
  misc_RNA (1)...(19): siRNA sense strand
ggaccugcgaaauccagaa

SEQ ID NO: 341053 - RNA, 19 nt, Homo sapiens
  misc_RNA (1)...(19): siRNA sense strand
gagcaugauuuugaaguca

SEQ ID NO: 341054 - RNA, 19 nt, Homo sapiens
  misc_RNA (1)...(19): siRNA sense strand
gugacccagucuauuaaag

SEQ ID NO: 341055 - RNA, 19 nt, Homo sapiens
  misc_RNA (1)...(19): siRNA sense strand
agaacaaagcacaucagaa

SEQ ID NO: 341056 - RNA, 19 nt, Homo sapiens
  misc_RNA (1)...(19): siRNA sense strand
uggaagaaaccaccaaggu

SEQ ID NO: 341057 - RNA, 19 nt, Homo sapiens
  misc_RNA (1)...(19): siRNA sense strand
ucaacuggaauggauggua

SEQ ID NO: 341058 - RNA, 19 nt, Homo sapiens
  misc_RNA (1)...(19): siRNA sense strand
ggaaauggcugaacuagaa

SEQ ID NO: 341059 - RNA, 19 nt, Homo sapiens
  misc_RNA (1)...(19): siRNA sense strand
gaacaaagcacaucagaaa

SEQ ID NO: 341060 - RNA, 19 nt, Homo sapiens
  misc_RNA (1)...(19): siRNA sense strand
cagcuacccuuccaucaua

SEQ ID NO: 341061 - RNA, 19 nt, Homo sapiens
  misc_RNA (1)...(19): siRNA sense strand
gggauaccaugcaacauaa

SEQ ID NO: 341062 - RNA, 19 nt, Homo sapiens
  misc_RNA (1)...(19): siRNA sense strand
gaggagauguggucaaugg

SEQ ID NO: 341063 - RNA, 19 nt, Homo sapiens
  misc_RNA (1)...(19): siRNA sense strand
gaaggagcuuucaucauuc

SEQ ID NO: 341064 - RNA, 19 nt, Homo sapiens
  misc_RNA (1)...(19): siRNA sense strand
cuagaaaucuguugcuaug

SEQ ID NO: 341065 - RNA, 19 nt, Homo sapiens
  misc_RNA (1)...(19): siRNA sense strand
gcucagggcuauccucuca

SEQ ID NO: 341066 - RNA, 19 nt, Homo sapiens
  misc_RNA (1)...(19): siRNA sense strand
aaacaagcgucucugaaga

SEQ ID NO: 341067 - RNA, 19 nt, Homo sapiens
  misc_RNA (1)...(19): siRNA sense strand
caacauaaccugauaaagc

SEQ ID NO: 341068 - RNA, 19 nt, Homo sapiens
  misc_RNA (1)...(19): siRNA sense strand
gaaacaagcgucucugaag

SEQ ID NO: 341069 - RNA, 19 nt, Homo sapiens
  misc_RNA (1)...(19): siRNA sense strand
gcagagggauaccaugcaa

SEQ ID NO: 341070 - RNA, 19 nt, Homo sapiens
  misc_RNA (1)...(19): siRNA sense strand
ugaacuagaagcuguguua

SEQ ID NO: 341071 - RNA, 19 nt, Homo sapiens
  misc_RNA (1)...(19): siRNA sense strand
gagaaucccaggacagaaa

SEQ ID NO: 341072 - RNA, 19 nt, Homo sapiens
  misc_RNA (1)...(19): siRNA sense strand
gcccacagaucaacuggaa

SEQ ID NO: 341073 - RNA, 19 nt, Homo sapiens
  misc_RNA (1)...(19): siRNA sense strand
gaagacugcucagggcuau

SEQ ID NO: 341074 - RNA, 19 nt, Homo sapiens
  misc_RNA (1)...(19): siRNA sense strand
gacccagucuauuaaagaa

SEQ ID NO: 341075 - RNA, 19 nt, Homo sapiens
  misc_RNA (1)...(19): siRNA sense strand
acuagaagcuguguuagaa

SEQ ID NO: 341076 - RNA, 19 nt, Homo sapiens
  misc_RNA (1)...(19): siRNA sense strand
caugcaacauaaccugaua

SEQ ID NO: 341077 - RNA, 19 nt, Homo sapiens
  misc_RNA (1)...(19): siRNA sense strand
gcuggacaccuaccugaua

SEQ ID NO: 341078 - RNA, 19 nt, Homo sapiens
  misc_RNA (1)...(19): siRNA sense strand
cagaucaacuggaauggau

SEQ ID NO: 341079 - RNA, 19 nt, Homo sapiens
  misc_RNA (1)...(19): siRNA sense strand
gcaggaaauggcugaacua

SEQ ID NO: 341080 - RNA, 19 nt, Homo sapiens
  misc_RNA (1)...(19): siRNA sense strand
ccacagaucaacuggaaug

SEQ ID NO: 341081 - RNA, 19 nt, Homo sapiens
  misc_RNA (1)...(19): siRNA sense strand
caacaugcccacagaucaa

SEQ ID NO: 341082 - RNA, 19 nt, Homo sapiens
  misc_RNA (1)...(19): siRNA sense strand
ucaccaacaugcccacaga

SEQ ID NO: 341083 - RNA, 19 nt, Homo sapiens
  misc_RNA (1)...(19): siRNA sense strand
cagaggagauguggucaau

SEQ ID NO: 341084 - RNA, 19 nt, Homo sapiens
  misc_RNA (1)...(19): siRNA sense strand
caauugggcagauguguga

SEQ ID NO: 341085 - RNA, 19 nt, Homo sapiens
  misc_RNA (1)...(19): siRNA sense strand
ggagauguggucaauggaa

SEQ ID NO: 341086 - RNA, 19 nt, Homo sapiens
  misc_RNA (1)...(19): siRNA sense strand
guacagcuguguggugcuu

SEQ ID NO: 341087 - RNA, 19 nt, Homo sapiens
  misc_RNA (1)...(19): siRNA sense strand
ccaaagcgagcaagagaau

SEQ ID NO: 341088 - RNA, 19 nt, Homo sapiens
  misc_RNA (1)...(19): siRNA sense strand
gcuaugggcccuucaccaa

SEQ ID NO: 341089 - RNA, 19 nt, Homo sapiens
  misc_RNA (1)...(19): siRNA sense strand
gaaugagcaugauuuugaa

SEQ ID NO: 341090 - RNA, 19 nt, Homo sapiens
  misc_RNA (1)...(19): siRNA sense strand
ucagggcuauccucucaga

SEQ ID NO: 341091 - RNA, 19 nt, Homo sapiens
  misc_RNA (1)...(19): siRNA sense strand
agggauaccaugcaacaua

SEQ ID NO: 341092 - RNA, 19 nt, Homo sapiens
  misc_RNA (1)...(19): siRNA sense strand
gcuagaaaucuguugcuau

SEQ ID NO: 341093 - RNA, 19 nt, Homo sapiens
  misc_RNA (1)...(19): siRNA sense strand
ugaaugagcaugauuuuga

SEQ ID NO: 341094 - RNA, 19 nt, Homo sapiens
  misc_RNA (1)...(19): siRNA sense strand
ggcuagaaaucuguugcua

SEQ ID NO: 341095 - RNA, 19 nt, Homo sapiens
  misc_RNA (1)...(19): siRNA sense strand
ugaaacaagcgucucugaa

SEQ ID NO: 341096 - RNA, 19 nt, Homo sapiens
  misc_RNA (1)...(19): siRNA sense strand
aacauaaccugauaaagcu

SEQ ID NO: 341097 - RNA, 19 nt, Homo sapiens
  misc_RNA (1)...(19): siRNA sense strand
ugacccagucuauuaaaga

SEQ ID NO: 341098 - RNA, 19 nt, Homo sapiens
  misc_RNA (1)...(19): siRNA sense strand
gaacuagaagcuguguuag

SEQ ID NO: 341099 - RNA, 19 nt, Homo sapiens
  misc_RNA (1)...(19): siRNA sense strand
gugaaacaagcgucucuga

SEQ ID NO: 341100 - RNA, 19 nt, Homo sapiens
  misc_RNA (1)...(19): siRNA sense strand
ccaacaugcccacagauca

SEQ ID NO: 341101 - RNA, 19 nt, Homo sapiens
  misc_RNA (1)...(19): siRNA sense strand
uaugggcccuucaccaaca

SEQ ID NO: 341102 - RNA, 19 nt, Homo sapiens
  misc_RNA (1)...(19): siRNA sense strand
guccaaagcgagcaagaga

SEQ ID NO: 341103 - RNA, 19 nt, Homo sapiens
  misc_RNA (1)...(19): siRNA sense strand
cagaacaaagcacaucaga

SEQ ID NO: 341104 - RNA, 19 nt, Homo sapiens
  misc_RNA (1)...(19): siRNA sense strand
ccugcgaaauccagaacaa

SEQ ID NO: 341105 - RNA, 19 nt, Homo sapiens
  misc_RNA (1)...(19): siRNA sense strand
gaaaccaccaagguccaaa

SEQ ID NO: 341106 - RNA, 19 nt, Homo sapiens
  misc_RNA (1)...(19): siRNA sense strand
gauaaagcuccagcaggaa

SEQ ID NO: 341107 - RNA, 19 nt, Homo sapiens
  misc_RNA (1)...(19): siRNA sense strand
aaggagcuuucaucauuca

SEQ ID NO: 341108 - RNA, 19 nt, Homo sapiens
  misc_RNA (1)...(19): siRNA sense strand
ggugugagagugaaacaag

SEQ ID NO: 341109 - RNA, 19 nt, Homo sapiens
  misc_RNA (1)...(19): siRNA sense strand
gaaauggcugaacuagaag

SEQ ID NO: 341110 - RNA, 19 nt, Homo sapiens
  misc_RNA (1)...(19): siRNA sense strand
auaaagcuccagcaggaaa

SEQ ID NO: 341111 - RNA, 19 nt, Homo sapiens
  misc_RNA (1)...(19): siRNA sense strand
acccuuccaucauaaguga

SEQ ID NO: 341112 - RNA, 19 nt, Homo sapiens
  misc_RNA (1)...(19): siRNA sense strand
ggugacccagucuauuaaa

SEQ ID NO: 341113 - RNA, 19 nt, Homo sapiens
  misc_RNA (1)...(19): siRNA sense strand
cccagucuauuaaagaaag

SEQ ID NO: 341114 - RNA, 19 nt, Homo sapiens
  misc_RNA (1)...(19): siRNA sense strand
caucugggugugagaguga

SEQ ID NO: 341115 - RNA, 19 nt, Homo sapiens
  misc_RNA (1)...(19): siRNA sense strand
ccagucuauuaaagaaaga

SEQ ID NO: 341116 - RNA, 19 nt, Homo sapiens
  misc_RNA (1)...(19): siRNA sense strand
cgaaauccagaacaaagca

SEQ ID NO: 341117 - RNA, 19 nt, Homo sapiens
  misc_RNA (1)...(19): siRNA sense strand
aagagaaucccaggacaga

SEQ ID NO: 341118 - RNA, 19 nt, Homo sapiens
  misc_RNA (1)...(19): siRNA sense strand
gauguggucaauggaagaa

SEQ ID NO: 341119 - RNA, 19 nt, Homo sapiens
  misc_RNA (1)...(19): siRNA sense strand
ggaccugcgaaauccagaa

SEQ ID NO: 341120 - RNA, 19 nt, Homo sapiens
  misc_RNA (1)...(19): siRNA sense strand
gagcaugauuuugaaguca

SEQ ID NO: 341121 - RNA, 19 nt, Homo sapiens
  misc_RNA (1)...(19): siRNA sense strand
gugacccagucuauuaaag

SEQ ID NO: 341122 - RNA, 19 nt, Homo sapiens
  misc_RNA (1)...(19): siRNA sense strand
agaacaaagcacaucagaa

SEQ ID NO: 341123 - RNA, 19 nt, Homo sapiens
  misc_RNA (1)...(19): siRNA sense strand
uggaagaaaccaccaaggu

SEQ ID NO: 341124 - RNA, 19 nt, Homo sapiens
  misc_RNA (1)...(19): siRNA sense strand
ucaacuggaauggauggua

SEQ ID NO: 341125 - RNA, 19 nt, Homo sapiens
  misc_RNA (1)...(19): siRNA sense strand
ggaaauggcugaacuagaa

SEQ ID NO: 341126 - RNA, 19 nt, Homo sapiens
  misc_RNA (1)...(19): siRNA sense strand
gaacaaagcacaucagaaa

SEQ ID NO: 341127 - RNA, 19 nt, Homo sapiens
  misc_RNA (1)...(19): siRNA sense strand
cagcuacccuuccaucaua

SEQ ID NO: 341128 - RNA, 19 nt, Homo sapiens
  misc_RNA (1)...(19): siRNA sense strand
gggauaccaugcaacauaa

SEQ ID NO: 341129 - RNA, 19 nt, Homo sapiens
  misc_RNA (1)...(19): siRNA sense strand
gaggagauguggucaaugg

SEQ ID NO: 341130 - RNA, 19 nt, Homo sapiens
  misc_RNA (1)...(19): siRNA sense strand
gaaggagcuuucaucauuc

SEQ ID NO: 341131 - RNA, 19 nt, Homo sapiens
  misc_RNA (1)...(19): siRNA sense strand
cuagaaaucuguugcuaug

SEQ ID NO: 341132 - RNA, 19 nt, Homo sapiens
  misc_RNA (1)...(19): siRNA sense strand
gcucagggcuauccucuca

SEQ ID NO: 341133 - RNA, 19 nt, Homo sapiens
  misc_RNA (1)...(19): siRNA sense strand
aaacaagcgucucugaaga

SEQ ID NO: 341134 - RNA, 19 nt, Homo sapiens
  misc_RNA (1)...(19): siRNA sense strand
caacauaaccugauaaagc

SEQ ID NO: 341135 - RNA, 19 nt, Homo sapiens
  misc_RNA (1)...(19): siRNA sense strand
gaaacaagcgucucugaag

SEQ ID NO: 341136 - RNA, 19 nt, Homo sapiens
  misc_RNA (1)...(19): siRNA sense strand
gcagagggauaccaugcaa

SEQ ID NO: 341137 - RNA, 19 nt, Homo sapiens
  misc_RNA (1)...(19): siRNA sense strand
ugaacuagaagcuguguua

SEQ ID NO: 341138 - RNA, 19 nt, Homo sapiens
  misc_RNA (1)...(19): siRNA sense strand
gagaaucccaggacagaaa

SEQ ID NO: 341139 - RNA, 19 nt, Homo sapiens
  misc_RNA (1)...(19): siRNA sense strand
gcccacagaucaacuggaa

SEQ ID NO: 341140 - RNA, 19 nt, Homo sapiens
  misc_RNA (1)...(19): siRNA sense strand
gaagacugcucagggcuau

SEQ ID NO: 341141 - RNA, 19 nt, Homo sapiens
  misc_RNA (1)...(19): siRNA sense strand
gacccagucuauuaaagaa

SEQ ID NO: 341142 - RNA, 19 nt, Homo sapiens
  misc_RNA (1)...(19): siRNA sense strand
acuagaagcuguguuagaa

SEQ ID NO: 341143 - RNA, 19 nt, Homo sapiens
  misc_RNA (1)...(19): siRNA sense strand
caugcaacauaaccugaua

SEQ ID NO: 341144 - RNA, 19 nt, Homo sapiens
  misc_RNA (1)...(19): siRNA sense strand
gcuggacaccuaccugaua

SEQ ID NO: 341145 - RNA, 19 nt, Homo sapiens
  misc_RNA (1)...(19): siRNA sense strand
cagaucaacuggaauggau

SEQ ID NO: 341146 - RNA, 19 nt, Homo sapiens
  misc_RNA (1)...(19): siRNA sense strand
gcaggaaauggcugaacua

SEQ ID NO: 341147 - RNA, 19 nt, Homo sapiens
  misc_RNA (1)...(19): siRNA sense strand
ccacagaucaacuggaaug

SEQ ID NO: 341148 - RNA, 19 nt, Homo sapiens
  misc_RNA (1)...(19): siRNA sense strand
caacaugcccacagaucaa

SEQ ID NO: 341149 - RNA, 19 nt, Homo sapiens
  misc_RNA (1)...(19): siRNA sense strand
ucaccaacaugcccacaga

SEQ ID NO: 341150 - RNA, 19 nt, Homo sapiens
  misc_RNA (1)...(19): siRNA sense strand
cagaggagauguggucaau

SEQ ID NO: 341151 - RNA, 19 nt, Homo sapiens
  misc_RNA (1)...(19): siRNA sense strand
caauugggcagauguguga

SEQ ID NO: 341152 - RNA, 19 nt, Homo sapiens
  misc_RNA (1)...(19): siRNA sense strand
ggagauguggucaauggaa

SEQ ID NO: 341153 - RNA, 19 nt, Homo sapiens
  misc_RNA (1)...(19): siRNA sense strand
guacagcuguguggugcuu

SEQ ID NO: 341154 - RNA, 19 nt, Homo sapiens
  misc_RNA (1)...(19): siRNA sense strand
ccaaagcgagcaagagaau

SEQ ID NO: 341155 - RNA, 19 nt, Homo sapiens
  misc_RNA (1)...(19): siRNA sense strand
gcuaugggcccuucaccaa

SEQ ID NO: 341156 - RNA, 19 nt, Homo sapiens
  misc_RNA (1)...(19): siRNA sense strand
gaaugagcaugauuuugaa

SEQ ID NO: 341157 - RNA, 19 nt, Homo sapiens
  misc_RNA (1)...(19): siRNA sense strand
ucagggcuauccucucaga

SEQ ID NO: 341158 - RNA, 19 nt, Homo sapiens
  misc_RNA (1)...(19): siRNA sense strand
agggauaccaugcaacaua

SEQ ID NO: 341159 - RNA, 19 nt, Homo sapiens
  misc_RNA (1)...(19): siRNA sense strand
gcuagaaaucuguugcuau

SEQ ID NO: 341160 - RNA, 19 nt, Homo sapiens
  misc_RNA (1)...(19): siRNA sense strand
ugaaugagcaugauuuuga

SEQ ID NO: 341161 - RNA, 19 nt, Homo sapiens
  misc_RNA (1)...(19): siRNA sense strand
ggcuagaaaucuguugcua

SEQ ID NO: 341162 - RNA, 19 nt, Homo sapiens
  misc_RNA (1)...(19): siRNA sense strand
ugaaacaagcgucucugaa

SEQ ID NO: 341163 - RNA, 19 nt, Homo sapiens
  misc_RNA (1)...(19): siRNA sense strand
aacauaaccugauaaagcu

SEQ ID NO: 341164 - RNA, 19 nt, Homo sapiens
  misc_RNA (1)...(19): siRNA sense strand
ugacccagucuauuaaaga

SEQ ID NO: 341165 - RNA, 19 nt, Homo sapiens
  misc_RNA (1)...(19): siRNA sense strand
gaacuagaagcuguguuag

SEQ ID NO: 341166 - RNA, 19 nt, Homo sapiens
  misc_RNA (1)...(19): siRNA sense strand
gugaaacaagcgucucuga

SEQ ID NO: 341167 - RNA, 19 nt, Homo sapiens
  misc_RNA (1)...(19): siRNA sense strand
ccaacaugcccacagauca

SEQ ID NO: 341168 - RNA, 19 nt, Homo sapiens
  misc_RNA (1)...(19): siRNA sense strand
uaugggcccuucaccaaca

SEQ ID NO: 341169 - RNA, 19 nt, Homo sapiens
  misc_RNA (1)...(19): siRNA sense strand
guccaaagcgagcaagaga

SEQ ID NO: 341170 - RNA, 19 nt, Homo sapiens
  misc_RNA (1)...(19): siRNA sense strand
cagaacaaagcacaucaga

SEQ ID NO: 341171 - RNA, 19 nt, Homo sapiens
  misc_RNA (1)...(19): siRNA sense strand
ccugcgaaauccagaacaa

SEQ ID NO: 341172 - RNA, 19 nt, Homo sapiens
  misc_RNA (1)...(19): siRNA sense strand
gaaaccaccaagguccaaa

SEQ ID NO: 341173 - RNA, 19 nt, Homo sapiens
  misc_RNA (1)...(19): siRNA sense strand
gauaaagcuccagcaggaa

SEQ ID NO: 341174 - RNA, 19 nt, Homo sapiens
  misc_RNA (1)...(19): siRNA sense strand
aaggagcuuucaucauuca

SEQ ID NO: 341175 - RNA, 19 nt, Homo sapiens
  misc_RNA (1)...(19): siRNA sense strand
ggugugagagugaaacaag

SEQ ID NO: 341176 - RNA, 19 nt, Homo sapiens
  misc_RNA (1)...(19): siRNA sense strand
gaaauggcugaacuagaag

SEQ ID NO: 341177 - RNA, 19 nt, Homo sapiens
  misc_RNA (1)...(19): siRNA sense strand
auaaagcuccagcaggaaa

SEQ ID NO: 341178 - RNA, 19 nt, Homo sapiens
  misc_RNA (1)...(19): siRNA sense strand
acccuuccaucauaaguga

SEQ ID NO: 341179 - RNA, 19 nt, Homo sapiens
  misc_RNA (1)...(19): siRNA sense strand
ggugacccagucuauuaaa

SEQ ID NO: 341180 - RNA, 19 nt, Homo sapiens
  misc_RNA (1)...(19): siRNA sense strand
cccagucuauuaaagaaag

SEQ ID NO: 341181 - RNA, 19 nt, Homo sapiens
  misc_RNA (1)...(19): siRNA sense strand
caucugggugugagaguga

SEQ ID NO: 341182 - RNA, 19 nt, Homo sapiens
  misc_RNA (1)...(19): siRNA sense strand
ccagucuauuaaagaaaga

SEQ ID NO: 341183 - RNA, 19 nt, Homo sapiens
  misc_RNA (1)...(19): siRNA sense strand
cgaaauccagaacaaagca

SEQ ID NO: 341184 - RNA, 19 nt, Homo sapiens
  misc_RNA (1)...(19): siRNA sense strand
aagagaaucccaggacaga

SEQ ID NO: 341185 - RNA, 19 nt, Homo sapiens
  misc_RNA (1)...(19): siRNA sense strand
gauguggucaauggaagaa

SEQ ID NO: 341186 - RNA, 19 nt, Homo sapiens
  misc_RNA (1)...(19): siRNA sense strand
ggaccugcgaaauccagaa

SEQ ID NO: 341187 - RNA, 19 nt, Homo sapiens
  misc_RNA (1)...(19): siRNA sense strand
gagcaugauuuugaaguca

SEQ ID NO: 341188 - RNA, 19 nt, Homo sapiens
  misc_RNA (1)...(19): siRNA sense strand
gugacccagucuauuaaag

SEQ ID NO: 341189 - RNA, 19 nt, Homo sapiens
  misc_RNA (1)...(19): siRNA sense strand
agaacaaagcacaucagaa

SEQ ID NO: 341190 - RNA, 19 nt, Homo sapiens
  misc_RNA (1)...(19): siRNA sense strand
uggaagaaaccaccaaggu

SEQ ID NO: 341191 - RNA, 19 nt, Homo sapiens
  misc_RNA (1)...(19): siRNA sense strand
ucaacuggaauggauggua

SEQ ID NO: 341192 - RNA, 19 nt, Homo sapiens
  misc_RNA (1)...(19): siRNA sense strand
ggaaauggcugaacuagaa

SEQ ID NO: 341193 - RNA, 19 nt, Homo sapiens
  misc_RNA (1)...(19): siRNA sense strand
gaacaaagcacaucagaaa

SEQ ID NO: 341194 - RNA, 19 nt, Homo sapiens
  misc_RNA (1)...(19): siRNA sense strand
cagcuacccuuccaucaua

SEQ ID NO: 341195 - RNA, 19 nt, Homo sapiens
  misc_RNA (1)...(19): siRNA sense strand
gggauaccaugcaacauaa

SEQ ID NO: 341196 - RNA, 19 nt, Homo sapiens
  misc_RNA (1)...(19): siRNA sense strand
gaggagauguggucaaugg

SEQ ID NO: 341197 - RNA, 19 nt, Homo sapiens
  misc_RNA (1)...(19): siRNA sense strand
gaaggagcuuucaucauuc

SEQ ID NO: 341198 - RNA, 19 nt, Homo sapiens
  misc_RNA (1)...(19): siRNA sense strand
cuagaaaucuguugcuaug

SEQ ID NO: 341199 - RNA, 19 nt, Homo sapiens
  misc_RNA (1)...(19): siRNA sense strand
gcucagggcuauccucuca

SEQ ID NO: 341200 - RNA, 19 nt, Homo sapiens
  misc_RNA (1)...(19): siRNA sense strand
aaacaagcgucucugaaga

SEQ ID NO: 341201 - RNA, 19 nt, Homo sapiens
  misc_RNA (1)...(19): siRNA sense strand
caacauaaccugauaaagc

SEQ ID NO: 341202 - RNA, 19 nt, Homo sapiens
  misc_RNA (1)...(19): siRNA sense strand
gaaacaagcgucucugaag

SEQ ID NO: 341203 - RNA, 19 nt, Homo sapiens
  misc_RNA (1)...(19): siRNA sense strand
gcagagggauaccaugcaa

SEQ ID NO: 341204 - RNA, 19 nt, Homo sapiens
  misc_RNA (1)...(19): siRNA sense strand
ugaacuagaagcuguguua

SEQ ID NO: 341205 - RNA, 19 nt, Homo sapiens
  misc_RNA (1)...(19): siRNA sense strand
gagaaucccaggacagaaa

SEQ ID NO: 341206 - RNA, 19 nt, Homo sapiens
  misc_RNA (1)...(19): siRNA sense strand
gcccacagaucaacuggaa

SEQ ID NO: 341207 - RNA, 19 nt, Homo sapiens
  misc_RNA (1)...(19): siRNA sense strand
gaagacugcucagggcuau

SEQ ID NO: 341208 - RNA, 19 nt, Homo sapiens
  misc_RNA (1)...(19): siRNA sense strand
gacccagucuauuaaagaa

SEQ ID NO: 341209 - RNA, 19 nt, Homo sapiens
  misc_RNA (1)...(19): siRNA sense strand
acuagaagcuguguuagaa

SEQ ID NO: 341210 - RNA, 19 nt, Homo sapiens
  misc_RNA (1)...(19): siRNA sense strand
caugcaacauaaccugaua

SEQ ID NO: 341211 - RNA, 19 nt, Homo sapiens
  misc_RNA (1)...(19): siRNA sense strand
gcuggacaccuaccugaua

SEQ ID NO: 341212 - RNA, 19 nt, Homo sapiens
  misc_RNA (1)...(19): siRNA sense strand
cagaucaacuggaauggau

SEQ ID NO: 341213 - RNA, 19 nt, Homo sapiens
  misc_RNA (1)...(19): siRNA sense strand
gcaggaaauggcugaacua

SEQ ID NO: 341214 - RNA, 19 nt, Homo sapiens
  misc_RNA (1)...(19): siRNA sense strand
ccacagaucaacuggaaug

SEQ ID NO: 341215 - RNA, 19 nt, Homo sapiens
  misc_RNA (1)...(19): siRNA sense strand
caacaugcccacagaucaa

SEQ ID NO: 341216 - RNA, 19 nt, Homo sapiens
  misc_RNA (1)...(19): siRNA sense strand
ucaccaacaugcccacaga

SEQ ID NO: 341217 - RNA, 19 nt, Homo sapiens
  misc_RNA (1)...(19): siRNA sense strand
cagaggagauguggucaau

SEQ ID NO: 341218 - RNA, 19 nt, Homo sapiens
  misc_RNA (1)...(19): siRNA sense strand
caauugggcagauguguga

SEQ ID NO: 341219 - RNA, 19 nt, Homo sapiens
  misc_RNA (1)...(19): siRNA sense strand
ggagauguggucaauggaa

SEQ ID NO: 341220 - RNA, 19 nt, Homo sapiens
  misc_RNA (1)...(19): siRNA sense strand
guacagcuguguggugcuu

SEQ ID NO: 341221 - RNA, 19 nt, Homo sapiens
  misc_RNA (1)...(19): siRNA sense strand
ccaaagcgagcaagagaau

SEQ ID NO: 341222 - RNA, 19 nt, Homo sapiens
  misc_RNA (1)...(19): siRNA sense strand
gcuaugggcccuucaccaa

SEQ ID NO: 341223 - RNA, 19 nt, Homo sapiens
  misc_RNA (1)...(19): siRNA sense strand
gaaugagcaugauuuugaa

SEQ ID NO: 341224 - RNA, 19 nt, Homo sapiens
  misc_RNA (1)...(19): siRNA sense strand
ucagggcuauccucucaga

SEQ ID NO: 341225 - RNA, 19 nt, Homo sapiens
  misc_RNA (1)...(19): siRNA sense strand
agggauaccaugcaacaua

SEQ ID NO: 341226 - RNA, 19 nt, Homo sapiens
  misc_RNA (1)...(19): siRNA sense strand
gcuagaaaucuguugcuau

SEQ ID NO: 341227 - RNA, 19 nt, Homo sapiens
  misc_RNA (1)...(19): siRNA sense strand
ugaaugagcaugauuuuga

SEQ ID NO: 341228 - RNA, 19 nt, Homo sapiens
  misc_RNA (1)...(19): siRNA sense strand
ggcuagaaaucuguugcua

SEQ ID NO: 341229 - RNA, 19 nt, Homo sapiens
  misc_RNA (1)...(19): siRNA sense strand
ugaaacaagcgucucugaa

SEQ ID NO: 341230 - RNA, 19 nt, Homo sapiens
  misc_RNA (1)...(19): siRNA sense strand
aacauaaccugauaaagcu

SEQ ID NO: 341231 - RNA, 19 nt, Homo sapiens
  misc_RNA (1)...(19): siRNA sense strand
ugacccagucuauuaaaga

SEQ ID NO: 341232 - RNA, 19 nt, Homo sapiens
  misc_RNA (1)...(19): siRNA sense strand
gaacuagaagcuguguuag

SEQ ID NO: 341233 - RNA, 19 nt, Homo sapiens
  misc_RNA (1)...(19): siRNA sense strand
gugaaacaagcgucucuga

SEQ ID NO: 341234 - RNA, 19 nt, Homo sapiens
  misc_RNA (1)...(19): siRNA sense strand
ccaacaugcccacagauca

SEQ ID NO: 341235 - RNA, 19 nt, Homo sapiens
  misc_RNA (1)...(19): siRNA sense strand
uaugggcccuucaccaaca

SEQ ID NO: 341236 - RNA, 19 nt, Homo sapiens
  misc_RNA (1)...(19): siRNA sense strand
guccaaagcgagcaagaga

SEQ ID NO: 341237 - RNA, 19 nt, Homo sapiens
  misc_RNA (1)...(19): siRNA sense strand
cagaacaaagcacaucaga

SEQ ID NO: 341238 - RNA, 19 nt, Homo sapiens
  misc_RNA (1)...(19): siRNA sense strand
ccugcgaaauccagaacaa

SEQ ID NO: 341239 - RNA, 19 nt, Homo sapiens
  misc_RNA (1)...(19): siRNA sense strand
gaaaccaccaagguccaaa

SEQ ID NO: 341240 - RNA, 19 nt, Homo sapiens
  misc_RNA (1)...(19): siRNA sense strand
gauaaagcuccagcaggaa

SEQ ID NO: 341241 - RNA, 19 nt, Homo sapiens
  misc_RNA (1)...(19): siRNA sense strand
aaggagcuuucaucauuca

SEQ ID NO: 341242 - RNA, 19 nt, Homo sapiens
  misc_RNA (1)...(19): siRNA sense strand
ggugugagagugaaacaag

SEQ ID NO: 341243 - RNA, 19 nt, Homo sapiens
  misc_RNA (1)...(19): siRNA sense strand
gaaauggcugaacuagaag

SEQ ID NO: 341244 - RNA, 19 nt, Homo sapiens
  misc_RNA (1)...(19): siRNA sense strand
auaaagcuccagcaggaaa

SEQ ID NO: 341245 - RNA, 19 nt, Homo sapiens
  misc_RNA (1)...(19): siRNA sense strand
acccuuccaucauaaguga

SEQ ID NO: 341246 - RNA, 19 nt, Homo sapiens
  misc_RNA (1)...(19): siRNA sense strand
ggugacccagucuauuaaa

SEQ ID NO: 341247 - RNA, 19 nt, Homo sapiens
  misc_RNA (1)...(19): siRNA sense strand
cccagucuauuaaagaaag

SEQ ID NO: 341248 - RNA, 19 nt, Homo sapiens
  misc_RNA (1)...(19): siRNA sense strand
caucugggugugagaguga

SEQ ID NO: 341249 - RNA, 19 nt, Homo sapiens
  misc_RNA (1)...(19): siRNA sense strand
ccagucuauuaaagaaaga

SEQ ID NO: 341250 - RNA, 19 nt, Homo sapiens
  misc_RNA (1)...(19): siRNA sense strand
cgaaauccagaacaaagca

SEQ ID NO: 341251 - RNA, 19 nt, Homo sapiens
  misc_RNA (1)...(19): siRNA sense strand
aagagaaucccaggacaga

SEQ ID NO: 341252 - RNA, 19 nt, Homo sapiens
  misc_RNA (1)...(19): siRNA sense strand
gauguggucaauggaagaa

SEQ ID NO: 341253 - RNA, 19 nt, Homo sapiens
  misc_RNA (1)...(19): siRNA sense strand
ggaccugcgaaauccagaa

SEQ ID NO: 341254 - RNA, 19 nt, Homo sapiens
  misc_RNA (1)...(19): siRNA sense strand
gagcaugauuuugaaguca

SEQ ID NO: 341255 - RNA, 19 nt, Homo sapiens
  misc_RNA (1)...(19): siRNA sense strand
gugacccagucuauuaaag

SEQ ID NO: 341256 - RNA, 19 nt, Homo sapiens
  misc_RNA (1)...(19): siRNA sense strand
agaacaaagcacaucagaa

SEQ ID NO: 341257 - RNA, 19 nt, Homo sapiens
  misc_RNA (1)...(19): siRNA sense strand
uggaagaaaccaccaaggu

SEQ ID NO: 341258 - RNA, 19 nt, Homo sapiens
  misc_RNA (1)...(19): siRNA sense strand
ucaacuggaauggauggua

SEQ ID NO: 341259 - RNA, 19 nt, Homo sapiens
  misc_RNA (1)...(19): siRNA sense strand
ggaaauggcugaacuagaa

SEQ ID NO: 341260 - RNA, 19 nt, Homo sapiens
  misc_RNA (1)...(19): siRNA sense strand
gaacaaagcacaucagaaa

SEQ ID NO: 341261 - RNA, 19 nt, Homo sapiens
  misc_RNA (1)...(19): siRNA sense strand
cagcuacccuuccaucaua

SEQ ID NO: 341262 - RNA, 19 nt, Homo sapiens
  misc_RNA (1)...(19): siRNA sense strand
gggauaccaugcaacauaa

SEQ ID NO: 341263 - RNA, 19 nt, Homo sapiens
  misc_RNA (1)...(19): siRNA sense strand
gaggagauguggucaaugg

SEQ ID NO: 341264 - RNA, 19 nt, Homo sapiens
  misc_RNA (1)...(19): siRNA sense strand
gaaggagcuuucaucauuc

SEQ ID NO: 341265 - RNA, 19 nt, Homo sapiens
  misc_RNA (1)...(19): siRNA sense strand
cuagaaaucuguugcuaug

SEQ ID NO: 341266 - RNA, 19 nt, Homo sapiens
  misc_RNA (1)...(19): siRNA sense strand
gcucagggcuauccucuca

SEQ ID NO: 341267 - RNA, 19 nt, Homo sapiens
  misc_RNA (1)...(19): siRNA sense strand
aaacaagcgucucugaaga

SEQ ID NO: 341268 - RNA, 19 nt, Homo sapiens
  misc_RNA (1)...(19): siRNA sense strand
caacauaaccugauaaagc

SEQ ID NO: 341269 - RNA, 19 nt, Homo sapiens
  misc_RNA (1)...(19): siRNA sense strand
gaaacaagcgucucugaag

SEQ ID NO: 341270 - RNA, 19 nt, Homo sapiens
  misc_RNA (1)...(19): siRNA sense strand
gcagagggauaccaugcaa

SEQ ID NO: 341271 - RNA, 19 nt, Homo sapiens
  misc_RNA (1)...(19): siRNA sense strand
ugaacuagaagcuguguua

SEQ ID NO: 341272 - RNA, 19 nt, Homo sapiens
  misc_RNA (1)...(19): siRNA sense strand
gagaaucccaggacagaaa

SEQ ID NO: 341273 - RNA, 19 nt, Homo sapiens
  misc_RNA (1)...(19): siRNA sense strand
gcccacagaucaacuggaa

SEQ ID NO: 341274 - RNA, 19 nt, Homo sapiens
  misc_RNA (1)...(19): siRNA sense strand
gaagacugcucagggcuau

SEQ ID NO: 341275 - RNA, 19 nt, Homo sapiens
  misc_RNA (1)...(19): siRNA sense strand
gacccagucuauuaaagaa

SEQ ID NO: 341276 - RNA, 19 nt, Homo sapiens
  misc_RNA (1)...(19): siRNA sense strand
acuagaagcuguguuagaa

SEQ ID NO: 341277 - RNA, 19 nt, Homo sapiens
  misc_RNA (1)...(19): siRNA sense strand
caugcaacauaaccugaua

SEQ ID NO: 341278 - RNA, 19 nt, Homo sapiens
  misc_RNA (1)...(19): siRNA sense strand
gcuggacaccuaccugaua

SEQ ID NO: 341279 - RNA, 19 nt, Homo sapiens
  misc_RNA (1)...(19): siRNA sense strand
cagaucaacuggaauggau

SEQ ID NO: 341280 - RNA, 19 nt, Homo sapiens
  misc_RNA (1)...(19): siRNA sense strand
gcaggaaauggcugaacua

SEQ ID NO: 341281 - RNA, 19 nt, Homo sapiens
  misc_RNA (1)...(19): siRNA sense strand
ccacagaucaacuggaaug

SEQ ID NO: 341282 - RNA, 19 nt, Homo sapiens
  misc_RNA (1)...(19): siRNA sense strand
caacaugcccacagaucaa

SEQ ID NO: 341283 - RNA, 19 nt, Homo sapiens
  misc_RNA (1)...(19): siRNA sense strand
ucaccaacaugcccacaga

SEQ ID NO: 341284 - RNA, 19 nt, Homo sapiens
  misc_RNA (1)...(19): siRNA sense strand
cagaggagauguggucaau

SEQ ID NO: 341285 - RNA, 19 nt, Homo sapiens
  misc_RNA (1)...(19): siRNA sense strand
caauugggcagauguguga

SEQ ID NO: 341286 - RNA, 19 nt, Homo sapiens
  misc_RNA (1)...(19): siRNA sense strand
ggagauguggucaauggaa

SEQ ID NO: 341287 - RNA, 19 nt, Homo sapiens
  misc_RNA (1)...(19): siRNA sense strand
guacagcuguguggugcuu

SEQ ID NO: 341288 - RNA, 19 nt, Homo sapiens
  misc_RNA (1)...(19): siRNA sense strand
ccaaagcgagcaagagaau

SEQ ID NO: 341289 - RNA, 19 nt, Homo sapiens
  misc_RNA (1)...(19): siRNA sense strand
gcuaugggcccuucaccaa

SEQ ID NO: 341290 - RNA, 19 nt, Homo sapiens
  misc_RNA (1)...(19): siRNA sense strand
gaaugagcaugauuuugaa

SEQ ID NO: 341291 - RNA, 19 nt, Homo sapiens
  misc_RNA (1)...(19): siRNA sense strand
ucagggcuauccucucaga

SEQ ID NO: 341292 - RNA, 19 nt, Homo sapiens
  misc_RNA (1)...(19): siRNA sense strand
agggauaccaugcaacaua

SEQ ID NO: 341293 - RNA, 19 nt, Homo sapiens
  misc_RNA (1)...(19): siRNA sense strand
gcuagaaaucuguugcuau

SEQ ID NO: 341294 - RNA, 19 nt, Homo sapiens
  misc_RNA (1)...(19): siRNA sense strand
ugaaugagcaugauuuuga

SEQ ID NO: 341295 - RNA, 19 nt, Homo sapiens
  misc_RNA (1)...(19): siRNA sense strand
ggcuagaaaucuguugcua

SEQ ID NO: 341296 - RNA, 19 nt, Homo sapiens
  misc_RNA (1)...(19): siRNA sense strand
ugaaacaagcgucucugaa

SEQ ID NO: 341297 - RNA, 19 nt, Homo sapiens
  misc_RNA (1)...(19): siRNA sense strand
aacauaaccugauaaagcu

SEQ ID NO: 341298 - RNA, 19 nt, Homo sapiens
  misc_RNA (1)...(19): siRNA sense strand
ugacccagucuauuaaaga

SEQ ID NO: 341299 - RNA, 19 nt, Homo sapiens
  misc_RNA (1)...(19): siRNA sense strand
gaacuagaagcuguguuag

SEQ ID NO: 341300 - RNA, 19 nt, Homo sapiens
  misc_RNA (1)...(19): siRNA sense strand
gugaaacaagcgucucuga

SEQ ID NO: 341301 - RNA, 19 nt, Homo sapiens
  misc_RNA (1)...(19): siRNA sense strand
ccaacaugcccacagauca

SEQ ID NO: 341302 - RNA, 19 nt, Homo sapiens
  misc_RNA (1)...(19): siRNA sense strand
uaugggcccuucaccaaca

SEQ ID NO: 341303 - RNA, 19 nt, Homo sapiens
  misc_RNA (1)...(19): siRNA sense strand
guccaaagcgagcaagaga

SEQ ID NO: 341304 - RNA, 19 nt, Homo sapiens
  misc_RNA (1)...(19): siRNA sense strand
cagaacaaagcacaucaga

SEQ ID NO: 341305 - RNA, 19 nt, Homo sapiens
  misc_RNA (1)...(19): siRNA sense strand
ccugcgaaauccagaacaa

SEQ ID NO: 341306 - RNA, 19 nt, Homo sapiens
  misc_RNA (1)...(19): siRNA sense strand
gaaaccaccaagguccaaa

SEQ ID NO: 341307 - RNA, 19 nt, Homo sapiens
  misc_RNA (1)...(19): siRNA sense strand
gauaaagcuccagcaggaa

SEQ ID NO: 341308 - RNA, 19 nt, Homo sapiens
  misc_RNA (1)...(19): siRNA sense strand
aaggagcuuucaucauuca

SEQ ID NO: 341309 - RNA, 19 nt, Homo sapiens
  misc_RNA (1)...(19): siRNA sense strand
ggugugagagugaaacaag

SEQ ID NO: 341310 - RNA, 19 nt, Homo sapiens
  misc_RNA (1)...(19): siRNA sense strand
gaaauggcugaacuagaag

SEQ ID NO: 341311 - RNA, 19 nt, Homo sapiens
  misc_RNA (1)...(19): siRNA sense strand
auaaagcuccagcaggaaa

SEQ ID NO: 341312 - RNA, 19 nt, Homo sapiens
  misc_RNA (1)...(19): siRNA sense strand
acccuuccaucauaaguga

SEQ ID NO: 341313 - RNA, 19 nt, Homo sapiens
  misc_RNA (1)...(19): siRNA sense strand
ggugacccagucuauuaaa

SEQ ID NO: 341314 - RNA, 19 nt, Homo sapiens
  misc_RNA (1)...(19): siRNA sense strand
cccagucuauuaaagaaag

SEQ ID NO: 341315 - RNA, 19 nt, Homo sapiens
  misc_RNA (1)...(19): siRNA sense strand
caucugggugugagaguga

SEQ ID NO: 341316 - RNA, 19 nt, Homo sapiens
  misc_RNA (1)...(19): siRNA sense strand
ccagucuauuaaagaaaga

SEQ ID NO: 341317 - RNA, 19 nt, Homo sapiens
  misc_RNA (1)...(19): siRNA sense strand
cgaaauccagaacaaagca

SEQ ID NO: 341318 - RNA, 19 nt, Homo sapiens
  misc_RNA (1)...(19): siRNA sense strand
aagagaaucccaggacaga

SEQ ID NO: 341319 - RNA, 19 nt, Homo sapiens
  misc_RNA (1)...(19): siRNA sense strand
gauguggucaauggaagaa

SEQ ID NO: 341320 - RNA, 19 nt, Homo sapiens
  misc_RNA (1)...(19): siRNA sense strand
ggaccugcgaaauccagaa

SEQ ID NO: 341321 - RNA, 19 nt, Homo sapiens
  misc_RNA (1)...(19): siRNA sense strand
gagcaugauuuugaaguca

SEQ ID NO: 341322 - RNA, 19 nt, Homo sapiens
  misc_RNA (1)...(19): siRNA sense strand
gugacccagucuauuaaag

SEQ ID NO: 341323 - RNA, 19 nt, Homo sapiens
  misc_RNA (1)...(19): siRNA sense strand
agaacaaagcacaucagaa

SEQ ID NO: 341324 - RNA, 19 nt, Homo sapiens
  misc_RNA (1)...(19): siRNA sense strand
uggaagaaaccaccaaggu

SEQ ID NO: 341325 - RNA, 19 nt, Homo sapiens
  misc_RNA (1)...(19): siRNA sense strand
ucaacuggaauggauggua

SEQ ID NO: 341326 - RNA, 19 nt, Homo sapiens
  misc_RNA (1)...(19): siRNA sense strand
ggaaauggcugaacuagaa

SEQ ID NO: 341327 - RNA, 19 nt, Homo sapiens
  misc_RNA (1)...(19): siRNA sense strand
gaacaaagcacaucagaaa

SEQ ID NO: 341328 - RNA, 19 nt, Homo sapiens
  misc_RNA (1)...(19): siRNA sense strand
cagcuacccuuccaucaua

SEQ ID NO: 341329 - RNA, 19 nt, Homo sapiens
  misc_RNA (1)...(19): siRNA sense strand
gggauaccaugcaacauaa

SEQ ID NO: 341330 - RNA, 19 nt, Homo sapiens
  misc_RNA (1)...(19): siRNA sense strand
gaggagauguggucaaugg

SEQ ID NO: 341331 - RNA, 19 nt, Homo sapiens
  misc_RNA (1)...(19): siRNA sense strand
gaaggagcuuucaucauuc

SEQ ID NO: 341332 - RNA, 19 nt, Homo sapiens
  misc_RNA (1)...(19): siRNA sense strand
cuagaaaucuguugcuaug

SEQ ID NO: 341333 - RNA, 19 nt, Homo sapiens
  misc_RNA (1)...(19): siRNA sense strand
gcucagggcuauccucuca

SEQ ID NO: 341334 - RNA, 19 nt, Homo sapiens
  misc_RNA (1)...(19): siRNA sense strand
aaacaagcgucucugaaga

SEQ ID NO: 341335 - RNA, 19 nt, Homo sapiens
  misc_RNA (1)...(19): siRNA sense strand
caacauaaccugauaaagc

SEQ ID NO: 341336 - RNA, 19 nt, Homo sapiens
  misc_RNA (1)...(19): siRNA sense strand
gaaacaagcgucucugaag

SEQ ID NO: 341337 - RNA, 19 nt, Homo sapiens
  misc_RNA (1)...(19): siRNA sense strand
gcagagggauaccaugcaa

SEQ ID NO: 341338 - RNA, 19 nt, Homo sapiens
  misc_RNA (1)...(19): siRNA sense strand
ugaacuagaagcuguguua

SEQ ID NO: 341339 - RNA, 19 nt, Homo sapiens
  misc_RNA (1)...(19): siRNA sense strand
gagaaucccaggacagaaa

SEQ ID NO: 341340 - RNA, 19 nt, Homo sapiens
  misc_RNA (1)...(19): siRNA sense strand
gcccacagaucaacuggaa

SEQ ID NO: 341341 - RNA, 19 nt, Homo sapiens
  misc_RNA (1)...(19): siRNA sense strand
gaagacugcucagggcuau

SEQ ID NO: 341342 - RNA, 19 nt, Homo sapiens
  misc_RNA (1)...(19): siRNA sense strand
gacccagucuauuaaagaa

SEQ ID NO: 341343 - RNA, 19 nt, Homo sapiens
  misc_RNA (1)...(19): siRNA sense strand
acuagaagcuguguuagaa

SEQ ID NO: 341344 - RNA, 19 nt, Homo sapiens
  misc_RNA (1)...(19): siRNA sense strand
caugcaacauaaccugaua

SEQ ID NO: 341345 - RNA, 19 nt, Homo sapiens
  misc_RNA (1)...(19): siRNA sense strand
gcuggacaccuaccugaua

SEQ ID NO: 341346 - RNA, 19 nt, Homo sapiens
  misc_RNA (1)...(19): siRNA sense strand
cagaucaacuggaauggau

SEQ ID NO: 341347 - RNA, 19 nt, Homo sapiens
  misc_RNA (1)...(19): siRNA sense strand
gcaggaaauggcugaacua

SEQ ID NO: 341348 - RNA, 19 nt, Homo sapiens
  misc_RNA (1)...(19): siRNA sense strand
ccacagaucaacuggaaug

SEQ ID NO: 341349 - RNA, 19 nt, Homo sapiens
  misc_RNA (1)...(19): siRNA sense strand
caacaugcccacagaucaa

SEQ ID NO: 341350 - RNA, 19 nt, Homo sapiens
  misc_RNA (1)...(19): siRNA sense strand
ucaccaacaugcccacaga

SEQ ID NO: 341351 - RNA, 19 nt, Homo sapiens
  misc_RNA (1)...(19): siRNA sense strand
cagaggagauguggucaau

SEQ ID NO: 341352 - RNA, 19 nt, Homo sapiens
  misc_RNA (1)...(19): siRNA sense strand
caauugggcagauguguga

SEQ ID NO: 341353 - RNA, 19 nt, Homo sapiens
  misc_RNA (1)...(19): siRNA sense strand
ggagauguggucaauggaa

SEQ ID NO: 341354 - RNA, 19 nt, Homo sapiens
  misc_RNA (1)...(19): siRNA sense strand
guacagcuguguggugcuu

SEQ ID NO: 341355 - RNA, 19 nt, Homo sapiens
  misc_RNA (1)...(19): siRNA sense strand
ccaaagcgagcaagagaau

SEQ ID NO: 341356 - RNA, 19 nt, Homo sapiens
  misc_RNA (1)...(19): siRNA sense strand
gcuaugggcccuucaccaa

SEQ ID NO: 341357 - RNA, 19 nt, Homo sapiens
  misc_RNA (1)...(19): siRNA sense strand
gaaugagcaugauuuugaa

SEQ ID NO: 341358 - RNA, 19 nt, Homo sapiens
  misc_RNA (1)...(19): siRNA sense strand
ucagggcuauccucucaga

SEQ ID NO: 341359 - RNA, 19 nt, Homo sapiens
  misc_RNA (1)...(19): siRNA sense strand
agggauaccaugcaacaua

SEQ ID NO: 341360 - RNA, 19 nt, Homo sapiens
  misc_RNA (1)...(19): siRNA sense strand
gcuagaaaucuguugcuau

SEQ ID NO: 341361 - RNA, 19 nt, Homo sapiens
  misc_RNA (1)...(19): siRNA sense strand
ugaaugagcaugauuuuga

SEQ ID NO: 341362 - RNA, 19 nt, Homo sapiens
  misc_RNA (1)...(19): siRNA sense strand
ggcuagaaaucuguugcua

SEQ ID NO: 341363 - RNA, 19 nt, Homo sapiens
  misc_RNA (1)...(19): siRNA sense strand
ugaaacaagcgucucugaa

SEQ ID NO: 341364 - RNA, 19 nt, Homo sapiens
  misc_RNA (1)...(19): siRNA sense strand
aacauaaccugauaaagcu

SEQ ID NO: 341365 - RNA, 19 nt, Homo sapiens
  misc_RNA (1)...(19): siRNA sense strand
ugacccagucuauuaaaga

SEQ ID NO: 341366 - RNA, 19 nt, Homo sapiens
  misc_RNA (1)...(19): siRNA sense strand
gaacuagaagcuguguuag

SEQ ID NO: 341367 - RNA, 19 nt, Homo sapiens
  misc_RNA (1)...(19): siRNA sense strand
gugaaacaagcgucucuga

SEQ ID NO: 341368 - RNA, 19 nt, Homo sapiens
  misc_RNA (1)...(19): siRNA sense strand
ccaacaugcccacagauca

SEQ ID NO: 341369 - RNA, 19 nt, Homo sapiens
  misc_RNA (1)...(19): siRNA sense strand
uaugggcccuucaccaaca

SEQ ID NO: 341370 - RNA, 19 nt, Homo sapiens
  misc_RNA (1)...(19): siRNA sense strand
guccaaagcgagcaagaga

SEQ ID NO: 341371 - RNA, 19 nt, Homo sapiens
  misc_RNA (1)...(19): siRNA sense strand
cagaacaaagcacaucaga

SEQ ID NO: 341372 - RNA, 19 nt, Homo sapiens
  misc_RNA (1)...(19): siRNA sense strand
ccugcgaaauccagaacaa

SEQ ID NO: 341373 - RNA, 19 nt, Homo sapiens
  misc_RNA (1)...(19): siRNA sense strand
gaaaccaccaagguccaaa

SEQ ID NO: 341374 - RNA, 19 nt, Homo sapiens
  misc_RNA (1)...(19): siRNA sense strand
gauaaagcuccagcaggaa

SEQ ID NO: 341375 - RNA, 19 nt, Homo sapiens
  misc_RNA (1)...(19): siRNA sense strand
aaggagcuuucaucauuca

SEQ ID NO: 341376 - RNA, 19 nt, Homo sapiens
  misc_RNA (1)...(19): siRNA sense strand
ggugugagagugaaacaag

SEQ ID NO: 341377 - RNA, 19 nt, Homo sapiens
  misc_RNA (1)...(19): siRNA sense strand
gaaauggcugaacuagaag

SEQ ID NO: 341378 - RNA, 19 nt, Homo sapiens
  misc_RNA (1)...(19): siRNA sense strand
auaaagcuccagcaggaaa

SEQ ID NO: 341379 - RNA, 19 nt, Homo sapiens
  misc_RNA (1)...(19): siRNA sense strand
acccuuccaucauaaguga

SEQ ID NO: 341380 - RNA, 19 nt, Homo sapiens
  misc_RNA (1)...(19): siRNA sense strand
ggugacccagucuauuaaa

SEQ ID NO: 341381 - RNA, 19 nt, Homo sapiens
  misc_RNA (1)...(19): siRNA sense strand
cccagucuauuaaagaaag

SEQ ID NO: 341382 - RNA, 19 nt, Homo sapiens
  misc_RNA (1)...(19): siRNA sense strand
caucugggugugagaguga

SEQ ID NO: 341383 - RNA, 19 nt, Homo sapiens
  misc_RNA (1)...(19): siRNA sense strand
ccagucuauuaaagaaaga

SEQ ID NO: 341384 - RNA, 19 nt, Homo sapiens
  misc_RNA (1)...(19): siRNA sense strand
cgaaauccagaacaaagca

SEQ ID NO: 341385 - RNA, 19 nt, Homo sapiens
  misc_RNA (1)...(19): siRNA sense strand
aagagaaucccaggacaga

SEQ ID NO: 341386 - RNA, 19 nt, Homo sapiens
  misc_RNA (1)...(19): siRNA sense strand
gauguggucaauggaagaa

SEQ ID NO: 341387 - RNA, 19 nt, Homo sapiens
  misc_RNA (1)...(19): siRNA sense strand
ggaccugcgaaauccagaa

SEQ ID NO: 341388 - RNA, 19 nt, Homo sapiens
  misc_RNA (1)...(19): siRNA sense strand
gagcaugauuuugaaguca

SEQ ID NO: 341389 - RNA, 19 nt, Homo sapiens
  misc_RNA (1)...(19): siRNA sense strand
gugacccagucuauuaaag

SEQ ID NO: 341390 - RNA, 19 nt, Homo sapiens
  misc_RNA (1)...(19): siRNA sense strand
agaacaaagcacaucagaa

SEQ ID NO: 341391 - RNA, 19 nt, Homo sapiens
  misc_RNA (1)...(19): siRNA sense strand
uggaagaaaccaccaaggu

SEQ ID NO: 341392 - RNA, 19 nt, Homo sapiens
  misc_RNA (1)...(19): siRNA sense strand
ucaacuggaauggauggua

SEQ ID NO: 341393 - RNA, 19 nt, Homo sapiens
  misc_RNA (1)...(19): siRNA sense strand
ggaaauggcugaacuagaa

SEQ ID NO: 341394 - RNA, 19 nt, Homo sapiens
  misc_RNA (1)...(19): siRNA sense strand
gaacaaagcacaucagaaa

SEQ ID NO: 341395 - RNA, 19 nt, Homo sapiens
  misc_RNA (1)...(19): siRNA sense strand
cagcuacccuuccaucaua

SEQ ID NO: 341396 - RNA, 19 nt, Homo sapiens
  misc_RNA (1)...(19): siRNA sense strand
gggauaccaugcaacauaa

SEQ ID NO: 341397 - RNA, 19 nt, Homo sapiens
  misc_RNA (1)...(19): siRNA sense strand
gcucagggcuauccucuca

SEQ ID NO: 341398 - RNA, 19 nt, Homo sapiens
  misc_RNA (1)...(19): siRNA sense strand
aaacaagcgucucugaaga

SEQ ID NO: 341399 - RNA, 19 nt, Homo sapiens
  misc_RNA (1)...(19): siRNA sense strand
caacauaaccugauaaagc

SEQ ID NO: 341400 - RNA, 19 nt, Homo sapiens
  misc_RNA (1)...(19): siRNA sense strand
gaaacaagcgucucugaag

SEQ ID NO: 341401 - RNA, 19 nt, Homo sapiens
  misc_RNA (1)...(19): siRNA sense strand
gcagagggauaccaugcaa

SEQ ID NO: 341402 - RNA, 19 nt, Homo sapiens
  misc_RNA (1)...(19): siRNA sense strand
ugaacuagaagcuguguua

SEQ ID NO: 341403 - RNA, 19 nt, Homo sapiens
  misc_RNA (1)...(19): siRNA sense strand
gaagacugcucagggcuau

SEQ ID NO: 341404 - RNA, 19 nt, Homo sapiens
  misc_RNA (1)...(19): siRNA sense strand
acuagaagcuguguuagaa

SEQ ID NO: 341405 - RNA, 19 nt, Homo sapiens
  misc_RNA (1)...(19): siRNA sense strand
caugcaacauaaccugaua

SEQ ID NO: 341406 - RNA, 19 nt, Homo sapiens
  misc_RNA (1)...(19): siRNA sense strand
gcaggaaauggcugaacua

SEQ ID NO: 341407 - RNA, 19 nt, Homo sapiens
  misc_RNA (1)...(19): siRNA sense strand
ucagggcuauccucucaga

SEQ ID NO: 341408 - RNA, 19 nt, Homo sapiens
  misc_RNA (1)...(19): siRNA sense strand
agggauaccaugcaacaua

SEQ ID NO: 341409 - RNA, 19 nt, Homo sapiens
  misc_RNA (1)...(19): siRNA sense strand
ugaaacaagcgucucugaa

SEQ ID NO: 341410 - RNA, 19 nt, Homo sapiens
  misc_RNA (1)...(19): siRNA sense strand
aacauaaccugauaaagcu

SEQ ID NO: 341411 - RNA, 19 nt, Homo sapiens
  misc_RNA (1)...(19): siRNA sense strand
gaacuagaagcuguguuag

SEQ ID NO: 341412 - RNA, 19 nt, Homo sapiens
  misc_RNA (1)...(19): siRNA sense strand
cagaacaaagcacaucaga

SEQ ID NO: 341413 - RNA, 19 nt, Homo sapiens
  misc_RNA (1)...(19): siRNA sense strand
gugaaacaagcgucucuga

SEQ ID NO: 341414 - RNA, 19 nt, Homo sapiens
  misc_RNA (1)...(19): siRNA sense strand
ccugcgaaauccagaacaa

SEQ ID NO: 341415 - RNA, 19 nt, Homo sapiens
  misc_RNA (1)...(19): siRNA sense strand
gauaaagcuccagcaggaa

SEQ ID NO: 341416 - RNA, 19 nt, Homo sapiens
  misc_RNA (1)...(19): siRNA sense strand
ggugugagagugaaacaag

SEQ ID NO: 341417 - RNA, 19 nt, Homo sapiens
  misc_RNA (1)...(19): siRNA sense strand
auaaagcuccagcaggaaa

SEQ ID NO: 341418 - RNA, 19 nt, Homo sapiens
  misc_RNA (1)...(19): siRNA sense strand
acccuuccaucauaaguga

SEQ ID NO: 341419 - RNA, 19 nt, Homo sapiens
  misc_RNA (1)...(19): siRNA sense strand
gaaauggcugaacuagaag

SEQ ID NO: 341420 - RNA, 19 nt, Homo sapiens
  misc_RNA (1)...(19): siRNA sense strand
caucugggugugagaguga

SEQ ID NO: 341421 - RNA, 19 nt, Homo sapiens
  misc_RNA (1)...(19): siRNA sense strand
cgaaauccagaacaaagca

SEQ ID NO: 341422 - RNA, 19 nt, Homo sapiens
  misc_RNA (1)...(19): siRNA sense strand
ggaccugcgaaauccagaa

SEQ ID NO: 341423 - RNA, 19 nt, Homo sapiens
  misc_RNA (1)...(19): siRNA sense strand
agaacaaagcacaucagaa

SEQ ID NO: 341424 - RNA, 19 nt, Homo sapiens
  misc_RNA (1)...(19): siRNA sense strand
ggaaauggcugaacuagaa

SEQ ID NO: 341425 - RNA, 19 nt, Homo sapiens
  misc_RNA (1)...(19): siRNA sense strand
gaacaaagcacaucagaaa

SEQ ID NO: 341426 - RNA, 19 nt, Homo sapiens
  misc_RNA (1)...(19): siRNA sense strand
cagcuacccuuccaucaua

SEQ ID NO: 341427 - RNA, 19 nt, Homo sapiens
  misc_RNA (1)...(19): siRNA sense strand
gggauaccaugcaacauaa

SEQ ID NO: 341428 - RNA, 19 nt, Homo sapiens
  misc_RNA (1)...(19): siRNA sense strand
gaggagauguggucaaugg

SEQ ID NO: 341429 - RNA, 19 nt, Homo sapiens
  misc_RNA (1)...(19): siRNA sense strand
gaaggagcuuucaucauuc

SEQ ID NO: 341430 - RNA, 19 nt, Homo sapiens
  misc_RNA (1)...(19): siRNA sense strand
cuagaaaucuguugcuaug

SEQ ID NO: 341431 - RNA, 19 nt, Homo sapiens
  misc_RNA (1)...(19): siRNA sense strand
gcucagggcuauccucuca

SEQ ID NO: 341432 - RNA, 19 nt, Homo sapiens
  misc_RNA (1)...(19): siRNA sense strand
aaacaagcgucucugaaga

SEQ ID NO: 341433 - RNA, 19 nt, Homo sapiens
  misc_RNA (1)...(19): siRNA sense strand
caacauaaccugauaaagc

SEQ ID NO: 341434 - RNA, 19 nt, Homo sapiens
  misc_RNA (1)...(19): siRNA sense strand
gaaacaagcgucucugaag

SEQ ID NO: 341435 - RNA, 19 nt, Homo sapiens
  misc_RNA (1)...(19): siRNA sense strand
gcagagggauaccaugcaa

SEQ ID NO: 341436 - RNA, 19 nt, Homo sapiens
  misc_RNA (1)...(19): siRNA sense strand
ugaacuagaagcuguguua

SEQ ID NO: 341437 - RNA, 19 nt, Homo sapiens
  misc_RNA (1)...(19): siRNA sense strand
gagaaucccaggacagaaa

SEQ ID NO: 341438 - RNA, 19 nt, Homo sapiens
  misc_RNA (1)...(19): siRNA sense strand
gcccacagaucaacuggaa

SEQ ID NO: 341439 - RNA, 19 nt, Homo sapiens
  misc_RNA (1)...(19): siRNA sense strand
gaagacugcucagggcuau

SEQ ID NO: 341440 - RNA, 19 nt, Homo sapiens
  misc_RNA (1)...(19): siRNA sense strand
gacccagucuauuaaagaa

SEQ ID NO: 341441 - RNA, 19 nt, Homo sapiens
  misc_RNA (1)...(19): siRNA sense strand
acuagaagcuguguuagaa

SEQ ID NO: 341442 - RNA, 19 nt, Homo sapiens
  misc_RNA (1)...(19): siRNA sense strand
caugcaacauaaccugaua

SEQ ID NO: 341443 - RNA, 19 nt, Homo sapiens
  misc_RNA (1)...(19): siRNA sense strand
gcuggacaccuaccugaua

SEQ ID NO: 341444 - RNA, 19 nt, Homo sapiens
  misc_RNA (1)...(19): siRNA sense strand
cagaucaacuggaauggau

SEQ ID NO: 341445 - RNA, 19 nt, Homo sapiens
  misc_RNA (1)...(19): siRNA sense strand
gcaggaaauggcugaacua

SEQ ID NO: 341446 - RNA, 19 nt, Homo sapiens
  misc_RNA (1)...(19): siRNA sense strand
ccacagaucaacuggaaug

SEQ ID NO: 341447 - RNA, 19 nt, Homo sapiens
  misc_RNA (1)...(19): siRNA sense strand
caacaugcccacagaucaa

SEQ ID NO: 341448 - RNA, 19 nt, Homo sapiens
  misc_RNA (1)...(19): siRNA sense strand
ucaccaacaugcccacaga

SEQ ID NO: 341449 - RNA, 19 nt, Homo sapiens
  misc_RNA (1)...(19): siRNA sense strand
cagaggagauguggucaau

SEQ ID NO: 341450 - RNA, 19 nt, Homo sapiens
  misc_RNA (1)...(19): siRNA sense strand
caauugggcagauguguga

SEQ ID NO: 341451 - RNA, 19 nt, Homo sapiens
  misc_RNA (1)...(19): siRNA sense strand
ggagauguggucaauggaa

SEQ ID NO: 341452 - RNA, 19 nt, Homo sapiens
  misc_RNA (1)...(19): siRNA sense strand
guacagcuguguggugcuu

SEQ ID NO: 341453 - RNA, 19 nt, Homo sapiens
  misc_RNA (1)...(19): siRNA sense strand
ccaaagcgagcaagagaau

SEQ ID NO: 341454 - RNA, 19 nt, Homo sapiens
  misc_RNA (1)...(19): siRNA sense strand
gcuaugggcccuucaccaa

SEQ ID NO: 341455 - RNA, 19 nt, Homo sapiens
  misc_RNA (1)...(19): siRNA sense strand
gaaugagcaugauuuugaa

SEQ ID NO: 341456 - RNA, 19 nt, Homo sapiens
  misc_RNA (1)...(19): siRNA sense strand
ucagggcuauccucucaga

SEQ ID NO: 341457 - RNA, 19 nt, Homo sapiens
  misc_RNA (1)...(19): siRNA sense strand
agggauaccaugcaacaua

SEQ ID NO: 341458 - RNA, 19 nt, Homo sapiens
  misc_RNA (1)...(19): siRNA sense strand
gcuagaaaucuguugcuau

SEQ ID NO: 341459 - RNA, 19 nt, Homo sapiens
  misc_RNA (1)...(19): siRNA sense strand
ugaaugagcaugauuuuga

SEQ ID NO: 341460 - RNA, 19 nt, Homo sapiens
  misc_RNA (1)...(19): siRNA sense strand
ggcuagaaaucuguugcua

SEQ ID NO: 341461 - RNA, 19 nt, Homo sapiens
  misc_RNA (1)...(19): siRNA sense strand
ugaaacaagcgucucugaa

SEQ ID NO: 341462 - RNA, 19 nt, Homo sapiens
  misc_RNA (1)...(19): siRNA sense strand
aacauaaccugauaaagcu

SEQ ID NO: 341463 - RNA, 19 nt, Homo sapiens
  misc_RNA (1)...(19): siRNA sense strand
ugacccagucuauuaaaga

SEQ ID NO: 341464 - RNA, 19 nt, Homo sapiens
  misc_RNA (1)...(19): siRNA sense strand
gaacuagaagcuguguuag

SEQ ID NO: 341465 - RNA, 19 nt, Homo sapiens
  misc_RNA (1)...(19): siRNA sense strand
gugaaacaagcgucucuga

SEQ ID NO: 341466 - RNA, 19 nt, Homo sapiens
  misc_RNA (1)...(19): siRNA sense strand
ccaacaugcccacagauca

SEQ ID NO: 341467 - RNA, 19 nt, Homo sapiens
  misc_RNA (1)...(19): siRNA sense strand
uaugggcccuucaccaaca

SEQ ID NO: 341468 - RNA, 19 nt, Homo sapiens
  misc_RNA (1)...(19): siRNA sense strand
guccaaagcgagcaagaga

SEQ ID NO: 341469 - RNA, 19 nt, Homo sapiens
  misc_RNA (1)...(19): siRNA sense strand
cagaacaaagcacaucaga

SEQ ID NO: 341470 - RNA, 19 nt, Homo sapiens
  misc_RNA (1)...(19): siRNA sense strand
ccugcgaaauccagaacaa

SEQ ID NO: 341471 - RNA, 19 nt, Homo sapiens
  misc_RNA (1)...(19): siRNA sense strand
gaaaccaccaagguccaaa

SEQ ID NO: 341472 - RNA, 19 nt, Homo sapiens
  misc_RNA (1)...(19): siRNA sense strand
gauaaagcuccagcaggaa

SEQ ID NO: 341473 - RNA, 19 nt, Homo sapiens
  misc_RNA (1)...(19): siRNA sense strand
aaggagcuuucaucauuca

SEQ ID NO: 341474 - RNA, 19 nt, Homo sapiens
  misc_RNA (1)...(19): siRNA sense strand
ggugugagagugaaacaag

SEQ ID NO: 341475 - RNA, 19 nt, Homo sapiens
  misc_RNA (1)...(19): siRNA sense strand
gaaauggcugaacuagaag

SEQ ID NO: 341476 - RNA, 19 nt, Homo sapiens
  misc_RNA (1)...(19): siRNA sense strand
auaaagcuccagcaggaaa

SEQ ID NO: 341477 - RNA, 19 nt, Homo sapiens
  misc_RNA (1)...(19): siRNA sense strand
acccuuccaucauaaguga

SEQ ID NO: 341478 - RNA, 19 nt, Homo sapiens
  misc_RNA (1)...(19): siRNA sense strand
ggugacccagucuauuaaa

SEQ ID NO: 341479 - RNA, 19 nt, Homo sapiens
  misc_RNA (1)...(19): siRNA sense strand
cccagucuauuaaagaaag

SEQ ID NO: 341480 - RNA, 19 nt, Homo sapiens
  misc_RNA (1)...(19): siRNA sense strand
caucugggugugagaguga

SEQ ID NO: 341481 - RNA, 19 nt, Homo sapiens
  misc_RNA (1)...(19): siRNA sense strand
ccagucuauuaaagaaaga

SEQ ID NO: 341482 - RNA, 19 nt, Homo sapiens
  misc_RNA (1)...(19): siRNA sense strand
cgaaauccagaacaaagca

SEQ ID NO: 341483 - RNA, 19 nt, Homo sapiens
  misc_RNA (1)...(19): siRNA sense strand
aagagaaucccaggacaga

SEQ ID NO: 341484 - RNA, 19 nt, Homo sapiens
  misc_RNA (1)...(19): siRNA sense strand
gauguggucaauggaagaa

SEQ ID NO: 341485 - RNA, 19 nt, Homo sapiens
  misc_RNA (1)...(19): siRNA sense strand
ggaccugcgaaauccagaa

SEQ ID NO: 341486 - RNA, 19 nt, Homo sapiens
  misc_RNA (1)...(19): siRNA sense strand
gagcaugauuuugaaguca

SEQ ID NO: 341487 - RNA, 19 nt, Homo sapiens
  misc_RNA (1)...(19): siRNA sense strand
gugacccagucuauuaaag

SEQ ID NO: 341488 - RNA, 19 nt, Homo sapiens
  misc_RNA (1)...(19): siRNA sense strand
agaacaaagcacaucagaa

SEQ ID NO: 341489 - RNA, 19 nt, Homo sapiens
  misc_RNA (1)...(19): siRNA sense strand
uggaagaaaccaccaaggu

SEQ ID NO: 341490 - RNA, 19 nt, Homo sapiens
  misc_RNA (1)...(19): siRNA sense strand
ucaacuggaauggauggua

SEQ ID NO: 341491 - RNA, 19 nt, Homo sapiens
  misc_RNA (1)...(19): siRNA sense strand
ggaaauggcugaacuagaa

SEQ ID NO: 341492 - RNA, 19 nt, Homo sapiens
  misc_RNA (1)...(19): siRNA sense strand
gaacaaagcacaucagaaa

SEQ ID NO: 341493 - RNA, 19 nt, Homo sapiens
  misc_RNA (1)...(19): siRNA sense strand
cagcuacccuuccaucaua

SEQ ID NO: 341494 - RNA, 19 nt, Homo sapiens
  misc_RNA (1)...(19): siRNA sense strand
gggauaccaugcaacauaa

SEQ ID NO: 341495 - RNA, 19 nt, Homo sapiens
  misc_RNA (1)...(19): siRNA sense strand
gaggagauguggucaaugg

SEQ ID NO: 341496 - RNA, 19 nt, Homo sapiens
  misc_RNA (1)...(19): siRNA sense strand
gaaggagcuuucaucauuc

SEQ ID NO: 341497 - RNA, 19 nt, Homo sapiens
  misc_RNA (1)...(19): siRNA sense strand
cuagaaaucuguugcuaug

SEQ ID NO: 341498 - RNA, 19 nt, Homo sapiens
  misc_RNA (1)...(19): siRNA sense strand
gcucagggcuauccucuca

SEQ ID NO: 341499 - RNA, 19 nt, Homo sapiens
  misc_RNA (1)...(19): siRNA sense strand
aaacaagcgucucugaaga

SEQ ID NO: 341500 - RNA, 19 nt, Homo sapiens
  misc_RNA (1)...(19): siRNA sense strand
caacauaaccugauaaagc

SEQ ID NO: 341501 - RNA, 19 nt, Homo sapiens
  misc_RNA (1)...(19): siRNA sense strand
gaaacaagcgucucugaag

SEQ ID NO: 341502 - RNA, 19 nt, Homo sapiens
  misc_RNA (1)...(19): siRNA sense strand
gcagagggauaccaugcaa

SEQ ID NO: 341503 - RNA, 19 nt, Homo sapiens
  misc_RNA (1)...(19): siRNA sense strand
ugaacuagaagcuguguua

SEQ ID NO: 341504 - RNA, 19 nt, Homo sapiens
  misc_RNA (1)...(19): siRNA sense strand
gagaaucccaggacagaaa

SEQ ID NO: 341505 - RNA, 19 nt, Homo sapiens
  misc_RNA (1)...(19): siRNA sense strand
gcccacagaucaacuggaa

SEQ ID NO: 341506 - RNA, 19 nt, Homo sapiens
  misc_RNA (1)...(19): siRNA sense strand
gaagacugcucagggcuau

SEQ ID NO: 341507 - RNA, 19 nt, Homo sapiens
  misc_RNA (1)...(19): siRNA sense strand
gacccagucuauuaaagaa

SEQ ID NO: 341508 - RNA, 19 nt, Homo sapiens
  misc_RNA (1)...(19): siRNA sense strand
acuagaagcuguguuagaa

SEQ ID NO: 341509 - RNA, 19 nt, Homo sapiens
  misc_RNA (1)...(19): siRNA sense strand
caugcaacauaaccugaua

SEQ ID NO: 341510 - RNA, 19 nt, Homo sapiens
  misc_RNA (1)...(19): siRNA sense strand
gcuggacaccuaccugaua

SEQ ID NO: 341511 - RNA, 19 nt, Homo sapiens
  misc_RNA (1)...(19): siRNA sense strand
cagaucaacuggaauggau

SEQ ID NO: 341512 - RNA, 19 nt, Homo sapiens
  misc_RNA (1)...(19): siRNA sense strand
gcaggaaauggcugaacua

SEQ ID NO: 341513 - RNA, 19 nt, Homo sapiens
  misc_RNA (1)...(19): siRNA sense strand
ccacagaucaacuggaaug

SEQ ID NO: 341514 - RNA, 19 nt, Homo sapiens
  misc_RNA (1)...(19): siRNA sense strand
caacaugcccacagaucaa

SEQ ID NO: 341515 - RNA, 19 nt, Homo sapiens
  misc_RNA (1)...(19): siRNA sense strand
ucaccaacaugcccacaga

SEQ ID NO: 341516 - RNA, 19 nt, Homo sapiens
  misc_RNA (1)...(19): siRNA sense strand
cagaggagauguggucaau

SEQ ID NO: 341517 - RNA, 19 nt, Homo sapiens
  misc_RNA (1)...(19): siRNA sense strand
caauugggcagauguguga

SEQ ID NO: 341518 - RNA, 19 nt, Homo sapiens
  misc_RNA (1)...(19): siRNA sense strand
ggagauguggucaauggaa

SEQ ID NO: 341519 - RNA, 19 nt, Homo sapiens
  misc_RNA (1)...(19): siRNA sense strand
guacagcuguguggugcuu

SEQ ID NO: 341520 - RNA, 19 nt, Homo sapiens
  misc_RNA (1)...(19): siRNA sense strand
ccaaagcgagcaagagaau

SEQ ID NO: 341521 - RNA, 19 nt, Homo sapiens
  misc_RNA (1)...(19): siRNA sense strand
gcuaugggcccuucaccaa

SEQ ID NO: 341522 - RNA, 19 nt, Homo sapiens
  misc_RNA (1)...(19): siRNA sense strand
gaaugagcaugauuuugaa

SEQ ID NO: 341523 - RNA, 19 nt, Homo sapiens
  misc_RNA (1)...(19): siRNA sense strand
ucagggcuauccucucaga

SEQ ID NO: 341524 - RNA, 19 nt, Homo sapiens
  misc_RNA (1)...(19): siRNA sense strand
agggauaccaugcaacaua

SEQ ID NO: 341525 - RNA, 19 nt, Homo sapiens
  misc_RNA (1)...(19): siRNA sense strand
gcuagaaaucuguugcuau

SEQ ID NO: 341526 - RNA, 19 nt, Homo sapiens
  misc_RNA (1)...(19): siRNA sense strand
ugaaugagcaugauuuuga

SEQ ID NO: 341527 - RNA, 19 nt, Homo sapiens
  misc_RNA (1)...(19): siRNA sense strand
ggcuagaaaucuguugcua

SEQ ID NO: 341528 - RNA, 19 nt, Homo sapiens
  misc_RNA (1)...(19): siRNA sense strand
ugaaacaagcgucucugaa

SEQ ID NO: 341529 - RNA, 19 nt, Homo sapiens
  misc_RNA (1)...(19): siRNA sense strand
aacauaaccugauaaagcu

SEQ ID NO: 341530 - RNA, 19 nt, Homo sapiens
  misc_RNA (1)...(19): siRNA sense strand
ugacccagucuauuaaaga

SEQ ID NO: 341531 - RNA, 19 nt, Homo sapiens
  misc_RNA (1)...(19): siRNA sense strand
gaacuagaagcuguguuag

SEQ ID NO: 341532 - RNA, 19 nt, Homo sapiens
  misc_RNA (1)...(19): siRNA sense strand
gugaaacaagcgucucuga

SEQ ID NO: 341533 - RNA, 19 nt, Homo sapiens
  misc_RNA (1)...(19): siRNA sense strand
ccaacaugcccacagauca

SEQ ID NO: 341534 - RNA, 19 nt, Homo sapiens
  misc_RNA (1)...(19): siRNA sense strand
uaugggcccuucaccaaca

SEQ ID NO: 341535 - RNA, 19 nt, Homo sapiens
  misc_RNA (1)...(19): siRNA sense strand
guccaaagcgagcaagaga

SEQ ID NO: 341536 - RNA, 19 nt, Homo sapiens
  misc_RNA (1)...(19): siRNA sense strand
cagaacaaagcacaucaga

SEQ ID NO: 341537 - RNA, 19 nt, Homo sapiens
  misc_RNA (1)...(19): siRNA sense strand
ccugcgaaauccagaacaa

SEQ ID NO: 341538 - RNA, 19 nt, Homo sapiens
  misc_RNA (1)...(19): siRNA sense strand
gaaaccaccaagguccaaa

SEQ ID NO: 341539 - RNA, 19 nt, Homo sapiens
  misc_RNA (1)...(19): siRNA sense strand
gauaaagcuccagcaggaa

SEQ ID NO: 341540 - RNA, 19 nt, Homo sapiens
  misc_RNA (1)...(19): siRNA sense strand
aaggagcuuucaucauuca

SEQ ID NO: 341541 - RNA, 19 nt, Homo sapiens
  misc_RNA (1)...(19): siRNA sense strand
ggugugagagugaaacaag

SEQ ID NO: 341542 - RNA, 19 nt, Homo sapiens
  misc_RNA (1)...(19): siRNA sense strand
gaaauggcugaacuagaag

SEQ ID NO: 341543 - RNA, 19 nt, Homo sapiens
  misc_RNA (1)...(19): siRNA sense strand
auaaagcuccagcaggaaa

SEQ ID NO: 341544 - RNA, 19 nt, Homo sapiens
  misc_RNA (1)...(19): siRNA sense strand
acccuuccaucauaaguga

SEQ ID NO: 341545 - RNA, 19 nt, Homo sapiens
  misc_RNA (1)...(19): siRNA sense strand
ggugacccagucuauuaaa

SEQ ID NO: 341546 - RNA, 19 nt, Homo sapiens
  misc_RNA (1)...(19): siRNA sense strand
cccagucuauuaaagaaag

SEQ ID NO: 341547 - RNA, 19 nt, Homo sapiens
  misc_RNA (1)...(19): siRNA sense strand
caucugggugugagaguga

SEQ ID NO: 341548 - RNA, 19 nt, Homo sapiens
  misc_RNA (1)...(19): siRNA sense strand
ccagucuauuaaagaaaga

SEQ ID NO: 341549 - RNA, 19 nt, Homo sapiens
  misc_RNA (1)...(19): siRNA sense strand
cgaaauccagaacaaagca

SEQ ID NO: 341550 - RNA, 19 nt, Homo sapiens
  misc_RNA (1)...(19): siRNA sense strand
aagagaaucccaggacaga

SEQ ID NO: 341551 - RNA, 19 nt, Homo sapiens
  misc_RNA (1)...(19): siRNA sense strand
gauguggucaauggaagaa

SEQ ID NO: 341552 - RNA, 19 nt, Homo sapiens
  misc_RNA (1)...(19): siRNA sense strand
ggaccugcgaaauccagaa

SEQ ID NO: 341553 - RNA, 19 nt, Homo sapiens
  misc_RNA (1)...(19): siRNA sense strand
gagcaugauuuugaaguca

SEQ ID NO: 341554 - RNA, 19 nt, Homo sapiens
  misc_RNA (1)...(19): siRNA sense strand
gugacccagucuauuaaag

SEQ ID NO: 341555 - RNA, 19 nt, Homo sapiens
  misc_RNA (1)...(19): siRNA sense strand
agaacaaagcacaucagaa

SEQ ID NO: 341556 - RNA, 19 nt, Homo sapiens
  misc_RNA (1)...(19): siRNA sense strand
uggaagaaaccaccaaggu

SEQ ID NO: 341557 - RNA, 19 nt, Homo sapiens
  misc_RNA (1)...(19): siRNA sense strand
ucaacuggaauggauggua

SEQ ID NO: 341558 - RNA, 19 nt, Homo sapiens
  misc_RNA (1)...(19): siRNA sense strand
ggaaauggcugaacuagaa

SEQ ID NO: 341559 - RNA, 19 nt, Homo sapiens
  misc_RNA (1)...(19): siRNA sense strand
gaacaaagcacaucagaaa

SEQ ID NO: 341560 - RNA, 19 nt, Homo sapiens
  misc_RNA (1)...(19): siRNA sense strand
cagcuacccuuccaucaua

SEQ ID NO: 341561 - RNA, 19 nt, Homo sapiens
  misc_RNA (1)...(19): siRNA sense strand
gggauaccaugcaacauaa

SEQ ID NO: 341562 - RNA, 19 nt, Homo sapiens
  misc_RNA (1)...(19): siRNA sense strand
gaggagauguggucaaugg

SEQ ID NO: 341563 - RNA, 19 nt, Homo sapiens
  misc_RNA (1)...(19): siRNA sense strand
gaaggagcuuucaucauuc

SEQ ID NO: 341564 - RNA, 19 nt, Homo sapiens
  misc_RNA (1)...(19): siRNA sense strand
cuagaaaucuguugcuaug

SEQ ID NO: 341565 - RNA, 19 nt, Homo sapiens
  misc_RNA (1)...(19): siRNA sense strand
gcucagggcuauccucuca

SEQ ID NO: 341566 - RNA, 19 nt, Homo sapiens
  misc_RNA (1)...(19): siRNA sense strand
aaacaagcgucucugaaga

SEQ ID NO: 341567 - RNA, 19 nt, Homo sapiens
  misc_RNA (1)...(19): siRNA sense strand
caacauaaccugauaaagc

SEQ ID NO: 341568 - RNA, 19 nt, Homo sapiens
  misc_RNA (1)...(19): siRNA sense strand
gaaacaagcgucucugaag

SEQ ID NO: 341569 - RNA, 19 nt, Homo sapiens
  misc_RNA (1)...(19): siRNA sense strand
gcagagggauaccaugcaa

SEQ ID NO: 341570 - RNA, 19 nt, Homo sapiens
  misc_RNA (1)...(19): siRNA sense strand
ugaacuagaagcuguguua

SEQ ID NO: 341571 - RNA, 19 nt, Homo sapiens
  misc_RNA (1)...(19): siRNA sense strand
gagaaucccaggacagaaa

SEQ ID NO: 341572 - RNA, 19 nt, Homo sapiens
  misc_RNA (1)...(19): siRNA sense strand
gcccacagaucaacuggaa

SEQ ID NO: 341573 - RNA, 19 nt, Homo sapiens
  misc_RNA (1)...(19): siRNA sense strand
gaagacugcucagggcuau

SEQ ID NO: 341574 - RNA, 19 nt, Homo sapiens
  misc_RNA (1)...(19): siRNA sense strand
gacccagucuauuaaagaa

SEQ ID NO: 341575 - RNA, 19 nt, Homo sapiens
  misc_RNA (1)...(19): siRNA sense strand
acuagaagcuguguuagaa

SEQ ID NO: 341576 - RNA, 19 nt, Homo sapiens
  misc_RNA (1)...(19): siRNA sense strand
caugcaacauaaccugaua

SEQ ID NO: 341577 - RNA, 19 nt, Homo sapiens
  misc_RNA (1)...(19): siRNA sense strand
gcuggacaccuaccugaua

SEQ ID NO: 341578 - RNA, 19 nt, Homo sapiens
  misc_RNA (1)...(19): siRNA sense strand
cagaucaacuggaauggau

SEQ ID NO: 341579 - RNA, 19 nt, Homo sapiens
  misc_RNA (1)...(19): siRNA sense strand
gcaggaaauggcugaacua

SEQ ID NO: 341580 - RNA, 19 nt, Homo sapiens
  misc_RNA (1)...(19): siRNA sense strand
ccacagaucaacuggaaug

SEQ ID NO: 341581 - RNA, 19 nt, Homo sapiens
  misc_RNA (1)...(19): siRNA sense strand
caacaugcccacagaucaa

SEQ ID NO: 341582 - RNA, 19 nt, Homo sapiens
  misc_RNA (1)...(19): siRNA sense strand
ucaccaacaugcccacaga

SEQ ID NO: 341583 - RNA, 19 nt, Homo sapiens
  misc_RNA (1)...(19): siRNA sense strand
cagaggagauguggucaau

SEQ ID NO: 341584 - RNA, 19 nt, Homo sapiens
  misc_RNA (1)...(19): siRNA sense strand
caauugggcagauguguga

SEQ ID NO: 341585 - RNA, 19 nt, Homo sapiens
  misc_RNA (1)...(19): siRNA sense strand
ggagauguggucaauggaa

SEQ ID NO: 341586 - RNA, 19 nt, Homo sapiens
  misc_RNA (1)...(19): siRNA sense strand
guacagcuguguggugcuu

SEQ ID NO: 341587 - RNA, 19 nt, Homo sapiens
  misc_RNA (1)...(19): siRNA sense strand
ccaaagcgagcaagagaau

SEQ ID NO: 341588 - RNA, 19 nt, Homo sapiens
  misc_RNA (1)...(19): siRNA sense strand
gcuaugggcccuucaccaa

SEQ ID NO: 341589 - RNA, 19 nt, Homo sapiens
  misc_RNA (1)...(19): siRNA sense strand
gaaugagcaugauuuugaa

SEQ ID NO: 341590 - RNA, 19 nt, Homo sapiens
  misc_RNA (1)...(19): siRNA sense strand
ucagggcuauccucucaga

SEQ ID NO: 341591 - RNA, 19 nt, Homo sapiens
  misc_RNA (1)...(19): siRNA sense strand
agggauaccaugcaacaua

SEQ ID NO: 341592 - RNA, 19 nt, Homo sapiens
  misc_RNA (1)...(19): siRNA sense strand
gcuagaaaucuguugcuau

SEQ ID NO: 341593 - RNA, 19 nt, Homo sapiens
  misc_RNA (1)...(19): siRNA sense strand
ugaaugagcaugauuuuga

SEQ ID NO: 341594 - RNA, 19 nt, Homo sapiens
  misc_RNA (1)...(19): siRNA sense strand
ggcuagaaaucuguugcua

SEQ ID NO: 341595 - RNA, 19 nt, Homo sapiens
  misc_RNA (1)...(19): siRNA sense strand
ugaaacaagcgucucugaa

SEQ ID NO: 341596 - RNA, 19 nt, Homo sapiens
  misc_RNA (1)...(19): siRNA sense strand
aacauaaccugauaaagcu

SEQ ID NO: 341597 - RNA, 19 nt, Homo sapiens
  misc_RNA (1)...(19): siRNA sense strand
ugacccagucuauuaaaga

SEQ ID NO: 341598 - RNA, 19 nt, Homo sapiens
  misc_RNA (1)...(19): siRNA sense strand
gaacuagaagcuguguuag

SEQ ID NO: 341599 - RNA, 19 nt, Homo sapiens
  misc_RNA (1)...(19): siRNA sense strand
gugaaacaagcgucucuga

SEQ ID NO: 341600 - RNA, 19 nt, Homo sapiens
  misc_RNA (1)...(19): siRNA sense strand
ccaacaugcccacagauca

SEQ ID NO: 341601 - RNA, 19 nt, Homo sapiens
  misc_RNA (1)...(19): siRNA sense strand
uaugggcccuucaccaaca

SEQ ID NO: 341602 - RNA, 19 nt, Homo sapiens
  misc_RNA (1)...(19): siRNA sense strand
guccaaagcgagcaagaga

SEQ ID NO: 341603 - RNA, 19 nt, Homo sapiens
  misc_RNA (1)...(19): siRNA sense strand
cagaacaaagcacaucaga

SEQ ID NO: 341604 - RNA, 19 nt, Homo sapiens
  misc_RNA (1)...(19): siRNA sense strand
ccugcgaaauccagaacaa

SEQ ID NO: 341605 - RNA, 19 nt, Homo sapiens
  misc_RNA (1)...(19): siRNA sense strand
gaaaccaccaagguccaaa

SEQ ID NO: 341606 - RNA, 19 nt, Homo sapiens
  misc_RNA (1)...(19): siRNA sense strand
gauaaagcuccagcaggaa

SEQ ID NO: 341607 - RNA, 19 nt, Homo sapiens
  misc_RNA (1)...(19): siRNA sense strand
aaggagcuuucaucauuca

SEQ ID NO: 341608 - RNA, 19 nt, Homo sapiens
  misc_RNA (1)...(19): siRNA sense strand
ggugugagagugaaacaag

SEQ ID NO: 341609 - RNA, 19 nt, Homo sapiens
  misc_RNA (1)...(19): siRNA sense strand
gaaauggcugaacuagaag

SEQ ID NO: 341610 - RNA, 19 nt, Homo sapiens
  misc_RNA (1)...(19): siRNA sense strand
auaaagcuccagcaggaaa

SEQ ID NO: 341611 - RNA, 19 nt, Homo sapiens
  misc_RNA (1)...(19): siRNA sense strand
acccuuccaucauaaguga

SEQ ID NO: 341612 - RNA, 19 nt, Homo sapiens
  misc_RNA (1)...(19): siRNA sense strand
ggugacccagucuauuaaa

SEQ ID NO: 341613 - RNA, 19 nt, Homo sapiens
  misc_RNA (1)...(19): siRNA sense strand
cccagucuauuaaagaaag

SEQ ID NO: 341614 - RNA, 19 nt, Homo sapiens
  misc_RNA (1)...(19): siRNA sense strand
caucugggugugagaguga

SEQ ID NO: 341615 - RNA, 19 nt, Homo sapiens
  misc_RNA (1)...(19): siRNA sense strand
ccagucuauuaaagaaaga

SEQ ID NO: 341616 - RNA, 19 nt, Homo sapiens
  misc_RNA (1)...(19): siRNA sense strand
cgaaauccagaacaaagca

SEQ ID NO: 341617 - RNA, 19 nt, Homo sapiens
  misc_RNA (1)...(19): siRNA sense strand
aagagaaucccaggacaga

SEQ ID NO: 341618 - RNA, 19 nt, Homo sapiens
  misc_RNA (1)...(19): siRNA sense strand
gauguggucaauggaagaa

SEQ ID NO: 341619 - RNA, 19 nt, Homo sapiens
  misc_RNA (1)...(19): siRNA sense strand
ggaccugcgaaauccagaa

SEQ ID NO: 341620 - RNA, 19 nt, Homo sapiens
  misc_RNA (1)...(19): siRNA sense strand
gagcaugauuuugaaguca

SEQ ID NO: 341621 - RNA, 19 nt, Homo sapiens
  misc_RNA (1)...(19): siRNA sense strand
gugacccagucuauuaaag

SEQ ID NO: 341622 - RNA, 19 nt, Homo sapiens
  misc_RNA (1)...(19): siRNA sense strand
agaacaaagcacaucagaa

SEQ ID NO: 341623 - RNA, 19 nt, Homo sapiens
  misc_RNA (1)...(19): siRNA sense strand
uggaagaaaccaccaaggu

SEQ ID NO: 341624 - RNA, 19 nt, Homo sapiens
  misc_RNA (1)...(19): siRNA sense strand
ucaacuggaauggauggua

SEQ ID NO: 341625 - RNA, 19 nt, Homo sapiens
  misc_RNA (1)...(19): siRNA sense strand
ggaaauggcugaacuagaa

SEQ ID NO: 341626 - RNA, 19 nt, Homo sapiens
  misc_RNA (1)...(19): siRNA sense strand
gaacaaagcacaucagaaa

SEQ ID NO: 341627 - RNA, 19 nt, Homo sapiens
  misc_RNA (1)...(19): siRNA sense strand
cagcuacccuuccaucaua

SEQ ID NO: 341628 - RNA, 19 nt, Homo sapiens
  misc_RNA (1)...(19): siRNA sense strand
gggauaccaugcaacauaa

SEQ ID NO: 341629 - RNA, 19 nt, Homo sapiens
  misc_RNA (1)...(19): siRNA sense strand
gaggagauguggucaaugg

SEQ ID NO: 341630 - RNA, 19 nt, Homo sapiens
  misc_RNA (1)...(19): siRNA sense strand
gaaggagcuuucaucauuc

SEQ ID NO: 341631 - RNA, 19 nt, Homo sapiens
  misc_RNA (1)...(19): siRNA sense strand
cuagaaaucuguugcuaug

SEQ ID NO: 341632 - RNA, 19 nt, Homo sapiens
  misc_RNA (1)...(19): siRNA sense strand
gcucagggcuauccucuca

SEQ ID NO: 341633 - RNA, 19 nt, Homo sapiens
  misc_RNA (1)...(19): siRNA sense strand
aaacaagcgucucugaaga

SEQ ID NO: 341634 - RNA, 19 nt, Homo sapiens
  misc_RNA (1)...(19): siRNA sense strand
caacauaaccugauaaagc

SEQ ID NO: 341635 - RNA, 19 nt, Homo sapiens
  misc_RNA (1)...(19): siRNA sense strand
gaaacaagcgucucugaag

SEQ ID NO: 341636 - RNA, 19 nt, Homo sapiens
  misc_RNA (1)...(19): siRNA sense strand
gcagagggauaccaugcaa

SEQ ID NO: 341637 - RNA, 19 nt, Homo sapiens
  misc_RNA (1)...(19): siRNA sense strand
ugaacuagaagcuguguua

SEQ ID NO: 341638 - RNA, 19 nt, Homo sapiens
  misc_RNA (1)...(19): siRNA sense strand
gagaaucccaggacagaaa

SEQ ID NO: 341639 - RNA, 19 nt, Homo sapiens
  misc_RNA (1)...(19): siRNA sense strand
gcccacagaucaacuggaa

SEQ ID NO: 341640 - RNA, 19 nt, Homo sapiens
  misc_RNA (1)...(19): siRNA sense strand
gaagacugcucagggcuau

SEQ ID NO: 341641 - RNA, 19 nt, Homo sapiens
  misc_RNA (1)...(19): siRNA sense strand
gacccagucuauuaaagaa

SEQ ID NO: 341642 - RNA, 19 nt, Homo sapiens
  misc_RNA (1)...(19): siRNA sense strand
acuagaagcuguguuagaa

SEQ ID NO: 341643 - RNA, 19 nt, Homo sapiens
  misc_RNA (1)...(19): siRNA sense strand
caugcaacauaaccugaua

SEQ ID NO: 341644 - RNA, 19 nt, Homo sapiens
  misc_RNA (1)...(19): siRNA sense strand
gcuggacaccuaccugaua

SEQ ID NO: 341645 - RNA, 19 nt, Homo sapiens
  misc_RNA (1)...(19): siRNA sense strand
cagaucaacuggaauggau

SEQ ID NO: 341646 - RNA, 19 nt, Homo sapiens
  misc_RNA (1)...(19): siRNA sense strand
gcaggaaauggcugaacua

SEQ ID NO: 341647 - RNA, 19 nt, Homo sapiens
  misc_RNA (1)...(19): siRNA sense strand
ccacagaucaacuggaaug

SEQ ID NO: 341648 - RNA, 19 nt, Homo sapiens
  misc_RNA (1)...(19): siRNA sense strand
caacaugcccacagaucaa

SEQ ID NO: 341649 - RNA, 19 nt, Homo sapiens
  misc_RNA (1)...(19): siRNA sense strand
ucaccaacaugcccacaga

SEQ ID NO: 341650 - RNA, 19 nt, Homo sapiens
  misc_RNA (1)...(19): siRNA sense strand
cagaggagauguggucaau

SEQ ID NO: 341651 - RNA, 19 nt, Homo sapiens
  misc_RNA (1)...(19): siRNA sense strand
caauugggcagauguguga

SEQ ID NO: 341652 - RNA, 19 nt, Homo sapiens
  misc_RNA (1)...(19): siRNA sense strand
ggagauguggucaauggaa

SEQ ID NO: 341653 - RNA, 19 nt, Homo sapiens
  misc_RNA (1)...(19): siRNA sense strand
guacagcuguguggugcuu

SEQ ID NO: 341654 - RNA, 19 nt, Homo sapiens
  misc_RNA (1)...(19): siRNA sense strand
ccaaagcgagcaagagaau

SEQ ID NO: 341655 - RNA, 19 nt, Homo sapiens
  misc_RNA (1)...(19): siRNA sense strand
gcuaugggcccuucaccaa

SEQ ID NO: 341656 - RNA, 19 nt, Homo sapiens
  misc_RNA (1)...(19): siRNA sense strand
gaaugagcaugauuuugaa

SEQ ID NO: 341657 - RNA, 19 nt, Homo sapiens
  misc_RNA (1)...(19): siRNA sense strand
ucagggcuauccucucaga

SEQ ID NO: 341658 - RNA, 19 nt, Homo sapiens
  misc_RNA (1)...(19): siRNA sense strand
agggauaccaugcaacaua

SEQ ID NO: 341659 - RNA, 19 nt, Homo sapiens
  misc_RNA (1)...(19): siRNA sense strand
gcuagaaaucuguugcuau

SEQ ID NO: 341660 - RNA, 19 nt, Homo sapiens
  misc_RNA (1)...(19): siRNA sense strand
ugaaugagcaugauuuuga

SEQ ID NO: 341661 - RNA, 19 nt, Homo sapiens
  misc_RNA (1)...(19): siRNA sense strand
ggcuagaaaucuguugcua

SEQ ID NO: 341662 - RNA, 19 nt, Homo sapiens
  misc_RNA (1)...(19): siRNA sense strand
ugaaacaagcgucucugaa

SEQ ID NO: 341663 - RNA, 19 nt, Homo sapiens
  misc_RNA (1)...(19): siRNA sense strand
aacauaaccugauaaagcu

SEQ ID NO: 341664 - RNA, 19 nt, Homo sapiens
  misc_RNA (1)...(19): siRNA sense strand
ugacccagucuauuaaaga

SEQ ID NO: 341665 - RNA, 19 nt, Homo sapiens
  misc_RNA (1)...(19): siRNA sense strand
gaacuagaagcuguguuag

SEQ ID NO: 341666 - RNA, 19 nt, Homo sapiens
  misc_RNA (1)...(19): siRNA sense strand
gugaaacaagcgucucuga

SEQ ID NO: 341667 - RNA, 19 nt, Homo sapiens
  misc_RNA (1)...(19): siRNA sense strand
ccaacaugcccacagauca

SEQ ID NO: 341668 - RNA, 19 nt, Homo sapiens
  misc_RNA (1)...(19): siRNA sense strand
uaugggcccuucaccaaca

SEQ ID NO: 341669 - RNA, 19 nt, Homo sapiens
  misc_RNA (1)...(19): siRNA sense strand
guccaaagcgagcaagaga

SEQ ID NO: 341670 - RNA, 19 nt, Homo sapiens
  misc_RNA (1)...(19): siRNA sense strand
cagaacaaagcacaucaga

SEQ ID NO: 341671 - RNA, 19 nt, Homo sapiens
  misc_RNA (1)...(19): siRNA sense strand
ccugcgaaauccagaacaa

SEQ ID NO: 341672 - RNA, 19 nt, Homo sapiens
  misc_RNA (1)...(19): siRNA sense strand
gaaaccaccaagguccaaa

SEQ ID NO: 341673 - RNA, 19 nt, Homo sapiens
  misc_RNA (1)...(19): siRNA sense strand
gauaaagcuccagcaggaa

SEQ ID NO: 341674 - RNA, 19 nt, Homo sapiens
  misc_RNA (1)...(19): siRNA sense strand
aaggagcuuucaucauuca

SEQ ID NO: 341675 - RNA, 19 nt, Homo sapiens
  misc_RNA (1)...(19): siRNA sense strand
ggugugagagugaaacaag

SEQ ID NO: 341676 - RNA, 19 nt, Homo sapiens
  misc_RNA (1)...(19): siRNA sense strand
gaaauggcugaacuagaag

SEQ ID NO: 341677 - RNA, 19 nt, Homo sapiens
  misc_RNA (1)...(19): siRNA sense strand
auaaagcuccagcaggaaa

SEQ ID NO: 341678 - RNA, 19 nt, Homo sapiens
  misc_RNA (1)...(19): siRNA sense strand
acccuuccaucauaaguga

SEQ ID NO: 341679 - RNA, 19 nt, Homo sapiens
  misc_RNA (1)...(19): siRNA sense strand
ggugacccagucuauuaaa

SEQ ID NO: 341680 - RNA, 19 nt, Homo sapiens
  misc_RNA (1)...(19): siRNA sense strand
cccagucuauuaaagaaag

SEQ ID NO: 341681 - RNA, 19 nt, Homo sapiens
  misc_RNA (1)...(19): siRNA sense strand
caucugggugugagaguga

SEQ ID NO: 341682 - RNA, 19 nt, Homo sapiens
  misc_RNA (1)...(19): siRNA sense strand
ccagucuauuaaagaaaga

SEQ ID NO: 341683 - RNA, 19 nt, Homo sapiens
  misc_RNA (1)...(19): siRNA sense strand
cgaaauccagaacaaagca

SEQ ID NO: 341684 - RNA, 19 nt, Homo sapiens
  misc_RNA (1)...(19): siRNA sense strand
aagagaaucccaggacaga

SEQ ID NO: 341685 - RNA, 19 nt, Homo sapiens
  misc_RNA (1)...(19): siRNA sense strand
gauguggucaauggaagaa

SEQ ID NO: 341686 - RNA, 19 nt, Homo sapiens
  misc_RNA (1)...(19): siRNA sense strand
ggaccugcgaaauccagaa

SEQ ID NO: 341687 - RNA, 19 nt, Homo sapiens
  misc_RNA (1)...(19): siRNA sense strand
gagcaugauuuugaaguca

SEQ ID NO: 341688 - RNA, 19 nt, Homo sapiens
  misc_RNA (1)...(19): siRNA sense strand
gugacccagucuauuaaag

SEQ ID NO: 341689 - RNA, 19 nt, Homo sapiens
  misc_RNA (1)...(19): siRNA sense strand
agaacaaagcacaucagaa

SEQ ID NO: 341690 - RNA, 19 nt, Homo sapiens
  misc_RNA (1)...(19): siRNA sense strand
uggaagaaaccaccaaggu

SEQ ID NO: 341691 - RNA, 19 nt, Homo sapiens
  misc_RNA (1)...(19): siRNA sense strand
ucaacuggaauggauggua

SEQ ID NO: 341692 - RNA, 19 nt, Homo sapiens
  misc_RNA (1)...(19): siRNA sense strand
ggaaauggcugaacuagaa

SEQ ID NO: 341693 - RNA, 19 nt, Homo sapiens
  misc_RNA (1)...(19): siRNA sense strand
gaacaaagcacaucagaaa

SEQ ID NO: 341694 - RNA, 19 nt, Homo sapiens
  misc_RNA (1)...(19): siRNA sense strand
cagcuacccuuccaucaua

SEQ ID NO: 341695 - RNA, 19 nt, Homo sapiens
  misc_RNA (1)...(19): siRNA sense strand
gggauaccaugcaacauaa

SEQ ID NO: 341696 - RNA, 19 nt, Homo sapiens
  misc_RNA (1)...(19): siRNA sense strand
gaggagauguggucaaugg

SEQ ID NO: 341697 - RNA, 19 nt, Homo sapiens
  misc_RNA (1)...(19): siRNA sense strand
gaaggagcuuucaucauuc

SEQ ID NO: 341698 - RNA, 19 nt, Homo sapiens
  misc_RNA (1)...(19): siRNA sense strand
cuagaaaucuguugcuaug

SEQ ID NO: 341699 - RNA, 19 nt, Homo sapiens
  misc_RNA (1)...(19): siRNA sense strand
gcucagggcuauccucuca

SEQ ID NO: 341700 - RNA, 19 nt, Homo sapiens
  misc_RNA (1)...(19): siRNA sense strand
aaacaagcgucucugaaga

SEQ ID NO: 341701 - RNA, 19 nt, Homo sapiens
  misc_RNA (1)...(19): siRNA sense strand
caacauaaccugauaaagc

SEQ ID NO: 341702 - RNA, 19 nt, Homo sapiens
  misc_RNA (1)...(19): siRNA sense strand
gaaacaagcgucucugaag

SEQ ID NO: 341703 - RNA, 19 nt, Homo sapiens
  misc_RNA (1)...(19): siRNA sense strand
gcagagggauaccaugcaa

SEQ ID NO: 341704 - RNA, 19 nt, Homo sapiens
  misc_RNA (1)...(19): siRNA sense strand
ugaacuagaagcuguguua

SEQ ID NO: 341705 - RNA, 19 nt, Homo sapiens
  misc_RNA (1)...(19): siRNA sense strand
gagaaucccaggacagaaa

SEQ ID NO: 341706 - RNA, 19 nt, Homo sapiens
  misc_RNA (1)...(19): siRNA sense strand
gcccacagaucaacuggaa

SEQ ID NO: 341707 - RNA, 19 nt, Homo sapiens
  misc_RNA (1)...(19): siRNA sense strand
gaagacugcucagggcuau

SEQ ID NO: 341708 - RNA, 19 nt, Homo sapiens
  misc_RNA (1)...(19): siRNA sense strand
gacccagucuauuaaagaa

SEQ ID NO: 341709 - RNA, 19 nt, Homo sapiens
  misc_RNA (1)...(19): siRNA sense strand
acuagaagcuguguuagaa

SEQ ID NO: 341710 - RNA, 19 nt, Homo sapiens
  misc_RNA (1)...(19): siRNA sense strand
caugcaacauaaccugaua

SEQ ID NO: 341711 - RNA, 19 nt, Homo sapiens
  misc_RNA (1)...(19): siRNA sense strand
gcuggacaccuaccugaua

SEQ ID NO: 341712 - RNA, 19 nt, Homo sapiens
  misc_RNA (1)...(19): siRNA sense strand
cagaucaacuggaauggau

SEQ ID NO: 341713 - RNA, 19 nt, Homo sapiens
  misc_RNA (1)...(19): siRNA sense strand
gcaggaaauggcugaacua

SEQ ID NO: 341714 - RNA, 19 nt, Homo sapiens
  misc_RNA (1)...(19): siRNA sense strand
ccacagaucaacuggaaug

SEQ ID NO: 341715 - RNA, 19 nt, Homo sapiens
  misc_RNA (1)...(19): siRNA sense strand
caacaugcccacagaucaa

SEQ ID NO: 341716 - RNA, 19 nt, Homo sapiens
  misc_RNA (1)...(19): siRNA sense strand
ucaccaacaugcccacaga

SEQ ID NO: 341717 - RNA, 19 nt, Homo sapiens
  misc_RNA (1)...(19): siRNA sense strand
cagaggagauguggucaau

SEQ ID NO: 341718 - RNA, 19 nt, Homo sapiens
  misc_RNA (1)...(19): siRNA sense strand
caauugggcagauguguga

SEQ ID NO: 341719 - RNA, 19 nt, Homo sapiens
  misc_RNA (1)...(19): siRNA sense strand
ggagauguggucaauggaa

SEQ ID NO: 341720 - RNA, 19 nt, Homo sapiens
  misc_RNA (1)...(19): siRNA sense strand
guacagcuguguggugcuu

SEQ ID NO: 341721 - RNA, 19 nt, Homo sapiens
  misc_RNA (1)...(19): siRNA sense strand
ccaaagcgagcaagagaau

SEQ ID NO: 341722 - RNA, 19 nt, Homo sapiens
  misc_RNA (1)...(19): siRNA sense strand
gcuaugggcccuucaccaa

SEQ ID NO: 341723 - RNA, 19 nt, Homo sapiens
  misc_RNA (1)...(19): siRNA sense strand
gaaugagcaugauuuugaa

SEQ ID NO: 341724 - RNA, 19 nt, Homo sapiens
  misc_RNA (1)...(19): siRNA sense strand
ucagggcuauccucucaga

SEQ ID NO: 341725 - RNA, 19 nt, Homo sapiens
  misc_RNA (1)...(19): siRNA sense strand
agggauaccaugcaacaua

SEQ ID NO: 341726 - RNA, 19 nt, Homo sapiens
  misc_RNA (1)...(19): siRNA sense strand
gcuagaaaucuguugcuau

SEQ ID NO: 341727 - RNA, 19 nt, Homo sapiens
  misc_RNA (1)...(19): siRNA sense strand
ugaaugagcaugauuuuga

SEQ ID NO: 341728 - RNA, 19 nt, Homo sapiens
  misc_RNA (1)...(19): siRNA sense strand
ggcuagaaaucuguugcua

SEQ ID NO: 341729 - RNA, 19 nt, Homo sapiens
  misc_RNA (1)...(19): siRNA sense strand
ugaaacaagcgucucugaa

SEQ ID NO: 341730 - RNA, 19 nt, Homo sapiens
  misc_RNA (1)...(19): siRNA sense strand
aacauaaccugauaaagcu

SEQ ID NO: 341731 - RNA, 19 nt, Homo sapiens
  misc_RNA (1)...(19): siRNA sense strand
ugacccagucuauuaaaga

SEQ ID NO: 341732 - RNA, 19 nt, Homo sapiens
  misc_RNA (1)...(19): siRNA sense strand
gaacuagaagcuguguuag

SEQ ID NO: 341733 - RNA, 19 nt, Homo sapiens
  misc_RNA (1)...(19): siRNA sense strand
gugaaacaagcgucucuga

SEQ ID NO: 341734 - RNA, 19 nt, Homo sapiens
  misc_RNA (1)...(19): siRNA sense strand
ccaacaugcccacagauca

SEQ ID NO: 341735 - RNA, 19 nt, Homo sapiens
  misc_RNA (1)...(19): siRNA sense strand
uaugggcccuucaccaaca

SEQ ID NO: 341736 - RNA, 19 nt, Homo sapiens
  misc_RNA (1)...(19): siRNA sense strand
guccaaagcgagcaagaga

SEQ ID NO: 341737 - RNA, 19 nt, Homo sapiens
  misc_RNA (1)...(19): siRNA sense strand
cagaacaaagcacaucaga

SEQ ID NO: 341738 - RNA, 19 nt, Homo sapiens
  misc_RNA (1)...(19): siRNA sense strand
ccugcgaaauccagaacaa

SEQ ID NO: 341739 - RNA, 19 nt, Homo sapiens
  misc_RNA (1)...(19): siRNA sense strand
gaaaccaccaagguccaaa

SEQ ID NO: 341740 - RNA, 19 nt, Homo sapiens
  misc_RNA (1)...(19): siRNA sense strand
gauaaagcuccagcaggaa

SEQ ID NO: 341741 - RNA, 19 nt, Homo sapiens
  misc_RNA (1)...(19): siRNA sense strand
aaggagcuuucaucauuca

SEQ ID NO: 341742 - RNA, 19 nt, Homo sapiens
  misc_RNA (1)...(19): siRNA sense strand
ggugugagagugaaacaag

SEQ ID NO: 341743 - RNA, 19 nt, Homo sapiens
  misc_RNA (1)...(19): siRNA sense strand
gaaauggcugaacuagaag

SEQ ID NO: 341744 - RNA, 19 nt, Homo sapiens
  misc_RNA (1)...(19): siRNA sense strand
auaaagcuccagcaggaaa

SEQ ID NO: 341745 - RNA, 19 nt, Homo sapiens
  misc_RNA (1)...(19): siRNA sense strand
acccuuccaucauaaguga

SEQ ID NO: 341746 - RNA, 19 nt, Homo sapiens
  misc_RNA (1)...(19): siRNA sense strand
ggugacccagucuauuaaa

SEQ ID NO: 341747 - RNA, 19 nt, Homo sapiens
  misc_RNA (1)...(19): siRNA sense strand
cccagucuauuaaagaaag

SEQ ID NO: 341748 - RNA, 19 nt, Homo sapiens
  misc_RNA (1)...(19): siRNA sense strand
caucugggugugagaguga

SEQ ID NO: 341749 - RNA, 19 nt, Homo sapiens
  misc_RNA (1)...(19): siRNA sense strand
ccagucuauuaaagaaaga

SEQ ID NO: 341750 - RNA, 19 nt, Homo sapiens
  misc_RNA (1)...(19): siRNA sense strand
cgaaauccagaacaaagca

SEQ ID NO: 341751 - RNA, 19 nt, Homo sapiens
  misc_RNA (1)...(19): siRNA sense strand
aagagaaucccaggacaga

SEQ ID NO: 341752 - RNA, 19 nt, Homo sapiens
  misc_RNA (1)...(19): siRNA sense strand
gauguggucaauggaagaa

SEQ ID NO: 341753 - RNA, 19 nt, Homo sapiens
  misc_RNA (1)...(19): siRNA sense strand
ggaccugcgaaauccagaa

SEQ ID NO: 341754 - RNA, 19 nt, Homo sapiens
  misc_RNA (1)...(19): siRNA sense strand
gagcaugauuuugaaguca

SEQ ID NO: 341755 - RNA, 19 nt, Homo sapiens
  misc_RNA (1)...(19): siRNA sense strand
gugacccagucuauuaaag

SEQ ID NO: 341756 - RNA, 19 nt, Homo sapiens
  misc_RNA (1)...(19): siRNA sense strand
agaacaaagcacaucagaa

SEQ ID NO: 341757 - RNA, 19 nt, Homo sapiens
  misc_RNA (1)...(19): siRNA sense strand
uggaagaaaccaccaaggu

SEQ ID NO: 341758 - RNA, 19 nt, Homo sapiens
  misc_RNA (1)...(19): siRNA sense strand
ucaacuggaauggauggua

SEQ ID NO: 341759 - RNA, 19 nt, Homo sapiens
  misc_RNA (1)...(19): siRNA sense strand
ggaaauggcugaacuagaa

SEQ ID NO: 341760 - RNA, 19 nt, Homo sapiens
  misc_RNA (1)...(19): siRNA sense strand
gaacaaagcacaucagaaa

SEQ ID NO: 341761 - RNA, 19 nt, Homo sapiens
  misc_RNA (1)...(19): siRNA sense strand
cagcuacccuuccaucaua

SEQ ID NO: 341762 - RNA, 19 nt, Homo sapiens
  misc_RNA (1)...(19): siRNA sense strand
gggauaccaugcaacauaa

SEQ ID NO: 341763 - RNA, 19 nt, Homo sapiens
  misc_RNA (1)...(19): siRNA sense strand
gaggagauguggucaaugg

SEQ ID NO: 341764 - RNA, 19 nt, Homo sapiens
  misc_RNA (1)...(19): siRNA sense strand
gaaggagcuuucaucauuc

SEQ ID NO: 341765 - RNA, 19 nt, Homo sapiens
  misc_RNA (1)...(19): siRNA sense strand
cuagaaaucuguugcuaug

SEQ ID NO: 341766 - RNA, 19 nt, Homo sapiens
  misc_RNA (1)...(19): siRNA sense strand
gcucagggcuauccucuca

SEQ ID NO: 341767 - RNA, 19 nt, Homo sapiens
  misc_RNA (1)...(19): siRNA sense strand
aaacaagcgucucugaaga

SEQ ID NO: 341768 - RNA, 19 nt, Homo sapiens
  misc_RNA (1)...(19): siRNA sense strand
caacauaaccugauaaagc

SEQ ID NO: 341769 - RNA, 19 nt, Homo sapiens
  misc_RNA (1)...(19): siRNA sense strand
gaaacaagcgucucugaag

SEQ ID NO: 341770 - RNA, 19 nt, Homo sapiens
  misc_RNA (1)...(19): siRNA sense strand
gcagagggauaccaugcaa

SEQ ID NO: 341771 - RNA, 19 nt, Homo sapiens
  misc_RNA (1)...(19): siRNA sense strand
ugaacuagaagcuguguua

SEQ ID NO: 341772 - RNA, 19 nt, Homo sapiens
  misc_RNA (1)...(19): siRNA sense strand
gagaaucccaggacagaaa

SEQ ID NO: 341773 - RNA, 19 nt, Homo sapiens
  misc_RNA (1)...(19): siRNA sense strand
gcccacagaucaacuggaa

SEQ ID NO: 341774 - RNA, 19 nt, Homo sapiens
  misc_RNA (1)...(19): siRNA sense strand
gaagacugcucagggcuau

SEQ ID NO: 341775 - RNA, 19 nt, Homo sapiens
  misc_RNA (1)...(19): siRNA sense strand
gacccagucuauuaaagaa

SEQ ID NO: 341776 - RNA, 19 nt, Homo sapiens
  misc_RNA (1)...(19): siRNA sense strand
acuagaagcuguguuagaa

SEQ ID NO: 341777 - RNA, 19 nt, Homo sapiens
  misc_RNA (1)...(19): siRNA sense strand
caugcaacauaaccugaua

SEQ ID NO: 341778 - RNA, 19 nt, Homo sapiens
  misc_RNA (1)...(19): siRNA sense strand
gcuggacaccuaccugaua

SEQ ID NO: 341779 - RNA, 19 nt, Homo sapiens
  misc_RNA (1)...(19): siRNA sense strand
cagaucaacuggaauggau

SEQ ID NO: 341780 - RNA, 19 nt, Homo sapiens
  misc_RNA (1)...(19): siRNA sense strand
gcaggaaauggcugaacua

SEQ ID NO: 341781 - RNA, 19 nt, Homo sapiens
  misc_RNA (1)...(19): siRNA sense strand
ccacagaucaacuggaaug

SEQ ID NO: 341782 - RNA, 19 nt, Homo sapiens
  misc_RNA (1)...(19): siRNA sense strand
caacaugcccacagaucaa

SEQ ID NO: 341783 - RNA, 19 nt, Homo sapiens
  misc_RNA (1)...(19): siRNA sense strand
ucaccaacaugcccacaga

SEQ ID NO: 341784 - RNA, 19 nt, Homo sapiens
  misc_RNA (1)...(19): siRNA sense strand
cagaggagauguggucaau

SEQ ID NO: 341785 - RNA, 19 nt, Homo sapiens
  misc_RNA (1)...(19): siRNA sense strand
caauugggcagauguguga

SEQ ID NO: 341786 - RNA, 19 nt, Homo sapiens
  misc_RNA (1)...(19): siRNA sense strand
ggagauguggucaauggaa

SEQ ID NO: 341787 - RNA, 19 nt, Homo sapiens
  misc_RNA (1)...(19): siRNA sense strand
guacagcuguguggugcuu

SEQ ID NO: 341788 - RNA, 19 nt, Homo sapiens
  misc_RNA (1)...(19): siRNA sense strand
ccaaagcgagcaagagaau

SEQ ID NO: 341789 - RNA, 19 nt, Homo sapiens
  misc_RNA (1)...(19): siRNA sense strand
gcuaugggcccuucaccaa

SEQ ID NO: 341790 - RNA, 19 nt, Homo sapiens
  misc_RNA (1)...(19): siRNA sense strand
gaaugagcaugauuuugaa

SEQ ID NO: 341791 - RNA, 19 nt, Homo sapiens
  misc_RNA (1)...(19): siRNA sense strand
ucagggcuauccucucaga

SEQ ID NO: 341792 - RNA, 19 nt, Homo sapiens
  misc_RNA (1)...(19): siRNA sense strand
agggauaccaugcaacaua

SEQ ID NO: 341793 - RNA, 19 nt, Homo sapiens
  misc_RNA (1)...(19): siRNA sense strand
gcuagaaaucuguugcuau

SEQ ID NO: 341794 - RNA, 19 nt, Homo sapiens
  misc_RNA (1)...(19): siRNA sense strand
ugaaugagcaugauuuuga

SEQ ID NO: 341795 - RNA, 19 nt, Homo sapiens
  misc_RNA (1)...(19): siRNA sense strand
ggcuagaaaucuguugcua

SEQ ID NO: 341796 - RNA, 19 nt, Homo sapiens
  misc_RNA (1)...(19): siRNA sense strand
ugaaacaagcgucucugaa

SEQ ID NO: 341797 - RNA, 19 nt, Homo sapiens
  misc_RNA (1)...(19): siRNA sense strand
aacauaaccugauaaagcu

SEQ ID NO: 341798 - RNA, 19 nt, Homo sapiens
  misc_RNA (1)...(19): siRNA sense strand
ugacccagucuauuaaaga

SEQ ID NO: 341799 - RNA, 19 nt, Homo sapiens
  misc_RNA (1)...(19): siRNA sense strand
gaacuagaagcuguguuag

SEQ ID NO: 341800 - RNA, 19 nt, Homo sapiens
  misc_RNA (1)...(19): siRNA sense strand
gugaaacaagcgucucuga

SEQ ID NO: 341801 - RNA, 19 nt, Homo sapiens
  misc_RNA (1)...(19): siRNA sense strand
ccaacaugcccacagauca

SEQ ID NO: 341802 - RNA, 19 nt, Homo sapiens
  misc_RNA (1)...(19): siRNA sense strand
uaugggcccuucaccaaca

SEQ ID NO: 341803 - RNA, 19 nt, Homo sapiens
  misc_RNA (1)...(19): siRNA sense strand
guccaaagcgagcaagaga

SEQ ID NO: 341804 - RNA, 19 nt, Homo sapiens
  misc_RNA (1)...(19): siRNA sense strand
cagaacaaagcacaucaga

SEQ ID NO: 341805 - RNA, 19 nt, Homo sapiens
  misc_RNA (1)...(19): siRNA sense strand
ccugcgaaauccagaacaa

SEQ ID NO: 341806 - RNA, 19 nt, Homo sapiens
  misc_RNA (1)...(19): siRNA sense strand
gaaaccaccaagguccaaa

SEQ ID NO: 341807 - RNA, 19 nt, Homo sapiens
  misc_RNA (1)...(19): siRNA sense strand
gauaaagcuccagcaggaa

SEQ ID NO: 341808 - RNA, 19 nt, Homo sapiens
  misc_RNA (1)...(19): siRNA sense strand
aaggagcuuucaucauuca

SEQ ID NO: 341809 - RNA, 19 nt, Homo sapiens
  misc_RNA (1)...(19): siRNA sense strand
ggugugagagugaaacaag

SEQ ID NO: 341810 - RNA, 19 nt, Homo sapiens
  misc_RNA (1)...(19): siRNA sense strand
gaaauggcugaacuagaag

SEQ ID NO: 341811 - RNA, 19 nt, Homo sapiens
  misc_RNA (1)...(19): siRNA sense strand
auaaagcuccagcaggaaa

SEQ ID NO: 341812 - RNA, 19 nt, Homo sapiens
  misc_RNA (1)...(19): siRNA sense strand
acccuuccaucauaaguga

SEQ ID NO: 341813 - RNA, 19 nt, Homo sapiens
  misc_RNA (1)...(19): siRNA sense strand
ggugacccagucuauuaaa

SEQ ID NO: 341814 - RNA, 19 nt, Homo sapiens
  misc_RNA (1)...(19): siRNA sense strand
cccagucuauuaaagaaag

SEQ ID NO: 341815 - RNA, 19 nt, Homo sapiens
  misc_RNA (1)...(19): siRNA sense strand
caucugggugugagaguga

SEQ ID NO: 341816 - RNA, 19 nt, Homo sapiens
  misc_RNA (1)...(19): siRNA sense strand
ccagucuauuaaagaaaga

SEQ ID NO: 341817 - RNA, 19 nt, Homo sapiens
  misc_RNA (1)...(19): siRNA sense strand
cgaaauccagaacaaagca

SEQ ID NO: 341818 - RNA, 19 nt, Homo sapiens
  misc_RNA (1)...(19): siRNA sense strand
aagagaaucccaggacaga

SEQ ID NO: 341819 - RNA, 19 nt, Homo sapiens
  misc_RNA (1)...(19): siRNA sense strand
gauguggucaauggaagaa

SEQ ID NO: 341820 - RNA, 19 nt, Homo sapiens
  misc_RNA (1)...(19): siRNA sense strand
ggaccugcgaaauccagaa

SEQ ID NO: 341821 - RNA, 19 nt, Homo sapiens
  misc_RNA (1)...(19): siRNA sense strand
gagcaugauuuugaaguca

SEQ ID NO: 341822 - RNA, 19 nt, Homo sapiens
  misc_RNA (1)...(19): siRNA sense strand
gugacccagucuauuaaag

SEQ ID NO: 341823 - RNA, 19 nt, Homo sapiens
  misc_RNA (1)...(19): siRNA sense strand
agaacaaagcacaucagaa

SEQ ID NO: 341824 - RNA, 19 nt, Homo sapiens
  misc_RNA (1)...(19): siRNA sense strand
uggaagaaaccaccaaggu

SEQ ID NO: 341825 - RNA, 19 nt, Homo sapiens
  misc_RNA (1)...(19): siRNA sense strand
ucaacuggaauggauggua

SEQ ID NO: 341826 - RNA, 19 nt, Homo sapiens
  misc_RNA (1)...(19): siRNA sense strand
ggaaauggcugaacuagaa

SEQ ID NO: 341827 - RNA, 19 nt, Homo sapiens
  misc_RNA (1)...(19): siRNA sense strand
gaacaaagcacaucagaaa

SEQ ID NO: 341828 - RNA, 19 nt, Homo sapiens
  misc_RNA (1)...(19): siRNA sense strand
cagcuacccuuccaucaua

SEQ ID NO: 341829 - RNA, 19 nt, Homo sapiens
  misc_RNA (1)...(19): siRNA sense strand
gggauaccaugcaacauaa

SEQ ID NO: 341830 - RNA, 19 nt, Homo sapiens
  misc_RNA (1)...(19): siRNA sense strand
gaggagauguggucaaugg

SEQ ID NO: 341831 - RNA, 19 nt, Homo sapiens
  misc_RNA (1)...(19): siRNA sense strand
gaaggagcuuucaucauuc

SEQ ID NO: 341832 - RNA, 19 nt, Homo sapiens
  misc_RNA (1)...(19): siRNA sense strand
cuagaaaucuguugcuaug

SEQ ID NO: 341833 - RNA, 19 nt, Homo sapiens
  misc_RNA (1)...(19): siRNA sense strand
gcucagggcuauccucuca

SEQ ID NO: 341834 - RNA, 19 nt, Homo sapiens
  misc_RNA (1)...(19): siRNA sense strand
aaacaagcgucucugaaga

SEQ ID NO: 341835 - RNA, 19 nt, Homo sapiens
  misc_RNA (1)...(19): siRNA sense strand
caacauaaccugauaaagc

SEQ ID NO: 341836 - RNA, 19 nt, Homo sapiens
  misc_RNA (1)...(19): siRNA sense strand
gaaacaagcgucucugaag

SEQ ID NO: 341837 - RNA, 19 nt, Homo sapiens
  misc_RNA (1)...(19): siRNA sense strand
gcagagggauaccaugcaa

SEQ ID NO: 341838 - RNA, 19 nt, Homo sapiens
  misc_RNA (1)...(19): siRNA sense strand
ugaacuagaagcuguguua

SEQ ID NO: 341839 - RNA, 19 nt, Homo sapiens
  misc_RNA (1)...(19): siRNA sense strand
gagaaucccaggacagaaa

SEQ ID NO: 341840 - RNA, 19 nt, Homo sapiens
  misc_RNA (1)...(19): siRNA sense strand
gcccacagaucaacuggaa

SEQ ID NO: 341841 - RNA, 19 nt, Homo sapiens
  misc_RNA (1)...(19): siRNA sense strand
gaagacugcucagggcuau

SEQ ID NO: 341842 - RNA, 19 nt, Homo sapiens
  misc_RNA (1)...(19): siRNA sense strand
gacccagucuauuaaagaa

SEQ ID NO: 341843 - RNA, 19 nt, Homo sapiens
  misc_RNA (1)...(19): siRNA sense strand
acuagaagcuguguuagaa

SEQ ID NO: 341844 - RNA, 19 nt, Homo sapiens
  misc_RNA (1)...(19): siRNA sense strand
caugcaacauaaccugaua

SEQ ID NO: 341845 - RNA, 19 nt, Homo sapiens
  misc_RNA (1)...(19): siRNA sense strand
gcuggacaccuaccugaua

SEQ ID NO: 341846 - RNA, 19 nt, Homo sapiens
  misc_RNA (1)...(19): siRNA sense strand
cagaucaacuggaauggau

SEQ ID NO: 341847 - RNA, 19 nt, Homo sapiens
  misc_RNA (1)...(19): siRNA sense strand
gcaggaaauggcugaacua

SEQ ID NO: 341848 - RNA, 19 nt, Homo sapiens
  misc_RNA (1)...(19): siRNA sense strand
ccacagaucaacuggaaug

SEQ ID NO: 341849 - RNA, 19 nt, Homo sapiens
  misc_RNA (1)...(19): siRNA sense strand
caacaugcccacagaucaa

SEQ ID NO: 341850 - RNA, 19 nt, Homo sapiens
  misc_RNA (1)...(19): siRNA sense strand
ucaccaacaugcccacaga

SEQ ID NO: 341851 - RNA, 19 nt, Homo sapiens
  misc_RNA (1)...(19): siRNA sense strand
cagaggagauguggucaau

SEQ ID NO: 341852 - RNA, 19 nt, Homo sapiens
  misc_RNA (1)...(19): siRNA sense strand
caauugggcagauguguga

SEQ ID NO: 341853 - RNA, 19 nt, Homo sapiens
  misc_RNA (1)...(19): siRNA sense strand
ggagauguggucaauggaa

SEQ ID NO: 341854 - RNA, 19 nt, Homo sapiens
  misc_RNA (1)...(19): siRNA sense strand
guacagcuguguggugcuu

SEQ ID NO: 341855 - RNA, 19 nt, Homo sapiens
  misc_RNA (1)...(19): siRNA sense strand
ccaaagcgagcaagagaau

SEQ ID NO: 341856 - RNA, 19 nt, Homo sapiens
  misc_RNA (1)...(19): siRNA sense strand
gcuaugggcccuucaccaa

SEQ ID NO: 341857 - RNA, 19 nt, Homo sapiens
  misc_RNA (1)...(19): siRNA sense strand
gaaugagcaugauuuugaa

SEQ ID NO: 341858 - RNA, 19 nt, Homo sapiens
  misc_RNA (1)...(19): siRNA sense strand
ucagggcuauccucucaga

SEQ ID NO: 341859 - RNA, 19 nt, Homo sapiens
  misc_RNA (1)...(19): siRNA sense strand
agggauaccaugcaacaua

SEQ ID NO: 341860 - RNA, 19 nt, Homo sapiens
  misc_RNA (1)...(19): siRNA sense strand
gcuagaaaucuguugcuau

SEQ ID NO: 341861 - RNA, 19 nt, Homo sapiens
  misc_RNA (1)...(19): siRNA sense strand
ugaaugagcaugauuuuga

SEQ ID NO: 341862 - RNA, 19 nt, Homo sapiens
  misc_RNA (1)...(19): siRNA sense strand
ggcuagaaaucuguugcua

SEQ ID NO: 341863 - RNA, 19 nt, Homo sapiens
  misc_RNA (1)...(19): siRNA sense strand
ugaaacaagcgucucugaa

SEQ ID NO: 341864 - RNA, 19 nt, Homo sapiens
  misc_RNA (1)...(19): siRNA sense strand
aacauaaccugauaaagcu

SEQ ID NO: 341865 - RNA, 19 nt, Homo sapiens
  misc_RNA (1)...(19): siRNA sense strand
ugacccagucuauuaaaga

SEQ ID NO: 341866 - RNA, 19 nt, Homo sapiens
  misc_RNA (1)...(19): siRNA sense strand
gaacuagaagcuguguuag

SEQ ID NO: 341867 - RNA, 19 nt, Homo sapiens
  misc_RNA (1)...(19): siRNA sense strand
gugaaacaagcgucucuga

SEQ ID NO: 341868 - RNA, 19 nt, Homo sapiens
  misc_RNA (1)...(19): siRNA sense strand
ccaacaugcccacagauca

SEQ ID NO: 341869 - RNA, 19 nt, Homo sapiens
  misc_RNA (1)...(19): siRNA sense strand
uaugggcccuucaccaaca

SEQ ID NO: 341870 - RNA, 19 nt, Homo sapiens
  misc_RNA (1)...(19): siRNA sense strand
guccaaagcgagcaagaga

SEQ ID NO: 341871 - RNA, 19 nt, Homo sapiens
  misc_RNA (1)...(19): siRNA sense strand
cagaacaaagcacaucaga

SEQ ID NO: 341872 - RNA, 19 nt, Homo sapiens
  misc_RNA (1)...(19): siRNA sense strand
ccugcgaaauccagaacaa

SEQ ID NO: 341873 - RNA, 19 nt, Homo sapiens
  misc_RNA (1)...(19): siRNA sense strand
gaaaccaccaagguccaaa

SEQ ID NO: 341874 - RNA, 19 nt, Homo sapiens
  misc_RNA (1)...(19): siRNA sense strand
gauaaagcuccagcaggaa

SEQ ID NO: 341875 - RNA, 19 nt, Homo sapiens
  misc_RNA (1)...(19): siRNA sense strand
aaggagcuuucaucauuca

SEQ ID NO: 341876 - RNA, 19 nt, Homo sapiens
  misc_RNA (1)...(19): siRNA sense strand
ggugugagagugaaacaag

SEQ ID NO: 341877 - RNA, 19 nt, Homo sapiens
  misc_RNA (1)...(19): siRNA sense strand
gaaauggcugaacuagaag

SEQ ID NO: 341878 - RNA, 19 nt, Homo sapiens
  misc_RNA (1)...(19): siRNA sense strand
auaaagcuccagcaggaaa

SEQ ID NO: 341879 - RNA, 19 nt, Homo sapiens
  misc_RNA (1)...(19): siRNA sense strand
acccuuccaucauaaguga

SEQ ID NO: 341880 - RNA, 19 nt, Homo sapiens
  misc_RNA (1)...(19): siRNA sense strand
ggugacccagucuauuaaa

SEQ ID NO: 341881 - RNA, 19 nt, Homo sapiens
  misc_RNA (1)...(19): siRNA sense strand
cccagucuauuaaagaaag

SEQ ID NO: 341882 - RNA, 19 nt, Homo sapiens
  misc_RNA (1)...(19): siRNA sense strand
caucugggugugagaguga

SEQ ID NO: 341883 - RNA, 19 nt, Homo sapiens
  misc_RNA (1)...(19): siRNA sense strand
ccagucuauuaaagaaaga

SEQ ID NO: 341884 - RNA, 19 nt, Homo sapiens
  misc_RNA (1)...(19): siRNA sense strand
cgaaauccagaacaaagca

SEQ ID NO: 341885 - RNA, 19 nt, Homo sapiens
  misc_RNA (1)...(19): siRNA sense strand
aagagaaucccaggacaga

SEQ ID NO: 341886 - RNA, 19 nt, Homo sapiens
  misc_RNA (1)...(19): siRNA sense strand
gauguggucaauggaagaa

SEQ ID NO: 341887 - RNA, 19 nt, Homo sapiens
  misc_RNA (1)...(19): siRNA sense strand
ggaccugcgaaauccagaa

SEQ ID NO: 341888 - RNA, 19 nt, Homo sapiens
  misc_RNA (1)...(19): siRNA sense strand
gagcaugauuuugaaguca

SEQ ID NO: 341889 - RNA, 19 nt, Homo sapiens
  misc_RNA (1)...(19): siRNA sense strand
gugacccagucuauuaaag

SEQ ID NO: 341890 - RNA, 19 nt, Homo sapiens
  misc_RNA (1)...(19): siRNA sense strand
agaacaaagcacaucagaa

SEQ ID NO: 341891 - RNA, 19 nt, Homo sapiens
  misc_RNA (1)...(19): siRNA sense strand
uggaagaaaccaccaaggu

SEQ ID NO: 341892 - RNA, 19 nt, Homo sapiens
  misc_RNA (1)...(19): siRNA sense strand
ucaacuggaauggauggua

SEQ ID NO: 341893 - RNA, 19 nt, Homo sapiens
  misc_RNA (1)...(19): siRNA sense strand
ggaaauggcugaacuagaa

SEQ ID NO: 341894 - RNA, 19 nt, Homo sapiens
  misc_RNA (1)...(19): siRNA sense strand
gaacaaagcacaucagaaa

SEQ ID NO: 341895 - RNA, 19 nt, Homo sapiens
  misc_RNA (1)...(19): siRNA sense strand
cagcuacccuuccaucaua

SEQ ID NO: 341896 - RNA, 19 nt, Homo sapiens
  misc_RNA (1)...(19): siRNA sense strand
gggauaccaugcaacauaa

SEQ ID NO: 341897 - RNA, 19 nt, Homo sapiens
  misc_RNA (1)...(19): siRNA sense strand
gaggagauguggucaaugg

SEQ ID NO: 341898 - RNA, 19 nt, Homo sapiens
  misc_RNA (1)...(19): siRNA sense strand
gaaggagcuuucaucauuc

SEQ ID NO: 341899 - RNA, 19 nt, Homo sapiens
  misc_RNA (1)...(19): siRNA sense strand
cuagaaaucuguugcuaug

SEQ ID NO: 341900 - RNA, 19 nt, Homo sapiens
  misc_RNA (1)...(19): siRNA sense strand
gcucagggcuauccucuca

SEQ ID NO: 341901 - RNA, 19 nt, Homo sapiens
  misc_RNA (1)...(19): siRNA sense strand
aaacaagcgucucugaaga

SEQ ID NO: 341902 - RNA, 19 nt, Homo sapiens
  misc_RNA (1)...(19): siRNA sense strand
caacauaaccugauaaagc

SEQ ID NO: 341903 - RNA, 19 nt, Homo sapiens
  misc_RNA (1)...(19): siRNA sense strand
gaaacaagcgucucugaag

SEQ ID NO: 341904 - RNA, 19 nt, Homo sapiens
  misc_RNA (1)...(19): siRNA sense strand
gcagagggauaccaugcaa

SEQ ID NO: 341905 - RNA, 19 nt, Homo sapiens
  misc_RNA (1)...(19): siRNA sense strand
ugaacuagaagcuguguua

SEQ ID NO: 341906 - RNA, 19 nt, Homo sapiens
  misc_RNA (1)...(19): siRNA sense strand
gagaaucccaggacagaaa

SEQ ID NO: 341907 - RNA, 19 nt, Homo sapiens
  misc_RNA (1)...(19): siRNA sense strand
gcccacagaucaacuggaa

SEQ ID NO: 341908 - RNA, 19 nt, Homo sapiens
  misc_RNA (1)...(19): siRNA sense strand
gaagacugcucagggcuau

SEQ ID NO: 341909 - RNA, 19 nt, Homo sapiens
  misc_RNA (1)...(19): siRNA sense strand
gacccagucuauuaaagaa

SEQ ID NO: 341910 - RNA, 19 nt, Homo sapiens
  misc_RNA (1)...(19): siRNA sense strand
acuagaagcuguguuagaa

SEQ ID NO: 341911 - RNA, 19 nt, Homo sapiens
  misc_RNA (1)...(19): siRNA sense strand
caugcaacauaaccugaua

SEQ ID NO: 341912 - RNA, 19 nt, Homo sapiens
  misc_RNA (1)...(19): siRNA sense strand
gcuggacaccuaccugaua

SEQ ID NO: 341913 - RNA, 19 nt, Homo sapiens
  misc_RNA (1)...(19): siRNA sense strand
cagaucaacuggaauggau

SEQ ID NO: 341914 - RNA, 19 nt, Homo sapiens
  misc_RNA (1)...(19): siRNA sense strand
gcaggaaauggcugaacua

SEQ ID NO: 341915 - RNA, 19 nt, Homo sapiens
  misc_RNA (1)...(19): siRNA sense strand
ccacagaucaacuggaaug

SEQ ID NO: 341916 - RNA, 19 nt, Homo sapiens
  misc_RNA (1)...(19): siRNA sense strand
caacaugcccacagaucaa

SEQ ID NO: 341917 - RNA, 19 nt, Homo sapiens
  misc_RNA (1)...(19): siRNA sense strand
ucaccaacaugcccacaga

SEQ ID NO: 341918 - RNA, 19 nt, Homo sapiens
  misc_RNA (1)...(19): siRNA sense strand
cagaggagauguggucaau

SEQ ID NO: 341919 - RNA, 19 nt, Homo sapiens
  misc_RNA (1)...(19): siRNA sense strand
caauugggcagauguguga

SEQ ID NO: 341920 - RNA, 19 nt, Homo sapiens
  misc_RNA (1)...(19): siRNA sense strand
ggagauguggucaauggaa

SEQ ID NO: 341921 - RNA, 19 nt, Homo sapiens
  misc_RNA (1)...(19): siRNA sense strand
guacagcuguguggugcuu

SEQ ID NO: 341922 - RNA, 19 nt, Homo sapiens
  misc_RNA (1)...(19): siRNA sense strand
ccaaagcgagcaagagaau

SEQ ID NO: 341923 - RNA, 19 nt, Homo sapiens
  misc_RNA (1)...(19): siRNA sense strand
gcuaugggcccuucaccaa

SEQ ID NO: 341924 - RNA, 19 nt, Homo sapiens
  misc_RNA (1)...(19): siRNA sense strand
gaaugagcaugauuuugaa

SEQ ID NO: 341925 - RNA, 19 nt, Homo sapiens
  misc_RNA (1)...(19): siRNA sense strand
ucagggcuauccucucaga

SEQ ID NO: 341926 - RNA, 19 nt, Homo sapiens
  misc_RNA (1)...(19): siRNA sense strand
agggauaccaugcaacaua

SEQ ID NO: 341927 - RNA, 19 nt, Homo sapiens
  misc_RNA (1)...(19): siRNA sense strand
gcuagaaaucuguugcuau

SEQ ID NO: 341928 - RNA, 19 nt, Homo sapiens
  misc_RNA (1)...(19): siRNA sense strand
ugaaugagcaugauuuuga

SEQ ID NO: 341929 - RNA, 19 nt, Homo sapiens
  misc_RNA (1)...(19): siRNA sense strand
ggcuagaaaucuguugcua

SEQ ID NO: 341930 - RNA, 19 nt, Homo sapiens
  misc_RNA (1)...(19): siRNA sense strand
ugaaacaagcgucucugaa

SEQ ID NO: 341931 - RNA, 19 nt, Homo sapiens
  misc_RNA (1)...(19): siRNA sense strand
aacauaaccugauaaagcu

SEQ ID NO: 341932 - RNA, 19 nt, Homo sapiens
  misc_RNA (1)...(19): siRNA sense strand
ugacccagucuauuaaaga

SEQ ID NO: 341933 - RNA, 19 nt, Homo sapiens
  misc_RNA (1)...(19): siRNA sense strand
gaacuagaagcuguguuag

SEQ ID NO: 341934 - RNA, 19 nt, Homo sapiens
  misc_RNA (1)...(19): siRNA sense strand
gugaaacaagcgucucuga

SEQ ID NO: 341935 - RNA, 19 nt, Homo sapiens
  misc_RNA (1)...(19): siRNA sense strand
ccaacaugcccacagauca

SEQ ID NO: 341936 - RNA, 19 nt, Homo sapiens
  misc_RNA (1)...(19): siRNA sense strand
uaugggcccuucaccaaca

SEQ ID NO: 341937 - RNA, 19 nt, Homo sapiens
  misc_RNA (1)...(19): siRNA sense strand
guccaaagcgagcaagaga

SEQ ID NO: 341938 - RNA, 19 nt, Homo sapiens
  misc_RNA (1)...(19): siRNA sense strand
cagaacaaagcacaucaga

SEQ ID NO: 341939 - RNA, 19 nt, Homo sapiens
  misc_RNA (1)...(19): siRNA sense strand
ccugcgaaauccagaacaa

SEQ ID NO: 341940 - RNA, 19 nt, Homo sapiens
  misc_RNA (1)...(19): siRNA sense strand
gaaaccaccaagguccaaa

SEQ ID NO: 341941 - RNA, 19 nt, Homo sapiens
  misc_RNA (1)...(19): siRNA sense strand
gauaaagcuccagcaggaa

SEQ ID NO: 341942 - RNA, 19 nt, Homo sapiens
  misc_RNA (1)...(19): siRNA sense strand
aaggagcuuucaucauuca

SEQ ID NO: 341943 - RNA, 19 nt, Homo sapiens
  misc_RNA (1)...(19): siRNA sense strand
ggugugagagugaaacaag

SEQ ID NO: 341944 - RNA, 19 nt, Homo sapiens
  misc_RNA (1)...(19): siRNA sense strand
gaaauggcugaacuagaag

SEQ ID NO: 341945 - RNA, 19 nt, Homo sapiens
  misc_RNA (1)...(19): siRNA sense strand
auaaagcuccagcaggaaa

SEQ ID NO: 341946 - RNA, 19 nt, Homo sapiens
  misc_RNA (1)...(19): siRNA sense strand
acccuuccaucauaaguga

SEQ ID NO: 341947 - RNA, 19 nt, Homo sapiens
  misc_RNA (1)...(19): siRNA sense strand
ggugacccagucuauuaaa

SEQ ID NO: 341948 - RNA, 19 nt, Homo sapiens
  misc_RNA (1)...(19): siRNA sense strand
cccagucuauuaaagaaag

SEQ ID NO: 341949 - RNA, 19 nt, Homo sapiens
  misc_RNA (1)...(19): siRNA sense strand
caucugggugugagaguga

SEQ ID NO: 341950 - RNA, 19 nt, Homo sapiens
  misc_RNA (1)...(19): siRNA sense strand
ccagucuauuaaagaaaga

SEQ ID NO: 341951 - RNA, 19 nt, Homo sapiens
  misc_RNA (1)...(19): siRNA sense strand
cgaaauccagaacaaagca

SEQ ID NO: 341952 - RNA, 19 nt, Homo sapiens
  misc_RNA (1)...(19): siRNA sense strand
aagagaaucccaggacaga

SEQ ID NO: 341953 - RNA, 19 nt, Homo sapiens
  misc_RNA (1)...(19): siRNA sense strand
gauguggucaauggaagaa

SEQ ID NO: 341954 - RNA, 19 nt, Homo sapiens
  misc_RNA (1)...(19): siRNA sense strand
ggaccugcgaaauccagaa

SEQ ID NO: 341955 - RNA, 19 nt, Homo sapiens
  misc_RNA (1)...(19): siRNA sense strand
gagcaugauuuugaaguca

SEQ ID NO: 341956 - RNA, 19 nt, Homo sapiens
  misc_RNA (1)...(19): siRNA sense strand
gugacccagucuauuaaag

SEQ ID NO: 341957 - RNA, 19 nt, Homo sapiens
  misc_RNA (1)...(19): siRNA sense strand
agaacaaagcacaucagaa

SEQ ID NO: 341958 - RNA, 19 nt, Homo sapiens
  misc_RNA (1)...(19): siRNA sense strand
uggaagaaaccaccaaggu

SEQ ID NO: 341959 - RNA, 19 nt, Homo sapiens
  misc_RNA (1)...(19): siRNA sense strand
ucaacuggaauggauggua

SEQ ID NO: 341960 - RNA, 19 nt, Homo sapiens
  misc_RNA (1)...(19): siRNA sense strand
ggaaauggcugaacuagaa

SEQ ID NO: 341961 - RNA, 19 nt, Homo sapiens
  misc_RNA (1)...(19): siRNA sense strand
gaacaaagcacaucagaaa

SEQ ID NO: 341962 - RNA, 19 nt, Homo sapiens
  misc_RNA (1)...(19): siRNA sense strand
cagcuacccuuccaucaua

SEQ ID NO: 341963 - RNA, 19 nt, Homo sapiens
  misc_RNA (1)...(19): siRNA sense strand
gggauaccaugcaacauaa

SEQ ID NO: 341964 - RNA, 19 nt, Homo sapiens
  misc_RNA (1)...(19): siRNA sense strand
gaggagauguggucaaugg

SEQ ID NO: 341965 - RNA, 19 nt, Homo sapiens
  misc_RNA (1)...(19): siRNA sense strand
gaaggagcuuucaucauuc

SEQ ID NO: 341966 - RNA, 19 nt, Homo sapiens
  misc_RNA (1)...(19): siRNA sense strand
cuagaaaucuguugcuaug

SEQ ID NO: 341967 - RNA, 19 nt, Homo sapiens
  misc_RNA (1)...(19): siRNA sense strand
gcucagggcuauccucuca

SEQ ID NO: 341968 - RNA, 19 nt, Homo sapiens
  misc_RNA (1)...(19): siRNA sense strand
aaacaagcgucucugaaga

SEQ ID NO: 341969 - RNA, 19 nt, Homo sapiens
  misc_RNA (1)...(19): siRNA sense strand
caacauaaccugauaaagc

SEQ ID NO: 341970 - RNA, 19 nt, Homo sapiens
  misc_RNA (1)...(19): siRNA sense strand
gaaacaagcgucucugaag

SEQ ID NO: 341971 - RNA, 19 nt, Homo sapiens
  misc_RNA (1)...(19): siRNA sense strand
gcagagggauaccaugcaa

SEQ ID NO: 341972 - RNA, 19 nt, Homo sapiens
  misc_RNA (1)...(19): siRNA sense strand
ugaacuagaagcuguguua

SEQ ID NO: 341973 - RNA, 19 nt, Homo sapiens
  misc_RNA (1)...(19): siRNA sense strand
gagaaucccaggacagaaa

SEQ ID NO: 341974 - RNA, 19 nt, Homo sapiens
  misc_RNA (1)...(19): siRNA sense strand
gcccacagaucaacuggaa

SEQ ID NO: 341975 - RNA, 19 nt, Homo sapiens
  misc_RNA (1)...(19): siRNA sense strand
gaagacugcucagggcuau

SEQ ID NO: 341976 - RNA, 19 nt, Homo sapiens
  misc_RNA (1)...(19): siRNA sense strand
gacccagucuauuaaagaa

SEQ ID NO: 341977 - RNA, 19 nt, Homo sapiens
  misc_RNA (1)...(19): siRNA sense strand
acuagaagcuguguuagaa

SEQ ID NO: 341978 - RNA, 19 nt, Homo sapiens
  misc_RNA (1)...(19): siRNA sense strand
caugcaacauaaccugaua

SEQ ID NO: 341979 - RNA, 19 nt, Homo sapiens
  misc_RNA (1)...(19): siRNA sense strand
gcuggacaccuaccugaua

SEQ ID NO: 341980 - RNA, 19 nt, Homo sapiens
  misc_RNA (1)...(19): siRNA sense strand
cagaucaacuggaauggau

SEQ ID NO: 341981 - RNA, 19 nt, Homo sapiens
  misc_RNA (1)...(19): siRNA sense strand
gcaggaaauggcugaacua

SEQ ID NO: 341982 - RNA, 19 nt, Homo sapiens
  misc_RNA (1)...(19): siRNA sense strand
ccacagaucaacuggaaug

SEQ ID NO: 341983 - RNA, 19 nt, Homo sapiens
  misc_RNA (1)...(19): siRNA sense strand
caacaugcccacagaucaa

SEQ ID NO: 341984 - RNA, 19 nt, Homo sapiens
  misc_RNA (1)...(19): siRNA sense strand
ucaccaacaugcccacaga

SEQ ID NO: 341985 - RNA, 19 nt, Homo sapiens
  misc_RNA (1)...(19): siRNA sense strand
cagaggagauguggucaau

SEQ ID NO: 341986 - RNA, 19 nt, Homo sapiens
  misc_RNA (1)...(19): siRNA sense strand
caauugggcagauguguga

SEQ ID NO: 341987 - RNA, 19 nt, Homo sapiens
  misc_RNA (1)...(19): siRNA sense strand
ggagauguggucaauggaa

SEQ ID NO: 341988 - RNA, 19 nt, Homo sapiens
  misc_RNA (1)...(19): siRNA sense strand
guacagcuguguggugcuu

SEQ ID NO: 341989 - RNA, 19 nt, Homo sapiens
  misc_RNA (1)...(19): siRNA sense strand
ccaaagcgagcaagagaau

SEQ ID NO: 341990 - RNA, 19 nt, Homo sapiens
  misc_RNA (1)...(19): siRNA sense strand
gcuaugggcccuucaccaa

SEQ ID NO: 341991 - RNA, 19 nt, Homo sapiens
  misc_RNA (1)...(19): siRNA sense strand
gaaugagcaugauuuugaa

SEQ ID NO: 341992 - RNA, 19 nt, Homo sapiens
  misc_RNA (1)...(19): siRNA sense strand
ucagggcuauccucucaga

SEQ ID NO: 341993 - RNA, 19 nt, Homo sapiens
  misc_RNA (1)...(19): siRNA sense strand
agggauaccaugcaacaua

SEQ ID NO: 341994 - RNA, 19 nt, Homo sapiens
  misc_RNA (1)...(19): siRNA sense strand
gcuagaaaucuguugcuau

SEQ ID NO: 341995 - RNA, 19 nt, Homo sapiens
  misc_RNA (1)...(19): siRNA sense strand
ugaaugagcaugauuuuga

SEQ ID NO: 341996 - RNA, 19 nt, Homo sapiens
  misc_RNA (1)...(19): siRNA sense strand
ggcuagaaaucuguugcua

SEQ ID NO: 341997 - RNA, 19 nt, Homo sapiens
  misc_RNA (1)...(19): siRNA sense strand
ugaaacaagcgucucugaa

SEQ ID NO: 341998 - RNA, 19 nt, Homo sapiens
  misc_RNA (1)...(19): siRNA sense strand
aacauaaccugauaaagcu

SEQ ID NO: 341999 - RNA, 19 nt, Homo sapiens
  misc_RNA (1)...(19): siRNA sense strand
ugacccagucuauuaaaga

SEQ ID NO: 342000 - RNA, 19 nt, Homo sapiens
  misc_RNA (1)...(19): siRNA sense strand
gaacuagaagcuguguuag

SEQ ID NO: 342001 - RNA, 19 nt, Homo sapiens
  misc_RNA (1)...(19): siRNA sense strand
gugaaacaagcgucucuga

SEQ ID NO: 342002 - RNA, 19 nt, Homo sapiens
  misc_RNA (1)...(19): siRNA sense strand
ccaacaugcccacagauca

SEQ ID NO: 342003 - RNA, 19 nt, Homo sapiens
  misc_RNA (1)...(19): siRNA sense strand
uaugggcccuucaccaaca

SEQ ID NO: 342004 - RNA, 19 nt, Homo sapiens
  misc_RNA (1)...(19): siRNA sense strand
guccaaagcgagcaagaga

SEQ ID NO: 342005 - RNA, 19 nt, Homo sapiens
  misc_RNA (1)...(19): siRNA sense strand
cagaacaaagcacaucaga

SEQ ID NO: 342006 - RNA, 19 nt, Homo sapiens
  misc_RNA (1)...(19): siRNA sense strand
ccugcgaaauccagaacaa

SEQ ID NO: 342007 - RNA, 19 nt, Homo sapiens
  misc_RNA (1)...(19): siRNA sense strand
gaaaccaccaagguccaaa

SEQ ID NO: 342008 - RNA, 19 nt, Homo sapiens
  misc_RNA (1)...(19): siRNA sense strand
gauaaagcuccagcaggaa

SEQ ID NO: 342009 - RNA, 19 nt, Homo sapiens
  misc_RNA (1)...(19): siRNA sense strand
aaggagcuuucaucauuca

SEQ ID NO: 342010 - RNA, 19 nt, Homo sapiens
  misc_RNA (1)...(19): siRNA sense strand
ggugugagagugaaacaag

SEQ ID NO: 342011 - RNA, 19 nt, Homo sapiens
  misc_RNA (1)...(19): siRNA sense strand
gaaauggcugaacuagaag

SEQ ID NO: 342012 - RNA, 19 nt, Homo sapiens
  misc_RNA (1)...(19): siRNA sense strand
auaaagcuccagcaggaaa

SEQ ID NO: 342013 - RNA, 19 nt, Homo sapiens
  misc_RNA (1)...(19): siRNA sense strand
acccuuccaucauaaguga

SEQ ID NO: 342014 - RNA, 19 nt, Homo sapiens
  misc_RNA (1)...(19): siRNA sense strand
ggugacccagucuauuaaa

SEQ ID NO: 342015 - RNA, 19 nt, Homo sapiens
  misc_RNA (1)...(19): siRNA sense strand
cccagucuauuaaagaaag

SEQ ID NO: 342016 - RNA, 19 nt, Homo sapiens
  misc_RNA (1)...(19): siRNA sense strand
caucugggugugagaguga

SEQ ID NO: 342017 - RNA, 19 nt, Homo sapiens
  misc_RNA (1)...(19): siRNA sense strand
ccagucuauuaaagaaaga

SEQ ID NO: 342018 - RNA, 19 nt, Homo sapiens
  misc_RNA (1)...(19): siRNA sense strand
cgaaauccagaacaaagca

SEQ ID NO: 342019 - RNA, 19 nt, Homo sapiens
  misc_RNA (1)...(19): siRNA sense strand
aagagaaucccaggacaga

SEQ ID NO: 342020 - RNA, 19 nt, Homo sapiens
  misc_RNA (1)...(19): siRNA sense strand
gauguggucaauggaagaa

SEQ ID NO: 342021 - RNA, 19 nt, Homo sapiens
  misc_RNA (1)...(19): siRNA sense strand
ggaccugcgaaauccagaa

SEQ ID NO: 342022 - RNA, 19 nt, Homo sapiens
  misc_RNA (1)...(19): siRNA sense strand
gagcaugauuuugaaguca

SEQ ID NO: 342023 - RNA, 19 nt, Homo sapiens
  misc_RNA (1)...(19): siRNA sense strand
gugacccagucuauuaaag

SEQ ID NO: 342024 - RNA, 19 nt, Homo sapiens
  misc_RNA (1)...(19): siRNA sense strand
agaacaaagcacaucagaa

SEQ ID NO: 342025 - RNA, 19 nt, Homo sapiens
  misc_RNA (1)...(19): siRNA sense strand
uggaagaaaccaccaaggu

SEQ ID NO: 342026 - RNA, 19 nt, Homo sapiens
  misc_RNA (1)...(19): siRNA sense strand
ucaacuggaauggauggua

SEQ ID NO: 342027 - RNA, 19 nt, Homo sapiens
  misc_RNA (1)...(19): siRNA sense strand
ggaaauggcugaacuagaa

SEQ ID NO: 342028 - RNA, 19 nt, Homo sapiens
  misc_RNA (1)...(19): siRNA sense strand
gaacaaagcacaucagaaa

SEQ ID NO: 342029 - RNA, 19 nt, Homo sapiens
  misc_RNA (1)...(19): siRNA sense strand
cagcuacccuuccaucaua

SEQ ID NO: 342030 - RNA, 19 nt, Homo sapiens
  misc_RNA (1)...(19): siRNA sense strand
gggauaccaugcaacauaa

SEQ ID NO: 342031 - RNA, 19 nt, Homo sapiens
  misc_RNA (1)...(19): siRNA sense strand
gaggagauguggucaaugg

SEQ ID NO: 342032 - RNA, 19 nt, Homo sapiens
  misc_RNA (1)...(19): siRNA sense strand
gaaggagcuuucaucauuc

SEQ ID NO: 342033 - RNA, 19 nt, Homo sapiens
  misc_RNA (1)...(19): siRNA sense strand
cuagaaaucuguugcuaug

SEQ ID NO: 342034 - RNA, 19 nt, Homo sapiens
  misc_RNA (1)...(19): siRNA sense strand
gcucagggcuauccucuca

SEQ ID NO: 342035 - RNA, 19 nt, Homo sapiens
  misc_RNA (1)...(19): siRNA sense strand
aaacaagcgucucugaaga

SEQ ID NO: 342036 - RNA, 19 nt, Homo sapiens
  misc_RNA (1)...(19): siRNA sense strand
caacauaaccugauaaagc

SEQ ID NO: 342037 - RNA, 19 nt, Homo sapiens
  misc_RNA (1)...(19): siRNA sense strand
gaaacaagcgucucugaag

SEQ ID NO: 342038 - RNA, 19 nt, Homo sapiens
  misc_RNA (1)...(19): siRNA sense strand
gcagagggauaccaugcaa

SEQ ID NO: 342039 - RNA, 19 nt, Homo sapiens
  misc_RNA (1)...(19): siRNA sense strand
ugaacuagaagcuguguua

SEQ ID NO: 342040 - RNA, 19 nt, Homo sapiens
  misc_RNA (1)...(19): siRNA sense strand
gagaaucccaggacagaaa

SEQ ID NO: 342041 - RNA, 19 nt, Homo sapiens
  misc_RNA (1)...(19): siRNA sense strand
gcccacagaucaacuggaa

SEQ ID NO: 342042 - RNA, 19 nt, Homo sapiens
  misc_RNA (1)...(19): siRNA sense strand
gaagacugcucagggcuau

SEQ ID NO: 342043 - RNA, 19 nt, Homo sapiens
  misc_RNA (1)...(19): siRNA sense strand
gacccagucuauuaaagaa

SEQ ID NO: 342044 - RNA, 19 nt, Homo sapiens
  misc_RNA (1)...(19): siRNA sense strand
acuagaagcuguguuagaa

SEQ ID NO: 342045 - RNA, 19 nt, Homo sapiens
  misc_RNA (1)...(19): siRNA sense strand
caugcaacauaaccugaua

SEQ ID NO: 342046 - RNA, 19 nt, Homo sapiens
  misc_RNA (1)...(19): siRNA sense strand
gcuggacaccuaccugaua

SEQ ID NO: 342047 - RNA, 19 nt, Homo sapiens
  misc_RNA (1)...(19): siRNA sense strand
cagaucaacuggaauggau

SEQ ID NO: 342048 - RNA, 19 nt, Homo sapiens
  misc_RNA (1)...(19): siRNA sense strand
gcaggaaauggcugaacua

SEQ ID NO: 342049 - RNA, 19 nt, Homo sapiens
  misc_RNA (1)...(19): siRNA sense strand
ccacagaucaacuggaaug

SEQ ID NO: 342050 - RNA, 19 nt, Homo sapiens
  misc_RNA (1)...(19): siRNA sense strand
caacaugcccacagaucaa

SEQ ID NO: 342051 - RNA, 19 nt, Homo sapiens
  misc_RNA (1)...(19): siRNA sense strand
ucaccaacaugcccacaga

SEQ ID NO: 342052 - RNA, 19 nt, Homo sapiens
  misc_RNA (1)...(19): siRNA sense strand
cagaggagauguggucaau

SEQ ID NO: 342053 - RNA, 19 nt, Homo sapiens
  misc_RNA (1)...(19): siRNA sense strand
caauugggcagauguguga

SEQ ID NO: 342054 - RNA, 19 nt, Homo sapiens
  misc_RNA (1)...(19): siRNA sense strand
ggagauguggucaauggaa

SEQ ID NO: 342055 - RNA, 19 nt, Homo sapiens
  misc_RNA (1)...(19): siRNA sense strand
guacagcuguguggugcuu

SEQ ID NO: 342056 - RNA, 19 nt, Homo sapiens
  misc_RNA (1)...(19): siRNA sense strand
ccaaagcgagcaagagaau

SEQ ID NO: 342057 - RNA, 19 nt, Homo sapiens
  misc_RNA (1)...(19): siRNA sense strand
gcuaugggcccuucaccaa

SEQ ID NO: 342058 - RNA, 19 nt, Homo sapiens
  misc_RNA (1)...(19): siRNA sense strand
gaaugagcaugauuuugaa

SEQ ID NO: 342059 - RNA, 19 nt, Homo sapiens
  misc_RNA (1)...(19): siRNA sense strand
ucagggcuauccucucaga

SEQ ID NO: 342060 - RNA, 19 nt, Homo sapiens
  misc_RNA (1)...(19): siRNA sense strand
agggauaccaugcaacaua

SEQ ID NO: 342061 - RNA, 19 nt, Homo sapiens
  misc_RNA (1)...(19): siRNA sense strand
gcuagaaaucuguugcuau

SEQ ID NO: 342062 - RNA, 19 nt, Homo sapiens
  misc_RNA (1)...(19): siRNA sense strand
ugaaugagcaugauuuuga

SEQ ID NO: 342063 - RNA, 19 nt, Homo sapiens
  misc_RNA (1)...(19): siRNA sense strand
ggcuagaaaucuguugcua

SEQ ID NO: 342064 - RNA, 19 nt, Homo sapiens
  misc_RNA (1)...(19): siRNA sense strand
ugaaacaagcgucucugaa

SEQ ID NO: 342065 - RNA, 19 nt, Homo sapiens
  misc_RNA (1)...(19): siRNA sense strand
aacauaaccugauaaagcu

SEQ ID NO: 342066 - RNA, 19 nt, Homo sapiens
  misc_RNA (1)...(19): siRNA sense strand
ugacccagucuauuaaaga

SEQ ID NO: 342067 - RNA, 19 nt, Homo sapiens
  misc_RNA (1)...(19): siRNA sense strand
gaacuagaagcuguguuag

SEQ ID NO: 342068 - RNA, 19 nt, Homo sapiens
  misc_RNA (1)...(19): siRNA sense strand
gugaaacaagcgucucuga

SEQ ID NO: 342069 - RNA, 19 nt, Homo sapiens
  misc_RNA (1)...(19): siRNA sense strand
ccaacaugcccacagauca

SEQ ID NO: 342070 - RNA, 19 nt, Homo sapiens
  misc_RNA (1)...(19): siRNA sense strand
uaugggcccuucaccaaca

SEQ ID NO: 342071 - RNA, 19 nt, Homo sapiens
  misc_RNA (1)...(19): siRNA sense strand
guccaaagcgagcaagaga

SEQ ID NO: 342072 - RNA, 19 nt, Homo sapiens
  misc_RNA (1)...(19): siRNA sense strand
cagaacaaagcacaucaga

SEQ ID NO: 342073 - RNA, 19 nt, Homo sapiens
  misc_RNA (1)...(19): siRNA sense strand
ccugcgaaauccagaacaa

SEQ ID NO: 342074 - RNA, 19 nt, Homo sapiens
  misc_RNA (1)...(19): siRNA sense strand
gaaaccaccaagguccaaa

SEQ ID NO: 342075 - RNA, 19 nt, Homo sapiens
  misc_RNA (1)...(19): siRNA sense strand
gauaaagcuccagcaggaa

SEQ ID NO: 342076 - RNA, 19 nt, Homo sapiens
  misc_RNA (1)...(19): siRNA sense strand
aaggagcuuucaucauuca

SEQ ID NO: 342077 - RNA, 19 nt, Homo sapiens
  misc_RNA (1)...(19): siRNA sense strand
ggugugagagugaaacaag

SEQ ID NO: 342078 - RNA, 19 nt, Homo sapiens
  misc_RNA (1)...(19): siRNA sense strand
gaaauggcugaacuagaag

SEQ ID NO: 342079 - RNA, 19 nt, Homo sapiens
  misc_RNA (1)...(19): siRNA sense strand
auaaagcuccagcaggaaa

SEQ ID NO: 342080 - RNA, 19 nt, Homo sapiens
  misc_RNA (1)...(19): siRNA sense strand
acccuuccaucauaaguga

SEQ ID NO: 342081 - RNA, 19 nt, Homo sapiens
  misc_RNA (1)...(19): siRNA sense strand
ggugacccagucuauuaaa

SEQ ID NO: 342082 - RNA, 19 nt, Homo sapiens
  misc_RNA (1)...(19): siRNA sense strand
cccagucuauuaaagaaag

SEQ ID NO: 342083 - RNA, 19 nt, Homo sapiens
  misc_RNA (1)...(19): siRNA sense strand
caucugggugugagaguga

SEQ ID NO: 342084 - RNA, 19 nt, Homo sapiens
  misc_RNA (1)...(19): siRNA sense strand
ccagucuauuaaagaaaga

SEQ ID NO: 342085 - RNA, 19 nt, Homo sapiens
  misc_RNA (1)...(19): siRNA sense strand
cgaaauccagaacaaagca

SEQ ID NO: 342086 - RNA, 19 nt, Homo sapiens
  misc_RNA (1)...(19): siRNA sense strand
aagagaaucccaggacaga

SEQ ID NO: 342087 - RNA, 19 nt, Homo sapiens
  misc_RNA (1)...(19): siRNA sense strand
gauguggucaauggaagaa

SEQ ID NO: 342088 - RNA, 19 nt, Homo sapiens
  misc_RNA (1)...(19): siRNA sense strand
ggaccugcgaaauccagaa

SEQ ID NO: 342089 - RNA, 19 nt, Homo sapiens
  misc_RNA (1)...(19): siRNA sense strand
gagcaugauuuugaaguca

SEQ ID NO: 342090 - RNA, 19 nt, Homo sapiens
  misc_RNA (1)...(19): siRNA sense strand
gugacccagucuauuaaag

SEQ ID NO: 342091 - RNA, 19 nt, Homo sapiens
  misc_RNA (1)...(19): siRNA sense strand
agaacaaagcacaucagaa

SEQ ID NO: 342092 - RNA, 19 nt, Homo sapiens
  misc_RNA (1)...(19): siRNA sense strand
uggaagaaaccaccaaggu

SEQ ID NO: 342093 - RNA, 19 nt, Homo sapiens
  misc_RNA (1)...(19): siRNA sense strand
ucaacuggaauggauggua

SEQ ID NO: 342094 - RNA, 19 nt, Homo sapiens
  misc_RNA (1)...(19): siRNA sense strand
ggaaauggcugaacuagaa

SEQ ID NO: 342095 - RNA, 19 nt, Homo sapiens
  misc_RNA (1)...(19): siRNA sense strand
gaacaaagcacaucagaaa

SEQ ID NO: 342096 - RNA, 19 nt, Homo sapiens
  misc_RNA (1)...(19): siRNA sense strand
cagcuacccuuccaucaua

SEQ ID NO: 342097 - RNA, 19 nt, Homo sapiens
  misc_RNA (1)...(19): siRNA sense strand
gggauaccaugcaacauaa

SEQ ID NO: 342098 - RNA, 19 nt, Homo sapiens
  misc_RNA (1)...(19): siRNA sense strand
gaggagauguggucaaugg

SEQ ID NO: 342099 - RNA, 19 nt, Homo sapiens
  misc_RNA (1)...(19): siRNA sense strand
gaaggagcuuucaucauuc

SEQ ID NO: 342100 - RNA, 19 nt, Homo sapiens
  misc_RNA (1)...(19): siRNA sense strand
cuagaaaucuguugcuaug

SEQ ID NO: 342101 - RNA, 19 nt, Homo sapiens
  misc_RNA (1)...(19): siRNA sense strand
gcucagggcuauccucuca

SEQ ID NO: 342102 - RNA, 19 nt, Homo sapiens
  misc_RNA (1)...(19): siRNA sense strand
aaacaagcgucucugaaga

SEQ ID NO: 342103 - RNA, 19 nt, Homo sapiens
  misc_RNA (1)...(19): siRNA sense strand
caacauaaccugauaaagc

SEQ ID NO: 342104 - RNA, 19 nt, Homo sapiens
  misc_RNA (1)...(19): siRNA sense strand
gaaacaagcgucucugaag

SEQ ID NO: 342105 - RNA, 19 nt, Homo sapiens
  misc_RNA (1)...(19): siRNA sense strand
gcagagggauaccaugcaa

SEQ ID NO: 342106 - RNA, 19 nt, Homo sapiens
  misc_RNA (1)...(19): siRNA sense strand
ugaacuagaagcuguguua

SEQ ID NO: 342107 - RNA, 19 nt, Homo sapiens
  misc_RNA (1)...(19): siRNA sense strand
gagaaucccaggacagaaa

SEQ ID NO: 342108 - RNA, 19 nt, Homo sapiens
  misc_RNA (1)...(19): siRNA sense strand
gcccacagaucaacuggaa

SEQ ID NO: 342109 - RNA, 19 nt, Homo sapiens
  misc_RNA (1)...(19): siRNA sense strand
gaagacugcucagggcuau

SEQ ID NO: 342110 - RNA, 19 nt, Homo sapiens
  misc_RNA (1)...(19): siRNA sense strand
gacccagucuauuaaagaa

SEQ ID NO: 342111 - RNA, 19 nt, Homo sapiens
  misc_RNA (1)...(19): siRNA sense strand
acuagaagcuguguuagaa

SEQ ID NO: 342112 - RNA, 19 nt, Homo sapiens
  misc_RNA (1)...(19): siRNA sense strand
caugcaacauaaccugaua

SEQ ID NO: 342113 - RNA, 19 nt, Homo sapiens
  misc_RNA (1)...(19): siRNA sense strand
gcuggacaccuaccugaua

SEQ ID NO: 342114 - RNA, 19 nt, Homo sapiens
  misc_RNA (1)...(19): siRNA sense strand
cagaucaacuggaauggau

SEQ ID NO: 342115 - RNA, 19 nt, Homo sapiens
  misc_RNA (1)...(19): siRNA sense strand
gcaggaaauggcugaacua

SEQ ID NO: 342116 - RNA, 19 nt, Homo sapiens
  misc_RNA (1)...(19): siRNA sense strand
ccacagaucaacuggaaug

SEQ ID NO: 342117 - RNA, 19 nt, Homo sapiens
  misc_RNA (1)...(19): siRNA sense strand
caacaugcccacagaucaa

SEQ ID NO: 342118 - RNA, 19 nt, Homo sapiens
  misc_RNA (1)...(19): siRNA sense strand
ucaccaacaugcccacaga

SEQ ID NO: 342119 - RNA, 19 nt, Homo sapiens
  misc_RNA (1)...(19): siRNA sense strand
cagaggagauguggucaau

SEQ ID NO: 342120 - RNA, 19 nt, Homo sapiens
  misc_RNA (1)...(19): siRNA sense strand
caauugggcagauguguga

SEQ ID NO: 342121 - RNA, 19 nt, Homo sapiens
  misc_RNA (1)...(19): siRNA sense strand
ggagauguggucaauggaa

SEQ ID NO: 342122 - RNA, 19 nt, Homo sapiens
  misc_RNA (1)...(19): siRNA sense strand
guacagcuguguggugcuu

SEQ ID NO: 342123 - RNA, 19 nt, Homo sapiens
  misc_RNA (1)...(19): siRNA sense strand
ccaaagcgagcaagagaau

SEQ ID NO: 342124 - RNA, 19 nt, Homo sapiens
  misc_RNA (1)...(19): siRNA sense strand
gcuaugggcccuucaccaa

SEQ ID NO: 342125 - RNA, 19 nt, Homo sapiens
  misc_RNA (1)...(19): siRNA sense strand
gaaugagcaugauuuugaa

SEQ ID NO: 342126 - RNA, 19 nt, Homo sapiens
  misc_RNA (1)...(19): siRNA sense strand
ucagggcuauccucucaga

SEQ ID NO: 342127 - RNA, 19 nt, Homo sapiens
  misc_RNA (1)...(19): siRNA sense strand
agggauaccaugcaacaua

SEQ ID NO: 342128 - RNA, 19 nt, Homo sapiens
  misc_RNA (1)...(19): siRNA sense strand
gcuagaaaucuguugcuau

SEQ ID NO: 342129 - RNA, 19 nt, Homo sapiens
  misc_RNA (1)...(19): siRNA sense strand
ugaaugagcaugauuuuga

SEQ ID NO: 342130 - RNA, 19 nt, Homo sapiens
  misc_RNA (1)...(19): siRNA sense strand
ggcuagaaaucuguugcua

SEQ ID NO: 342131 - RNA, 19 nt, Homo sapiens
  misc_RNA (1)...(19): siRNA sense strand
ugaaacaagcgucucugaa

SEQ ID NO: 342132 - RNA, 19 nt, Homo sapiens
  misc_RNA (1)...(19): siRNA sense strand
aacauaaccugauaaagcu

SEQ ID NO: 342133 - RNA, 19 nt, Homo sapiens
  misc_RNA (1)...(19): siRNA sense strand
ugacccagucuauuaaaga

SEQ ID NO: 342134 - RNA, 19 nt, Homo sapiens
  misc_RNA (1)...(19): siRNA sense strand
gaacuagaagcuguguuag

SEQ ID NO: 342135 - RNA, 19 nt, Homo sapiens
  misc_RNA (1)...(19): siRNA sense strand
gugaaacaagcgucucuga

SEQ ID NO: 342136 - RNA, 19 nt, Homo sapiens
  misc_RNA (1)...(19): siRNA sense strand
ccaacaugcccacagauca

SEQ ID NO: 342137 - RNA, 19 nt, Homo sapiens
  misc_RNA (1)...(19): siRNA sense strand
uaugggcccuucaccaaca

SEQ ID NO: 342138 - RNA, 19 nt, Homo sapiens
  misc_RNA (1)...(19): siRNA sense strand
guccaaagcgagcaagaga

SEQ ID NO: 342139 - RNA, 19 nt, Homo sapiens
  misc_RNA (1)...(19): siRNA sense strand
cagaacaaagcacaucaga

SEQ ID NO: 342140 - RNA, 19 nt, Homo sapiens
  misc_RNA (1)...(19): siRNA sense strand
ccugcgaaauccagaacaa

SEQ ID NO: 342141 - RNA, 19 nt, Homo sapiens
  misc_RNA (1)...(19): siRNA sense strand
gaaaccaccaagguccaaa

SEQ ID NO: 342142 - RNA, 19 nt, Homo sapiens
  misc_RNA (1)...(19): siRNA sense strand
gauaaagcuccagcaggaa

SEQ ID NO: 342143 - RNA, 19 nt, Homo sapiens
  misc_RNA (1)...(19): siRNA sense strand
aaggagcuuucaucauuca

SEQ ID NO: 342144 - RNA, 19 nt, Homo sapiens
  misc_RNA (1)...(19): siRNA sense strand
ggugugagagugaaacaag

SEQ ID NO: 342145 - RNA, 19 nt, Homo sapiens
  misc_RNA (1)...(19): siRNA sense strand
gaaauggcugaacuagaag

SEQ ID NO: 342146 - RNA, 19 nt, Homo sapiens
  misc_RNA (1)...(19): siRNA sense strand
auaaagcuccagcaggaaa

SEQ ID NO: 342147 - RNA, 19 nt, Homo sapiens
  misc_RNA (1)...(19): siRNA sense strand
acccuuccaucauaaguga

SEQ ID NO: 342148 - RNA, 19 nt, Homo sapiens
  misc_RNA (1)...(19): siRNA sense strand
ggugacccagucuauuaaa

SEQ ID NO: 342149 - RNA, 19 nt, Homo sapiens
  misc_RNA (1)...(19): siRNA sense strand
cccagucuauuaaagaaag

SEQ ID NO: 342150 - RNA, 19 nt, Homo sapiens
  misc_RNA (1)...(19): siRNA sense strand
caucugggugugagaguga

SEQ ID NO: 342151 - RNA, 19 nt, Homo sapiens
  misc_RNA (1)...(19): siRNA sense strand
ccagucuauuaaagaaaga

SEQ ID NO: 342152 - RNA, 19 nt, Homo sapiens
  misc_RNA (1)...(19): siRNA sense strand
cgaaauccagaacaaagca

SEQ ID NO: 342153 - RNA, 19 nt, Homo sapiens
  misc_RNA (1)...(19): siRNA sense strand
aagagaaucccaggacaga

SEQ ID NO: 342154 - RNA, 19 nt, Homo sapiens
  misc_RNA (1)...(19): siRNA sense strand
gauguggucaauggaagaa

SEQ ID NO: 342155 - RNA, 19 nt, Homo sapiens
  misc_RNA (1)...(19): siRNA sense strand
ggaccugcgaaauccagaa

SEQ ID NO: 342156 - RNA, 19 nt, Homo sapiens
  misc_RNA (1)...(19): siRNA sense strand
gagcaugauuuugaaguca

SEQ ID NO: 342157 - RNA, 19 nt, Homo sapiens
  misc_RNA (1)...(19): siRNA sense strand
gugacccagucuauuaaag

SEQ ID NO: 342158 - RNA, 19 nt, Homo sapiens
  misc_RNA (1)...(19): siRNA sense strand
agaacaaagcacaucagaa

SEQ ID NO: 342159 - RNA, 19 nt, Homo sapiens
  misc_RNA (1)...(19): siRNA sense strand
uggaagaaaccaccaaggu

SEQ ID NO: 342160 - RNA, 19 nt, Homo sapiens
  misc_RNA (1)...(19): siRNA sense strand
ucaacuggaauggauggua

SEQ ID NO: 342161 - RNA, 19 nt, Homo sapiens
  misc_RNA (1)...(19): siRNA sense strand
ggaaauggcugaacuagaa

SEQ ID NO: 342162 - RNA, 19 nt, Homo sapiens
  misc_RNA (1)...(19): siRNA sense strand
gaacaaagcacaucagaaa

SEQ ID NO: 342163 - RNA, 19 nt, Homo sapiens
  misc_RNA (1)...(19): siRNA sense strand
cagcuacccuuccaucaua

SEQ ID NO: 342164 - RNA, 19 nt, Homo sapiens
  misc_RNA (1)...(19): siRNA sense strand
gggauaccaugcaacauaa

SEQ ID NO: 342165 - RNA, 19 nt, Homo sapiens
  misc_RNA (1)...(19): siRNA sense strand
gcucagggcuauccucuca

SEQ ID NO: 342166 - RNA, 19 nt, Homo sapiens
  misc_RNA (1)...(19): siRNA sense strand
aaacaagcgucucugaaga

SEQ ID NO: 342167 - RNA, 19 nt, Homo sapiens
  misc_RNA (1)...(19): siRNA sense strand
caacauaaccugauaaagc

SEQ ID NO: 342168 - RNA, 19 nt, Homo sapiens
  misc_RNA (1)...(19): siRNA sense strand
gaaacaagcgucucugaag

SEQ ID NO: 342169 - RNA, 19 nt, Homo sapiens
  misc_RNA (1)...(19): siRNA sense strand
gcagagggauaccaugcaa

SEQ ID NO: 342170 - RNA, 19 nt, Homo sapiens
  misc_RNA (1)...(19): siRNA sense strand
ugaacuagaagcuguguua

SEQ ID NO: 342171 - RNA, 19 nt, Homo sapiens
  misc_RNA (1)...(19): siRNA sense strand
gaagacugcucagggcuau

SEQ ID NO: 342172 - RNA, 19 nt, Homo sapiens
  misc_RNA (1)...(19): siRNA sense strand
acuagaagcuguguuagaa

SEQ ID NO: 342173 - RNA, 19 nt, Homo sapiens
  misc_RNA (1)...(19): siRNA sense strand
caugcaacauaaccugaua

SEQ ID NO: 342174 - RNA, 19 nt, Homo sapiens
  misc_RNA (1)...(19): siRNA sense strand
gcaggaaauggcugaacua

SEQ ID NO: 342175 - RNA, 19 nt, Homo sapiens
  misc_RNA (1)...(19): siRNA sense strand
ucagggcuauccucucaga

SEQ ID NO: 342176 - RNA, 19 nt, Homo sapiens
  misc_RNA (1)...(19): siRNA sense strand
agggauaccaugcaacaua

SEQ ID NO: 342177 - RNA, 19 nt, Homo sapiens
  misc_RNA (1)...(19): siRNA sense strand
ugaaacaagcgucucugaa

SEQ ID NO: 342178 - RNA, 19 nt, Homo sapiens
  misc_RNA (1)...(19): siRNA sense strand
aacauaaccugauaaagcu

SEQ ID NO: 342179 - RNA, 19 nt, Homo sapiens
  misc_RNA (1)...(19): siRNA sense strand
gaacuagaagcuguguuag

SEQ ID NO: 342180 - RNA, 19 nt, Homo sapiens
  misc_RNA (1)...(19): siRNA sense strand
cagaacaaagcacaucaga

SEQ ID NO: 342181 - RNA, 19 nt, Homo sapiens
  misc_RNA (1)...(19): siRNA sense strand
gugaaacaagcgucucuga

SEQ ID NO: 342182 - RNA, 19 nt, Homo sapiens
  misc_RNA (1)...(19): siRNA sense strand
ccugcgaaauccagaacaa

SEQ ID NO: 342183 - RNA, 19 nt, Homo sapiens
  misc_RNA (1)...(19): siRNA sense strand
gauaaagcuccagcaggaa

SEQ ID NO: 342184 - RNA, 19 nt, Homo sapiens
  misc_RNA (1)...(19): siRNA sense strand
ggugugagagugaaacaag

SEQ ID NO: 342185 - RNA, 19 nt, Homo sapiens
  misc_RNA (1)...(19): siRNA sense strand
auaaagcuccagcaggaaa

SEQ ID NO: 342186 - RNA, 19 nt, Homo sapiens
  misc_RNA (1)...(19): siRNA sense strand
acccuuccaucauaaguga

SEQ ID NO: 342187 - RNA, 19 nt, Homo sapiens
  misc_RNA (1)...(19): siRNA sense strand
gaaauggcugaacuagaag

SEQ ID NO: 342188 - RNA, 19 nt, Homo sapiens
  misc_RNA (1)...(19): siRNA sense strand
caucugggugugagaguga

SEQ ID NO: 342189 - RNA, 19 nt, Homo sapiens
  misc_RNA (1)...(19): siRNA sense strand
cgaaauccagaacaaagca

SEQ ID NO: 342190 - RNA, 19 nt, Homo sapiens
  misc_RNA (1)...(19): siRNA sense strand
ggaccugcgaaauccagaa

SEQ ID NO: 342191 - RNA, 19 nt, Homo sapiens
  misc_RNA (1)...(19): siRNA sense strand
agaacaaagcacaucagaa

SEQ ID NO: 342192 - RNA, 19 nt, Homo sapiens
  misc_RNA (1)...(19): siRNA sense strand
ggaaauggcugaacuagaa

SEQ ID NO: 342193 - RNA, 19 nt, Homo sapiens
  misc_RNA (1)...(19): siRNA sense strand
gaacaaagcacaucagaaa

SEQ ID NO: 342194 - RNA, 19 nt, Homo sapiens
  misc_RNA (1)...(19): siRNA sense strand
cagcuacccuuccaucaua

SEQ ID NO: 342195 - RNA, 19 nt, Homo sapiens
  misc_RNA (1)...(19): siRNA sense strand
gggauaccaugcaacauaa

SEQ ID NO: 342196 - RNA, 19 nt, Homo sapiens
  misc_RNA (1)...(19): siRNA sense strand
gaggagauguggucaaugg

SEQ ID NO: 342197 - RNA, 19 nt, Homo sapiens
  misc_RNA (1)...(19): siRNA sense strand
gaaggagcuuucaucauuc

SEQ ID NO: 342198 - RNA, 19 nt, Homo sapiens
  misc_RNA (1)...(19): siRNA sense strand
cuagaaaucuguugcuaug

SEQ ID NO: 342199 - RNA, 19 nt, Homo sapiens
  misc_RNA (1)...(19): siRNA sense strand
gcucagggcuauccucuca

SEQ ID NO: 342200 - RNA, 19 nt, Homo sapiens
  misc_RNA (1)...(19): siRNA sense strand
aaacaagcgucucugaaga

SEQ ID NO: 342201 - RNA, 19 nt, Homo sapiens
  misc_RNA (1)...(19): siRNA sense strand
caacauaaccugauaaagc

SEQ ID NO: 342202 - RNA, 19 nt, Homo sapiens
  misc_RNA (1)...(19): siRNA sense strand
gaaacaagcgucucugaag

SEQ ID NO: 342203 - RNA, 19 nt, Homo sapiens
  misc_RNA (1)...(19): siRNA sense strand
gcagagggauaccaugcaa

SEQ ID NO: 342204 - RNA, 19 nt, Homo sapiens
  misc_RNA (1)...(19): siRNA sense strand
ugaacuagaagcuguguua

SEQ ID NO: 342205 - RNA, 19 nt, Homo sapiens
  misc_RNA (1)...(19): siRNA sense strand
gagaaucccaggacagaaa

SEQ ID NO: 342206 - RNA, 19 nt, Homo sapiens
  misc_RNA (1)...(19): siRNA sense strand
gcccacagaucaacuggaa

SEQ ID NO: 342207 - RNA, 19 nt, Homo sapiens
  misc_RNA (1)...(19): siRNA sense strand
gaagacugcucagggcuau

SEQ ID NO: 342208 - RNA, 19 nt, Homo sapiens
  misc_RNA (1)...(19): siRNA sense strand
gacccagucuauuaaagaa

SEQ ID NO: 342209 - RNA, 19 nt, Homo sapiens
  misc_RNA (1)...(19): siRNA sense strand
acuagaagcuguguuagaa

SEQ ID NO: 342210 - RNA, 19 nt, Homo sapiens
  misc_RNA (1)...(19): siRNA sense strand
caugcaacauaaccugaua

SEQ ID NO: 342211 - RNA, 19 nt, Homo sapiens
  misc_RNA (1)...(19): siRNA sense strand
gcuggacaccuaccugaua

SEQ ID NO: 342212 - RNA, 19 nt, Homo sapiens
  misc_RNA (1)...(19): siRNA sense strand
cagaucaacuggaauggau

SEQ ID NO: 342213 - RNA, 19 nt, Homo sapiens
  misc_RNA (1)...(19): siRNA sense strand
gcaggaaauggcugaacua

SEQ ID NO: 342214 - RNA, 19 nt, Homo sapiens
  misc_RNA (1)...(19): siRNA sense strand
ccacagaucaacuggaaug

SEQ ID NO: 342215 - RNA, 19 nt, Homo sapiens
  misc_RNA (1)...(19): siRNA sense strand
caacaugcccacagaucaa

SEQ ID NO: 342216 - RNA, 19 nt, Homo sapiens
  misc_RNA (1)...(19): siRNA sense strand
ucaccaacaugcccacaga

SEQ ID NO: 342217 - RNA, 19 nt, Homo sapiens
  misc_RNA (1)...(19): siRNA sense strand
cagaggagauguggucaau

SEQ ID NO: 342218 - RNA, 19 nt, Homo sapiens
  misc_RNA (1)...(19): siRNA sense strand
caauugggcagauguguga

SEQ ID NO: 342219 - RNA, 19 nt, Homo sapiens
  misc_RNA (1)...(19): siRNA sense strand
ggagauguggucaauggaa

SEQ ID NO: 342220 - RNA, 19 nt, Homo sapiens
  misc_RNA (1)...(19): siRNA sense strand
guacagcuguguggugcuu

SEQ ID NO: 342221 - RNA, 19 nt, Homo sapiens
  misc_RNA (1)...(19): siRNA sense strand
ccaaagcgagcaagagaau

SEQ ID NO: 342222 - RNA, 19 nt, Homo sapiens
  misc_RNA (1)...(19): siRNA sense strand
gcuaugggcccuucaccaa

SEQ ID NO: 342223 - RNA, 19 nt, Homo sapiens
  misc_RNA (1)...(19): siRNA sense strand
gaaugagcaugauuuugaa

SEQ ID NO: 342224 - RNA, 19 nt, Homo sapiens
  misc_RNA (1)...(19): siRNA sense strand
ucagggcuauccucucaga

SEQ ID NO: 342225 - RNA, 19 nt, Homo sapiens
  misc_RNA (1)...(19): siRNA sense strand
agggauaccaugcaacaua

SEQ ID NO: 342226 - RNA, 19 nt, Homo sapiens
  misc_RNA (1)...(19): siRNA sense strand
gcuagaaaucuguugcuau

SEQ ID NO: 342227 - RNA, 19 nt, Homo sapiens
  misc_RNA (1)...(19): siRNA sense strand
ugaaugagcaugauuuuga

SEQ ID NO: 342228 - RNA, 19 nt, Homo sapiens
  misc_RNA (1)...(19): siRNA sense strand
ggcuagaaaucuguugcua

SEQ ID NO: 342229 - RNA, 19 nt, Homo sapiens
  misc_RNA (1)...(19): siRNA sense strand
ugaaacaagcgucucugaa

SEQ ID NO: 342230 - RNA, 19 nt, Homo sapiens
  misc_RNA (1)...(19): siRNA sense strand
aacauaaccugauaaagcu

SEQ ID NO: 342231 - RNA, 19 nt, Homo sapiens
  misc_RNA (1)...(19): siRNA sense strand
ugacccagucuauuaaaga

SEQ ID NO: 342232 - RNA, 19 nt, Homo sapiens
  misc_RNA (1)...(19): siRNA sense strand
gaacuagaagcuguguuag

SEQ ID NO: 342233 - RNA, 19 nt, Homo sapiens
  misc_RNA (1)...(19): siRNA sense strand
gugaaacaagcgucucuga

SEQ ID NO: 342234 - RNA, 19 nt, Homo sapiens
  misc_RNA (1)...(19): siRNA sense strand
ccaacaugcccacagauca

SEQ ID NO: 342235 - RNA, 19 nt, Homo sapiens
  misc_RNA (1)...(19): siRNA sense strand
uaugggcccuucaccaaca

SEQ ID NO: 342236 - RNA, 19 nt, Homo sapiens
  misc_RNA (1)...(19): siRNA sense strand
guccaaagcgagcaagaga

SEQ ID NO: 342237 - RNA, 19 nt, Homo sapiens
  misc_RNA (1)...(19): siRNA sense strand
cagaacaaagcacaucaga

SEQ ID NO: 342238 - RNA, 19 nt, Homo sapiens
  misc_RNA (1)...(19): siRNA sense strand
ccugcgaaauccagaacaa

SEQ ID NO: 342239 - RNA, 19 nt, Homo sapiens
  misc_RNA (1)...(19): siRNA sense strand
gaaaccaccaagguccaaa

SEQ ID NO: 342240 - RNA, 19 nt, Homo sapiens
  misc_RNA (1)...(19): siRNA sense strand
gauaaagcuccagcaggaa

SEQ ID NO: 342241 - RNA, 19 nt, Homo sapiens
  misc_RNA (1)...(19): siRNA sense strand
aaggagcuuucaucauuca

SEQ ID NO: 342242 - RNA, 19 nt, Homo sapiens
  misc_RNA (1)...(19): siRNA sense strand
ggugugagagugaaacaag

SEQ ID NO: 342243 - RNA, 19 nt, Homo sapiens
  misc_RNA (1)...(19): siRNA sense strand
gaaauggcugaacuagaag

SEQ ID NO: 342244 - RNA, 19 nt, Homo sapiens
  misc_RNA (1)...(19): siRNA sense strand
auaaagcuccagcaggaaa

SEQ ID NO: 342245 - RNA, 19 nt, Homo sapiens
  misc_RNA (1)...(19): siRNA sense strand
acccuuccaucauaaguga

SEQ ID NO: 342246 - RNA, 19 nt, Homo sapiens
  misc_RNA (1)...(19): siRNA sense strand
ggugacccagucuauuaaa

SEQ ID NO: 342247 - RNA, 19 nt, Homo sapiens
  misc_RNA (1)...(19): siRNA sense strand
cccagucuauuaaagaaag

SEQ ID NO: 342248 - RNA, 19 nt, Homo sapiens
  misc_RNA (1)...(19): siRNA sense strand
caucugggugugagaguga

SEQ ID NO: 342249 - RNA, 19 nt, Homo sapiens
  misc_RNA (1)...(19): siRNA sense strand
ccagucuauuaaagaaaga

SEQ ID NO: 342250 - RNA, 19 nt, Homo sapiens
  misc_RNA (1)...(19): siRNA sense strand
cgaaauccagaacaaagca

SEQ ID NO: 342251 - RNA, 19 nt, Homo sapiens
  misc_RNA (1)...(19): siRNA sense strand
aagagaaucccaggacaga

SEQ ID NO: 342252 - RNA, 19 nt, Homo sapiens
  misc_RNA (1)...(19): siRNA sense strand
gauguggucaauggaagaa

SEQ ID NO: 342253 - RNA, 19 nt, Homo sapiens
  misc_RNA (1)...(19): siRNA sense strand
ggaccugcgaaauccagaa

SEQ ID NO: 342254 - RNA, 19 nt, Homo sapiens
  misc_RNA (1)...(19): siRNA sense strand
gagcaugauuuugaaguca

SEQ ID NO: 342255 - RNA, 19 nt, Homo sapiens
  misc_RNA (1)...(19): siRNA sense strand
gugacccagucuauuaaag

SEQ ID NO: 342256 - RNA, 19 nt, Homo sapiens
  misc_RNA (1)...(19): siRNA sense strand
agaacaaagcacaucagaa

SEQ ID NO: 342257 - RNA, 19 nt, Homo sapiens
  misc_RNA (1)...(19): siRNA sense strand
uggaagaaaccaccaaggu

SEQ ID NO: 342258 - RNA, 19 nt, Homo sapiens
  misc_RNA (1)...(19): siRNA sense strand
ucaacuggaauggauggua

SEQ ID NO: 342259 - RNA, 19 nt, Homo sapiens
  misc_RNA (1)...(19): siRNA sense strand
ggaaauggcugaacuagaa

SEQ ID NO: 342260 - RNA, 19 nt, Homo sapiens
  misc_RNA (1)...(19): siRNA sense strand
gaacaaagcacaucagaaa

SEQ ID NO: 342261 - RNA, 19 nt, Homo sapiens
  misc_RNA (1)...(19): siRNA sense strand
cagcuacccuuccaucaua

SEQ ID NO: 342262 - RNA, 19 nt, Homo sapiens
  misc_RNA (1)...(19): siRNA sense strand
gggauaccaugcaacauaa

SEQ ID NO: 342263 - RNA, 19 nt, Homo sapiens
  misc_RNA (1)...(19): siRNA sense strand
gaggagauguggucaaugg

SEQ ID NO: 342264 - RNA, 19 nt, Homo sapiens
  misc_RNA (1)...(19): siRNA sense strand
gaaggagcuuucaucauuc

SEQ ID NO: 342265 - RNA, 19 nt, Homo sapiens
  misc_RNA (1)...(19): siRNA sense strand
cuagaaaucuguugcuaug

SEQ ID NO: 342266 - RNA, 19 nt, Homo sapiens
  misc_RNA (1)...(19): siRNA sense strand
gcucagggcuauccucuca

SEQ ID NO: 342267 - RNA, 19 nt, Homo sapiens
  misc_RNA (1)...(19): siRNA sense strand
aaacaagcgucucugaaga

SEQ ID NO: 342268 - RNA, 19 nt, Homo sapiens
  misc_RNA (1)...(19): siRNA sense strand
caacauaaccugauaaagc

SEQ ID NO: 342269 - RNA, 19 nt, Homo sapiens
  misc_RNA (1)...(19): siRNA sense strand
gaaacaagcgucucugaag

SEQ ID NO: 342270 - RNA, 19 nt, Homo sapiens
  misc_RNA (1)...(19): siRNA sense strand
gcagagggauaccaugcaa

SEQ ID NO: 342271 - RNA, 19 nt, Homo sapiens
  misc_RNA (1)...(19): siRNA sense strand
ugaacuagaagcuguguua

SEQ ID NO: 342272 - RNA, 19 nt, Homo sapiens
  misc_RNA (1)...(19): siRNA sense strand
gagaaucccaggacagaaa

SEQ ID NO: 342273 - RNA, 19 nt, Homo sapiens
  misc_RNA (1)...(19): siRNA sense strand
gcccacagaucaacuggaa

SEQ ID NO: 342274 - RNA, 19 nt, Homo sapiens
  misc_RNA (1)...(19): siRNA sense strand
gaagacugcucagggcuau

SEQ ID NO: 342275 - RNA, 19 nt, Homo sapiens
  misc_RNA (1)...(19): siRNA sense strand
gacccagucuauuaaagaa

SEQ ID NO: 342276 - RNA, 19 nt, Homo sapiens
  misc_RNA (1)...(19): siRNA sense strand
acuagaagcuguguuagaa

SEQ ID NO: 342277 - RNA, 19 nt, Homo sapiens
  misc_RNA (1)...(19): siRNA sense strand
caugcaacauaaccugaua

SEQ ID NO: 342278 - RNA, 19 nt, Homo sapiens
  misc_RNA (1)...(19): siRNA sense strand
gcuggacaccuaccugaua

SEQ ID NO: 342279 - RNA, 19 nt, Homo sapiens
  misc_RNA (1)...(19): siRNA sense strand
cagaucaacuggaauggau

SEQ ID NO: 342280 - RNA, 19 nt, Homo sapiens
  misc_RNA (1)...(19): siRNA sense strand
gcaggaaauggcugaacua

SEQ ID NO: 342281 - RNA, 19 nt, Homo sapiens
  misc_RNA (1)...(19): siRNA sense strand
ccacagaucaacuggaaug

SEQ ID NO: 342282 - RNA, 19 nt, Homo sapiens
  misc_RNA (1)...(19): siRNA sense strand
caacaugcccacagaucaa

SEQ ID NO: 342283 - RNA, 19 nt, Homo sapiens
  misc_RNA (1)...(19): siRNA sense strand
ucaccaacaugcccacaga

SEQ ID NO: 342284 - RNA, 19 nt, Homo sapiens
  misc_RNA (1)...(19): siRNA sense strand
cagaggagauguggucaau

SEQ ID NO: 342285 - RNA, 19 nt, Homo sapiens
  misc_RNA (1)...(19): siRNA sense strand
caauugggcagauguguga

SEQ ID NO: 342286 - RNA, 19 nt, Homo sapiens
  misc_RNA (1)...(19): siRNA sense strand
ggagauguggucaauggaa

SEQ ID NO: 342287 - RNA, 19 nt, Homo sapiens
  misc_RNA (1)...(19): siRNA sense strand
guacagcuguguggugcuu

SEQ ID NO: 342288 - RNA, 19 nt, Homo sapiens
  misc_RNA (1)...(19): siRNA sense strand
ccaaagcgagcaagagaau

SEQ ID NO: 342289 - RNA, 19 nt, Homo sapiens
  misc_RNA (1)...(19): siRNA sense strand
gcuaugggcccuucaccaa

SEQ ID NO: 342290 - RNA, 19 nt, Homo sapiens
  misc_RNA (1)...(19): siRNA sense strand
gaaugagcaugauuuugaa

SEQ ID NO: 342291 - RNA, 19 nt, Homo sapiens
  misc_RNA (1)...(19): siRNA sense strand
ucagggcuauccucucaga

SEQ ID NO: 342292 - RNA, 19 nt, Homo sapiens
  misc_RNA (1)...(19): siRNA sense strand
agggauaccaugcaacaua

SEQ ID NO: 342293 - RNA, 19 nt, Homo sapiens
  misc_RNA (1)...(19): siRNA sense strand
gcuagaaaucuguugcuau

SEQ ID NO: 342294 - RNA, 19 nt, Homo sapiens
  misc_RNA (1)...(19): siRNA sense strand
ugaaugagcaugauuuuga

SEQ ID NO: 342295 - RNA, 19 nt, Homo sapiens
  misc_RNA (1)...(19): siRNA sense strand
ggcuagaaaucuguugcua

SEQ ID NO: 342296 - RNA, 19 nt, Homo sapiens
  misc_RNA (1)...(19): siRNA sense strand
ugaaacaagcgucucugaa

SEQ ID NO: 342297 - RNA, 19 nt, Homo sapiens
  misc_RNA (1)...(19): siRNA sense strand
aacauaaccugauaaagcu

SEQ ID NO: 342298 - RNA, 19 nt, Homo sapiens
  misc_RNA (1)...(19): siRNA sense strand
ugacccagucuauuaaaga

SEQ ID NO: 342299 - RNA, 19 nt, Homo sapiens
  misc_RNA (1)...(19): siRNA sense strand
gaacuagaagcuguguuag

SEQ ID NO: 342300 - RNA, 19 nt, Homo sapiens
  misc_RNA (1)...(19): siRNA sense strand
gugaaacaagcgucucuga

SEQ ID NO: 342301 - RNA, 19 nt, Homo sapiens
  misc_RNA (1)...(19): siRNA sense strand
ccaacaugcccacagauca

SEQ ID NO: 342302 - RNA, 19 nt, Homo sapiens
  misc_RNA (1)...(19): siRNA sense strand
uaugggcccuucaccaaca

SEQ ID NO: 342303 - RNA, 19 nt, Homo sapiens
  misc_RNA (1)...(19): siRNA sense strand
guccaaagcgagcaagaga

SEQ ID NO: 342304 - RNA, 19 nt, Homo sapiens
  misc_RNA (1)...(19): siRNA sense strand
cagaacaaagcacaucaga

SEQ ID NO: 342305 - RNA, 19 nt, Homo sapiens
  misc_RNA (1)...(19): siRNA sense strand
ccugcgaaauccagaacaa

SEQ ID NO: 342306 - RNA, 19 nt, Homo sapiens
  misc_RNA (1)...(19): siRNA sense strand
gaaaccaccaagguccaaa

SEQ ID NO: 342307 - RNA, 19 nt, Homo sapiens
  misc_RNA (1)...(19): siRNA sense strand
gauaaagcuccagcaggaa

SEQ ID NO: 342308 - RNA, 19 nt, Homo sapiens
  misc_RNA (1)...(19): siRNA sense strand
aaggagcuuucaucauuca

SEQ ID NO: 342309 - RNA, 19 nt, Homo sapiens
  misc_RNA (1)...(19): siRNA sense strand
ggugugagagugaaacaag

SEQ ID NO: 342310 - RNA, 19 nt, Homo sapiens
  misc_RNA (1)...(19): siRNA sense strand
gaaauggcugaacuagaag

SEQ ID NO: 342311 - RNA, 19 nt, Homo sapiens
  misc_RNA (1)...(19): siRNA sense strand
auaaagcuccagcaggaaa

SEQ ID NO: 342312 - RNA, 19 nt, Homo sapiens
  misc_RNA (1)...(19): siRNA sense strand
acccuuccaucauaaguga

SEQ ID NO: 342313 - RNA, 19 nt, Homo sapiens
  misc_RNA (1)...(19): siRNA sense strand
ggugacccagucuauuaaa

SEQ ID NO: 342314 - RNA, 19 nt, Homo sapiens
  misc_RNA (1)...(19): siRNA sense strand
cccagucuauuaaagaaag

SEQ ID NO: 342315 - RNA, 19 nt, Homo sapiens
  misc_RNA (1)...(19): siRNA sense strand
caucugggugugagaguga

SEQ ID NO: 342316 - RNA, 19 nt, Homo sapiens
  misc_RNA (1)...(19): siRNA sense strand
ccagucuauuaaagaaaga

SEQ ID NO: 342317 - RNA, 19 nt, Homo sapiens
  misc_RNA (1)...(19): siRNA sense strand
cgaaauccagaacaaagca

SEQ ID NO: 342318 - RNA, 19 nt, Homo sapiens
  misc_RNA (1)...(19): siRNA sense strand
aagagaaucccaggacaga

SEQ ID NO: 342319 - RNA, 19 nt, Homo sapiens
  misc_RNA (1)...(19): siRNA sense strand
gauguggucaauggaagaa

SEQ ID NO: 342320 - RNA, 19 nt, Homo sapiens
  misc_RNA (1)...(19): siRNA sense strand
ggaccugcgaaauccagaa

SEQ ID NO: 342321 - RNA, 19 nt, Homo sapiens
  misc_RNA (1)...(19): siRNA sense strand
gagcaugauuuugaaguca

SEQ ID NO: 342322 - RNA, 19 nt, Homo sapiens
  misc_RNA (1)...(19): siRNA sense strand
gugacccagucuauuaaag

SEQ ID NO: 342323 - RNA, 19 nt, Homo sapiens
  misc_RNA (1)...(19): siRNA sense strand
agaacaaagcacaucagaa

SEQ ID NO: 342324 - RNA, 19 nt, Homo sapiens
  misc_RNA (1)...(19): siRNA sense strand
uggaagaaaccaccaaggu

SEQ ID NO: 342325 - RNA, 19 nt, Homo sapiens
  misc_RNA (1)...(19): siRNA sense strand
ucaacuggaauggauggua

SEQ ID NO: 342326 - RNA, 19 nt, Homo sapiens
  misc_RNA (1)...(19): siRNA sense strand
ggaaauggcugaacuagaa

SEQ ID NO: 342327 - RNA, 19 nt, Homo sapiens
  misc_RNA (1)...(19): siRNA sense strand
gaacaaagcacaucagaaa

SEQ ID NO: 342328 - RNA, 19 nt, Homo sapiens
  misc_RNA (1)...(19): siRNA sense strand
cagcuacccuuccaucaua

SEQ ID NO: 342329 - RNA, 19 nt, Homo sapiens
  misc_RNA (1)...(19): siRNA sense strand
gggauaccaugcaacauaa

SEQ ID NO: 342330 - RNA, 19 nt, Homo sapiens
  misc_RNA (1)...(19): siRNA sense strand
gaggagauguggucaaugg

SEQ ID NO: 342331 - RNA, 19 nt, Homo sapiens
  misc_RNA (1)...(19): siRNA sense strand
gaaggagcuuucaucauuc

SEQ ID NO: 342332 - RNA, 19 nt, Homo sapiens
  misc_RNA (1)...(19): siRNA sense strand
cuagaaaucuguugcuaug

SEQ ID NO: 342333 - RNA, 19 nt, Homo sapiens
  misc_RNA (1)...(19): siRNA sense strand
gcucagggcuauccucuca

SEQ ID NO: 342334 - RNA, 19 nt, Homo sapiens
  misc_RNA (1)...(19): siRNA sense strand
aaacaagcgucucugaaga

SEQ ID NO: 342335 - RNA, 19 nt, Homo sapiens
  misc_RNA (1)...(19): siRNA sense strand
caacauaaccugauaaagc

SEQ ID NO: 342336 - RNA, 19 nt, Homo sapiens
  misc_RNA (1)...(19): siRNA sense strand
gaaacaagcgucucugaag

SEQ ID NO: 342337 - RNA, 19 nt, Homo sapiens
  misc_RNA (1)...(19): siRNA sense strand
gcagagggauaccaugcaa

SEQ ID NO: 342338 - RNA, 19 nt, Homo sapiens
  misc_RNA (1)...(19): siRNA sense strand
ugaacuagaagcuguguua

SEQ ID NO: 342339 - RNA, 19 nt, Homo sapiens
  misc_RNA (1)...(19): siRNA sense strand
gagaaucccaggacagaaa

SEQ ID NO: 342340 - RNA, 19 nt, Homo sapiens
  misc_RNA (1)...(19): siRNA sense strand
gcccacagaucaacuggaa

SEQ ID NO: 342341 - RNA, 19 nt, Homo sapiens
  misc_RNA (1)...(19): siRNA sense strand
gaagacugcucagggcuau

SEQ ID NO: 342342 - RNA, 19 nt, Homo sapiens
  misc_RNA (1)...(19): siRNA sense strand
gacccagucuauuaaagaa

SEQ ID NO: 342343 - RNA, 19 nt, Homo sapiens
  misc_RNA (1)...(19): siRNA sense strand
acuagaagcuguguuagaa

SEQ ID NO: 342344 - RNA, 19 nt, Homo sapiens
  misc_RNA (1)...(19): siRNA sense strand
caugcaacauaaccugaua

SEQ ID NO: 342345 - RNA, 19 nt, Homo sapiens
  misc_RNA (1)...(19): siRNA sense strand
gcuggacaccuaccugaua

SEQ ID NO: 342346 - RNA, 19 nt, Homo sapiens
  misc_RNA (1)...(19): siRNA sense strand
cagaucaacuggaauggau

SEQ ID NO: 342347 - RNA, 19 nt, Homo sapiens
  misc_RNA (1)...(19): siRNA sense strand
gcaggaaauggcugaacua

SEQ ID NO: 342348 - RNA, 19 nt, Homo sapiens
  misc_RNA (1)...(19): siRNA sense strand
ccacagaucaacuggaaug

SEQ ID NO: 342349 - RNA, 19 nt, Homo sapiens
  misc_RNA (1)...(19): siRNA sense strand
caacaugcccacagaucaa

SEQ ID NO: 342350 - RNA, 19 nt, Homo sapiens
  misc_RNA (1)...(19): siRNA sense strand
ucaccaacaugcccacaga

SEQ ID NO: 342351 - RNA, 19 nt, Homo sapiens
  misc_RNA (1)...(19): siRNA sense strand
cagaggagauguggucaau

SEQ ID NO: 342352 - RNA, 19 nt, Homo sapiens
  misc_RNA (1)...(19): siRNA sense strand
caauugggcagauguguga

SEQ ID NO: 342353 - RNA, 19 nt, Homo sapiens
  misc_RNA (1)...(19): siRNA sense strand
ggagauguggucaauggaa

SEQ ID NO: 342354 - RNA, 19 nt, Homo sapiens
  misc_RNA (1)...(19): siRNA sense strand
guacagcuguguggugcuu

SEQ ID NO: 342355 - RNA, 19 nt, Homo sapiens
  misc_RNA (1)...(19): siRNA sense strand
ccaaagcgagcaagagaau

SEQ ID NO: 342356 - RNA, 19 nt, Homo sapiens
  misc_RNA (1)...(19): siRNA sense strand
gcuaugggcccuucaccaa

SEQ ID NO: 342357 - RNA, 19 nt, Homo sapiens
  misc_RNA (1)...(19): siRNA sense strand
gaaugagcaugauuuugaa

SEQ ID NO: 342358 - RNA, 19 nt, Homo sapiens
  misc_RNA (1)...(19): siRNA sense strand
ucagggcuauccucucaga

SEQ ID NO: 342359 - RNA, 19 nt, Homo sapiens
  misc_RNA (1)...(19): siRNA sense strand
agggauaccaugcaacaua

SEQ ID NO: 342360 - RNA, 19 nt, Homo sapiens
  misc_RNA (1)...(19): siRNA sense strand
gcuagaaaucuguugcuau

SEQ ID NO: 342361 - RNA, 19 nt, Homo sapiens
  misc_RNA (1)...(19): siRNA sense strand
ugaaugagcaugauuuuga

SEQ ID NO: 342362 - RNA, 19 nt, Homo sapiens
  misc_RNA (1)...(19): siRNA sense strand
ggcuagaaaucuguugcua

SEQ ID NO: 342363 - RNA, 19 nt, Homo sapiens
  misc_RNA (1)...(19): siRNA sense strand
ugaaacaagcgucucugaa

SEQ ID NO: 342364 - RNA, 19 nt, Homo sapiens
  misc_RNA (1)...(19): siRNA sense strand
aacauaaccugauaaagcu

SEQ ID NO: 342365 - RNA, 19 nt, Homo sapiens
  misc_RNA (1)...(19): siRNA sense strand
ugacccagucuauuaaaga

SEQ ID NO: 342366 - RNA, 19 nt, Homo sapiens
  misc_RNA (1)...(19): siRNA sense strand
gaacuagaagcuguguuag

SEQ ID NO: 342367 - RNA, 19 nt, Homo sapiens
  misc_RNA (1)...(19): siRNA sense strand
gugaaacaagcgucucuga

SEQ ID NO: 342368 - RNA, 19 nt, Homo sapiens
  misc_RNA (1)...(19): siRNA sense strand
ccaacaugcccacagauca

SEQ ID NO: 342369 - RNA, 19 nt, Homo sapiens
  misc_RNA (1)...(19): siRNA sense strand
uaugggcccuucaccaaca

SEQ ID NO: 342370 - RNA, 19 nt, Homo sapiens
  misc_RNA (1)...(19): siRNA sense strand
guccaaagcgagcaagaga

SEQ ID NO: 342371 - RNA, 19 nt, Homo sapiens
  misc_RNA (1)...(19): siRNA sense strand
cagaacaaagcacaucaga

SEQ ID NO: 342372 - RNA, 19 nt, Homo sapiens
  misc_RNA (1)...(19): siRNA sense strand
ccugcgaaauccagaacaa

SEQ ID NO: 342373 - RNA, 19 nt, Homo sapiens
  misc_RNA (1)...(19): siRNA sense strand
gaaaccaccaagguccaaa

SEQ ID NO: 342374 - RNA, 19 nt, Homo sapiens
  misc_RNA (1)...(19): siRNA sense strand
gauaaagcuccagcaggaa

SEQ ID NO: 342375 - RNA, 19 nt, Homo sapiens
  misc_RNA (1)...(19): siRNA sense strand
aaggagcuuucaucauuca

SEQ ID NO: 342376 - RNA, 19 nt, Homo sapiens
  misc_RNA (1)...(19): siRNA sense strand
ggugugagagugaaacaag

SEQ ID NO: 342377 - RNA, 19 nt, Homo sapiens
  misc_RNA (1)...(19): siRNA sense strand
gaaauggcugaacuagaag

SEQ ID NO: 342378 - RNA, 19 nt, Homo sapiens
  misc_RNA (1)...(19): siRNA sense strand
auaaagcuccagcaggaaa

SEQ ID NO: 342379 - RNA, 19 nt, Homo sapiens
  misc_RNA (1)...(19): siRNA sense strand
acccuuccaucauaaguga

SEQ ID NO: 342380 - RNA, 19 nt, Homo sapiens
  misc_RNA (1)...(19): siRNA sense strand
ggugacccagucuauuaaa

SEQ ID NO: 342381 - RNA, 19 nt, Homo sapiens
  misc_RNA (1)...(19): siRNA sense strand
cccagucuauuaaagaaag

SEQ ID NO: 342382 - RNA, 19 nt, Homo sapiens
  misc_RNA (1)...(19): siRNA sense strand
caucugggugugagaguga

SEQ ID NO: 342383 - RNA, 19 nt, Homo sapiens
  misc_RNA (1)...(19): siRNA sense strand
ccagucuauuaaagaaaga

SEQ ID NO: 342384 - RNA, 19 nt, Homo sapiens
  misc_RNA (1)...(19): siRNA sense strand
cgaaauccagaacaaagca

SEQ ID NO: 342385 - RNA, 19 nt, Homo sapiens
  misc_RNA (1)...(19): siRNA sense strand
aagagaaucccaggacaga

SEQ ID NO: 342386 - RNA, 19 nt, Homo sapiens
  misc_RNA (1)...(19): siRNA sense strand
gauguggucaauggaagaa

SEQ ID NO: 342387 - RNA, 19 nt, Homo sapiens
  misc_RNA (1)...(19): siRNA sense strand
ggaccugcgaaauccagaa

SEQ ID NO: 342388 - RNA, 19 nt, Homo sapiens
  misc_RNA (1)...(19): siRNA sense strand
gagcaugauuuugaaguca

SEQ ID NO: 342389 - RNA, 19 nt, Homo sapiens
  misc_RNA (1)...(19): siRNA sense strand
gugacccagucuauuaaag

SEQ ID NO: 342390 - RNA, 19 nt, Homo sapiens
  misc_RNA (1)...(19): siRNA sense strand
agaacaaagcacaucagaa

SEQ ID NO: 342391 - RNA, 19 nt, Homo sapiens
  misc_RNA (1)...(19): siRNA sense strand
uggaagaaaccaccaaggu

SEQ ID NO: 342392 - RNA, 19 nt, Homo sapiens
  misc_RNA (1)...(19): siRNA sense strand
ucaacuggaauggauggua

SEQ ID NO: 342393 - RNA, 19 nt, Homo sapiens
  misc_RNA (1)...(19): siRNA sense strand
ggaaauggcugaacuagaa

SEQ ID NO: 342394 - RNA, 19 nt, Homo sapiens
  misc_RNA (1)...(19): siRNA sense strand
gaacaaagcacaucagaaa

SEQ ID NO: 342395 - RNA, 19 nt, Homo sapiens
  misc_RNA (1)...(19): siRNA sense strand
cagcuacccuuccaucaua

SEQ ID NO: 342396 - RNA, 19 nt, Homo sapiens
  misc_RNA (1)...(19): siRNA sense strand
gggauaccaugcaacauaa

SEQ ID NO: 342397 - RNA, 19 nt, Homo sapiens
  misc_RNA (1)...(19): siRNA sense strand
gaggagauguggucaaugg

SEQ ID NO: 342398 - RNA, 19 nt, Homo sapiens
  misc_RNA (1)...(19): siRNA sense strand
gaaggagcuuucaucauuc

SEQ ID NO: 342399 - RNA, 19 nt, Homo sapiens
  misc_RNA (1)...(19): siRNA sense strand
cuagaaaucuguugcuaug

SEQ ID NO: 342400 - RNA, 19 nt, Homo sapiens
  misc_RNA (1)...(19): siRNA sense strand
gcucagggcuauccucuca

SEQ ID NO: 342401 - RNA, 19 nt, Homo sapiens
  misc_RNA (1)...(19): siRNA sense strand
aaacaagcgucucugaaga

SEQ ID NO: 342402 - RNA, 19 nt, Homo sapiens
  misc_RNA (1)...(19): siRNA sense strand
caacauaaccugauaaagc

SEQ ID NO: 342403 - RNA, 19 nt, Homo sapiens
  misc_RNA (1)...(19): siRNA sense strand
gaaacaagcgucucugaag

SEQ ID NO: 342404 - RNA, 19 nt, Homo sapiens
  misc_RNA (1)...(19): siRNA sense strand
gcagagggauaccaugcaa

SEQ ID NO: 342405 - RNA, 19 nt, Homo sapiens
  misc_RNA (1)...(19): siRNA sense strand
ugaacuagaagcuguguua

SEQ ID NO: 342406 - RNA, 19 nt, Homo sapiens
  misc_RNA (1)...(19): siRNA sense strand
gagaaucccaggacagaaa

SEQ ID NO: 342407 - RNA, 19 nt, Homo sapiens
  misc_RNA (1)...(19): siRNA sense strand
gcccacagaucaacuggaa

SEQ ID NO: 342408 - RNA, 19 nt, Homo sapiens
  misc_RNA (1)...(19): siRNA sense strand
gaagacugcucagggcuau

SEQ ID NO: 342409 - RNA, 19 nt, Homo sapiens
  misc_RNA (1)...(19): siRNA sense strand
gacccagucuauuaaagaa

SEQ ID NO: 342410 - RNA, 19 nt, Homo sapiens
  misc_RNA (1)...(19): siRNA sense strand
acuagaagcuguguuagaa

SEQ ID NO: 342411 - RNA, 19 nt, Homo sapiens
  misc_RNA (1)...(19): siRNA sense strand
caugcaacauaaccugaua

SEQ ID NO: 342412 - RNA, 19 nt, Homo sapiens
  misc_RNA (1)...(19): siRNA sense strand
gcuggacaccuaccugaua

SEQ ID NO: 342413 - RNA, 19 nt, Homo sapiens
  misc_RNA (1)...(19): siRNA sense strand
cagaucaacuggaauggau

SEQ ID NO: 342414 - RNA, 19 nt, Homo sapiens
  misc_RNA (1)...(19): siRNA sense strand
gcaggaaauggcugaacua

SEQ ID NO: 342415 - RNA, 19 nt, Homo sapiens
  misc_RNA (1)...(19): siRNA sense strand
ccacagaucaacuggaaug

SEQ ID NO: 342416 - RNA, 19 nt, Homo sapiens
  misc_RNA (1)...(19): siRNA sense strand
caacaugcccacagaucaa

SEQ ID NO: 342417 - RNA, 19 nt, Homo sapiens
  misc_RNA (1)...(19): siRNA sense strand
ucaccaacaugcccacaga

SEQ ID NO: 342418 - RNA, 19 nt, Homo sapiens
  misc_RNA (1)...(19): siRNA sense strand
cagaggagauguggucaau

SEQ ID NO: 342419 - RNA, 19 nt, Homo sapiens
  misc_RNA (1)...(19): siRNA sense strand
caauugggcagauguguga

SEQ ID NO: 342420 - RNA, 19 nt, Homo sapiens
  misc_RNA (1)...(19): siRNA sense strand
ggagauguggucaauggaa

SEQ ID NO: 342421 - RNA, 19 nt, Homo sapiens
  misc_RNA (1)...(19): siRNA sense strand
guacagcuguguggugcuu

SEQ ID NO: 342422 - RNA, 19 nt, Homo sapiens
  misc_RNA (1)...(19): siRNA sense strand
ccaaagcgagcaagagaau

SEQ ID NO: 342423 - RNA, 19 nt, Homo sapiens
  misc_RNA (1)...(19): siRNA sense strand
gcuaugggcccuucaccaa

SEQ ID NO: 342424 - RNA, 19 nt, Homo sapiens
  misc_RNA (1)...(19): siRNA sense strand
gaaugagcaugauuuugaa

SEQ ID NO: 342425 - RNA, 19 nt, Homo sapiens
  misc_RNA (1)...(19): siRNA sense strand
ucagggcuauccucucaga

SEQ ID NO: 342426 - RNA, 19 nt, Homo sapiens
  misc_RNA (1)...(19): siRNA sense strand
agggauaccaugcaacaua

SEQ ID NO: 342427 - RNA, 19 nt, Homo sapiens
  misc_RNA (1)...(19): siRNA sense strand
gcuagaaaucuguugcuau

SEQ ID NO: 342428 - RNA, 19 nt, Homo sapiens
  misc_RNA (1)...(19): siRNA sense strand
ugaaugagcaugauuuuga

SEQ ID NO: 342429 - RNA, 19 nt, Homo sapiens
  misc_RNA (1)...(19): siRNA sense strand
ggcuagaaaucuguugcua

SEQ ID NO: 342430 - RNA, 19 nt, Homo sapiens
  misc_RNA (1)...(19): siRNA sense strand
ugaaacaagcgucucugaa

SEQ ID NO: 342431 - RNA, 19 nt, Homo sapiens
  misc_RNA (1)...(19): siRNA sense strand
aacauaaccugauaaagcu

SEQ ID NO: 342432 - RNA, 19 nt, Homo sapiens
  misc_RNA (1)...(19): siRNA sense strand
ugacccagucuauuaaaga

SEQ ID NO: 342433 - RNA, 19 nt, Homo sapiens
  misc_RNA (1)...(19): siRNA sense strand
gaacuagaagcuguguuag

SEQ ID NO: 342434 - RNA, 19 nt, Homo sapiens
  misc_RNA (1)...(19): siRNA sense strand
gugaaacaagcgucucuga

SEQ ID NO: 342435 - RNA, 19 nt, Homo sapiens
  misc_RNA (1)...(19): siRNA sense strand
ccaacaugcccacagauca

SEQ ID NO: 342436 - RNA, 19 nt, Homo sapiens
  misc_RNA (1)...(19): siRNA sense strand
uaugggcccuucaccaaca

SEQ ID NO: 342437 - RNA, 19 nt, Homo sapiens
  misc_RNA (1)...(19): siRNA sense strand
guccaaagcgagcaagaga

SEQ ID NO: 342438 - RNA, 19 nt, Homo sapiens
  misc_RNA (1)...(19): siRNA sense strand
cagaacaaagcacaucaga

SEQ ID NO: 342439 - RNA, 19 nt, Homo sapiens
  misc_RNA (1)...(19): siRNA sense strand
ccugcgaaauccagaacaa

SEQ ID NO: 342440 - RNA, 19 nt, Homo sapiens
  misc_RNA (1)...(19): siRNA sense strand
gaaaccaccaagguccaaa

SEQ ID NO: 342441 - RNA, 19 nt, Homo sapiens
  misc_RNA (1)...(19): siRNA sense strand
gauaaagcuccagcaggaa

SEQ ID NO: 342442 - RNA, 19 nt, Homo sapiens
  misc_RNA (1)...(19): siRNA sense strand
aaggagcuuucaucauuca

SEQ ID NO: 342443 - RNA, 19 nt, Homo sapiens
  misc_RNA (1)...(19): siRNA sense strand
ggugugagagugaaacaag

SEQ ID NO: 342444 - RNA, 19 nt, Homo sapiens
  misc_RNA (1)...(19): siRNA sense strand
gaaauggcugaacuagaag

SEQ ID NO: 342445 - RNA, 19 nt, Homo sapiens
  misc_RNA (1)...(19): siRNA sense strand
auaaagcuccagcaggaaa

SEQ ID NO: 342446 - RNA, 19 nt, Homo sapiens
  misc_RNA (1)...(19): siRNA sense strand
acccuuccaucauaaguga

SEQ ID NO: 342447 - RNA, 19 nt, Homo sapiens
  misc_RNA (1)...(19): siRNA sense strand
ggugacccagucuauuaaa

SEQ ID NO: 342448 - RNA, 19 nt, Homo sapiens
  misc_RNA (1)...(19): siRNA sense strand
cccagucuauuaaagaaag

SEQ ID NO: 342449 - RNA, 19 nt, Homo sapiens
  misc_RNA (1)...(19): siRNA sense strand
caucugggugugagaguga

SEQ ID NO: 342450 - RNA, 19 nt, Homo sapiens
  misc_RNA (1)...(19): siRNA sense strand
ccagucuauuaaagaaaga

SEQ ID NO: 342451 - RNA, 19 nt, Homo sapiens
  misc_RNA (1)...(19): siRNA sense strand
cgaaauccagaacaaagca

SEQ ID NO: 342452 - RNA, 19 nt, Homo sapiens
  misc_RNA (1)...(19): siRNA sense strand
aagagaaucccaggacaga

SEQ ID NO: 342453 - RNA, 19 nt, Homo sapiens
  misc_RNA (1)...(19): siRNA sense strand
gauguggucaauggaagaa

SEQ ID NO: 342454 - RNA, 19 nt, Homo sapiens
  misc_RNA (1)...(19): siRNA sense strand
ggaccugcgaaauccagaa

SEQ ID NO: 342455 - RNA, 19 nt, Homo sapiens
  misc_RNA (1)...(19): siRNA sense strand
gagcaugauuuugaaguca

SEQ ID NO: 342456 - RNA, 19 nt, Homo sapiens
  misc_RNA (1)...(19): siRNA sense strand
gugacccagucuauuaaag

SEQ ID NO: 342457 - RNA, 19 nt, Homo sapiens
  misc_RNA (1)...(19): siRNA sense strand
agaacaaagcacaucagaa

SEQ ID NO: 342458 - RNA, 19 nt, Homo sapiens
  misc_RNA (1)...(19): siRNA sense strand
uggaagaaaccaccaaggu

SEQ ID NO: 342459 - RNA, 19 nt, Homo sapiens
  misc_RNA (1)...(19): siRNA sense strand
ucaacuggaauggauggua

SEQ ID NO: 342460 - RNA, 19 nt, Homo sapiens
  misc_RNA (1)...(19): siRNA sense strand
ggaaauggcugaacuagaa

SEQ ID NO: 342461 - RNA, 19 nt, Homo sapiens
  misc_RNA (1)...(19): siRNA sense strand
gaacaaagcacaucagaaa

SEQ ID NO: 342462 - RNA, 19 nt, Homo sapiens
  misc_RNA (1)...(19): siRNA sense strand
cagcuacccuuccaucaua

SEQ ID NO: 342463 - RNA, 19 nt, Homo sapiens
  misc_RNA (1)...(19): siRNA sense strand
gggauaccaugcaacauaa

SEQ ID NO: 342464 - RNA, 19 nt, Homo sapiens
  misc_RNA (1)...(19): siRNA sense strand
gaggagauguggucaaugg

SEQ ID NO: 342465 - RNA, 19 nt, Homo sapiens
  misc_RNA (1)...(19): siRNA sense strand
gaaggagcuuucaucauuc

SEQ ID NO: 342466 - RNA, 19 nt, Homo sapiens
  misc_RNA (1)...(19): siRNA sense strand
cuagaaaucuguugcuaug

SEQ ID NO: 342467 - RNA, 19 nt, Homo sapiens
  misc_RNA (1)...(19): siRNA sense strand
gcucagggcuauccucuca

SEQ ID NO: 342468 - RNA, 19 nt, Homo sapiens
  misc_RNA (1)...(19): siRNA sense strand
aaacaagcgucucugaaga

SEQ ID NO: 342469 - RNA, 19 nt, Homo sapiens
  misc_RNA (1)...(19): siRNA sense strand
caacauaaccugauaaagc

SEQ ID NO: 342470 - RNA, 19 nt, Homo sapiens
  misc_RNA (1)...(19): siRNA sense strand
gaaacaagcgucucugaag

SEQ ID NO: 342471 - RNA, 19 nt, Homo sapiens
  misc_RNA (1)...(19): siRNA sense strand
gcagagggauaccaugcaa

SEQ ID NO: 342472 - RNA, 19 nt, Homo sapiens
  misc_RNA (1)...(19): siRNA sense strand
ugaacuagaagcuguguua

SEQ ID NO: 342473 - RNA, 19 nt, Homo sapiens
  misc_RNA (1)...(19): siRNA sense strand
gagaaucccaggacagaaa

SEQ ID NO: 342474 - RNA, 19 nt, Homo sapiens
  misc_RNA (1)...(19): siRNA sense strand
gcccacagaucaacuggaa

SEQ ID NO: 342475 - RNA, 19 nt, Homo sapiens
  misc_RNA (1)...(19): siRNA sense strand
gaagacugcucagggcuau

SEQ ID NO: 342476 - RNA, 19 nt, Homo sapiens
  misc_RNA (1)...(19): siRNA sense strand
gacccagucuauuaaagaa

SEQ ID NO: 342477 - RNA, 19 nt, Homo sapiens
  misc_RNA (1)...(19): siRNA sense strand
acuagaagcuguguuagaa

SEQ ID NO: 342478 - RNA, 19 nt, Homo sapiens
  misc_RNA (1)...(19): siRNA sense strand
caugcaacauaaccugaua

SEQ ID NO: 342479 - RNA, 19 nt, Homo sapiens
  misc_RNA (1)...(19): siRNA sense strand
gcuggacaccuaccugaua

SEQ ID NO: 342480 - RNA, 19 nt, Homo sapiens
  misc_RNA (1)...(19): siRNA sense strand
cagaucaacuggaauggau

SEQ ID NO: 342481 - RNA, 19 nt, Homo sapiens
  misc_RNA (1)...(19): siRNA sense strand
gcaggaaauggcugaacua

SEQ ID NO: 342482 - RNA, 19 nt, Homo sapiens
  misc_RNA (1)...(19): siRNA sense strand
ccacagaucaacuggaaug

SEQ ID NO: 342483 - RNA, 19 nt, Homo sapiens
  misc_RNA (1)...(19): siRNA sense strand
caacaugcccacagaucaa

SEQ ID NO: 342484 - RNA, 19 nt, Homo sapiens
  misc_RNA (1)...(19): siRNA sense strand
ucaccaacaugcccacaga

SEQ ID NO: 342485 - RNA, 19 nt, Homo sapiens
  misc_RNA (1)...(19): siRNA sense strand
cagaggagauguggucaau

SEQ ID NO: 342486 - RNA, 19 nt, Homo sapiens
  misc_RNA (1)...(19): siRNA sense strand
caauugggcagauguguga

SEQ ID NO: 342487 - RNA, 19 nt, Homo sapiens
  misc_RNA (1)...(19): siRNA sense strand
ggagauguggucaauggaa

SEQ ID NO: 342488 - RNA, 19 nt, Homo sapiens
  misc_RNA (1)...(19): siRNA sense strand
guacagcuguguggugcuu

SEQ ID NO: 342489 - RNA, 19 nt, Homo sapiens
  misc_RNA (1)...(19): siRNA sense strand
ccaaagcgagcaagagaau

SEQ ID NO: 342490 - RNA, 19 nt, Homo sapiens
  misc_RNA (1)...(19): siRNA sense strand
gcuaugggcccuucaccaa

SEQ ID NO: 342491 - RNA, 19 nt, Homo sapiens
  misc_RNA (1)...(19): siRNA sense strand
gaaugagcaugauuuugaa

SEQ ID NO: 342492 - RNA, 19 nt, Homo sapiens
  misc_RNA (1)...(19): siRNA sense strand
ucagggcuauccucucaga

SEQ ID NO: 342493 - RNA, 19 nt, Homo sapiens
  misc_RNA (1)...(19): siRNA sense strand
agggauaccaugcaacaua

SEQ ID NO: 342494 - RNA, 19 nt, Homo sapiens
  misc_RNA (1)...(19): siRNA sense strand
gcuagaaaucuguugcuau

SEQ ID NO: 342495 - RNA, 19 nt, Homo sapiens
  misc_RNA (1)...(19): siRNA sense strand
ugaaugagcaugauuuuga

SEQ ID NO: 342496 - RNA, 19 nt, Homo sapiens
  misc_RNA (1)...(19): siRNA sense strand
ggcuagaaaucuguugcua

SEQ ID NO: 342497 - RNA, 19 nt, Homo sapiens
  misc_RNA (1)...(19): siRNA sense strand
ugaaacaagcgucucugaa

SEQ ID NO: 342498 - RNA, 19 nt, Homo sapiens
  misc_RNA (1)...(19): siRNA sense strand
aacauaaccugauaaagcu

SEQ ID NO: 342499 - RNA, 19 nt, Homo sapiens
  misc_RNA (1)...(19): siRNA sense strand
ugacccagucuauuaaaga

SEQ ID NO: 342500 - RNA, 19 nt, Homo sapiens
  misc_RNA (1)...(19): siRNA sense strand
gaacuagaagcuguguuag

SEQ ID NO: 342501 - RNA, 19 nt, Homo sapiens
  misc_RNA (1)...(19): siRNA sense strand
gugaaacaagcgucucuga

SEQ ID NO: 342502 - RNA, 19 nt, Homo sapiens
  misc_RNA (1)...(19): siRNA sense strand
ccaacaugcccacagauca

SEQ ID NO: 342503 - RNA, 19 nt, Homo sapiens
  misc_RNA (1)...(19): siRNA sense strand
uaugggcccuucaccaaca

SEQ ID NO: 342504 - RNA, 19 nt, Homo sapiens
  misc_RNA (1)...(19): siRNA sense strand
guccaaagcgagcaagaga

SEQ ID NO: 342505 - RNA, 19 nt, Homo sapiens
  misc_RNA (1)...(19): siRNA sense strand
cagaacaaagcacaucaga

SEQ ID NO: 342506 - RNA, 19 nt, Homo sapiens
  misc_RNA (1)...(19): siRNA sense strand
ccugcgaaauccagaacaa

SEQ ID NO: 342507 - RNA, 19 nt, Homo sapiens
  misc_RNA (1)...(19): siRNA sense strand
gaaaccaccaagguccaaa

SEQ ID NO: 342508 - RNA, 19 nt, Homo sapiens
  misc_RNA (1)...(19): siRNA sense strand
gauaaagcuccagcaggaa

SEQ ID NO: 342509 - RNA, 19 nt, Homo sapiens
  misc_RNA (1)...(19): siRNA sense strand
aaggagcuuucaucauuca

SEQ ID NO: 342510 - RNA, 19 nt, Homo sapiens
  misc_RNA (1)...(19): siRNA sense strand
ggugugagagugaaacaag

SEQ ID NO: 342511 - RNA, 19 nt, Homo sapiens
  misc_RNA (1)...(19): siRNA sense strand
gaaauggcugaacuagaag

SEQ ID NO: 342512 - RNA, 19 nt, Homo sapiens
  misc_RNA (1)...(19): siRNA sense strand
auaaagcuccagcaggaaa

SEQ ID NO: 342513 - RNA, 19 nt, Homo sapiens
  misc_RNA (1)...(19): siRNA sense strand
acccuuccaucauaaguga

SEQ ID NO: 342514 - RNA, 19 nt, Homo sapiens
  misc_RNA (1)...(19): siRNA sense strand
ggugacccagucuauuaaa

SEQ ID NO: 342515 - RNA, 19 nt, Homo sapiens
  misc_RNA (1)...(19): siRNA sense strand
cccagucuauuaaagaaag

SEQ ID NO: 342516 - RNA, 19 nt, Homo sapiens
  misc_RNA (1)...(19): siRNA sense strand
caucugggugugagaguga

SEQ ID NO: 342517 - RNA, 19 nt, Homo sapiens
  misc_RNA (1)...(19): siRNA sense strand
ccagucuauuaaagaaaga

SEQ ID NO: 342518 - RNA, 19 nt, Homo sapiens
  misc_RNA (1)...(19): siRNA sense strand
cgaaauccagaacaaagca

SEQ ID NO: 342519 - RNA, 19 nt, Homo sapiens
  misc_RNA (1)...(19): siRNA sense strand
aagagaaucccaggacaga

SEQ ID NO: 342520 - RNA, 19 nt, Homo sapiens
  misc_RNA (1)...(19): siRNA sense strand
gauguggucaauggaagaa

SEQ ID NO: 342521 - RNA, 19 nt, Homo sapiens
  misc_RNA (1)...(19): siRNA sense strand
ggaccugcgaaauccagaa

SEQ ID NO: 342522 - RNA, 19 nt, Homo sapiens
  misc_RNA (1)...(19): siRNA sense strand
gagcaugauuuugaaguca

SEQ ID NO: 342523 - RNA, 19 nt, Homo sapiens
  misc_RNA (1)...(19): siRNA sense strand
gugacccagucuauuaaag

SEQ ID NO: 342524 - RNA, 19 nt, Homo sapiens
  misc_RNA (1)...(19): siRNA sense strand
agaacaaagcacaucagaa

SEQ ID NO: 342525 - RNA, 19 nt, Homo sapiens
  misc_RNA (1)...(19): siRNA sense strand
uggaagaaaccaccaaggu

SEQ ID NO: 342526 - RNA, 19 nt, Homo sapiens
  misc_RNA (1)...(19): siRNA sense strand
ucaacuggaauggauggua

SEQ ID NO: 342527 - RNA, 19 nt, Homo sapiens
  misc_RNA (1)...(19): siRNA sense strand
ggaaauggcugaacuagaa

SEQ ID NO: 342528 - RNA, 19 nt, Homo sapiens
  misc_RNA (1)...(19): siRNA sense strand
gaacaaagcacaucagaaa

SEQ ID NO: 342529 - RNA, 19 nt, Homo sapiens
  misc_RNA (1)...(19): siRNA sense strand
cagcuacccuuccaucaua

SEQ ID NO: 342530 - RNA, 19 nt, Homo sapiens
  misc_RNA (1)...(19): siRNA sense strand
gggauaccaugcaacauaa

SEQ ID NO: 342531 - RNA, 19 nt, Homo sapiens
  misc_RNA (1)...(19): siRNA sense strand
gaggagauguggucaaugg

SEQ ID NO: 342532 - RNA, 19 nt, Homo sapiens
  misc_RNA (1)...(19): siRNA sense strand
gaaggagcuuucaucauuc

SEQ ID NO: 342533 - RNA, 19 nt, Homo sapiens
  misc_RNA (1)...(19): siRNA sense strand
cuagaaaucuguugcuaug

SEQ ID NO: 342534 - RNA, 19 nt, Homo sapiens
  misc_RNA (1)...(19): siRNA sense strand
gcucagggcuauccucuca

SEQ ID NO: 342535 - RNA, 19 nt, Homo sapiens
  misc_RNA (1)...(19): siRNA sense strand
aaacaagcgucucugaaga

SEQ ID NO: 342536 - RNA, 19 nt, Homo sapiens
  misc_RNA (1)...(19): siRNA sense strand
caacauaaccugauaaagc

SEQ ID NO: 342537 - RNA, 19 nt, Homo sapiens
  misc_RNA (1)...(19): siRNA sense strand
gaaacaagcgucucugaag

SEQ ID NO: 342538 - RNA, 19 nt, Homo sapiens
  misc_RNA (1)...(19): siRNA sense strand
gcagagggauaccaugcaa

SEQ ID NO: 342539 - RNA, 19 nt, Homo sapiens
  misc_RNA (1)...(19): siRNA sense strand
ugaacuagaagcuguguua

SEQ ID NO: 342540 - RNA, 19 nt, Homo sapiens
  misc_RNA (1)...(19): siRNA sense strand
gagaaucccaggacagaaa

SEQ ID NO: 342541 - RNA, 19 nt, Homo sapiens
  misc_RNA (1)...(19): siRNA sense strand
gcccacagaucaacuggaa

SEQ ID NO: 342542 - RNA, 19 nt, Homo sapiens
  misc_RNA (1)...(19): siRNA sense strand
gaagacugcucagggcuau

SEQ ID NO: 342543 - RNA, 19 nt, Homo sapiens
  misc_RNA (1)...(19): siRNA sense strand
gacccagucuauuaaagaa

SEQ ID NO: 342544 - RNA, 19 nt, Homo sapiens
  misc_RNA (1)...(19): siRNA sense strand
acuagaagcuguguuagaa

SEQ ID NO: 342545 - RNA, 19 nt, Homo sapiens
  misc_RNA (1)...(19): siRNA sense strand
caugcaacauaaccugaua

SEQ ID NO: 342546 - RNA, 19 nt, Homo sapiens
  misc_RNA (1)...(19): siRNA sense strand
gcuggacaccuaccugaua

SEQ ID NO: 342547 - RNA, 19 nt, Homo sapiens
  misc_RNA (1)...(19): siRNA sense strand
cagaucaacuggaauggau

SEQ ID NO: 342548 - RNA, 19 nt, Homo sapiens
  misc_RNA (1)...(19): siRNA sense strand
gcaggaaauggcugaacua

SEQ ID NO: 342549 - RNA, 19 nt, Homo sapiens
  misc_RNA (1)...(19): siRNA sense strand
ccacagaucaacuggaaug

SEQ ID NO: 342550 - RNA, 19 nt, Homo sapiens
  misc_RNA (1)...(19): siRNA sense strand
caacaugcccacagaucaa

SEQ ID NO: 342551 - RNA, 19 nt, Homo sapiens
  misc_RNA (1)...(19): siRNA sense strand
ucaccaacaugcccacaga

SEQ ID NO: 342552 - RNA, 19 nt, Homo sapiens
  misc_RNA (1)...(19): siRNA sense strand
cagaggagauguggucaau

SEQ ID NO: 342553 - RNA, 19 nt, Homo sapiens
  misc_RNA (1)...(19): siRNA sense strand
caauugggcagauguguga

SEQ ID NO: 342554 - RNA, 19 nt, Homo sapiens
  misc_RNA (1)...(19): siRNA sense strand
ggagauguggucaauggaa

SEQ ID NO: 342555 - RNA, 19 nt, Homo sapiens
  misc_RNA (1)...(19): siRNA sense strand
guacagcuguguggugcuu

SEQ ID NO: 342556 - RNA, 19 nt, Homo sapiens
  misc_RNA (1)...(19): siRNA sense strand
ccaaagcgagcaagagaau

SEQ ID NO: 342557 - RNA, 19 nt, Homo sapiens
  misc_RNA (1)...(19): siRNA sense strand
gcuaugggcccuucaccaa

SEQ ID NO: 342558 - RNA, 19 nt, Homo sapiens
  misc_RNA (1)...(19): siRNA sense strand
gaaugagcaugauuuugaa

SEQ ID NO: 342559 - RNA, 19 nt, Homo sapiens
  misc_RNA (1)...(19): siRNA sense strand
ucagggcuauccucucaga

SEQ ID NO: 342560 - RNA, 19 nt, Homo sapiens
  misc_RNA (1)...(19): siRNA sense strand
agggauaccaugcaacaua

SEQ ID NO: 342561 - RNA, 19 nt, Homo sapiens
  misc_RNA (1)...(19): siRNA sense strand
gcuagaaaucuguugcuau

SEQ ID NO: 342562 - RNA, 19 nt, Homo sapiens
  misc_RNA (1)...(19): siRNA sense strand
ugaaugagcaugauuuuga

SEQ ID NO: 342563 - RNA, 19 nt, Homo sapiens
  misc_RNA (1)...(19): siRNA sense strand
ggcuagaaaucuguugcua

SEQ ID NO: 342564 - RNA, 19 nt, Homo sapiens
  misc_RNA (1)...(19): siRNA sense strand
ugaaacaagcgucucugaa

SEQ ID NO: 342565 - RNA, 19 nt, Homo sapiens
  misc_RNA (1)...(19): siRNA sense strand
aacauaaccugauaaagcu

SEQ ID NO: 342566 - RNA, 19 nt, Homo sapiens
  misc_RNA (1)...(19): siRNA sense strand
ugacccagucuauuaaaga

SEQ ID NO: 342567 - RNA, 19 nt, Homo sapiens
  misc_RNA (1)...(19): siRNA sense strand
gaacuagaagcuguguuag

SEQ ID NO: 342568 - RNA, 19 nt, Homo sapiens
  misc_RNA (1)...(19): siRNA sense strand
gugaaacaagcgucucuga

SEQ ID NO: 342569 - RNA, 19 nt, Homo sapiens
  misc_RNA (1)...(19): siRNA sense strand
ccaacaugcccacagauca

SEQ ID NO: 342570 - RNA, 19 nt, Homo sapiens
  misc_RNA (1)...(19): siRNA sense strand
uaugggcccuucaccaaca

SEQ ID NO: 342571 - RNA, 19 nt, Homo sapiens
  misc_RNA (1)...(19): siRNA sense strand
guccaaagcgagcaagaga

SEQ ID NO: 342572 - RNA, 19 nt, Homo sapiens
  misc_RNA (1)...(19): siRNA sense strand
cagaacaaagcacaucaga

SEQ ID NO: 342573 - RNA, 19 nt, Homo sapiens
  misc_RNA (1)...(19): siRNA sense strand
ccugcgaaauccagaacaa

SEQ ID NO: 342574 - RNA, 19 nt, Homo sapiens
  misc_RNA (1)...(19): siRNA sense strand
gaaaccaccaagguccaaa

SEQ ID NO: 342575 - RNA, 19 nt, Homo sapiens
  misc_RNA (1)...(19): siRNA sense strand
gauaaagcuccagcaggaa

SEQ ID NO: 342576 - RNA, 19 nt, Homo sapiens
  misc_RNA (1)...(19): siRNA sense strand
aaggagcuuucaucauuca

SEQ ID NO: 342577 - RNA, 19 nt, Homo sapiens
  misc_RNA (1)...(19): siRNA sense strand
ggugugagagugaaacaag

SEQ ID NO: 342578 - RNA, 19 nt, Homo sapiens
  misc_RNA (1)...(19): siRNA sense strand
gaaauggcugaacuagaag

SEQ ID NO: 342579 - RNA, 19 nt, Homo sapiens
  misc_RNA (1)...(19): siRNA sense strand
auaaagcuccagcaggaaa

SEQ ID NO: 342580 - RNA, 19 nt, Homo sapiens
  misc_RNA (1)...(19): siRNA sense strand
acccuuccaucauaaguga

SEQ ID NO: 342581 - RNA, 19 nt, Homo sapiens
  misc_RNA (1)...(19): siRNA sense strand
ggugacccagucuauuaaa

SEQ ID NO: 342582 - RNA, 19 nt, Homo sapiens
  misc_RNA (1)...(19): siRNA sense strand
cccagucuauuaaagaaag

SEQ ID NO: 342583 - RNA, 19 nt, Homo sapiens
  misc_RNA (1)...(19): siRNA sense strand
caucugggugugagaguga

SEQ ID NO: 342584 - RNA, 19 nt, Homo sapiens
  misc_RNA (1)...(19): siRNA sense strand
ccagucuauuaaagaaaga

SEQ ID NO: 342585 - RNA, 19 nt, Homo sapiens
  misc_RNA (1)...(19): siRNA sense strand
cgaaauccagaacaaagca

SEQ ID NO: 342586 - RNA, 19 nt, Homo sapiens
  misc_RNA (1)...(19): siRNA sense strand
aagagaaucccaggacaga

SEQ ID NO: 342587 - RNA, 19 nt, Homo sapiens
  misc_RNA (1)...(19): siRNA sense strand
gauguggucaauggaagaa

SEQ ID NO: 342588 - RNA, 19 nt, Homo sapiens
  misc_RNA (1)...(19): siRNA sense strand
ggaccugcgaaauccagaa

SEQ ID NO: 342589 - RNA, 19 nt, Homo sapiens
  misc_RNA (1)...(19): siRNA sense strand
gagcaugauuuugaaguca

SEQ ID NO: 342590 - RNA, 19 nt, Homo sapiens
  misc_RNA (1)...(19): siRNA sense strand
gugacccagucuauuaaag

SEQ ID NO: 342591 - RNA, 19 nt, Homo sapiens
  misc_RNA (1)...(19): siRNA sense strand
agaacaaagcacaucagaa

SEQ ID NO: 342592 - RNA, 19 nt, Homo sapiens
  misc_RNA (1)...(19): siRNA sense strand
uggaagaaaccaccaaggu

SEQ ID NO: 342593 - RNA, 19 nt, Homo sapiens
  misc_RNA (1)...(19): siRNA sense strand
ucaacuggaauggauggua

SEQ ID NO: 342594 - RNA, 19 nt, Homo sapiens
  misc_RNA (1)...(19): siRNA sense strand
ggaaauggcugaacuagaa

SEQ ID NO: 342595 - RNA, 19 nt, Homo sapiens
  misc_RNA (1)...(19): siRNA sense strand
gaacaaagcacaucagaaa

SEQ ID NO: 342596 - RNA, 19 nt, Homo sapiens
  misc_RNA (1)...(19): siRNA sense strand
cagcuacccuuccaucaua

SEQ ID NO: 342597 - RNA, 19 nt, Homo sapiens
  misc_RNA (1)...(19): siRNA sense strand
gggauaccaugcaacauaa

SEQ ID NO: 342598 - RNA, 19 nt, Homo sapiens
  misc_RNA (1)...(19): siRNA sense strand
gaggagauguggucaaugg

SEQ ID NO: 342599 - RNA, 19 nt, Homo sapiens
  misc_RNA (1)...(19): siRNA sense strand
gaaggagcuuucaucauuc

SEQ ID NO: 342600 - RNA, 19 nt, Homo sapiens
  misc_RNA (1)...(19): siRNA sense strand
cuagaaaucuguugcuaug

SEQ ID NO: 342601 - RNA, 19 nt, Homo sapiens
  misc_RNA (1)...(19): siRNA sense strand
gcucagggcuauccucuca

SEQ ID NO: 342602 - RNA, 19 nt, Homo sapiens
  misc_RNA (1)...(19): siRNA sense strand
aaacaagcgucucugaaga

SEQ ID NO: 342603 - RNA, 19 nt, Homo sapiens
  misc_RNA (1)...(19): siRNA sense strand
caacauaaccugauaaagc

SEQ ID NO: 342604 - RNA, 19 nt, Homo sapiens
  misc_RNA (1)...(19): siRNA sense strand
gaaacaagcgucucugaag

SEQ ID NO: 342605 - RNA, 19 nt, Homo sapiens
  misc_RNA (1)...(19): siRNA sense strand
gcagagggauaccaugcaa

SEQ ID NO: 342606 - RNA, 19 nt, Homo sapiens
  misc_RNA (1)...(19): siRNA sense strand
ugaacuagaagcuguguua

SEQ ID NO: 342607 - RNA, 19 nt, Homo sapiens
  misc_RNA (1)...(19): siRNA sense strand
gagaaucccaggacagaaa

SEQ ID NO: 342608 - RNA, 19 nt, Homo sapiens
  misc_RNA (1)...(19): siRNA sense strand
gcccacagaucaacuggaa

SEQ ID NO: 342609 - RNA, 19 nt, Homo sapiens
  misc_RNA (1)...(19): siRNA sense strand
gaagacugcucagggcuau

SEQ ID NO: 342610 - RNA, 19 nt, Homo sapiens
  misc_RNA (1)...(19): siRNA sense strand
gacccagucuauuaaagaa

SEQ ID NO: 342611 - RNA, 19 nt, Homo sapiens
  misc_RNA (1)...(19): siRNA sense strand
acuagaagcuguguuagaa

SEQ ID NO: 342612 - RNA, 19 nt, Homo sapiens
  misc_RNA (1)...(19): siRNA sense strand
caugcaacauaaccugaua

SEQ ID NO: 342613 - RNA, 19 nt, Homo sapiens
  misc_RNA (1)...(19): siRNA sense strand
gcuggacaccuaccugaua

SEQ ID NO: 342614 - RNA, 19 nt, Homo sapiens
  misc_RNA (1)...(19): siRNA sense strand
cagaucaacuggaauggau

SEQ ID NO: 342615 - RNA, 19 nt, Homo sapiens
  misc_RNA (1)...(19): siRNA sense strand
gcaggaaauggcugaacua

SEQ ID NO: 342616 - RNA, 19 nt, Homo sapiens
  misc_RNA (1)...(19): siRNA sense strand
ccacagaucaacuggaaug

SEQ ID NO: 342617 - RNA, 19 nt, Homo sapiens
  misc_RNA (1)...(19): siRNA sense strand
caacaugcccacagaucaa

SEQ ID NO: 342618 - RNA, 19 nt, Homo sapiens
  misc_RNA (1)...(19): siRNA sense strand
ucaccaacaugcccacaga

SEQ ID NO: 342619 - RNA, 19 nt, Homo sapiens
  misc_RNA (1)...(19): siRNA sense strand
cagaggagauguggucaau

SEQ ID NO: 342620 - RNA, 19 nt, Homo sapiens
  misc_RNA (1)...(19): siRNA sense strand
caauugggcagauguguga

SEQ ID NO: 342621 - RNA, 19 nt, Homo sapiens
  misc_RNA (1)...(19): siRNA sense strand
ggagauguggucaauggaa

SEQ ID NO: 342622 - RNA, 19 nt, Homo sapiens
  misc_RNA (1)...(19): siRNA sense strand
guacagcuguguggugcuu

SEQ ID NO: 342623 - RNA, 19 nt, Homo sapiens
  misc_RNA (1)...(19): siRNA sense strand
ccaaagcgagcaagagaau

SEQ ID NO: 342624 - RNA, 19 nt, Homo sapiens
  misc_RNA (1)...(19): siRNA sense strand
gcuaugggcccuucaccaa

SEQ ID NO: 342625 - RNA, 19 nt, Homo sapiens
  misc_RNA (1)...(19): siRNA sense strand
gaaugagcaugauuuugaa

SEQ ID NO: 342626 - RNA, 19 nt, Homo sapiens
  misc_RNA (1)...(19): siRNA sense strand
ucagggcuauccucucaga

SEQ ID NO: 342627 - RNA, 19 nt, Homo sapiens
  misc_RNA (1)...(19): siRNA sense strand
agggauaccaugcaacaua

SEQ ID NO: 342628 - RNA, 19 nt, Homo sapiens
  misc_RNA (1)...(19): siRNA sense strand
gcuagaaaucuguugcuau

SEQ ID NO: 342629 - RNA, 19 nt, Homo sapiens
  misc_RNA (1)...(19): siRNA sense strand
ugaaugagcaugauuuuga

SEQ ID NO: 342630 - RNA, 19 nt, Homo sapiens
  misc_RNA (1)...(19): siRNA sense strand
ggcuagaaaucuguugcua

SEQ ID NO: 342631 - RNA, 19 nt, Homo sapiens
  misc_RNA (1)...(19): siRNA sense strand
ugaaacaagcgucucugaa

SEQ ID NO: 342632 - RNA, 19 nt, Homo sapiens
  misc_RNA (1)...(19): siRNA sense strand
aacauaaccugauaaagcu

SEQ ID NO: 342633 - RNA, 19 nt, Homo sapiens
  misc_RNA (1)...(19): siRNA sense strand
ugacccagucuauuaaaga

SEQ ID NO: 342634 - RNA, 19 nt, Homo sapiens
  misc_RNA (1)...(19): siRNA sense strand
gaacuagaagcuguguuag

SEQ ID NO: 342635 - RNA, 19 nt, Homo sapiens
  misc_RNA (1)...(19): siRNA sense strand
gugaaacaagcgucucuga

SEQ ID NO: 342636 - RNA, 19 nt, Homo sapiens
  misc_RNA (1)...(19): siRNA sense strand
ccaacaugcccacagauca

SEQ ID NO: 342637 - RNA, 19 nt, Homo sapiens
  misc_RNA (1)...(19): siRNA sense strand
uaugggcccuucaccaaca

SEQ ID NO: 342638 - RNA, 19 nt, Homo sapiens
  misc_RNA (1)...(19): siRNA sense strand
guccaaagcgagcaagaga

SEQ ID NO: 342639 - RNA, 19 nt, Homo sapiens
  misc_RNA (1)...(19): siRNA sense strand
cagaacaaagcacaucaga

SEQ ID NO: 342640 - RNA, 19 nt, Homo sapiens
  misc_RNA (1)...(19): siRNA sense strand
ccugcgaaauccagaacaa

SEQ ID NO: 342641 - RNA, 19 nt, Homo sapiens
  misc_RNA (1)...(19): siRNA sense strand
gaaaccaccaagguccaaa

SEQ ID NO: 342642 - RNA, 19 nt, Homo sapiens
  misc_RNA (1)...(19): siRNA sense strand
gauaaagcuccagcaggaa

SEQ ID NO: 342643 - RNA, 19 nt, Homo sapiens
  misc_RNA (1)...(19): siRNA sense strand
aaggagcuuucaucauuca

SEQ ID NO: 342644 - RNA, 19 nt, Homo sapiens
  misc_RNA (1)...(19): siRNA sense strand
ggugugagagugaaacaag

SEQ ID NO: 342645 - RNA, 19 nt, Homo sapiens
  misc_RNA (1)...(19): siRNA sense strand
gaaauggcugaacuagaag

SEQ ID NO: 342646 - RNA, 19 nt, Homo sapiens
  misc_RNA (1)...(19): siRNA sense strand
auaaagcuccagcaggaaa

SEQ ID NO: 342647 - RNA, 19 nt, Homo sapiens
  misc_RNA (1)...(19): siRNA sense strand
acccuuccaucauaaguga

SEQ ID NO: 342648 - RNA, 19 nt, Homo sapiens
  misc_RNA (1)...(19): siRNA sense strand
ggugacccagucuauuaaa

SEQ ID NO: 342649 - RNA, 19 nt, Homo sapiens
  misc_RNA (1)...(19): siRNA sense strand
cccagucuauuaaagaaag

SEQ ID NO: 342650 - RNA, 19 nt, Homo sapiens
  misc_RNA (1)...(19): siRNA sense strand
caucugggugugagaguga

SEQ ID NO: 342651 - RNA, 19 nt, Homo sapiens
  misc_RNA (1)...(19): siRNA sense strand
ccagucuauuaaagaaaga

SEQ ID NO: 342652 - RNA, 19 nt, Homo sapiens
  misc_RNA (1)...(19): siRNA sense strand
cgaaauccagaacaaagca

SEQ ID NO: 342653 - RNA, 19 nt, Homo sapiens
  misc_RNA (1)...(19): siRNA sense strand
aagagaaucccaggacaga

SEQ ID NO: 342654 - RNA, 19 nt, Homo sapiens
  misc_RNA (1)...(19): siRNA sense strand
gauguggucaauggaagaa

SEQ ID NO: 342655 - RNA, 19 nt, Homo sapiens
  misc_RNA (1)...(19): siRNA sense strand
ggaccugcgaaauccagaa

SEQ ID NO: 342656 - RNA, 19 nt, Homo sapiens
  misc_RNA (1)...(19): siRNA sense strand
gagcaugauuuugaaguca

SEQ ID NO: 342657 - RNA, 19 nt, Homo sapiens
  misc_RNA (1)...(19): siRNA sense strand
gugacccagucuauuaaag

SEQ ID NO: 342658 - RNA, 19 nt, Homo sapiens
  misc_RNA (1)...(19): siRNA sense strand
agaacaaagcacaucagaa

SEQ ID NO: 342659 - RNA, 19 nt, Homo sapiens
  misc_RNA (1)...(19): siRNA sense strand
uggaagaaaccaccaaggu

SEQ ID NO: 342660 - RNA, 19 nt, Homo sapiens
  misc_RNA (1)...(19): siRNA sense strand
ucaacuggaauggauggua

SEQ ID NO: 342661 - RNA, 19 nt, Homo sapiens
  misc_RNA (1)...(19): siRNA sense strand
ggaaauggcugaacuagaa

SEQ ID NO: 342662 - RNA, 19 nt, Homo sapiens
  misc_RNA (1)...(19): siRNA sense strand
gaacaaagcacaucagaaa

SEQ ID NO: 342663 - RNA, 19 nt, Homo sapiens
  misc_RNA (1)...(19): siRNA sense strand
cagcuacccuuccaucaua

SEQ ID NO: 342664 - RNA, 19 nt, Homo sapiens
  misc_RNA (1)...(19): siRNA sense strand
gggauaccaugcaacauaa

SEQ ID NO: 342665 - RNA, 19 nt, Homo sapiens
  misc_RNA (1)...(19): siRNA sense strand
gaggagauguggucaaugg

SEQ ID NO: 342666 - RNA, 19 nt, Homo sapiens
  misc_RNA (1)...(19): siRNA sense strand
gaaggagcuuucaucauuc

SEQ ID NO: 342667 - RNA, 19 nt, Homo sapiens
  misc_RNA (1)...(19): siRNA sense strand
cuagaaaucuguugcuaug

SEQ ID NO: 342668 - RNA, 19 nt, Homo sapiens
  misc_RNA (1)...(19): siRNA sense strand
gcucagggcuauccucuca

SEQ ID NO: 342669 - RNA, 19 nt, Homo sapiens
  misc_RNA (1)...(19): siRNA sense strand
aaacaagcgucucugaaga

SEQ ID NO: 342670 - RNA, 19 nt, Homo sapiens
  misc_RNA (1)...(19): siRNA sense strand
caacauaaccugauaaagc

SEQ ID NO: 342671 - RNA, 19 nt, Homo sapiens
  misc_RNA (1)...(19): siRNA sense strand
gaaacaagcgucucugaag

SEQ ID NO: 342672 - RNA, 19 nt, Homo sapiens
  misc_RNA (1)...(19): siRNA sense strand
gcagagggauaccaugcaa

SEQ ID NO: 342673 - RNA, 19 nt, Homo sapiens
  misc_RNA (1)...(19): siRNA sense strand
ugaacuagaagcuguguua

SEQ ID NO: 342674 - RNA, 19 nt, Homo sapiens
  misc_RNA (1)...(19): siRNA sense strand
gagaaucccaggacagaaa

SEQ ID NO: 342675 - RNA, 19 nt, Homo sapiens
  misc_RNA (1)...(19): siRNA sense strand
gcccacagaucaacuggaa

SEQ ID NO: 342676 - RNA, 19 nt, Homo sapiens
  misc_RNA (1)...(19): siRNA sense strand
gaagacugcucagggcuau

SEQ ID NO: 342677 - RNA, 19 nt, Homo sapiens
  misc_RNA (1)...(19): siRNA sense strand
gacccagucuauuaaagaa

SEQ ID NO: 342678 - RNA, 19 nt, Homo sapiens
  misc_RNA (1)...(19): siRNA sense strand
acuagaagcuguguuagaa

SEQ ID NO: 342679 - RNA, 19 nt, Homo sapiens
  misc_RNA (1)...(19): siRNA sense strand
caugcaacauaaccugaua

SEQ ID NO: 342680 - RNA, 19 nt, Homo sapiens
  misc_RNA (1)...(19): siRNA sense strand
gcuggacaccuaccugaua

SEQ ID NO: 342681 - RNA, 19 nt, Homo sapiens
  misc_RNA (1)...(19): siRNA sense strand
cagaucaacuggaauggau

SEQ ID NO: 342682 - RNA, 19 nt, Homo sapiens
  misc_RNA (1)...(19): siRNA sense strand
gcaggaaauggcugaacua

SEQ ID NO: 342683 - RNA, 19 nt, Homo sapiens
  misc_RNA (1)...(19): siRNA sense strand
ccacagaucaacuggaaug

SEQ ID NO: 342684 - RNA, 19 nt, Homo sapiens
  misc_RNA (1)...(19): siRNA sense strand
caacaugcccacagaucaa

SEQ ID NO: 342685 - RNA, 19 nt, Homo sapiens
  misc_RNA (1)...(19): siRNA sense strand
ucaccaacaugcccacaga

SEQ ID NO: 342686 - RNA, 19 nt, Homo sapiens
  misc_RNA (1)...(19): siRNA sense strand
cagaggagauguggucaau

SEQ ID NO: 342687 - RNA, 19 nt, Homo sapiens
  misc_RNA (1)...(19): siRNA sense strand
caauugggcagauguguga

SEQ ID NO: 342688 - RNA, 19 nt, Homo sapiens
  misc_RNA (1)...(19): siRNA sense strand
ggagauguggucaauggaa

SEQ ID NO: 342689 - RNA, 19 nt, Homo sapiens
  misc_RNA (1)...(19): siRNA sense strand
guacagcuguguggugcuu

SEQ ID NO: 342690 - RNA, 19 nt, Homo sapiens
  misc_RNA (1)...(19): siRNA sense strand
ccaaagcgagcaagagaau

SEQ ID NO: 342691 - RNA, 19 nt, Homo sapiens
  misc_RNA (1)...(19): siRNA sense strand
gcuaugggcccuucaccaa

SEQ ID NO: 342692 - RNA, 19 nt, Homo sapiens
  misc_RNA (1)...(19): siRNA sense strand
gaaugagcaugauuuugaa

SEQ ID NO: 342693 - RNA, 19 nt, Homo sapiens
  misc_RNA (1)...(19): siRNA sense strand
ucagggcuauccucucaga

SEQ ID NO: 342694 - RNA, 19 nt, Homo sapiens
  misc_RNA (1)...(19): siRNA sense strand
agggauaccaugcaacaua

SEQ ID NO: 342695 - RNA, 19 nt, Homo sapiens
  misc_RNA (1)...(19): siRNA sense strand
gcuagaaaucuguugcuau

SEQ ID NO: 342696 - RNA, 19 nt, Homo sapiens
  misc_RNA (1)...(19): siRNA sense strand
ugaaugagcaugauuuuga

SEQ ID NO: 342697 - RNA, 19 nt, Homo sapiens
  misc_RNA (1)...(19): siRNA sense strand
ggcuagaaaucuguugcua

SEQ ID NO: 342698 - RNA, 19 nt, Homo sapiens
  misc_RNA (1)...(19): siRNA sense strand
ugaaacaagcgucucugaa

SEQ ID NO: 342699 - RNA, 19 nt, Homo sapiens
  misc_RNA (1)...(19): siRNA sense strand
aacauaaccugauaaagcu

SEQ ID NO: 342700 - RNA, 19 nt, Homo sapiens
  misc_RNA (1)...(19): siRNA sense strand
ugacccagucuauuaaaga

SEQ ID NO: 342701 - RNA, 19 nt, Homo sapiens
  misc_RNA (1)...(19): siRNA sense strand
gaacuagaagcuguguuag

SEQ ID NO: 342702 - RNA, 19 nt, Homo sapiens
  misc_RNA (1)...(19): siRNA sense strand
gugaaacaagcgucucuga

SEQ ID NO: 342703 - RNA, 19 nt, Homo sapiens
  misc_RNA (1)...(19): siRNA sense strand
ccaacaugcccacagauca

SEQ ID NO: 342704 - RNA, 19 nt, Homo sapiens
  misc_RNA (1)...(19): siRNA sense strand
uaugggcccuucaccaaca

SEQ ID NO: 342705 - RNA, 19 nt, Homo sapiens
  misc_RNA (1)...(19): siRNA sense strand
guccaaagcgagcaagaga

SEQ ID NO: 342706 - RNA, 19 nt, Homo sapiens
  misc_RNA (1)...(19): siRNA sense strand
cagaacaaagcacaucaga

SEQ ID NO: 342707 - RNA, 19 nt, Homo sapiens
  misc_RNA (1)...(19): siRNA sense strand
ccugcgaaauccagaacaa

SEQ ID NO: 342708 - RNA, 19 nt, Homo sapiens
  misc_RNA (1)...(19): siRNA sense strand
gaaaccaccaagguccaaa

SEQ ID NO: 342709 - RNA, 19 nt, Homo sapiens
  misc_RNA (1)...(19): siRNA sense strand
gauaaagcuccagcaggaa

SEQ ID NO: 342710 - RNA, 19 nt, Homo sapiens
  misc_RNA (1)...(19): siRNA sense strand
aaggagcuuucaucauuca

SEQ ID NO: 342711 - RNA, 19 nt, Homo sapiens
  misc_RNA (1)...(19): siRNA sense strand
ggugugagagugaaacaag

SEQ ID NO: 342712 - RNA, 19 nt, Homo sapiens
  misc_RNA (1)...(19): siRNA sense strand
gaaauggcugaacuagaag

SEQ ID NO: 342713 - RNA, 19 nt, Homo sapiens
  misc_RNA (1)...(19): siRNA sense strand
auaaagcuccagcaggaaa

SEQ ID NO: 342714 - RNA, 19 nt, Homo sapiens
  misc_RNA (1)...(19): siRNA sense strand
acccuuccaucauaaguga

SEQ ID NO: 342715 - RNA, 19 nt, Homo sapiens
  misc_RNA (1)...(19): siRNA sense strand
ggugacccagucuauuaaa

SEQ ID NO: 342716 - RNA, 19 nt, Homo sapiens
  misc_RNA (1)...(19): siRNA sense strand
cccagucuauuaaagaaag

SEQ ID NO: 342717 - RNA, 19 nt, Homo sapiens
  misc_RNA (1)...(19): siRNA sense strand
caucugggugugagaguga

SEQ ID NO: 342718 - RNA, 19 nt, Homo sapiens
  misc_RNA (1)...(19): siRNA sense strand
ccagucuauuaaagaaaga

SEQ ID NO: 342719 - RNA, 19 nt, Homo sapiens
  misc_RNA (1)...(19): siRNA sense strand
cgaaauccagaacaaagca

SEQ ID NO: 342720 - RNA, 19 nt, Homo sapiens
  misc_RNA (1)...(19): siRNA sense strand
aagagaaucccaggacaga

SEQ ID NO: 342721 - RNA, 19 nt, Homo sapiens
  misc_RNA (1)...(19): siRNA sense strand
gauguggucaauggaagaa

SEQ ID NO: 342722 - RNA, 19 nt, Homo sapiens
  misc_RNA (1)...(19): siRNA sense strand
ggaccugcgaaauccagaa

SEQ ID NO: 342723 - RNA, 19 nt, Homo sapiens
  misc_RNA (1)...(19): siRNA sense strand
gagcaugauuuugaaguca

SEQ ID NO: 342724 - RNA, 19 nt, Homo sapiens
  misc_RNA (1)...(19): siRNA sense strand
gugacccagucuauuaaag

SEQ ID NO: 342725 - RNA, 19 nt, Homo sapiens
  misc_RNA (1)...(19): siRNA sense strand
agaacaaagcacaucagaa

SEQ ID NO: 342726 - RNA, 19 nt, Homo sapiens
  misc_RNA (1)...(19): siRNA sense strand
uggaagaaaccaccaaggu

SEQ ID NO: 342727 - RNA, 19 nt, Homo sapiens
  misc_RNA (1)...(19): siRNA sense strand
ucaacuggaauggauggua

SEQ ID NO: 342728 - RNA, 19 nt, Homo sapiens
  misc_RNA (1)...(19): siRNA sense strand
ggaaauggcugaacuagaa

SEQ ID NO: 342729 - RNA, 19 nt, Homo sapiens
  misc_RNA (1)...(19): siRNA sense strand
gaacaaagcacaucagaaa

SEQ ID NO: 342730 - RNA, 19 nt, Homo sapiens
  misc_RNA (1)...(19): siRNA sense strand
cagcuacccuuccaucaua

SEQ ID NO: 342731 - RNA, 19 nt, Homo sapiens
  misc_RNA (1)...(19): siRNA sense strand
gggauaccaugcaacauaa

SEQ ID NO: 342732 - RNA, 19 nt, Homo sapiens
  misc_RNA (1)...(19): siRNA sense strand
gaggagauguggucaaugg

SEQ ID NO: 342733 - RNA, 19 nt, Homo sapiens
  misc_RNA (1)...(19): siRNA sense strand
gaaggagcuuucaucauuc

SEQ ID NO: 342734 - RNA, 19 nt, Homo sapiens
  misc_RNA (1)...(19): siRNA sense strand
cuagaaaucuguugcuaug

SEQ ID NO: 342735 - RNA, 19 nt, Homo sapiens
  misc_RNA (1)...(19): siRNA sense strand
gcucagggcuauccucuca

SEQ ID NO: 342736 - RNA, 19 nt, Homo sapiens
  misc_RNA (1)...(19): siRNA sense strand
aaacaagcgucucugaaga

SEQ ID NO: 342737 - RNA, 19 nt, Homo sapiens
  misc_RNA (1)...(19): siRNA sense strand
caacauaaccugauaaagc

SEQ ID NO: 342738 - RNA, 19 nt, Homo sapiens
  misc_RNA (1)...(19): siRNA sense strand
gaaacaagcgucucugaag

SEQ ID NO: 342739 - RNA, 19 nt, Homo sapiens
  misc_RNA (1)...(19): siRNA sense strand
gcagagggauaccaugcaa

SEQ ID NO: 342740 - RNA, 19 nt, Homo sapiens
  misc_RNA (1)...(19): siRNA sense strand
ugaacuagaagcuguguua

SEQ ID NO: 342741 - RNA, 19 nt, Homo sapiens
  misc_RNA (1)...(19): siRNA sense strand
gagaaucccaggacagaaa

SEQ ID NO: 342742 - RNA, 19 nt, Homo sapiens
  misc_RNA (1)...(19): siRNA sense strand
gcccacagaucaacuggaa

SEQ ID NO: 342743 - RNA, 19 nt, Homo sapiens
  misc_RNA (1)...(19): siRNA sense strand
gaagacugcucagggcuau

SEQ ID NO: 342744 - RNA, 19 nt, Homo sapiens
  misc_RNA (1)...(19): siRNA sense strand
gacccagucuauuaaagaa

SEQ ID NO: 342745 - RNA, 19 nt, Homo sapiens
  misc_RNA (1)...(19): siRNA sense strand
acuagaagcuguguuagaa

SEQ ID NO: 342746 - RNA, 19 nt, Homo sapiens
  misc_RNA (1)...(19): siRNA sense strand
caugcaacauaaccugaua

SEQ ID NO: 342747 - RNA, 19 nt, Homo sapiens
  misc_RNA (1)...(19): siRNA sense strand
gcuggacaccuaccugaua

SEQ ID NO: 342748 - RNA, 19 nt, Homo sapiens
  misc_RNA (1)...(19): siRNA sense strand
cagaucaacuggaauggau

SEQ ID NO: 342749 - RNA, 19 nt, Homo sapiens
  misc_RNA (1)...(19): siRNA sense strand
gcaggaaauggcugaacua

SEQ ID NO: 342750 - RNA, 19 nt, Homo sapiens
  misc_RNA (1)...(19): siRNA sense strand
ccacagaucaacuggaaug

SEQ ID NO: 342751 - RNA, 19 nt, Homo sapiens
  misc_RNA (1)...(19): siRNA sense strand
caacaugcccacagaucaa

SEQ ID NO: 342752 - RNA, 19 nt, Homo sapiens
  misc_RNA (1)...(19): siRNA sense strand
ucaccaacaugcccacaga

SEQ ID NO: 342753 - RNA, 19 nt, Homo sapiens
  misc_RNA (1)...(19): siRNA sense strand
cagaggagauguggucaau

SEQ ID NO: 342754 - RNA, 19 nt, Homo sapiens
  misc_RNA (1)...(19): siRNA sense strand
caauugggcagauguguga

SEQ ID NO: 342755 - RNA, 19 nt, Homo sapiens
  misc_RNA (1)...(19): siRNA sense strand
ggagauguggucaauggaa

SEQ ID NO: 342756 - RNA, 19 nt, Homo sapiens
  misc_RNA (1)...(19): siRNA sense strand
guacagcuguguggugcuu

SEQ ID NO: 342757 - RNA, 19 nt, Homo sapiens
  misc_RNA (1)...(19): siRNA sense strand
ccaaagcgagcaagagaau

SEQ ID NO: 342758 - RNA, 19 nt, Homo sapiens
  misc_RNA (1)...(19): siRNA sense strand
gcuaugggcccuucaccaa

SEQ ID NO: 342759 - RNA, 19 nt, Homo sapiens
  misc_RNA (1)...(19): siRNA sense strand
gaaugagcaugauuuugaa

SEQ ID NO: 342760 - RNA, 19 nt, Homo sapiens
  misc_RNA (1)...(19): siRNA sense strand
ucagggcuauccucucaga

SEQ ID NO: 342761 - RNA, 19 nt, Homo sapiens
  misc_RNA (1)...(19): siRNA sense strand
agggauaccaugcaacaua

SEQ ID NO: 342762 - RNA, 19 nt, Homo sapiens
  misc_RNA (1)...(19): siRNA sense strand
gcuagaaaucuguugcuau

SEQ ID NO: 342763 - RNA, 19 nt, Homo sapiens
  misc_RNA (1)...(19): siRNA sense strand
ugaaugagcaugauuuuga

SEQ ID NO: 342764 - RNA, 19 nt, Homo sapiens
  misc_RNA (1)...(19): siRNA sense strand
ggcuagaaaucuguugcua

SEQ ID NO: 342765 - RNA, 19 nt, Homo sapiens
  misc_RNA (1)...(19): siRNA sense strand
ugaaacaagcgucucugaa

SEQ ID NO: 342766 - RNA, 19 nt, Homo sapiens
  misc_RNA (1)...(19): siRNA sense strand
aacauaaccugauaaagcu

SEQ ID NO: 342767 - RNA, 19 nt, Homo sapiens
  misc_RNA (1)...(19): siRNA sense strand
ugacccagucuauuaaaga

SEQ ID NO: 342768 - RNA, 19 nt, Homo sapiens
  misc_RNA (1)...(19): siRNA sense strand
gaacuagaagcuguguuag

SEQ ID NO: 342769 - RNA, 19 nt, Homo sapiens
  misc_RNA (1)...(19): siRNA sense strand
gugaaacaagcgucucuga

SEQ ID NO: 342770 - RNA, 19 nt, Homo sapiens
  misc_RNA (1)...(19): siRNA sense strand
ccaacaugcccacagauca

SEQ ID NO: 342771 - RNA, 19 nt, Homo sapiens
  misc_RNA (1)...(19): siRNA sense strand
uaugggcccuucaccaaca

SEQ ID NO: 342772 - RNA, 19 nt, Homo sapiens
  misc_RNA (1)...(19): siRNA sense strand
guccaaagcgagcaagaga

SEQ ID NO: 342773 - RNA, 19 nt, Homo sapiens
  misc_RNA (1)...(19): siRNA sense strand
cagaacaaagcacaucaga

SEQ ID NO: 342774 - RNA, 19 nt, Homo sapiens
  misc_RNA (1)...(19): siRNA sense strand
ccugcgaaauccagaacaa

SEQ ID NO: 342775 - RNA, 19 nt, Homo sapiens
  misc_RNA (1)...(19): siRNA sense strand
gaaaccaccaagguccaaa

SEQ ID NO: 342776 - RNA, 19 nt, Homo sapiens
  misc_RNA (1)...(19): siRNA sense strand
gauaaagcuccagcaggaa

SEQ ID NO: 342777 - RNA, 19 nt, Homo sapiens
  misc_RNA (1)...(19): siRNA sense strand
aaggagcuuucaucauuca

SEQ ID NO: 342778 - RNA, 19 nt, Homo sapiens
  misc_RNA (1)...(19): siRNA sense strand
ggugugagagugaaacaag

SEQ ID NO: 342779 - RNA, 19 nt, Homo sapiens
  misc_RNA (1)...(19): siRNA sense strand
gaaauggcugaacuagaag

SEQ ID NO: 342780 - RNA, 19 nt, Homo sapiens
  misc_RNA (1)...(19): siRNA sense strand
auaaagcuccagcaggaaa

SEQ ID NO: 342781 - RNA, 19 nt, Homo sapiens
  misc_RNA (1)...(19): siRNA sense strand
acccuuccaucauaaguga

SEQ ID NO: 342782 - RNA, 19 nt, Homo sapiens
  misc_RNA (1)...(19): siRNA sense strand
ggugacccagucuauuaaa

SEQ ID NO: 342783 - RNA, 19 nt, Homo sapiens
  misc_RNA (1)...(19): siRNA sense strand
cccagucuauuaaagaaag

SEQ ID NO: 342784 - RNA, 19 nt, Homo sapiens
  misc_RNA (1)...(19): siRNA sense strand
caucugggugugagaguga

SEQ ID NO: 342785 - RNA, 19 nt, Homo sapiens
  misc_RNA (1)...(19): siRNA sense strand
ccagucuauuaaagaaaga

SEQ ID NO: 342786 - RNA, 19 nt, Homo sapiens
  misc_RNA (1)...(19): siRNA sense strand
cgaaauccagaacaaagca

SEQ ID NO: 342787 - RNA, 19 nt, Homo sapiens
  misc_RNA (1)...(19): siRNA sense strand
aagagaaucccaggacaga

SEQ ID NO: 342788 - RNA, 19 nt, Homo sapiens
  misc_RNA (1)...(19): siRNA sense strand
gauguggucaauggaagaa

SEQ ID NO: 342789 - RNA, 19 nt, Homo sapiens
  misc_RNA (1)...(19): siRNA sense strand
ggaccugcgaaauccagaa

SEQ ID NO: 342790 - RNA, 19 nt, Homo sapiens
  misc_RNA (1)...(19): siRNA sense strand
gagcaugauuuugaaguca

SEQ ID NO: 342791 - RNA, 19 nt, Homo sapiens
  misc_RNA (1)...(19): siRNA sense strand
gugacccagucuauuaaag

SEQ ID NO: 342792 - RNA, 19 nt, Homo sapiens
  misc_RNA (1)...(19): siRNA sense strand
agaacaaagcacaucagaa

SEQ ID NO: 342793 - RNA, 19 nt, Homo sapiens
  misc_RNA (1)...(19): siRNA sense strand
uggaagaaaccaccaaggu

SEQ ID NO: 342794 - RNA, 19 nt, Homo sapiens
  misc_RNA (1)...(19): siRNA sense strand
ucaacuggaauggauggua

SEQ ID NO: 342795 - RNA, 19 nt, Homo sapiens
  misc_RNA (1)...(19): siRNA sense strand
ggaaauggcugaacuagaa

SEQ ID NO: 342796 - RNA, 19 nt, Homo sapiens
  misc_RNA (1)...(19): siRNA sense strand
gaacaaagcacaucagaaa

SEQ ID NO: 342797 - RNA, 19 nt, Homo sapiens
  misc_RNA (1)...(19): siRNA sense strand
cagcuacccuuccaucaua

SEQ ID NO: 342798 - RNA, 19 nt, Homo sapiens
  misc_RNA (1)...(19): siRNA sense strand
gggauaccaugcaacauaa

SEQ ID NO: 342799 - RNA, 19 nt, Homo sapiens
  misc_RNA (1)...(19): siRNA sense strand
gaggagauguggucaaugg

SEQ ID NO: 342800 - RNA, 19 nt, Homo sapiens
  misc_RNA (1)...(19): siRNA sense strand
gaaggagcuuucaucauuc

SEQ ID NO: 342801 - RNA, 19 nt, Homo sapiens
  misc_RNA (1)...(19): siRNA sense strand
cuagaaaucuguugcuaug

SEQ ID NO: 342802 - RNA, 19 nt, Homo sapiens
  misc_RNA (1)...(19): siRNA sense strand
gcucagggcuauccucuca

SEQ ID NO: 342803 - RNA, 19 nt, Homo sapiens
  misc_RNA (1)...(19): siRNA sense strand
aaacaagcgucucugaaga

SEQ ID NO: 342804 - RNA, 19 nt, Homo sapiens
  misc_RNA (1)...(19): siRNA sense strand
caacauaaccugauaaagc

SEQ ID NO: 342805 - RNA, 19 nt, Homo sapiens
  misc_RNA (1)...(19): siRNA sense strand
gaaacaagcgucucugaag

SEQ ID NO: 342806 - RNA, 19 nt, Homo sapiens
  misc_RNA (1)...(19): siRNA sense strand
gcagagggauaccaugcaa

SEQ ID NO: 342807 - RNA, 19 nt, Homo sapiens
  misc_RNA (1)...(19): siRNA sense strand
ugaacuagaagcuguguua

SEQ ID NO: 342808 - RNA, 19 nt, Homo sapiens
  misc_RNA (1)...(19): siRNA sense strand
gagaaucccaggacagaaa

SEQ ID NO: 342809 - RNA, 19 nt, Homo sapiens
  misc_RNA (1)...(19): siRNA sense strand
gcccacagaucaacuggaa

SEQ ID NO: 342810 - RNA, 19 nt, Homo sapiens
  misc_RNA (1)...(19): siRNA sense strand
gaagacugcucagggcuau

SEQ ID NO: 342811 - RNA, 19 nt, Homo sapiens
  misc_RNA (1)...(19): siRNA sense strand
gacccagucuauuaaagaa

SEQ ID NO: 342812 - RNA, 19 nt, Homo sapiens
  misc_RNA (1)...(19): siRNA sense strand
acuagaagcuguguuagaa

SEQ ID NO: 342813 - RNA, 19 nt, Homo sapiens
  misc_RNA (1)...(19): siRNA sense strand
caugcaacauaaccugaua

SEQ ID NO: 342814 - RNA, 19 nt, Homo sapiens
  misc_RNA (1)...(19): siRNA sense strand
gcuggacaccuaccugaua

SEQ ID NO: 342815 - RNA, 19 nt, Homo sapiens
  misc_RNA (1)...(19): siRNA sense strand
cagaucaacuggaauggau

SEQ ID NO: 342816 - RNA, 19 nt, Homo sapiens
  misc_RNA (1)...(19): siRNA sense strand
gcaggaaauggcugaacua

SEQ ID NO: 342817 - RNA, 19 nt, Homo sapiens
  misc_RNA (1)...(19): siRNA sense strand
ccacagaucaacuggaaug

SEQ ID NO: 342818 - RNA, 19 nt, Homo sapiens
  misc_RNA (1)...(19): siRNA sense strand
caacaugcccacagaucaa

SEQ ID NO: 342819 - RNA, 19 nt, Homo sapiens
  misc_RNA (1)...(19): siRNA sense strand
ucaccaacaugcccacaga

SEQ ID NO: 342820 - RNA, 19 nt, Homo sapiens
  misc_RNA (1)...(19): siRNA sense strand
cagaggagauguggucaau

SEQ ID NO: 342821 - RNA, 19 nt, Homo sapiens
  misc_RNA (1)...(19): siRNA sense strand
caauugggcagauguguga

SEQ ID NO: 342822 - RNA, 19 nt, Homo sapiens
  misc_RNA (1)...(19): siRNA sense strand
ggagauguggucaauggaa

SEQ ID NO: 342823 - RNA, 19 nt, Homo sapiens
  misc_RNA (1)...(19): siRNA sense strand
guacagcuguguggugcuu

SEQ ID NO: 342824 - RNA, 19 nt, Homo sapiens
  misc_RNA (1)...(19): siRNA sense strand
ccaaagcgagcaagagaau

SEQ ID NO: 342825 - RNA, 19 nt, Homo sapiens
  misc_RNA (1)...(19): siRNA sense strand
gcuaugggcccuucaccaa

SEQ ID NO: 342826 - RNA, 19 nt, Homo sapiens
  misc_RNA (1)...(19): siRNA sense strand
gaaugagcaugauuuugaa

SEQ ID NO: 342827 - RNA, 19 nt, Homo sapiens
  misc_RNA (1)...(19): siRNA sense strand
ucagggcuauccucucaga

SEQ ID NO: 342828 - RNA, 19 nt, Homo sapiens
  misc_RNA (1)...(19): siRNA sense strand
agggauaccaugcaacaua

SEQ ID NO: 342829 - RNA, 19 nt, Homo sapiens
  misc_RNA (1)...(19): siRNA sense strand
gcuagaaaucuguugcuau

SEQ ID NO: 342830 - RNA, 19 nt, Homo sapiens
  misc_RNA (1)...(19): siRNA sense strand
ugaaugagcaugauuuuga

SEQ ID NO: 342831 - RNA, 19 nt, Homo sapiens
  misc_RNA (1)...(19): siRNA sense strand
ggcuagaaaucuguugcua

SEQ ID NO: 342832 - RNA, 19 nt, Homo sapiens
  misc_RNA (1)...(19): siRNA sense strand
ugaaacaagcgucucugaa

SEQ ID NO: 342833 - RNA, 19 nt, Homo sapiens
  misc_RNA (1)...(19): siRNA sense strand
aacauaaccugauaaagcu

SEQ ID NO: 342834 - RNA, 19 nt, Homo sapiens
  misc_RNA (1)...(19): siRNA sense strand
ugacccagucuauuaaaga

SEQ ID NO: 342835 - RNA, 19 nt, Homo sapiens
  misc_RNA (1)...(19): siRNA sense strand
gaacuagaagcuguguuag

SEQ ID NO: 342836 - RNA, 19 nt, Homo sapiens
  misc_RNA (1)...(19): siRNA sense strand
gugaaacaagcgucucuga

SEQ ID NO: 342837 - RNA, 19 nt, Homo sapiens
  misc_RNA (1)...(19): siRNA sense strand
ccaacaugcccacagauca

SEQ ID NO: 342838 - RNA, 19 nt, Homo sapiens
  misc_RNA (1)...(19): siRNA sense strand
uaugggcccuucaccaaca

SEQ ID NO: 342839 - RNA, 19 nt, Homo sapiens
  misc_RNA (1)...(19): siRNA sense strand
guccaaagcgagcaagaga

SEQ ID NO: 342840 - RNA, 19 nt, Homo sapiens
  misc_RNA (1)...(19): siRNA sense strand
cagaacaaagcacaucaga

SEQ ID NO: 342841 - RNA, 19 nt, Homo sapiens
  misc_RNA (1)...(19): siRNA sense strand
ccugcgaaauccagaacaa

SEQ ID NO: 342842 - RNA, 19 nt, Homo sapiens
  misc_RNA (1)...(19): siRNA sense strand
gaaaccaccaagguccaaa

SEQ ID NO: 342843 - RNA, 19 nt, Homo sapiens
  misc_RNA (1)...(19): siRNA sense strand
gauaaagcuccagcaggaa

SEQ ID NO: 342844 - RNA, 19 nt, Homo sapiens
  misc_RNA (1)...(19): siRNA sense strand
aaggagcuuucaucauuca

SEQ ID NO: 342845 - RNA, 19 nt, Homo sapiens
  misc_RNA (1)...(19): siRNA sense strand
ggugugagagugaaacaag

SEQ ID NO: 342846 - RNA, 19 nt, Homo sapiens
  misc_RNA (1)...(19): siRNA sense strand
gaaauggcugaacuagaag

SEQ ID NO: 342847 - RNA, 19 nt, Homo sapiens
  misc_RNA (1)...(19): siRNA sense strand
auaaagcuccagcaggaaa

SEQ ID NO: 342848 - RNA, 19 nt, Homo sapiens
  misc_RNA (1)...(19): siRNA sense strand
acccuuccaucauaaguga

SEQ ID NO: 342849 - RNA, 19 nt, Homo sapiens
  misc_RNA (1)...(19): siRNA sense strand
ggugacccagucuauuaaa

SEQ ID NO: 342850 - RNA, 19 nt, Homo sapiens
  misc_RNA (1)...(19): siRNA sense strand
cccagucuauuaaagaaag

SEQ ID NO: 342851 - RNA, 19 nt, Homo sapiens
  misc_RNA (1)...(19): siRNA sense strand
caucugggugugagaguga

SEQ ID NO: 342852 - RNA, 19 nt, Homo sapiens
  misc_RNA (1)...(19): siRNA sense strand
ccagucuauuaaagaaaga

SEQ ID NO: 342853 - RNA, 19 nt, Homo sapiens
  misc_RNA (1)...(19): siRNA sense strand
cgaaauccagaacaaagca

SEQ ID NO: 342854 - RNA, 19 nt, Homo sapiens
  misc_RNA (1)...(19): siRNA sense strand
aagagaaucccaggacaga

SEQ ID NO: 342855 - RNA, 19 nt, Homo sapiens
  misc_RNA (1)...(19): siRNA sense strand
gauguggucaauggaagaa

SEQ ID NO: 342856 - RNA, 19 nt, Homo sapiens
  misc_RNA (1)...(19): siRNA sense strand
ggaccugcgaaauccagaa

SEQ ID NO: 342857 - RNA, 19 nt, Homo sapiens
  misc_RNA (1)...(19): siRNA sense strand
gagcaugauuuugaaguca

SEQ ID NO: 342858 - RNA, 19 nt, Homo sapiens
  misc_RNA (1)...(19): siRNA sense strand
gugacccagucuauuaaag

SEQ ID NO: 342859 - RNA, 19 nt, Homo sapiens
  misc_RNA (1)...(19): siRNA sense strand
agaacaaagcacaucagaa

SEQ ID NO: 342860 - RNA, 19 nt, Homo sapiens
  misc_RNA (1)...(19): siRNA sense strand
uggaagaaaccaccaaggu

SEQ ID NO: 342861 - RNA, 19 nt, Homo sapiens
  misc_RNA (1)...(19): siRNA sense strand
ucaacuggaauggauggua

SEQ ID NO: 342862 - RNA, 19 nt, Homo sapiens
  misc_RNA (1)...(19): siRNA sense strand
ggaaauggcugaacuagaa

SEQ ID NO: 342863 - RNA, 19 nt, Homo sapiens
  misc_RNA (1)...(19): siRNA sense strand
gaacaaagcacaucagaaa

SEQ ID NO: 342864 - RNA, 19 nt, Homo sapiens
  misc_RNA (1)...(19): siRNA sense strand
cagcuacccuuccaucaua

SEQ ID NO: 342865 - RNA, 19 nt, Homo sapiens
  misc_RNA (1)...(19): siRNA sense strand
gggauaccaugcaacauaa

SEQ ID NO: 342866 - RNA, 19 nt, Homo sapiens
  misc_RNA (1)...(19): siRNA sense strand
gaggagauguggucaaugg

SEQ ID NO: 342867 - RNA, 19 nt, Homo sapiens
  misc_RNA (1)...(19): siRNA sense strand
gaaggagcuuucaucauuc

SEQ ID NO: 342868 - RNA, 19 nt, Homo sapiens
  misc_RNA (1)...(19): siRNA sense strand
cuagaaaucuguugcuaug

SEQ ID NO: 342869 - RNA, 19 nt, Homo sapiens
  misc_RNA (1)...(19): siRNA sense strand
gcucagggcuauccucuca

SEQ ID NO: 342870 - RNA, 19 nt, Homo sapiens
  misc_RNA (1)...(19): siRNA sense strand
aaacaagcgucucugaaga

SEQ ID NO: 342871 - RNA, 19 nt, Homo sapiens
  misc_RNA (1)...(19): siRNA sense strand
caacauaaccugauaaagc

SEQ ID NO: 342872 - RNA, 19 nt, Homo sapiens
  misc_RNA (1)...(19): siRNA sense strand
gaaacaagcgucucugaag

SEQ ID NO: 342873 - RNA, 19 nt, Homo sapiens
  misc_RNA (1)...(19): siRNA sense strand
gcagagggauaccaugcaa

SEQ ID NO: 342874 - RNA, 19 nt, Homo sapiens
  misc_RNA (1)...(19): siRNA sense strand
ugaacuagaagcuguguua

SEQ ID NO: 342875 - RNA, 19 nt, Homo sapiens
  misc_RNA (1)...(19): siRNA sense strand
gagaaucccaggacagaaa

SEQ ID NO: 342876 - RNA, 19 nt, Homo sapiens
  misc_RNA (1)...(19): siRNA sense strand
gcccacagaucaacuggaa

SEQ ID NO: 342877 - RNA, 19 nt, Homo sapiens
  misc_RNA (1)...(19): siRNA sense strand
gaagacugcucagggcuau

SEQ ID NO: 342878 - RNA, 19 nt, Homo sapiens
  misc_RNA (1)...(19): siRNA sense strand
gacccagucuauuaaagaa

SEQ ID NO: 342879 - RNA, 19 nt, Homo sapiens
  misc_RNA (1)...(19): siRNA sense strand
acuagaagcuguguuagaa

SEQ ID NO: 342880 - RNA, 19 nt, Homo sapiens
  misc_RNA (1)...(19): siRNA sense strand
caugcaacauaaccugaua

SEQ ID NO: 342881 - RNA, 19 nt, Homo sapiens
  misc_RNA (1)...(19): siRNA sense strand
gcuggacaccuaccugaua

SEQ ID NO: 342882 - RNA, 19 nt, Homo sapiens
  misc_RNA (1)...(19): siRNA sense strand
cagaucaacuggaauggau

SEQ ID NO: 342883 - RNA, 19 nt, Homo sapiens
  misc_RNA (1)...(19): siRNA sense strand
gcaggaaauggcugaacua

SEQ ID NO: 342884 - RNA, 19 nt, Homo sapiens
  misc_RNA (1)...(19): siRNA sense strand
ccacagaucaacuggaaug

SEQ ID NO: 342885 - RNA, 19 nt, Homo sapiens
  misc_RNA (1)...(19): siRNA sense strand
caacaugcccacagaucaa

SEQ ID NO: 342886 - RNA, 19 nt, Homo sapiens
  misc_RNA (1)...(19): siRNA sense strand
ucaccaacaugcccacaga

SEQ ID NO: 342887 - RNA, 19 nt, Homo sapiens
  misc_RNA (1)...(19): siRNA sense strand
cagaggagauguggucaau

SEQ ID NO: 342888 - RNA, 19 nt, Homo sapiens
  misc_RNA (1)...(19): siRNA sense strand
caauugggcagauguguga

SEQ ID NO: 342889 - RNA, 19 nt, Homo sapiens
  misc_RNA (1)...(19): siRNA sense strand
ggagauguggucaauggaa

SEQ ID NO: 342890 - RNA, 19 nt, Homo sapiens
  misc_RNA (1)...(19): siRNA sense strand
guacagcuguguggugcuu

SEQ ID NO: 342891 - RNA, 19 nt, Homo sapiens
  misc_RNA (1)...(19): siRNA sense strand
ccaaagcgagcaagagaau

SEQ ID NO: 342892 - RNA, 19 nt, Homo sapiens
  misc_RNA (1)...(19): siRNA sense strand
gcuaugggcccuucaccaa

SEQ ID NO: 342893 - RNA, 19 nt, Homo sapiens
  misc_RNA (1)...(19): siRNA sense strand
gaaugagcaugauuuugaa

SEQ ID NO: 342894 - RNA, 19 nt, Homo sapiens
  misc_RNA (1)...(19): siRNA sense strand
ucagggcuauccucucaga

SEQ ID NO: 342895 - RNA, 19 nt, Homo sapiens
  misc_RNA (1)...(19): siRNA sense strand
agggauaccaugcaacaua

SEQ ID NO: 342896 - RNA, 19 nt, Homo sapiens
  misc_RNA (1)...(19): siRNA sense strand
gcuagaaaucuguugcuau

SEQ ID NO: 342897 - RNA, 19 nt, Homo sapiens
  misc_RNA (1)...(19): siRNA sense strand
ugaaugagcaugauuuuga

SEQ ID NO: 342898 - RNA, 19 nt, Homo sapiens
  misc_RNA (1)...(19): siRNA sense strand
ggcuagaaaucuguugcua

SEQ ID NO: 342899 - RNA, 19 nt, Homo sapiens
  misc_RNA (1)...(19): siRNA sense strand
ugaaacaagcgucucugaa

SEQ ID NO: 342900 - RNA, 19 nt, Homo sapiens
  misc_RNA (1)...(19): siRNA sense strand
aacauaaccugauaaagcu

SEQ ID NO: 342901 - RNA, 19 nt, Homo sapiens
  misc_RNA (1)...(19): siRNA sense strand
ugacccagucuauuaaaga

SEQ ID NO: 342902 - RNA, 19 nt, Homo sapiens
  misc_RNA (1)...(19): siRNA sense strand
gaacuagaagcuguguuag

SEQ ID NO: 342903 - RNA, 19 nt, Homo sapiens
  misc_RNA (1)...(19): siRNA sense strand
gugaaacaagcgucucuga

SEQ ID NO: 342904 - RNA, 19 nt, Homo sapiens
  misc_RNA (1)...(19): siRNA sense strand
ccaacaugcccacagauca

SEQ ID NO: 342905 - RNA, 19 nt, Homo sapiens
  misc_RNA (1)...(19): siRNA sense strand
uaugggcccuucaccaaca

SEQ ID NO: 342906 - RNA, 19 nt, Homo sapiens
  misc_RNA (1)...(19): siRNA sense strand
guccaaagcgagcaagaga

SEQ ID NO: 342907 - RNA, 19 nt, Homo sapiens
  misc_RNA (1)...(19): siRNA sense strand
cagaacaaagcacaucaga

SEQ ID NO: 342908 - RNA, 19 nt, Homo sapiens
  misc_RNA (1)...(19): siRNA sense strand
ccugcgaaauccagaacaa

SEQ ID NO: 342909 - RNA, 19 nt, Homo sapiens
  misc_RNA (1)...(19): siRNA sense strand
gaaaccaccaagguccaaa

SEQ ID NO: 342910 - RNA, 19 nt, Homo sapiens
  misc_RNA (1)...(19): siRNA sense strand
gauaaagcuccagcaggaa

SEQ ID NO: 342911 - RNA, 19 nt, Homo sapiens
  misc_RNA (1)...(19): siRNA sense strand
aaggagcuuucaucauuca

SEQ ID NO: 342912 - RNA, 19 nt, Homo sapiens
  misc_RNA (1)...(19): siRNA sense strand
ggugugagagugaaacaag

SEQ ID NO: 342913 - RNA, 19 nt, Homo sapiens
  misc_RNA (1)...(19): siRNA sense strand
gaaauggcugaacuagaag

SEQ ID NO: 342914 - RNA, 19 nt, Homo sapiens
  misc_RNA (1)...(19): siRNA sense strand
auaaagcuccagcaggaaa

SEQ ID NO: 342915 - RNA, 19 nt, Homo sapiens
  misc_RNA (1)...(19): siRNA sense strand
acccuuccaucauaaguga

SEQ ID NO: 342916 - RNA, 19 nt, Homo sapiens
  misc_RNA (1)...(19): siRNA sense strand
ggugacccagucuauuaaa

SEQ ID NO: 342917 - RNA, 19 nt, Homo sapiens
  misc_RNA (1)...(19): siRNA sense strand
cccagucuauuaaagaaag

SEQ ID NO: 342918 - RNA, 19 nt, Homo sapiens
  misc_RNA (1)...(19): siRNA sense strand
caucugggugugagaguga

SEQ ID NO: 342919 - RNA, 19 nt, Homo sapiens
  misc_RNA (1)...(19): siRNA sense strand
ccagucuauuaaagaaaga

SEQ ID NO: 342920 - RNA, 19 nt, Homo sapiens
  misc_RNA (1)...(19): siRNA sense strand
cgaaauccagaacaaagca

SEQ ID NO: 342921 - RNA, 19 nt, Homo sapiens
  misc_RNA (1)...(19): siRNA sense strand
aagagaaucccaggacaga

SEQ ID NO: 342922 - RNA, 19 nt, Homo sapiens
  misc_RNA (1)...(19): siRNA sense strand
gauguggucaauggaagaa

SEQ ID NO: 342923 - RNA, 19 nt, Homo sapiens
  misc_RNA (1)...(19): siRNA sense strand
ggaccugcgaaauccagaa

SEQ ID NO: 342924 - RNA, 19 nt, Homo sapiens
  misc_RNA (1)...(19): siRNA sense strand
gagcaugauuuugaaguca

SEQ ID NO: 342925 - RNA, 19 nt, Homo sapiens
  misc_RNA (1)...(19): siRNA sense strand
gugacccagucuauuaaag

SEQ ID NO: 342926 - RNA, 19 nt, Homo sapiens
  misc_RNA (1)...(19): siRNA sense strand
agaacaaagcacaucagaa

SEQ ID NO: 342927 - RNA, 19 nt, Homo sapiens
  misc_RNA (1)...(19): siRNA sense strand
uggaagaaaccaccaaggu

SEQ ID NO: 342928 - RNA, 19 nt, Homo sapiens
  misc_RNA (1)...(19): siRNA sense strand
ucaacuggaauggauggua

SEQ ID NO: 342929 - RNA, 19 nt, Homo sapiens
  misc_RNA (1)...(19): siRNA sense strand
ggaaauggcugaacuagaa

SEQ ID NO: 342930 - RNA, 19 nt, Homo sapiens
  misc_RNA (1)...(19): siRNA sense strand
gaacaaagcacaucagaaa

SEQ ID NO: 342931 - RNA, 19 nt, Homo sapiens
  misc_RNA (1)...(19): siRNA sense strand
cagcuacccuuccaucaua

SEQ ID NO: 342932 - RNA, 19 nt, Homo sapiens
  misc_RNA (1)...(19): siRNA sense strand
gggauaccaugcaacauaa

SEQ ID NO: 342933 - RNA, 19 nt, Homo sapiens
  misc_RNA (1)...(19): siRNA sense strand
gcucagggcuauccucuca

SEQ ID NO: 342934 - RNA, 19 nt, Homo sapiens
  misc_RNA (1)...(19): siRNA sense strand
aaacaagcgucucugaaga

SEQ ID NO: 342935 - RNA, 19 nt, Homo sapiens
  misc_RNA (1)...(19): siRNA sense strand
caacauaaccugauaaagc

SEQ ID NO: 342936 - RNA, 19 nt, Homo sapiens
  misc_RNA (1)...(19): siRNA sense strand
gaaacaagcgucucugaag

SEQ ID NO: 342937 - RNA, 19 nt, Homo sapiens
  misc_RNA (1)...(19): siRNA sense strand
gcagagggauaccaugcaa

SEQ ID NO: 342938 - RNA, 19 nt, Homo sapiens
  misc_RNA (1)...(19): siRNA sense strand
ugaacuagaagcuguguua

SEQ ID NO: 342939 - RNA, 19 nt, Homo sapiens
  misc_RNA (1)...(19): siRNA sense strand
gaagacugcucagggcuau

SEQ ID NO: 342940 - RNA, 19 nt, Homo sapiens
  misc_RNA (1)...(19): siRNA sense strand
acuagaagcuguguuagaa

SEQ ID NO: 342941 - RNA, 19 nt, Homo sapiens
  misc_RNA (1)...(19): siRNA sense strand
caugcaacauaaccugaua

SEQ ID NO: 342942 - RNA, 19 nt, Homo sapiens
  misc_RNA (1)...(19): siRNA sense strand
gcaggaaauggcugaacua

SEQ ID NO: 342943 - RNA, 19 nt, Homo sapiens
  misc_RNA (1)...(19): siRNA sense strand
ucagggcuauccucucaga

SEQ ID NO: 342944 - RNA, 19 nt, Homo sapiens
  misc_RNA (1)...(19): siRNA sense strand
agggauaccaugcaacaua

SEQ ID NO: 342945 - RNA, 19 nt, Homo sapiens
  misc_RNA (1)...(19): siRNA sense strand
ugaaacaagcgucucugaa

SEQ ID NO: 342946 - RNA, 19 nt, Homo sapiens
  misc_RNA (1)...(19): siRNA sense strand
aacauaaccugauaaagcu

SEQ ID NO: 342947 - RNA, 19 nt, Homo sapiens
  misc_RNA (1)...(19): siRNA sense strand
gaacuagaagcuguguuag

SEQ ID NO: 342948 - RNA, 19 nt, Homo sapiens
  misc_RNA (1)...(19): siRNA sense strand
cagaacaaagcacaucaga

SEQ ID NO: 342949 - RNA, 19 nt, Homo sapiens
  misc_RNA (1)...(19): siRNA sense strand
gugaaacaagcgucucuga

SEQ ID NO: 342950 - RNA, 19 nt, Homo sapiens
  misc_RNA (1)...(19): siRNA sense strand
ccugcgaaauccagaacaa

SEQ ID NO: 342951 - RNA, 19 nt, Homo sapiens
  misc_RNA (1)...(19): siRNA sense strand
gauaaagcuccagcaggaa

SEQ ID NO: 342952 - RNA, 19 nt, Homo sapiens
  misc_RNA (1)...(19): siRNA sense strand
ggugugagagugaaacaag

SEQ ID NO: 342953 - RNA, 19 nt, Homo sapiens
  misc_RNA (1)...(19): siRNA sense strand
auaaagcuccagcaggaaa

SEQ ID NO: 342954 - RNA, 19 nt, Homo sapiens
  misc_RNA (1)...(19): siRNA sense strand
acccuuccaucauaaguga

SEQ ID NO: 342955 - RNA, 19 nt, Homo sapiens
  misc_RNA (1)...(19): siRNA sense strand
gaaauggcugaacuagaag

SEQ ID NO: 342956 - RNA, 19 nt, Homo sapiens
  misc_RNA (1)...(19): siRNA sense strand
caucugggugugagaguga

SEQ ID NO: 342957 - RNA, 19 nt, Homo sapiens
  misc_RNA (1)...(19): siRNA sense strand
cgaaauccagaacaaagca

SEQ ID NO: 342958 - RNA, 19 nt, Homo sapiens
  misc_RNA (1)...(19): siRNA sense strand
ggaccugcgaaauccagaa

SEQ ID NO: 342959 - RNA, 19 nt, Homo sapiens
  misc_RNA (1)...(19): siRNA sense strand
agaacaaagcacaucagaa

SEQ ID NO: 342960 - RNA, 19 nt, Homo sapiens
  misc_RNA (1)...(19): siRNA sense strand
ggaaauggcugaacuagaa

SEQ ID NO: 342961 - RNA, 19 nt, Homo sapiens
  misc_RNA (1)...(19): siRNA sense strand
gaacaaagcacaucagaaa

SEQ ID NO: 342962 - RNA, 19 nt, Homo sapiens
  misc_RNA (1)...(19): siRNA sense strand
cagcuacccuuccaucaua

SEQ ID NO: 342963 - RNA, 19 nt, Homo sapiens
  misc_RNA (1)...(19): siRNA sense strand
gggauaccaugcaacauaa

SEQ ID NO: 342964 - RNA, 19 nt, Homo sapiens
  misc_RNA (1)...(19): siRNA sense strand
gaggagauguggucaaugg

SEQ ID NO: 342965 - RNA, 19 nt, Homo sapiens
  misc_RNA (1)...(19): siRNA sense strand
gaaggagcuuucaucauuc

SEQ ID NO: 342966 - RNA, 19 nt, Homo sapiens
  misc_RNA (1)...(19): siRNA sense strand
cuagaaaucuguugcuaug

SEQ ID NO: 342967 - RNA, 19 nt, Homo sapiens
  misc_RNA (1)...(19): siRNA sense strand
gcucagggcuauccucuca

SEQ ID NO: 342968 - RNA, 19 nt, Homo sapiens
  misc_RNA (1)...(19): siRNA sense strand
aaacaagcgucucugaaga

SEQ ID NO: 342969 - RNA, 19 nt, Homo sapiens
  misc_RNA (1)...(19): siRNA sense strand
caacauaaccugauaaagc

SEQ ID NO: 342970 - RNA, 19 nt, Homo sapiens
  misc_RNA (1)...(19): siRNA sense strand
gaaacaagcgucucugaag

SEQ ID NO: 342971 - RNA, 19 nt, Homo sapiens
  misc_RNA (1)...(19): siRNA sense strand
gcagagggauaccaugcaa

SEQ ID NO: 342972 - RNA, 19 nt, Homo sapiens
  misc_RNA (1)...(19): siRNA sense strand
ugaacuagaagcuguguua

SEQ ID NO: 342973 - RNA, 19 nt, Homo sapiens
  misc_RNA (1)...(19): siRNA sense strand
gagaaucccaggacagaaa

SEQ ID NO: 342974 - RNA, 19 nt, Homo sapiens
  misc_RNA (1)...(19): siRNA sense strand
gcccacagaucaacuggaa

SEQ ID NO: 342975 - RNA, 19 nt, Homo sapiens
  misc_RNA (1)...(19): siRNA sense strand
gaagacugcucagggcuau

SEQ ID NO: 342976 - RNA, 19 nt, Homo sapiens
  misc_RNA (1)...(19): siRNA sense strand
gacccagucuauuaaagaa

SEQ ID NO: 342977 - RNA, 19 nt, Homo sapiens
  misc_RNA (1)...(19): siRNA sense strand
acuagaagcuguguuagaa

SEQ ID NO: 342978 - RNA, 19 nt, Homo sapiens
  misc_RNA (1)...(19): siRNA sense strand
caugcaacauaaccugaua

SEQ ID NO: 342979 - RNA, 19 nt, Homo sapiens
  misc_RNA (1)...(19): siRNA sense strand
gcuggacaccuaccugaua

SEQ ID NO: 342980 - RNA, 19 nt, Homo sapiens
  misc_RNA (1)...(19): siRNA sense strand
cagaucaacuggaauggau

SEQ ID NO: 342981 - RNA, 19 nt, Homo sapiens
  misc_RNA (1)...(19): siRNA sense strand
gcaggaaauggcugaacua

SEQ ID NO: 342982 - RNA, 19 nt, Homo sapiens
  misc_RNA (1)...(19): siRNA sense strand
ccacagaucaacuggaaug

SEQ ID NO: 342983 - RNA, 19 nt, Homo sapiens
  misc_RNA (1)...(19): siRNA sense strand
caacaugcccacagaucaa

SEQ ID NO: 342984 - RNA, 19 nt, Homo sapiens
  misc_RNA (1)...(19): siRNA sense strand
ucaccaacaugcccacaga

SEQ ID NO: 342985 - RNA, 19 nt, Homo sapiens
  misc_RNA (1)...(19): siRNA sense strand
cagaggagauguggucaau

SEQ ID NO: 342986 - RNA, 19 nt, Homo sapiens
  misc_RNA (1)...(19): siRNA sense strand
caauugggcagauguguga

SEQ ID NO: 342987 - RNA, 19 nt, Homo sapiens
  misc_RNA (1)...(19): siRNA sense strand
ggagauguggucaauggaa

SEQ ID NO: 342988 - RNA, 19 nt, Homo sapiens
  misc_RNA (1)...(19): siRNA sense strand
guacagcuguguggugcuu

SEQ ID NO: 342989 - RNA, 19 nt, Homo sapiens
  misc_RNA (1)...(19): siRNA sense strand
ccaaagcgagcaagagaau

SEQ ID NO: 342990 - RNA, 19 nt, Homo sapiens
  misc_RNA (1)...(19): siRNA sense strand
gcuaugggcccuucaccaa

SEQ ID NO: 342991 - RNA, 19 nt, Homo sapiens
  misc_RNA (1)...(19): siRNA sense strand
gaaugagcaugauuuugaa

SEQ ID NO: 342992 - RNA, 19 nt, Homo sapiens
  misc_RNA (1)...(19): siRNA sense strand
ucagggcuauccucucaga

SEQ ID NO: 342993 - RNA, 19 nt, Homo sapiens
  misc_RNA (1)...(19): siRNA sense strand
agggauaccaugcaacaua

SEQ ID NO: 342994 - RNA, 19 nt, Homo sapiens
  misc_RNA (1)...(19): siRNA sense strand
gcuagaaaucuguugcuau

SEQ ID NO: 342995 - RNA, 19 nt, Homo sapiens
  misc_RNA (1)...(19): siRNA sense strand
ugaaugagcaugauuuuga

SEQ ID NO: 342996 - RNA, 19 nt, Homo sapiens
  misc_RNA (1)...(19): siRNA sense strand
ggcuagaaaucuguugcua

SEQ ID NO: 342997 - RNA, 19 nt, Homo sapiens
  misc_RNA (1)...(19): siRNA sense strand
ugaaacaagcgucucugaa

SEQ ID NO: 342998 - RNA, 19 nt, Homo sapiens
  misc_RNA (1)...(19): siRNA sense strand
aacauaaccugauaaagcu

SEQ ID NO: 342999 - RNA, 19 nt, Homo sapiens
  misc_RNA (1)...(19): siRNA sense strand
ugacccagucuauuaaaga

SEQ ID NO: 343000 - RNA, 19 nt, Homo sapiens
  misc_RNA (1)...(19): siRNA sense strand
gaacuagaagcuguguuag

SEQ ID NO: 343001 - RNA, 19 nt, Homo sapiens
  misc_RNA (1)...(19): siRNA sense strand
gugaaacaagcgucucuga

SEQ ID NO: 343002 - RNA, 19 nt, Homo sapiens
  misc_RNA (1)...(19): siRNA sense strand
ccaacaugcccacagauca

SEQ ID NO: 343003 - RNA, 19 nt, Homo sapiens
  misc_RNA (1)...(19): siRNA sense strand
uaugggcccuucaccaaca

SEQ ID NO: 343004 - RNA, 19 nt, Homo sapiens
  misc_RNA (1)...(19): siRNA sense strand
guccaaagcgagcaagaga

SEQ ID NO: 343005 - RNA, 19 nt, Homo sapiens
  misc_RNA (1)...(19): siRNA sense strand
cagaacaaagcacaucaga

SEQ ID NO: 343006 - RNA, 19 nt, Homo sapiens
  misc_RNA (1)...(19): siRNA sense strand
ccugcgaaauccagaacaa

SEQ ID NO: 343007 - RNA, 19 nt, Homo sapiens
  misc_RNA (1)...(19): siRNA sense strand
gaaaccaccaagguccaaa

SEQ ID NO: 343008 - RNA, 19 nt, Homo sapiens
  misc_RNA (1)...(19): siRNA sense strand
gauaaagcuccagcaggaa

SEQ ID NO: 343009 - RNA, 19 nt, Homo sapiens
  misc_RNA (1)...(19): siRNA sense strand
aaggagcuuucaucauuca

SEQ ID NO: 343010 - RNA, 19 nt, Homo sapiens
  misc_RNA (1)...(19): siRNA sense strand
ggugugagagugaaacaag

SEQ ID NO: 343011 - RNA, 19 nt, Homo sapiens
  misc_RNA (1)...(19): siRNA sense strand
gaaauggcugaacuagaag

SEQ ID NO: 343012 - RNA, 19 nt, Homo sapiens
  misc_RNA (1)...(19): siRNA sense strand
auaaagcuccagcaggaaa

SEQ ID NO: 343013 - RNA, 19 nt, Homo sapiens
  misc_RNA (1)...(19): siRNA sense strand
acccuuccaucauaaguga

SEQ ID NO: 343014 - RNA, 19 nt, Homo sapiens
  misc_RNA (1)...(19): siRNA sense strand
ggugacccagucuauuaaa

SEQ ID NO: 343015 - RNA, 19 nt, Homo sapiens
  misc_RNA (1)...(19): siRNA sense strand
cccagucuauuaaagaaag

SEQ ID NO: 343016 - RNA, 19 nt, Homo sapiens
  misc_RNA (1)...(19): siRNA sense strand
caucugggugugagaguga

SEQ ID NO: 343017 - RNA, 19 nt, Homo sapiens
  misc_RNA (1)...(19): siRNA sense strand
ccagucuauuaaagaaaga

SEQ ID NO: 343018 - RNA, 19 nt, Homo sapiens
  misc_RNA (1)...(19): siRNA sense strand
cgaaauccagaacaaagca

SEQ ID NO: 343019 - RNA, 19 nt, Homo sapiens
  misc_RNA (1)...(19): siRNA sense strand
aagagaaucccaggacaga

SEQ ID NO: 343020 - RNA, 19 nt, Homo sapiens
  misc_RNA (1)...(19): siRNA sense strand
gauguggucaauggaagaa

SEQ ID NO: 343021 - RNA, 19 nt, Homo sapiens
  misc_RNA (1)...(19): siRNA sense strand
ggaccugcgaaauccagaa

SEQ ID NO: 343022 - RNA, 19 nt, Homo sapiens
  misc_RNA (1)...(19): siRNA sense strand
gagcaugauuuugaaguca

SEQ ID NO: 343023 - RNA, 19 nt, Homo sapiens
  misc_RNA (1)...(19): siRNA sense strand
gugacccagucuauuaaag

SEQ ID NO: 343024 - RNA, 19 nt, Homo sapiens
  misc_RNA (1)...(19): siRNA sense strand
agaacaaagcacaucagaa

SEQ ID NO: 343025 - RNA, 19 nt, Homo sapiens
  misc_RNA (1)...(19): siRNA sense strand
uggaagaaaccaccaaggu

SEQ ID NO: 343026 - RNA, 19 nt, Homo sapiens
  misc_RNA (1)...(19): siRNA sense strand
ucaacuggaauggauggua

SEQ ID NO: 343027 - RNA, 19 nt, Homo sapiens
  misc_RNA (1)...(19): siRNA sense strand
ggaaauggcugaacuagaa

SEQ ID NO: 343028 - RNA, 19 nt, Homo sapiens
  misc_RNA (1)...(19): siRNA sense strand
gaacaaagcacaucagaaa

SEQ ID NO: 343029 - RNA, 19 nt, Homo sapiens
  misc_RNA (1)...(19): siRNA sense strand
cagcuacccuuccaucaua

SEQ ID NO: 343030 - RNA, 19 nt, Homo sapiens
  misc_RNA (1)...(19): siRNA sense strand
gggauaccaugcaacauaa

SEQ ID NO: 343031 - RNA, 19 nt, Homo sapiens
  misc_RNA (1)...(19): siRNA sense strand
gaggagauguggucaaugg

SEQ ID NO: 343032 - RNA, 19 nt, Homo sapiens
  misc_RNA (1)...(19): siRNA sense strand
gaaggagcuuucaucauuc

SEQ ID NO: 343033 - RNA, 19 nt, Homo sapiens
  misc_RNA (1)...(19): siRNA sense strand
cuagaaaucuguugcuaug

SEQ ID NO: 343034 - RNA, 19 nt, Homo sapiens
  misc_RNA (1)...(19): siRNA sense strand
gcucagggcuauccucuca

SEQ ID NO: 343035 - RNA, 19 nt, Homo sapiens
  misc_RNA (1)...(19): siRNA sense strand
aaacaagcgucucugaaga

SEQ ID NO: 343036 - RNA, 19 nt, Homo sapiens
  misc_RNA (1)...(19): siRNA sense strand
caacauaaccugauaaagc

SEQ ID NO: 343037 - RNA, 19 nt, Homo sapiens
  misc_RNA (1)...(19): siRNA sense strand
gaaacaagcgucucugaag

SEQ ID NO: 343038 - RNA, 19 nt, Homo sapiens
  misc_RNA (1)...(19): siRNA sense strand
gcagagggauaccaugcaa

SEQ ID NO: 343039 - RNA, 19 nt, Homo sapiens
  misc_RNA (1)...(19): siRNA sense strand
ugaacuagaagcuguguua

SEQ ID NO: 343040 - RNA, 19 nt, Homo sapiens
  misc_RNA (1)...(19): siRNA sense strand
gagaaucccaggacagaaa

SEQ ID NO: 343041 - RNA, 19 nt, Homo sapiens
  misc_RNA (1)...(19): siRNA sense strand
gcccacagaucaacuggaa

SEQ ID NO: 343042 - RNA, 19 nt, Homo sapiens
  misc_RNA (1)...(19): siRNA sense strand
gaagacugcucagggcuau

SEQ ID NO: 343043 - RNA, 19 nt, Homo sapiens
  misc_RNA (1)...(19): siRNA sense strand
gacccagucuauuaaagaa

SEQ ID NO: 343044 - RNA, 19 nt, Homo sapiens
  misc_RNA (1)...(19): siRNA sense strand
acuagaagcuguguuagaa

SEQ ID NO: 343045 - RNA, 19 nt, Homo sapiens
  misc_RNA (1)...(19): siRNA sense strand
caugcaacauaaccugaua

SEQ ID NO: 343046 - RNA, 19 nt, Homo sapiens
  misc_RNA (1)...(19): siRNA sense strand
gcuggacaccuaccugaua

SEQ ID NO: 343047 - RNA, 19 nt, Homo sapiens
  misc_RNA (1)...(19): siRNA sense strand
cagaucaacuggaauggau

SEQ ID NO: 343048 - RNA, 19 nt, Homo sapiens
  misc_RNA (1)...(19): siRNA sense strand
gcaggaaauggcugaacua

SEQ ID NO: 343049 - RNA, 19 nt, Homo sapiens
  misc_RNA (1)...(19): siRNA sense strand
ccacagaucaacuggaaug

SEQ ID NO: 343050 - RNA, 19 nt, Homo sapiens
  misc_RNA (1)...(19): siRNA sense strand
caacaugcccacagaucaa

SEQ ID NO: 343051 - RNA, 19 nt, Homo sapiens
  misc_RNA (1)...(19): siRNA sense strand
ucaccaacaugcccacaga

SEQ ID NO: 343052 - RNA, 19 nt, Homo sapiens
  misc_RNA (1)...(19): siRNA sense strand
cagaggagauguggucaau

SEQ ID NO: 343053 - RNA, 19 nt, Homo sapiens
  misc_RNA (1)...(19): siRNA sense strand
caauugggcagauguguga

SEQ ID NO: 343054 - RNA, 19 nt, Homo sapiens
  misc_RNA (1)...(19): siRNA sense strand
ggagauguggucaauggaa

SEQ ID NO: 343055 - RNA, 19 nt, Homo sapiens
  misc_RNA (1)...(19): siRNA sense strand
guacagcuguguggugcuu

SEQ ID NO: 343056 - RNA, 19 nt, Homo sapiens
  misc_RNA (1)...(19): siRNA sense strand
ccaaagcgagcaagagaau

SEQ ID NO: 343057 - RNA, 19 nt, Homo sapiens
  misc_RNA (1)...(19): siRNA sense strand
gcuaugggcccuucaccaa

SEQ ID NO: 343058 - RNA, 19 nt, Homo sapiens
  misc_RNA (1)...(19): siRNA sense strand
gaaugagcaugauuuugaa

SEQ ID NO: 343059 - RNA, 19 nt, Homo sapiens
  misc_RNA (1)...(19): siRNA sense strand
ucagggcuauccucucaga

SEQ ID NO: 343060 - RNA, 19 nt, Homo sapiens
  misc_RNA (1)...(19): siRNA sense strand
agggauaccaugcaacaua

SEQ ID NO: 343061 - RNA, 19 nt, Homo sapiens
  misc_RNA (1)...(19): siRNA sense strand
gcuagaaaucuguugcuau

SEQ ID NO: 343062 - RNA, 19 nt, Homo sapiens
  misc_RNA (1)...(19): siRNA sense strand
ugaaugagcaugauuuuga

SEQ ID NO: 343063 - RNA, 19 nt, Homo sapiens
  misc_RNA (1)...(19): siRNA sense strand
ggcuagaaaucuguugcua

SEQ ID NO: 343064 - RNA, 19 nt, Homo sapiens
  misc_RNA (1)...(19): siRNA sense strand
ugaaacaagcgucucugaa

SEQ ID NO: 343065 - RNA, 19 nt, Homo sapiens
  misc_RNA (1)...(19): siRNA sense strand
aacauaaccugauaaagcu

SEQ ID NO: 343066 - RNA, 19 nt, Homo sapiens
  misc_RNA (1)...(19): siRNA sense strand
ugacccagucuauuaaaga

SEQ ID NO: 343067 - RNA, 19 nt, Homo sapiens
  misc_RNA (1)...(19): siRNA sense strand
gaacuagaagcuguguuag

SEQ ID NO: 343068 - RNA, 19 nt, Homo sapiens
  misc_RNA (1)...(19): siRNA sense strand
gugaaacaagcgucucuga

SEQ ID NO: 343069 - RNA, 19 nt, Homo sapiens
  misc_RNA (1)...(19): siRNA sense strand
ccaacaugcccacagauca

SEQ ID NO: 343070 - RNA, 19 nt, Homo sapiens
  misc_RNA (1)...(19): siRNA sense strand
uaugggcccuucaccaaca

SEQ ID NO: 343071 - RNA, 19 nt, Homo sapiens
  misc_RNA (1)...(19): siRNA sense strand
guccaaagcgagcaagaga

SEQ ID NO: 343072 - RNA, 19 nt, Homo sapiens
  misc_RNA (1)...(19): siRNA sense strand
cagaacaaagcacaucaga

SEQ ID NO: 343073 - RNA, 19 nt, Homo sapiens
  misc_RNA (1)...(19): siRNA sense strand
ccugcgaaauccagaacaa

SEQ ID NO: 343074 - RNA, 19 nt, Homo sapiens
  misc_RNA (1)...(19): siRNA sense strand
gaaaccaccaagguccaaa

SEQ ID NO: 343075 - RNA, 19 nt, Homo sapiens
  misc_RNA (1)...(19): siRNA sense strand
gauaaagcuccagcaggaa

SEQ ID NO: 343076 - RNA, 19 nt, Homo sapiens
  misc_RNA (1)...(19): siRNA sense strand
aaggagcuuucaucauuca

SEQ ID NO: 343077 - RNA, 19 nt, Homo sapiens
  misc_RNA (1)...(19): siRNA sense strand
ggugugagagugaaacaag

SEQ ID NO: 343078 - RNA, 19 nt, Homo sapiens
  misc_RNA (1)...(19): siRNA sense strand
gaaauggcugaacuagaag

SEQ ID NO: 343079 - RNA, 19 nt, Homo sapiens
  misc_RNA (1)...(19): siRNA sense strand
auaaagcuccagcaggaaa

SEQ ID NO: 343080 - RNA, 19 nt, Homo sapiens
  misc_RNA (1)...(19): siRNA sense strand
acccuuccaucauaaguga

SEQ ID NO: 343081 - RNA, 19 nt, Homo sapiens
  misc_RNA (1)...(19): siRNA sense strand
ggugacccagucuauuaaa

SEQ ID NO: 343082 - RNA, 19 nt, Homo sapiens
  misc_RNA (1)...(19): siRNA sense strand
cccagucuauuaaagaaag

SEQ ID NO: 343083 - RNA, 19 nt, Homo sapiens
  misc_RNA (1)...(19): siRNA sense strand
caucugggugugagaguga

SEQ ID NO: 343084 - RNA, 19 nt, Homo sapiens
  misc_RNA (1)...(19): siRNA sense strand
ccagucuauuaaagaaaga

SEQ ID NO: 343085 - RNA, 19 nt, Homo sapiens
  misc_RNA (1)...(19): siRNA sense strand
cgaaauccagaacaaagca

SEQ ID NO: 343086 - RNA, 19 nt, Homo sapiens
  misc_RNA (1)...(19): siRNA sense strand
aagagaaucccaggacaga

SEQ ID NO: 343087 - RNA, 19 nt, Homo sapiens
  misc_RNA (1)...(19): siRNA sense strand
gauguggucaauggaagaa

SEQ ID NO: 343088 - RNA, 19 nt, Homo sapiens
  misc_RNA (1)...(19): siRNA sense strand
ggaccugcgaaauccagaa

SEQ ID NO: 343089 - RNA, 19 nt, Homo sapiens
  misc_RNA (1)...(19): siRNA sense strand
gagcaugauuuugaaguca

SEQ ID NO: 343090 - RNA, 19 nt, Homo sapiens
  misc_RNA (1)...(19): siRNA sense strand
gugacccagucuauuaaag

SEQ ID NO: 343091 - RNA, 19 nt, Homo sapiens
  misc_RNA (1)...(19): siRNA sense strand
agaacaaagcacaucagaa

SEQ ID NO: 343092 - RNA, 19 nt, Homo sapiens
  misc_RNA (1)...(19): siRNA sense strand
uggaagaaaccaccaaggu

SEQ ID NO: 343093 - RNA, 19 nt, Homo sapiens
  misc_RNA (1)...(19): siRNA sense strand
ucaacuggaauggauggua

SEQ ID NO: 343094 - RNA, 19 nt, Homo sapiens
  misc_RNA (1)...(19): siRNA sense strand
ggaaauggcugaacuagaa

SEQ ID NO: 343095 - RNA, 19 nt, Homo sapiens
  misc_RNA (1)...(19): siRNA sense strand
gaacaaagcacaucagaaa

SEQ ID NO: 343096 - RNA, 19 nt, Homo sapiens
  misc_RNA (1)...(19): siRNA sense strand
cagcuacccuuccaucaua

SEQ ID NO: 343097 - RNA, 19 nt, Homo sapiens
  misc_RNA (1)...(19): siRNA sense strand
gggauaccaugcaacauaa

SEQ ID NO: 343098 - RNA, 19 nt, Homo sapiens
  misc_RNA (1)...(19): siRNA sense strand
gaggagauguggucaaugg

SEQ ID NO: 343099 - RNA, 19 nt, Homo sapiens
  misc_RNA (1)...(19): siRNA sense strand
gaaggagcuuucaucauuc

SEQ ID NO: 343100 - RNA, 19 nt, Homo sapiens
  misc_RNA (1)...(19): siRNA sense strand
cuagaaaucuguugcuaug

SEQ ID NO: 343101 - RNA, 19 nt, Homo sapiens
  misc_RNA (1)...(19): siRNA sense strand
gcucagggcuauccucuca

SEQ ID NO: 343102 - RNA, 19 nt, Homo sapiens
  misc_RNA (1)...(19): siRNA sense strand
aaacaagcgucucugaaga

SEQ ID NO: 343103 - RNA, 19 nt, Homo sapiens
  misc_RNA (1)...(19): siRNA sense strand
caacauaaccugauaaagc

SEQ ID NO: 343104 - RNA, 19 nt, Homo sapiens
  misc_RNA (1)...(19): siRNA sense strand
gaaacaagcgucucugaag

SEQ ID NO: 343105 - RNA, 19 nt, Homo sapiens
  misc_RNA (1)...(19): siRNA sense strand
gcagagggauaccaugcaa

SEQ ID NO: 343106 - RNA, 19 nt, Homo sapiens
  misc_RNA (1)...(19): siRNA sense strand
ugaacuagaagcuguguua

SEQ ID NO: 343107 - RNA, 19 nt, Homo sapiens
  misc_RNA (1)...(19): siRNA sense strand
gagaaucccaggacagaaa

SEQ ID NO: 343108 - RNA, 19 nt, Homo sapiens
  misc_RNA (1)...(19): siRNA sense strand
gcccacagaucaacuggaa

SEQ ID NO: 343109 - RNA, 19 nt, Homo sapiens
  misc_RNA (1)...(19): siRNA sense strand
gaagacugcucagggcuau

SEQ ID NO: 343110 - RNA, 19 nt, Homo sapiens
  misc_RNA (1)...(19): siRNA sense strand
gacccagucuauuaaagaa

SEQ ID NO: 343111 - RNA, 19 nt, Homo sapiens
  misc_RNA (1)...(19): siRNA sense strand
acuagaagcuguguuagaa

SEQ ID NO: 343112 - RNA, 19 nt, Homo sapiens
  misc_RNA (1)...(19): siRNA sense strand
caugcaacauaaccugaua

SEQ ID NO: 343113 - RNA, 19 nt, Homo sapiens
  misc_RNA (1)...(19): siRNA sense strand
gcuggacaccuaccugaua

SEQ ID NO: 343114 - RNA, 19 nt, Homo sapiens
  misc_RNA (1)...(19): siRNA sense strand
cagaucaacuggaauggau

SEQ ID NO: 343115 - RNA, 19 nt, Homo sapiens
  misc_RNA (1)...(19): siRNA sense strand
gcaggaaauggcugaacua

SEQ ID NO: 343116 - RNA, 19 nt, Homo sapiens
  misc_RNA (1)...(19): siRNA sense strand
ccacagaucaacuggaaug

SEQ ID NO: 343117 - RNA, 19 nt, Homo sapiens
  misc_RNA (1)...(19): siRNA sense strand
caacaugcccacagaucaa

SEQ ID NO: 343118 - RNA, 19 nt, Homo sapiens
  misc_RNA (1)...(19): siRNA sense strand
ucaccaacaugcccacaga

SEQ ID NO: 343119 - RNA, 19 nt, Homo sapiens
  misc_RNA (1)...(19): siRNA sense strand
cagaggagauguggucaau

SEQ ID NO: 343120 - RNA, 19 nt, Homo sapiens
  misc_RNA (1)...(19): siRNA sense strand
caauugggcagauguguga

SEQ ID NO: 343121 - RNA, 19 nt, Homo sapiens
  misc_RNA (1)...(19): siRNA sense strand
ggagauguggucaauggaa

SEQ ID NO: 343122 - RNA, 19 nt, Homo sapiens
  misc_RNA (1)...(19): siRNA sense strand
guacagcuguguggugcuu

SEQ ID NO: 343123 - RNA, 19 nt, Homo sapiens
  misc_RNA (1)...(19): siRNA sense strand
ccaaagcgagcaagagaau

SEQ ID NO: 343124 - RNA, 19 nt, Homo sapiens
  misc_RNA (1)...(19): siRNA sense strand
gcuaugggcccuucaccaa

SEQ ID NO: 343125 - RNA, 19 nt, Homo sapiens
  misc_RNA (1)...(19): siRNA sense strand
gaaugagcaugauuuugaa

SEQ ID NO: 343126 - RNA, 19 nt, Homo sapiens
  misc_RNA (1)...(19): siRNA sense strand
ucagggcuauccucucaga

SEQ ID NO: 343127 - RNA, 19 nt, Homo sapiens
  misc_RNA (1)...(19): siRNA sense strand
agggauaccaugcaacaua

SEQ ID NO: 343128 - RNA, 19 nt, Homo sapiens
  misc_RNA (1)...(19): siRNA sense strand
gcuagaaaucuguugcuau

SEQ ID NO: 343129 - RNA, 19 nt, Homo sapiens
  misc_RNA (1)...(19): siRNA sense strand
ugaaugagcaugauuuuga

SEQ ID NO: 343130 - RNA, 19 nt, Homo sapiens
  misc_RNA (1)...(19): siRNA sense strand
ggcuagaaaucuguugcua

SEQ ID NO: 343131 - RNA, 19 nt, Homo sapiens
  misc_RNA (1)...(19): siRNA sense strand
ugaaacaagcgucucugaa

SEQ ID NO: 343132 - RNA, 19 nt, Homo sapiens
  misc_RNA (1)...(19): siRNA sense strand
aacauaaccugauaaagcu

SEQ ID NO: 343133 - RNA, 19 nt, Homo sapiens
  misc_RNA (1)...(19): siRNA sense strand
ugacccagucuauuaaaga

SEQ ID NO: 343134 - RNA, 19 nt, Homo sapiens
  misc_RNA (1)...(19): siRNA sense strand
gaacuagaagcuguguuag

SEQ ID NO: 343135 - RNA, 19 nt, Homo sapiens
  misc_RNA (1)...(19): siRNA sense strand
gugaaacaagcgucucuga

SEQ ID NO: 343136 - RNA, 19 nt, Homo sapiens
  misc_RNA (1)...(19): siRNA sense strand
ccaacaugcccacagauca

SEQ ID NO: 343137 - RNA, 19 nt, Homo sapiens
  misc_RNA (1)...(19): siRNA sense strand
uaugggcccuucaccaaca

SEQ ID NO: 343138 - RNA, 19 nt, Homo sapiens
  misc_RNA (1)...(19): siRNA sense strand
guccaaagcgagcaagaga

SEQ ID NO: 343139 - RNA, 19 nt, Homo sapiens
  misc_RNA (1)...(19): siRNA sense strand
cagaacaaagcacaucaga

SEQ ID NO: 343140 - RNA, 19 nt, Homo sapiens
  misc_RNA (1)...(19): siRNA sense strand
ccugcgaaauccagaacaa

SEQ ID NO: 343141 - RNA, 19 nt, Homo sapiens
  misc_RNA (1)...(19): siRNA sense strand
gaaaccaccaagguccaaa

SEQ ID NO: 343142 - RNA, 19 nt, Homo sapiens
  misc_RNA (1)...(19): siRNA sense strand
gauaaagcuccagcaggaa

SEQ ID NO: 343143 - RNA, 19 nt, Homo sapiens
  misc_RNA (1)...(19): siRNA sense strand
aaggagcuuucaucauuca

SEQ ID NO: 343144 - RNA, 19 nt, Homo sapiens
  misc_RNA (1)...(19): siRNA sense strand
ggugugagagugaaacaag

SEQ ID NO: 343145 - RNA, 19 nt, Homo sapiens
  misc_RNA (1)...(19): siRNA sense strand
gaaauggcugaacuagaag

SEQ ID NO: 343146 - RNA, 19 nt, Homo sapiens
  misc_RNA (1)...(19): siRNA sense strand
auaaagcuccagcaggaaa

SEQ ID NO: 343147 - RNA, 19 nt, Homo sapiens
  misc_RNA (1)...(19): siRNA sense strand
acccuuccaucauaaguga

SEQ ID NO: 343148 - RNA, 19 nt, Homo sapiens
  misc_RNA (1)...(19): siRNA sense strand
ggugacccagucuauuaaa

SEQ ID NO: 343149 - RNA, 19 nt, Homo sapiens
  misc_RNA (1)...(19): siRNA sense strand
cccagucuauuaaagaaag

SEQ ID NO: 343150 - RNA, 19 nt, Homo sapiens
  misc_RNA (1)...(19): siRNA sense strand
caucugggugugagaguga

SEQ ID NO: 343151 - RNA, 19 nt, Homo sapiens
  misc_RNA (1)...(19): siRNA sense strand
ccagucuauuaaagaaaga

SEQ ID NO: 343152 - RNA, 19 nt, Homo sapiens
  misc_RNA (1)...(19): siRNA sense strand
cgaaauccagaacaaagca

SEQ ID NO: 343153 - RNA, 19 nt, Homo sapiens
  misc_RNA (1)...(19): siRNA sense strand
aagagaaucccaggacaga

SEQ ID NO: 343154 - RNA, 19 nt, Homo sapiens
  misc_RNA (1)...(19): siRNA sense strand
gauguggucaauggaagaa

SEQ ID NO: 343155 - RNA, 19 nt, Homo sapiens
  misc_RNA (1)...(19): siRNA sense strand
ggaccugcgaaauccagaa

SEQ ID NO: 343156 - RNA, 19 nt, Homo sapiens
  misc_RNA (1)...(19): siRNA sense strand
gagcaugauuuugaaguca

SEQ ID NO: 343157 - RNA, 19 nt, Homo sapiens
  misc_RNA (1)...(19): siRNA sense strand
gugacccagucuauuaaag

SEQ ID NO: 343158 - RNA, 19 nt, Homo sapiens
  misc_RNA (1)...(19): siRNA sense strand
agaacaaagcacaucagaa

SEQ ID NO: 343159 - RNA, 19 nt, Homo sapiens
  misc_RNA (1)...(19): siRNA sense strand
uggaagaaaccaccaaggu

SEQ ID NO: 343160 - RNA, 19 nt, Homo sapiens
  misc_RNA (1)...(19): siRNA sense strand
ucaacuggaauggauggua

SEQ ID NO: 343161 - RNA, 19 nt, Homo sapiens
  misc_RNA (1)...(19): siRNA sense strand
ggaaauggcugaacuagaa

SEQ ID NO: 343162 - RNA, 19 nt, Homo sapiens
  misc_RNA (1)...(19): siRNA sense strand
gaacaaagcacaucagaaa

SEQ ID NO: 343163 - RNA, 19 nt, Homo sapiens
  misc_RNA (1)...(19): siRNA sense strand
cagcuacccuuccaucaua

SEQ ID NO: 343164 - RNA, 19 nt, Homo sapiens
  misc_RNA (1)...(19): siRNA sense strand
gggauaccaugcaacauaa

SEQ ID NO: 343165 - RNA, 19 nt, Homo sapiens
  misc_RNA (1)...(19): siRNA sense strand
gaggagauguggucaaugg

SEQ ID NO: 343166 - RNA, 19 nt, Homo sapiens
  misc_RNA (1)...(19): siRNA sense strand
gaaggagcuuucaucauuc

SEQ ID NO: 343167 - RNA, 19 nt, Homo sapiens
  misc_RNA (1)...(19): siRNA sense strand
cuagaaaucuguugcuaug

SEQ ID NO: 343168 - RNA, 19 nt, Homo sapiens
  misc_RNA (1)...(19): siRNA sense strand
gcucagggcuauccucuca

SEQ ID NO: 343169 - RNA, 19 nt, Homo sapiens
  misc_RNA (1)...(19): siRNA sense strand
aaacaagcgucucugaaga

SEQ ID NO: 343170 - RNA, 19 nt, Homo sapiens
  misc_RNA (1)...(19): siRNA sense strand
caacauaaccugauaaagc

SEQ ID NO: 343171 - RNA, 19 nt, Homo sapiens
  misc_RNA (1)...(19): siRNA sense strand
gaaacaagcgucucugaag

SEQ ID NO: 343172 - RNA, 19 nt, Homo sapiens
  misc_RNA (1)...(19): siRNA sense strand
gcagagggauaccaugcaa

SEQ ID NO: 343173 - RNA, 19 nt, Homo sapiens
  misc_RNA (1)...(19): siRNA sense strand
ugaacuagaagcuguguua

SEQ ID NO: 343174 - RNA, 19 nt, Homo sapiens
  misc_RNA (1)...(19): siRNA sense strand
gagaaucccaggacagaaa

SEQ ID NO: 343175 - RNA, 19 nt, Homo sapiens
  misc_RNA (1)...(19): siRNA sense strand
gcccacagaucaacuggaa

SEQ ID NO: 343176 - RNA, 19 nt, Homo sapiens
  misc_RNA (1)...(19): siRNA sense strand
gaagacugcucagggcuau

SEQ ID NO: 343177 - RNA, 19 nt, Homo sapiens
  misc_RNA (1)...(19): siRNA sense strand
gacccagucuauuaaagaa

SEQ ID NO: 343178 - RNA, 19 nt, Homo sapiens
  misc_RNA (1)...(19): siRNA sense strand
acuagaagcuguguuagaa

SEQ ID NO: 343179 - RNA, 19 nt, Homo sapiens
  misc_RNA (1)...(19): siRNA sense strand
caugcaacauaaccugaua

SEQ ID NO: 343180 - RNA, 19 nt, Homo sapiens
  misc_RNA (1)...(19): siRNA sense strand
gcuggacaccuaccugaua

SEQ ID NO: 343181 - RNA, 19 nt, Homo sapiens
  misc_RNA (1)...(19): siRNA sense strand
cagaucaacuggaauggau

SEQ ID NO: 343182 - RNA, 19 nt, Homo sapiens
  misc_RNA (1)...(19): siRNA sense strand
gcaggaaauggcugaacua

SEQ ID NO: 343183 - RNA, 19 nt, Homo sapiens
  misc_RNA (1)...(19): siRNA sense strand
ccacagaucaacuggaaug

SEQ ID NO: 343184 - RNA, 19 nt, Homo sapiens
  misc_RNA (1)...(19): siRNA sense strand
caacaugcccacagaucaa

SEQ ID NO: 343185 - RNA, 19 nt, Homo sapiens
  misc_RNA (1)...(19): siRNA sense strand
ucaccaacaugcccacaga

SEQ ID NO: 343186 - RNA, 19 nt, Homo sapiens
  misc_RNA (1)...(19): siRNA sense strand
cagaggagauguggucaau

SEQ ID NO: 343187 - RNA, 19 nt, Homo sapiens
  misc_RNA (1)...(19): siRNA sense strand
caauugggcagauguguga

SEQ ID NO: 343188 - RNA, 19 nt, Homo sapiens
  misc_RNA (1)...(19): siRNA sense strand
ggagauguggucaauggaa

SEQ ID NO: 343189 - RNA, 19 nt, Homo sapiens
  misc_RNA (1)...(19): siRNA sense strand
guacagcuguguggugcuu

SEQ ID NO: 343190 - RNA, 19 nt, Homo sapiens
  misc_RNA (1)...(19): siRNA sense strand
ccaaagcgagcaagagaau

SEQ ID NO: 343191 - RNA, 19 nt, Homo sapiens
  misc_RNA (1)...(19): siRNA sense strand
gcuaugggcccuucaccaa

SEQ ID NO: 343192 - RNA, 19 nt, Homo sapiens
  misc_RNA (1)...(19): siRNA sense strand
gaaugagcaugauuuugaa

SEQ ID NO: 343193 - RNA, 19 nt, Homo sapiens
  misc_RNA (1)...(19): siRNA sense strand
ucagggcuauccucucaga

SEQ ID NO: 343194 - RNA, 19 nt, Homo sapiens
  misc_RNA (1)...(19): siRNA sense strand
agggauaccaugcaacaua

SEQ ID NO: 343195 - RNA, 19 nt, Homo sapiens
  misc_RNA (1)...(19): siRNA sense strand
gcuagaaaucuguugcuau

SEQ ID NO: 343196 - RNA, 19 nt, Homo sapiens
  misc_RNA (1)...(19): siRNA sense strand
ugaaugagcaugauuuuga

SEQ ID NO: 343197 - RNA, 19 nt, Homo sapiens
  misc_RNA (1)...(19): siRNA sense strand
ggcuagaaaucuguugcua

SEQ ID NO: 343198 - RNA, 19 nt, Homo sapiens
  misc_RNA (1)...(19): siRNA sense strand
ugaaacaagcgucucugaa

SEQ ID NO: 343199 - RNA, 19 nt, Homo sapiens
  misc_RNA (1)...(19): siRNA sense strand
aacauaaccugauaaagcu

SEQ ID NO: 343200 - RNA, 19 nt, Homo sapiens
  misc_RNA (1)...(19): siRNA sense strand
ugacccagucuauuaaaga

SEQ ID NO: 343201 - RNA, 19 nt, Homo sapiens
  misc_RNA (1)...(19): siRNA sense strand
gaacuagaagcuguguuag

SEQ ID NO: 343202 - RNA, 19 nt, Homo sapiens
  misc_RNA (1)...(19): siRNA sense strand
gugaaacaagcgucucuga

SEQ ID NO: 343203 - RNA, 19 nt, Homo sapiens
  misc_RNA (1)...(19): siRNA sense strand
ccaacaugcccacagauca

SEQ ID NO: 343204 - RNA, 19 nt, Homo sapiens
  misc_RNA (1)...(19): siRNA sense strand
uaugggcccuucaccaaca

SEQ ID NO: 343205 - RNA, 19 nt, Homo sapiens
  misc_RNA (1)...(19): siRNA sense strand
guccaaagcgagcaagaga

SEQ ID NO: 343206 - RNA, 19 nt, Homo sapiens
  misc_RNA (1)...(19): siRNA sense strand
cagaacaaagcacaucaga

SEQ ID NO: 343207 - RNA, 19 nt, Homo sapiens
  misc_RNA (1)...(19): siRNA sense strand
ccugcgaaauccagaacaa

SEQ ID NO: 343208 - RNA, 19 nt, Homo sapiens
  misc_RNA (1)...(19): siRNA sense strand
gaaaccaccaagguccaaa

SEQ ID NO: 343209 - RNA, 19 nt, Homo sapiens
  misc_RNA (1)...(19): siRNA sense strand
gauaaagcuccagcaggaa

SEQ ID NO: 343210 - RNA, 19 nt, Homo sapiens
  misc_RNA (1)...(19): siRNA sense strand
aaggagcuuucaucauuca

SEQ ID NO: 343211 - RNA, 19 nt, Homo sapiens
  misc_RNA (1)...(19): siRNA sense strand
ggugugagagugaaacaag

SEQ ID NO: 343212 - RNA, 19 nt, Homo sapiens
  misc_RNA (1)...(19): siRNA sense strand
gaaauggcugaacuagaag

SEQ ID NO: 343213 - RNA, 19 nt, Homo sapiens
  misc_RNA (1)...(19): siRNA sense strand
auaaagcuccagcaggaaa

SEQ ID NO: 343214 - RNA, 19 nt, Homo sapiens
  misc_RNA (1)...(19): siRNA sense strand
acccuuccaucauaaguga

SEQ ID NO: 343215 - RNA, 19 nt, Homo sapiens
  misc_RNA (1)...(19): siRNA sense strand
ggugacccagucuauuaaa

SEQ ID NO: 343216 - RNA, 19 nt, Homo sapiens
  misc_RNA (1)...(19): siRNA sense strand
cccagucuauuaaagaaag

SEQ ID NO: 343217 - RNA, 19 nt, Homo sapiens
  misc_RNA (1)...(19): siRNA sense strand
caucugggugugagaguga

SEQ ID NO: 343218 - RNA, 19 nt, Homo sapiens
  misc_RNA (1)...(19): siRNA sense strand
ccagucuauuaaagaaaga

SEQ ID NO: 343219 - RNA, 19 nt, Homo sapiens
  misc_RNA (1)...(19): siRNA sense strand
cgaaauccagaacaaagca

SEQ ID NO: 343220 - RNA, 19 nt, Homo sapiens
  misc_RNA (1)...(19): siRNA sense strand
aagagaaucccaggacaga

SEQ ID NO: 343221 - RNA, 19 nt, Homo sapiens
  misc_RNA (1)...(19): siRNA sense strand
gauguggucaauggaagaa

SEQ ID NO: 343222 - RNA, 19 nt, Homo sapiens
  misc_RNA (1)...(19): siRNA sense strand
ggaccugcgaaauccagaa

SEQ ID NO: 343223 - RNA, 19 nt, Homo sapiens
  misc_RNA (1)...(19): siRNA sense strand
gagcaugauuuugaaguca

SEQ ID NO: 343224 - RNA, 19 nt, Homo sapiens
  misc_RNA (1)...(19): siRNA sense strand
gugacccagucuauuaaag

SEQ ID NO: 343225 - RNA, 19 nt, Homo sapiens
  misc_RNA (1)...(19): siRNA sense strand
agaacaaagcacaucagaa

SEQ ID NO: 343226 - RNA, 19 nt, Homo sapiens
  misc_RNA (1)...(19): siRNA sense strand
uggaagaaaccaccaaggu

SEQ ID NO: 343227 - RNA, 19 nt, Homo sapiens
  misc_RNA (1)...(19): siRNA sense strand
ucaacuggaauggauggua

SEQ ID NO: 343228 - RNA, 19 nt, Homo sapiens
  misc_RNA (1)...(19): siRNA sense strand
ggaaauggcugaacuagaa

SEQ ID NO: 343229 - RNA, 19 nt, Homo sapiens
  misc_RNA (1)...(19): siRNA sense strand
gaacaaagcacaucagaaa

SEQ ID NO: 343230 - RNA, 19 nt, Homo sapiens
  misc_RNA (1)...(19): siRNA sense strand
cagcuacccuuccaucaua

SEQ ID NO: 343231 - RNA, 19 nt, Homo sapiens
  misc_RNA (1)...(19): siRNA sense strand
gggauaccaugcaacauaa

SEQ ID NO: 343232 - RNA, 19 nt, Homo sapiens
  misc_RNA (1)...(19): siRNA sense strand
gaggagauguggucaaugg

SEQ ID NO: 343233 - RNA, 19 nt, Homo sapiens
  misc_RNA (1)...(19): siRNA sense strand
gaaggagcuuucaucauuc

SEQ ID NO: 343234 - RNA, 19 nt, Homo sapiens
  misc_RNA (1)...(19): siRNA sense strand
cuagaaaucuguugcuaug

SEQ ID NO: 343235 - RNA, 19 nt, Homo sapiens
  misc_RNA (1)...(19): siRNA sense strand
gcucagggcuauccucuca

SEQ ID NO: 343236 - RNA, 19 nt, Homo sapiens
  misc_RNA (1)...(19): siRNA sense strand
aaacaagcgucucugaaga

SEQ ID NO: 343237 - RNA, 19 nt, Homo sapiens
  misc_RNA (1)...(19): siRNA sense strand
caacauaaccugauaaagc

SEQ ID NO: 343238 - RNA, 19 nt, Homo sapiens
  misc_RNA (1)...(19): siRNA sense strand
gaaacaagcgucucugaag

SEQ ID NO: 343239 - RNA, 19 nt, Homo sapiens
  misc_RNA (1)...(19): siRNA sense strand
gcagagggauaccaugcaa

SEQ ID NO: 343240 - RNA, 19 nt, Homo sapiens
  misc_RNA (1)...(19): siRNA sense strand
ugaacuagaagcuguguua

SEQ ID NO: 343241 - RNA, 19 nt, Homo sapiens
  misc_RNA (1)...(19): siRNA sense strand
gagaaucccaggacagaaa

SEQ ID NO: 343242 - RNA, 19 nt, Homo sapiens
  misc_RNA (1)...(19): siRNA sense strand
gcccacagaucaacuggaa

SEQ ID NO: 343243 - RNA, 19 nt, Homo sapiens
  misc_RNA (1)...(19): siRNA sense strand
gaagacugcucagggcuau

SEQ ID NO: 343244 - RNA, 19 nt, Homo sapiens
  misc_RNA (1)...(19): siRNA sense strand
gacccagucuauuaaagaa

SEQ ID NO: 343245 - RNA, 19 nt, Homo sapiens
  misc_RNA (1)...(19): siRNA sense strand
acuagaagcuguguuagaa

SEQ ID NO: 343246 - RNA, 19 nt, Homo sapiens
  misc_RNA (1)...(19): siRNA sense strand
caugcaacauaaccugaua

SEQ ID NO: 343247 - RNA, 19 nt, Homo sapiens
  misc_RNA (1)...(19): siRNA sense strand
gcuggacaccuaccugaua

SEQ ID NO: 343248 - RNA, 19 nt, Homo sapiens
  misc_RNA (1)...(19): siRNA sense strand
cagaucaacuggaauggau

SEQ ID NO: 343249 - RNA, 19 nt, Homo sapiens
  misc_RNA (1)...(19): siRNA sense strand
gcaggaaauggcugaacua

SEQ ID NO: 343250 - RNA, 19 nt, Homo sapiens
  misc_RNA (1)...(19): siRNA sense strand
ccacagaucaacuggaaug

SEQ ID NO: 343251 - RNA, 19 nt, Homo sapiens
  misc_RNA (1)...(19): siRNA sense strand
caacaugcccacagaucaa

SEQ ID NO: 343252 - RNA, 19 nt, Homo sapiens
  misc_RNA (1)...(19): siRNA sense strand
ucaccaacaugcccacaga

SEQ ID NO: 343253 - RNA, 19 nt, Homo sapiens
  misc_RNA (1)...(19): siRNA sense strand
cagaggagauguggucaau

SEQ ID NO: 343254 - RNA, 19 nt, Homo sapiens
  misc_RNA (1)...(19): siRNA sense strand
caauugggcagauguguga

SEQ ID NO: 343255 - RNA, 19 nt, Homo sapiens
  misc_RNA (1)...(19): siRNA sense strand
ggagauguggucaauggaa

SEQ ID NO: 343256 - RNA, 19 nt, Homo sapiens
  misc_RNA (1)...(19): siRNA sense strand
guacagcuguguggugcuu

SEQ ID NO: 343257 - RNA, 19 nt, Homo sapiens
  misc_RNA (1)...(19): siRNA sense strand
ccaaagcgagcaagagaau

SEQ ID NO: 343258 - RNA, 19 nt, Homo sapiens
  misc_RNA (1)...(19): siRNA sense strand
gcuaugggcccuucaccaa

SEQ ID NO: 343259 - RNA, 19 nt, Homo sapiens
  misc_RNA (1)...(19): siRNA sense strand
gaaugagcaugauuuugaa

SEQ ID NO: 343260 - RNA, 19 nt, Homo sapiens
  misc_RNA (1)...(19): siRNA sense strand
ucagggcuauccucucaga

SEQ ID NO: 343261 - RNA, 19 nt, Homo sapiens
  misc_RNA (1)...(19): siRNA sense strand
agggauaccaugcaacaua

SEQ ID NO: 343262 - RNA, 19 nt, Homo sapiens
  misc_RNA (1)...(19): siRNA sense strand
gcuagaaaucuguugcuau

SEQ ID NO: 343263 - RNA, 19 nt, Homo sapiens
  misc_RNA (1)...(19): siRNA sense strand
ugaaugagcaugauuuuga

SEQ ID NO: 343264 - RNA, 19 nt, Homo sapiens
  misc_RNA (1)...(19): siRNA sense strand
ggcuagaaaucuguugcua

SEQ ID NO: 343265 - RNA, 19 nt, Homo sapiens
  misc_RNA (1)...(19): siRNA sense strand
ugaaacaagcgucucugaa

SEQ ID NO: 343266 - RNA, 19 nt, Homo sapiens
  misc_RNA (1)...(19): siRNA sense strand
aacauaaccugauaaagcu

SEQ ID NO: 343267 - RNA, 19 nt, Homo sapiens
  misc_RNA (1)...(19): siRNA sense strand
ugacccagucuauuaaaga

SEQ ID NO: 343268 - RNA, 19 nt, Homo sapiens
  misc_RNA (1)...(19): siRNA sense strand
gaacuagaagcuguguuag

SEQ ID NO: 343269 - RNA, 19 nt, Homo sapiens
  misc_RNA (1)...(19): siRNA sense strand
gugaaacaagcgucucuga

SEQ ID NO: 343270 - RNA, 19 nt, Homo sapiens
  misc_RNA (1)...(19): siRNA sense strand
ccaacaugcccacagauca

SEQ ID NO: 343271 - RNA, 19 nt, Homo sapiens
  misc_RNA (1)...(19): siRNA sense strand
uaugggcccuucaccaaca

SEQ ID NO: 343272 - RNA, 19 nt, Homo sapiens
  misc_RNA (1)...(19): siRNA sense strand
guccaaagcgagcaagaga

SEQ ID NO: 343273 - RNA, 19 nt, Homo sapiens
  misc_RNA (1)...(19): siRNA sense strand
cagaacaaagcacaucaga

SEQ ID NO: 343274 - RNA, 19 nt, Homo sapiens
  misc_RNA (1)...(19): siRNA sense strand
ccugcgaaauccagaacaa

SEQ ID NO: 343275 - RNA, 19 nt, Homo sapiens
  misc_RNA (1)...(19): siRNA sense strand
gaaaccaccaagguccaaa

SEQ ID NO: 343276 - RNA, 19 nt, Homo sapiens
  misc_RNA (1)...(19): siRNA sense strand
gauaaagcuccagcaggaa

SEQ ID NO: 343277 - RNA, 19 nt, Homo sapiens
  misc_RNA (1)...(19): siRNA sense strand
aaggagcuuucaucauuca

SEQ ID NO: 343278 - RNA, 19 nt, Homo sapiens
  misc_RNA (1)...(19): siRNA sense strand
ggugugagagugaaacaag

SEQ ID NO: 343279 - RNA, 19 nt, Homo sapiens
  misc_RNA (1)...(19): siRNA sense strand
gaaauggcugaacuagaag

SEQ ID NO: 343280 - RNA, 19 nt, Homo sapiens
  misc_RNA (1)...(19): siRNA sense strand
auaaagcuccagcaggaaa

SEQ ID NO: 343281 - RNA, 19 nt, Homo sapiens
  misc_RNA (1)...(19): siRNA sense strand
acccuuccaucauaaguga

SEQ ID NO: 343282 - RNA, 19 nt, Homo sapiens
  misc_RNA (1)...(19): siRNA sense strand
ggugacccagucuauuaaa

SEQ ID NO: 343283 - RNA, 19 nt, Homo sapiens
  misc_RNA (1)...(19): siRNA sense strand
cccagucuauuaaagaaag

SEQ ID NO: 343284 - RNA, 19 nt, Homo sapiens
  misc_RNA (1)...(19): siRNA sense strand
caucugggugugagaguga

SEQ ID NO: 343285 - RNA, 19 nt, Homo sapiens
  misc_RNA (1)...(19): siRNA sense strand
ccagucuauuaaagaaaga

SEQ ID NO: 343286 - RNA, 19 nt, Homo sapiens
  misc_RNA (1)...(19): siRNA sense strand
cgaaauccagaacaaagca

SEQ ID NO: 343287 - RNA, 19 nt, Homo sapiens
  misc_RNA (1)...(19): siRNA sense strand
aagagaaucccaggacaga

SEQ ID NO: 343288 - RNA, 19 nt, Homo sapiens
  misc_RNA (1)...(19): siRNA sense strand
gauguggucaauggaagaa

SEQ ID NO: 343289 - RNA, 19 nt, Homo sapiens
  misc_RNA (1)...(19): siRNA sense strand
ggaccugcgaaauccagaa

SEQ ID NO: 343290 - RNA, 19 nt, Homo sapiens
  misc_RNA (1)...(19): siRNA sense strand
gagcaugauuuugaaguca

SEQ ID NO: 343291 - RNA, 19 nt, Homo sapiens
  misc_RNA (1)...(19): siRNA sense strand
gugacccagucuauuaaag

SEQ ID NO: 343292 - RNA, 19 nt, Homo sapiens
  misc_RNA (1)...(19): siRNA sense strand
agaacaaagcacaucagaa

SEQ ID NO: 343293 - RNA, 19 nt, Homo sapiens
  misc_RNA (1)...(19): siRNA sense strand
uggaagaaaccaccaaggu

SEQ ID NO: 343294 - RNA, 19 nt, Homo sapiens
  misc_RNA (1)...(19): siRNA sense strand
ucaacuggaauggauggua

SEQ ID NO: 343295 - RNA, 19 nt, Homo sapiens
  misc_RNA (1)...(19): siRNA sense strand
ggaaauggcugaacuagaa

SEQ ID NO: 343296 - RNA, 19 nt, Homo sapiens
  misc_RNA (1)...(19): siRNA sense strand
gaacaaagcacaucagaaa

SEQ ID NO: 343297 - RNA, 19 nt, Homo sapiens
  misc_RNA (1)...(19): siRNA sense strand
cagcuacccuuccaucaua

SEQ ID NO: 343298 - RNA, 19 nt, Homo sapiens
  misc_RNA (1)...(19): siRNA sense strand
gggauaccaugcaacauaa

SEQ ID NO: 343299 - RNA, 19 nt, Homo sapiens
  misc_RNA (1)...(19): siRNA sense strand
gaggagauguggucaaugg

SEQ ID NO: 343300 - RNA, 19 nt, Homo sapiens
  misc_RNA (1)...(19): siRNA sense strand
gaaggagcuuucaucauuc

SEQ ID NO: 343301 - RNA, 19 nt, Homo sapiens
  misc_RNA (1)...(19): siRNA sense strand
cuagaaaucuguugcuaug

SEQ ID NO: 343302 - RNA, 19 nt, Homo sapiens
  misc_RNA (1)...(19): siRNA sense strand
gcucagggcuauccucuca

SEQ ID NO: 343303 - RNA, 19 nt, Homo sapiens
  misc_RNA (1)...(19): siRNA sense strand
aaacaagcgucucugaaga

SEQ ID NO: 343304 - RNA, 19 nt, Homo sapiens
  misc_RNA (1)...(19): siRNA sense strand
caacauaaccugauaaagc

SEQ ID NO: 343305 - RNA, 19 nt, Homo sapiens
  misc_RNA (1)...(19): siRNA sense strand
gaaacaagcgucucugaag

SEQ ID NO: 343306 - RNA, 19 nt, Homo sapiens
  misc_RNA (1)...(19): siRNA sense strand
gcagagggauaccaugcaa

SEQ ID NO: 343307 - RNA, 19 nt, Homo sapiens
  misc_RNA (1)...(19): siRNA sense strand
ugaacuagaagcuguguua

SEQ ID NO: 343308 - RNA, 19 nt, Homo sapiens
  misc_RNA (1)...(19): siRNA sense strand
gagaaucccaggacagaaa

SEQ ID NO: 343309 - RNA, 19 nt, Homo sapiens
  misc_RNA (1)...(19): siRNA sense strand
gcccacagaucaacuggaa

SEQ ID NO: 343310 - RNA, 19 nt, Homo sapiens
  misc_RNA (1)...(19): siRNA sense strand
gaagacugcucagggcuau

SEQ ID NO: 343311 - RNA, 19 nt, Homo sapiens
  misc_RNA (1)...(19): siRNA sense strand
gacccagucuauuaaagaa

SEQ ID NO: 343312 - RNA, 19 nt, Homo sapiens
  misc_RNA (1)...(19): siRNA sense strand
acuagaagcuguguuagaa

SEQ ID NO: 343313 - RNA, 19 nt, Homo sapiens
  misc_RNA (1)...(19): siRNA sense strand
caugcaacauaaccugaua

SEQ ID NO: 343314 - RNA, 19 nt, Homo sapiens
  misc_RNA (1)...(19): siRNA sense strand
gcuggacaccuaccugaua

SEQ ID NO: 343315 - RNA, 19 nt, Homo sapiens
  misc_RNA (1)...(19): siRNA sense strand
cagaucaacuggaauggau

SEQ ID NO: 343316 - RNA, 19 nt, Homo sapiens
  misc_RNA (1)...(19): siRNA sense strand
gcaggaaauggcugaacua

SEQ ID NO: 343317 - RNA, 19 nt, Homo sapiens
  misc_RNA (1)...(19): siRNA sense strand
ccacagaucaacuggaaug

SEQ ID NO: 343318 - RNA, 19 nt, Homo sapiens
  misc_RNA (1)...(19): siRNA sense strand
caacaugcccacagaucaa

SEQ ID NO: 343319 - RNA, 19 nt, Homo sapiens
  misc_RNA (1)...(19): siRNA sense strand
ucaccaacaugcccacaga

SEQ ID NO: 343320 - RNA, 19 nt, Homo sapiens
  misc_RNA (1)...(19): siRNA sense strand
cagaggagauguggucaau

SEQ ID NO: 343321 - RNA, 19 nt, Homo sapiens
  misc_RNA (1)...(19): siRNA sense strand
caauugggcagauguguga

SEQ ID NO: 343322 - RNA, 19 nt, Homo sapiens
  misc_RNA (1)...(19): siRNA sense strand
ggagauguggucaauggaa

SEQ ID NO: 343323 - RNA, 19 nt, Homo sapiens
  misc_RNA (1)...(19): siRNA sense strand
guacagcuguguggugcuu

SEQ ID NO: 343324 - RNA, 19 nt, Homo sapiens
  misc_RNA (1)...(19): siRNA sense strand
ccaaagcgagcaagagaau

SEQ ID NO: 343325 - RNA, 19 nt, Homo sapiens
  misc_RNA (1)...(19): siRNA sense strand
gcuaugggcccuucaccaa

SEQ ID NO: 343326 - RNA, 19 nt, Homo sapiens
  misc_RNA (1)...(19): siRNA sense strand
gaaugagcaugauuuugaa

SEQ ID NO: 343327 - RNA, 19 nt, Homo sapiens
  misc_RNA (1)...(19): siRNA sense strand
ucagggcuauccucucaga

SEQ ID NO: 343328 - RNA, 19 nt, Homo sapiens
  misc_RNA (1)...(19): siRNA sense strand
agggauaccaugcaacaua

SEQ ID NO: 343329 - RNA, 19 nt, Homo sapiens
  misc_RNA (1)...(19): siRNA sense strand
gcuagaaaucuguugcuau

SEQ ID NO: 343330 - RNA, 19 nt, Homo sapiens
  misc_RNA (1)...(19): siRNA sense strand
ugaaugagcaugauuuuga

SEQ ID NO: 343331 - RNA, 19 nt, Homo sapiens
  misc_RNA (1)...(19): siRNA sense strand
ggcuagaaaucuguugcua

SEQ ID NO: 343332 - RNA, 19 nt, Homo sapiens
  misc_RNA (1)...(19): siRNA sense strand
ugaaacaagcgucucugaa

SEQ ID NO: 343333 - RNA, 19 nt, Homo sapiens
  misc_RNA (1)...(19): siRNA sense strand
aacauaaccugauaaagcu

SEQ ID NO: 343334 - RNA, 19 nt, Homo sapiens
  misc_RNA (1)...(19): siRNA sense strand
ugacccagucuauuaaaga

SEQ ID NO: 343335 - RNA, 19 nt, Homo sapiens
  misc_RNA (1)...(19): siRNA sense strand
gaacuagaagcuguguuag

SEQ ID NO: 343336 - RNA, 19 nt, Homo sapiens
  misc_RNA (1)...(19): siRNA sense strand
gugaaacaagcgucucuga

SEQ ID NO: 343337 - RNA, 19 nt, Homo sapiens
  misc_RNA (1)...(19): siRNA sense strand
ccaacaugcccacagauca

SEQ ID NO: 343338 - RNA, 19 nt, Homo sapiens
  misc_RNA (1)...(19): siRNA sense strand
uaugggcccuucaccaaca

SEQ ID NO: 343339 - RNA, 19 nt, Homo sapiens
  misc_RNA (1)...(19): siRNA sense strand
guccaaagcgagcaagaga

SEQ ID NO: 343340 - RNA, 19 nt, Homo sapiens
  misc_RNA (1)...(19): siRNA sense strand
cagaacaaagcacaucaga

SEQ ID NO: 343341 - RNA, 19 nt, Homo sapiens
  misc_RNA (1)...(19): siRNA sense strand
ccugcgaaauccagaacaa

SEQ ID NO: 343342 - RNA, 19 nt, Homo sapiens
  misc_RNA (1)...(19): siRNA sense strand
gaaaccaccaagguccaaa

SEQ ID NO: 343343 - RNA, 19 nt, Homo sapiens
  misc_RNA (1)...(19): siRNA sense strand
gauaaagcuccagcaggaa

SEQ ID NO: 343344 - RNA, 19 nt, Homo sapiens
  misc_RNA (1)...(19): siRNA sense strand
aaggagcuuucaucauuca

SEQ ID NO: 343345 - RNA, 19 nt, Homo sapiens
  misc_RNA (1)...(19): siRNA sense strand
ggugugagagugaaacaag

SEQ ID NO: 343346 - RNA, 19 nt, Homo sapiens
  misc_RNA (1)...(19): siRNA sense strand
gaaauggcugaacuagaag

SEQ ID NO: 343347 - RNA, 19 nt, Homo sapiens
  misc_RNA (1)...(19): siRNA sense strand
auaaagcuccagcaggaaa

SEQ ID NO: 343348 - RNA, 19 nt, Homo sapiens
  misc_RNA (1)...(19): siRNA sense strand
acccuuccaucauaaguga

SEQ ID NO: 343349 - RNA, 19 nt, Homo sapiens
  misc_RNA (1)...(19): siRNA sense strand
ggugacccagucuauuaaa

SEQ ID NO: 343350 - RNA, 19 nt, Homo sapiens
  misc_RNA (1)...(19): siRNA sense strand
cccagucuauuaaagaaag

SEQ ID NO: 343351 - RNA, 19 nt, Homo sapiens
  misc_RNA (1)...(19): siRNA sense strand
caucugggugugagaguga

SEQ ID NO: 343352 - RNA, 19 nt, Homo sapiens
  misc_RNA (1)...(19): siRNA sense strand
ccagucuauuaaagaaaga

SEQ ID NO: 343353 - RNA, 19 nt, Homo sapiens
  misc_RNA (1)...(19): siRNA sense strand
cgaaauccagaacaaagca

SEQ ID NO: 343354 - RNA, 19 nt, Homo sapiens
  misc_RNA (1)...(19): siRNA sense strand
aagagaaucccaggacaga

SEQ ID NO: 343355 - RNA, 19 nt, Homo sapiens
  misc_RNA (1)...(19): siRNA sense strand
gauguggucaauggaagaa

SEQ ID NO: 343356 - RNA, 19 nt, Homo sapiens
  misc_RNA (1)...(19): siRNA sense strand
ggaccugcgaaauccagaa

SEQ ID NO: 343357 - RNA, 19 nt, Homo sapiens
  misc_RNA (1)...(19): siRNA sense strand
gagcaugauuuugaaguca

SEQ ID NO: 343358 - RNA, 19 nt, Homo sapiens
  misc_RNA (1)...(19): siRNA sense strand
gugacccagucuauuaaag

SEQ ID NO: 343359 - RNA, 19 nt, Homo sapiens
  misc_RNA (1)...(19): siRNA sense strand
agaacaaagcacaucagaa

SEQ ID NO: 343360 - RNA, 19 nt, Homo sapiens
  misc_RNA (1)...(19): siRNA sense strand
uggaagaaaccaccaaggu

SEQ ID NO: 343361 - RNA, 19 nt, Homo sapiens
  misc_RNA (1)...(19): siRNA sense strand
ucaacuggaauggauggua

SEQ ID NO: 343362 - RNA, 19 nt, Homo sapiens
  misc_RNA (1)...(19): siRNA sense strand
ggaaauggcugaacuagaa

SEQ ID NO: 343363 - RNA, 19 nt, Homo sapiens
  misc_RNA (1)...(19): siRNA sense strand
gaacaaagcacaucagaaa

SEQ ID NO: 343364 - RNA, 19 nt, Homo sapiens
  misc_RNA (1)...(19): siRNA sense strand
cagcuacccuuccaucaua

SEQ ID NO: 343365 - RNA, 19 nt, Homo sapiens
  misc_RNA (1)...(19): siRNA sense strand
gggauaccaugcaacauaa

SEQ ID NO: 343366 - RNA, 19 nt, Homo sapiens
  misc_RNA (1)...(19): siRNA sense strand
gaggagauguggucaaugg

SEQ ID NO: 343367 - RNA, 19 nt, Homo sapiens
  misc_RNA (1)...(19): siRNA sense strand
gaaggagcuuucaucauuc

SEQ ID NO: 343368 - RNA, 19 nt, Homo sapiens
  misc_RNA (1)...(19): siRNA sense strand
cuagaaaucuguugcuaug

SEQ ID NO: 343369 - RNA, 19 nt, Homo sapiens
  misc_RNA (1)...(19): siRNA sense strand
gcucagggcuauccucuca

SEQ ID NO: 343370 - RNA, 19 nt, Homo sapiens
  misc_RNA (1)...(19): siRNA sense strand
aaacaagcgucucugaaga

SEQ ID NO: 343371 - RNA, 19 nt, Homo sapiens
  misc_RNA (1)...(19): siRNA sense strand
caacauaaccugauaaagc

SEQ ID NO: 343372 - RNA, 19 nt, Homo sapiens
  misc_RNA (1)...(19): siRNA sense strand
gaaacaagcgucucugaag

SEQ ID NO: 343373 - RNA, 19 nt, Homo sapiens
  misc_RNA (1)...(19): siRNA sense strand
gcagagggauaccaugcaa

SEQ ID NO: 343374 - RNA, 19 nt, Homo sapiens
  misc_RNA (1)...(19): siRNA sense strand
ugaacuagaagcuguguua

SEQ ID NO: 343375 - RNA, 19 nt, Homo sapiens
  misc_RNA (1)...(19): siRNA sense strand
gagaaucccaggacagaaa

SEQ ID NO: 343376 - RNA, 19 nt, Homo sapiens
  misc_RNA (1)...(19): siRNA sense strand
gcccacagaucaacuggaa

SEQ ID NO: 343377 - RNA, 19 nt, Homo sapiens
  misc_RNA (1)...(19): siRNA sense strand
gaagacugcucagggcuau

SEQ ID NO: 343378 - RNA, 19 nt, Homo sapiens
  misc_RNA (1)...(19): siRNA sense strand
gacccagucuauuaaagaa

SEQ ID NO: 343379 - RNA, 19 nt, Homo sapiens
  misc_RNA (1)...(19): siRNA sense strand
acuagaagcuguguuagaa

SEQ ID NO: 343380 - RNA, 19 nt, Homo sapiens
  misc_RNA (1)...(19): siRNA sense strand
caugcaacauaaccugaua

SEQ ID NO: 343381 - RNA, 19 nt, Homo sapiens
  misc_RNA (1)...(19): siRNA sense strand
gcuggacaccuaccugaua

SEQ ID NO: 343382 - RNA, 19 nt, Homo sapiens
  misc_RNA (1)...(19): siRNA sense strand
cagaucaacuggaauggau

SEQ ID NO: 343383 - RNA, 19 nt, Homo sapiens
  misc_RNA (1)...(19): siRNA sense strand
gcaggaaauggcugaacua

SEQ ID NO: 343384 - RNA, 19 nt, Homo sapiens
  misc_RNA (1)...(19): siRNA sense strand
ccacagaucaacuggaaug

SEQ ID NO: 343385 - RNA, 19 nt, Homo sapiens
  misc_RNA (1)...(19): siRNA sense strand
caacaugcccacagaucaa

SEQ ID NO: 343386 - RNA, 19 nt, Homo sapiens
  misc_RNA (1)...(19): siRNA sense strand
ucaccaacaugcccacaga

SEQ ID NO: 343387 - RNA, 19 nt, Homo sapiens
  misc_RNA (1)...(19): siRNA sense strand
cagaggagauguggucaau

SEQ ID NO: 343388 - RNA, 19 nt, Homo sapiens
  misc_RNA (1)...(19): siRNA sense strand
caauugggcagauguguga

SEQ ID NO: 343389 - RNA, 19 nt, Homo sapiens
  misc_RNA (1)...(19): siRNA sense strand
ggagauguggucaauggaa

SEQ ID NO: 343390 - RNA, 19 nt, Homo sapiens
  misc_RNA (1)...(19): siRNA sense strand
guacagcuguguggugcuu

SEQ ID NO: 343391 - RNA, 19 nt, Homo sapiens
  misc_RNA (1)...(19): siRNA sense strand
ccaaagcgagcaagagaau

SEQ ID NO: 343392 - RNA, 19 nt, Homo sapiens
  misc_RNA (1)...(19): siRNA sense strand
gcuaugggcccuucaccaa

SEQ ID NO: 343393 - RNA, 19 nt, Homo sapiens
  misc_RNA (1)...(19): siRNA sense strand
gaaugagcaugauuuugaa

SEQ ID NO: 343394 - RNA, 19 nt, Homo sapiens
  misc_RNA (1)...(19): siRNA sense strand
ucagggcuauccucucaga

SEQ ID NO: 343395 - RNA, 19 nt, Homo sapiens
  misc_RNA (1)...(19): siRNA sense strand
agggauaccaugcaacaua

SEQ ID NO: 343396 - RNA, 19 nt, Homo sapiens
  misc_RNA (1)...(19): siRNA sense strand
gcuagaaaucuguugcuau

SEQ ID NO: 343397 - RNA, 19 nt, Homo sapiens
  misc_RNA (1)...(19): siRNA sense strand
ugaaugagcaugauuuuga

SEQ ID NO: 343398 - RNA, 19 nt, Homo sapiens
  misc_RNA (1)...(19): siRNA sense strand
ggcuagaaaucuguugcua

SEQ ID NO: 343399 - RNA, 19 nt, Homo sapiens
  misc_RNA (1)...(19): siRNA sense strand
ugaaacaagcgucucugaa

SEQ ID NO: 343400 - RNA, 19 nt, Homo sapiens
  misc_RNA (1)...(19): siRNA sense strand
aacauaaccugauaaagcu

SEQ ID NO: 343401 - RNA, 19 nt, Homo sapiens
  misc_RNA (1)...(19): siRNA sense strand
ugacccagucuauuaaaga

SEQ ID NO: 343402 - RNA, 19 nt, Homo sapiens
  misc_RNA (1)...(19): siRNA sense strand
gaacuagaagcuguguuag

SEQ ID NO: 343403 - RNA, 19 nt, Homo sapiens
  misc_RNA (1)...(19): siRNA sense strand
gugaaacaagcgucucuga

SEQ ID NO: 343404 - RNA, 19 nt, Homo sapiens
  misc_RNA (1)...(19): siRNA sense strand
ccaacaugcccacagauca

SEQ ID NO: 343405 - RNA, 19 nt, Homo sapiens
  misc_RNA (1)...(19): siRNA sense strand
uaugggcccuucaccaaca

SEQ ID NO: 343406 - RNA, 19 nt, Homo sapiens
  misc_RNA (1)...(19): siRNA sense strand
guccaaagcgagcaagaga

SEQ ID NO: 343407 - RNA, 19 nt, Homo sapiens
  misc_RNA (1)...(19): siRNA sense strand
cagaacaaagcacaucaga

SEQ ID NO: 343408 - RNA, 19 nt, Homo sapiens
  misc_RNA (1)...(19): siRNA sense strand
ccugcgaaauccagaacaa

SEQ ID NO: 343409 - RNA, 19 nt, Homo sapiens
  misc_RNA (1)...(19): siRNA sense strand
gaaaccaccaagguccaaa

SEQ ID NO: 343410 - RNA, 19 nt, Homo sapiens
  misc_RNA (1)...(19): siRNA sense strand
gauaaagcuccagcaggaa

SEQ ID NO: 343411 - RNA, 19 nt, Homo sapiens
  misc_RNA (1)...(19): siRNA sense strand
aaggagcuuucaucauuca

SEQ ID NO: 343412 - RNA, 19 nt, Homo sapiens
  misc_RNA (1)...(19): siRNA sense strand
ggugugagagugaaacaag

SEQ ID NO: 343413 - RNA, 19 nt, Homo sapiens
  misc_RNA (1)...(19): siRNA sense strand
gaaauggcugaacuagaag

SEQ ID NO: 343414 - RNA, 19 nt, Homo sapiens
  misc_RNA (1)...(19): siRNA sense strand
auaaagcuccagcaggaaa

SEQ ID NO: 343415 - RNA, 19 nt, Homo sapiens
  misc_RNA (1)...(19): siRNA sense strand
acccuuccaucauaaguga

SEQ ID NO: 343416 - RNA, 19 nt, Homo sapiens
  misc_RNA (1)...(19): siRNA sense strand
ggugacccagucuauuaaa

SEQ ID NO: 343417 - RNA, 19 nt, Homo sapiens
  misc_RNA (1)...(19): siRNA sense strand
cccagucuauuaaagaaag

SEQ ID NO: 343418 - RNA, 19 nt, Homo sapiens
  misc_RNA (1)...(19): siRNA sense strand
caucugggugugagaguga

SEQ ID NO: 343419 - RNA, 19 nt, Homo sapiens
  misc_RNA (1)...(19): siRNA sense strand
ccagucuauuaaagaaaga

SEQ ID NO: 343420 - RNA, 19 nt, Homo sapiens
  misc_RNA (1)...(19): siRNA sense strand
cgaaauccagaacaaagca

SEQ ID NO: 343421 - RNA, 19 nt, Homo sapiens
  misc_RNA (1)...(19): siRNA sense strand
aagagaaucccaggacaga

SEQ ID NO: 343422 - RNA, 19 nt, Homo sapiens
  misc_RNA (1)...(19): siRNA sense strand
gauguggucaauggaagaa

SEQ ID NO: 343423 - RNA, 19 nt, Homo sapiens
  misc_RNA (1)...(19): siRNA sense strand
ggaccugcgaaauccagaa

SEQ ID NO: 343424 - RNA, 19 nt, Homo sapiens
  misc_RNA (1)...(19): siRNA sense strand
gagcaugauuuugaaguca

SEQ ID NO: 343425 - RNA, 19 nt, Homo sapiens
  misc_RNA (1)...(19): siRNA sense strand
gugacccagucuauuaaag

SEQ ID NO: 343426 - RNA, 19 nt, Homo sapiens
  misc_RNA (1)...(19): siRNA sense strand
agaacaaagcacaucagaa

SEQ ID NO: 343427 - RNA, 19 nt, Homo sapiens
  misc_RNA (1)...(19): siRNA sense strand
uggaagaaaccaccaaggu

SEQ ID NO: 343428 - RNA, 19 nt, Homo sapiens
  misc_RNA (1)...(19): siRNA sense strand
ucaacuggaauggauggua

SEQ ID NO: 343429 - RNA, 19 nt, Homo sapiens
  misc_RNA (1)...(19): siRNA sense strand
ggaaauggcugaacuagaa

SEQ ID NO: 343430 - RNA, 19 nt, Homo sapiens
  misc_RNA (1)...(19): siRNA sense strand
gaacaaagcacaucagaaa

SEQ ID NO: 343431 - RNA, 19 nt, Homo sapiens
  misc_RNA (1)...(19): siRNA sense strand
cagcuacccuuccaucaua

SEQ ID NO: 343432 - RNA, 19 nt, Homo sapiens
  misc_RNA (1)...(19): siRNA sense strand
gggauaccaugcaacauaa

SEQ ID NO: 343433 - RNA, 19 nt, Homo sapiens
  misc_RNA (1)...(19): siRNA sense strand
gaggagauguggucaaugg

SEQ ID NO: 343434 - RNA, 19 nt, Homo sapiens
  misc_RNA (1)...(19): siRNA sense strand
gaaggagcuuucaucauuc

SEQ ID NO: 343435 - RNA, 19 nt, Homo sapiens
  misc_RNA (1)...(19): siRNA sense strand
cuagaaaucuguugcuaug

SEQ ID NO: 343436 - RNA, 19 nt, Homo sapiens
  misc_RNA (1)...(19): siRNA sense strand
gcucagggcuauccucuca

SEQ ID NO: 343437 - RNA, 19 nt, Homo sapiens
  misc_RNA (1)...(19): siRNA sense strand
aaacaagcgucucugaaga

SEQ ID NO: 343438 - RNA, 19 nt, Homo sapiens
  misc_RNA (1)...(19): siRNA sense strand
caacauaaccugauaaagc

SEQ ID NO: 343439 - RNA, 19 nt, Homo sapiens
  misc_RNA (1)...(19): siRNA sense strand
gaaacaagcgucucugaag

SEQ ID NO: 343440 - RNA, 19 nt, Homo sapiens
  misc_RNA (1)...(19): siRNA sense strand
gcagagggauaccaugcaa

SEQ ID NO: 343441 - RNA, 19 nt, Homo sapiens
  misc_RNA (1)...(19): siRNA sense strand
ugaacuagaagcuguguua

SEQ ID NO: 343442 - RNA, 19 nt, Homo sapiens
  misc_RNA (1)...(19): siRNA sense strand
gagaaucccaggacagaaa

SEQ ID NO: 343443 - RNA, 19 nt, Homo sapiens
  misc_RNA (1)...(19): siRNA sense strand
gcccacagaucaacuggaa

SEQ ID NO: 343444 - RNA, 19 nt, Homo sapiens
  misc_RNA (1)...(19): siRNA sense strand
gaagacugcucagggcuau

SEQ ID NO: 343445 - RNA, 19 nt, Homo sapiens
  misc_RNA (1)...(19): siRNA sense strand
gacccagucuauuaaagaa

SEQ ID NO: 343446 - RNA, 19 nt, Homo sapiens
  misc_RNA (1)...(19): siRNA sense strand
acuagaagcuguguuagaa

SEQ ID NO: 343447 - RNA, 19 nt, Homo sapiens
  misc_RNA (1)...(19): siRNA sense strand
caugcaacauaaccugaua

SEQ ID NO: 343448 - RNA, 19 nt, Homo sapiens
  misc_RNA (1)...(19): siRNA sense strand
gcuggacaccuaccugaua

SEQ ID NO: 343449 - RNA, 19 nt, Homo sapiens
  misc_RNA (1)...(19): siRNA sense strand
cagaucaacuggaauggau

SEQ ID NO: 343450 - RNA, 19 nt, Homo sapiens
  misc_RNA (1)...(19): siRNA sense strand
gcaggaaauggcugaacua

SEQ ID NO: 343451 - RNA, 19 nt, Homo sapiens
  misc_RNA (1)...(19): siRNA sense strand
ccacagaucaacuggaaug

SEQ ID NO: 343452 - RNA, 19 nt, Homo sapiens
  misc_RNA (1)...(19): siRNA sense strand
caacaugcccacagaucaa

SEQ ID NO: 343453 - RNA, 19 nt, Homo sapiens
  misc_RNA (1)...(19): siRNA sense strand
ucaccaacaugcccacaga

SEQ ID NO: 343454 - RNA, 19 nt, Homo sapiens
  misc_RNA (1)...(19): siRNA sense strand
cagaggagauguggucaau

SEQ ID NO: 343455 - RNA, 19 nt, Homo sapiens
  misc_RNA (1)...(19): siRNA sense strand
caauugggcagauguguga

SEQ ID NO: 343456 - RNA, 19 nt, Homo sapiens
  misc_RNA (1)...(19): siRNA sense strand
ggagauguggucaauggaa

SEQ ID NO: 343457 - RNA, 19 nt, Homo sapiens
  misc_RNA (1)...(19): siRNA sense strand
guacagcuguguggugcuu

SEQ ID NO: 343458 - RNA, 19 nt, Homo sapiens
  misc_RNA (1)...(19): siRNA sense strand
ccaaagcgagcaagagaau

SEQ ID NO: 343459 - RNA, 19 nt, Homo sapiens
  misc_RNA (1)...(19): siRNA sense strand
gcuaugggcccuucaccaa

SEQ ID NO: 343460 - RNA, 19 nt, Homo sapiens
  misc_RNA (1)...(19): siRNA sense strand
gaaugagcaugauuuugaa

SEQ ID NO: 343461 - RNA, 19 nt, Homo sapiens
  misc_RNA (1)...(19): siRNA sense strand
ucagggcuauccucucaga

SEQ ID NO: 343462 - RNA, 19 nt, Homo sapiens
  misc_RNA (1)...(19): siRNA sense strand
agggauaccaugcaacaua

SEQ ID NO: 343463 - RNA, 19 nt, Homo sapiens
  misc_RNA (1)...(19): siRNA sense strand
gcuagaaaucuguugcuau

SEQ ID NO: 343464 - RNA, 19 nt, Homo sapiens
  misc_RNA (1)...(19): siRNA sense strand
ugaaugagcaugauuuuga

SEQ ID NO: 343465 - RNA, 19 nt, Homo sapiens
  misc_RNA (1)...(19): siRNA sense strand
ggcuagaaaucuguugcua

SEQ ID NO: 343466 - RNA, 19 nt, Homo sapiens
  misc_RNA (1)...(19): siRNA sense strand
ugaaacaagcgucucugaa

SEQ ID NO: 343467 - RNA, 19 nt, Homo sapiens
  misc_RNA (1)...(19): siRNA sense strand
aacauaaccugauaaagcu

SEQ ID NO: 343468 - RNA, 19 nt, Homo sapiens
  misc_RNA (1)...(19): siRNA sense strand
ugacccagucuauuaaaga

SEQ ID NO: 343469 - RNA, 19 nt, Homo sapiens
  misc_RNA (1)...(19): siRNA sense strand
gaacuagaagcuguguuag

SEQ ID NO: 343470 - RNA, 19 nt, Homo sapiens
  misc_RNA (1)...(19): siRNA sense strand
gugaaacaagcgucucuga

SEQ ID NO: 343471 - RNA, 19 nt, Homo sapiens
  misc_RNA (1)...(19): siRNA sense strand
ccaacaugcccacagauca

SEQ ID NO: 343472 - RNA, 19 nt, Homo sapiens
  misc_RNA (1)...(19): siRNA sense strand
uaugggcccuucaccaaca

SEQ ID NO: 343473 - RNA, 19 nt, Homo sapiens
  misc_RNA (1)...(19): siRNA sense strand
guccaaagcgagcaagaga

SEQ ID NO: 343474 - RNA, 19 nt, Homo sapiens
  misc_RNA (1)...(19): siRNA sense strand
cagaacaaagcacaucaga

SEQ ID NO: 343475 - RNA, 19 nt, Homo sapiens
  misc_RNA (1)...(19): siRNA sense strand
ccugcgaaauccagaacaa

SEQ ID NO: 343476 - RNA, 19 nt, Homo sapiens
  misc_RNA (1)...(19): siRNA sense strand
gaaaccaccaagguccaaa

SEQ ID NO: 343477 - RNA, 19 nt, Homo sapiens
  misc_RNA (1)...(19): siRNA sense strand
gauaaagcuccagcaggaa

SEQ ID NO: 343478 - RNA, 19 nt, Homo sapiens
  misc_RNA (1)...(19): siRNA sense strand
aaggagcuuucaucauuca

SEQ ID NO: 343479 - RNA, 19 nt, Homo sapiens
  misc_RNA (1)...(19): siRNA sense strand
ggugugagagugaaacaag

SEQ ID NO: 343480 - RNA, 19 nt, Homo sapiens
  misc_RNA (1)...(19): siRNA sense strand
gaaauggcugaacuagaag

SEQ ID NO: 343481 - RNA, 19 nt, Homo sapiens
  misc_RNA (1)...(19): siRNA sense strand
auaaagcuccagcaggaaa

SEQ ID NO: 343482 - RNA, 19 nt, Homo sapiens
  misc_RNA (1)...(19): siRNA sense strand
acccuuccaucauaaguga

SEQ ID NO: 343483 - RNA, 19 nt, Homo sapiens
  misc_RNA (1)...(19): siRNA sense strand
ggugacccagucuauuaaa

SEQ ID NO: 343484 - RNA, 19 nt, Homo sapiens
  misc_RNA (1)...(19): siRNA sense strand
cccagucuauuaaagaaag

SEQ ID NO: 343485 - RNA, 19 nt, Homo sapiens
  misc_RNA (1)...(19): siRNA sense strand
caucugggugugagaguga

SEQ ID NO: 343486 - RNA, 19 nt, Homo sapiens
  misc_RNA (1)...(19): siRNA sense strand
ccagucuauuaaagaaaga

SEQ ID NO: 343487 - RNA, 19 nt, Homo sapiens
  misc_RNA (1)...(19): siRNA sense strand
cgaaauccagaacaaagca

SEQ ID NO: 343488 - RNA, 19 nt, Homo sapiens
  misc_RNA (1)...(19): siRNA sense strand
aagagaaucccaggacaga

SEQ ID NO: 343489 - RNA, 19 nt, Homo sapiens
  misc_RNA (1)...(19): siRNA sense strand
gauguggucaauggaagaa

SEQ ID NO: 343490 - RNA, 19 nt, Homo sapiens
  misc_RNA (1)...(19): siRNA sense strand
ggaccugcgaaauccagaa

SEQ ID NO: 343491 - RNA, 19 nt, Homo sapiens
  misc_RNA (1)...(19): siRNA sense strand
gagcaugauuuugaaguca

SEQ ID NO: 343492 - RNA, 19 nt, Homo sapiens
  misc_RNA (1)...(19): siRNA sense strand
gugacccagucuauuaaag

SEQ ID NO: 343493 - RNA, 19 nt, Homo sapiens
  misc_RNA (1)...(19): siRNA sense strand
agaacaaagcacaucagaa

SEQ ID NO: 343494 - RNA, 19 nt, Homo sapiens
  misc_RNA (1)...(19): siRNA sense strand
uggaagaaaccaccaaggu

SEQ ID NO: 343495 - RNA, 19 nt, Homo sapiens
  misc_RNA (1)...(19): siRNA sense strand
ucaacuggaauggauggua

SEQ ID NO: 343496 - RNA, 19 nt, Homo sapiens
  misc_RNA (1)...(19): siRNA sense strand
ggaaauggcugaacuagaa

SEQ ID NO: 343497 - RNA, 19 nt, Homo sapiens
  misc_RNA (1)...(19): siRNA sense strand
gaacaaagcacaucagaaa

SEQ ID NO: 343498 - RNA, 19 nt, Homo sapiens
  misc_RNA (1)...(19): siRNA sense strand
cagcuacccuuccaucaua

SEQ ID NO: 343499 - RNA, 19 nt, Homo sapiens
  misc_RNA (1)...(19): siRNA sense strand
gggauaccaugcaacauaa

SEQ ID NO: 343500 - RNA, 19 nt, Homo sapiens
  misc_RNA (1)...(19): siRNA sense strand
gaggagauguggucaaugg

SEQ ID NO: 343501 - RNA, 19 nt, Homo sapiens
  misc_RNA (1)...(19): siRNA sense strand
gaaggagcuuucaucauuc

SEQ ID NO: 343502 - RNA, 19 nt, Homo sapiens
  misc_RNA (1)...(19): siRNA sense strand
cuagaaaucuguugcuaug

SEQ ID NO: 343503 - RNA, 19 nt, Homo sapiens
  misc_RNA (1)...(19): siRNA sense strand
gcucagggcuauccucuca

SEQ ID NO: 343504 - RNA, 19 nt, Homo sapiens
  misc_RNA (1)...(19): siRNA sense strand
aaacaagcgucucugaaga

SEQ ID NO: 343505 - RNA, 19 nt, Homo sapiens
  misc_RNA (1)...(19): siRNA sense strand
caacauaaccugauaaagc

SEQ ID NO: 343506 - RNA, 19 nt, Homo sapiens
  misc_RNA (1)...(19): siRNA sense strand
gaaacaagcgucucugaag

SEQ ID NO: 343507 - RNA, 19 nt, Homo sapiens
  misc_RNA (1)...(19): siRNA sense strand
gcagagggauaccaugcaa

SEQ ID NO: 343508 - RNA, 19 nt, Homo sapiens
  misc_RNA (1)...(19): siRNA sense strand
ugaacuagaagcuguguua

SEQ ID NO: 343509 - RNA, 19 nt, Homo sapiens
  misc_RNA (1)...(19): siRNA sense strand
gagaaucccaggacagaaa

SEQ ID NO: 343510 - RNA, 19 nt, Homo sapiens
  misc_RNA (1)...(19): siRNA sense strand
gcccacagaucaacuggaa

SEQ ID NO: 343511 - RNA, 19 nt, Homo sapiens
  misc_RNA (1)...(19): siRNA sense strand
gaagacugcucagggcuau

SEQ ID NO: 343512 - RNA, 19 nt, Homo sapiens
  misc_RNA (1)...(19): siRNA sense strand
gacccagucuauuaaagaa

SEQ ID NO: 343513 - RNA, 19 nt, Homo sapiens
  misc_RNA (1)...(19): siRNA sense strand
acuagaagcuguguuagaa

SEQ ID NO: 343514 - RNA, 19 nt, Homo sapiens
  misc_RNA (1)...(19): siRNA sense strand
caugcaacauaaccugaua

SEQ ID NO: 343515 - RNA, 19 nt, Homo sapiens
  misc_RNA (1)...(19): siRNA sense strand
gcuggacaccuaccugaua

SEQ ID NO: 343516 - RNA, 19 nt, Homo sapiens
  misc_RNA (1)...(19): siRNA sense strand
cagaucaacuggaauggau

SEQ ID NO: 343517 - RNA, 19 nt, Homo sapiens
  misc_RNA (1)...(19): siRNA sense strand
gcaggaaauggcugaacua

SEQ ID NO: 343518 - RNA, 19 nt, Homo sapiens
  misc_RNA (1)...(19): siRNA sense strand
ccacagaucaacuggaaug

SEQ ID NO: 343519 - RNA, 19 nt, Homo sapiens
  misc_RNA (1)...(19): siRNA sense strand
caacaugcccacagaucaa

SEQ ID NO: 343520 - RNA, 19 nt, Homo sapiens
  misc_RNA (1)...(19): siRNA sense strand
ucaccaacaugcccacaga

SEQ ID NO: 343521 - RNA, 19 nt, Homo sapiens
  misc_RNA (1)...(19): siRNA sense strand
cagaggagauguggucaau

SEQ ID NO: 343522 - RNA, 19 nt, Homo sapiens
  misc_RNA (1)...(19): siRNA sense strand
caauugggcagauguguga

SEQ ID NO: 343523 - RNA, 19 nt, Homo sapiens
  misc_RNA (1)...(19): siRNA sense strand
ggagauguggucaauggaa

SEQ ID NO: 343524 - RNA, 19 nt, Homo sapiens
  misc_RNA (1)...(19): siRNA sense strand
guacagcuguguggugcuu

SEQ ID NO: 343525 - RNA, 19 nt, Homo sapiens
  misc_RNA (1)...(19): siRNA sense strand
ccaaagcgagcaagagaau

SEQ ID NO: 343526 - RNA, 19 nt, Homo sapiens
  misc_RNA (1)...(19): siRNA sense strand
gcuaugggcccuucaccaa

SEQ ID NO: 343527 - RNA, 19 nt, Homo sapiens
  misc_RNA (1)...(19): siRNA sense strand
gaaugagcaugauuuugaa

SEQ ID NO: 343528 - RNA, 19 nt, Homo sapiens
  misc_RNA (1)...(19): siRNA sense strand
ucagggcuauccucucaga

SEQ ID NO: 343529 - RNA, 19 nt, Homo sapiens
  misc_RNA (1)...(19): siRNA sense strand
agggauaccaugcaacaua

SEQ ID NO: 343530 - RNA, 19 nt, Homo sapiens
  misc_RNA (1)...(19): siRNA sense strand
gcuagaaaucuguugcuau

SEQ ID NO: 343531 - RNA, 19 nt, Homo sapiens
  misc_RNA (1)...(19): siRNA sense strand
ugaaugagcaugauuuuga

SEQ ID NO: 343532 - RNA, 19 nt, Homo sapiens
  misc_RNA (1)...(19): siRNA sense strand
ggcuagaaaucuguugcua

SEQ ID NO: 343533 - RNA, 19 nt, Homo sapiens
  misc_RNA (1)...(19): siRNA sense strand
ugaaacaagcgucucugaa

SEQ ID NO: 343534 - RNA, 19 nt, Homo sapiens
  misc_RNA (1)...(19): siRNA sense strand
aacauaaccugauaaagcu

SEQ ID NO: 343535 - RNA, 19 nt, Homo sapiens
  misc_RNA (1)...(19): siRNA sense strand
ugacccagucuauuaaaga

SEQ ID NO: 343536 - RNA, 19 nt, Homo sapiens
  misc_RNA (1)...(19): siRNA sense strand
gaacuagaagcuguguuag

SEQ ID NO: 343537 - RNA, 19 nt, Homo sapiens
  misc_RNA (1)...(19): siRNA sense strand
gugaaacaagcgucucuga

SEQ ID NO: 343538 - RNA, 19 nt, Homo sapiens
  misc_RNA (1)...(19): siRNA sense strand
ccaacaugcccacagauca

SEQ ID NO: 343539 - RNA, 19 nt, Homo sapiens
  misc_RNA (1)...(19): siRNA sense strand
uaugggcccuucaccaaca

SEQ ID NO: 343540 - RNA, 19 nt, Homo sapiens
  misc_RNA (1)...(19): siRNA sense strand
guccaaagcgagcaagaga

SEQ ID NO: 343541 - RNA, 19 nt, Homo sapiens
  misc_RNA (1)...(19): siRNA sense strand
cagaacaaagcacaucaga

SEQ ID NO: 343542 - RNA, 19 nt, Homo sapiens
  misc_RNA (1)...(19): siRNA sense strand
ccugcgaaauccagaacaa

SEQ ID NO: 343543 - RNA, 19 nt, Homo sapiens
  misc_RNA (1)...(19): siRNA sense strand
gaaaccaccaagguccaaa

SEQ ID NO: 343544 - RNA, 19 nt, Homo sapiens
  misc_RNA (1)...(19): siRNA sense strand
gauaaagcuccagcaggaa

SEQ ID NO: 343545 - RNA, 19 nt, Homo sapiens
  misc_RNA (1)...(19): siRNA sense strand
aaggagcuuucaucauuca

SEQ ID NO: 343546 - RNA, 19 nt, Homo sapiens
  misc_RNA (1)...(19): siRNA sense strand
ggugugagagugaaacaag

SEQ ID NO: 343547 - RNA, 19 nt, Homo sapiens
  misc_RNA (1)...(19): siRNA sense strand
gaaauggcugaacuagaag

SEQ ID NO: 343548 - RNA, 19 nt, Homo sapiens
  misc_RNA (1)...(19): siRNA sense strand
auaaagcuccagcaggaaa

SEQ ID NO: 343549 - RNA, 19 nt, Homo sapiens
  misc_RNA (1)...(19): siRNA sense strand
acccuuccaucauaaguga

SEQ ID NO: 343550 - RNA, 19 nt, Homo sapiens
  misc_RNA (1)...(19): siRNA sense strand
ggugacccagucuauuaaa

SEQ ID NO: 343551 - RNA, 19 nt, Homo sapiens
  misc_RNA (1)...(19): siRNA sense strand
cccagucuauuaaagaaag

SEQ ID NO: 343552 - RNA, 19 nt, Homo sapiens
  misc_RNA (1)...(19): siRNA sense strand
caucugggugugagaguga

SEQ ID NO: 343553 - RNA, 19 nt, Homo sapiens
  misc_RNA (1)...(19): siRNA sense strand
ccagucuauuaaagaaaga

SEQ ID NO: 343554 - RNA, 19 nt, Homo sapiens
  misc_RNA (1)...(19): siRNA sense strand
cgaaauccagaacaaagca

SEQ ID NO: 343555 - RNA, 19 nt, Homo sapiens
  misc_RNA (1)...(19): siRNA sense strand
aagagaaucccaggacaga

SEQ ID NO: 343556 - RNA, 19 nt, Homo sapiens
  misc_RNA (1)...(19): siRNA sense strand
gauguggucaauggaagaa

SEQ ID NO: 343557 - RNA, 19 nt, Homo sapiens
  misc_RNA (1)...(19): siRNA sense strand
ggaccugcgaaauccagaa

SEQ ID NO: 343558 - RNA, 19 nt, Homo sapiens
  misc_RNA (1)...(19): siRNA sense strand
gagcaugauuuugaaguca

SEQ ID NO: 343559 - RNA, 19 nt, Homo sapiens
  misc_RNA (1)...(19): siRNA sense strand
gugacccagucuauuaaag

SEQ ID NO: 343560 - RNA, 19 nt, Homo sapiens
  misc_RNA (1)...(19): siRNA sense strand
agaacaaagcacaucagaa

SEQ ID NO: 343561 - RNA, 19 nt, Homo sapiens
  misc_RNA (1)...(19): siRNA sense strand
uggaagaaaccaccaaggu

SEQ ID NO: 343562 - RNA, 19 nt, Homo sapiens
  misc_RNA (1)...(19): siRNA sense strand
ucaacuggaauggauggua

SEQ ID NO: 343563 - RNA, 19 nt, Homo sapiens
  misc_RNA (1)...(19): siRNA sense strand
ggaaauggcugaacuagaa

SEQ ID NO: 343564 - RNA, 19 nt, Homo sapiens
  misc_RNA (1)...(19): siRNA sense strand
gaacaaagcacaucagaaa

SEQ ID NO: 343565 - RNA, 19 nt, Homo sapiens
  misc_RNA (1)...(19): siRNA sense strand
cagcuacccuuccaucaua

SEQ ID NO: 343566 - RNA, 19 nt, Homo sapiens
  misc_RNA (1)...(19): siRNA sense strand
gggauaccaugcaacauaa

SEQ ID NO: 343567 - RNA, 19 nt, Homo sapiens
  misc_RNA (1)...(19): siRNA sense strand
gaggagauguggucaaugg

SEQ ID NO: 343568 - RNA, 19 nt, Homo sapiens
  misc_RNA (1)...(19): siRNA sense strand
gaaggagcuuucaucauuc

SEQ ID NO: 343569 - RNA, 19 nt, Homo sapiens
  misc_RNA (1)...(19): siRNA sense strand
cuagaaaucuguugcuaug

SEQ ID NO: 343570 - RNA, 19 nt, Homo sapiens
  misc_RNA (1)...(19): siRNA sense strand
gcucagggcuauccucuca

SEQ ID NO: 343571 - RNA, 19 nt, Homo sapiens
  misc_RNA (1)...(19): siRNA sense strand
aaacaagcgucucugaaga

SEQ ID NO: 343572 - RNA, 19 nt, Homo sapiens
  misc_RNA (1)...(19): siRNA sense strand
caacauaaccugauaaagc

SEQ ID NO: 343573 - RNA, 19 nt, Homo sapiens
  misc_RNA (1)...(19): siRNA sense strand
gaaacaagcgucucugaag

SEQ ID NO: 343574 - RNA, 19 nt, Homo sapiens
  misc_RNA (1)...(19): siRNA sense strand
gcagagggauaccaugcaa

SEQ ID NO: 343575 - RNA, 19 nt, Homo sapiens
  misc_RNA (1)...(19): siRNA sense strand
ugaacuagaagcuguguua

SEQ ID NO: 343576 - RNA, 19 nt, Homo sapiens
  misc_RNA (1)...(19): siRNA sense strand
gagaaucccaggacagaaa

SEQ ID NO: 343577 - RNA, 19 nt, Homo sapiens
  misc_RNA (1)...(19): siRNA sense strand
gcccacagaucaacuggaa

SEQ ID NO: 343578 - RNA, 19 nt, Homo sapiens
  misc_RNA (1)...(19): siRNA sense strand
gaagacugcucagggcuau

SEQ ID NO: 343579 - RNA, 19 nt, Homo sapiens
  misc_RNA (1)...(19): siRNA sense strand
gacccagucuauuaaagaa

SEQ ID NO: 343580 - RNA, 19 nt, Homo sapiens
  misc_RNA (1)...(19): siRNA sense strand
acuagaagcuguguuagaa

SEQ ID NO: 343581 - RNA, 19 nt, Homo sapiens
  misc_RNA (1)...(19): siRNA sense strand
caugcaacauaaccugaua

SEQ ID NO: 343582 - RNA, 19 nt, Homo sapiens
  misc_RNA (1)...(19): siRNA sense strand
gcuggacaccuaccugaua

SEQ ID NO: 343583 - RNA, 19 nt, Homo sapiens
  misc_RNA (1)...(19): siRNA sense strand
cagaucaacuggaauggau

SEQ ID NO: 343584 - RNA, 19 nt, Homo sapiens
  misc_RNA (1)...(19): siRNA sense strand
gcaggaaauggcugaacua

SEQ ID NO: 343585 - RNA, 19 nt, Homo sapiens
  misc_RNA (1)...(19): siRNA sense strand
ccacagaucaacuggaaug

SEQ ID NO: 343586 - RNA, 19 nt, Homo sapiens
  misc_RNA (1)...(19): siRNA sense strand
caacaugcccacagaucaa

SEQ ID NO: 343587 - RNA, 19 nt, Homo sapiens
  misc_RNA (1)...(19): siRNA sense strand
ucaccaacaugcccacaga

SEQ ID NO: 343588 - RNA, 19 nt, Homo sapiens
  misc_RNA (1)...(19): siRNA sense strand
cagaggagauguggucaau

SEQ ID NO: 343589 - RNA, 19 nt, Homo sapiens
  misc_RNA (1)...(19): siRNA sense strand
caauugggcagauguguga

SEQ ID NO: 343590 - RNA, 19 nt, Homo sapiens
  misc_RNA (1)...(19): siRNA sense strand
ggagauguggucaauggaa

SEQ ID NO: 343591 - RNA, 19 nt, Homo sapiens
  misc_RNA (1)...(19): siRNA sense strand
guacagcuguguggugcuu

SEQ ID NO: 343592 - RNA, 19 nt, Homo sapiens
  misc_RNA (1)...(19): siRNA sense strand
ccaaagcgagcaagagaau

SEQ ID NO: 343593 - RNA, 19 nt, Homo sapiens
  misc_RNA (1)...(19): siRNA sense strand
gcuaugggcccuucaccaa

SEQ ID NO: 343594 - RNA, 19 nt, Homo sapiens
  misc_RNA (1)...(19): siRNA sense strand
gaaugagcaugauuuugaa

SEQ ID NO: 343595 - RNA, 19 nt, Homo sapiens
  misc_RNA (1)...(19): siRNA sense strand
ucagggcuauccucucaga

SEQ ID NO: 343596 - RNA, 19 nt, Homo sapiens
  misc_RNA (1)...(19): siRNA sense strand
agggauaccaugcaacaua

SEQ ID NO: 343597 - RNA, 19 nt, Homo sapiens
  misc_RNA (1)...(19): siRNA sense strand
gcuagaaaucuguugcuau

SEQ ID NO: 343598 - RNA, 19 nt, Homo sapiens
  misc_RNA (1)...(19): siRNA sense strand
ugaaugagcaugauuuuga

SEQ ID NO: 343599 - RNA, 19 nt, Homo sapiens
  misc_RNA (1)...(19): siRNA sense strand
ggcuagaaaucuguugcua

SEQ ID NO: 343600 - RNA, 19 nt, Homo sapiens
  misc_RNA (1)...(19): siRNA sense strand
ugaaacaagcgucucugaa

SEQ ID NO: 343601 - RNA, 19 nt, Homo sapiens
  misc_RNA (1)...(19): siRNA sense strand
aacauaaccugauaaagcu

SEQ ID NO: 343602 - RNA, 19 nt, Homo sapiens
  misc_RNA (1)...(19): siRNA sense strand
ugacccagucuauuaaaga

SEQ ID NO: 343603 - RNA, 19 nt, Homo sapiens
  misc_RNA (1)...(19): siRNA sense strand
gaacuagaagcuguguuag

SEQ ID NO: 343604 - RNA, 19 nt, Homo sapiens
  misc_RNA (1)...(19): siRNA sense strand
gugaaacaagcgucucuga

SEQ ID NO: 343605 - RNA, 19 nt, Homo sapiens
  misc_RNA (1)...(19): siRNA sense strand
ccaacaugcccacagauca

SEQ ID NO: 343606 - RNA, 19 nt, Homo sapiens
  misc_RNA (1)...(19): siRNA sense strand
uaugggcccuucaccaaca

SEQ ID NO: 343607 - RNA, 19 nt, Homo sapiens
  misc_RNA (1)...(19): siRNA sense strand
guccaaagcgagcaagaga

SEQ ID NO: 343608 - RNA, 19 nt, Homo sapiens
  misc_RNA (1)...(19): siRNA sense strand
cagaacaaagcacaucaga

SEQ ID NO: 343609 - RNA, 19 nt, Homo sapiens
  misc_RNA (1)...(19): siRNA sense strand
ccugcgaaauccagaacaa

SEQ ID NO: 343610 - RNA, 19 nt, Homo sapiens
  misc_RNA (1)...(19): siRNA sense strand
gaaaccaccaagguccaaa

SEQ ID NO: 343611 - RNA, 19 nt, Homo sapiens
  misc_RNA (1)...(19): siRNA sense strand
gauaaagcuccagcaggaa

SEQ ID NO: 343612 - RNA, 19 nt, Homo sapiens
  misc_RNA (1)...(19): siRNA sense strand
aaggagcuuucaucauuca

SEQ ID NO: 343613 - RNA, 19 nt, Homo sapiens
  misc_RNA (1)...(19): siRNA sense strand
ggugugagagugaaacaag

SEQ ID NO: 343614 - RNA, 19 nt, Homo sapiens
  misc_RNA (1)...(19): siRNA sense strand
gaaauggcugaacuagaag

SEQ ID NO: 343615 - RNA, 19 nt, Homo sapiens
  misc_RNA (1)...(19): siRNA sense strand
auaaagcuccagcaggaaa

SEQ ID NO: 343616 - RNA, 19 nt, Homo sapiens
  misc_RNA (1)...(19): siRNA sense strand
acccuuccaucauaaguga

SEQ ID NO: 343617 - RNA, 19 nt, Homo sapiens
  misc_RNA (1)...(19): siRNA sense strand
ggugacccagucuauuaaa

SEQ ID NO: 343618 - RNA, 19 nt, Homo sapiens
  misc_RNA (1)...(19): siRNA sense strand
cccagucuauuaaagaaag

SEQ ID NO: 343619 - RNA, 19 nt, Homo sapiens
  misc_RNA (1)...(19): siRNA sense strand
caucugggugugagaguga

SEQ ID NO: 343620 - RNA, 19 nt, Homo sapiens
  misc_RNA (1)...(19): siRNA sense strand
ccagucuauuaaagaaaga

SEQ ID NO: 343621 - RNA, 19 nt, Homo sapiens
  misc_RNA (1)...(19): siRNA sense strand
cgaaauccagaacaaagca

SEQ ID NO: 343622 - RNA, 19 nt, Homo sapiens
  misc_RNA (1)...(19): siRNA sense strand
aagagaaucccaggacaga

SEQ ID NO: 343623 - RNA, 19 nt, Homo sapiens
  misc_RNA (1)...(19): siRNA sense strand
gauguggucaauggaagaa

SEQ ID NO: 343624 - RNA, 19 nt, Homo sapiens
  misc_RNA (1)...(19): siRNA sense strand
ggaccugcgaaauccagaa

SEQ ID NO: 343625 - RNA, 19 nt, Homo sapiens
  misc_RNA (1)...(19): siRNA sense strand
gagcaugauuuugaaguca

SEQ ID NO: 343626 - RNA, 19 nt, Homo sapiens
  misc_RNA (1)...(19): siRNA sense strand
gugacccagucuauuaaag

SEQ ID NO: 343627 - RNA, 19 nt, Homo sapiens
  misc_RNA (1)...(19): siRNA sense strand
agaacaaagcacaucagaa

SEQ ID NO: 343628 - RNA, 19 nt, Homo sapiens
  misc_RNA (1)...(19): siRNA sense strand
uggaagaaaccaccaaggu

SEQ ID NO: 343629 - RNA, 19 nt, Homo sapiens
  misc_RNA (1)...(19): siRNA sense strand
ucaacuggaauggauggua

SEQ ID NO: 343630 - RNA, 19 nt, Homo sapiens
  misc_RNA (1)...(19): siRNA sense strand
ggaaauggcugaacuagaa

SEQ ID NO: 343631 - RNA, 19 nt, Homo sapiens
  misc_RNA (1)...(19): siRNA sense strand
gaacaaagcacaucagaaa

SEQ ID NO: 343632 - RNA, 19 nt, Homo sapiens
  misc_RNA (1)...(19): siRNA sense strand
cagcuacccuuccaucaua

SEQ ID NO: 343633 - RNA, 19 nt, Homo sapiens
  misc_RNA (1)...(19): siRNA sense strand
gggauaccaugcaacauaa

SEQ ID NO: 343634 - RNA, 19 nt, Homo sapiens
  misc_RNA (1)...(19): siRNA sense strand
gaggagauguggucaaugg

SEQ ID NO: 343635 - RNA, 19 nt, Homo sapiens
  misc_RNA (1)...(19): siRNA sense strand
gaaggagcuuucaucauuc

SEQ ID NO: 343636 - RNA, 19 nt, Homo sapiens
  misc_RNA (1)...(19): siRNA sense strand
cuagaaaucuguugcuaug

SEQ ID NO: 343637 - RNA, 19 nt, Homo sapiens
  misc_RNA (1)...(19): siRNA sense strand
gcucagggcuauccucuca

SEQ ID NO: 343638 - RNA, 19 nt, Homo sapiens
  misc_RNA (1)...(19): siRNA sense strand
aaacaagcgucucugaaga

SEQ ID NO: 343639 - RNA, 19 nt, Homo sapiens
  misc_RNA (1)...(19): siRNA sense strand
caacauaaccugauaaagc

SEQ ID NO: 343640 - RNA, 19 nt, Homo sapiens
  misc_RNA (1)...(19): siRNA sense strand
gaaacaagcgucucugaag

SEQ ID NO: 343641 - RNA, 19 nt, Homo sapiens
  misc_RNA (1)...(19): siRNA sense strand
gcagagggauaccaugcaa

SEQ ID NO: 343642 - RNA, 19 nt, Homo sapiens
  misc_RNA (1)...(19): siRNA sense strand
ugaacuagaagcuguguua

SEQ ID NO: 343643 - RNA, 19 nt, Homo sapiens
  misc_RNA (1)...(19): siRNA sense strand
gagaaucccaggacagaaa

SEQ ID NO: 343644 - RNA, 19 nt, Homo sapiens
  misc_RNA (1)...(19): siRNA sense strand
gcccacagaucaacuggaa

SEQ ID NO: 343645 - RNA, 19 nt, Homo sapiens
  misc_RNA (1)...(19): siRNA sense strand
gaagacugcucagggcuau

SEQ ID NO: 343646 - RNA, 19 nt, Homo sapiens
  misc_RNA (1)...(19): siRNA sense strand
gacccagucuauuaaagaa

SEQ ID NO: 343647 - RNA, 19 nt, Homo sapiens
  misc_RNA (1)...(19): siRNA sense strand
acuagaagcuguguuagaa

SEQ ID NO: 343648 - RNA, 19 nt, Homo sapiens
  misc_RNA (1)...(19): siRNA sense strand
caugcaacauaaccugaua

SEQ ID NO: 343649 - RNA, 19 nt, Homo sapiens
  misc_RNA (1)...(19): siRNA sense strand
gcuggacaccuaccugaua

SEQ ID NO: 343650 - RNA, 19 nt, Homo sapiens
  misc_RNA (1)...(19): siRNA sense strand
cagaucaacuggaauggau

SEQ ID NO: 343651 - RNA, 19 nt, Homo sapiens
  misc_RNA (1)...(19): siRNA sense strand
gcaggaaauggcugaacua

SEQ ID NO: 343652 - RNA, 19 nt, Homo sapiens
  misc_RNA (1)...(19): siRNA sense strand
ccacagaucaacuggaaug

SEQ ID NO: 343653 - RNA, 19 nt, Homo sapiens
  misc_RNA (1)...(19): siRNA sense strand
caacaugcccacagaucaa

SEQ ID NO: 343654 - RNA, 19 nt, Homo sapiens
  misc_RNA (1)...(19): siRNA sense strand
ucaccaacaugcccacaga

SEQ ID NO: 343655 - RNA, 19 nt, Homo sapiens
  misc_RNA (1)...(19): siRNA sense strand
cagaggagauguggucaau

SEQ ID NO: 343656 - RNA, 19 nt, Homo sapiens
  misc_RNA (1)...(19): siRNA sense strand
caauugggcagauguguga

SEQ ID NO: 343657 - RNA, 19 nt, Homo sapiens
  misc_RNA (1)...(19): siRNA sense strand
ggagauguggucaauggaa

SEQ ID NO: 343658 - RNA, 19 nt, Homo sapiens
  misc_RNA (1)...(19): siRNA sense strand
guacagcuguguggugcuu

SEQ ID NO: 343659 - RNA, 19 nt, Homo sapiens
  misc_RNA (1)...(19): siRNA sense strand
ccaaagcgagcaagagaau

SEQ ID NO: 343660 - RNA, 19 nt, Homo sapiens
  misc_RNA (1)...(19): siRNA sense strand
gcuaugggcccuucaccaa

SEQ ID NO: 343661 - RNA, 19 nt, Homo sapiens
  misc_RNA (1)...(19): siRNA sense strand
gaaugagcaugauuuugaa

SEQ ID NO: 343662 - RNA, 19 nt, Homo sapiens
  misc_RNA (1)...(19): siRNA sense strand
ucagggcuauccucucaga

SEQ ID NO: 343663 - RNA, 19 nt, Homo sapiens
  misc_RNA (1)...(19): siRNA sense strand
agggauaccaugcaacaua

SEQ ID NO: 343664 - RNA, 19 nt, Homo sapiens
  misc_RNA (1)...(19): siRNA sense strand
gcuagaaaucuguugcuau

SEQ ID NO: 343665 - RNA, 19 nt, Homo sapiens
  misc_RNA (1)...(19): siRNA sense strand
ugaaugagcaugauuuuga

SEQ ID NO: 343666 - RNA, 19 nt, Homo sapiens
  misc_RNA (1)...(19): siRNA sense strand
ggcuagaaaucuguugcua

SEQ ID NO: 343667 - RNA, 19 nt, Homo sapiens
  misc_RNA (1)...(19): siRNA sense strand
ugaaacaagcgucucugaa

SEQ ID NO: 343668 - RNA, 19 nt, Homo sapiens
  misc_RNA (1)...(19): siRNA sense strand
aacauaaccugauaaagcu

SEQ ID NO: 343669 - RNA, 19 nt, Homo sapiens
  misc_RNA (1)...(19): siRNA sense strand
ugacccagucuauuaaaga

SEQ ID NO: 343670 - RNA, 19 nt, Homo sapiens
  misc_RNA (1)...(19): siRNA sense strand
gaacuagaagcuguguuag

SEQ ID NO: 343671 - RNA, 19 nt, Homo sapiens
  misc_RNA (1)...(19): siRNA sense strand
gugaaacaagcgucucuga

SEQ ID NO: 343672 - RNA, 19 nt, Homo sapiens
  misc_RNA (1)...(19): siRNA sense strand
ccaacaugcccacagauca

SEQ ID NO: 343673 - RNA, 19 nt, Homo sapiens
  misc_RNA (1)...(19): siRNA sense strand
uaugggcccuucaccaaca

SEQ ID NO: 343674 - RNA, 19 nt, Homo sapiens
  misc_RNA (1)...(19): siRNA sense strand
guccaaagcgagcaagaga

SEQ ID NO: 343675 - RNA, 19 nt, Homo sapiens
  misc_RNA (1)...(19): siRNA sense strand
cagaacaaagcacaucaga

SEQ ID NO: 343676 - RNA, 19 nt, Homo sapiens
  misc_RNA (1)...(19): siRNA sense strand
ccugcgaaauccagaacaa

SEQ ID NO: 343677 - RNA, 19 nt, Homo sapiens
  misc_RNA (1)...(19): siRNA sense strand
gaaaccaccaagguccaaa

SEQ ID NO: 343678 - RNA, 19 nt, Homo sapiens
  misc_RNA (1)...(19): siRNA sense strand
gauaaagcuccagcaggaa

SEQ ID NO: 343679 - RNA, 19 nt, Homo sapiens
  misc_RNA (1)...(19): siRNA sense strand
aaggagcuuucaucauuca

SEQ ID NO: 343680 - RNA, 19 nt, Homo sapiens
  misc_RNA (1)...(19): siRNA sense strand
ggugugagagugaaacaag

SEQ ID NO: 343681 - RNA, 19 nt, Homo sapiens
  misc_RNA (1)...(19): siRNA sense strand
gaaauggcugaacuagaag

SEQ ID NO: 343682 - RNA, 19 nt, Homo sapiens
  misc_RNA (1)...(19): siRNA sense strand
auaaagcuccagcaggaaa

SEQ ID NO: 343683 - RNA, 19 nt, Homo sapiens
  misc_RNA (1)...(19): siRNA sense strand
acccuuccaucauaaguga

SEQ ID NO: 343684 - RNA, 19 nt, Homo sapiens
  misc_RNA (1)...(19): siRNA sense strand
ggugacccagucuauuaaa

SEQ ID NO: 343685 - RNA, 19 nt, Homo sapiens
  misc_RNA (1)...(19): siRNA sense strand
cccagucuauuaaagaaag

SEQ ID NO: 343686 - RNA, 19 nt, Homo sapiens
  misc_RNA (1)...(19): siRNA sense strand
caucugggugugagaguga

SEQ ID NO: 343687 - RNA, 19 nt, Homo sapiens
  misc_RNA (1)...(19): siRNA sense strand
ccagucuauuaaagaaaga

SEQ ID NO: 343688 - RNA, 19 nt, Homo sapiens
  misc_RNA (1)...(19): siRNA sense strand
cgaaauccagaacaaagca

SEQ ID NO: 343689 - RNA, 19 nt, Homo sapiens
  misc_RNA (1)...(19): siRNA sense strand
aagagaaucccaggacaga

SEQ ID NO: 343690 - RNA, 19 nt, Homo sapiens
  misc_RNA (1)...(19): siRNA sense strand
gauguggucaauggaagaa

SEQ ID NO: 343691 - RNA, 19 nt, Homo sapiens
  misc_RNA (1)...(19): siRNA sense strand
ggaccugcgaaauccagaa

SEQ ID NO: 343692 - RNA, 19 nt, Homo sapiens
  misc_RNA (1)...(19): siRNA sense strand
gagcaugauuuugaaguca

SEQ ID NO: 343693 - RNA, 19 nt, Homo sapiens
  misc_RNA (1)...(19): siRNA sense strand
gugacccagucuauuaaag

SEQ ID NO: 343694 - RNA, 19 nt, Homo sapiens
  misc_RNA (1)...(19): siRNA sense strand
agaacaaagcacaucagaa

SEQ ID NO: 343695 - RNA, 19 nt, Homo sapiens
  misc_RNA (1)...(19): siRNA sense strand
uggaagaaaccaccaaggu

SEQ ID NO: 343696 - RNA, 19 nt, Homo sapiens
  misc_RNA (1)...(19): siRNA sense strand
ucaacuggaauggauggua

SEQ ID NO: 343697 - RNA, 19 nt, Homo sapiens
  misc_RNA (1)...(19): siRNA sense strand
ggaaauggcugaacuagaa

SEQ ID NO: 343698 - RNA, 19 nt, Homo sapiens
  misc_RNA (1)...(19): siRNA sense strand
gaacaaagcacaucagaaa

SEQ ID NO: 343699 - RNA, 19 nt, Homo sapiens
  misc_RNA (1)...(19): siRNA sense strand
cagcuacccuuccaucaua

SEQ ID NO: 343700 - RNA, 19 nt, Homo sapiens
  misc_RNA (1)...(19): siRNA sense strand
gggauaccaugcaacauaa

SEQ ID NO: 343701 - RNA, 19 nt, Homo sapiens
  misc_RNA (1)...(19): siRNA sense strand
gcucagggcuauccucuca

SEQ ID NO: 343702 - RNA, 19 nt, Homo sapiens
  misc_RNA (1)...(19): siRNA sense strand
aaacaagcgucucugaaga

SEQ ID NO: 343703 - RNA, 19 nt, Homo sapiens
  misc_RNA (1)...(19): siRNA sense strand
caacauaaccugauaaagc

SEQ ID NO: 343704 - RNA, 19 nt, Homo sapiens
  misc_RNA (1)...(19): siRNA sense strand
gaaacaagcgucucugaag

SEQ ID NO: 343705 - RNA, 19 nt, Homo sapiens
  misc_RNA (1)...(19): siRNA sense strand
gcagagggauaccaugcaa

SEQ ID NO: 343706 - RNA, 19 nt, Homo sapiens
  misc_RNA (1)...(19): siRNA sense strand
ugaacuagaagcuguguua

SEQ ID NO: 343707 - RNA, 19 nt, Homo sapiens
  misc_RNA (1)...(19): siRNA sense strand
gaagacugcucagggcuau

SEQ ID NO: 343708 - RNA, 19 nt, Homo sapiens
  misc_RNA (1)...(19): siRNA sense strand
acuagaagcuguguuagaa

SEQ ID NO: 343709 - RNA, 19 nt, Homo sapiens
  misc_RNA (1)...(19): siRNA sense strand
caugcaacauaaccugaua

SEQ ID NO: 343710 - RNA, 19 nt, Homo sapiens
  misc_RNA (1)...(19): siRNA sense strand
gcaggaaauggcugaacua

SEQ ID NO: 343711 - RNA, 19 nt, Homo sapiens
  misc_RNA (1)...(19): siRNA sense strand
ucagggcuauccucucaga

SEQ ID NO: 343712 - RNA, 19 nt, Homo sapiens
  misc_RNA (1)...(19): siRNA sense strand
agggauaccaugcaacaua

SEQ ID NO: 343713 - RNA, 19 nt, Homo sapiens
  misc_RNA (1)...(19): siRNA sense strand
ugaaacaagcgucucugaa

SEQ ID NO: 343714 - RNA, 19 nt, Homo sapiens
  misc_RNA (1)...(19): siRNA sense strand
aacauaaccugauaaagcu

SEQ ID NO: 343715 - RNA, 19 nt, Homo sapiens
  misc_RNA (1)...(19): siRNA sense strand
gaacuagaagcuguguuag

SEQ ID NO: 343716 - RNA, 19 nt, Homo sapiens
  misc_RNA (1)...(19): siRNA sense strand
cagaacaaagcacaucaga

SEQ ID NO: 343717 - RNA, 19 nt, Homo sapiens
  misc_RNA (1)...(19): siRNA sense strand
gugaaacaagcgucucuga

SEQ ID NO: 343718 - RNA, 19 nt, Homo sapiens
  misc_RNA (1)...(19): siRNA sense strand
ccugcgaaauccagaacaa

SEQ ID NO: 343719 - RNA, 19 nt, Homo sapiens
  misc_RNA (1)...(19): siRNA sense strand
gauaaagcuccagcaggaa

SEQ ID NO: 343720 - RNA, 19 nt, Homo sapiens
  misc_RNA (1)...(19): siRNA sense strand
ggugugagagugaaacaag

SEQ ID NO: 343721 - RNA, 19 nt, Homo sapiens
  misc_RNA (1)...(19): siRNA sense strand
auaaagcuccagcaggaaa

SEQ ID NO: 343722 - RNA, 19 nt, Homo sapiens
  misc_RNA (1)...(19): siRNA sense strand
acccuuccaucauaaguga

SEQ ID NO: 343723 - RNA, 19 nt, Homo sapiens
  misc_RNA (1)...(19): siRNA sense strand
gaaauggcugaacuagaag

SEQ ID NO: 343724 - RNA, 19 nt, Homo sapiens
  misc_RNA (1)...(19): siRNA sense strand
caucugggugugagaguga

SEQ ID NO: 343725 - RNA, 19 nt, Homo sapiens
  misc_RNA (1)...(19): siRNA sense strand
cgaaauccagaacaaagca

SEQ ID NO: 343726 - RNA, 19 nt, Homo sapiens
  misc_RNA (1)...(19): siRNA sense strand
ggaccugcgaaauccagaa

SEQ ID NO: 343727 - RNA, 19 nt, Homo sapiens
  misc_RNA (1)...(19): siRNA sense strand
agaacaaagcacaucagaa

SEQ ID NO: 343728 - RNA, 19 nt, Homo sapiens
  misc_RNA (1)...(19): siRNA sense strand
ggaaauggcugaacuagaa

SEQ ID NO: 343729 - RNA, 19 nt, Homo sapiens
  misc_RNA (1)...(19): siRNA sense strand
gaacaaagcacaucagaaa

SEQ ID NO: 343730 - RNA, 19 nt, Homo sapiens
  misc_RNA (1)...(19): siRNA sense strand
cagcuacccuuccaucaua

SEQ ID NO: 343731 - RNA, 19 nt, Homo sapiens
  misc_RNA (1)...(19): siRNA sense strand
gggauaccaugcaacauaa

SEQ ID NO: 343732 - RNA, 19 nt, Homo sapiens
  misc_RNA (1)...(19): siRNA sense strand
gaggagauguggucaaugg

SEQ ID NO: 343733 - RNA, 19 nt, Homo sapiens
  misc_RNA (1)...(19): siRNA sense strand
gaaggagcuuucaucauuc

SEQ ID NO: 343734 - RNA, 19 nt, Homo sapiens
  misc_RNA (1)...(19): siRNA sense strand
cuagaaaucuguugcuaug

SEQ ID NO: 343735 - RNA, 19 nt, Homo sapiens
  misc_RNA (1)...(19): siRNA sense strand
gcucagggcuauccucuca

SEQ ID NO: 343736 - RNA, 19 nt, Homo sapiens
  misc_RNA (1)...(19): siRNA sense strand
aaacaagcgucucugaaga

SEQ ID NO: 343737 - RNA, 19 nt, Homo sapiens
  misc_RNA (1)...(19): siRNA sense strand
caacauaaccugauaaagc

SEQ ID NO: 343738 - RNA, 19 nt, Homo sapiens
  misc_RNA (1)...(19): siRNA sense strand
gaaacaagcgucucugaag

SEQ ID NO: 343739 - RNA, 19 nt, Homo sapiens
  misc_RNA (1)...(19): siRNA sense strand
gcagagggauaccaugcaa

SEQ ID NO: 343740 - RNA, 19 nt, Homo sapiens
  misc_RNA (1)...(19): siRNA sense strand
ugaacuagaagcuguguua

SEQ ID NO: 343741 - RNA, 19 nt, Homo sapiens
  misc_RNA (1)...(19): siRNA sense strand
gagaaucccaggacagaaa

SEQ ID NO: 343742 - RNA, 19 nt, Homo sapiens
  misc_RNA (1)...(19): siRNA sense strand
gcccacagaucaacuggaa

SEQ ID NO: 343743 - RNA, 19 nt, Homo sapiens
  misc_RNA (1)...(19): siRNA sense strand
gaagacugcucagggcuau

SEQ ID NO: 343744 - RNA, 19 nt, Homo sapiens
  misc_RNA (1)...(19): siRNA sense strand
gacccagucuauuaaagaa

SEQ ID NO: 343745 - RNA, 19 nt, Homo sapiens
  misc_RNA (1)...(19): siRNA sense strand
acuagaagcuguguuagaa

SEQ ID NO: 343746 - RNA, 19 nt, Homo sapiens
  misc_RNA (1)...(19): siRNA sense strand
caugcaacauaaccugaua

SEQ ID NO: 343747 - RNA, 19 nt, Homo sapiens
  misc_RNA (1)...(19): siRNA sense strand
gcuggacaccuaccugaua

SEQ ID NO: 343748 - RNA, 19 nt, Homo sapiens
  misc_RNA (1)...(19): siRNA sense strand
cagaucaacuggaauggau

SEQ ID NO: 343749 - RNA, 19 nt, Homo sapiens
  misc_RNA (1)...(19): siRNA sense strand
gcaggaaauggcugaacua

SEQ ID NO: 343750 - RNA, 19 nt, Homo sapiens
  misc_RNA (1)...(19): siRNA sense strand
ccacagaucaacuggaaug

SEQ ID NO: 343751 - RNA, 19 nt, Homo sapiens
  misc_RNA (1)...(19): siRNA sense strand
caacaugcccacagaucaa

SEQ ID NO: 343752 - RNA, 19 nt, Homo sapiens
  misc_RNA (1)...(19): siRNA sense strand
ucaccaacaugcccacaga

SEQ ID NO: 343753 - RNA, 19 nt, Homo sapiens
  misc_RNA (1)...(19): siRNA sense strand
cagaggagauguggucaau

SEQ ID NO: 343754 - RNA, 19 nt, Homo sapiens
  misc_RNA (1)...(19): siRNA sense strand
caauugggcagauguguga

SEQ ID NO: 343755 - RNA, 19 nt, Homo sapiens
  misc_RNA (1)...(19): siRNA sense strand
ggagauguggucaauggaa

SEQ ID NO: 343756 - RNA, 19 nt, Homo sapiens
  misc_RNA (1)...(19): siRNA sense strand
guacagcuguguggugcuu

SEQ ID NO: 343757 - RNA, 19 nt, Homo sapiens
  misc_RNA (1)...(19): siRNA sense strand
ccaaagcgagcaagagaau

SEQ ID NO: 343758 - RNA, 19 nt, Homo sapiens
  misc_RNA (1)...(19): siRNA sense strand
gcuaugggcccuucaccaa

SEQ ID NO: 343759 - RNA, 19 nt, Homo sapiens
  misc_RNA (1)...(19): siRNA sense strand
gaaugagcaugauuuugaa

SEQ ID NO: 343760 - RNA, 19 nt, Homo sapiens
  misc_RNA (1)...(19): siRNA sense strand
ucagggcuauccucucaga

SEQ ID NO: 343761 - RNA, 19 nt, Homo sapiens
  misc_RNA (1)...(19): siRNA sense strand
agggauaccaugcaacaua

SEQ ID NO: 343762 - RNA, 19 nt, Homo sapiens
  misc_RNA (1)...(19): siRNA sense strand
gcuagaaaucuguugcuau

SEQ ID NO: 343763 - RNA, 19 nt, Homo sapiens
  misc_RNA (1)...(19): siRNA sense strand
ugaaugagcaugauuuuga

SEQ ID NO: 343764 - RNA, 19 nt, Homo sapiens
  misc_RNA (1)...(19): siRNA sense strand
ggcuagaaaucuguugcua

SEQ ID NO: 343765 - RNA, 19 nt, Homo sapiens
  misc_RNA (1)...(19): siRNA sense strand
ugaaacaagcgucucugaa

SEQ ID NO: 343766 - RNA, 19 nt, Homo sapiens
  misc_RNA (1)...(19): siRNA sense strand
aacauaaccugauaaagcu

SEQ ID NO: 343767 - RNA, 19 nt, Homo sapiens
  misc_RNA (1)...(19): siRNA sense strand
ugacccagucuauuaaaga

SEQ ID NO: 343768 - RNA, 19 nt, Homo sapiens
  misc_RNA (1)...(19): siRNA sense strand
gaacuagaagcuguguuag

SEQ ID NO: 343769 - RNA, 19 nt, Homo sapiens
  misc_RNA (1)...(19): siRNA sense strand
gugaaacaagcgucucuga

SEQ ID NO: 343770 - RNA, 19 nt, Homo sapiens
  misc_RNA (1)...(19): siRNA sense strand
ccaacaugcccacagauca

SEQ ID NO: 343771 - RNA, 19 nt, Homo sapiens
  misc_RNA (1)...(19): siRNA sense strand
uaugggcccuucaccaaca

SEQ ID NO: 343772 - RNA, 19 nt, Homo sapiens
  misc_RNA (1)...(19): siRNA sense strand
guccaaagcgagcaagaga

SEQ ID NO: 343773 - RNA, 19 nt, Homo sapiens
  misc_RNA (1)...(19): siRNA sense strand
cagaacaaagcacaucaga

SEQ ID NO: 343774 - RNA, 19 nt, Homo sapiens
  misc_RNA (1)...(19): siRNA sense strand
ccugcgaaauccagaacaa

SEQ ID NO: 343775 - RNA, 19 nt, Homo sapiens
  misc_RNA (1)...(19): siRNA sense strand
gaaaccaccaagguccaaa

SEQ ID NO: 343776 - RNA, 19 nt, Homo sapiens
  misc_RNA (1)...(19): siRNA sense strand
gauaaagcuccagcaggaa

SEQ ID NO: 343777 - RNA, 19 nt, Homo sapiens
  misc_RNA (1)...(19): siRNA sense strand
aaggagcuuucaucauuca

SEQ ID NO: 343778 - RNA, 19 nt, Homo sapiens
  misc_RNA (1)...(19): siRNA sense strand
ggugugagagugaaacaag

SEQ ID NO: 343779 - RNA, 19 nt, Homo sapiens
  misc_RNA (1)...(19): siRNA sense strand
gaaauggcugaacuagaag

SEQ ID NO: 343780 - RNA, 19 nt, Homo sapiens
  misc_RNA (1)...(19): siRNA sense strand
auaaagcuccagcaggaaa

SEQ ID NO: 343781 - RNA, 19 nt, Homo sapiens
  misc_RNA (1)...(19): siRNA sense strand
acccuuccaucauaaguga

SEQ ID NO: 343782 - RNA, 19 nt, Homo sapiens
  misc_RNA (1)...(19): siRNA sense strand
ggugacccagucuauuaaa

SEQ ID NO: 343783 - RNA, 19 nt, Homo sapiens
  misc_RNA (1)...(19): siRNA sense strand
cccagucuauuaaagaaag

SEQ ID NO: 343784 - RNA, 19 nt, Homo sapiens
  misc_RNA (1)...(19): siRNA sense strand
caucugggugugagaguga

SEQ ID NO: 343785 - RNA, 19 nt, Homo sapiens
  misc_RNA (1)...(19): siRNA sense strand
ccagucuauuaaagaaaga

SEQ ID NO: 343786 - RNA, 19 nt, Homo sapiens
  misc_RNA (1)...(19): siRNA sense strand
cgaaauccagaacaaagca

SEQ ID NO: 343787 - RNA, 19 nt, Homo sapiens
  misc_RNA (1)...(19): siRNA sense strand
aagagaaucccaggacaga

SEQ ID NO: 343788 - RNA, 19 nt, Homo sapiens
  misc_RNA (1)...(19): siRNA sense strand
gauguggucaauggaagaa

SEQ ID NO: 343789 - RNA, 19 nt, Homo sapiens
  misc_RNA (1)...(19): siRNA sense strand
ggaccugcgaaauccagaa

SEQ ID NO: 343790 - RNA, 19 nt, Homo sapiens
  misc_RNA (1)...(19): siRNA sense strand
gagcaugauuuugaaguca

SEQ ID NO: 343791 - RNA, 19 nt, Homo sapiens
  misc_RNA (1)...(19): siRNA sense strand
gugacccagucuauuaaag

SEQ ID NO: 343792 - RNA, 19 nt, Homo sapiens
  misc_RNA (1)...(19): siRNA sense strand
agaacaaagcacaucagaa

SEQ ID NO: 343793 - RNA, 19 nt, Homo sapiens
  misc_RNA (1)...(19): siRNA sense strand
uggaagaaaccaccaaggu

SEQ ID NO: 343794 - RNA, 19 nt, Homo sapiens
  misc_RNA (1)...(19): siRNA sense strand
ucaacuggaauggauggua

SEQ ID NO: 343795 - RNA, 19 nt, Homo sapiens
  misc_RNA (1)...(19): siRNA sense strand
ggaaauggcugaacuagaa

SEQ ID NO: 343796 - RNA, 19 nt, Homo sapiens
  misc_RNA (1)...(19): siRNA sense strand
gaacaaagcacaucagaaa

SEQ ID NO: 343797 - RNA, 19 nt, Homo sapiens
  misc_RNA (1)...(19): siRNA sense strand
cagcuacccuuccaucaua

SEQ ID NO: 343798 - RNA, 19 nt, Homo sapiens
  misc_RNA (1)...(19): siRNA sense strand
gggauaccaugcaacauaa

SEQ ID NO: 343799 - RNA, 19 nt, Homo sapiens
  misc_RNA (1)...(19): siRNA sense strand
gaggagauguggucaaugg

SEQ ID NO: 343800 - RNA, 19 nt, Homo sapiens
  misc_RNA (1)...(19): siRNA sense strand
gaaggagcuuucaucauuc

SEQ ID NO: 343801 - RNA, 19 nt, Homo sapiens
  misc_RNA (1)...(19): siRNA sense strand
cuagaaaucuguugcuaug

SEQ ID NO: 343802 - RNA, 19 nt, Homo sapiens
  misc_RNA (1)...(19): siRNA sense strand
gcucagggcuauccucuca

SEQ ID NO: 343803 - RNA, 19 nt, Homo sapiens
  misc_RNA (1)...(19): siRNA sense strand
aaacaagcgucucugaaga

SEQ ID NO: 343804 - RNA, 19 nt, Homo sapiens
  misc_RNA (1)...(19): siRNA sense strand
caacauaaccugauaaagc

SEQ ID NO: 343805 - RNA, 19 nt, Homo sapiens
  misc_RNA (1)...(19): siRNA sense strand
gaaacaagcgucucugaag

SEQ ID NO: 343806 - RNA, 19 nt, Homo sapiens
  misc_RNA (1)...(19): siRNA sense strand
gcagagggauaccaugcaa

SEQ ID NO: 343807 - RNA, 19 nt, Homo sapiens
  misc_RNA (1)...(19): siRNA sense strand
ugaacuagaagcuguguua

SEQ ID NO: 343808 - RNA, 19 nt, Homo sapiens
  misc_RNA (1)...(19): siRNA sense strand
gagaaucccaggacagaaa

SEQ ID NO: 343809 - RNA, 19 nt, Homo sapiens
  misc_RNA (1)...(19): siRNA sense strand
gcccacagaucaacuggaa

SEQ ID NO: 343810 - RNA, 19 nt, Homo sapiens
  misc_RNA (1)...(19): siRNA sense strand
gaagacugcucagggcuau

SEQ ID NO: 343811 - RNA, 19 nt, Homo sapiens
  misc_RNA (1)...(19): siRNA sense strand
gacccagucuauuaaagaa

SEQ ID NO: 343812 - RNA, 19 nt, Homo sapiens
  misc_RNA (1)...(19): siRNA sense strand
acuagaagcuguguuagaa

SEQ ID NO: 343813 - RNA, 19 nt, Homo sapiens
  misc_RNA (1)...(19): siRNA sense strand
caugcaacauaaccugaua

SEQ ID NO: 343814 - RNA, 19 nt, Homo sapiens
  misc_RNA (1)...(19): siRNA sense strand
gcuggacaccuaccugaua

SEQ ID NO: 343815 - RNA, 19 nt, Homo sapiens
  misc_RNA (1)...(19): siRNA sense strand
cagaucaacuggaauggau

SEQ ID NO: 343816 - RNA, 19 nt, Homo sapiens
  misc_RNA (1)...(19): siRNA sense strand
gcaggaaauggcugaacua

SEQ ID NO: 343817 - RNA, 19 nt, Homo sapiens
  misc_RNA (1)...(19): siRNA sense strand
ccacagaucaacuggaaug

SEQ ID NO: 343818 - RNA, 19 nt, Homo sapiens
  misc_RNA (1)...(19): siRNA sense strand
caacaugcccacagaucaa

SEQ ID NO: 343819 - RNA, 19 nt, Homo sapiens
  misc_RNA (1)...(19): siRNA sense strand
ucaccaacaugcccacaga

SEQ ID NO: 343820 - RNA, 19 nt, Homo sapiens
  misc_RNA (1)...(19): siRNA sense strand
cagaggagauguggucaau

SEQ ID NO: 343821 - RNA, 19 nt, Homo sapiens
  misc_RNA (1)...(19): siRNA sense strand
caauugggcagauguguga

SEQ ID NO: 343822 - RNA, 19 nt, Homo sapiens
  misc_RNA (1)...(19): siRNA sense strand
ggagauguggucaauggaa

SEQ ID NO: 343823 - RNA, 19 nt, Homo sapiens
  misc_RNA (1)...(19): siRNA sense strand
guacagcuguguggugcuu

SEQ ID NO: 343824 - RNA, 19 nt, Homo sapiens
  misc_RNA (1)...(19): siRNA sense strand
ccaaagcgagcaagagaau

SEQ ID NO: 343825 - RNA, 19 nt, Homo sapiens
  misc_RNA (1)...(19): siRNA sense strand
gcuaugggcccuucaccaa

SEQ ID NO: 343826 - RNA, 19 nt, Homo sapiens
  misc_RNA (1)...(19): siRNA sense strand
gaaugagcaugauuuugaa

SEQ ID NO: 343827 - RNA, 19 nt, Homo sapiens
  misc_RNA (1)...(19): siRNA sense strand
ucagggcuauccucucaga

SEQ ID NO: 343828 - RNA, 19 nt, Homo sapiens
  misc_RNA (1)...(19): siRNA sense strand
agggauaccaugcaacaua

SEQ ID NO: 343829 - RNA, 19 nt, Homo sapiens
  misc_RNA (1)...(19): siRNA sense strand
gcuagaaaucuguugcuau

SEQ ID NO: 343830 - RNA, 19 nt, Homo sapiens
  misc_RNA (1)...(19): siRNA sense strand
ugaaugagcaugauuuuga

SEQ ID NO: 343831 - RNA, 19 nt, Homo sapiens
  misc_RNA (1)...(19): siRNA sense strand
ggcuagaaaucuguugcua

SEQ ID NO: 343832 - RNA, 19 nt, Homo sapiens
  misc_RNA (1)...(19): siRNA sense strand
ugaaacaagcgucucugaa

SEQ ID NO: 343833 - RNA, 19 nt, Homo sapiens
  misc_RNA (1)...(19): siRNA sense strand
aacauaaccugauaaagcu

SEQ ID NO: 343834 - RNA, 19 nt, Homo sapiens
  misc_RNA (1)...(19): siRNA sense strand
ugacccagucuauuaaaga

SEQ ID NO: 343835 - RNA, 19 nt, Homo sapiens
  misc_RNA (1)...(19): siRNA sense strand
gaacuagaagcuguguuag

SEQ ID NO: 343836 - RNA, 19 nt, Homo sapiens
  misc_RNA (1)...(19): siRNA sense strand
gugaaacaagcgucucuga

SEQ ID NO: 343837 - RNA, 19 nt, Homo sapiens
  misc_RNA (1)...(19): siRNA sense strand
ccaacaugcccacagauca

SEQ ID NO: 343838 - RNA, 19 nt, Homo sapiens
  misc_RNA (1)...(19): siRNA sense strand
uaugggcccuucaccaaca

SEQ ID NO: 343839 - RNA, 19 nt, Homo sapiens
  misc_RNA (1)...(19): siRNA sense strand
guccaaagcgagcaagaga

SEQ ID NO: 343840 - RNA, 19 nt, Homo sapiens
  misc_RNA (1)...(19): siRNA sense strand
cagaacaaagcacaucaga

SEQ ID NO: 343841 - RNA, 19 nt, Homo sapiens
  misc_RNA (1)...(19): siRNA sense strand
ccugcgaaauccagaacaa

SEQ ID NO: 343842 - RNA, 19 nt, Homo sapiens
  misc_RNA (1)...(19): siRNA sense strand
gaaaccaccaagguccaaa

SEQ ID NO: 343843 - RNA, 19 nt, Homo sapiens
  misc_RNA (1)...(19): siRNA sense strand
gauaaagcuccagcaggaa

SEQ ID NO: 343844 - RNA, 19 nt, Homo sapiens
  misc_RNA (1)...(19): siRNA sense strand
aaggagcuuucaucauuca

SEQ ID NO: 343845 - RNA, 19 nt, Homo sapiens
  misc_RNA (1)...(19): siRNA sense strand
ggugugagagugaaacaag

SEQ ID NO: 343846 - RNA, 19 nt, Homo sapiens
  misc_RNA (1)...(19): siRNA sense strand
gaaauggcugaacuagaag

SEQ ID NO: 343847 - RNA, 19 nt, Homo sapiens
  misc_RNA (1)...(19): siRNA sense strand
auaaagcuccagcaggaaa

SEQ ID NO: 343848 - RNA, 19 nt, Homo sapiens
  misc_RNA (1)...(19): siRNA sense strand
acccuuccaucauaaguga

SEQ ID NO: 343849 - RNA, 19 nt, Homo sapiens
  misc_RNA (1)...(19): siRNA sense strand
ggugacccagucuauuaaa

SEQ ID NO: 343850 - RNA, 19 nt, Homo sapiens
  misc_RNA (1)...(19): siRNA sense strand
cccagucuauuaaagaaag

SEQ ID NO: 343851 - RNA, 19 nt, Homo sapiens
  misc_RNA (1)...(19): siRNA sense strand
caucugggugugagaguga

SEQ ID NO: 343852 - RNA, 19 nt, Homo sapiens
  misc_RNA (1)...(19): siRNA sense strand
ccagucuauuaaagaaaga

SEQ ID NO: 343853 - RNA, 19 nt, Homo sapiens
  misc_RNA (1)...(19): siRNA sense strand
cgaaauccagaacaaagca

SEQ ID NO: 343854 - RNA, 19 nt, Homo sapiens
  misc_RNA (1)...(19): siRNA sense strand
aagagaaucccaggacaga

SEQ ID NO: 343855 - RNA, 19 nt, Homo sapiens
  misc_RNA (1)...(19): siRNA sense strand
gauguggucaauggaagaa

SEQ ID NO: 343856 - RNA, 19 nt, Homo sapiens
  misc_RNA (1)...(19): siRNA sense strand
ggaccugcgaaauccagaa

SEQ ID NO: 343857 - RNA, 19 nt, Homo sapiens
  misc_RNA (1)...(19): siRNA sense strand
gagcaugauuuugaaguca

SEQ ID NO: 343858 - RNA, 19 nt, Homo sapiens
  misc_RNA (1)...(19): siRNA sense strand
gugacccagucuauuaaag

SEQ ID NO: 343859 - RNA, 19 nt, Homo sapiens
  misc_RNA (1)...(19): siRNA sense strand
agaacaaagcacaucagaa

SEQ ID NO: 343860 - RNA, 19 nt, Homo sapiens
  misc_RNA (1)...(19): siRNA sense strand
uggaagaaaccaccaaggu

SEQ ID NO: 343861 - RNA, 19 nt, Homo sapiens
  misc_RNA (1)...(19): siRNA sense strand
ucaacuggaauggauggua

SEQ ID NO: 343862 - RNA, 19 nt, Homo sapiens
  misc_RNA (1)...(19): siRNA sense strand
ggaaauggcugaacuagaa

SEQ ID NO: 343863 - RNA, 19 nt, Homo sapiens
  misc_RNA (1)...(19): siRNA sense strand
gaacaaagcacaucagaaa

SEQ ID NO: 343864 - RNA, 19 nt, Homo sapiens
  misc_RNA (1)...(19): siRNA sense strand
cagcuacccuuccaucaua

SEQ ID NO: 343865 - RNA, 19 nt, Homo sapiens
  misc_RNA (1)...(19): siRNA sense strand
gggauaccaugcaacauaa

SEQ ID NO: 343866 - RNA, 19 nt, Homo sapiens
  misc_RNA (1)...(19): siRNA sense strand
gaggagauguggucaaugg

SEQ ID NO: 343867 - RNA, 19 nt, Homo sapiens
  misc_RNA (1)...(19): siRNA sense strand
gaaggagcuuucaucauuc

SEQ ID NO: 343868 - RNA, 19 nt, Homo sapiens
  misc_RNA (1)...(19): siRNA sense strand
cuagaaaucuguugcuaug

SEQ ID NO: 343869 - RNA, 19 nt, Homo sapiens
  misc_RNA (1)...(19): siRNA sense strand
gcucagggcuauccucuca

SEQ ID NO: 343870 - RNA, 19 nt, Homo sapiens
  misc_RNA (1)...(19): siRNA sense strand
aaacaagcgucucugaaga

SEQ ID NO: 343871 - RNA, 19 nt, Homo sapiens
  misc_RNA (1)...(19): siRNA sense strand
caacauaaccugauaaagc

SEQ ID NO: 343872 - RNA, 19 nt, Homo sapiens
  misc_RNA (1)...(19): siRNA sense strand
gaaacaagcgucucugaag

SEQ ID NO: 343873 - RNA, 19 nt, Homo sapiens
  misc_RNA (1)...(19): siRNA sense strand
gcagagggauaccaugcaa

SEQ ID NO: 343874 - RNA, 19 nt, Homo sapiens
  misc_RNA (1)...(19): siRNA sense strand
ugaacuagaagcuguguua

SEQ ID NO: 343875 - RNA, 19 nt, Homo sapiens
  misc_RNA (1)...(19): siRNA sense strand
gagaaucccaggacagaaa

SEQ ID NO: 343876 - RNA, 19 nt, Homo sapiens
  misc_RNA (1)...(19): siRNA sense strand
gcccacagaucaacuggaa

SEQ ID NO: 343877 - RNA, 19 nt, Homo sapiens
  misc_RNA (1)...(19): siRNA sense strand
gaagacugcucagggcuau

SEQ ID NO: 343878 - RNA, 19 nt, Homo sapiens
  misc_RNA (1)...(19): siRNA sense strand
gacccagucuauuaaagaa

SEQ ID NO: 343879 - RNA, 19 nt, Homo sapiens
  misc_RNA (1)...(19): siRNA sense strand
acuagaagcuguguuagaa

SEQ ID NO: 343880 - RNA, 19 nt, Homo sapiens
  misc_RNA (1)...(19): siRNA sense strand
caugcaacauaaccugaua

SEQ ID NO: 343881 - RNA, 19 nt, Homo sapiens
  misc_RNA (1)...(19): siRNA sense strand
gcuggacaccuaccugaua

SEQ ID NO: 343882 - RNA, 19 nt, Homo sapiens
  misc_RNA (1)...(19): siRNA sense strand
cagaucaacuggaauggau

SEQ ID NO: 343883 - RNA, 19 nt, Homo sapiens
  misc_RNA (1)...(19): siRNA sense strand
gcaggaaauggcugaacua

SEQ ID NO: 343884 - RNA, 19 nt, Homo sapiens
  misc_RNA (1)...(19): siRNA sense strand
ccacagaucaacuggaaug

SEQ ID NO: 343885 - RNA, 19 nt, Homo sapiens
  misc_RNA (1)...(19): siRNA sense strand
caacaugcccacagaucaa

SEQ ID NO: 343886 - RNA, 19 nt, Homo sapiens
  misc_RNA (1)...(19): siRNA sense strand
ucaccaacaugcccacaga

SEQ ID NO: 343887 - RNA, 19 nt, Homo sapiens
  misc_RNA (1)...(19): siRNA sense strand
cagaggagauguggucaau

SEQ ID NO: 343888 - RNA, 19 nt, Homo sapiens
  misc_RNA (1)...(19): siRNA sense strand
caauugggcagauguguga

SEQ ID NO: 343889 - RNA, 19 nt, Homo sapiens
  misc_RNA (1)...(19): siRNA sense strand
ggagauguggucaauggaa

SEQ ID NO: 343890 - RNA, 19 nt, Homo sapiens
  misc_RNA (1)...(19): siRNA sense strand
guacagcuguguggugcuu

SEQ ID NO: 343891 - RNA, 19 nt, Homo sapiens
  misc_RNA (1)...(19): siRNA sense strand
ccaaagcgagcaagagaau

SEQ ID NO: 343892 - RNA, 19 nt, Homo sapiens
  misc_RNA (1)...(19): siRNA sense strand
gcuaugggcccuucaccaa

SEQ ID NO: 343893 - RNA, 19 nt, Homo sapiens
  misc_RNA (1)...(19): siRNA sense strand
gaaugagcaugauuuugaa

SEQ ID NO: 343894 - RNA, 19 nt, Homo sapiens
  misc_RNA (1)...(19): siRNA sense strand
ucagggcuauccucucaga

SEQ ID NO: 343895 - RNA, 19 nt, Homo sapiens
  misc_RNA (1)...(19): siRNA sense strand
agggauaccaugcaacaua

SEQ ID NO: 343896 - RNA, 19 nt, Homo sapiens
  misc_RNA (1)...(19): siRNA sense strand
gcuagaaaucuguugcuau

SEQ ID NO: 343897 - RNA, 19 nt, Homo sapiens
  misc_RNA (1)...(19): siRNA sense strand
ugaaugagcaugauuuuga

SEQ ID NO: 343898 - RNA, 19 nt, Homo sapiens
  misc_RNA (1)...(19): siRNA sense strand
ggcuagaaaucuguugcua

SEQ ID NO: 343899 - RNA, 19 nt, Homo sapiens
  misc_RNA (1)...(19): siRNA sense strand
ugaaacaagcgucucugaa

SEQ ID NO: 343900 - RNA, 19 nt, Homo sapiens
  misc_RNA (1)...(19): siRNA sense strand
aacauaaccugauaaagcu

SEQ ID NO: 343901 - RNA, 19 nt, Homo sapiens
  misc_RNA (1)...(19): siRNA sense strand
ugacccagucuauuaaaga

SEQ ID NO: 343902 - RNA, 19 nt, Homo sapiens
  misc_RNA (1)...(19): siRNA sense strand
gaacuagaagcuguguuag

SEQ ID NO: 343903 - RNA, 19 nt, Homo sapiens
  misc_RNA (1)...(19): siRNA sense strand
gugaaacaagcgucucuga

SEQ ID NO: 343904 - RNA, 19 nt, Homo sapiens
  misc_RNA (1)...(19): siRNA sense strand
ccaacaugcccacagauca

SEQ ID NO: 343905 - RNA, 19 nt, Homo sapiens
  misc_RNA (1)...(19): siRNA sense strand
uaugggcccuucaccaaca

SEQ ID NO: 343906 - RNA, 19 nt, Homo sapiens
  misc_RNA (1)...(19): siRNA sense strand
guccaaagcgagcaagaga

SEQ ID NO: 343907 - RNA, 19 nt, Homo sapiens
  misc_RNA (1)...(19): siRNA sense strand
cagaacaaagcacaucaga

SEQ ID NO: 343908 - RNA, 19 nt, Homo sapiens
  misc_RNA (1)...(19): siRNA sense strand
ccugcgaaauccagaacaa

SEQ ID NO: 343909 - RNA, 19 nt, Homo sapiens
  misc_RNA (1)...(19): siRNA sense strand
gaaaccaccaagguccaaa

SEQ ID NO: 343910 - RNA, 19 nt, Homo sapiens
  misc_RNA (1)...(19): siRNA sense strand
gauaaagcuccagcaggaa

SEQ ID NO: 343911 - RNA, 19 nt, Homo sapiens
  misc_RNA (1)...(19): siRNA sense strand
aaggagcuuucaucauuca

SEQ ID NO: 343912 - RNA, 19 nt, Homo sapiens
  misc_RNA (1)...(19): siRNA sense strand
ggugugagagugaaacaag

SEQ ID NO: 343913 - RNA, 19 nt, Homo sapiens
  misc_RNA (1)...(19): siRNA sense strand
gaaauggcugaacuagaag

SEQ ID NO: 343914 - RNA, 19 nt, Homo sapiens
  misc_RNA (1)...(19): siRNA sense strand
auaaagcuccagcaggaaa

SEQ ID NO: 343915 - RNA, 19 nt, Homo sapiens
  misc_RNA (1)...(19): siRNA sense strand
acccuuccaucauaaguga

SEQ ID NO: 343916 - RNA, 19 nt, Homo sapiens
  misc_RNA (1)...(19): siRNA sense strand
ggugacccagucuauuaaa

SEQ ID NO: 343917 - RNA, 19 nt, Homo sapiens
  misc_RNA (1)...(19): siRNA sense strand
cccagucuauuaaagaaag

SEQ ID NO: 343918 - RNA, 19 nt, Homo sapiens
  misc_RNA (1)...(19): siRNA sense strand
caucugggugugagaguga

SEQ ID NO: 343919 - RNA, 19 nt, Homo sapiens
  misc_RNA (1)...(19): siRNA sense strand
ccagucuauuaaagaaaga

SEQ ID NO: 343920 - RNA, 19 nt, Homo sapiens
  misc_RNA (1)...(19): siRNA sense strand
cgaaauccagaacaaagca

SEQ ID NO: 343921 - RNA, 19 nt, Homo sapiens
  misc_RNA (1)...(19): siRNA sense strand
aagagaaucccaggacaga

SEQ ID NO: 343922 - RNA, 19 nt, Homo sapiens
  misc_RNA (1)...(19): siRNA sense strand
gauguggucaauggaagaa

SEQ ID NO: 343923 - RNA, 19 nt, Homo sapiens
  misc_RNA (1)...(19): siRNA sense strand
ggaccugcgaaauccagaa

SEQ ID NO: 343924 - RNA, 19 nt, Homo sapiens
  misc_RNA (1)...(19): siRNA sense strand
gagcaugauuuugaaguca

SEQ ID NO: 343925 - RNA, 19 nt, Homo sapiens
  misc_RNA (1)...(19): siRNA sense strand
gugacccagucuauuaaag

SEQ ID NO: 343926 - RNA, 19 nt, Homo sapiens
  misc_RNA (1)...(19): siRNA sense strand
agaacaaagcacaucagaa

SEQ ID NO: 343927 - RNA, 19 nt, Homo sapiens
  misc_RNA (1)...(19): siRNA sense strand
uggaagaaaccaccaaggu

SEQ ID NO: 343928 - RNA, 19 nt, Homo sapiens
  misc_RNA (1)...(19): siRNA sense strand
ucaacuggaauggauggua

SEQ ID NO: 343929 - RNA, 19 nt, Homo sapiens
  misc_RNA (1)...(19): siRNA sense strand
ggaaauggcugaacuagaa

SEQ ID NO: 343930 - RNA, 19 nt, Homo sapiens
  misc_RNA (1)...(19): siRNA sense strand
gaacaaagcacaucagaaa

SEQ ID NO: 343931 - RNA, 19 nt, Homo sapiens
  misc_RNA (1)...(19): siRNA sense strand
cagcuacccuuccaucaua

SEQ ID NO: 343932 - RNA, 19 nt, Homo sapiens
  misc_RNA (1)...(19): siRNA sense strand
gggauaccaugcaacauaa

SEQ ID NO: 343933 - RNA, 19 nt, Homo sapiens
  misc_RNA (1)...(19): siRNA sense strand
gaggagauguggucaaugg

SEQ ID NO: 343934 - RNA, 19 nt, Homo sapiens
  misc_RNA (1)...(19): siRNA sense strand
gaaggagcuuucaucauuc

SEQ ID NO: 343935 - RNA, 19 nt, Homo sapiens
  misc_RNA (1)...(19): siRNA sense strand
cuagaaaucuguugcuaug

SEQ ID NO: 343936 - RNA, 19 nt, Homo sapiens
  misc_RNA (1)...(19): siRNA sense strand
gcucagggcuauccucuca

SEQ ID NO: 343937 - RNA, 19 nt, Homo sapiens
  misc_RNA (1)...(19): siRNA sense strand
aaacaagcgucucugaaga

SEQ ID NO: 343938 - RNA, 19 nt, Homo sapiens
  misc_RNA (1)...(19): siRNA sense strand
caacauaaccugauaaagc

SEQ ID NO: 343939 - RNA, 19 nt, Homo sapiens
  misc_RNA (1)...(19): siRNA sense strand
gaaacaagcgucucugaag

SEQ ID NO: 343940 - RNA, 19 nt, Homo sapiens
  misc_RNA (1)...(19): siRNA sense strand
gcagagggauaccaugcaa

SEQ ID NO: 343941 - RNA, 19 nt, Homo sapiens
  misc_RNA (1)...(19): siRNA sense strand
ugaacuagaagcuguguua

SEQ ID NO: 343942 - RNA, 19 nt, Homo sapiens
  misc_RNA (1)...(19): siRNA sense strand
gagaaucccaggacagaaa

SEQ ID NO: 343943 - RNA, 19 nt, Homo sapiens
  misc_RNA (1)...(19): siRNA sense strand
gcccacagaucaacuggaa

SEQ ID NO: 343944 - RNA, 19 nt, Homo sapiens
  misc_RNA (1)...(19): siRNA sense strand
gaagacugcucagggcuau

SEQ ID NO: 343945 - RNA, 19 nt, Homo sapiens
  misc_RNA (1)...(19): siRNA sense strand
gacccagucuauuaaagaa

SEQ ID NO: 343946 - RNA, 19 nt, Homo sapiens
  misc_RNA (1)...(19): siRNA sense strand
acuagaagcuguguuagaa

SEQ ID NO: 343947 - RNA, 19 nt, Homo sapiens
  misc_RNA (1)...(19): siRNA sense strand
caugcaacauaaccugaua

SEQ ID NO: 343948 - RNA, 19 nt, Homo sapiens
  misc_RNA (1)...(19): siRNA sense strand
gcuggacaccuaccugaua

SEQ ID NO: 343949 - RNA, 19 nt, Homo sapiens
  misc_RNA (1)...(19): siRNA sense strand
cagaucaacuggaauggau

SEQ ID NO: 343950 - RNA, 19 nt, Homo sapiens
  misc_RNA (1)...(19): siRNA sense strand
gcaggaaauggcugaacua

SEQ ID NO: 343951 - RNA, 19 nt, Homo sapiens
  misc_RNA (1)...(19): siRNA sense strand
ccacagaucaacuggaaug

SEQ ID NO: 343952 - RNA, 19 nt, Homo sapiens
  misc_RNA (1)...(19): siRNA sense strand
caacaugcccacagaucaa

SEQ ID NO: 343953 - RNA, 19 nt, Homo sapiens
  misc_RNA (1)...(19): siRNA sense strand
ucaccaacaugcccacaga

SEQ ID NO: 343954 - RNA, 19 nt, Homo sapiens
  misc_RNA (1)...(19): siRNA sense strand
cagaggagauguggucaau

SEQ ID NO: 343955 - RNA, 19 nt, Homo sapiens
  misc_RNA (1)...(19): siRNA sense strand
caauugggcagauguguga

SEQ ID NO: 343956 - RNA, 19 nt, Homo sapiens
  misc_RNA (1)...(19): siRNA sense strand
ggagauguggucaauggaa

SEQ ID NO: 343957 - RNA, 19 nt, Homo sapiens
  misc_RNA (1)...(19): siRNA sense strand
guacagcuguguggugcuu

SEQ ID NO: 343958 - RNA, 19 nt, Homo sapiens
  misc_RNA (1)...(19): siRNA sense strand
ccaaagcgagcaagagaau

SEQ ID NO: 343959 - RNA, 19 nt, Homo sapiens
  misc_RNA (1)...(19): siRNA sense strand
gcuaugggcccuucaccaa

SEQ ID NO: 343960 - RNA, 19 nt, Homo sapiens
  misc_RNA (1)...(19): siRNA sense strand
gaaugagcaugauuuugaa

SEQ ID NO: 343961 - RNA, 19 nt, Homo sapiens
  misc_RNA (1)...(19): siRNA sense strand
ucagggcuauccucucaga

SEQ ID NO: 343962 - RNA, 19 nt, Homo sapiens
  misc_RNA (1)...(19): siRNA sense strand
agggauaccaugcaacaua

SEQ ID NO: 343963 - RNA, 19 nt, Homo sapiens
  misc_RNA (1)...(19): siRNA sense strand
gcuagaaaucuguugcuau

SEQ ID NO: 343964 - RNA, 19 nt, Homo sapiens
  misc_RNA (1)...(19): siRNA sense strand
ugaaugagcaugauuuuga

SEQ ID NO: 343965 - RNA, 19 nt, Homo sapiens
  misc_RNA (1)...(19): siRNA sense strand
ggcuagaaaucuguugcua

SEQ ID NO: 343966 - RNA, 19 nt, Homo sapiens
  misc_RNA (1)...(19): siRNA sense strand
ugaaacaagcgucucugaa

SEQ ID NO: 343967 - RNA, 19 nt, Homo sapiens
  misc_RNA (1)...(19): siRNA sense strand
aacauaaccugauaaagcu

SEQ ID NO: 343968 - RNA, 19 nt, Homo sapiens
  misc_RNA (1)...(19): siRNA sense strand
ugacccagucuauuaaaga

SEQ ID NO: 343969 - RNA, 19 nt, Homo sapiens
  misc_RNA (1)...(19): siRNA sense strand
gaacuagaagcuguguuag

SEQ ID NO: 343970 - RNA, 19 nt, Homo sapiens
  misc_RNA (1)...(19): siRNA sense strand
gugaaacaagcgucucuga

SEQ ID NO: 343971 - RNA, 19 nt, Homo sapiens
  misc_RNA (1)...(19): siRNA sense strand
ccaacaugcccacagauca

SEQ ID NO: 343972 - RNA, 19 nt, Homo sapiens
  misc_RNA (1)...(19): siRNA sense strand
uaugggcccuucaccaaca

SEQ ID NO: 343973 - RNA, 19 nt, Homo sapiens
  misc_RNA (1)...(19): siRNA sense strand
guccaaagcgagcaagaga

SEQ ID NO: 343974 - RNA, 19 nt, Homo sapiens
  misc_RNA (1)...(19): siRNA sense strand
cagaacaaagcacaucaga

SEQ ID NO: 343975 - RNA, 19 nt, Homo sapiens
  misc_RNA (1)...(19): siRNA sense strand
ccugcgaaauccagaacaa

SEQ ID NO: 343976 - RNA, 19 nt, Homo sapiens
  misc_RNA (1)...(19): siRNA sense strand
gaaaccaccaagguccaaa

SEQ ID NO: 343977 - RNA, 19 nt, Homo sapiens
  misc_RNA (1)...(19): siRNA sense strand
gauaaagcuccagcaggaa

SEQ ID NO: 343978 - RNA, 19 nt, Homo sapiens
  misc_RNA (1)...(19): siRNA sense strand
aaggagcuuucaucauuca

SEQ ID NO: 343979 - RNA, 19 nt, Homo sapiens
  misc_RNA (1)...(19): siRNA sense strand
ggugugagagugaaacaag

SEQ ID NO: 343980 - RNA, 19 nt, Homo sapiens
  misc_RNA (1)...(19): siRNA sense strand
gaaauggcugaacuagaag

SEQ ID NO: 343981 - RNA, 19 nt, Homo sapiens
  misc_RNA (1)...(19): siRNA sense strand
auaaagcuccagcaggaaa

SEQ ID NO: 343982 - RNA, 19 nt, Homo sapiens
  misc_RNA (1)...(19): siRNA sense strand
acccuuccaucauaaguga

SEQ ID NO: 343983 - RNA, 19 nt, Homo sapiens
  misc_RNA (1)...(19): siRNA sense strand
ggugacccagucuauuaaa

SEQ ID NO: 343984 - RNA, 19 nt, Homo sapiens
  misc_RNA (1)...(19): siRNA sense strand
cccagucuauuaaagaaag

SEQ ID NO: 343985 - RNA, 19 nt, Homo sapiens
  misc_RNA (1)...(19): siRNA sense strand
caucugggugugagaguga

SEQ ID NO: 343986 - RNA, 19 nt, Homo sapiens
  misc_RNA (1)...(19): siRNA sense strand
ccagucuauuaaagaaaga

SEQ ID NO: 343987 - RNA, 19 nt, Homo sapiens
  misc_RNA (1)...(19): siRNA sense strand
cgaaauccagaacaaagca

SEQ ID NO: 343988 - RNA, 19 nt, Homo sapiens
  misc_RNA (1)...(19): siRNA sense strand
aagagaaucccaggacaga

SEQ ID NO: 343989 - RNA, 19 nt, Homo sapiens
  misc_RNA (1)...(19): siRNA sense strand
gauguggucaauggaagaa

SEQ ID NO: 343990 - RNA, 19 nt, Homo sapiens
  misc_RNA (1)...(19): siRNA sense strand
ggaccugcgaaauccagaa

SEQ ID NO: 343991 - RNA, 19 nt, Homo sapiens
  misc_RNA (1)...(19): siRNA sense strand
gagcaugauuuugaaguca

SEQ ID NO: 343992 - RNA, 19 nt, Homo sapiens
  misc_RNA (1)...(19): siRNA sense strand
gugacccagucuauuaaag

SEQ ID NO: 343993 - RNA, 19 nt, Homo sapiens
  misc_RNA (1)...(19): siRNA sense strand
agaacaaagcacaucagaa

SEQ ID NO: 343994 - RNA, 19 nt, Homo sapiens
  misc_RNA (1)...(19): siRNA sense strand
uggaagaaaccaccaaggu

SEQ ID NO: 343995 - RNA, 19 nt, Homo sapiens
  misc_RNA (1)...(19): siRNA sense strand
ucaacuggaauggauggua

SEQ ID NO: 343996 - RNA, 19 nt, Homo sapiens
  misc_RNA (1)...(19): siRNA sense strand
gugaagaccugguaucaga

SEQ ID NO: 343997 - RNA, 19 nt, Homo sapiens
  misc_RNA (1)...(19): siRNA sense strand
gauugaagcugaagagaag

SEQ ID NO: 343998 - RNA, 19 nt, Homo sapiens
  misc_RNA (1)...(19): siRNA sense strand
cuacaagacuuucaugauc

SEQ ID NO: 343999 - RNA, 19 nt, Homo sapiens
  misc_RNA (1)...(19): siRNA sense strand
ccaaggagaccugcgauua

SEQ ID NO: 344000 - RNA, 19 nt, Homo sapiens
  misc_RNA (1)...(19): siRNA sense strand
gaaaaugguucuuaaaggu

SEQ ID NO: 344001 - RNA, 19 nt, Homo sapiens
  misc_RNA (1)...(19): siRNA sense strand
ggagaccugcgauuacuuu

SEQ ID NO: 344002 - RNA, 19 nt, Homo sapiens
  misc_RNA (1)...(19): siRNA sense strand
gaaccgaaagcacgugaug

SEQ ID NO: 344003 - RNA, 19 nt, Homo sapiens
  misc_RNA (1)...(19): siRNA sense strand
uccagaagcagaaguauuu

SEQ ID NO: 344004 - RNA, 19 nt, Homo sapiens
  misc_RNA (1)...(19): siRNA sense strand
gcgauuacuuugagaaacu

SEQ ID NO: 344005 - RNA, 19 nt, Homo sapiens
  misc_RNA (1)...(19): siRNA sense strand
ucaugggccuggagaagaa

SEQ ID NO: 344006 - RNA, 19 nt, Homo sapiens
  misc_RNA (1)...(19): siRNA sense strand
cagaaucgcaggaugaaau

SEQ ID NO: 344007 - RNA, 19 nt, Homo sapiens
  misc_RNA (1)...(19): siRNA sense strand
ucuuaaagguggacaggaa

SEQ ID NO: 344008 - RNA, 19 nt, Homo sapiens
  misc_RNA (1)...(19): siRNA sense strand
gaccugcgauuacuuugag

SEQ ID NO: 344009 - RNA, 19 nt, Homo sapiens
  misc_RNA (1)...(19): siRNA sense strand
agaagaaauuccagaagca

SEQ ID NO: 344010 - RNA, 19 nt, Homo sapiens
  misc_RNA (1)...(19): siRNA sense strand
gaagaccugguaucagaau

SEQ ID NO: 344011 - RNA, 19 nt, Homo sapiens
  misc_RNA (1)...(19): siRNA sense strand
uaucagaaucgcaggauga

SEQ ID NO: 344012 - RNA, 19 nt, Homo sapiens
  misc_RNA (1)...(19): siRNA sense strand
ggacaggaagcacccacaa

SEQ ID NO: 344013 - RNA, 19 nt, Homo sapiens
  misc_RNA (1)...(19): siRNA sense strand
gaagcagaaguauuuguca

SEQ ID NO: 344014 - RNA, 19 nt, Homo sapiens
  misc_RNA (1)...(19): siRNA sense strand
gcuacaagacuuucaugau

SEQ ID NO: 344015 - RNA, 19 nt, Homo sapiens
  misc_RNA (1)...(19): siRNA sense strand
aagcagaaguauuugucaa

SEQ ID NO: 344016 - RNA, 19 nt, Homo sapiens
  misc_RNA (1)...(19): siRNA sense strand
ggagaagaaauuccagaag

SEQ ID NO: 344017 - RNA, 19 nt, Homo sapiens
  misc_RNA (1)...(19): siRNA sense strand
ccacaucagaagagauuga

SEQ ID NO: 344018 - RNA, 19 nt, Homo sapiens
  misc_RNA (1)...(19): siRNA sense strand
gacaggaagcacccacaaa

SEQ ID NO: 344019 - RNA, 19 nt, Homo sapiens
  misc_RNA (1)...(19): siRNA sense strand
gaagcugaagagaagauga

SEQ ID NO: 344020 - RNA, 19 nt, Homo sapiens
  misc_RNA (1)...(19): siRNA sense strand
caaggagaccugcgauuac

SEQ ID NO: 344021 - RNA, 19 nt, Homo sapiens
  misc_RNA (1)...(19): siRNA sense strand
agaagagauugaagcugaa

SEQ ID NO: 344022 - RNA, 19 nt, Homo sapiens
  misc_RNA (1)...(19): siRNA sense strand
ggcaggaggagcucuguga

SEQ ID NO: 344023 - RNA, 19 nt, Homo sapiens
  misc_RNA (1)...(19): siRNA sense strand
gcaggaggagcucugugaa

SEQ ID NO: 344024 - RNA, 19 nt, Homo sapiens
  misc_RNA (1)...(19): siRNA sense strand
agaaauuccagaagcagaa

SEQ ID NO: 344025 - RNA, 19 nt, Homo sapiens
  misc_RNA (1)...(19): siRNA sense strand
acaagacuuucaugaucga

SEQ ID NO: 344026 - RNA, 19 nt, Homo sapiens
  misc_RNA (1)...(19): siRNA sense strand
gagauugaagcugaagaga

SEQ ID NO: 344027 - RNA, 19 nt, Homo sapiens
  misc_RNA (1)...(19): siRNA sense strand
cgauuacuuugagaaacuu

SEQ ID NO: 344028 - RNA, 19 nt, Homo sapiens
  misc_RNA (1)...(19): siRNA sense strand
ugaagcacaggaaccgaaa

SEQ ID NO: 344029 - RNA, 19 nt, Homo sapiens
  misc_RNA (1)...(19): siRNA sense strand
agauugaagcugaagagaa

SEQ ID NO: 344030 - RNA, 19 nt, Homo sapiens
  misc_RNA (1)...(19): siRNA sense strand
gaagagauugaagcugaag

SEQ ID NO: 344031 - RNA, 19 nt, Homo sapiens
  misc_RNA (1)...(19): siRNA sense strand
gaaauuccagaagcagaag

SEQ ID NO: 344032 - RNA, 19 nt, Homo sapiens
  misc_RNA (1)...(19): siRNA sense strand
ggaggagcucugugaagca

SEQ ID NO: 344033 - RNA, 19 nt, Homo sapiens
  misc_RNA (1)...(19): siRNA sense strand
aagcugaagagaagaugaa

SEQ ID NO: 344034 - RNA, 19 nt, Homo sapiens
  misc_RNA (1)...(19): siRNA sense strand
gaaauggaagaaaaugguu

SEQ ID NO: 344035 - RNA, 19 nt, Homo sapiens
  misc_RNA (1)...(19): siRNA sense strand
aggaugaaauggaagaaaa

SEQ ID NO: 344036 - RNA, 19 nt, Homo sapiens
  misc_RNA (1)...(19): siRNA sense strand
aaggagaccugcgauuacu

SEQ ID NO: 344037 - RNA, 19 nt, Homo sapiens
  misc_RNA (1)...(19): siRNA sense strand
gaacuaaccugucagauuu

SEQ ID NO: 344038 - RNA, 19 nt, Homo sapiens
  misc_RNA (1)...(19): siRNA sense strand
gagaacagauucacaauuu

SEQ ID NO: 344039 - RNA, 19 nt, Homo sapiens
  misc_RNA (1)...(19): siRNA sense strand
gcaaggagauuguuagauu

SEQ ID NO: 344040 - RNA, 19 nt, Homo sapiens
  misc_RNA (1)...(19): siRNA sense strand
ggaacaauguacacuauua

SEQ ID NO: 344041 - RNA, 19 nt, Homo sapiens
  misc_RNA (1)...(19): siRNA sense strand
gaaauagaguccuuaaaug

SEQ ID NO: 344042 - RNA, 19 nt, Homo sapiens
  misc_RNA (1)...(19): siRNA sense strand
gcaaagaacuuaauugaac

SEQ ID NO: 344043 - RNA, 19 nt, Homo sapiens
  misc_RNA (1)...(19): siRNA sense strand
ggaaauacaugaaauccaa

SEQ ID NO: 344044 - RNA, 19 nt, Homo sapiens
  misc_RNA (1)...(19): siRNA sense strand
guagaugacugguccaaua

SEQ ID NO: 344045 - RNA, 19 nt, Homo sapiens
  misc_RNA (1)...(19): siRNA sense strand
gaagcacaauuccacauua

SEQ ID NO: 344046 - RNA, 19 nt, Homo sapiens
  misc_RNA (1)...(19): siRNA sense strand
uaacauggcugaaggaaga

SEQ ID NO: 344047 - RNA, 19 nt, Homo sapiens
  misc_RNA (1)...(19): siRNA sense strand
gagaauagcagaauuaaga

SEQ ID NO: 344048 - RNA, 19 nt, Homo sapiens
  misc_RNA (1)...(19): siRNA sense strand
gaaagaagagcuuaaagaa

SEQ ID NO: 344049 - RNA, 19 nt, Homo sapiens
  misc_RNA (1)...(19): siRNA sense strand
caagauggaugaacagaaa

SEQ ID NO: 344050 - RNA, 19 nt, Homo sapiens
  misc_RNA (1)...(19): siRNA sense strand
acaaugaucuggaguuuaa

SEQ ID NO: 344051 - RNA, 19 nt, Homo sapiens
  misc_RNA (1)...(19): siRNA sense strand
gagauuagcagucuuagua

SEQ ID NO: 344052 - RNA, 19 nt, Homo sapiens
  misc_RNA (1)...(19): siRNA sense strand
gaaaaggagucuuguauaa

SEQ ID NO: 344053 - RNA, 19 nt, Homo sapiens
  misc_RNA (1)...(19): siRNA sense strand
ggaguuugaugcaucuuua

SEQ ID NO: 344054 - RNA, 19 nt, Homo sapiens
  misc_RNA (1)...(19): siRNA sense strand
aaacaacgauuacgaaaug

SEQ ID NO: 344055 - RNA, 19 nt, Homo sapiens
  misc_RNA (1)...(19): siRNA sense strand
gaacuuaauugaacagcuu

SEQ ID NO: 344056 - RNA, 19 nt, Homo sapiens
  misc_RNA (1)...(19): siRNA sense strand
gaaaggagcaucagcaaga

SEQ ID NO: 344057 - RNA, 19 nt, Homo sapiens
  misc_RNA (1)...(19): siRNA sense strand
caugaaagcugaacuugaa

SEQ ID NO: 344058 - RNA, 19 nt, Homo sapiens
  misc_RNA (1)...(19): siRNA sense strand
caaaugagcuaaucaacau

SEQ ID NO: 344059 - RNA, 19 nt, Homo sapiens
  misc_RNA (1)...(19): siRNA sense strand
gaaaguagcucuugaaaag

SEQ ID NO: 344060 - RNA, 19 nt, Homo sapiens
  misc_RNA (1)...(19): siRNA sense strand
uaacacaguugaagaaaga

SEQ ID NO: 344061 - RNA, 19 nt, Homo sapiens
  misc_RNA (1)...(19): siRNA sense strand
gcaagaaacguuaaagaaa

SEQ ID NO: 344062 - RNA, 19 nt, Homo sapiens
  misc_RNA (1)...(19): siRNA sense strand
gaagauaagcggaagguuu

SEQ ID NO: 344063 - RNA, 19 nt, Homo sapiens
  misc_RNA (1)...(19): siRNA sense strand
gaaagaccuucgaauguug

SEQ ID NO: 344064 - RNA, 19 nt, Homo sapiens
  misc_RNA (1)...(19): siRNA sense strand
gaaauccaauuacaggaaa

SEQ ID NO: 344065 - RNA, 19 nt, Homo sapiens
  misc_RNA (1)...(19): siRNA sense strand
gcaaagaggaggaguuaaa

SEQ ID NO: 344066 - RNA, 19 nt, Homo sapiens
  misc_RNA (1)...(19): siRNA sense strand
gcacaaugaucuggaguuu

SEQ ID NO: 344067 - RNA, 19 nt, Homo sapiens
  misc_RNA (1)...(19): siRNA sense strand
ggaauuaagucgggugaaa

SEQ ID NO: 344068 - RNA, 19 nt, Homo sapiens
  misc_RNA (1)...(19): siRNA sense strand
gcacagaagacgacuuuaa

SEQ ID NO: 344069 - RNA, 19 nt, Homo sapiens
  misc_RNA (1)...(19): siRNA sense strand
caacccaaauugcuuagua

SEQ ID NO: 344070 - RNA, 19 nt, Homo sapiens
  misc_RNA (1)...(19): siRNA sense strand
ugagugagcuaaauacaaa

SEQ ID NO: 344071 - RNA, 19 nt, Homo sapiens
  misc_RNA (1)...(19): siRNA sense strand
aagcugaacuugaaacuaa

SEQ ID NO: 344072 - RNA, 19 nt, Homo sapiens
  misc_RNA (1)...(19): siRNA sense strand
caagguauauuaagucaga

SEQ ID NO: 344073 - RNA, 19 nt, Homo sapiens
  misc_RNA (1)...(19): siRNA sense strand
gaagacgacuuuaaucagu

SEQ ID NO: 344074 - RNA, 19 nt, Homo sapiens
  misc_RNA (1)...(19): siRNA sense strand
uaagaaagcaguaugauga

SEQ ID NO: 344075 - RNA, 19 nt, Homo sapiens
  misc_RNA (1)...(19): siRNA sense strand
gcagagacuuacagaacua

SEQ ID NO: 344076 - RNA, 19 nt, Homo sapiens
  misc_RNA (1)...(19): siRNA sense strand
gcaggaagaucuugaacug

SEQ ID NO: 344077 - RNA, 19 nt, Homo sapiens
  misc_RNA (1)...(19): siRNA sense strand
ggagaaagaucaguauauc

SEQ ID NO: 344078 - RNA, 19 nt, Homo sapiens
  misc_RNA (1)...(19): siRNA sense strand
ggaauuagaggaccauauu

SEQ ID NO: 344079 - RNA, 19 nt, Homo sapiens
  misc_RNA (1)...(19): siRNA sense strand
gaagaaagaguuaucugaa

SEQ ID NO: 344080 - RNA, 19 nt, Homo sapiens
  misc_RNA (1)...(19): siRNA sense strand
gaauguugauguacugaaa

SEQ ID NO: 344081 - RNA, 19 nt, Homo sapiens
  misc_RNA (1)...(19): siRNA sense strand
gaaauggcccgaugaaugu

SEQ ID NO: 344082 - RNA, 19 nt, Homo sapiens
  misc_RNA (1)...(19): siRNA sense strand
gaauaagucucugaaggaa

SEQ ID NO: 344083 - RNA, 19 nt, Homo sapiens
  misc_RNA (1)...(19): siRNA sense strand
agacuaaacuuaucacuca

SEQ ID NO: 344084 - RNA, 19 nt, Homo sapiens
  misc_RNA (1)...(19): siRNA sense strand
ggaacuaaccugucagauu

SEQ ID NO: 344085 - RNA, 19 nt, Homo sapiens
  misc_RNA (1)...(19): siRNA sense strand
gcaacaggcugcuucugaa

SEQ ID NO: 344086 - RNA, 19 nt, Homo sapiens
  misc_RNA (1)...(19): siRNA sense strand
caugaaggcugauauugaa

SEQ ID NO: 344087 - RNA, 19 nt, Homo sapiens
  misc_RNA (1)...(19): siRNA sense strand
gacgagaacucaaugaugu

SEQ ID NO: 344088 - RNA, 19 nt, Homo sapiens
  misc_RNA (1)...(19): siRNA sense strand
caaguugacaguaucauua

SEQ ID NO: 344089 - RNA, 19 nt, Homo sapiens
  misc_RNA (1)...(19): siRNA sense strand
gcaaacagaacuagaauca

SEQ ID NO: 344090 - RNA, 19 nt, Homo sapiens
  misc_RNA (1)...(19): siRNA sense strand
gaagaccguuugaagaaau

SEQ ID NO: 344091 - RNA, 19 nt, Homo sapiens
  misc_RNA (1)...(19): siRNA sense strand
gaacaagagcuggaaauga

SEQ ID NO: 344092 - RNA, 19 nt, Homo sapiens
  misc_RNA (1)...(19): siRNA sense strand
gcagaaagaccuucgaaug

SEQ ID NO: 344093 - RNA, 19 nt, Homo sapiens
  misc_RNA (1)...(19): siRNA sense strand
gaaagcacagucaagauuu

SEQ ID NO: 344094 - RNA, 19 nt, Homo sapiens
  misc_RNA (1)...(19): siRNA sense strand
gaagaaagcacagucaaga

SEQ ID NO: 344095 - RNA, 19 nt, Homo sapiens
  misc_RNA (1)...(19): siRNA sense strand
uaagcaggauacaacauua

SEQ ID NO: 344096 - RNA, 19 nt, Homo sapiens
  misc_RNA (1)...(19): siRNA sense strand
ggacugagaaggcauuaaa

SEQ ID NO: 344097 - RNA, 19 nt, Homo sapiens
  misc_RNA (1)...(19): siRNA sense strand
gcaucaggcucauguagaa

SEQ ID NO: 344098 - RNA, 19 nt, Homo sapiens
  misc_RNA (1)...(19): siRNA sense strand
guacugaaguucccugaug

SEQ ID NO: 344099 - RNA, 19 nt, Homo sapiens
  misc_RNA (1)...(19): siRNA sense strand
gaaagaaguacauagaguu

SEQ ID NO: 344100 - RNA, 19 nt, Homo sapiens
  misc_RNA (1)...(19): siRNA sense strand
uagcagaguugaagagaaa

SEQ ID NO: 344101 - RNA, 19 nt, Homo sapiens
  misc_RNA (1)...(19): siRNA sense strand
uaacucagcuggaaucagu

SEQ ID NO: 344102 - RNA, 19 nt, Homo sapiens
  misc_RNA (1)...(19): siRNA sense strand
caaaggagaugcaagaaac

SEQ ID NO: 344103 - RNA, 19 nt, Homo sapiens
  misc_RNA (1)...(19): siRNA sense strand
gaucaggaagccaaacuua

SEQ ID NO: 344104 - RNA, 19 nt, Homo sapiens
  misc_RNA (1)...(19): siRNA sense strand
gagcaggacaucuucauuu

SEQ ID NO: 344105 - RNA, 19 nt, Homo sapiens
  misc_RNA (1)...(19): siRNA sense strand
ggagaacccuggcaaugau

SEQ ID NO: 344106 - RNA, 19 nt, Homo sapiens
  misc_RNA (1)...(19): siRNA sense strand
gaaauaaacccacagaacu

SEQ ID NO: 344107 - RNA, 19 nt, Homo sapiens
  misc_RNA (1)...(19): siRNA sense strand
agaaagugcugcaaaauua

SEQ ID NO: 344108 - RNA, 19 nt, Homo sapiens
  misc_RNA (1)...(19): siRNA sense strand
gcagauccagcuugaguua

SEQ ID NO: 344109 - RNA, 19 nt, Homo sapiens
  misc_RNA (1)...(19): siRNA sense strand
gaaacaauucagucacaua

SEQ ID NO: 344110 - RNA, 19 nt, Homo sapiens
  misc_RNA (1)...(19): siRNA sense strand
gcagaagacauaugaagaa

SEQ ID NO: 344111 - RNA, 19 nt, Homo sapiens
  misc_RNA (1)...(19): siRNA sense strand
aaacagaguuaaagucuca

SEQ ID NO: 344112 - RNA, 19 nt, Homo sapiens
  misc_RNA (1)...(19): siRNA sense strand
gaauuagaagcacaacuua

SEQ ID NO: 344113 - RNA, 19 nt, Homo sapiens
  misc_RNA (1)...(19): siRNA sense strand
uugcacaguuucugaauua

SEQ ID NO: 344114 - RNA, 19 nt, Homo sapiens
  misc_RNA (1)...(19): siRNA sense strand
gaugaagaauuccagaguu

SEQ ID NO: 344115 - RNA, 19 nt, Homo sapiens
  misc_RNA (1)...(19): siRNA sense strand
aagaagagaugaacaagga

SEQ ID NO: 344116 - RNA, 19 nt, Homo sapiens
  misc_RNA (1)...(19): siRNA sense strand
cagcagaaguuguuggauu

SEQ ID NO: 344117 - RNA, 19 nt, Homo sapiens
  misc_RNA (1)...(19): siRNA sense strand
gaagcaaacagaacuagaa

SEQ ID NO: 344118 - RNA, 19 nt, Homo sapiens
  misc_RNA (1)...(19): siRNA sense strand
ggaaaugaaagaagaagaa

SEQ ID NO: 344119 - RNA, 19 nt, Homo sapiens
  misc_RNA (1)...(19): siRNA sense strand
gaucuggaguuuaaauuag

SEQ ID NO: 344120 - RNA, 19 nt, Homo sapiens
  misc_RNA (1)...(19): siRNA sense strand
uaagggaccugcagacuca

SEQ ID NO: 344121 - RNA, 19 nt, Homo sapiens
  misc_RNA (1)...(19): siRNA sense strand
ugaauuacaggaacaguua

SEQ ID NO: 344122 - RNA, 19 nt, Homo sapiens
  misc_RNA (1)...(19): siRNA sense strand
guuguuaucucaaauggaa

SEQ ID NO: 344123 - RNA, 19 nt, Homo sapiens
  misc_RNA (1)...(19): siRNA sense strand
aaagcacagucaagauuua

SEQ ID NO: 344124 - RNA, 19 nt, Homo sapiens
  misc_RNA (1)...(19): siRNA sense strand
caaagaaacaucugcaaga

SEQ ID NO: 344125 - RNA, 19 nt, Homo sapiens
  misc_RNA (1)...(19): siRNA sense strand
cuaccgaauuugaguauuu

SEQ ID NO: 344126 - RNA, 19 nt, Homo sapiens
  misc_RNA (1)...(19): siRNA sense strand
uggagaaccuaccgaauuu

SEQ ID NO: 344127 - RNA, 19 nt, Homo sapiens
  misc_RNA (1)...(19): siRNA sense strand
gaacagauucacaauuuag

SEQ ID NO: 344128 - RNA, 19 nt, Homo sapiens
  misc_RNA (1)...(19): siRNA sense strand
gcaagaauuggaaauacua

SEQ ID NO: 344129 - RNA, 19 nt, Homo sapiens
  misc_RNA (1)...(19): siRNA sense strand
ucacauugaugaaagaaga

SEQ ID NO: 344130 - RNA, 19 nt, Homo sapiens
  misc_RNA (1)...(19): siRNA sense strand
gaaaaccgaagccuuauua

SEQ ID NO: 344131 - RNA, 19 nt, Homo sapiens
  misc_RNA (1)...(19): siRNA sense strand
ggagaugcaagaaacguua

SEQ ID NO: 344132 - RNA, 19 nt, Homo sapiens
  misc_RNA (1)...(19): siRNA sense strand
ggaggacaguauucauauu

SEQ ID NO: 344133 - RNA, 19 nt, Homo sapiens
  misc_RNA (1)...(19): siRNA sense strand
agaaagauguuuguacuga

SEQ ID NO: 344134 - RNA, 19 nt, Homo sapiens
  misc_RNA (1)...(19): siRNA sense strand
ggaauuacgggaacagaaa

SEQ ID NO: 344135 - RNA, 19 nt, Homo sapiens
  misc_RNA (1)...(19): siRNA sense strand
gaauuagaggaccauauua

SEQ ID NO: 344136 - RNA, 19 nt, Homo sapiens
  misc_RNA (1)...(19): siRNA sense strand
agaaagaccuucgaauguu

SEQ ID NO: 344137 - RNA, 19 nt, Homo sapiens
  misc_RNA (1)...(19): siRNA sense strand
gcaggaaaguagagaauua

SEQ ID NO: 344138 - RNA, 19 nt, Homo sapiens
  misc_RNA (1)...(19): siRNA sense strand
gaaaggaaauugauacaga

SEQ ID NO: 344139 - RNA, 19 nt, Homo sapiens
  misc_RNA (1)...(19): siRNA sense strand
cgaaacagcugucaagaaa

SEQ ID NO: 344140 - RNA, 19 nt, Homo sapiens
  misc_RNA (1)...(19): siRNA sense strand
gagaagggaccaaguauua

SEQ ID NO: 344141 - RNA, 19 nt, Homo sapiens
  misc_RNA (1)...(19): siRNA sense strand
gagaauuacugcaaaguuu

SEQ ID NO: 344142 - RNA, 19 nt, Homo sapiens
  misc_RNA (1)...(19): siRNA sense strand
gagcaaggauucaaauuug

SEQ ID NO: 344143 - RNA, 19 nt, Homo sapiens
  misc_RNA (1)...(19): siRNA sense strand
ggagaaguguucauuauug

SEQ ID NO: 344144 - RNA, 19 nt, Homo sapiens
  misc_RNA (1)...(19): siRNA sense strand
gcggauaacuauggaauua

SEQ ID NO: 344145 - RNA, 19 nt, Homo sapiens
  misc_RNA (1)...(19): siRNA sense strand
gaagauggauggaauaaac

SEQ ID NO: 344146 - RNA, 19 nt, Homo sapiens
  misc_RNA (1)...(19): siRNA sense strand
ggagaaggauuucaguuug

SEQ ID NO: 344147 - RNA, 19 nt, Homo sapiens
  misc_RNA (1)...(19): siRNA sense strand
acagagagcugaagaaaug

SEQ ID NO: 344148 - RNA, 19 nt, Homo sapiens
  misc_RNA (1)...(19): siRNA sense strand
ggcauacaaugaagaauua

SEQ ID NO: 344149 - RNA, 19 nt, Homo sapiens
  misc_RNA (1)...(19): siRNA sense strand
uugcaaagcuguauuauga

SEQ ID NO: 344150 - RNA, 19 nt, Homo sapiens
  misc_RNA (1)...(19): siRNA sense strand
guaaacagcuuuguacaga

SEQ ID NO: 344151 - RNA, 19 nt, Homo sapiens
  misc_RNA (1)...(19): siRNA sense strand
acaaagccguugaauguua

SEQ ID NO: 344152 - RNA, 19 nt, Homo sapiens
  misc_RNA (1)...(19): siRNA sense strand
aaccagagcuugaagauuu

SEQ ID NO: 344153 - RNA, 19 nt, Homo sapiens
  misc_RNA (1)...(19): siRNA sense strand
gaugaagaaucugauguua

SEQ ID NO: 344154 - RNA, 19 nt, Homo sapiens
  misc_RNA (1)...(19): siRNA sense strand
gaagaagacgcacacauaa

SEQ ID NO: 344155 - RNA, 19 nt, Homo sapiens
  misc_RNA (1)...(19): siRNA sense strand
gcagcggucuuaauucuuu

SEQ ID NO: 344156 - RNA, 19 nt, Homo sapiens
  misc_RNA (1)...(19): siRNA sense strand
gaauuaaacccaacacaaa

SEQ ID NO: 344157 - RNA, 19 nt, Homo sapiens
  misc_RNA (1)...(19): siRNA sense strand
gaagaugcuuuggaugaua

SEQ ID NO: 344158 - RNA, 19 nt, Homo sapiens
  misc_RNA (1)...(19): siRNA sense strand
gcaaggagauggcuauagu

SEQ ID NO: 344159 - RNA, 19 nt, Homo sapiens
  misc_RNA (1)...(19): siRNA sense strand
uguaacagcugcucauuaa

SEQ ID NO: 344160 - RNA, 19 nt, Homo sapiens
  misc_RNA (1)...(19): siRNA sense strand
gaauaacuaucacagaaug

SEQ ID NO: 344161 - RNA, 19 nt, Homo sapiens
  misc_RNA (1)...(19): siRNA sense strand
gagccaaacuuuauagaug

SEQ ID NO: 344162 - RNA, 19 nt, Homo sapiens
  misc_RNA (1)...(19): siRNA sense strand
gaagacauguuugcuaaga

SEQ ID NO: 344163 - RNA, 19 nt, Homo sapiens
  misc_RNA (1)...(19): siRNA sense strand
gaaggucacugggauugua

SEQ ID NO: 344164 - RNA, 19 nt, Homo sapiens
  misc_RNA (1)...(19): siRNA sense strand
gcaccugaaucaauaugua

SEQ ID NO: 344165 - RNA, 19 nt, Homo sapiens
  misc_RNA (1)...(19): siRNA sense strand
caaaccacguuauuacuaa

SEQ ID NO: 344166 - RNA, 19 nt, Homo sapiens
  misc_RNA (1)...(19): siRNA sense strand
caagauaguuucauuugga

SEQ ID NO: 344167 - RNA, 19 nt, Homo sapiens
  misc_RNA (1)...(19): siRNA sense strand
gcugauggauuuaaauuug

SEQ ID NO: 344168 - RNA, 19 nt, Homo sapiens
  misc_RNA (1)...(19): siRNA sense strand
gcgaagugaugauauguuu

SEQ ID NO: 344169 - RNA, 19 nt, Homo sapiens
  misc_RNA (1)...(19): siRNA sense strand
gaaaugaaguugcaugacu

SEQ ID NO: 344170 - RNA, 19 nt, Homo sapiens
  misc_RNA (1)...(19): siRNA sense strand
gcacagggcucucauuugc

SEQ ID NO: 344171 - RNA, 19 nt, Homo sapiens
  misc_RNA (1)...(19): siRNA sense strand
gaagaaaccacaagagaga

SEQ ID NO: 344172 - RNA, 19 nt, Homo sapiens
  misc_RNA (1)...(19): siRNA sense strand
gaaagggacagaaagagua

SEQ ID NO: 344173 - RNA, 19 nt, Homo sapiens
  misc_RNA (1)...(19): siRNA sense strand
ucccaaagcucacagauuu

SEQ ID NO: 344174 - RNA, 19 nt, Homo sapiens
  misc_RNA (1)...(19): siRNA sense strand
ucaaacaacugcaauuuca

SEQ ID NO: 344175 - RNA, 19 nt, Homo sapiens
  misc_RNA (1)...(19): siRNA sense strand
gauaugaaauugacaccaa

SEQ ID NO: 344176 - RNA, 19 nt, Homo sapiens
  misc_RNA (1)...(19): siRNA sense strand
gaugguaccuucuuucugu

SEQ ID NO: 344177 - RNA, 19 nt, Homo sapiens
  misc_RNA (1)...(19): siRNA sense strand
ggauugcaguucaugcuua

SEQ ID NO: 344178 - RNA, 19 nt, Homo sapiens
  misc_RNA (1)...(19): siRNA sense strand
gaagaagcccagagcauuu

SEQ ID NO: 344179 - RNA, 19 nt, Homo sapiens
  misc_RNA (1)...(19): siRNA sense strand
aggaauaucuggagucuuu

SEQ ID NO: 344180 - RNA, 19 nt, Homo sapiens
  misc_RNA (1)...(19): siRNA sense strand
guaagucaguggaaagaaa

SEQ ID NO: 344181 - RNA, 19 nt, Homo sapiens
  misc_RNA (1)...(19): siRNA sense strand
gagggaauguucacuaaga

SEQ ID NO: 344182 - RNA, 19 nt, Homo sapiens
  misc_RNA (1)...(19): siRNA sense strand
gagggaauguucacuaaga

SEQ ID NO: 344183 - RNA, 19 nt, Homo sapiens
  misc_RNA (1)...(19): siRNA sense strand
gagggaauguucacuaaga

SEQ ID NO: 344184 - RNA, 19 nt, Homo sapiens
  misc_RNA (1)...(19): siRNA sense strand
gaaaugaaccuacuguauc

SEQ ID NO: 344185 - RNA, 19 nt, Homo sapiens
  misc_RNA (1)...(19): siRNA sense strand
ugaggaagaugaagaagaa

SEQ ID NO: 344186 - RNA, 19 nt, Homo sapiens
  misc_RNA (1)...(19): siRNA sense strand
gcacauguugcuaaacuua

SEQ ID NO: 344187 - RNA, 19 nt, Homo sapiens
  misc_RNA (1)...(19): siRNA sense strand
ggaauucauugccugcuuu

SEQ ID NO: 344188 - RNA, 19 nt, Homo sapiens
  misc_RNA (1)...(19): siRNA sense strand
gaggagauaucaccaaaca

SEQ ID NO: 344189 - RNA, 19 nt, Homo sapiens
  misc_RNA (1)...(19): siRNA sense strand
agaaguagcugauuguuuc

SEQ ID NO: 344190 - RNA, 19 nt, Homo sapiens
  misc_RNA (1)...(19): siRNA sense strand
aaagaacucugauaucgaa

SEQ ID NO: 344191 - RNA, 19 nt, Homo sapiens
  misc_RNA (1)...(19): siRNA sense strand
gggcaaaacucuacagaua

SEQ ID NO: 344192 - RNA, 19 nt, Homo sapiens
  misc_RNA (1)...(19): siRNA sense strand
gaccagggacuaccuaaua

SEQ ID NO: 344193 - RNA, 19 nt, Homo sapiens
  misc_RNA (1)...(19): siRNA sense strand
gaagagaacaaguacuaaa

SEQ ID NO: 344194 - RNA, 19 nt, Homo sapiens
  misc_RNA (1)...(19): siRNA sense strand
gcagaacauuuggacuuua

SEQ ID NO: 344195 - RNA, 19 nt, Homo sapiens
  misc_RNA (1)...(19): siRNA sense strand
gcagugagauuuaaaacua

SEQ ID NO: 344196 - RNA, 19 nt, Homo sapiens
  misc_RNA (1)...(19): siRNA sense strand
aaaugcaccugaaucaaua

SEQ ID NO: 344197 - RNA, 19 nt, Homo sapiens
  misc_RNA (1)...(19): siRNA sense strand
gaauagaccagauuauguu

SEQ ID NO: 344198 - RNA, 19 nt, Homo sapiens
  misc_RNA (1)...(19): siRNA sense strand
gaauuuaagucaaccaaag

SEQ ID NO: 344199 - RNA, 19 nt, Homo sapiens
  misc_RNA (1)...(19): siRNA sense strand
caacacagccaacuccuuu

SEQ ID NO: 344200 - RNA, 19 nt, Homo sapiens
  misc_RNA (1)...(19): siRNA sense strand
gaagaacaguauuccugaa

SEQ ID NO: 344201 - RNA, 19 nt, Homo sapiens
  misc_RNA (1)...(19): siRNA sense strand
gagacaaauuugaagauga

SEQ ID NO: 344202 - RNA, 19 nt, Homo sapiens
  misc_RNA (1)...(19): siRNA sense strand
gcaaaccacguuauuacua

SEQ ID NO: 344203 - RNA, 19 nt, Homo sapiens
  misc_RNA (1)...(19): siRNA sense strand
ccaaauguauugcuuguca

SEQ ID NO: 344204 - RNA, 19 nt, Homo sapiens
  misc_RNA (1)...(19): siRNA sense strand
ccaaauguauugcuuguca

SEQ ID NO: 344205 - RNA, 19 nt, Homo sapiens
  misc_RNA (1)...(19): siRNA sense strand
ccaaauguauugcuuguca

SEQ ID NO: 344206 - RNA, 19 nt, Homo sapiens
  misc_RNA (1)...(19): siRNA sense strand
ugaagaagacgcacacaua

SEQ ID NO: 344207 - RNA, 19 nt, Homo sapiens
  misc_RNA (1)...(19): siRNA sense strand
gaaccaggauauuucacaa

SEQ ID NO: 344208 - RNA, 19 nt, Homo sapiens
  misc_RNA (1)...(19): siRNA sense strand
gaguggaucugaaagcaaa

SEQ ID NO: 344209 - RNA, 19 nt, Homo sapiens
  misc_RNA (1)...(19): siRNA sense strand
agacaaagccguugaaugu

SEQ ID NO: 344210 - RNA, 19 nt, Homo sapiens
  misc_RNA (1)...(19): siRNA sense strand
cgacagaagucaaugaaag

SEQ ID NO: 344211 - RNA, 19 nt, Homo sapiens
  misc_RNA (1)...(19): siRNA sense strand
cagaacauuuggacuuuaa

SEQ ID NO: 344212 - RNA, 19 nt, Homo sapiens
  misc_RNA (1)...(19): siRNA sense strand
ggagauaucaccaaacaug

SEQ ID NO: 344213 - RNA, 19 nt, Homo sapiens
  misc_RNA (1)...(19): siRNA sense strand
gaagaaguaguucauaaug

SEQ ID NO: 344214 - RNA, 19 nt, Homo sapiens
  misc_RNA (1)...(19): siRNA sense strand
gaugauagugucaguagua

SEQ ID NO: 344215 - RNA, 19 nt, Homo sapiens
  misc_RNA (1)...(19): siRNA sense strand
ccagggagaucuuccuaaa

SEQ ID NO: 344216 - RNA, 19 nt, Homo sapiens
  misc_RNA (1)...(19): siRNA sense strand
cagaacaacuugcuauuag

SEQ ID NO: 344217 - RNA, 19 nt, Homo sapiens
  misc_RNA (1)...(19): siRNA sense strand
agaaagaaaugcaggaguu

SEQ ID NO: 344218 - RNA, 19 nt, Homo sapiens
  misc_RNA (1)...(19): siRNA sense strand
aaacagcuuuguacagaaa

SEQ ID NO: 344219 - RNA, 19 nt, Homo sapiens
  misc_RNA (1)...(19): siRNA sense strand
cuaaagaaguagcugauug

SEQ ID NO: 344220 - RNA, 19 nt, Homo sapiens
  misc_RNA (1)...(19): siRNA sense strand
gggaagacuuucaaucaga

SEQ ID NO: 344221 - RNA, 19 nt, Homo sapiens
  misc_RNA (1)...(19): siRNA sense strand
gaagggaccaaguauuaaa

SEQ ID NO: 344222 - RNA, 19 nt, Homo sapiens
  misc_RNA (1)...(19): siRNA sense strand
gcaaguagcccugugagaa

SEQ ID NO: 344223 - RNA, 19 nt, Homo sapiens
  misc_RNA (1)...(19): siRNA sense strand
ggaacaggauuuaaaagua

SEQ ID NO: 344224 - RNA, 19 nt, Homo sapiens
  misc_RNA (1)...(19): siRNA sense strand
gcgaagagaacaaguacua

SEQ ID NO: 344225 - RNA, 19 nt, Homo sapiens
  misc_RNA (1)...(19): siRNA sense strand
gcaaagcuguauuaugaag

SEQ ID NO: 344226 - RNA, 19 nt, Homo sapiens
  misc_RNA (1)...(19): siRNA sense strand
gcauuuagcuguucguuuu

SEQ ID NO: 344227 - RNA, 19 nt, Homo sapiens
  misc_RNA (1)...(19): siRNA sense strand
agaguggacugaaagauuu

SEQ ID NO: 344228 - RNA, 19 nt, Homo sapiens
  misc_RNA (1)...(19): siRNA sense strand
gaagaaauaacuagcacaa

SEQ ID NO: 344229 - RNA, 19 nt, Homo sapiens
  misc_RNA (1)...(19): siRNA sense strand
guagauuugucaacuagaa

SEQ ID NO: 344230 - RNA, 19 nt, Homo sapiens
  misc_RNA (1)...(19): siRNA sense strand
guacagacccuuaaggaau

SEQ ID NO: 344231 - RNA, 19 nt, Homo sapiens
  misc_RNA (1)...(19): siRNA sense strand
ggagacaaauuugaagaug

SEQ ID NO: 344232 - RNA, 19 nt, Homo sapiens
  misc_RNA (1)...(19): siRNA sense strand
uaaaguuggugaagaugaa

SEQ ID NO: 344233 - RNA, 19 nt, Homo sapiens
  misc_RNA (1)...(19): siRNA sense strand
acacugggcucagaaauga

SEQ ID NO: 344234 - RNA, 19 nt, Homo sapiens
  misc_RNA (1)...(19): siRNA sense strand
ucacugggauuguaguauu

SEQ ID NO: 344235 - RNA, 19 nt, Homo sapiens
  misc_RNA (1)...(19): siRNA sense strand
gaagaugggucagcauagu

SEQ ID NO: 344236 - RNA, 19 nt, Homo sapiens
  misc_RNA (1)...(19): siRNA sense strand
uacagacccuuaaggaaua

SEQ ID NO: 344237 - RNA, 19 nt, Homo sapiens
  misc_RNA (1)...(19): siRNA sense strand
cuacgaaccugaagccuaa

SEQ ID NO: 344238 - RNA, 19 nt, Homo sapiens
  misc_RNA (1)...(19): siRNA sense strand
ccaaagagcaagugacaaa

SEQ ID NO: 344239 - RNA, 19 nt, Homo sapiens
  misc_RNA (1)...(19): siRNA sense strand
ggaaggguaucaagacuac

SEQ ID NO: 344240 - RNA, 19 nt, Homo sapiens
  misc_RNA (1)...(19): siRNA sense strand
gagcaagugacaaauguug

SEQ ID NO: 344241 - RNA, 19 nt, Homo sapiens
  misc_RNA (1)...(19): siRNA sense strand
caaacaggguguggcagaa

SEQ ID NO: 344242 - RNA, 19 nt, Homo sapiens
  misc_RNA (1)...(19): siRNA sense strand
ugacagcaguagcccagaa

SEQ ID NO: 344243 - RNA, 19 nt, Homo sapiens
  misc_RNA (1)...(19): siRNA sense strand
gaccaaagagcaagugaca

SEQ ID NO: 344244 - RNA, 19 nt, Homo sapiens
  misc_RNA (1)...(19): siRNA sense strand
aagagcaagugacaaaugu

SEQ ID NO: 344245 - RNA, 19 nt, Homo sapiens
  misc_RNA (1)...(19): siRNA sense strand
ggagggagcagggagcauu

SEQ ID NO: 344246 - RNA, 19 nt, Homo sapiens
  misc_RNA (1)...(19): siRNA sense strand
gcaagugacaaauguugga

SEQ ID NO: 344247 - RNA, 19 nt, Homo sapiens
  misc_RNA (1)...(19): siRNA sense strand
uggcaacaguggcugagaa

SEQ ID NO: 344248 - RNA, 19 nt, Homo sapiens
  misc_RNA (1)...(19): siRNA sense strand
aaagagcaagugacaaaug

SEQ ID NO: 344249 - RNA, 19 nt, Homo sapiens
  misc_RNA (1)...(19): siRNA sense strand
gcagaagcagcaggaaaga

SEQ ID NO: 344250 - RNA, 19 nt, Homo sapiens
  misc_RNA (1)...(19): siRNA sense strand
caacaguggcugagaagac

SEQ ID NO: 344251 - RNA, 19 nt, Homo sapiens
  misc_RNA (1)...(19): siRNA sense strand
ggcagaagcagcaggaaag

SEQ ID NO: 344252 - RNA, 19 nt, Homo sapiens
  misc_RNA (1)...(19): siRNA sense strand
uggcugagaagaccaaaga

SEQ ID NO: 344253 - RNA, 19 nt, Homo sapiens
  misc_RNA (1)...(19): siRNA sense strand
gaagcagcaggaaagacaa

SEQ ID NO: 344254 - RNA, 19 nt, Homo sapiens
  misc_RNA (1)...(19): siRNA sense strand
ugagaagaccaaagagcaa

SEQ ID NO: 344255 - RNA, 19 nt, Homo sapiens
  misc_RNA (1)...(19): siRNA sense strand
agaagcagcaggaaagaca

SEQ ID NO: 344256 - RNA, 19 nt, Homo sapiens
  misc_RNA (1)...(19): siRNA sense strand
ucaagacuacgaaccugaa

SEQ ID NO: 344257 - RNA, 19 nt, Homo sapiens
  misc_RNA (1)...(19): siRNA sense strand
gaagaccaaagagcaagug

SEQ ID NO: 344258 - RNA, 19 nt, Homo sapiens
  misc_RNA (1)...(19): siRNA sense strand
uguggcugcugcugagaaa

SEQ ID NO: 344259 - RNA, 19 nt, Homo sapiens
  misc_RNA (1)...(19): siRNA sense strand
caaagagcaagugacaaau

SEQ ID NO: 344260 - RNA, 19 nt, Homo sapiens
  misc_RNA (1)...(19): siRNA sense strand
gagggagcagggagcauug

SEQ ID NO: 344261 - RNA, 19 nt, Homo sapiens
  misc_RNA (1)...(19): siRNA sense strand
gaggguguucucuauguag

SEQ ID NO: 344262 - RNA, 19 nt, Homo sapiens
  misc_RNA (1)...(19): siRNA sense strand
gcaguggugacggguguga

SEQ ID NO: 344263 - RNA, 19 nt, Homo sapiens
  misc_RNA (1)...(19): siRNA sense strand
cuacgaaccugaagccuaa

SEQ ID NO: 344264 - RNA, 19 nt, Homo sapiens
  misc_RNA (1)...(19): siRNA sense strand
ccaaagagcaagugacaaa

SEQ ID NO: 344265 - RNA, 19 nt, Homo sapiens
  misc_RNA (1)...(19): siRNA sense strand
ggaaggguaucaagacuac

SEQ ID NO: 344266 - RNA, 19 nt, Homo sapiens
  misc_RNA (1)...(19): siRNA sense strand
gagcaagugacaaauguug

SEQ ID NO: 344267 - RNA, 19 nt, Homo sapiens
  misc_RNA (1)...(19): siRNA sense strand
caaacaggguguggcagaa

SEQ ID NO: 344268 - RNA, 19 nt, Homo sapiens
  misc_RNA (1)...(19): siRNA sense strand
ugacagcaguagcccagaa

SEQ ID NO: 344269 - RNA, 19 nt, Homo sapiens
  misc_RNA (1)...(19): siRNA sense strand
gaccaaagagcaagugaca

SEQ ID NO: 344270 - RNA, 19 nt, Homo sapiens
  misc_RNA (1)...(19): siRNA sense strand
aagagcaagugacaaaugu

SEQ ID NO: 344271 - RNA, 19 nt, Homo sapiens
  misc_RNA (1)...(19): siRNA sense strand
ggagggagcagggagcauu

SEQ ID NO: 344272 - RNA, 19 nt, Homo sapiens
  misc_RNA (1)...(19): siRNA sense strand
gcaagugacaaauguugga

SEQ ID NO: 344273 - RNA, 19 nt, Homo sapiens
  misc_RNA (1)...(19): siRNA sense strand
uggcaacaguggcugagaa

SEQ ID NO: 344274 - RNA, 19 nt, Homo sapiens
  misc_RNA (1)...(19): siRNA sense strand
aaagagcaagugacaaaug

SEQ ID NO: 344275 - RNA, 19 nt, Homo sapiens
  misc_RNA (1)...(19): siRNA sense strand
gcagaagcagcaggaaaga

SEQ ID NO: 344276 - RNA, 19 nt, Homo sapiens
  misc_RNA (1)...(19): siRNA sense strand
caacaguggcugagaagac

SEQ ID NO: 344277 - RNA, 19 nt, Homo sapiens
  misc_RNA (1)...(19): siRNA sense strand
ggcagaagcagcaggaaag

SEQ ID NO: 344278 - RNA, 19 nt, Homo sapiens
  misc_RNA (1)...(19): siRNA sense strand
uggcugagaagaccaaaga

SEQ ID NO: 344279 - RNA, 19 nt, Homo sapiens
  misc_RNA (1)...(19): siRNA sense strand
gaagcagcaggaaagacaa

SEQ ID NO: 344280 - RNA, 19 nt, Homo sapiens
  misc_RNA (1)...(19): siRNA sense strand
ugagaagaccaaagagcaa

SEQ ID NO: 344281 - RNA, 19 nt, Homo sapiens
  misc_RNA (1)...(19): siRNA sense strand
agaagcagcaggaaagaca

SEQ ID NO: 344282 - RNA, 19 nt, Homo sapiens
  misc_RNA (1)...(19): siRNA sense strand
ucaagacuacgaaccugaa

SEQ ID NO: 344283 - RNA, 19 nt, Homo sapiens
  misc_RNA (1)...(19): siRNA sense strand
gaagaccaaagagcaagug

SEQ ID NO: 344284 - RNA, 19 nt, Homo sapiens
  misc_RNA (1)...(19): siRNA sense strand
uguggcugcugcugagaaa

SEQ ID NO: 344285 - RNA, 19 nt, Homo sapiens
  misc_RNA (1)...(19): siRNA sense strand
caaagagcaagugacaaau

SEQ ID NO: 344286 - RNA, 19 nt, Homo sapiens
  misc_RNA (1)...(19): siRNA sense strand
gagggagcagggagcauug

SEQ ID NO: 344287 - RNA, 19 nt, Homo sapiens
  misc_RNA (1)...(19): siRNA sense strand
gaggguguucucuauguag

SEQ ID NO: 344288 - RNA, 19 nt, Homo sapiens
  misc_RNA (1)...(19): siRNA sense strand
gcaguggugacggguguga

SEQ ID NO: 344289 - RNA, 19 nt, Homo sapiens
  misc_RNA (1)...(19): siRNA sense strand
uagcagagcuuaagaauga

SEQ ID NO: 344290 - RNA, 19 nt, Homo sapiens
  misc_RNA (1)...(19): siRNA sense strand
gaagagaaauggaagagaa

SEQ ID NO: 344291 - RNA, 19 nt, Homo sapiens
  misc_RNA (1)...(19): siRNA sense strand
gaaguucgaugaagaauuc

SEQ ID NO: 344292 - RNA, 19 nt, Homo sapiens
  misc_RNA (1)...(19): siRNA sense strand
gaucagagauacuaaauca

SEQ ID NO: 344293 - RNA, 19 nt, Homo sapiens
  misc_RNA (1)...(19): siRNA sense strand
gaagauacucaacgaauua

SEQ ID NO: 344294 - RNA, 19 nt, Homo sapiens
  misc_RNA (1)...(19): siRNA sense strand
gagcagaaauggaugauau

SEQ ID NO: 344295 - RNA, 19 nt, Homo sapiens
  misc_RNA (1)...(19): siRNA sense strand
agagaaagcugaacaagaa

SEQ ID NO: 344296 - RNA, 19 nt, Homo sapiens
  misc_RNA (1)...(19): siRNA sense strand
gaugaacgaucuuugaauu

SEQ ID NO: 344297 - RNA, 19 nt, Homo sapiens
  misc_RNA (1)...(19): siRNA sense strand
cgauuuaacucaucugaua

SEQ ID NO: 344298 - RNA, 19 nt, Homo sapiens
  misc_RNA (1)...(19): siRNA sense strand
caugaugacugaaauagua

SEQ ID NO: 344299 - RNA, 19 nt, Homo sapiens
  misc_RNA (1)...(19): siRNA sense strand
caaagaaguucgaugaaga

SEQ ID NO: 344300 - RNA, 19 nt, Homo sapiens
  misc_RNA (1)...(19): siRNA sense strand
gaagacauaagaaacguua

SEQ ID NO: 344301 - RNA, 19 nt, Homo sapiens
  misc_RNA (1)...(19): siRNA sense strand
gaucauaucgcaugccaua

SEQ ID NO: 344302 - RNA, 19 nt, Homo sapiens
  misc_RNA (1)...(19): siRNA sense strand
caaagaagaugaccuaacu

SEQ ID NO: 344303 - RNA, 19 nt, Homo sapiens
  misc_RNA (1)...(19): siRNA sense strand
ugaccuaacugaauuauca

SEQ ID NO: 344304 - RNA, 19 nt, Homo sapiens
  misc_RNA (1)...(19): siRNA sense strand
gaagaugaccuaacugaau

SEQ ID NO: 344305 - RNA, 19 nt, Homo sapiens
  misc_RNA (1)...(19): siRNA sense strand
aaagaacgcagaagcauua

SEQ ID NO: 344306 - RNA, 19 nt, Homo sapiens
  misc_RNA (1)...(19): siRNA sense strand
gaacaaggcgaaaguugaa

SEQ ID NO: 344307 - RNA, 19 nt, Homo sapiens
  misc_RNA (1)...(19): siRNA sense strand
gaaggacacugcugcugaa

SEQ ID NO: 344308 - RNA, 19 nt, Homo sapiens
  misc_RNA (1)...(19): siRNA sense strand
caaagaacuugaagcagaa

SEQ ID NO: 344309 - RNA, 19 nt, Homo sapiens
  misc_RNA (1)...(19): siRNA sense strand
gaauuacgaucggguauau

SEQ ID NO: 344310 - RNA, 19 nt, Homo sapiens
  misc_RNA (1)...(19): siRNA sense strand
gauugaacccacagaauua

SEQ ID NO: 344311 - RNA, 19 nt, Homo sapiens
  misc_RNA (1)...(19): siRNA sense strand
uaaaugcccuugucacuuc

SEQ ID NO: 344312 - RNA, 19 nt, Homo sapiens
  misc_RNA (1)...(19): siRNA sense strand
ucaggaagccuugcaauua

SEQ ID NO: 344313 - RNA, 19 nt, Homo sapiens
  misc_RNA (1)...(19): siRNA sense strand
caaauacaggcaaagauua

SEQ ID NO: 344314 - RNA, 19 nt, Homo sapiens
  misc_RNA (1)...(19): siRNA sense strand
gaaagugcaagcaaaguuu

SEQ ID NO: 344315 - RNA, 19 nt, Homo sapiens
  misc_RNA (1)...(19): siRNA sense strand
gcagaagcauuagaagaaa

SEQ ID NO: 344316 - RNA, 19 nt, Homo sapiens
  misc_RNA (1)...(19): siRNA sense strand
gaacgcagaagcauuagaa

SEQ ID NO: 344317 - RNA, 19 nt, Homo sapiens
  misc_RNA (1)...(19): siRNA sense strand
gcacaaguacucucaaguu

SEQ ID NO: 344318 - RNA, 19 nt, Homo sapiens
  misc_RNA (1)...(19): siRNA sense strand
gaaauaacagggaacgauu

SEQ ID NO: 344319 - RNA, 19 nt, Homo sapiens
  misc_RNA (1)...(19): siRNA sense strand
ugaugaagcucuaugagaa

SEQ ID NO: 344320 - RNA, 19 nt, Homo sapiens
  misc_RNA (1)...(19): siRNA sense strand
gaacucaggcucaagaaau

SEQ ID NO: 344321 - RNA, 19 nt, Homo sapiens
  misc_RNA (1)...(19): siRNA sense strand
gcucagccauuauaugaug

SEQ ID NO: 344322 - RNA, 19 nt, Homo sapiens
  misc_RNA (1)...(19): siRNA sense strand
gaacgugacaucaagaaau

SEQ ID NO: 344323 - RNA, 19 nt, Homo sapiens
  misc_RNA (1)...(19): siRNA sense strand
gaagacaaguuugagaauc

SEQ ID NO: 344324 - RNA, 19 nt, Homo sapiens
  misc_RNA (1)...(19): siRNA sense strand
ggacaugaaccuuaacgaa

SEQ ID NO: 344325 - RNA, 19 nt, Homo sapiens
  misc_RNA (1)...(19): siRNA sense strand
ggaaguauuggaucucuuu

SEQ ID NO: 344326 - RNA, 19 nt, Homo sapiens
  misc_RNA (1)...(19): siRNA sense strand
gaacgaucuuugaauuugu

SEQ ID NO: 344327 - RNA, 19 nt, Homo sapiens
  misc_RNA (1)...(19): siRNA sense strand
aagaucaacuuccuuugua

SEQ ID NO: 344328 - RNA, 19 nt, Homo sapiens
  misc_RNA (1)...(19): siRNA sense strand
gaagaacacauaaacaaca

SEQ ID NO: 344329 - RNA, 19 nt, Homo sapiens
  misc_RNA (1)...(19): siRNA sense strand
ccaggaauaucacuuaauc

SEQ ID NO: 344330 - RNA, 19 nt, Homo sapiens
  misc_RNA (1)...(19): siRNA sense strand
gcagaaauccagcaacuuc

SEQ ID NO: 344331 - RNA, 19 nt, Homo sapiens
  misc_RNA (1)...(19): siRNA sense strand
aaacaaagaagaugaccua

SEQ ID NO: 344332 - RNA, 19 nt, Homo sapiens
  misc_RNA (1)...(19): siRNA sense strand
gaucggguauaucagauga

SEQ ID NO: 344333 - RNA, 19 nt, Homo sapiens
  misc_RNA (1)...(19): siRNA sense strand
aaacaacccuuuugcauuu

SEQ ID NO: 344334 - RNA, 19 nt, Homo sapiens
  misc_RNA (1)...(19): siRNA sense strand
uaacaacuuuggccaugaa

SEQ ID NO: 344335 - RNA, 19 nt, Homo sapiens
  misc_RNA (1)...(19): siRNA sense strand
ugaacgaucuuugaauuug

SEQ ID NO: 344336 - RNA, 19 nt, Homo sapiens
  misc_RNA (1)...(19): siRNA sense strand
caaagaagaaagugaaaga

SEQ ID NO: 344337 - RNA, 19 nt, Homo sapiens
  misc_RNA (1)...(19): siRNA sense strand
caucaaaccaagcaucaua

SEQ ID NO: 344338 - RNA, 19 nt, Homo sapiens
  misc_RNA (1)...(19): siRNA sense strand
agacuggugugauggauaa

SEQ ID NO: 344339 - RNA, 19 nt, Homo sapiens
  misc_RNA (1)...(19): siRNA sense strand
aagaugaccuaacugaauu

SEQ ID NO: 344340 - RNA, 19 nt, Homo sapiens
  misc_RNA (1)...(19): siRNA sense strand
gugaaagaacugagaauuu

SEQ ID NO: 344341 - RNA, 19 nt, Homo sapiens
  misc_RNA (1)...(19): siRNA sense strand
uaaucuaccuuauggaaug

SEQ ID NO: 344342 - RNA, 19 nt, Homo sapiens
  misc_RNA (1)...(19): siRNA sense strand
gauccagacuucaaauaca

SEQ ID NO: 344343 - RNA, 19 nt, Homo sapiens
  misc_RNA (1)...(19): siRNA sense strand
caacaugaugacugaaaua

SEQ ID NO: 344344 - RNA, 19 nt, Homo sapiens
  misc_RNA (1)...(19): siRNA sense strand
gaaagugaaagaacugaga

SEQ ID NO: 344345 - RNA, 19 nt, Homo sapiens
  misc_RNA (1)...(19): siRNA sense strand
agaagauacucaacgaauu

SEQ ID NO: 344346 - RNA, 19 nt, Homo sapiens
  misc_RNA (1)...(19): siRNA sense strand
gauggauaaucuucuagaa

SEQ ID NO: 344347 - RNA, 19 nt, Homo sapiens
  misc_RNA (1)...(19): siRNA sense strand
gaacacauaaacaacauca

SEQ ID NO: 344348 - RNA, 19 nt, Homo sapiens
  misc_RNA (1)...(19): siRNA sense strand
agaauuaucugagaacugu

SEQ ID NO: 344349 - RNA, 19 nt, Homo sapiens
  misc_RNA (1)...(19): siRNA sense strand
caaaguuucagcucaaauu

SEQ ID NO: 344350 - RNA, 19 nt, Homo sapiens
  misc_RNA (1)...(19): siRNA sense strand
ugagaugguuguccaguau

SEQ ID NO: 344351 - RNA, 19 nt, Homo sapiens
  misc_RNA (1)...(19): siRNA sense strand
caguaacucuugccuguga

SEQ ID NO: 344352 - RNA, 19 nt, Homo sapiens
  misc_RNA (1)...(19): siRNA sense strand
gaauuuugcuacucagaua

SEQ ID NO: 344353 - RNA, 19 nt, Homo sapiens
  misc_RNA (1)...(19): siRNA sense strand
caaguacucucaaguucau

SEQ ID NO: 344354 - RNA, 19 nt, Homo sapiens
  misc_RNA (1)...(19): siRNA sense strand
ucaaauacaggcaaagauu

SEQ ID NO: 344355 - RNA, 19 nt, Homo sapiens
  misc_RNA (1)...(19): siRNA sense strand
ugaaggucuuggacucuua

SEQ ID NO: 344356 - RNA, 19 nt, Homo sapiens
  misc_RNA (1)...(19): siRNA sense strand
ggagguuaaugaagacaug

SEQ ID NO: 344357 - RNA, 19 nt, Homo sapiens
  misc_RNA (1)...(19): siRNA sense strand
cagcucagccauuauauga

SEQ ID NO: 344358 - RNA, 19 nt, Homo sapiens
  misc_RNA (1)...(19): siRNA sense strand
caaagagggugaugagacu

SEQ ID NO: 344359 - RNA, 19 nt, Homo sapiens
  misc_RNA (1)...(19): siRNA sense strand
caacuuccuuuguaagauc

SEQ ID NO: 344360 - RNA, 19 nt, Homo sapiens
  misc_RNA (1)...(19): siRNA sense strand
acaugaaccuuaacgaaga

SEQ ID NO: 344361 - RNA, 19 nt, Homo sapiens
  misc_RNA (1)...(19): siRNA sense strand
gccauuauaugaugaacga

SEQ ID NO: 344362 - RNA, 19 nt, Homo sapiens
  misc_RNA (1)...(19): siRNA sense strand
caaagacagugagcauaga

SEQ ID NO: 344363 - RNA, 19 nt, Homo sapiens
  misc_RNA (1)...(19): siRNA sense strand
agaguuaguucuucuuguu

SEQ ID NO: 344364 - RNA, 19 nt, Homo sapiens
  misc_RNA (1)...(19): siRNA sense strand
ugaaugaagucuaccaucu

SEQ ID NO: 344365 - RNA, 19 nt, Homo sapiens
  misc_RNA (1)...(19): siRNA sense strand
caacagcagcagaaagaaa

SEQ ID NO: 344366 - RNA, 19 nt, Homo sapiens
  misc_RNA (1)...(19): siRNA sense strand
ccucaaagcauuuaugaau

SEQ ID NO: 344367 - RNA, 19 nt, Homo sapiens
  misc_RNA (1)...(19): siRNA sense strand
gauuagacaucgauuuaac

SEQ ID NO: 344368 - RNA, 19 nt, Homo sapiens
  misc_RNA (1)...(19): siRNA sense strand
acaaucaggugcagcauuc

SEQ ID NO: 344369 - RNA, 19 nt, Homo sapiens
  misc_RNA (1)...(19): siRNA sense strand
cguagaaagugcaagcaaa

SEQ ID NO: 344370 - RNA, 19 nt, Homo sapiens
  misc_RNA (1)...(19): siRNA sense strand
ggcgaaaguugaagaaagu

SEQ ID NO: 344371 - RNA, 19 nt, Homo sapiens
  misc_RNA (1)...(19): siRNA sense strand
gaaccuuaacgaagagaaa

SEQ ID NO: 344372 - RNA, 19 nt, Homo sapiens
  misc_RNA (1)...(19): siRNA sense strand
gaagaaagugaaagaacug

SEQ ID NO: 344373 - RNA, 19 nt, Homo sapiens
  misc_RNA (1)...(19): siRNA sense strand
agacugggccuacaaagaa

SEQ ID NO: 344374 - RNA, 19 nt, Homo sapiens
  misc_RNA (1)...(19): siRNA sense strand
gagaaucaauuggucaaag

SEQ ID NO: 344375 - RNA, 19 nt, Homo sapiens
  misc_RNA (1)...(19): siRNA sense strand
gaaaguugaagaaagugaa

SEQ ID NO: 344376 - RNA, 19 nt, Homo sapiens
  misc_RNA (1)...(19): siRNA sense strand
augaugagcuugauauuca

SEQ ID NO: 344377 - RNA, 19 nt, Homo sapiens
  misc_RNA (1)...(19): siRNA sense strand
uggaggacaugaaccuuaa

SEQ ID NO: 344378 - RNA, 19 nt, Homo sapiens
  misc_RNA (1)...(19): siRNA sense strand
gugagaugguuguccagua

SEQ ID NO: 344379 - RNA, 19 nt, Homo sapiens
  misc_RNA (1)...(19): siRNA sense strand
ucuagaagcccuacaauca

SEQ ID NO: 344380 - RNA, 19 nt, Homo sapiens
  misc_RNA (1)...(19): siRNA sense strand
aaacccaaauugaacauuc

SEQ ID NO: 344381 - RNA, 19 nt, Homo sapiens
  misc_RNA (1)...(19): siRNA sense strand
gguuaagagucaaagaaga

SEQ ID NO: 344382 - RNA, 19 nt, Homo sapiens
  misc_RNA (1)...(19): siRNA sense strand
agaaucaauuggucaaaga

SEQ ID NO: 344383 - RNA, 19 nt, Homo sapiens
  misc_RNA (1)...(19): siRNA sense strand
gaaugaagucuaccaucuu

SEQ ID NO: 344384 - RNA, 19 nt, Homo sapiens
  misc_RNA (1)...(19): siRNA sense strand
gcagaaauggaugauauga

SEQ ID NO: 344385 - RNA, 19 nt, Homo sapiens
  misc_RNA (1)...(19): siRNA sense strand
gacaagaagaaucaguaua

SEQ ID NO: 344386 - RNA, 19 nt, Homo sapiens
  misc_RNA (1)...(19): siRNA sense strand
ugaauaugaugaccucugu

SEQ ID NO: 344387 - RNA, 19 nt, Homo sapiens
  misc_RNA (1)...(19): siRNA sense strand
uaagagaagagaaauggaa

SEQ ID NO: 344388 - RNA, 19 nt, Homo sapiens
  misc_RNA (1)...(19): siRNA sense strand
uacaaagacugcccgagaa

SEQ ID NO: 344389 - RNA, 19 nt, Homo sapiens
  misc_RNA (1)...(19): siRNA sense strand
uagcagagcuuaagaauga

SEQ ID NO: 344390 - RNA, 19 nt, Homo sapiens
  misc_RNA (1)...(19): siRNA sense strand
gaagagaaauggaagagaa

SEQ ID NO: 344391 - RNA, 19 nt, Homo sapiens
  misc_RNA (1)...(19): siRNA sense strand
gaaguucgaugaagaauuc

SEQ ID NO: 344392 - RNA, 19 nt, Homo sapiens
  misc_RNA (1)...(19): siRNA sense strand
gaucagagauacuaaauca

SEQ ID NO: 344393 - RNA, 19 nt, Homo sapiens
  misc_RNA (1)...(19): siRNA sense strand
gaagauacucaacgaauua

SEQ ID NO: 344394 - RNA, 19 nt, Homo sapiens
  misc_RNA (1)...(19): siRNA sense strand
gagcagaaauggaugauau

SEQ ID NO: 344395 - RNA, 19 nt, Homo sapiens
  misc_RNA (1)...(19): siRNA sense strand
agagaaagcugaacaagaa

SEQ ID NO: 344396 - RNA, 19 nt, Homo sapiens
  misc_RNA (1)...(19): siRNA sense strand
gaugaacgaucuuugaauu

SEQ ID NO: 344397 - RNA, 19 nt, Homo sapiens
  misc_RNA (1)...(19): siRNA sense strand
cgauuuaacucaucugaua

SEQ ID NO: 344398 - RNA, 19 nt, Homo sapiens
  misc_RNA (1)...(19): siRNA sense strand
caugaugacugaaauagua

SEQ ID NO: 344399 - RNA, 19 nt, Homo sapiens
  misc_RNA (1)...(19): siRNA sense strand
caaagaaguucgaugaaga

SEQ ID NO: 344400 - RNA, 19 nt, Homo sapiens
  misc_RNA (1)...(19): siRNA sense strand
gaagacauaagaaacguua

SEQ ID NO: 344401 - RNA, 19 nt, Homo sapiens
  misc_RNA (1)...(19): siRNA sense strand
gaucauaucgcaugccaua

SEQ ID NO: 344402 - RNA, 19 nt, Homo sapiens
  misc_RNA (1)...(19): siRNA sense strand
caaagaagaugaccuaacu

SEQ ID NO: 344403 - RNA, 19 nt, Homo sapiens
  misc_RNA (1)...(19): siRNA sense strand
ugaccuaacugaauuauca

SEQ ID NO: 344404 - RNA, 19 nt, Homo sapiens
  misc_RNA (1)...(19): siRNA sense strand
gaagaugaccuaacugaau

SEQ ID NO: 344405 - RNA, 19 nt, Homo sapiens
  misc_RNA (1)...(19): siRNA sense strand
aaagaacgcagaagcauua

SEQ ID NO: 344406 - RNA, 19 nt, Homo sapiens
  misc_RNA (1)...(19): siRNA sense strand
gaacaaggcgaaaguugaa

SEQ ID NO: 344407 - RNA, 19 nt, Homo sapiens
  misc_RNA (1)...(19): siRNA sense strand
gaaggacacugcugcugaa

SEQ ID NO: 344408 - RNA, 19 nt, Homo sapiens
  misc_RNA (1)...(19): siRNA sense strand
caaagaacuugaagcagaa

SEQ ID NO: 344409 - RNA, 19 nt, Homo sapiens
  misc_RNA (1)...(19): siRNA sense strand
gaauuacgaucggguauau

SEQ ID NO: 344410 - RNA, 19 nt, Homo sapiens
  misc_RNA (1)...(19): siRNA sense strand
gauugaacccacagaauua

SEQ ID NO: 344411 - RNA, 19 nt, Homo sapiens
  misc_RNA (1)...(19): siRNA sense strand
uaaaugcccuugucacuuc

SEQ ID NO: 344412 - RNA, 19 nt, Homo sapiens
  misc_RNA (1)...(19): siRNA sense strand
ucaggaagccuugcaauua

SEQ ID NO: 344413 - RNA, 19 nt, Homo sapiens
  misc_RNA (1)...(19): siRNA sense strand
caaauacaggcaaagauua

SEQ ID NO: 344414 - RNA, 19 nt, Homo sapiens
  misc_RNA (1)...(19): siRNA sense strand
gaaagugcaagcaaaguuu

SEQ ID NO: 344415 - RNA, 19 nt, Homo sapiens
  misc_RNA (1)...(19): siRNA sense strand
gcagaagcauuagaagaaa

SEQ ID NO: 344416 - RNA, 19 nt, Homo sapiens
  misc_RNA (1)...(19): siRNA sense strand
gaacgcagaagcauuagaa

SEQ ID NO: 344417 - RNA, 19 nt, Homo sapiens
  misc_RNA (1)...(19): siRNA sense strand
gcacaaguacucucaaguu

SEQ ID NO: 344418 - RNA, 19 nt, Homo sapiens
  misc_RNA (1)...(19): siRNA sense strand
gaaauaacagggaacgauu

SEQ ID NO: 344419 - RNA, 19 nt, Homo sapiens
  misc_RNA (1)...(19): siRNA sense strand
ugaugaagcucuaugagaa

SEQ ID NO: 344420 - RNA, 19 nt, Homo sapiens
  misc_RNA (1)...(19): siRNA sense strand
gaacucaggcucaagaaau

SEQ ID NO: 344421 - RNA, 19 nt, Homo sapiens
  misc_RNA (1)...(19): siRNA sense strand
gcucagccauuauaugaug

SEQ ID NO: 344422 - RNA, 19 nt, Homo sapiens
  misc_RNA (1)...(19): siRNA sense strand
gaacgugacaucaagaaau

SEQ ID NO: 344423 - RNA, 19 nt, Homo sapiens
  misc_RNA (1)...(19): siRNA sense strand
gaagacaaguuugagaauc

SEQ ID NO: 344424 - RNA, 19 nt, Homo sapiens
  misc_RNA (1)...(19): siRNA sense strand
ggacaugaaccuuaacgaa

SEQ ID NO: 344425 - RNA, 19 nt, Homo sapiens
  misc_RNA (1)...(19): siRNA sense strand
ggaaguauuggaucucuuu

SEQ ID NO: 344426 - RNA, 19 nt, Homo sapiens
  misc_RNA (1)...(19): siRNA sense strand
gaacgaucuuugaauuugu

SEQ ID NO: 344427 - RNA, 19 nt, Homo sapiens
  misc_RNA (1)...(19): siRNA sense strand
aagaucaacuuccuuugua

SEQ ID NO: 344428 - RNA, 19 nt, Homo sapiens
  misc_RNA (1)...(19): siRNA sense strand
gaagaacacauaaacaaca

SEQ ID NO: 344429 - RNA, 19 nt, Homo sapiens
  misc_RNA (1)...(19): siRNA sense strand
ccaggaauaucacuuaauc

SEQ ID NO: 344430 - RNA, 19 nt, Homo sapiens
  misc_RNA (1)...(19): siRNA sense strand
gcagaaauccagcaacuuc

SEQ ID NO: 344431 - RNA, 19 nt, Homo sapiens
  misc_RNA (1)...(19): siRNA sense strand
aaacaaagaagaugaccua

SEQ ID NO: 344432 - RNA, 19 nt, Homo sapiens
  misc_RNA (1)...(19): siRNA sense strand
gaucggguauaucagauga

SEQ ID NO: 344433 - RNA, 19 nt, Homo sapiens
  misc_RNA (1)...(19): siRNA sense strand
aaacaacccuuuugcauuu

SEQ ID NO: 344434 - RNA, 19 nt, Homo sapiens
  misc_RNA (1)...(19): siRNA sense strand
uaacaacuuuggccaugaa

SEQ ID NO: 344435 - RNA, 19 nt, Homo sapiens
  misc_RNA (1)...(19): siRNA sense strand
ugaacgaucuuugaauuug

SEQ ID NO: 344436 - RNA, 19 nt, Homo sapiens
  misc_RNA (1)...(19): siRNA sense strand
caaagaagaaagugaaaga

SEQ ID NO: 344437 - RNA, 19 nt, Homo sapiens
  misc_RNA (1)...(19): siRNA sense strand
caucaaaccaagcaucaua

SEQ ID NO: 344438 - RNA, 19 nt, Homo sapiens
  misc_RNA (1)...(19): siRNA sense strand
agacuggugugauggauaa

SEQ ID NO: 344439 - RNA, 19 nt, Homo sapiens
  misc_RNA (1)...(19): siRNA sense strand
aagaugaccuaacugaauu

SEQ ID NO: 344440 - RNA, 19 nt, Homo sapiens
  misc_RNA (1)...(19): siRNA sense strand
gugaaagaacugagaauuu

SEQ ID NO: 344441 - RNA, 19 nt, Homo sapiens
  misc_RNA (1)...(19): siRNA sense strand
uaaucuaccuuauggaaug

SEQ ID NO: 344442 - RNA, 19 nt, Homo sapiens
  misc_RNA (1)...(19): siRNA sense strand
gauccagacuucaaauaca

SEQ ID NO: 344443 - RNA, 19 nt, Homo sapiens
  misc_RNA (1)...(19): siRNA sense strand
caacaugaugacugaaaua

SEQ ID NO: 344444 - RNA, 19 nt, Homo sapiens
  misc_RNA (1)...(19): siRNA sense strand
gaaagugaaagaacugaga

SEQ ID NO: 344445 - RNA, 19 nt, Homo sapiens
  misc_RNA (1)...(19): siRNA sense strand
agaagauacucaacgaauu

SEQ ID NO: 344446 - RNA, 19 nt, Homo sapiens
  misc_RNA (1)...(19): siRNA sense strand
gauggauaaucuucuagaa

SEQ ID NO: 344447 - RNA, 19 nt, Homo sapiens
  misc_RNA (1)...(19): siRNA sense strand
gaacacauaaacaacauca

SEQ ID NO: 344448 - RNA, 19 nt, Homo sapiens
  misc_RNA (1)...(19): siRNA sense strand
agaauuaucugagaacugu

SEQ ID NO: 344449 - RNA, 19 nt, Homo sapiens
  misc_RNA (1)...(19): siRNA sense strand
caaaguuucagcucaaauu

SEQ ID NO: 344450 - RNA, 19 nt, Homo sapiens
  misc_RNA (1)...(19): siRNA sense strand
ugagaugguuguccaguau

SEQ ID NO: 344451 - RNA, 19 nt, Homo sapiens
  misc_RNA (1)...(19): siRNA sense strand
caguaacucuugccuguga

SEQ ID NO: 344452 - RNA, 19 nt, Homo sapiens
  misc_RNA (1)...(19): siRNA sense strand
gaauuuugcuacucagaua

SEQ ID NO: 344453 - RNA, 19 nt, Homo sapiens
  misc_RNA (1)...(19): siRNA sense strand
caaguacucucaaguucau

SEQ ID NO: 344454 - RNA, 19 nt, Homo sapiens
  misc_RNA (1)...(19): siRNA sense strand
ucaaauacaggcaaagauu

SEQ ID NO: 344455 - RNA, 19 nt, Homo sapiens
  misc_RNA (1)...(19): siRNA sense strand
ugaaggucuuggacucuua

SEQ ID NO: 344456 - RNA, 19 nt, Homo sapiens
  misc_RNA (1)...(19): siRNA sense strand
ggagguuaaugaagacaug

SEQ ID NO: 344457 - RNA, 19 nt, Homo sapiens
  misc_RNA (1)...(19): siRNA sense strand
cagcucagccauuauauga

SEQ ID NO: 344458 - RNA, 19 nt, Homo sapiens
  misc_RNA (1)...(19): siRNA sense strand
caaagagggugaugagacu

SEQ ID NO: 344459 - RNA, 19 nt, Homo sapiens
  misc_RNA (1)...(19): siRNA sense strand
caacuuccuuuguaagauc

SEQ ID NO: 344460 - RNA, 19 nt, Homo sapiens
  misc_RNA (1)...(19): siRNA sense strand
acaugaaccuuaacgaaga

SEQ ID NO: 344461 - RNA, 19 nt, Homo sapiens
  misc_RNA (1)...(19): siRNA sense strand
gccauuauaugaugaacga

SEQ ID NO: 344462 - RNA, 19 nt, Homo sapiens
  misc_RNA (1)...(19): siRNA sense strand
caaagacagugagcauaga

SEQ ID NO: 344463 - RNA, 19 nt, Homo sapiens
  misc_RNA (1)...(19): siRNA sense strand
agaguuaguucuucuuguu

SEQ ID NO: 344464 - RNA, 19 nt, Homo sapiens
  misc_RNA (1)...(19): siRNA sense strand
ugaaugaagucuaccaucu

SEQ ID NO: 344465 - RNA, 19 nt, Homo sapiens
  misc_RNA (1)...(19): siRNA sense strand
caacagcagcagaaagaaa

SEQ ID NO: 344466 - RNA, 19 nt, Homo sapiens
  misc_RNA (1)...(19): siRNA sense strand
ccucaaagcauuuaugaau

SEQ ID NO: 344467 - RNA, 19 nt, Homo sapiens
  misc_RNA (1)...(19): siRNA sense strand
gauuagacaucgauuuaac

SEQ ID NO: 344468 - RNA, 19 nt, Homo sapiens
  misc_RNA (1)...(19): siRNA sense strand
acaaucaggugcagcauuc

SEQ ID NO: 344469 - RNA, 19 nt, Homo sapiens
  misc_RNA (1)...(19): siRNA sense strand
cguagaaagugcaagcaaa

SEQ ID NO: 344470 - RNA, 19 nt, Homo sapiens
  misc_RNA (1)...(19): siRNA sense strand
ggcgaaaguugaagaaagu

SEQ ID NO: 344471 - RNA, 19 nt, Homo sapiens
  misc_RNA (1)...(19): siRNA sense strand
gaaccuuaacgaagagaaa

SEQ ID NO: 344472 - RNA, 19 nt, Homo sapiens
  misc_RNA (1)...(19): siRNA sense strand
gaagaaagugaaagaacug

SEQ ID NO: 344473 - RNA, 19 nt, Homo sapiens
  misc_RNA (1)...(19): siRNA sense strand
agacugggccuacaaagaa

SEQ ID NO: 344474 - RNA, 19 nt, Homo sapiens
  misc_RNA (1)...(19): siRNA sense strand
gagaaucaauuggucaaag

SEQ ID NO: 344475 - RNA, 19 nt, Homo sapiens
  misc_RNA (1)...(19): siRNA sense strand
gaaaguugaagaaagugaa

SEQ ID NO: 344476 - RNA, 19 nt, Homo sapiens
  misc_RNA (1)...(19): siRNA sense strand
augaugagcuugauauuca

SEQ ID NO: 344477 - RNA, 19 nt, Homo sapiens
  misc_RNA (1)...(19): siRNA sense strand
uggaggacaugaaccuuaa

SEQ ID NO: 344478 - RNA, 19 nt, Homo sapiens
  misc_RNA (1)...(19): siRNA sense strand
gugagaugguuguccagua

SEQ ID NO: 344479 - RNA, 19 nt, Homo sapiens
  misc_RNA (1)...(19): siRNA sense strand
ucuagaagcccuacaauca

SEQ ID NO: 344480 - RNA, 19 nt, Homo sapiens
  misc_RNA (1)...(19): siRNA sense strand
aaacccaaauugaacauuc

SEQ ID NO: 344481 - RNA, 19 nt, Homo sapiens
  misc_RNA (1)...(19): siRNA sense strand
gguuaagagucaaagaaga

SEQ ID NO: 344482 - RNA, 19 nt, Homo sapiens
  misc_RNA (1)...(19): siRNA sense strand
agaaucaauuggucaaaga

SEQ ID NO: 344483 - RNA, 19 nt, Homo sapiens
  misc_RNA (1)...(19): siRNA sense strand
gaaugaagucuaccaucuu

SEQ ID NO: 344484 - RNA, 19 nt, Homo sapiens
  misc_RNA (1)...(19): siRNA sense strand
gcagaaauggaugauauga

SEQ ID NO: 344485 - RNA, 19 nt, Homo sapiens
  misc_RNA (1)...(19): siRNA sense strand
gacaagaagaaucaguaua

SEQ ID NO: 344486 - RNA, 19 nt, Homo sapiens
  misc_RNA (1)...(19): siRNA sense strand
ugaauaugaugaccucugu

SEQ ID NO: 344487 - RNA, 19 nt, Homo sapiens
  misc_RNA (1)...(19): siRNA sense strand
uaagagaagagaaauggaa

SEQ ID NO: 344488 - RNA, 19 nt, Homo sapiens
  misc_RNA (1)...(19): siRNA sense strand
uacaaagacugcccgagaa

SEQ ID NO: 344489 - RNA, 19 nt, Homo sapiens
  misc_RNA (1)...(19): siRNA sense strand
gaacuuggagaguauauaa

SEQ ID NO: 344490 - RNA, 19 nt, Homo sapiens
  misc_RNA (1)...(19): siRNA sense strand
gaacagguuuauauucgaa

SEQ ID NO: 344491 - RNA, 19 nt, Homo sapiens
  misc_RNA (1)...(19): siRNA sense strand
agaagaggcugcacccuua

SEQ ID NO: 344492 - RNA, 19 nt, Homo sapiens
  misc_RNA (1)...(19): siRNA sense strand
ucaaugaaauccucaauca

SEQ ID NO: 344493 - RNA, 19 nt, Homo sapiens
  misc_RNA (1)...(19): siRNA sense strand
caacucagauaccaagcua

SEQ ID NO: 344494 - RNA, 19 nt, Homo sapiens
  misc_RNA (1)...(19): siRNA sense strand
gcauggagcagcauuauga

SEQ ID NO: 344495 - RNA, 19 nt, Homo sapiens
  misc_RNA (1)...(19): siRNA sense strand
gcacacaguuccucuuucu

SEQ ID NO: 344496 - RNA, 19 nt, Homo sapiens
  misc_RNA (1)...(19): siRNA sense strand
ccaaggaguugaaguuugu

SEQ ID NO: 344497 - RNA, 19 nt, Homo sapiens
  misc_RNA (1)...(19): siRNA sense strand
ugacggaauuguacuuuga

SEQ ID NO: 344498 - RNA, 19 nt, Homo sapiens
  misc_RNA (1)...(19): siRNA sense strand
gaaguguacuagccaagga

SEQ ID NO: 344499 - RNA, 19 nt, Homo sapiens
  misc_RNA (1)...(19): siRNA sense strand
ugacuaaguugagagaauu

SEQ ID NO: 344500 - RNA, 19 nt, Homo sapiens
  misc_RNA (1)...(19): siRNA sense strand
cuacgacccuuuauauugu

SEQ ID NO: 344501 - RNA, 19 nt, Homo sapiens
  misc_RNA (1)...(19): siRNA sense strand
gaaauccucaaucacauga

SEQ ID NO: 344502 - RNA, 19 nt, Homo sapiens
  misc_RNA (1)...(19): siRNA sense strand
acaaacagccaucaaggua

SEQ ID NO: 344503 - RNA, 19 nt, Homo sapiens
  misc_RNA (1)...(19): siRNA sense strand
ggagcagcauuaugaacuu

SEQ ID NO: 344504 - RNA, 19 nt, Homo sapiens
  misc_RNA (1)...(19): siRNA sense strand
agauggcgcuagauguuua

SEQ ID NO: 344505 - RNA, 19 nt, Homo sapiens
  misc_RNA (1)...(19): siRNA sense strand
gaagucccauugacaccuu

SEQ ID NO: 344506 - RNA, 19 nt, Homo sapiens
  misc_RNA (1)...(19): siRNA sense strand
ggacuuugaugagugcuau

SEQ ID NO: 344507 - RNA, 19 nt, Homo sapiens
  misc_RNA (1)...(19): siRNA sense strand
cuauaaacaugaacagguu

SEQ ID NO: 344508 - RNA, 19 nt, Homo sapiens
  misc_RNA (1)...(19): siRNA sense strand
caucuggaauccuauccua

SEQ ID NO: 344509 - RNA, 19 nt, Homo sapiens
  misc_RNA (1)...(19): siRNA sense strand
ucagaggaauuccagaaga

SEQ ID NO: 344510 - RNA, 19 nt, Homo sapiens
  misc_RNA (1)...(19): siRNA sense strand
gaacugcccucguuuucaa

SEQ ID NO: 344511 - RNA, 19 nt, Homo sapiens
  misc_RNA (1)...(19): siRNA sense strand
gccaaggaguugaaguuug

SEQ ID NO: 344512 - RNA, 19 nt, Homo sapiens
  misc_RNA (1)...(19): siRNA sense strand
gagugagacuuugaaauca

SEQ ID NO: 344513 - RNA, 19 nt, Homo sapiens
  misc_RNA (1)...(19): siRNA sense strand
gaaugaguccuauaaacau

SEQ ID NO: 344514 - RNA, 19 nt, Homo sapiens
  misc_RNA (1)...(19): siRNA sense strand
gaagaucaguugcuauacc

SEQ ID NO: 344515 - RNA, 19 nt, Homo sapiens
  misc_RNA (1)...(19): siRNA sense strand
gcgcaugacacuacuguga

SEQ ID NO: 344516 - RNA, 19 nt, Homo sapiens
  misc_RNA (1)...(19): siRNA sense strand
gaauuuggaguaaagucua

SEQ ID NO: 344517 - RNA, 19 nt, Homo sapiens
  misc_RNA (1)...(19): siRNA sense strand
ggaauuguacuuugagaag

SEQ ID NO: 344518 - RNA, 19 nt, Homo sapiens
  misc_RNA (1)...(19): siRNA sense strand
ugaaugaguccuauaaaca

SEQ ID NO: 344519 - RNA, 19 nt, Homo sapiens
  misc_RNA (1)...(19): siRNA sense strand
gucagcaucuggaauccua

SEQ ID NO: 344520 - RNA, 19 nt, Homo sapiens
  misc_RNA (1)...(19): siRNA sense strand
gagcagcauuaugaacuug

SEQ ID NO: 344521 - RNA, 19 nt, Homo sapiens
  misc_RNA (1)...(19): siRNA sense strand
gaauucacaagcagaaaga

SEQ ID NO: 344522 - RNA, 19 nt, Homo sapiens
  misc_RNA (1)...(19): siRNA sense strand
gagaguauauaagaaagag

SEQ ID NO: 344523 - RNA, 19 nt, Homo sapiens
  misc_RNA (1)...(19): siRNA sense strand
ucagauaccaagcuacaaa

SEQ ID NO: 344524 - RNA, 19 nt, Homo sapiens
  misc_RNA (1)...(19): siRNA sense strand
cggaguguaugaccacaaa

SEQ ID NO: 344525 - RNA, 19 nt, Homo sapiens
  misc_RNA (1)...(19): siRNA sense strand
gcaugacacuacugugagu

SEQ ID NO: 344526 - RNA, 19 nt, Homo sapiens
  misc_RNA (1)...(19): siRNA sense strand
gagguuugcugagcugguu

SEQ ID NO: 344527 - RNA, 19 nt, Homo sapiens
  misc_RNA (1)...(19): siRNA sense strand
gggaguacuuuguggagau

SEQ ID NO: 344528 - RNA, 19 nt, Homo sapiens
  misc_RNA (1)...(19): siRNA sense strand
ggagaccgaagucccauug

SEQ ID NO: 344529 - RNA, 19 nt, Homo sapiens
  misc_RNA (1)...(19): siRNA sense strand
acacaguuccucuuucuga

SEQ ID NO: 344530 - RNA, 19 nt, Homo sapiens
  misc_RNA (1)...(19): siRNA sense strand
ugagaguguucacaauuuc

SEQ ID NO: 344531 - RNA, 19 nt, Homo sapiens
  misc_RNA (1)...(19): siRNA sense strand
ucuacgacccuuuauauug

SEQ ID NO: 344532 - RNA, 19 nt, Homo sapiens
  misc_RNA (1)...(19): siRNA sense strand
auuaugaacuuggagagua

SEQ ID NO: 344533 - RNA, 19 nt, Homo sapiens
  misc_RNA (1)...(19): siRNA sense strand
guuugugacuuugguguuu

SEQ ID NO: 344534 - RNA, 19 nt, Homo sapiens
  misc_RNA (1)...(19): siRNA sense strand
ggaguacuuuguggagaug

SEQ ID NO: 344535 - RNA, 19 nt, Homo sapiens
  misc_RNA (1)...(19): siRNA sense strand
gaggacaccaugacuaagu

SEQ ID NO: 344536 - RNA, 19 nt, Homo sapiens
  misc_RNA (1)...(19): siRNA sense strand
gugagacuuugaaaucaga

SEQ ID NO: 344537 - RNA, 19 nt, Homo sapiens
  misc_RNA (1)...(19): siRNA sense strand
agagugagacuuugaaauc

SEQ ID NO: 344538 - RNA, 19 nt, Homo sapiens
  misc_RNA (1)...(19): siRNA sense strand
gacguugaccggacuuuga

SEQ ID NO: 344539 - RNA, 19 nt, Homo sapiens
  misc_RNA (1)...(19): siRNA sense strand
guucacaauuucacuuuac

SEQ ID NO: 344540 - RNA, 19 nt, Homo sapiens
  misc_RNA (1)...(19): siRNA sense strand
gcagcauuaugaacuugga

SEQ ID NO: 344541 - RNA, 19 nt, Homo sapiens
  misc_RNA (1)...(19): siRNA sense strand
ggagaguauauaagaaaga

SEQ ID NO: 344542 - RNA, 19 nt, Homo sapiens
  misc_RNA (1)...(19): siRNA sense strand
cagaggaauuccagaagag

SEQ ID NO: 344543 - RNA, 19 nt, Homo sapiens
  misc_RNA (1)...(19): siRNA sense strand
agagaaaucuaggcuccaa

SEQ ID NO: 344544 - RNA, 19 nt, Homo sapiens
  misc_RNA (1)...(19): siRNA sense strand
ggaauucacaagcagaaag

SEQ ID NO: 344545 - RNA, 19 nt, Homo sapiens
  misc_RNA (1)...(19): siRNA sense strand
gugcacacaguuccucuuu

SEQ ID NO: 344546 - RNA, 19 nt, Homo sapiens
  misc_RNA (1)...(19): siRNA sense strand
aaacagccaucaagguacu

SEQ ID NO: 344547 - RNA, 19 nt, Homo sapiens
  misc_RNA (1)...(19): siRNA sense strand
aaugaaauccucaaucaca

SEQ ID NO: 344548 - RNA, 19 nt, Homo sapiens
  misc_RNA (1)...(19): siRNA sense strand
gaagaggcugcacccuuau

SEQ ID NO: 344549 - RNA, 19 nt, Homo sapiens
  misc_RNA (1)...(19): siRNA sense strand
ugaacagguuuauauucga

SEQ ID NO: 344550 - RNA, 19 nt, Homo sapiens
  misc_RNA (1)...(19): siRNA sense strand
gcccugugaucccucaaga

SEQ ID NO: 344551 - RNA, 19 nt, Homo sapiens
  misc_RNA (1)...(19): siRNA sense strand
acagauggcgcuagauguu

SEQ ID NO: 344552 - RNA, 19 nt, Homo sapiens
  misc_RNA (1)...(19): siRNA sense strand
caccaugacuaaguugaga

SEQ ID NO: 344553 - RNA, 19 nt, Homo sapiens
  misc_RNA (1)...(19): siRNA sense strand
gagagugagacuuugaaau

SEQ ID NO: 344554 - RNA, 19 nt, Homo sapiens
  misc_RNA (1)...(19): siRNA sense strand
caugaacagguuuauauuc

SEQ ID NO: 344555 - RNA, 19 nt, Homo sapiens
  misc_RNA (1)...(19): siRNA sense strand
ccucauggccacaaggauu

SEQ ID NO: 344556 - RNA, 19 nt, Homo sapiens
  misc_RNA (1)...(19): siRNA sense strand
ggaauuuggaguaaagucu

SEQ ID NO: 344557 - RNA, 19 nt, Homo sapiens
  misc_RNA (1)...(19): siRNA sense strand
uuaugaacuuggagaguau

SEQ ID NO: 344558 - RNA, 19 nt, Homo sapiens
  misc_RNA (1)...(19): siRNA sense strand
cuacagauggcgcuagaug

SEQ ID NO: 344559 - RNA, 19 nt, Homo sapiens
  misc_RNA (1)...(19): siRNA sense strand
ucacaagcagaaagagaaa

SEQ ID NO: 344560 - RNA, 19 nt, Homo sapiens
  misc_RNA (1)...(19): siRNA sense strand
gaacuugagagugagacuu

SEQ ID NO: 344561 - RNA, 19 nt, Homo sapiens
  misc_RNA (1)...(19): siRNA sense strand
cacaguuccucuuucugaa

SEQ ID NO: 344562 - RNA, 19 nt, Homo sapiens
  misc_RNA (1)...(19): siRNA sense strand
cugaggacaccaugacuaa

SEQ ID NO: 344563 - RNA, 19 nt, Homo sapiens
  misc_RNA (1)...(19): siRNA sense strand
aaugaguccuauaaacaug

SEQ ID NO: 344564 - RNA, 19 nt, Homo sapiens
  misc_RNA (1)...(19): siRNA sense strand
gaccgaagucccauugaca

SEQ ID NO: 344565 - RNA, 19 nt, Homo sapiens
  misc_RNA (1)...(19): siRNA sense strand
gaugagugcuaugacaaac

SEQ ID NO: 344566 - RNA, 19 nt, Homo sapiens
  misc_RNA (1)...(19): siRNA sense strand
ugaguccuauaaacaugaa

SEQ ID NO: 344567 - RNA, 19 nt, Homo sapiens
  misc_RNA (1)...(19): siRNA sense strand
ccacuugacggaauuguac

SEQ ID NO: 344568 - RNA, 19 nt, Homo sapiens
  misc_RNA (1)...(19): siRNA sense strand
gccuacagauggcgcuaga

SEQ ID NO: 344569 - RNA, 19 nt, Homo sapiens
  misc_RNA (1)...(19): siRNA sense strand
acaaggauuuggccaacuc

SEQ ID NO: 344570 - RNA, 19 nt, Homo sapiens
  misc_RNA (1)...(19): siRNA sense strand
ggacaccaugacuaaguug

SEQ ID NO: 344571 - RNA, 19 nt, Homo sapiens
  misc_RNA (1)...(19): siRNA sense strand
agucuacgacccuuuauau

SEQ ID NO: 344572 - RNA, 19 nt, Homo sapiens
  misc_RNA (1)...(19): siRNA sense strand
uuacauggccaggaccuuu

SEQ ID NO: 344573 - RNA, 19 nt, Homo sapiens
  misc_RNA (1)...(19): siRNA sense strand
uagccaaggaguugaaguu

SEQ ID NO: 344574 - RNA, 19 nt, Homo sapiens
  misc_RNA (1)...(19): siRNA sense strand
ucuauggaauucacaagca

SEQ ID NO: 344575 - RNA, 19 nt, Homo sapiens
  misc_RNA (1)...(19): siRNA sense strand
uaaguugagagaauuguca

SEQ ID NO: 344576 - RNA, 19 nt, Homo sapiens
  misc_RNA (1)...(19): siRNA sense strand
aaucagaggaauuccagaa

SEQ ID NO: 344577 - RNA, 19 nt, Homo sapiens
  misc_RNA (1)...(19): siRNA sense strand
uucaggaacugcccucguu

SEQ ID NO: 344578 - RNA, 19 nt, Homo sapiens
  misc_RNA (1)...(19): siRNA sense strand
gggcauggagcagcauuau

SEQ ID NO: 344579 - RNA, 19 nt, Homo sapiens
  misc_RNA (1)...(19): siRNA sense strand
ggugucagcaucuggaauc

SEQ ID NO: 344580 - RNA, 19 nt, Homo sapiens
  misc_RNA (1)...(19): siRNA sense strand
ggcgcuagauguuuacaac

SEQ ID NO: 344581 - RNA, 19 nt, Homo sapiens
  misc_RNA (1)...(19): siRNA sense strand
gagaguguucacaauuuca

SEQ ID NO: 344582 - RNA, 19 nt, Homo sapiens
  misc_RNA (1)...(19): siRNA sense strand
ugaccggacuuugaugagu

SEQ ID NO: 344583 - RNA, 19 nt, Homo sapiens
  misc_RNA (1)...(19): siRNA sense strand
gaguguaugaccacaaaca

SEQ ID NO: 344584 - RNA, 19 nt, Homo sapiens
  misc_RNA (1)...(19): siRNA sense strand
cagauggcgcuagauguuu

SEQ ID NO: 344585 - RNA, 19 nt, Homo sapiens
  misc_RNA (1)...(19): siRNA sense strand
aagcagaaagagaaaucua

SEQ ID NO: 344586 - RNA, 19 nt, Homo sapiens
  misc_RNA (1)...(19): siRNA sense strand
guugagagaauugucagaa

SEQ ID NO: 344587 - RNA, 19 nt, Homo sapiens
  misc_RNA (1)...(19): siRNA sense strand
uugaaugaguccuauaaac

SEQ ID NO: 344588 - RNA, 19 nt, Homo sapiens
  misc_RNA (1)...(19): siRNA sense strand
gacccuuuauauugugaga

SEQ ID NO: 344589 - RNA, 19 nt, Homo sapiens
  misc_RNA (1)...(19): siRNA sense strand
gcuccuaccuggucuggaa

SEQ ID NO: 344590 - RNA, 19 nt, Homo sapiens
  misc_RNA (1)...(19): siRNA sense strand
cgaccacacucaacuacug

SEQ ID NO: 344591 - RNA, 19 nt, Homo sapiens
  misc_RNA (1)...(19): siRNA sense strand
acacucaacuacugcguau

SEQ ID NO: 344592 - RNA, 19 nt, Homo sapiens
  misc_RNA (1)...(19): siRNA sense strand
cugggaggcuucacagaga

SEQ ID NO: 344593 - RNA, 19 nt, Homo sapiens
  misc_RNA (1)...(19): siRNA sense strand
ugggaggcuucacagagaa

SEQ ID NO: 344594 - RNA, 19 nt, Homo sapiens
  misc_RNA (1)...(19): siRNA sense strand
cgaccacacucaacuacug

SEQ ID NO: 344595 - RNA, 19 nt, Homo sapiens
  misc_RNA (1)...(19): siRNA sense strand
acacucaacuacugcguau

SEQ ID NO: 344596 - RNA, 19 nt, Homo sapiens
  misc_RNA (1)...(19): siRNA sense strand
ggccgucacgcuuucauga

SEQ ID NO: 344597 - RNA, 19 nt, Homo sapiens
  misc_RNA (1)...(19): siRNA sense strand
caggugccaucacgcuugu

SEQ ID NO: 344598 - RNA, 19 nt, Homo sapiens
  misc_RNA (1)...(19): siRNA sense strand
gaaagaagcugcagucaug

SEQ ID NO: 344599 - RNA, 19 nt, Homo sapiens
  misc_RNA (1)...(19): siRNA sense strand
ucaacaaacuggagaauaa

SEQ ID NO: 344600 - RNA, 19 nt, Homo sapiens
  misc_RNA (1)...(19): siRNA sense strand
ggaaaucagugacauagug

SEQ ID NO: 344601 - RNA, 19 nt, Homo sapiens
  misc_RNA (1)...(19): siRNA sense strand
ccagaaggcugcccagaga

SEQ ID NO: 344602 - RNA, 19 nt, Homo sapiens
  misc_RNA (1)...(19): siRNA sense strand
gcaacaagcccacugucua

SEQ ID NO: 344603 - RNA, 19 nt, Homo sapiens
  misc_RNA (1)...(19): siRNA sense strand
gaaggaaaucagugacaua

SEQ ID NO: 344604 - RNA, 19 nt, Homo sapiens
  misc_RNA (1)...(19): siRNA sense strand
ucacugaguucaugaccua

SEQ ID NO: 344605 - RNA, 19 nt, Homo sapiens
  misc_RNA (1)...(19): siRNA sense strand
uguaugagcugcuagagaa

SEQ ID NO: 344606 - RNA, 19 nt, Homo sapiens
  misc_RNA (1)...(19): siRNA sense strand
agauaacacucuaagcaua

SEQ ID NO: 344607 - RNA, 19 nt, Homo sapiens
  misc_RNA (1)...(19): siRNA sense strand
gauaacacucuaagcauaa

SEQ ID NO: 344608 - RNA, 19 nt, Homo sapiens
  misc_RNA (1)...(19): siRNA sense strand
gcaaaugaggaacaaguuu

SEQ ID NO: 344609 - RNA, 19 nt, Homo sapiens
  misc_RNA (1)...(19): siRNA sense strand
gaagggaggguguaccauu

SEQ ID NO: 344610 - RNA, 19 nt, Homo sapiens
  misc_RNA (1)...(19): siRNA sense strand
gaaaaugaccccaaccuuu

SEQ ID NO: 344611 - RNA, 19 nt, Homo sapiens
  misc_RNA (1)...(19): siRNA sense strand
gaagagggccgagacauca

SEQ ID NO: 344612 - RNA, 19 nt, Homo sapiens
  misc_RNA (1)...(19): siRNA sense strand
ggagauaacacucuaagca

SEQ ID NO: 344613 - RNA, 19 nt, Homo sapiens
  misc_RNA (1)...(19): siRNA sense strand
gccaguagcaucugacuuu

SEQ ID NO: 344614 - RNA, 19 nt, Homo sapiens
  misc_RNA (1)...(19): siRNA sense strand
ucagcaagcuccucaguuc

SEQ ID NO: 344615 - RNA, 19 nt, Homo sapiens
  misc_RNA (1)...(19): siRNA sense strand
gagaaggucuaugaacuca

SEQ ID NO: 344616 - RNA, 19 nt, Homo sapiens
  misc_RNA (1)...(19): siRNA sense strand
aagggaggguguaccauua

SEQ ID NO: 344617 - RNA, 19 nt, Homo sapiens
  misc_RNA (1)...(19): siRNA sense strand
caacaagcccacugucuau

SEQ ID NO: 344618 - RNA, 19 nt, Homo sapiens
  misc_RNA (1)...(19): siRNA sense strand
gcgauccucuggaccauga

SEQ ID NO: 344619 - RNA, 19 nt, Homo sapiens
  misc_RNA (1)...(19): siRNA sense strand
aagcauaacuaaaggugaa

SEQ ID NO: 344620 - RNA, 19 nt, Homo sapiens
  misc_RNA (1)...(19): siRNA sense strand
ccaccaagccuuugaaaca

SEQ ID NO: 344621 - RNA, 19 nt, Homo sapiens
  misc_RNA (1)...(19): siRNA sense strand
ccauggagguggaagaguu

SEQ ID NO: 344622 - RNA, 19 nt, Homo sapiens
  misc_RNA (1)...(19): siRNA sense strand
cuucaucccucucauauca

SEQ ID NO: 344623 - RNA, 19 nt, Homo sapiens
  misc_RNA (1)...(19): siRNA sense strand
gcccagagaaggucuauga

SEQ ID NO: 344624 - RNA, 19 nt, Homo sapiens
  misc_RNA (1)...(19): siRNA sense strand
ucaacagucuggagaaaca

SEQ ID NO: 344625 - RNA, 19 nt, Homo sapiens
  misc_RNA (1)...(19): siRNA sense strand
ugaggaagcugcugaugag

SEQ ID NO: 344626 - RNA, 19 nt, Homo sapiens
  misc_RNA (1)...(19): siRNA sense strand
uaucaucacugaguucaug

SEQ ID NO: 344627 - RNA, 19 nt, Homo sapiens
  misc_RNA (1)...(19): siRNA sense strand
ccacugacgugccugagau

SEQ ID NO: 344628 - RNA, 19 nt, Homo sapiens
  misc_RNA (1)...(19): siRNA sense strand
guacauggccacucagauc

SEQ ID NO: 344629 - RNA, 19 nt, Homo sapiens
  misc_RNA (1)...(19): siRNA sense strand
ucaguucggugaaggaaau

SEQ ID NO: 344630 - RNA, 19 nt, Homo sapiens
  misc_RNA (1)...(19): siRNA sense strand
cagagaaggucuaugaacu

SEQ ID NO: 344631 - RNA, 19 nt, Homo sapiens
  misc_RNA (1)...(19): siRNA sense strand
gcauuuggaguauugcuuu

SEQ ID NO: 344632 - RNA, 19 nt, Homo sapiens
  misc_RNA (1)...(19): siRNA sense strand
gagaggccaucaacaaacu

SEQ ID NO: 344633 - RNA, 19 nt, Homo sapiens
  misc_RNA (1)...(19): siRNA sense strand
caaggaagaagccuggaaa

SEQ ID NO: 344634 - RNA, 19 nt, Homo sapiens
  misc_RNA (1)...(19): siRNA sense strand
ugaaauccaccaagccuuu

SEQ ID NO: 344635 - RNA, 19 nt, Homo sapiens
  misc_RNA (1)...(19): siRNA sense strand
gaguauugcuuugggaaau

SEQ ID NO: 344636 - RNA, 19 nt, Homo sapiens
  misc_RNA (1)...(19): siRNA sense strand
ggaagagggccgagacauc

SEQ ID NO: 344637 - RNA, 19 nt, Homo sapiens
  misc_RNA (1)...(19): siRNA sense strand
gaucaauggcagcuucuug

SEQ ID NO: 344638 - RNA, 19 nt, Homo sapiens
  misc_RNA (1)...(19): siRNA sense strand
caccaagccuuugaaacaa

SEQ ID NO: 344639 - RNA, 19 nt, Homo sapiens
  misc_RNA (1)...(19): siRNA sense strand
ucaacacccuggccgaguu

SEQ ID NO: 344640 - RNA, 19 nt, Homo sapiens
  misc_RNA (1)...(19): siRNA sense strand
aagcugcagucaugaaaga

SEQ ID NO: 344641 - RNA, 19 nt, Homo sapiens
  misc_RNA (1)...(19): siRNA sense strand
ucguugcacuguaugauuu

SEQ ID NO: 344642 - RNA, 19 nt, Homo sapiens
  misc_RNA (1)...(19): siRNA sense strand
ggaucaacacugcuucuga

SEQ ID NO: 344643 - RNA, 19 nt, Homo sapiens
  misc_RNA (1)...(19): siRNA sense strand
gccgaggaguccagaguga

SEQ ID NO: 344644 - RNA, 19 nt, Homo sapiens
  misc_RNA (1)...(19): siRNA sense strand
acaacaaguucuccaucaa

SEQ ID NO: 344645 - RNA, 19 nt, Homo sapiens
  misc_RNA (1)...(19): siRNA sense strand
uacaacaaguucuccauca

SEQ ID NO: 344646 - RNA, 19 nt, Homo sapiens
  misc_RNA (1)...(19): siRNA sense strand
gagauaacacucuaagcau

SEQ ID NO: 344647 - RNA, 19 nt, Homo sapiens
  misc_RNA (1)...(19): siRNA sense strand
ccgagagccuggccuacaa

SEQ ID NO: 344648 - RNA, 19 nt, Homo sapiens
  misc_RNA (1)...(19): siRNA sense strand
ccaagccuuugaaacaaug

SEQ ID NO: 344649 - RNA, 19 nt, Homo sapiens
  misc_RNA (1)...(19): siRNA sense strand
uggugaagguagcugauuu

SEQ ID NO: 344650 - RNA, 19 nt, Homo sapiens
  misc_RNA (1)...(19): siRNA sense strand
guauugcuuugggaaauug

SEQ ID NO: 344651 - RNA, 19 nt, Homo sapiens
  misc_RNA (1)...(19): siRNA sense strand
cgucugggcauuuggagua

SEQ ID NO: 344652 - RNA, 19 nt, Homo sapiens
  misc_RNA (1)...(19): siRNA sense strand
ucaccacgcuccauuaucc

SEQ ID NO: 344653 - RNA, 19 nt, Homo sapiens
  misc_RNA (1)...(19): siRNA sense strand
ggcacaagcacuccucuga

SEQ ID NO: 344654 - RNA, 19 nt, Homo sapiens
  misc_RNA (1)...(19): siRNA sense strand
gaaauccaccaagccuuug

SEQ ID NO: 344655 - RNA, 19 nt, Homo sapiens
  misc_RNA (1)...(19): siRNA sense strand
caacaaguucuccaucaag

SEQ ID NO: 344656 - RNA, 19 nt, Homo sapiens
  misc_RNA (1)...(19): siRNA sense strand
gugugaagcccaaaccaaa

SEQ ID NO: 344657 - RNA, 19 nt, Homo sapiens
  misc_RNA (1)...(19): siRNA sense strand
caacaaacuggagaauaau

SEQ ID NO: 344658 - RNA, 19 nt, Homo sapiens
  misc_RNA (1)...(19): siRNA sense strand
ggaguauugcuuugggaaa

SEQ ID NO: 344659 - RNA, 19 nt, Homo sapiens
  misc_RNA (1)...(19): siRNA sense strand
gagccuggccuacaacaag

SEQ ID NO: 344660 - RNA, 19 nt, Homo sapiens
  misc_RNA (1)...(19): siRNA sense strand
acgggaaccuccuggacua

SEQ ID NO: 344661 - RNA, 19 nt, Homo sapiens
  misc_RNA (1)...(19): siRNA sense strand
gagggcguguggaagaaau

SEQ ID NO: 344662 - RNA, 19 nt, Homo sapiens
  misc_RNA (1)...(19): siRNA sense strand
ccagguguaugagcugcua

SEQ ID NO: 344663 - RNA, 19 nt, Homo sapiens
  misc_RNA (1)...(19): siRNA sense strand
aaaaggagcuggggaaaca

SEQ ID NO: 344664 - RNA, 19 nt, Homo sapiens
  misc_RNA (1)...(19): siRNA sense strand
ccaguagcaucugacuuug

SEQ ID NO: 344665 - RNA, 19 nt, Homo sapiens
  misc_RNA (1)...(19): siRNA sense strand
ugaaggaaaucagugacau

SEQ ID NO: 344666 - RNA, 19 nt, Homo sapiens
  misc_RNA (1)...(19): siRNA sense strand
cguucuauaucaucacuga

SEQ ID NO: 344667 - RNA, 19 nt, Homo sapiens
  misc_RNA (1)...(19): siRNA sense strand
ccgaguugguucaucauca

SEQ ID NO: 344668 - RNA, 19 nt, Homo sapiens
  misc_RNA (1)...(19): siRNA sense strand
cgaguugguucaucaucau

SEQ ID NO: 344669 - RNA, 19 nt, Homo sapiens
  misc_RNA (1)...(19): siRNA sense strand
ccgagaggccaucaacaaa

SEQ ID NO: 344670 - RNA, 19 nt, Homo sapiens
  misc_RNA (1)...(19): siRNA sense strand
uaucucagacgaaguggaa

SEQ ID NO: 344671 - RNA, 19 nt, Homo sapiens
  misc_RNA (1)...(19): siRNA sense strand
ccgcaaugccgcugaguau

SEQ ID NO: 344672 - RNA, 19 nt, Homo sapiens
  misc_RNA (1)...(19): siRNA sense strand
gauuccauccagcaaauga

SEQ ID NO: 344673 - RNA, 19 nt, Homo sapiens
  misc_RNA (1)...(19): siRNA sense strand
acucuaagcauaacuaaag

SEQ ID NO: 344674 - RNA, 19 nt, Homo sapiens
  misc_RNA (1)...(19): siRNA sense strand
uuugggaaauugcuaccua

SEQ ID NO: 344675 - RNA, 19 nt, Homo sapiens
  misc_RNA (1)...(19): siRNA sense strand
ugaaggaggacaccaugga

SEQ ID NO: 344676 - RNA, 19 nt, Homo sapiens
  misc_RNA (1)...(19): siRNA sense strand
gugacauagugcagaggua

SEQ ID NO: 344677 - RNA, 19 nt, Homo sapiens
  misc_RNA (1)...(19): siRNA sense strand
cuccauugcucccucgaaa

SEQ ID NO: 344678 - RNA, 19 nt, Homo sapiens
  misc_RNA (1)...(19): siRNA sense strand
gagcauguuggcaguggaa

SEQ ID NO: 344679 - RNA, 19 nt, Homo sapiens
  misc_RNA (1)...(19): siRNA sense strand
gaaacacuccugguaccau

SEQ ID NO: 344680 - RNA, 19 nt, Homo sapiens
  misc_RNA (1)...(19): siRNA sense strand
caucaccacgcuccauuau

SEQ ID NO: 344681 - RNA, 19 nt, Homo sapiens
  misc_RNA (1)...(19): siRNA sense strand
agucaacagucuggagaaa

SEQ ID NO: 344682 - RNA, 19 nt, Homo sapiens
  misc_RNA (1)...(19): siRNA sense strand
cagcaaaugaggaacaagu

SEQ ID NO: 344683 - RNA, 19 nt, Homo sapiens
  misc_RNA (1)...(19): siRNA sense strand
agggaaggcuggaggaaag

SEQ ID NO: 344684 - RNA, 19 nt, Homo sapiens
  misc_RNA (1)...(19): siRNA sense strand
ucaagaagaagaagaagac

SEQ ID NO: 344685 - RNA, 19 nt, Homo sapiens
  misc_RNA (1)...(19): siRNA sense strand
ccagagcugcccaccaaga

SEQ ID NO: 344686 - RNA, 19 nt, Homo sapiens
  misc_RNA (1)...(19): siRNA sense strand
ucuauaucaucacugaguu

SEQ ID NO: 344687 - RNA, 19 nt, Homo sapiens
  misc_RNA (1)...(19): siRNA sense strand
ccacucaggacuucagcaa

SEQ ID NO: 344688 - RNA, 19 nt, Homo sapiens
  misc_RNA (1)...(19): siRNA sense strand
ugaucaagaagaagaagaa

SEQ ID NO: 344689 - RNA, 19 nt, Homo sapiens
  misc_RNA (1)...(19): siRNA sense strand
ccaugagccugccgugucu

SEQ ID NO: 344690 - RNA, 19 nt, Homo sapiens
  misc_RNA (1)...(19): siRNA sense strand
gagcugcagagcacagaga

SEQ ID NO: 344691 - RNA, 19 nt, Homo sapiens
  misc_RNA (1)...(19): siRNA sense strand
gcaaccggcaggaggugaa

SEQ ID NO: 344692 - RNA, 19 nt, Homo sapiens
  misc_RNA (1)...(19): siRNA sense strand
uggccgaguugguucauca

SEQ ID NO: 344693 - RNA, 19 nt, Homo sapiens
  misc_RNA (1)...(19): siRNA sense strand
ggugugaagcccaaaccaa

SEQ ID NO: 344694 - RNA, 19 nt, Homo sapiens
  misc_RNA (1)...(19): siRNA sense strand
gggaaauugcuaccuaugg

SEQ ID NO: 344695 - RNA, 19 nt, Homo sapiens
  misc_RNA (1)...(19): siRNA sense strand
ugaaagaagcugcagucau

SEQ ID NO: 344696 - RNA, 19 nt, Homo sapiens
  misc_RNA (1)...(19): siRNA sense strand
caagcccacugucuauggu

SEQ ID NO: 344697 - RNA, 19 nt, Homo sapiens
  misc_RNA (1)...(19): siRNA sense strand
cauaucaacccgagugucu

SEQ ID NO: 344698 - RNA, 19 nt, Homo sapiens
  misc_RNA (1)...(19): siRNA sense strand
gaaagaagcugcagucaug

SEQ ID NO: 344699 - RNA, 19 nt, Homo sapiens
  misc_RNA (1)...(19): siRNA sense strand
ucaacaaacuggagaauaa

SEQ ID NO: 344700 - RNA, 19 nt, Homo sapiens
  misc_RNA (1)...(19): siRNA sense strand
ggaaaucagugacauagug

SEQ ID NO: 344701 - RNA, 19 nt, Homo sapiens
  misc_RNA (1)...(19): siRNA sense strand
ccagaaggcugcccagaga

SEQ ID NO: 344702 - RNA, 19 nt, Homo sapiens
  misc_RNA (1)...(19): siRNA sense strand
gcaacaagcccacugucua

SEQ ID NO: 344703 - RNA, 19 nt, Homo sapiens
  misc_RNA (1)...(19): siRNA sense strand
gaaggaaaucagugacaua

SEQ ID NO: 344704 - RNA, 19 nt, Homo sapiens
  misc_RNA (1)...(19): siRNA sense strand
ucacugaguucaugaccua

SEQ ID NO: 344705 - RNA, 19 nt, Homo sapiens
  misc_RNA (1)...(19): siRNA sense strand
uguaugagcugcuagagaa

SEQ ID NO: 344706 - RNA, 19 nt, Homo sapiens
  misc_RNA (1)...(19): siRNA sense strand
agauaacacucuaagcaua

SEQ ID NO: 344707 - RNA, 19 nt, Homo sapiens
  misc_RNA (1)...(19): siRNA sense strand
gauaacacucuaagcauaa

SEQ ID NO: 344708 - RNA, 19 nt, Homo sapiens
  misc_RNA (1)...(19): siRNA sense strand
gcaaaugaggaacaaguuu

SEQ ID NO: 344709 - RNA, 19 nt, Homo sapiens
  misc_RNA (1)...(19): siRNA sense strand
gaagggaggguguaccauu

SEQ ID NO: 344710 - RNA, 19 nt, Homo sapiens
  misc_RNA (1)...(19): siRNA sense strand
gaaaaugaccccaaccuuu

SEQ ID NO: 344711 - RNA, 19 nt, Homo sapiens
  misc_RNA (1)...(19): siRNA sense strand
gaagagggccgagacauca

SEQ ID NO: 344712 - RNA, 19 nt, Homo sapiens
  misc_RNA (1)...(19): siRNA sense strand
ggagauaacacucuaagca

SEQ ID NO: 344713 - RNA, 19 nt, Homo sapiens
  misc_RNA (1)...(19): siRNA sense strand
gccaguagcaucugacuuu

SEQ ID NO: 344714 - RNA, 19 nt, Homo sapiens
  misc_RNA (1)...(19): siRNA sense strand
ucagcaagcuccucaguuc

SEQ ID NO: 344715 - RNA, 19 nt, Homo sapiens
  misc_RNA (1)...(19): siRNA sense strand
gagaaggucuaugaacuca

SEQ ID NO: 344716 - RNA, 19 nt, Homo sapiens
  misc_RNA (1)...(19): siRNA sense strand
aagggaggguguaccauua

SEQ ID NO: 344717 - RNA, 19 nt, Homo sapiens
  misc_RNA (1)...(19): siRNA sense strand
caacaagcccacugucuau

SEQ ID NO: 344718 - RNA, 19 nt, Homo sapiens
  misc_RNA (1)...(19): siRNA sense strand
gcgauccucuggaccauga

SEQ ID NO: 344719 - RNA, 19 nt, Homo sapiens
  misc_RNA (1)...(19): siRNA sense strand
aagcauaacuaaaggugaa

SEQ ID NO: 344720 - RNA, 19 nt, Homo sapiens
  misc_RNA (1)...(19): siRNA sense strand
ccaccaagccuuugaaaca

SEQ ID NO: 344721 - RNA, 19 nt, Homo sapiens
  misc_RNA (1)...(19): siRNA sense strand
ccauggagguggaagaguu

SEQ ID NO: 344722 - RNA, 19 nt, Homo sapiens
  misc_RNA (1)...(19): siRNA sense strand
cuucaucccucucauauca

SEQ ID NO: 344723 - RNA, 19 nt, Homo sapiens
  misc_RNA (1)...(19): siRNA sense strand
gcccagagaaggucuauga

SEQ ID NO: 344724 - RNA, 19 nt, Homo sapiens
  misc_RNA (1)...(19): siRNA sense strand
ucaacagucuggagaaaca

SEQ ID NO: 344725 - RNA, 19 nt, Homo sapiens
  misc_RNA (1)...(19): siRNA sense strand
ugaggaagcugcugaugag

SEQ ID NO: 344726 - RNA, 19 nt, Homo sapiens
  misc_RNA (1)...(19): siRNA sense strand
uaucaucacugaguucaug

SEQ ID NO: 344727 - RNA, 19 nt, Homo sapiens
  misc_RNA (1)...(19): siRNA sense strand
ccacugacgugccugagau

SEQ ID NO: 344728 - RNA, 19 nt, Homo sapiens
  misc_RNA (1)...(19): siRNA sense strand
guacauggccacucagauc

SEQ ID NO: 344729 - RNA, 19 nt, Homo sapiens
  misc_RNA (1)...(19): siRNA sense strand
ucaguucggugaaggaaau

SEQ ID NO: 344730 - RNA, 19 nt, Homo sapiens
  misc_RNA (1)...(19): siRNA sense strand
cagagaaggucuaugaacu

SEQ ID NO: 344731 - RNA, 19 nt, Homo sapiens
  misc_RNA (1)...(19): siRNA sense strand
gcauuuggaguauugcuuu

SEQ ID NO: 344732 - RNA, 19 nt, Homo sapiens
  misc_RNA (1)...(19): siRNA sense strand
gagaggccaucaacaaacu

SEQ ID NO: 344733 - RNA, 19 nt, Homo sapiens
  misc_RNA (1)...(19): siRNA sense strand
caaggaagaagccuggaaa

SEQ ID NO: 344734 - RNA, 19 nt, Homo sapiens
  misc_RNA (1)...(19): siRNA sense strand
ugaaauccaccaagccuuu

SEQ ID NO: 344735 - RNA, 19 nt, Homo sapiens
  misc_RNA (1)...(19): siRNA sense strand
gaguauugcuuugggaaau

SEQ ID NO: 344736 - RNA, 19 nt, Homo sapiens
  misc_RNA (1)...(19): siRNA sense strand
ggaagagggccgagacauc

SEQ ID NO: 344737 - RNA, 19 nt, Homo sapiens
  misc_RNA (1)...(19): siRNA sense strand
gaucaauggcagcuucuug

SEQ ID NO: 344738 - RNA, 19 nt, Homo sapiens
  misc_RNA (1)...(19): siRNA sense strand
caccaagccuuugaaacaa

SEQ ID NO: 344739 - RNA, 19 nt, Homo sapiens
  misc_RNA (1)...(19): siRNA sense strand
ucaacacccuggccgaguu

SEQ ID NO: 344740 - RNA, 19 nt, Homo sapiens
  misc_RNA (1)...(19): siRNA sense strand
aagcugcagucaugaaaga

SEQ ID NO: 344741 - RNA, 19 nt, Homo sapiens
  misc_RNA (1)...(19): siRNA sense strand
ucguugcacuguaugauuu

SEQ ID NO: 344742 - RNA, 19 nt, Homo sapiens
  misc_RNA (1)...(19): siRNA sense strand
ggaucaacacugcuucuga

SEQ ID NO: 344743 - RNA, 19 nt, Homo sapiens
  misc_RNA (1)...(19): siRNA sense strand
gccgaggaguccagaguga

SEQ ID NO: 344744 - RNA, 19 nt, Homo sapiens
  misc_RNA (1)...(19): siRNA sense strand
acaacaaguucuccaucaa

SEQ ID NO: 344745 - RNA, 19 nt, Homo sapiens
  misc_RNA (1)...(19): siRNA sense strand
uacaacaaguucuccauca

SEQ ID NO: 344746 - RNA, 19 nt, Homo sapiens
  misc_RNA (1)...(19): siRNA sense strand
gagauaacacucuaagcau

SEQ ID NO: 344747 - RNA, 19 nt, Homo sapiens
  misc_RNA (1)...(19): siRNA sense strand
ccgagagccuggccuacaa

SEQ ID NO: 344748 - RNA, 19 nt, Homo sapiens
  misc_RNA (1)...(19): siRNA sense strand
ccaagccuuugaaacaaug

SEQ ID NO: 344749 - RNA, 19 nt, Homo sapiens
  misc_RNA (1)...(19): siRNA sense strand
uggugaagguagcugauuu

SEQ ID NO: 344750 - RNA, 19 nt, Homo sapiens
  misc_RNA (1)...(19): siRNA sense strand
guauugcuuugggaaauug

SEQ ID NO: 344751 - RNA, 19 nt, Homo sapiens
  misc_RNA (1)...(19): siRNA sense strand
cgucugggcauuuggagua

SEQ ID NO: 344752 - RNA, 19 nt, Homo sapiens
  misc_RNA (1)...(19): siRNA sense strand
ucaccacgcuccauuaucc

SEQ ID NO: 344753 - RNA, 19 nt, Homo sapiens
  misc_RNA (1)...(19): siRNA sense strand
ggcacaagcacuccucuga

SEQ ID NO: 344754 - RNA, 19 nt, Homo sapiens
  misc_RNA (1)...(19): siRNA sense strand
gaaauccaccaagccuuug

SEQ ID NO: 344755 - RNA, 19 nt, Homo sapiens
  misc_RNA (1)...(19): siRNA sense strand
caacaaguucuccaucaag

SEQ ID NO: 344756 - RNA, 19 nt, Homo sapiens
  misc_RNA (1)...(19): siRNA sense strand
gugugaagcccaaaccaaa

SEQ ID NO: 344757 - RNA, 19 nt, Homo sapiens
  misc_RNA (1)...(19): siRNA sense strand
caacaaacuggagaauaau

SEQ ID NO: 344758 - RNA, 19 nt, Homo sapiens
  misc_RNA (1)...(19): siRNA sense strand
ggaguauugcuuugggaaa

SEQ ID NO: 344759 - RNA, 19 nt, Homo sapiens
  misc_RNA (1)...(19): siRNA sense strand
gagccuggccuacaacaag

SEQ ID NO: 344760 - RNA, 19 nt, Homo sapiens
  misc_RNA (1)...(19): siRNA sense strand
acgggaaccuccuggacua

SEQ ID NO: 344761 - RNA, 19 nt, Homo sapiens
  misc_RNA (1)...(19): siRNA sense strand
gagggcguguggaagaaau

SEQ ID NO: 344762 - RNA, 19 nt, Homo sapiens
  misc_RNA (1)...(19): siRNA sense strand
ccagguguaugagcugcua

SEQ ID NO: 344763 - RNA, 19 nt, Homo sapiens
  misc_RNA (1)...(19): siRNA sense strand
aaaaggagcuggggaaaca

SEQ ID NO: 344764 - RNA, 19 nt, Homo sapiens
  misc_RNA (1)...(19): siRNA sense strand
ccaguagcaucugacuuug

SEQ ID NO: 344765 - RNA, 19 nt, Homo sapiens
  misc_RNA (1)...(19): siRNA sense strand
ugaaggaaaucagugacau

SEQ ID NO: 344766 - RNA, 19 nt, Homo sapiens
  misc_RNA (1)...(19): siRNA sense strand
cguucuauaucaucacuga

SEQ ID NO: 344767 - RNA, 19 nt, Homo sapiens
  misc_RNA (1)...(19): siRNA sense strand
ccgaguugguucaucauca

SEQ ID NO: 344768 - RNA, 19 nt, Homo sapiens
  misc_RNA (1)...(19): siRNA sense strand
cgaguugguucaucaucau

SEQ ID NO: 344769 - RNA, 19 nt, Homo sapiens
  misc_RNA (1)...(19): siRNA sense strand
ccgagaggccaucaacaaa

SEQ ID NO: 344770 - RNA, 19 nt, Homo sapiens
  misc_RNA (1)...(19): siRNA sense strand
uaucucagacgaaguggaa

SEQ ID NO: 344771 - RNA, 19 nt, Homo sapiens
  misc_RNA (1)...(19): siRNA sense strand
ccgcaaugccgcugaguau

SEQ ID NO: 344772 - RNA, 19 nt, Homo sapiens
  misc_RNA (1)...(19): siRNA sense strand
gauuccauccagcaaauga

SEQ ID NO: 344773 - RNA, 19 nt, Homo sapiens
  misc_RNA (1)...(19): siRNA sense strand
acucuaagcauaacuaaag

SEQ ID NO: 344774 - RNA, 19 nt, Homo sapiens
  misc_RNA (1)...(19): siRNA sense strand
uuugggaaauugcuaccua

SEQ ID NO: 344775 - RNA, 19 nt, Homo sapiens
  misc_RNA (1)...(19): siRNA sense strand
ugaaggaggacaccaugga

SEQ ID NO: 344776 - RNA, 19 nt, Homo sapiens
  misc_RNA (1)...(19): siRNA sense strand
gugacauagugcagaggua

SEQ ID NO: 344777 - RNA, 19 nt, Homo sapiens
  misc_RNA (1)...(19): siRNA sense strand
cuccauugcucccucgaaa

SEQ ID NO: 344778 - RNA, 19 nt, Homo sapiens
  misc_RNA (1)...(19): siRNA sense strand
gagcauguuggcaguggaa

SEQ ID NO: 344779 - RNA, 19 nt, Homo sapiens
  misc_RNA (1)...(19): siRNA sense strand
gaaacacuccugguaccau

SEQ ID NO: 344780 - RNA, 19 nt, Homo sapiens
  misc_RNA (1)...(19): siRNA sense strand
caucaccacgcuccauuau

SEQ ID NO: 344781 - RNA, 19 nt, Homo sapiens
  misc_RNA (1)...(19): siRNA sense strand
agucaacagucuggagaaa

SEQ ID NO: 344782 - RNA, 19 nt, Homo sapiens
  misc_RNA (1)...(19): siRNA sense strand
cagcaaaugaggaacaagu

SEQ ID NO: 344783 - RNA, 19 nt, Homo sapiens
  misc_RNA (1)...(19): siRNA sense strand
agggaaggcuggaggaaag

SEQ ID NO: 344784 - RNA, 19 nt, Homo sapiens
  misc_RNA (1)...(19): siRNA sense strand
ucaagaagaagaagaagac

SEQ ID NO: 344785 - RNA, 19 nt, Homo sapiens
  misc_RNA (1)...(19): siRNA sense strand
ccagagcugcccaccaaga

SEQ ID NO: 344786 - RNA, 19 nt, Homo sapiens
  misc_RNA (1)...(19): siRNA sense strand
ucuauaucaucacugaguu

SEQ ID NO: 344787 - RNA, 19 nt, Homo sapiens
  misc_RNA (1)...(19): siRNA sense strand
ccacucaggacuucagcaa

SEQ ID NO: 344788 - RNA, 19 nt, Homo sapiens
  misc_RNA (1)...(19): siRNA sense strand
ugaucaagaagaagaagaa

SEQ ID NO: 344789 - RNA, 19 nt, Homo sapiens
  misc_RNA (1)...(19): siRNA sense strand
ccaugagccugccgugucu

SEQ ID NO: 344790 - RNA, 19 nt, Homo sapiens
  misc_RNA (1)...(19): siRNA sense strand
gagcugcagagcacagaga

SEQ ID NO: 344791 - RNA, 19 nt, Homo sapiens
  misc_RNA (1)...(19): siRNA sense strand
gcaaccggcaggaggugaa

SEQ ID NO: 344792 - RNA, 19 nt, Homo sapiens
  misc_RNA (1)...(19): siRNA sense strand
uggccgaguugguucauca

SEQ ID NO: 344793 - RNA, 19 nt, Homo sapiens
  misc_RNA (1)...(19): siRNA sense strand
ggugugaagcccaaaccaa

SEQ ID NO: 344794 - RNA, 19 nt, Homo sapiens
  misc_RNA (1)...(19): siRNA sense strand
gggaaauugcuaccuaugg

SEQ ID NO: 344795 - RNA, 19 nt, Homo sapiens
  misc_RNA (1)...(19): siRNA sense strand
ugaaagaagcugcagucau

SEQ ID NO: 344796 - RNA, 19 nt, Homo sapiens
  misc_RNA (1)...(19): siRNA sense strand
caagcccacugucuauggu

SEQ ID NO: 344797 - RNA, 19 nt, Homo sapiens
  misc_RNA (1)...(19): siRNA sense strand
cauaucaacccgagugucu

SEQ ID NO: 344798 - RNA, 19 nt, Homo sapiens
  misc_RNA (1)...(19): siRNA sense strand
gaaagaagcugcaguaaug

SEQ ID NO: 344799 - RNA, 19 nt, Homo sapiens
  misc_RNA (1)...(19): siRNA sense strand
gaacagauauuaccaugaa

SEQ ID NO: 344800 - RNA, 19 nt, Homo sapiens
  misc_RNA (1)...(19): siRNA sense strand
gaaguucgcucuaagaaug

SEQ ID NO: 344801 - RNA, 19 nt, Homo sapiens
  misc_RNA (1)...(19): siRNA sense strand
ggagccaaauuuccuauua

SEQ ID NO: 344802 - RNA, 19 nt, Homo sapiens
  misc_RNA (1)...(19): siRNA sense strand
gaaauggagcgaacagaua

SEQ ID NO: 344803 - RNA, 19 nt, Homo sapiens
  misc_RNA (1)...(19): siRNA sense strand
gaagagaaaugcuccuaca

SEQ ID NO: 344804 - RNA, 19 nt, Homo sapiens
  misc_RNA (1)...(19): siRNA sense strand
guaauaagccuacagucua

SEQ ID NO: 344805 - RNA, 19 nt, Homo sapiens
  misc_RNA (1)...(19): siRNA sense strand
gcacaggccucuaguggau

SEQ ID NO: 344806 - RNA, 19 nt, Homo sapiens
  misc_RNA (1)...(19): siRNA sense strand
ggaaauugcuaccuaugga

SEQ ID NO: 344807 - RNA, 19 nt, Homo sapiens
  misc_RNA (1)...(19): siRNA sense strand
gagccaaauuuccuauuaa

SEQ ID NO: 344808 - RNA, 19 nt, Homo sapiens
  misc_RNA (1)...(19): siRNA sense strand
ggagugaaguucgcucuaa

SEQ ID NO: 344809 - RNA, 19 nt, Homo sapiens
  misc_RNA (1)...(19): siRNA sense strand
gaagaagaauuucauccau

SEQ ID NO: 344810 - RNA, 19 nt, Homo sapiens
  misc_RNA (1)...(19): siRNA sense strand
ccaaugacaugcuuccaaa

SEQ ID NO: 344811 - RNA, 19 nt, Homo sapiens
  misc_RNA (1)...(19): siRNA sense strand
caaacccuguccuuaauaa

SEQ ID NO: 344812 - RNA, 19 nt, Homo sapiens
  misc_RNA (1)...(19): siRNA sense strand
ggaaugugcugaccuacug

SEQ ID NO: 344813 - RNA, 19 nt, Homo sapiens
  misc_RNA (1)...(19): siRNA sense strand
cagcauuucugaagaggua

SEQ ID NO: 344814 - RNA, 19 nt, Homo sapiens
  misc_RNA (1)...(19): siRNA sense strand
gaaauacagccuuacaguu

SEQ ID NO: 344815 - RNA, 19 nt, Homo sapiens
  misc_RNA (1)...(19): siRNA sense strand
gcaauggaguacuuagaga

SEQ ID NO: 344816 - RNA, 19 nt, Homo sapiens
  misc_RNA (1)...(19): siRNA sense strand
gaacaaggagaacauugaa

SEQ ID NO: 344817 - RNA, 19 nt, Homo sapiens
  misc_RNA (1)...(19): siRNA sense strand
uagaagaauuccugaaaga

SEQ ID NO: 344818 - RNA, 19 nt, Homo sapiens
  misc_RNA (1)...(19): siRNA sense strand
ggacagggccaaugacaug

SEQ ID NO: 344819 - RNA, 19 nt, Homo sapiens
  misc_RNA (1)...(19): siRNA sense strand
uggaagaaauacagccuua

SEQ ID NO: 344820 - RNA, 19 nt, Homo sapiens
  misc_RNA (1)...(19): siRNA sense strand
agaaacagguggagaacaa

SEQ ID NO: 344821 - RNA, 19 nt, Homo sapiens
  misc_RNA (1)...(19): siRNA sense strand
gacaccagcugcuugacua

SEQ ID NO: 344822 - RNA, 19 nt, Homo sapiens
  misc_RNA (1)...(19): siRNA sense strand
gcucagacccuacagaaga

SEQ ID NO: 344823 - RNA, 19 nt, Homo sapiens
  misc_RNA (1)...(19): siRNA sense strand
gcucagcagucuaaucaau

SEQ ID NO: 344824 - RNA, 19 nt, Homo sapiens
  misc_RNA (1)...(19): siRNA sense strand
gcugauggguucucuuuca

SEQ ID NO: 344825 - RNA, 19 nt, Homo sapiens
  misc_RNA (1)...(19): siRNA sense strand
gguaacuucucaucuguug

SEQ ID NO: 344826 - RNA, 19 nt, Homo sapiens
  misc_RNA (1)...(19): siRNA sense strand
cgucaucuguuguuccaua

SEQ ID NO: 344827 - RNA, 19 nt, Homo sapiens
  misc_RNA (1)...(19): siRNA sense strand
uaauaagccuacagucuau

SEQ ID NO: 344828 - RNA, 19 nt, Homo sapiens
  misc_RNA (1)...(19): siRNA sense strand
caaacaggccgcugagaaa

SEQ ID NO: 344829 - RNA, 19 nt, Homo sapiens
  misc_RNA (1)...(19): siRNA sense strand
gaagaaauacagccuuaca

SEQ ID NO: 344830 - RNA, 19 nt, Homo sapiens
  misc_RNA (1)...(19): siRNA sense strand
aaauucugcuuccaguuua

SEQ ID NO: 344831 - RNA, 19 nt, Homo sapiens
  misc_RNA (1)...(19): siRNA sense strand
cagagagucuugccuacaa

SEQ ID NO: 344832 - RNA, 19 nt, Homo sapiens
  misc_RNA (1)...(19): siRNA sense strand
gguagaagaauuccugaaa

SEQ ID NO: 344833 - RNA, 19 nt, Homo sapiens
  misc_RNA (1)...(19): siRNA sense strand
ccauggagguagaagaauu

SEQ ID NO: 344834 - RNA, 19 nt, Homo sapiens
  misc_RNA (1)...(19): siRNA sense strand
gcuggaaugugcugaccua

SEQ ID NO: 344835 - RNA, 19 nt, Homo sapiens
  misc_RNA (1)...(19): siRNA sense strand
ggaauuugcuggauuaccu

SEQ ID NO: 344836 - RNA, 19 nt, Homo sapiens
  misc_RNA (1)...(19): siRNA sense strand
guagaagaauuccugaaag

SEQ ID NO: 344837 - RNA, 19 nt, Homo sapiens
  misc_RNA (1)...(19): siRNA sense strand
aaauacagccuuacaguug

SEQ ID NO: 344838 - RNA, 19 nt, Homo sapiens
  misc_RNA (1)...(19): siRNA sense strand
aauacgaacucacggguaa

SEQ ID NO: 344839 - RNA, 19 nt, Homo sapiens
  misc_RNA (1)...(19): siRNA sense strand
gaaaucaagcauccuaauc

SEQ ID NO: 344840 - RNA, 19 nt, Homo sapiens
  misc_RNA (1)...(19): siRNA sense strand
gaagaauuccugaaagaag

SEQ ID NO: 344841 - RNA, 19 nt, Homo sapiens
  misc_RNA (1)...(19): siRNA sense strand
ccaaauuuccuauuaagug

SEQ ID NO: 344842 - RNA, 19 nt, Homo sapiens
  misc_RNA (1)...(19): siRNA sense strand
gaaaaucucagcagacaaa

SEQ ID NO: 344843 - RNA, 19 nt, Homo sapiens
  misc_RNA (1)...(19): siRNA sense strand
gauaacacacucagcauca

SEQ ID NO: 344844 - RNA, 19 nt, Homo sapiens
  misc_RNA (1)...(19): siRNA sense strand
aauucaagcucuuaucuga

SEQ ID NO: 344845 - RNA, 19 nt, Homo sapiens
  misc_RNA (1)...(19): siRNA sense strand
ggaaauggagcgaacagau

SEQ ID NO: 344846 - RNA, 19 nt, Homo sapiens
  misc_RNA (1)...(19): siRNA sense strand
cuacauggccacucagauu

SEQ ID NO: 344847 - RNA, 19 nt, Homo sapiens
  misc_RNA (1)...(19): siRNA sense strand
gcacaagaugccacagaaa

SEQ ID NO: 344848 - RNA, 19 nt, Homo sapiens
  misc_RNA (1)...(19): siRNA sense strand
agaagaauuucauccauag

SEQ ID NO: 344849 - RNA, 19 nt, Homo sapiens
  misc_RNA (1)...(19): siRNA sense strand
caagcauccuaaucuggua

SEQ ID NO: 344850 - RNA, 19 nt, Homo sapiens
  misc_RNA (1)...(19): siRNA sense strand
ccaaacaggccgcugagaa

SEQ ID NO: 344851 - RNA, 19 nt, Homo sapiens
  misc_RNA (1)...(19): siRNA sense strand
gaaauugcuaccuauggaa

SEQ ID NO: 344852 - RNA, 19 nt, Homo sapiens
  misc_RNA (1)...(19): siRNA sense strand
cuacaauaccuucucaauu

SEQ ID NO: 344853 - RNA, 19 nt, Homo sapiens
  misc_RNA (1)...(19): siRNA sense strand
gcacagcagguacuaaagu

SEQ ID NO: 344854 - RNA, 19 nt, Homo sapiens
  misc_RNA (1)...(19): siRNA sense strand
gaucuagccauuacagaga

SEQ ID NO: 344855 - RNA, 19 nt, Homo sapiens
  misc_RNA (1)...(19): siRNA sense strand
cauaagaaauacgaacuca

SEQ ID NO: 344856 - RNA, 19 nt, Homo sapiens
  misc_RNA (1)...(19): siRNA sense strand
ggaaaucaagcauccuaau

SEQ ID NO: 344857 - RNA, 19 nt, Homo sapiens
  misc_RNA (1)...(19): siRNA sense strand
gugauguggugcagaggua

SEQ ID NO: 344858 - RNA, 19 nt, Homo sapiens
  misc_RNA (1)...(19): siRNA sense strand
ucguugcacuuuaugauuu

SEQ ID NO: 344859 - RNA, 19 nt, Homo sapiens
  misc_RNA (1)...(19): siRNA sense strand
caaagaggcccugcuggaa

SEQ ID NO: 344860 - RNA, 19 nt, Homo sapiens
  misc_RNA (1)...(19): siRNA sense strand
uaaaguggcucugagaaaa

SEQ ID NO: 344861 - RNA, 19 nt, Homo sapiens
  misc_RNA (1)...(19): siRNA sense strand
ggucaaacucuacaucuuc

SEQ ID NO: 344862 - RNA, 19 nt, Homo sapiens
  misc_RNA (1)...(19): siRNA sense strand
ugaagaaacagguggagaa

SEQ ID NO: 344863 - RNA, 19 nt, Homo sapiens
  misc_RNA (1)...(19): siRNA sense strand
cauugugacugaauacaug

SEQ ID NO: 344864 - RNA, 19 nt, Homo sapiens
  misc_RNA (1)...(19): siRNA sense strand
uuccaugacuccagcauuu

SEQ ID NO: 344865 - RNA, 19 nt, Homo sapiens
  misc_RNA (1)...(19): siRNA sense strand
gagagucuugccuacaaua

SEQ ID NO: 344866 - RNA, 19 nt, Homo sapiens
  misc_RNA (1)...(19): siRNA sense strand
acgggaauuugcuggauua

SEQ ID NO: 344867 - RNA, 19 nt, Homo sapiens
  misc_RNA (1)...(19): siRNA sense strand
gagugacccuaaucucuuc

SEQ ID NO: 344868 - RNA, 19 nt, Homo sapiens
  misc_RNA (1)...(19): siRNA sense strand
gcacccaaguguaauaagc

SEQ ID NO: 344869 - RNA, 19 nt, Homo sapiens
  misc_RNA (1)...(19): siRNA sense strand
ugaaagaagcugcaguaau

SEQ ID NO: 344870 - RNA, 19 nt, Homo sapiens
  misc_RNA (1)...(19): siRNA sense strand
ggacagcaccagagagucu

SEQ ID NO: 344871 - RNA, 19 nt, Homo sapiens
  misc_RNA (1)...(19): siRNA sense strand
gagaacaaggagaacauug

SEQ ID NO: 344872 - RNA, 19 nt, Homo sapiens
  misc_RNA (1)...(19): siRNA sense strand
gaagagccaacugcccuaa

SEQ ID NO: 344873 - RNA, 19 nt, Homo sapiens
  misc_RNA (1)...(19): siRNA sense strand
ggaagaugccaaagagaca

SEQ ID NO: 344874 - RNA, 19 nt, Homo sapiens
  misc_RNA (1)...(19): siRNA sense strand
guacgagggacguguguau

SEQ ID NO: 344875 - RNA, 19 nt, Homo sapiens
  misc_RNA (1)...(19): siRNA sense strand
cuaaaguggcucugagaaa

SEQ ID NO: 344876 - RNA, 19 nt, Homo sapiens
  misc_RNA (1)...(19): siRNA sense strand
cagcagcuccuuccgagaa

SEQ ID NO: 344877 - RNA, 19 nt, Homo sapiens
  misc_RNA (1)...(19): siRNA sense strand
gcacugccucgaaagcaaa

SEQ ID NO: 344878 - RNA, 19 nt, Homo sapiens
  misc_RNA (1)...(19): siRNA sense strand
aaaaggauaucgaauggaa

SEQ ID NO: 344879 - RNA, 19 nt, Homo sapiens
  misc_RNA (1)...(19): siRNA sense strand
agaauuucauccauagaga

SEQ ID NO: 344880 - RNA, 19 nt, Homo sapiens
  misc_RNA (1)...(19): siRNA sense strand
gaagaggugacugcaguug

SEQ ID NO: 344881 - RNA, 19 nt, Homo sapiens
  misc_RNA (1)...(19): siRNA sense strand
ccugaaagaagcugcagua

SEQ ID NO: 344882 - RNA, 19 nt, Homo sapiens
  misc_RNA (1)...(19): siRNA sense strand
ugugggaaauugcuaccua

SEQ ID NO: 344883 - RNA, 19 nt, Homo sapiens
  misc_RNA (1)...(19): siRNA sense strand
ugacugaauacaugccaua

SEQ ID NO: 344884 - RNA, 19 nt, Homo sapiens
  misc_RNA (1)...(19): siRNA sense strand
ccgagaggcugugagcaaa

SEQ ID NO: 344885 - RNA, 19 nt, Homo sapiens
  misc_RNA (1)...(19): siRNA sense strand
caaagugccaguccuuauc

SEQ ID NO: 344886 - RNA, 19 nt, Homo sapiens
  misc_RNA (1)...(19): siRNA sense strand
uccgagaaauggagaauca

SEQ ID NO: 344887 - RNA, 19 nt, Homo sapiens
  misc_RNA (1)...(19): siRNA sense strand
ggagaacaaggagaacauu

SEQ ID NO: 344888 - RNA, 19 nt, Homo sapiens
  misc_RNA (1)...(19): siRNA sense strand
ucucuucguugcacuuuau

SEQ ID NO: 344889 - RNA, 19 nt, Homo sapiens
  misc_RNA (1)...(19): siRNA sense strand
ccuaaucugguacaacuuu

SEQ ID NO: 344890 - RNA, 19 nt, Homo sapiens
  misc_RNA (1)...(19): siRNA sense strand
aagaggcccugcuggaaug

SEQ ID NO: 344891 - RNA, 19 nt, Homo sapiens
  misc_RNA (1)...(19): siRNA sense strand
caucacaggcuucuuuaca

SEQ ID NO: 344892 - RNA, 19 nt, Homo sapiens
  misc_RNA (1)...(19): siRNA sense strand
gaaagcaaagagacaaguc

SEQ ID NO: 344893 - RNA, 19 nt, Homo sapiens
  misc_RNA (1)...(19): siRNA sense strand
gaagaauuucauccauaga

SEQ ID NO: 344894 - RNA, 19 nt, Homo sapiens
  misc_RNA (1)...(19): siRNA sense strand
uggauuaccuccgagaaug

SEQ ID NO: 344895 - RNA, 19 nt, Homo sapiens
  misc_RNA (1)...(19): siRNA sense strand
agaacaaggagaacauuga

SEQ ID NO: 344896 - RNA, 19 nt, Homo sapiens
  misc_RNA (1)...(19): siRNA sense strand
ccacaaagugccaguccuu

SEQ ID NO: 344897 - RNA, 19 nt, Homo sapiens
  misc_RNA (1)...(19): siRNA sense strand
caggauaggauggcaauga

SEQ ID NO: 344898 - RNA, 19 nt, Homo sapiens
  misc_RNA (1)...(19): siRNA sense strand
gaaagaagcugcaguaaug

SEQ ID NO: 344899 - RNA, 19 nt, Homo sapiens
  misc_RNA (1)...(19): siRNA sense strand
gaacagauauuaccaugaa

SEQ ID NO: 344900 - RNA, 19 nt, Homo sapiens
  misc_RNA (1)...(19): siRNA sense strand
gaaguucgcucuaagaaug

SEQ ID NO: 344901 - RNA, 19 nt, Homo sapiens
  misc_RNA (1)...(19): siRNA sense strand
ggagccaaauuuccuauua

SEQ ID NO: 344902 - RNA, 19 nt, Homo sapiens
  misc_RNA (1)...(19): siRNA sense strand
gaaauggagcgaacagaua

SEQ ID NO: 344903 - RNA, 19 nt, Homo sapiens
  misc_RNA (1)...(19): siRNA sense strand
gaagagaaaugcuccuaca

SEQ ID NO: 344904 - RNA, 19 nt, Homo sapiens
  misc_RNA (1)...(19): siRNA sense strand
guaauaagccuacagucua

SEQ ID NO: 344905 - RNA, 19 nt, Homo sapiens
  misc_RNA (1)...(19): siRNA sense strand
gcacaggccucuaguggau

SEQ ID NO: 344906 - RNA, 19 nt, Homo sapiens
  misc_RNA (1)...(19): siRNA sense strand
ggaaauugcuaccuaugga

SEQ ID NO: 344907 - RNA, 19 nt, Homo sapiens
  misc_RNA (1)...(19): siRNA sense strand
gagccaaauuuccuauuaa

SEQ ID NO: 344908 - RNA, 19 nt, Homo sapiens
  misc_RNA (1)...(19): siRNA sense strand
ggagugaaguucgcucuaa

SEQ ID NO: 344909 - RNA, 19 nt, Homo sapiens
  misc_RNA (1)...(19): siRNA sense strand
gaagaagaauuucauccau

SEQ ID NO: 344910 - RNA, 19 nt, Homo sapiens
  misc_RNA (1)...(19): siRNA sense strand
ccaaugacaugcuuccaaa

SEQ ID NO: 344911 - RNA, 19 nt, Homo sapiens
  misc_RNA (1)...(19): siRNA sense strand
caaacccuguccuuaauaa

SEQ ID NO: 344912 - RNA, 19 nt, Homo sapiens
  misc_RNA (1)...(19): siRNA sense strand
ggaaugugcugaccuacug

SEQ ID NO: 344913 - RNA, 19 nt, Homo sapiens
  misc_RNA (1)...(19): siRNA sense strand
cagcauuucugaagaggua

SEQ ID NO: 344914 - RNA, 19 nt, Homo sapiens
  misc_RNA (1)...(19): siRNA sense strand
gaaauacagccuuacaguu

SEQ ID NO: 344915 - RNA, 19 nt, Homo sapiens
  misc_RNA (1)...(19): siRNA sense strand
gcaauggaguacuuagaga

SEQ ID NO: 344916 - RNA, 19 nt, Homo sapiens
  misc_RNA (1)...(19): siRNA sense strand
gaacaaggagaacauugaa

SEQ ID NO: 344917 - RNA, 19 nt, Homo sapiens
  misc_RNA (1)...(19): siRNA sense strand
uagaagaauuccugaaaga

SEQ ID NO: 344918 - RNA, 19 nt, Homo sapiens
  misc_RNA (1)...(19): siRNA sense strand
ggacagggccaaugacaug

SEQ ID NO: 344919 - RNA, 19 nt, Homo sapiens
  misc_RNA (1)...(19): siRNA sense strand
uggaagaaauacagccuua

SEQ ID NO: 344920 - RNA, 19 nt, Homo sapiens
  misc_RNA (1)...(19): siRNA sense strand
agaaacagguggagaacaa

SEQ ID NO: 344921 - RNA, 19 nt, Homo sapiens
  misc_RNA (1)...(19): siRNA sense strand
gacaccagcugcuugacua

SEQ ID NO: 344922 - RNA, 19 nt, Homo sapiens
  misc_RNA (1)...(19): siRNA sense strand
gcucagacccuacagaaga

SEQ ID NO: 344923 - RNA, 19 nt, Homo sapiens
  misc_RNA (1)...(19): siRNA sense strand
gcucagcagucuaaucaau

SEQ ID NO: 344924 - RNA, 19 nt, Homo sapiens
  misc_RNA (1)...(19): siRNA sense strand
gcugauggguucucuuuca

SEQ ID NO: 344925 - RNA, 19 nt, Homo sapiens
  misc_RNA (1)...(19): siRNA sense strand
gguaacuucucaucuguug

SEQ ID NO: 344926 - RNA, 19 nt, Homo sapiens
  misc_RNA (1)...(19): siRNA sense strand
cgucaucuguuguuccaua

SEQ ID NO: 344927 - RNA, 19 nt, Homo sapiens
  misc_RNA (1)...(19): siRNA sense strand
uaauaagccuacagucuau

SEQ ID NO: 344928 - RNA, 19 nt, Homo sapiens
  misc_RNA (1)...(19): siRNA sense strand
caaacaggccgcugagaaa

SEQ ID NO: 344929 - RNA, 19 nt, Homo sapiens
  misc_RNA (1)...(19): siRNA sense strand
gaagaaauacagccuuaca

SEQ ID NO: 344930 - RNA, 19 nt, Homo sapiens
  misc_RNA (1)...(19): siRNA sense strand
aaauucugcuuccaguuua

SEQ ID NO: 344931 - RNA, 19 nt, Homo sapiens
  misc_RNA (1)...(19): siRNA sense strand
cagagagucuugccuacaa

SEQ ID NO: 344932 - RNA, 19 nt, Homo sapiens
  misc_RNA (1)...(19): siRNA sense strand
gguagaagaauuccugaaa

SEQ ID NO: 344933 - RNA, 19 nt, Homo sapiens
  misc_RNA (1)...(19): siRNA sense strand
ccauggagguagaagaauu

SEQ ID NO: 344934 - RNA, 19 nt, Homo sapiens
  misc_RNA (1)...(19): siRNA sense strand
gcuggaaugugcugaccua

SEQ ID NO: 344935 - RNA, 19 nt, Homo sapiens
  misc_RNA (1)...(19): siRNA sense strand
ggaauuugcuggauuaccu

SEQ ID NO: 344936 - RNA, 19 nt, Homo sapiens
  misc_RNA (1)...(19): siRNA sense strand
guagaagaauuccugaaag

SEQ ID NO: 344937 - RNA, 19 nt, Homo sapiens
  misc_RNA (1)...(19): siRNA sense strand
aaauacagccuuacaguug

SEQ ID NO: 344938 - RNA, 19 nt, Homo sapiens
  misc_RNA (1)...(19): siRNA sense strand
aauacgaacucacggguaa

SEQ ID NO: 344939 - RNA, 19 nt, Homo sapiens
  misc_RNA (1)...(19): siRNA sense strand
gaaaucaagcauccuaauc

SEQ ID NO: 344940 - RNA, 19 nt, Homo sapiens
  misc_RNA (1)...(19): siRNA sense strand
gaagaauuccugaaagaag

SEQ ID NO: 344941 - RNA, 19 nt, Homo sapiens
  misc_RNA (1)...(19): siRNA sense strand
ccaaauuuccuauuaagug

SEQ ID NO: 344942 - RNA, 19 nt, Homo sapiens
  misc_RNA (1)...(19): siRNA sense strand
gaaaaucucagcagacaaa

SEQ ID NO: 344943 - RNA, 19 nt, Homo sapiens
  misc_RNA (1)...(19): siRNA sense strand
gauaacacacucagcauca

SEQ ID NO: 344944 - RNA, 19 nt, Homo sapiens
  misc_RNA (1)...(19): siRNA sense strand
aauucaagcucuuaucuga

SEQ ID NO: 344945 - RNA, 19 nt, Homo sapiens
  misc_RNA (1)...(19): siRNA sense strand
ggaaauggagcgaacagau

SEQ ID NO: 344946 - RNA, 19 nt, Homo sapiens
  misc_RNA (1)...(19): siRNA sense strand
cuacauggccacucagauu

SEQ ID NO: 344947 - RNA, 19 nt, Homo sapiens
  misc_RNA (1)...(19): siRNA sense strand
gcacaagaugccacagaaa

SEQ ID NO: 344948 - RNA, 19 nt, Homo sapiens
  misc_RNA (1)...(19): siRNA sense strand
agaagaauuucauccauag

SEQ ID NO: 344949 - RNA, 19 nt, Homo sapiens
  misc_RNA (1)...(19): siRNA sense strand
caagcauccuaaucuggua

SEQ ID NO: 344950 - RNA, 19 nt, Homo sapiens
  misc_RNA (1)...(19): siRNA sense strand
ccaaacaggccgcugagaa

SEQ ID NO: 344951 - RNA, 19 nt, Homo sapiens
  misc_RNA (1)...(19): siRNA sense strand
gaaauugcuaccuauggaa

SEQ ID NO: 344952 - RNA, 19 nt, Homo sapiens
  misc_RNA (1)...(19): siRNA sense strand
cuacaauaccuucucaauu

SEQ ID NO: 344953 - RNA, 19 nt, Homo sapiens
  misc_RNA (1)...(19): siRNA sense strand
gcacagcagguacuaaagu

SEQ ID NO: 344954 - RNA, 19 nt, Homo sapiens
  misc_RNA (1)...(19): siRNA sense strand
gaucuagccauuacagaga

SEQ ID NO: 344955 - RNA, 19 nt, Homo sapiens
  misc_RNA (1)...(19): siRNA sense strand
cauaagaaauacgaacuca

SEQ ID NO: 344956 - RNA, 19 nt, Homo sapiens
  misc_RNA (1)...(19): siRNA sense strand
ggaaaucaagcauccuaau

SEQ ID NO: 344957 - RNA, 19 nt, Homo sapiens
  misc_RNA (1)...(19): siRNA sense strand
gugauguggugcagaggua

SEQ ID NO: 344958 - RNA, 19 nt, Homo sapiens
  misc_RNA (1)...(19): siRNA sense strand
ucguugcacuuuaugauuu

SEQ ID NO: 344959 - RNA, 19 nt, Homo sapiens
  misc_RNA (1)...(19): siRNA sense strand
caaagaggcccugcuggaa

SEQ ID NO: 344960 - RNA, 19 nt, Homo sapiens
  misc_RNA (1)...(19): siRNA sense strand
uaaaguggcucugagaaaa

SEQ ID NO: 344961 - RNA, 19 nt, Homo sapiens
  misc_RNA (1)...(19): siRNA sense strand
ggucaaacucuacaucuuc

SEQ ID NO: 344962 - RNA, 19 nt, Homo sapiens
  misc_RNA (1)...(19): siRNA sense strand
ugaagaaacagguggagaa

SEQ ID NO: 344963 - RNA, 19 nt, Homo sapiens
  misc_RNA (1)...(19): siRNA sense strand
cauugugacugaauacaug

SEQ ID NO: 344964 - RNA, 19 nt, Homo sapiens
  misc_RNA (1)...(19): siRNA sense strand
uuccaugacuccagcauuu

SEQ ID NO: 344965 - RNA, 19 nt, Homo sapiens
  misc_RNA (1)...(19): siRNA sense strand
gagagucuugccuacaaua

SEQ ID NO: 344966 - RNA, 19 nt, Homo sapiens
  misc_RNA (1)...(19): siRNA sense strand
acgggaauuugcuggauua

SEQ ID NO: 344967 - RNA, 19 nt, Homo sapiens
  misc_RNA (1)...(19): siRNA sense strand
gagugacccuaaucucuuc

SEQ ID NO: 344968 - RNA, 19 nt, Homo sapiens
  misc_RNA (1)...(19): siRNA sense strand
gcacccaaguguaauaagc

SEQ ID NO: 344969 - RNA, 19 nt, Homo sapiens
  misc_RNA (1)...(19): siRNA sense strand
ugaaagaagcugcaguaau

SEQ ID NO: 344970 - RNA, 19 nt, Homo sapiens
  misc_RNA (1)...(19): siRNA sense strand
ggacagcaccagagagucu

SEQ ID NO: 344971 - RNA, 19 nt, Homo sapiens
  misc_RNA (1)...(19): siRNA sense strand
gagaacaaggagaacauug

SEQ ID NO: 344972 - RNA, 19 nt, Homo sapiens
  misc_RNA (1)...(19): siRNA sense strand
gaagagccaacugcccuaa

SEQ ID NO: 344973 - RNA, 19 nt, Homo sapiens
  misc_RNA (1)...(19): siRNA sense strand
ggaagaugccaaagagaca

SEQ ID NO: 344974 - RNA, 19 nt, Homo sapiens
  misc_RNA (1)...(19): siRNA sense strand
guacgagggacguguguau

SEQ ID NO: 344975 - RNA, 19 nt, Homo sapiens
  misc_RNA (1)...(19): siRNA sense strand
cuaaaguggcucugagaaa

SEQ ID NO: 344976 - RNA, 19 nt, Homo sapiens
  misc_RNA (1)...(19): siRNA sense strand
cagcagcuccuuccgagaa

SEQ ID NO: 344977 - RNA, 19 nt, Homo sapiens
  misc_RNA (1)...(19): siRNA sense strand
gcacugccucgaaagcaaa

SEQ ID NO: 344978 - RNA, 19 nt, Homo sapiens
  misc_RNA (1)...(19): siRNA sense strand
aaaaggauaucgaauggaa

SEQ ID NO: 344979 - RNA, 19 nt, Homo sapiens
  misc_RNA (1)...(19): siRNA sense strand
agaauuucauccauagaga

SEQ ID NO: 344980 - RNA, 19 nt, Homo sapiens
  misc_RNA (1)...(19): siRNA sense strand
gaagaggugacugcaguug

SEQ ID NO: 344981 - RNA, 19 nt, Homo sapiens
  misc_RNA (1)...(19): siRNA sense strand
ccugaaagaagcugcagua

SEQ ID NO: 344982 - RNA, 19 nt, Homo sapiens
  misc_RNA (1)...(19): siRNA sense strand
ugugggaaauugcuaccua

SEQ ID NO: 344983 - RNA, 19 nt, Homo sapiens
  misc_RNA (1)...(19): siRNA sense strand
ugacugaauacaugccaua

SEQ ID NO: 344984 - RNA, 19 nt, Homo sapiens
  misc_RNA (1)...(19): siRNA sense strand
ccgagaggcugugagcaaa

SEQ ID NO: 344985 - RNA, 19 nt, Homo sapiens
  misc_RNA (1)...(19): siRNA sense strand
caaagugccaguccuuauc

SEQ ID NO: 344986 - RNA, 19 nt, Homo sapiens
  misc_RNA (1)...(19): siRNA sense strand
uccgagaaauggagaauca

SEQ ID NO: 344987 - RNA, 19 nt, Homo sapiens
  misc_RNA (1)...(19): siRNA sense strand
ggagaacaaggagaacauu

SEQ ID NO: 344988 - RNA, 19 nt, Homo sapiens
  misc_RNA (1)...(19): siRNA sense strand
ucucuucguugcacuuuau

SEQ ID NO: 344989 - RNA, 19 nt, Homo sapiens
  misc_RNA (1)...(19): siRNA sense strand
ccuaaucugguacaacuuu

SEQ ID NO: 344990 - RNA, 19 nt, Homo sapiens
  misc_RNA (1)...(19): siRNA sense strand
aagaggcccugcuggaaug

SEQ ID NO: 344991 - RNA, 19 nt, Homo sapiens
  misc_RNA (1)...(19): siRNA sense strand
caucacaggcuucuuuaca

SEQ ID NO: 344992 - RNA, 19 nt, Homo sapiens
  misc_RNA (1)...(19): siRNA sense strand
gaaagcaaagagacaaguc

SEQ ID NO: 344993 - RNA, 19 nt, Homo sapiens
  misc_RNA (1)...(19): siRNA sense strand
gaagaauuucauccauaga

SEQ ID NO: 344994 - RNA, 19 nt, Homo sapiens
  misc_RNA (1)...(19): siRNA sense strand
uggauuaccuccgagaaug

SEQ ID NO: 344995 - RNA, 19 nt, Homo sapiens
  misc_RNA (1)...(19): siRNA sense strand
agaacaaggagaacauuga

SEQ ID NO: 344996 - RNA, 19 nt, Homo sapiens
  misc_RNA (1)...(19): siRNA sense strand
ccacaaagugccaguccuu

SEQ ID NO: 344997 - RNA, 19 nt, Homo sapiens
  misc_RNA (1)...(19): siRNA sense strand
caggauaggauggcaauga

SEQ ID NO: 344998 - RNA, 19 nt, Homo sapiens
  misc_RNA (1)...(19): siRNA sense strand
ccaagaauaugcccuuuca

SEQ ID NO: 344999 - RNA, 19 nt, Homo sapiens
  misc_RNA (1)...(19): siRNA sense strand
gugcaaguguggagagaua

SEQ ID NO: 345000 - RNA, 19 nt, Homo sapiens
  misc_RNA (1)...(19): siRNA sense strand
ccaauccucuuacaccuuu

SEQ ID NO: 345001 - RNA, 19 nt, Homo sapiens
  misc_RNA (1)...(19): siRNA sense strand
gaaggaggaaucagacauu

SEQ ID NO: 345002 - RNA, 19 nt, Homo sapiens
  misc_RNA (1)...(19): siRNA sense strand
ucucagugcugccagauaa

SEQ ID NO: 345003 - RNA, 19 nt, Homo sapiens
  misc_RNA (1)...(19): siRNA sense strand
gaauaugcccuuucaggau

SEQ ID NO: 345004 - RNA, 19 nt, Homo sapiens
  misc_RNA (1)...(19): siRNA sense strand
ggaagcagcagguggaauc

SEQ ID NO: 345005 - RNA, 19 nt, Homo sapiens
  misc_RNA (1)...(19): siRNA sense strand
ucaauggccaauccucuua

SEQ ID NO: 345006 - RNA, 19 nt, Homo sapiens
  misc_RNA (1)...(19): siRNA sense strand
ugucagcuauuuaaagaga

SEQ ID NO: 345007 - RNA, 19 nt, Homo sapiens
  misc_RNA (1)...(19): siRNA sense strand
ggccaagaauuugaacuga

SEQ ID NO: 345008 - RNA, 19 nt, Homo sapiens
  misc_RNA (1)...(19): siRNA sense strand
guucuacugugacaaucaa

SEQ ID NO: 345009 - RNA, 19 nt, Homo sapiens
  misc_RNA (1)...(19): siRNA sense strand
ucaggauggccaagaauuu

SEQ ID NO: 345010 - RNA, 19 nt, Homo sapiens
  misc_RNA (1)...(19): siRNA sense strand
ccaaauuuaaugucagcua

SEQ ID NO: 345011 - RNA, 19 nt, Homo sapiens
  misc_RNA (1)...(19): siRNA sense strand
gaauuugaacugagcaucu

SEQ ID NO: 345012 - RNA, 19 nt, Homo sapiens
  misc_RNA (1)...(19): siRNA sense strand
ucuuacaccuuugaccaua

SEQ ID NO: 345013 - RNA, 19 nt, Homo sapiens
  misc_RNA (1)...(19): siRNA sense strand
ugucuuccauuuccaagug

SEQ ID NO: 345014 - RNA, 19 nt, Homo sapiens
  misc_RNA (1)...(19): siRNA sense strand
uuacaccuuugaccauaga

SEQ ID NO: 345015 - RNA, 19 nt, Homo sapiens
  misc_RNA (1)...(19): siRNA sense strand
auaucucccugaccaaauu

SEQ ID NO: 345016 - RNA, 19 nt, Homo sapiens
  misc_RNA (1)...(19): siRNA sense strand
cauaucugcagguggauuu

SEQ ID NO: 345017 - RNA, 19 nt, Homo sapiens
  misc_RNA (1)...(19): siRNA sense strand
ucuacugguucuacuguga

SEQ ID NO: 345018 - RNA, 19 nt, Homo sapiens
  misc_RNA (1)...(19): siRNA sense strand
caugaacagccgugaguau

SEQ ID NO: 345019 - RNA, 19 nt, Homo sapiens
  misc_RNA (1)...(19): siRNA sense strand
gauaucucccugaccaaau

SEQ ID NO: 345020 - RNA, 19 nt, Homo sapiens
  misc_RNA (1)...(19): siRNA sense strand
gugaagauggugcaagugu

SEQ ID NO: 345021 - RNA, 19 nt, Homo sapiens
  misc_RNA (1)...(19): siRNA sense strand
aaggaggaaucagacauug

SEQ ID NO: 345022 - RNA, 19 nt, Homo sapiens
  misc_RNA (1)...(19): siRNA sense strand
caggauggccaagaauuug

SEQ ID NO: 345023 - RNA, 19 nt, Homo sapiens
  misc_RNA (1)...(19): siRNA sense strand
ggauggccaagaauuugaa

SEQ ID NO: 345024 - RNA, 19 nt, Homo sapiens
  misc_RNA (1)...(19): siRNA sense strand
aaucaaagggcgaccacuu

SEQ ID NO: 345025 - RNA, 19 nt, Homo sapiens
  misc_RNA (1)...(19): siRNA sense strand
gcaaguguggagagauauc

SEQ ID NO: 345026 - RNA, 19 nt, Homo sapiens
  misc_RNA (1)...(19): siRNA sense strand
ggauuuccacacugagaug

SEQ ID NO: 345027 - RNA, 19 nt, Homo sapiens
  misc_RNA (1)...(19): siRNA sense strand
agaugaaggaggaaucaga

SEQ ID NO: 345028 - RNA, 19 nt, Homo sapiens
  misc_RNA (1)...(19): siRNA sense strand
aagaagagcugaucaaguu

SEQ ID NO: 345029 - RNA, 19 nt, Homo sapiens
  misc_RNA (1)...(19): siRNA sense strand
gggaugugcugcagaauga

SEQ ID NO: 345030 - RNA, 19 nt, Homo sapiens
  misc_RNA (1)...(19): siRNA sense strand
ucacuaagcagcacaauga

SEQ ID NO: 345031 - RNA, 19 nt, Homo sapiens
  misc_RNA (1)...(19): siRNA sense strand
agaaugacaucaagagcua

SEQ ID NO: 345032 - RNA, 19 nt, Homo sapiens
  misc_RNA (1)...(19): siRNA sense strand
gggcaucccuuaucuugau

SEQ ID NO: 345033 - RNA, 19 nt, Homo sapiens
  misc_RNA (1)...(19): siRNA sense strand
ggugaaggcuggcaaaguc

SEQ ID NO: 345034 - RNA, 19 nt, Homo sapiens
  misc_RNA (1)...(19): siRNA sense strand
gccguaagguggccauuga

SEQ ID NO: 345035 - RNA, 19 nt, Homo sapiens
  misc_RNA (1)...(19): siRNA sense strand
gcaucaagcccguguaugu

SEQ ID NO: 345036 - RNA, 19 nt, Homo sapiens
  misc_RNA (1)...(19): siRNA sense strand
caaacuaauugcugaugug

SEQ ID NO: 345037 - RNA, 19 nt, Homo sapiens
  misc_RNA (1)...(19): siRNA sense strand
gaagaagagcugaucaagu

SEQ ID NO: 345038 - RNA, 19 nt, Homo sapiens
  misc_RNA (1)...(19): siRNA sense strand
ggagcgagccaaaugaaga

SEQ ID NO: 345039 - RNA, 19 nt, Homo sapiens
  misc_RNA (1)...(19): siRNA sense strand
caaguacccugugccagaa

SEQ ID NO: 345040 - RNA, 19 nt, Homo sapiens
  misc_RNA (1)...(19): siRNA sense strand
ccacuaagaagaaggcaaa

SEQ ID NO: 345041 - RNA, 19 nt, Homo sapiens
  misc_RNA (1)...(19): siRNA sense strand
cccaagggauccacuaaga

SEQ ID NO: 345042 - RNA, 19 nt, Homo sapiens
  misc_RNA (1)...(19): siRNA sense strand
cuaagcagcacaaugauga

SEQ ID NO: 345043 - RNA, 19 nt, Homo sapiens
  misc_RNA (1)...(19): siRNA sense strand
gucaagaggcugaguaaga

SEQ ID NO: 345044 - RNA, 19 nt, Homo sapiens
  misc_RNA (1)...(19): siRNA sense strand
gaagagcugaucaaguuca

SEQ ID NO: 345045 - RNA, 19 nt, Homo sapiens
  misc_RNA (1)...(19): siRNA sense strand
ccaaacuaauugcugaugu

SEQ ID NO: 345046 - RNA, 19 nt, Homo sapiens
  misc_RNA (1)...(19): siRNA sense strand
ucaagaggcugaguaagag

SEQ ID NO: 345047 - RNA, 19 nt, Homo sapiens
  misc_RNA (1)...(19): siRNA sense strand
aaaauuggcuccacaagga

SEQ ID NO: 345048 - RNA, 19 nt, Homo sapiens
  misc_RNA (1)...(19): siRNA sense strand
gagcugaucaaguucaugu

SEQ ID NO: 345049 - RNA, 19 nt, Homo sapiens
  misc_RNA (1)...(19): siRNA sense strand
gaacccaagggauccacua

SEQ ID NO: 345050 - RNA, 19 nt, Homo sapiens
  misc_RNA (1)...(19): siRNA sense strand
gagcgagccaaaugaagaa

SEQ ID NO: 345051 - RNA, 19 nt, Homo sapiens
  misc_RNA (1)...(19): siRNA sense strand
cggcagcccugugcuaaug

SEQ ID NO: 345052 - RNA, 19 nt, Homo sapiens
  misc_RNA (1)...(19): siRNA sense strand
uaugagcauuuaucaguuc

SEQ ID NO: 345053 - RNA, 19 nt, Homo sapiens
  misc_RNA (1)...(19): siRNA sense strand
ugacaucaagagcuacuuu

SEQ ID NO: 345054 - RNA, 19 nt, Homo sapiens
  misc_RNA (1)...(19): siRNA sense strand
cuaagcggcuggugaaggu

SEQ ID NO: 345055 - RNA, 19 nt, Homo sapiens
  misc_RNA (1)...(19): siRNA sense strand
ggccauugaugccucuaug

SEQ ID NO: 345056 - RNA, 19 nt, Homo sapiens
  misc_RNA (1)...(19): siRNA sense strand
caagggauccacuaagaag

SEQ ID NO: 345057 - RNA, 19 nt, Homo sapiens
  misc_RNA (1)...(19): siRNA sense strand
cuaugagcauuuaucaguu

SEQ ID NO: 345058 - RNA, 19 nt, Homo sapiens
  misc_RNA (1)...(19): siRNA sense strand
ccaagggauccacuaagaa

SEQ ID NO: 345059 - RNA, 19 nt, Homo sapiens
  misc_RNA (1)...(19): siRNA sense strand
ccgccuggaugauuucuuc

SEQ ID NO: 345060 - RNA, 19 nt, Homo sapiens
  misc_RNA (1)...(19): siRNA sense strand
acaagagcaucgaggagau

SEQ ID NO: 345061 - RNA, 19 nt, Homo sapiens
  misc_RNA (1)...(19): siRNA sense strand
gugaaaagcaguucucuga

SEQ ID NO: 345062 - RNA, 19 nt, Homo sapiens
  misc_RNA (1)...(19): siRNA sense strand
ucuaugagcauuuaucagu

SEQ ID NO: 345063 - RNA, 19 nt, Homo sapiens
  misc_RNA (1)...(19): siRNA sense strand
gaaggcuggcaaagucuau

SEQ ID NO: 345064 - RNA, 19 nt, Homo sapiens
  misc_RNA (1)...(19): siRNA sense strand
gcccguguaugucuuugau

SEQ ID NO: 345065 - RNA, 19 nt, Homo sapiens
  misc_RNA (1)...(19): siRNA sense strand
gagcuacuuuggccguaag

SEQ ID NO: 345066 - RNA, 19 nt, Homo sapiens
  misc_RNA (1)...(19): siRNA sense strand
gaaguggagcgagccaaau

SEQ ID NO: 345067 - RNA, 19 nt, Homo sapiens
  misc_RNA (1)...(19): siRNA sense strand
gcaagccgccacagcucaa

SEQ ID NO: 345068 - RNA, 19 nt, Homo sapiens
  misc_RNA (1)...(19): siRNA sense strand
gagaucgugcggcgacuug

SEQ ID NO: 345069 - RNA, 19 nt, Homo sapiens
  misc_RNA (1)...(19): siRNA sense strand
gaaccaggaacaguuugug

SEQ ID NO: 345070 - RNA, 19 nt, Homo sapiens
  misc_RNA (1)...(19): siRNA sense strand
ugaaguggagcgagccaaa

SEQ ID NO: 345071 - RNA, 19 nt, Homo sapiens
  misc_RNA (1)...(19): siRNA sense strand
gagaguauccgggguauug

SEQ ID NO: 345072 - RNA, 19 nt, Homo sapiens
  misc_RNA (1)...(19): siRNA sense strand
cgagccaaaugaagaagag

SEQ ID NO: 345073 - RNA, 19 nt, Homo sapiens
  misc_RNA (1)...(19): siRNA sense strand
uggaugauuucuucaaggu

SEQ ID NO: 345074 - RNA, 19 nt, Homo sapiens
  misc_RNA (1)...(19): siRNA sense strand
gggucaagaggcugaguaa

SEQ ID NO: 345075 - RNA, 19 nt, Homo sapiens
  misc_RNA (1)...(19): siRNA sense strand
ggcucacucucuucagcua

SEQ ID NO: 345076 - RNA, 19 nt, Homo sapiens
  misc_RNA (1)...(19): siRNA sense strand
gggcugaggcagagaagca

SEQ ID NO: 345077 - RNA, 19 nt, Homo sapiens
  misc_RNA (1)...(19): siRNA sense strand
gcugaucaaguucaugugu

SEQ ID NO: 345078 - RNA, 19 nt, Homo sapiens
  misc_RNA (1)...(19): siRNA sense strand
ccagugccauccgggagaa

SEQ ID NO: 345079 - RNA, 19 nt, Homo sapiens
  misc_RNA (1)...(19): siRNA sense strand
gacaucaagagcuacuuug

SEQ ID NO: 345080 - RNA, 19 nt, Homo sapiens
  misc_RNA (1)...(19): siRNA sense strand
ucaagcccguguaugucuu

SEQ ID NO: 345081 - RNA, 19 nt, Homo sapiens
  misc_RNA (1)...(19): siRNA sense strand
caaaugaagaagagcugau

SEQ ID NO: 345082 - RNA, 19 nt, Homo sapiens
  misc_RNA (1)...(19): siRNA sense strand
gggagaaugacaucaagag

SEQ ID NO: 345083 - RNA, 19 nt, Homo sapiens
  misc_RNA (1)...(19): siRNA sense strand
ucaugggcaucccuuaucu

SEQ ID NO: 345084 - RNA, 19 nt, Homo sapiens
  misc_RNA (1)...(19): siRNA sense strand
aggaacaguuuguggaucu

SEQ ID NO: 345085 - RNA, 19 nt, Homo sapiens
  misc_RNA (1)...(19): siRNA sense strand
ggaacaguuuguggaucug

SEQ ID NO: 345086 - RNA, 19 nt, Homo sapiens
  misc_RNA (1)...(19): siRNA sense strand
caagcccguguaugucuuu

SEQ ID NO: 345087 - RNA, 19 nt, Homo sapiens
  misc_RNA (1)...(19): siRNA sense strand
cuaagaagaaggcaaagac

SEQ ID NO: 345088 - RNA, 19 nt, Homo sapiens
  misc_RNA (1)...(19): siRNA sense strand
ccgcaccauucgcaugaug

SEQ ID NO: 345089 - RNA, 19 nt, Homo sapiens
  misc_RNA (1)...(19): siRNA sense strand
guggagcgagccaaaugaa

SEQ ID NO: 345090 - RNA, 19 nt, Homo sapiens
  misc_RNA (1)...(19): siRNA sense strand
ccaggaacaguuuguggau

SEQ ID NO: 345091 - RNA, 19 nt, Homo sapiens
  misc_RNA (1)...(19): siRNA sense strand
gaccaccagccaccugaug

SEQ ID NO: 345092 - RNA, 19 nt, Homo sapiens
  misc_RNA (1)...(19): siRNA sense strand
gccauugaugccucuauga

SEQ ID NO: 345093 - RNA, 19 nt, Homo sapiens
  misc_RNA (1)...(19): siRNA sense strand
agagcuacuuuggccguaa

SEQ ID NO: 345094 - RNA, 19 nt, Homo sapiens
  misc_RNA (1)...(19): siRNA sense strand
gggauccacuaagaagaag

SEQ ID NO: 345095 - RNA, 19 nt, Homo sapiens
  misc_RNA (1)...(19): siRNA sense strand
gaccggcucacucucuuca

SEQ ID NO: 345096 - RNA, 19 nt, Homo sapiens
  misc_RNA (1)...(19): siRNA sense strand
ccuggaugauuucuucaag

SEQ ID NO: 345097 - RNA, 19 nt, Homo sapiens
  misc_RNA (1)...(19): siRNA sense strand
ugaagaagagcugaucaag

SEQ ID NO: 345098 - RNA, 19 nt, Homo sapiens
  misc_RNA (1)...(19): siRNA sense strand
gagcaaagauuccagcaua

SEQ ID NO: 345099 - RNA, 19 nt, Homo sapiens
  misc_RNA (1)...(19): siRNA sense strand
ccacgugucugcccaauua

SEQ ID NO: 345100 - RNA, 19 nt, Homo sapiens
  misc_RNA (1)...(19): siRNA sense strand
gcacugggcuggagagaaa

SEQ ID NO: 345101 - RNA, 19 nt, Homo sapiens
  misc_RNA (1)...(19): siRNA sense strand
gacaggagcuacaaaguaa

SEQ ID NO: 345102 - RNA, 19 nt, Homo sapiens
  misc_RNA (1)...(19): siRNA sense strand
gaagaacacuggaagcaau

SEQ ID NO: 345103 - RNA, 19 nt, Homo sapiens
  misc_RNA (1)...(19): siRNA sense strand
gaagaugggucauaauuac

SEQ ID NO: 345104 - RNA, 19 nt, Homo sapiens
  misc_RNA (1)...(19): siRNA sense strand
gagugaagauuugucauua

SEQ ID NO: 345105 - RNA, 19 nt, Homo sapiens
  misc_RNA (1)...(19): siRNA sense strand
caaauaccaucuacauuga

SEQ ID NO: 345106 - RNA, 19 nt, Homo sapiens
  misc_RNA (1)...(19): siRNA sense strand
ggaauacuacugacaauuu

SEQ ID NO: 345107 - RNA, 19 nt, Homo sapiens
  misc_RNA (1)...(19): siRNA sense strand
gaacaauaccugugucaaa

SEQ ID NO: 345108 - RNA, 19 nt, Homo sapiens
  misc_RNA (1)...(19): siRNA sense strand
caagacauccuauuaauga

SEQ ID NO: 345109 - RNA, 19 nt, Homo sapiens
  misc_RNA (1)...(19): siRNA sense strand
ggaaagaacuuggcuagca

SEQ ID NO: 345110 - RNA, 19 nt, Homo sapiens
  misc_RNA (1)...(19): siRNA sense strand
guacgugucuuacgacuau

SEQ ID NO: 345111 - RNA, 19 nt, Homo sapiens
  misc_RNA (1)...(19): siRNA sense strand
gaaagaacuuggcuagcaa

SEQ ID NO: 345112 - RNA, 19 nt, Homo sapiens
  misc_RNA (1)...(19): siRNA sense strand
caagaugagugaagauuug

SEQ ID NO: 345113 - RNA, 19 nt, Homo sapiens
  misc_RNA (1)...(19): siRNA sense strand
gcuaucagcucaagaacaa

SEQ ID NO: 345114 - RNA, 19 nt, Homo sapiens
  misc_RNA (1)...(19): siRNA sense strand
ccgaagagcuugacuacuu

SEQ ID NO: 345115 - RNA, 19 nt, Homo sapiens
  misc_RNA (1)...(19): siRNA sense strand
uggagaacgugcucuauua

SEQ ID NO: 345116 - RNA, 19 nt, Homo sapiens
  misc_RNA (1)...(19): siRNA sense strand
ggagagagcauauggaaga

SEQ ID NO: 345117 - RNA, 19 nt, Homo sapiens
  misc_RNA (1)...(19): siRNA sense strand
gcacagagaaugacuacaa

SEQ ID NO: 345118 - RNA, 19 nt, Homo sapiens
  misc_RNA (1)...(19): siRNA sense strand
ggucacagcucagcauauu

SEQ ID NO: 345119 - RNA, 19 nt, Homo sapiens
  misc_RNA (1)...(19): siRNA sense strand
ccaugaauaucacagcuua

SEQ ID NO: 345120 - RNA, 19 nt, Homo sapiens
  misc_RNA (1)...(19): siRNA sense strand
gagaagaagugcaauggau

SEQ ID NO: 345121 - RNA, 19 nt, Homo sapiens
  misc_RNA (1)...(19): siRNA sense strand
gaggagaacuuugaacuuc

SEQ ID NO: 345122 - RNA, 19 nt, Homo sapiens
  misc_RNA (1)...(19): siRNA sense strand
ggaaugugguuuaugguau

SEQ ID NO: 345123 - RNA, 19 nt, Homo sapiens
  misc_RNA (1)...(19): siRNA sense strand
ccaaauaccaucuacauug

SEQ ID NO: 345124 - RNA, 19 nt, Homo sapiens
  misc_RNA (1)...(19): siRNA sense strand
gagauacacauguuugaua

SEQ ID NO: 345125 - RNA, 19 nt, Homo sapiens
  misc_RNA (1)...(19): siRNA sense strand
ggaguucccugcacagaga

SEQ ID NO: 345126 - RNA, 19 nt, Homo sapiens
  misc_RNA (1)...(19): siRNA sense strand
gaaugugguuuaugguauu

SEQ ID NO: 345127 - RNA, 19 nt, Homo sapiens
  misc_RNA (1)...(19): siRNA sense strand
ggacuggucugaugagaag

SEQ ID NO: 345128 - RNA, 19 nt, Homo sapiens
  misc_RNA (1)...(19): siRNA sense strand
caagguaugugaugaguuc

SEQ ID NO: 345129 - RNA, 19 nt, Homo sapiens
  misc_RNA (1)...(19): siRNA sense strand
gaaacuggagcgauucuaa

SEQ ID NO: 345130 - RNA, 19 nt, Homo sapiens
  misc_RNA (1)...(19): siRNA sense strand
agucaaagaucucauaaga

SEQ ID NO: 345131 - RNA, 19 nt, Homo sapiens
  misc_RNA (1)...(19): siRNA sense strand
ggauagcccucuggcauuu

SEQ ID NO: 345132 - RNA, 19 nt, Homo sapiens
  misc_RNA (1)...(19): siRNA sense strand
guaaggaugagcaguauuu

SEQ ID NO: 345133 - RNA, 19 nt, Homo sapiens
  misc_RNA (1)...(19): siRNA sense strand
gcuaugagauacacauguu

SEQ ID NO: 345134 - RNA, 19 nt, Homo sapiens
  misc_RNA (1)...(19): siRNA sense strand
guaacaaccgcaccaauuu

SEQ ID NO: 345135 - RNA, 19 nt, Homo sapiens
  misc_RNA (1)...(19): siRNA sense strand
gaauacuacugacaauuuc

SEQ ID NO: 345136 - RNA, 19 nt, Homo sapiens
  misc_RNA (1)...(19): siRNA sense strand
ggaagcauauugucacaca

SEQ ID NO: 345137 - RNA, 19 nt, Homo sapiens
  misc_RNA (1)...(19): siRNA sense strand
uaacaaccgcaccaauuua

SEQ ID NO: 345138 - RNA, 19 nt, Homo sapiens
  misc_RNA (1)...(19): siRNA sense strand
caagagaggagaacuuuga

SEQ ID NO: 345139 - RNA, 19 nt, Homo sapiens
  misc_RNA (1)...(19): siRNA sense strand
gaaaaggccugcagugaug

SEQ ID NO: 345140 - RNA, 19 nt, Homo sapiens
  misc_RNA (1)...(19): siRNA sense strand
caaggagucuacauugcua

SEQ ID NO: 345141 - RNA, 19 nt, Homo sapiens
  misc_RNA (1)...(19): siRNA sense strand
caccagauauccacauuga

SEQ ID NO: 345142 - RNA, 19 nt, Homo sapiens
  misc_RNA (1)...(19): siRNA sense strand
gcaauaagacaaacacugu

SEQ ID NO: 345143 - RNA, 19 nt, Homo sapiens
  misc_RNA (1)...(19): siRNA sense strand
gagagaaacugcccuacca

SEQ ID NO: 345144 - RNA, 19 nt, Homo sapiens
  misc_RNA (1)...(19): siRNA sense strand
aaacauucaucuucucuga

SEQ ID NO: 345145 - RNA, 19 nt, Homo sapiens
  misc_RNA (1)...(19): siRNA sense strand
gaauugaucccuaugacaa

SEQ ID NO: 345146 - RNA, 19 nt, Homo sapiens
  misc_RNA (1)...(19): siRNA sense strand
gaccaggacuuguuguaug

SEQ ID NO: 345147 - RNA, 19 nt, Homo sapiens
  misc_RNA (1)...(19): siRNA sense strand
caaccagacugcaguggaa

SEQ ID NO: 345148 - RNA, 19 nt, Homo sapiens
  misc_RNA (1)...(19): siRNA sense strand
cuacauugcuacucugauu

SEQ ID NO: 345149 - RNA, 19 nt, Homo sapiens
  misc_RNA (1)...(19): siRNA sense strand
ucacaagacauccuauuaa

SEQ ID NO: 345150 - RNA, 19 nt, Homo sapiens
  misc_RNA (1)...(19): siRNA sense strand
caacaagcgguacaucuuu

SEQ ID NO: 345151 - RNA, 19 nt, Homo sapiens
  misc_RNA (1)...(19): siRNA sense strand
gaauacagcaggagugguu

SEQ ID NO: 345152 - RNA, 19 nt, Homo sapiens
  misc_RNA (1)...(19): siRNA sense strand
caacgacuguggagacaug

SEQ ID NO: 345153 - RNA, 19 nt, Homo sapiens
  misc_RNA (1)...(19): siRNA sense strand
gcauagagcggaucacguu

SEQ ID NO: 345154 - RNA, 19 nt, Homo sapiens
  misc_RNA (1)...(19): siRNA sense strand
ugacuucgguuucaagaug

SEQ ID NO: 345155 - RNA, 19 nt, Homo sapiens
  misc_RNA (1)...(19): siRNA sense strand
cuacaaagguggugcaucu

SEQ ID NO: 345156 - RNA, 19 nt, Homo sapiens
  misc_RNA (1)...(19): siRNA sense strand
gaaggauuguggagauuca

SEQ ID NO: 345157 - RNA, 19 nt, Homo sapiens
  misc_RNA (1)...(19): siRNA sense strand
gaugugaaguggcccaaug

SEQ ID NO: 345158 - RNA, 19 nt, Homo sapiens
  misc_RNA (1)...(19): siRNA sense strand
gugaagauuugucauuaga

SEQ ID NO: 345159 - RNA, 19 nt, Homo sapiens
  misc_RNA (1)...(19): siRNA sense strand
gaaaaucaauugugagcuu

SEQ ID NO: 345160 - RNA, 19 nt, Homo sapiens
  misc_RNA (1)...(19): siRNA sense strand
gcaaagauuccagcauaaa

SEQ ID NO: 345161 - RNA, 19 nt, Homo sapiens
  misc_RNA (1)...(19): siRNA sense strand
cuacuucacuccacaacaa

SEQ ID NO: 345162 - RNA, 19 nt, Homo sapiens
  misc_RNA (1)...(19): siRNA sense strand
ccagagggauugccagaug

SEQ ID NO: 345163 - RNA, 19 nt, Homo sapiens
  misc_RNA (1)...(19): siRNA sense strand
gugaugaguugacugugua

SEQ ID NO: 345164 - RNA, 19 nt, Homo sapiens
  misc_RNA (1)...(19): siRNA sense strand
guaccgagauugugcagau

SEQ ID NO: 345165 - RNA, 19 nt, Homo sapiens
  misc_RNA (1)...(19): siRNA sense strand
caugagagcagcccaguuu

SEQ ID NO: 345166 - RNA, 19 nt, Homo sapiens
  misc_RNA (1)...(19): siRNA sense strand
gaagaugccccuaugauaa

SEQ ID NO: 345167 - RNA, 19 nt, Homo sapiens
  misc_RNA (1)...(19): siRNA sense strand
ugaagaugggucauaauua

SEQ ID NO: 345168 - RNA, 19 nt, Homo sapiens
  misc_RNA (1)...(19): siRNA sense strand
ugacaggagcuacaaagua

SEQ ID NO: 345169 - RNA, 19 nt, Homo sapiens
  misc_RNA (1)...(19): siRNA sense strand
ggaagcagaaggugugauu

SEQ ID NO: 345170 - RNA, 19 nt, Homo sapiens
  misc_RNA (1)...(19): siRNA sense strand
caacaccaaugacuuugug

SEQ ID NO: 345171 - RNA, 19 nt, Homo sapiens
  misc_RNA (1)...(19): siRNA sense strand
gcaggaugcucccaagauc

SEQ ID NO: 345172 - RNA, 19 nt, Homo sapiens
  misc_RNA (1)...(19): siRNA sense strand
gagagaaaaucaauuguga

SEQ ID NO: 345173 - RNA, 19 nt, Homo sapiens
  misc_RNA (1)...(19): siRNA sense strand
cacaagacauccuauuaau

SEQ ID NO: 345174 - RNA, 19 nt, Homo sapiens
  misc_RNA (1)...(19): siRNA sense strand
caauaccugugucaaagaa

SEQ ID NO: 345175 - RNA, 19 nt, Homo sapiens
  misc_RNA (1)...(19): siRNA sense strand
gaauacacccuuaacaagu

SEQ ID NO: 345176 - RNA, 19 nt, Homo sapiens
  misc_RNA (1)...(19): siRNA sense strand
aaugugaccuugaggauga

SEQ ID NO: 345177 - RNA, 19 nt, Homo sapiens
  misc_RNA (1)...(19): siRNA sense strand
gaucggucaucaccuuuga

SEQ ID NO: 345178 - RNA, 19 nt, Homo sapiens
  misc_RNA (1)...(19): siRNA sense strand
ggaauacacccuuaacaag

SEQ ID NO: 345179 - RNA, 19 nt, Homo sapiens
  misc_RNA (1)...(19): siRNA sense strand
guaucccacuguccuauaa

SEQ ID NO: 345180 - RNA, 19 nt, Homo sapiens
  misc_RNA (1)...(19): siRNA sense strand
gagaaggauuguggagauu

SEQ ID NO: 345181 - RNA, 19 nt, Homo sapiens
  misc_RNA (1)...(19): siRNA sense strand
gaucuccuccuacacagua

SEQ ID NO: 345182 - RNA, 19 nt, Homo sapiens
  misc_RNA (1)...(19): siRNA sense strand
gagggcugcuaguaacuuu

SEQ ID NO: 345183 - RNA, 19 nt, Homo sapiens
  misc_RNA (1)...(19): siRNA sense strand
caagagcagugauguguac

SEQ ID NO: 345184 - RNA, 19 nt, Homo sapiens
  misc_RNA (1)...(19): siRNA sense strand
cagcagcgcucugucauuc

SEQ ID NO: 345185 - RNA, 19 nt, Homo sapiens
  misc_RNA (1)...(19): siRNA sense strand
ugagguagcuaauccagau

SEQ ID NO: 345186 - RNA, 19 nt, Homo sapiens
  misc_RNA (1)...(19): siRNA sense strand
gcagugaacagcagucuuc

SEQ ID NO: 345187 - RNA, 19 nt, Homo sapiens
  misc_RNA (1)...(19): siRNA sense strand
gcgacgggauggaugauug

SEQ ID NO: 345188 - RNA, 19 nt, Homo sapiens
  misc_RNA (1)...(19): siRNA sense strand
gaagaagugcaauggauuc

SEQ ID NO: 345189 - RNA, 19 nt, Homo sapiens
  misc_RNA (1)...(19): siRNA sense strand
agacaacagugaugaaagu

SEQ ID NO: 345190 - RNA, 19 nt, Homo sapiens
  misc_RNA (1)...(19): siRNA sense strand
ucauggacuuuguguguaa

SEQ ID NO: 345191 - RNA, 19 nt, Homo sapiens
  misc_RNA (1)...(19): siRNA sense strand
acacaacaccaaugacuuu

SEQ ID NO: 345192 - RNA, 19 nt, Homo sapiens
  misc_RNA (1)...(19): siRNA sense strand
ccaccaagauugccaggau

SEQ ID NO: 345193 - RNA, 19 nt, Homo sapiens
  misc_RNA (1)...(19): siRNA sense strand
ugagaucggucaucaccuu

SEQ ID NO: 345194 - RNA, 19 nt, Homo sapiens
  misc_RNA (1)...(19): siRNA sense strand
gaauaucacagcuuaccuu

SEQ ID NO: 345195 - RNA, 19 nt, Homo sapiens
  misc_RNA (1)...(19): siRNA sense strand
uaccacaguuucauuauca

SEQ ID NO: 345196 - RNA, 19 nt, Homo sapiens
  misc_RNA (1)...(19): siRNA sense strand
ugaguugacuguguacaaa

SEQ ID NO: 345197 - RNA, 19 nt, Homo sapiens
  misc_RNA (1)...(19): siRNA sense strand
ugagaaggauuguggagau

SEQ ID NO: 345198 - RNA, 19 nt, Homo sapiens
  misc_RNA (1)...(19): siRNA sense strand
gaagacaacugcagaacag

SEQ ID NO: 345199 - RNA, 19 nt, Homo sapiens
  misc_RNA (1)...(19): siRNA sense strand
gaagaagacaacugcagaa

SEQ ID NO: 345200 - RNA, 19 nt, Homo sapiens
  misc_RNA (1)...(19): siRNA sense strand
gcuggguacugccaugaau

SEQ ID NO: 345201 - RNA, 19 nt, Homo sapiens
  misc_RNA (1)...(19): siRNA sense strand
ggccuuggcagagguacua

SEQ ID NO: 345202 - RNA, 19 nt, Homo sapiens
  misc_RNA (1)...(19): siRNA sense strand
cuacugccgcuucuucaau

SEQ ID NO: 345203 - RNA, 19 nt, Homo sapiens
  misc_RNA (1)...(19): siRNA sense strand
ccacugaagaagacaacug

SEQ ID NO: 345204 - RNA, 19 nt, Homo sapiens
  misc_RNA (1)...(19): siRNA sense strand
uacugccgcuucuucaaug

SEQ ID NO: 345205 - RNA, 19 nt, Homo sapiens
  misc_RNA (1)...(19): siRNA sense strand
gaagacaacugcagaacag

SEQ ID NO: 345206 - RNA, 19 nt, Homo sapiens
  misc_RNA (1)...(19): siRNA sense strand
gaagaagacaacugcagaa

SEQ ID NO: 345207 - RNA, 19 nt, Homo sapiens
  misc_RNA (1)...(19): siRNA sense strand
gcuggguacugccaugaau

SEQ ID NO: 345208 - RNA, 19 nt, Homo sapiens
  misc_RNA (1)...(19): siRNA sense strand
ggccuuggcagagguacua

SEQ ID NO: 345209 - RNA, 19 nt, Homo sapiens
  misc_RNA (1)...(19): siRNA sense strand
cuacugccgcuucuucaau

SEQ ID NO: 345210 - RNA, 19 nt, Homo sapiens
  misc_RNA (1)...(19): siRNA sense strand
ccacugaagaagacaacug

SEQ ID NO: 345211 - RNA, 19 nt, Homo sapiens
  misc_RNA (1)...(19): siRNA sense strand
uacugccgcuucuucaaug

SEQ ID NO: 345212 - RNA, 19 nt, Homo sapiens
  misc_RNA (1)...(19): siRNA sense strand
ggacucaccuugcuuguaa

SEQ ID NO: 345213 - RNA, 19 nt, Homo sapiens
  misc_RNA (1)...(19): siRNA sense strand
ggaaguuucuuguucauuu

SEQ ID NO: 345214 - RNA, 19 nt, Homo sapiens
  misc_RNA (1)...(19): siRNA sense strand
cauuugaucugcugauuua

SEQ ID NO: 345215 - RNA, 19 nt, Homo sapiens
  misc_RNA (1)...(19): siRNA sense strand
gaaagauggcaguuugaua

SEQ ID NO: 345216 - RNA, 19 nt, Homo sapiens
  misc_RNA (1)...(19): siRNA sense strand
uaaauaaugugguggaaca

SEQ ID NO: 345217 - RNA, 19 nt, Homo sapiens
  misc_RNA (1)...(19): siRNA sense strand
gauggcaguuugauauuga

SEQ ID NO: 345218 - RNA, 19 nt, Homo sapiens
  misc_RNA (1)...(19): siRNA sense strand
gaaguuucuuguucauuug

SEQ ID NO: 345219 - RNA, 19 nt, Homo sapiens
  misc_RNA (1)...(19): siRNA sense strand
uggaacaacugaaagauug

SEQ ID NO: 345220 - RNA, 19 nt, Homo sapiens
  misc_RNA (1)...(19): siRNA sense strand
gaccacaguuuauuaccaa

SEQ ID NO: 345221 - RNA, 19 nt, Homo sapiens
  misc_RNA (1)...(19): siRNA sense strand
uuacucgagugcagaaaua

SEQ ID NO: 345222 - RNA, 19 nt, Homo sapiens
  misc_RNA (1)...(19): siRNA sense strand
gaaauccguucagugauca

SEQ ID NO: 345223 - RNA, 19 nt, Homo sapiens
  misc_RNA (1)...(19): siRNA sense strand
aaagauggcaguuugauau

SEQ ID NO: 345224 - RNA, 19 nt, Homo sapiens
  misc_RNA (1)...(19): siRNA sense strand
gauauugagugugacaaga

SEQ ID NO: 345225 - RNA, 19 nt, Homo sapiens
  misc_RNA (1)...(19): siRNA sense strand
gcaguuugauauugagugu

SEQ ID NO: 345226 - RNA, 19 nt, Homo sapiens
  misc_RNA (1)...(19): siRNA sense strand
uggcauauauccaucugaa

SEQ ID NO: 345227 - RNA, 19 nt, Homo sapiens
  misc_RNA (1)...(19): siRNA sense strand
ggaccacaguuuauuacca

SEQ ID NO: 345228 - RNA, 19 nt, Homo sapiens
  misc_RNA (1)...(19): siRNA sense strand
gcugauuuauacagacaaa

SEQ ID NO: 345229 - RNA, 19 nt, Homo sapiens
  misc_RNA (1)...(19): siRNA sense strand
cuacuacaauccacaaagu

SEQ ID NO: 345230 - RNA, 19 nt, Homo sapiens
  misc_RNA (1)...(19): siRNA sense strand
cuggaaagauggcaguuug

SEQ ID NO: 345231 - RNA, 19 nt, Homo sapiens
  misc_RNA (1)...(19): siRNA sense strand
cuacugaucuugagcucau

SEQ ID NO: 345232 - RNA, 19 nt, Homo sapiens
  misc_RNA (1)...(19): siRNA sense strand
gcuuguaacuacugaucuu

SEQ ID NO: 345233 - RNA, 19 nt, Homo sapiens
  misc_RNA (1)...(19): siRNA sense strand
gcauauauccaucugaaac

SEQ ID NO: 345234 - RNA, 19 nt, Homo sapiens
  misc_RNA (1)...(19): siRNA sense strand
guuggaaguuucuuguuca

SEQ ID NO: 345235 - RNA, 19 nt, Homo sapiens
  misc_RNA (1)...(19): siRNA sense strand
cagcuacggugacauuucu

SEQ ID NO: 345236 - RNA, 19 nt, Homo sapiens
  misc_RNA (1)...(19): siRNA sense strand
caacugaaagauugguuau

SEQ ID NO: 345237 - RNA, 19 nt, Homo sapiens
  misc_RNA (1)...(19): siRNA sense strand
cgccuucguucauuuacua

SEQ ID NO: 345238 - RNA, 19 nt, Homo sapiens
  misc_RNA (1)...(19): siRNA sense strand
ucaccuugcuuguaacuac

SEQ ID NO: 345239 - RNA, 19 nt, Homo sapiens
  misc_RNA (1)...(19): siRNA sense strand
ugacaagacugcaaaagau

SEQ ID NO: 345240 - RNA, 19 nt, Homo sapiens
  misc_RNA (1)...(19): siRNA sense strand
ggaaagauggcaguuugau

SEQ ID NO: 345241 - RNA, 19 nt, Homo sapiens
  misc_RNA (1)...(19): siRNA sense strand
gguuguaguuaucucaaau

SEQ ID NO: 345242 - RNA, 19 nt, Homo sapiens
  misc_RNA (1)...(19): siRNA sense strand
caaguguucaguucagaaa

SEQ ID NO: 345243 - RNA, 19 nt, Homo sapiens
  misc_RNA (1)...(19): siRNA sense strand
gaaagauugguuauacaag

SEQ ID NO: 345244 - RNA, 19 nt, Homo sapiens
  misc_RNA (1)...(19): siRNA sense strand
cacaguuuauuaccaauuc

SEQ ID NO: 345245 - RNA, 19 nt, Homo sapiens
  misc_RNA (1)...(19): siRNA sense strand
gugagguccuggaaagaug

SEQ ID NO: 345246 - RNA, 19 nt, Homo sapiens
  misc_RNA (1)...(19): siRNA sense strand
uuauacaaguguucaguuc

SEQ ID NO: 345247 - RNA, 19 nt, Homo sapiens
  misc_RNA (1)...(19): siRNA sense strand
gagucgggaccacaguuua

SEQ ID NO: 345248 - RNA, 19 nt, Homo sapiens
  misc_RNA (1)...(19): siRNA sense strand
uggccgaguucuucucauu

SEQ ID NO: 345249 - RNA, 19 nt, Homo sapiens
  misc_RNA (1)...(19): siRNA sense strand
guggugagguccuggaaag

SEQ ID NO: 345250 - RNA, 19 nt, Homo sapiens
  misc_RNA (1)...(19): siRNA sense strand
gacagugcacccagagaaa

SEQ ID NO: 345251 - RNA, 19 nt, Homo sapiens
  misc_RNA (1)...(19): siRNA sense strand
gugcagaaauacggacuca

SEQ ID NO: 345252 - RNA, 19 nt, Homo sapiens
  misc_RNA (1)...(19): siRNA sense strand
ugacagugcacccagagaa

SEQ ID NO: 345253 - RNA, 19 nt, Homo sapiens
  misc_RNA (1)...(19): siRNA sense strand
acugaaagauugguuauac

SEQ ID NO: 345254 - RNA, 19 nt, Homo sapiens
  misc_RNA (1)...(19): siRNA sense strand
guggaacaacugaaagauu

SEQ ID NO: 345255 - RNA, 19 nt, Homo sapiens
  misc_RNA (1)...(19): siRNA sense strand
aguuugauauugaguguga

SEQ ID NO: 345256 - RNA, 19 nt, Homo sapiens
  misc_RNA (1)...(19): siRNA sense strand
cuucguucauuuacuacua

SEQ ID NO: 345257 - RNA, 19 nt, Homo sapiens
  misc_RNA (1)...(19): siRNA sense strand
cuacaauccacaaaguaaa

SEQ ID NO: 345258 - RNA, 19 nt, Homo sapiens
  misc_RNA (1)...(19): siRNA sense strand
acaacugaaagauugguua

SEQ ID NO: 345259 - RNA, 19 nt, Homo sapiens
  misc_RNA (1)...(19): siRNA sense strand
aagauugguuauacaagug

SEQ ID NO: 345260 - RNA, 19 nt, Homo sapiens
  misc_RNA (1)...(19): siRNA sense strand
auauccaucugaaaccuuu

SEQ ID NO: 345261 - RNA, 19 nt, Homo sapiens
  misc_RNA (1)...(19): siRNA sense strand
cgaaaucguggccgaguuc

SEQ ID NO: 345262 - RNA, 19 nt, Homo sapiens
  misc_RNA (1)...(19): siRNA sense strand
agauggcaguuugauauug

SEQ ID NO: 345263 - RNA, 19 nt, Homo sapiens
  misc_RNA (1)...(19): siRNA sense strand
acuacaauccacaaaguaa

SEQ ID NO: 345264 - RNA, 19 nt, Homo sapiens
  misc_RNA (1)...(19): siRNA sense strand
ccacaguuuauuaccaauu

SEQ ID NO: 345265 - RNA, 19 nt, Homo sapiens
  misc_RNA (1)...(19): siRNA sense strand
uguuggaaguuucuuguuc

SEQ ID NO: 345266 - RNA, 19 nt, Homo sapiens
  misc_RNA (1)...(19): siRNA sense strand
cuacaaaauuccugucaau

SEQ ID NO: 345267 - RNA, 19 nt, Homo sapiens
  misc_RNA (1)...(19): siRNA sense strand
uauuaccaauucugaggaa

SEQ ID NO: 345268 - RNA, 19 nt, Homo sapiens
  misc_RNA (1)...(19): siRNA sense strand
ccgaaaucguggccgaguu

SEQ ID NO: 345269 - RNA, 19 nt, Homo sapiens
  misc_RNA (1)...(19): siRNA sense strand
ccuaaauaaugugguggaa

SEQ ID NO: 345270 - RNA, 19 nt, Homo sapiens
  misc_RNA (1)...(19): siRNA sense strand
uagcaugguggccuacaaa

SEQ ID NO: 345271 - RNA, 19 nt, Homo sapiens
  misc_RNA (1)...(19): siRNA sense strand
ucgggaccacaguuuauua

SEQ ID NO: 345272 - RNA, 19 nt, Homo sapiens
  misc_RNA (1)...(19): siRNA sense strand
guucagaaacugguuguag

SEQ ID NO: 345273 - RNA, 19 nt, Homo sapiens
  misc_RNA (1)...(19): siRNA sense strand
cugaaagauugguuauaca

SEQ ID NO: 345274 - RNA, 19 nt, Homo sapiens
  misc_RNA (1)...(19): siRNA sense strand
guucagugaucagacagau

SEQ ID NO: 345275 - RNA, 19 nt, Homo sapiens
  misc_RNA (1)...(19): siRNA sense strand
ucauuugaucugcugauuu

SEQ ID NO: 345276 - RNA, 19 nt, Homo sapiens
  misc_RNA (1)...(19): siRNA sense strand
gaacaacugaaagauuggu

SEQ ID NO: 345277 - RNA, 19 nt, Homo sapiens
  misc_RNA (1)...(19): siRNA sense strand
acaaaauuccugucaauga

SEQ ID NO: 345278 - RNA, 19 nt, Homo sapiens
  misc_RNA (1)...(19): siRNA sense strand
caugguggccuacaaaauu

SEQ ID NO: 345279 - RNA, 19 nt, Homo sapiens
  misc_RNA (1)...(19): siRNA sense strand
gaagagucgggaccacagu

SEQ ID NO: 345280 - RNA, 19 nt, Homo sapiens
  misc_RNA (1)...(19): siRNA sense strand
ggugagguccuggaaagau

SEQ ID NO: 345281 - RNA, 19 nt, Homo sapiens
  misc_RNA (1)...(19): siRNA sense strand
guuauacaaguguucaguu

SEQ ID NO: 345282 - RNA, 19 nt, Homo sapiens
  misc_RNA (1)...(19): siRNA sense strand
gaucuugagcucauaaaau

SEQ ID NO: 345283 - RNA, 19 nt, Homo sapiens
  misc_RNA (1)...(19): siRNA sense strand
uugaucugcugauuuauac

SEQ ID NO: 345284 - RNA, 19 nt, Homo sapiens
  misc_RNA (1)...(19): siRNA sense strand
gauugguuauacaaguguu

SEQ ID NO: 345285 - RNA, 19 nt, Homo sapiens
  misc_RNA (1)...(19): siRNA sense strand
auacaaguguucaguucag

SEQ ID NO: 345286 - RNA, 19 nt, Homo sapiens
  misc_RNA (1)...(19): siRNA sense strand
gaucugcugauuuauacag

SEQ ID NO: 345287 - RNA, 19 nt, Homo sapiens
  misc_RNA (1)...(19): siRNA sense strand
gcaucaacagcauuuuaua

SEQ ID NO: 345288 - RNA, 19 nt, Homo sapiens
  misc_RNA (1)...(19): siRNA sense strand
cagcguggcauauauccau

SEQ ID NO: 345289 - RNA, 19 nt, Homo sapiens
  misc_RNA (1)...(19): siRNA sense strand
uucagaaacugguuguagu

SEQ ID NO: 345290 - RNA, 19 nt, Homo sapiens
  misc_RNA (1)...(19): siRNA sense strand
agaaauacggacucaccuu

SEQ ID NO: 345291 - RNA, 19 nt, Homo sapiens
  misc_RNA (1)...(19): siRNA sense strand
aagauggcaguuugauauu

SEQ ID NO: 345292 - RNA, 19 nt, Homo sapiens
  misc_RNA (1)...(19): siRNA sense strand
gccgaguucuucucauucg

SEQ ID NO: 345293 - RNA, 19 nt, Homo sapiens
  misc_RNA (1)...(19): siRNA sense strand
ggaagucccucaagcagaa

SEQ ID NO: 345294 - RNA, 19 nt, Homo sapiens
  misc_RNA (1)...(19): siRNA sense strand
ggcaacaucuccucuaaca

SEQ ID NO: 345295 - RNA, 19 nt, Homo sapiens
  misc_RNA (1)...(19): siRNA sense strand
caacaucuccucuaacauc

SEQ ID NO: 345296 - RNA, 19 nt, Homo sapiens
  misc_RNA (1)...(19): siRNA sense strand
agacggagcugcacaaggu

SEQ ID NO: 345297 - RNA, 19 nt, Homo sapiens
  misc_RNA (1)...(19): siRNA sense strand
gacaagcucuaugagauga

SEQ ID NO: 345298 - RNA, 19 nt, Homo sapiens
  misc_RNA (1)...(19): siRNA sense strand
gcacggacggcaucaucua

SEQ ID NO: 345299 - RNA, 19 nt, Homo sapiens
  misc_RNA (1)...(19): siRNA sense strand
ggacaagcucuaugagaug

SEQ ID NO: 345300 - RNA, 19 nt, Homo sapiens
  misc_RNA (1)...(19): siRNA sense strand
uggcagagauugagaagca

SEQ ID NO: 345301 - RNA, 19 nt, Homo sapiens
  misc_RNA (1)...(19): siRNA sense strand
ucuaugagaugauccugaa

SEQ ID NO: 345302 - RNA, 19 nt, Homo sapiens
  misc_RNA (1)...(19): siRNA sense strand
gcauggacaagcucuauga

SEQ ID NO: 345303 - RNA, 19 nt, Homo sapiens
  misc_RNA (1)...(19): siRNA sense strand
ugaccaaguucgccgagaa

SEQ ID NO: 345304 - RNA, 19 nt, Homo sapiens
  misc_RNA (1)...(19): siRNA sense strand
uggacaagcucuaugagau

SEQ ID NO: 345305 - RNA, 19 nt, Homo sapiens
  misc_RNA (1)...(19): siRNA sense strand
gcaagaccacggugcucua

SEQ ID NO: 345306 - RNA, 19 nt, Homo sapiens
  misc_RNA (1)...(19): siRNA sense strand
gcaggaagucccucaagca

SEQ ID NO: 345307 - RNA, 19 nt, Homo sapiens
  misc_RNA (1)...(19): siRNA sense strand
gcacaaggugaccaaguuc

SEQ ID NO: 345308 - RNA, 19 nt, Homo sapiens
  misc_RNA (1)...(19): siRNA sense strand
ugcacaaggugaccaaguu

SEQ ID NO: 345309 - RNA, 19 nt, Homo sapiens
  misc_RNA (1)...(19): siRNA sense strand
caagcucuaugagaugauc

SEQ ID NO: 345310 - RNA, 19 nt, Homo sapiens
  misc_RNA (1)...(19): siRNA sense strand
gcagaagaagaagcgguaa

SEQ ID NO: 345311 - RNA, 19 nt, Homo sapiens
  misc_RNA (1)...(19): siRNA sense strand
gggcauggacaagcucuau

SEQ ID NO: 345312 - RNA, 19 nt, Homo sapiens
  misc_RNA (1)...(19): siRNA sense strand
ggcucaaguucaacgaguu

SEQ ID NO: 345313 - RNA, 19 nt, Homo sapiens
  misc_RNA (1)...(19): siRNA sense strand
ccaagacggagcugcacaa

SEQ ID NO: 345314 - RNA, 19 nt, Homo sapiens
  misc_RNA (1)...(19): siRNA sense strand
ucuaccggcucaaguucaa

SEQ ID NO: 345315 - RNA, 19 nt, Homo sapiens
  misc_RNA (1)...(19): siRNA sense strand
gcucaaguucaacgaguuc

SEQ ID NO: 345316 - RNA, 19 nt, Homo sapiens
  misc_RNA (1)...(19): siRNA sense strand
gcucuaccggcucaaguuc

SEQ ID NO: 345317 - RNA, 19 nt, Homo sapiens
  misc_RNA (1)...(19): siRNA sense strand
gccuuccagucccugcaua

SEQ ID NO: 345318 - RNA, 19 nt, Homo sapiens
  misc_RNA (1)...(19): siRNA sense strand
gagcugacauugaaauaug

SEQ ID NO: 345319 - RNA, 19 nt, Homo sapiens
  misc_RNA (1)...(19): siRNA sense strand
cagcaggcauaucucauua

SEQ ID NO: 345320 - RNA, 19 nt, Homo sapiens
  misc_RNA (1)...(19): siRNA sense strand
gaaagggagucacaagaca

SEQ ID NO: 345321 - RNA, 19 nt, Homo sapiens
  misc_RNA (1)...(19): siRNA sense strand
ucaaguaccucccugaaug

SEQ ID NO: 345322 - RNA, 19 nt, Homo sapiens
  misc_RNA (1)...(19): siRNA sense strand
ggagcaagaugaggaagaa

SEQ ID NO: 345323 - RNA, 19 nt, Homo sapiens
  misc_RNA (1)...(19): siRNA sense strand
uuaauugguuugugccuua

SEQ ID NO: 345324 - RNA, 19 nt, Homo sapiens
  misc_RNA (1)...(19): siRNA sense strand
ugaaacagcucaggagaga

SEQ ID NO: 345325 - RNA, 19 nt, Homo sapiens
  misc_RNA (1)...(19): siRNA sense strand
gcccugcacucaauucuga

SEQ ID NO: 345326 - RNA, 19 nt, Homo sapiens
  misc_RNA (1)...(19): siRNA sense strand
gacaaccaccugagcaaua

SEQ ID NO: 345327 - RNA, 19 nt, Homo sapiens
  misc_RNA (1)...(19): siRNA sense strand
aaacuuggauugggagauu

SEQ ID NO: 345328 - RNA, 19 nt, Homo sapiens
  misc_RNA (1)...(19): siRNA sense strand
ccaauuagcauuccaucaa

SEQ ID NO: 345329 - RNA, 19 nt, Homo sapiens
  misc_RNA (1)...(19): siRNA sense strand
auccaugccuggcuuauua

SEQ ID NO: 345330 - RNA, 19 nt, Homo sapiens
  misc_RNA (1)...(19): siRNA sense strand
aaacagcucaggagagaaa

SEQ ID NO: 345331 - RNA, 19 nt, Homo sapiens
  misc_RNA (1)...(19): siRNA sense strand
gcacagaaagggagucaca

SEQ ID NO: 345332 - RNA, 19 nt, Homo sapiens
  misc_RNA (1)...(19): siRNA sense strand
caauuagcauuccaucaau

SEQ ID NO: 345333 - RNA, 19 nt, Homo sapiens
  misc_RNA (1)...(19): siRNA sense strand
guagccauauuaauugguu

SEQ ID NO: 345334 - RNA, 19 nt, Homo sapiens
  misc_RNA (1)...(19): siRNA sense strand
gaugaggagcugacauuga

SEQ ID NO: 345335 - RNA, 19 nt, Homo sapiens
  misc_RNA (1)...(19): siRNA sense strand
guuugugccuuacauuauu

SEQ ID NO: 345336 - RNA, 19 nt, Homo sapiens
  misc_RNA (1)...(19): siRNA sense strand
ggucguggcuaccauuaag

SEQ ID NO: 345337 - RNA, 19 nt, Homo sapiens
  misc_RNA (1)...(19): siRNA sense strand
augaggagcugacauugaa

SEQ ID NO: 345338 - RNA, 19 nt, Homo sapiens
  misc_RNA (1)...(19): siRNA sense strand
agagagcccugcacucaau

SEQ ID NO: 345339 - RNA, 19 nt, Homo sapiens
  misc_RNA (1)...(19): siRNA sense strand
gaugggcagcuaaucuaua

SEQ ID NO: 345340 - RNA, 19 nt, Homo sapiens
  misc_RNA (1)...(19): siRNA sense strand
aaauacaggugcuauaagg

SEQ ID NO: 345341 - RNA, 19 nt, Homo sapiens
  misc_RNA (1)...(19): siRNA sense strand
ccucaacaauggugugguu

SEQ ID NO: 345342 - RNA, 19 nt, Homo sapiens
  misc_RNA (1)...(19): siRNA sense strand
acaguguucugguugguaa

SEQ ID NO: 345343 - RNA, 19 nt, Homo sapiens
  misc_RNA (1)...(19): siRNA sense strand
uggugguucuguauaaaua

SEQ ID NO: 345344 - RNA, 19 nt, Homo sapiens
  misc_RNA (1)...(19): siRNA sense strand
ggauugggagauuucauuu

SEQ ID NO: 345345 - RNA, 19 nt, Homo sapiens
  misc_RNA (1)...(19): siRNA sense strand
ucauggcccugguguuuau

SEQ ID NO: 345346 - RNA, 19 nt, Homo sapiens
  misc_RNA (1)...(19): siRNA sense strand
ccagagagcccugcacuca

SEQ ID NO: 345347 - RNA, 19 nt, Homo sapiens
  misc_RNA (1)...(19): siRNA sense strand
gcucaggagagaaaugaaa

SEQ ID NO: 345348 - RNA, 19 nt, Homo sapiens
  misc_RNA (1)...(19): siRNA sense strand
gaaagguccacuucguaug

SEQ ID NO: 345349 - RNA, 19 nt, Homo sapiens
  misc_RNA (1)...(19): siRNA sense strand
cagaagauaccgagacugu

SEQ ID NO: 345350 - RNA, 19 nt, Homo sapiens
  misc_RNA (1)...(19): siRNA sense strand
uaacguugcuguggacuac

SEQ ID NO: 345351 - RNA, 19 nt, Homo sapiens
  misc_RNA (1)...(19): siRNA sense strand
gaaaggggaguaaaacuug

SEQ ID NO: 345352 - RNA, 19 nt, Homo sapiens
  misc_RNA (1)...(19): siRNA sense strand
gcaagaugaggaagaagau

SEQ ID NO: 345353 - RNA, 19 nt, Homo sapiens
  misc_RNA (1)...(19): siRNA sense strand
ccucauggcccugguguuu

SEQ ID NO: 345354 - RNA, 19 nt, Homo sapiens
  misc_RNA (1)...(19): siRNA sense strand
ggacuacauuacuguugca

SEQ ID NO: 345355 - RNA, 19 nt, Homo sapiens
  misc_RNA (1)...(19): siRNA sense strand
ggaaggaugggcagcuaau

SEQ ID NO: 345356 - RNA, 19 nt, Homo sapiens
  misc_RNA (1)...(19): siRNA sense strand
gaaauauggcgccaagcau

SEQ ID NO: 345357 - RNA, 19 nt, Homo sapiens
  misc_RNA (1)...(19): siRNA sense strand
ucugaaugcugccaucaug

SEQ ID NO: 345358 - RNA, 19 nt, Homo sapiens
  misc_RNA (1)...(19): siRNA sense strand
caaaggagaguauccaaaa

SEQ ID NO: 345359 - RNA, 19 nt, Homo sapiens
  misc_RNA (1)...(19): siRNA sense strand
gaagcucaaaggagaguau

SEQ ID NO: 345360 - RNA, 19 nt, Homo sapiens
  misc_RNA (1)...(19): siRNA sense strand
gcacuccugaucuggaauu

SEQ ID NO: 345361 - RNA, 19 nt, Homo sapiens
  misc_RNA (1)...(19): siRNA sense strand
gcuguggacuacauuacug

SEQ ID NO: 345362 - RNA, 19 nt, Homo sapiens
  misc_RNA (1)...(19): siRNA sense strand
gagaacggcaggagcacaa

SEQ ID NO: 345363 - RNA, 19 nt, Homo sapiens
  misc_RNA (1)...(19): siRNA sense strand
gagagaaaugaaacgcuuu

SEQ ID NO: 345364 - RNA, 19 nt, Homo sapiens
  misc_RNA (1)...(19): siRNA sense strand
gguaaagccucagcaacag

SEQ ID NO: 345365 - RNA, 19 nt, Homo sapiens
  misc_RNA (1)...(19): siRNA sense strand
ggagcugacauugaaauau

SEQ ID NO: 345366 - RNA, 19 nt, Homo sapiens
  misc_RNA (1)...(19): siRNA sense strand
ccagcaggcauaucucauu

SEQ ID NO: 345367 - RNA, 19 nt, Homo sapiens
  misc_RNA (1)...(19): siRNA sense strand
gagcugcuguccaggaacu

SEQ ID NO: 345368 - RNA, 19 nt, Homo sapiens
  misc_RNA (1)...(19): siRNA sense strand
ccagagggacagucaucua

SEQ ID NO: 345369 - RNA, 19 nt, Homo sapiens
  misc_RNA (1)...(19): siRNA sense strand
cagaaagggagucacaaga

SEQ ID NO: 345370 - RNA, 19 nt, Homo sapiens
  misc_RNA (1)...(19): siRNA sense strand
ucaaaggagaguauccaaa

SEQ ID NO: 345371 - RNA, 19 nt, Homo sapiens
  misc_RNA (1)...(19): siRNA sense strand
acccugagccauuaucuaa

SEQ ID NO: 345372 - RNA, 19 nt, Homo sapiens
  misc_RNA (1)...(19): siRNA sense strand
aagaugaggagcugacauu

SEQ ID NO: 345373 - RNA, 19 nt, Homo sapiens
  misc_RNA (1)...(19): siRNA sense strand
uggcucaucuuggcuguga

SEQ ID NO: 345374 - RNA, 19 nt, Homo sapiens
  misc_RNA (1)...(19): siRNA sense strand
gcccugguguuuaucaagu

SEQ ID NO: 345375 - RNA, 19 nt, Homo sapiens
  misc_RNA (1)...(19): siRNA sense strand
ggacaaccaccugagcaau

SEQ ID NO: 345376 - RNA, 19 nt, Homo sapiens
  misc_RNA (1)...(19): siRNA sense strand
cauuaagucagucagcuuu

SEQ ID NO: 345377 - RNA, 19 nt, Homo sapiens
  misc_RNA (1)...(19): siRNA sense strand
cuacuuugccacagauuau

SEQ ID NO: 345378 - RNA, 19 nt, Homo sapiens
  misc_RNA (1)...(19): siRNA sense strand
ugaaauauggcgccaagca

SEQ ID NO: 345379 - RNA, 19 nt, Homo sapiens
  misc_RNA (1)...(19): siRNA sense strand
gguuugugccuuacauuau

SEQ ID NO: 345380 - RNA, 19 nt, Homo sapiens
  misc_RNA (1)...(19): siRNA sense strand
ggcaggugguggagcaaga

SEQ ID NO: 345381 - RNA, 19 nt, Homo sapiens
  misc_RNA (1)...(19): siRNA sense strand
ggaaaggggaguaaaacuu

SEQ ID NO: 345382 - RNA, 19 nt, Homo sapiens
  misc_RNA (1)...(19): siRNA sense strand
gaggagcugacauugaaau

SEQ ID NO: 345383 - RNA, 19 nt, Homo sapiens
  misc_RNA (1)...(19): siRNA sense strand
uaucaucucuauuguugcu

SEQ ID NO: 345384 - RNA, 19 nt, Homo sapiens
  misc_RNA (1)...(19): siRNA sense strand
gaacuuuccagcaguaucc

SEQ ID NO: 345385 - RNA, 19 nt, Homo sapiens
  misc_RNA (1)...(19): siRNA sense strand
gcucaucuuggcugugauu

SEQ ID NO: 345386 - RNA, 19 nt, Homo sapiens
  misc_RNA (1)...(19): siRNA sense strand
gguguggugggaaugauuu

SEQ ID NO: 345387 - RNA, 19 nt, Homo sapiens
  misc_RNA (1)...(19): siRNA sense strand
ggacugcguggcucaucuu

SEQ ID NO: 345388 - RNA, 19 nt, Homo sapiens
  misc_RNA (1)...(19): siRNA sense strand
ggaugggcagcuaaucuau

SEQ ID NO: 345389 - RNA, 19 nt, Homo sapiens
  misc_RNA (1)...(19): siRNA sense strand
gaaagcauugccagcucuu

SEQ ID NO: 345390 - RNA, 19 nt, Homo sapiens
  misc_RNA (1)...(19): siRNA sense strand
gugaagacccagaggaaag

SEQ ID NO: 345391 - RNA, 19 nt, Homo sapiens
  misc_RNA (1)...(19): siRNA sense strand
ggugaagacccagaggaaa

SEQ ID NO: 345392 - RNA, 19 nt, Homo sapiens
  misc_RNA (1)...(19): siRNA sense strand
uauccucgcuggugaagac

SEQ ID NO: 345393 - RNA, 19 nt, Homo sapiens
  misc_RNA (1)...(19): siRNA sense strand
gcaggagcacaacgacaga

SEQ ID NO: 345394 - RNA, 19 nt, Homo sapiens
  misc_RNA (1)...(19): siRNA sense strand
ccggaaggaugggcagcua

SEQ ID NO: 345395 - RNA, 19 nt, Homo sapiens
  misc_RNA (1)...(19): siRNA sense strand
agacuggaacacaaccaua

SEQ ID NO: 345396 - RNA, 19 nt, Homo sapiens
  misc_RNA (1)...(19): siRNA sense strand
agacacuguugcagagaau

SEQ ID NO: 345397 - RNA, 19 nt, Homo sapiens
  misc_RNA (1)...(19): siRNA sense strand
ggagucacaagacacuguu

SEQ ID NO: 345398 - RNA, 19 nt, Homo sapiens
  misc_RNA (1)...(19): siRNA sense strand
uaaauacaggugcuauaag

SEQ ID NO: 345399 - RNA, 19 nt, Homo sapiens
  misc_RNA (1)...(19): siRNA sense strand
aagaugaggaagaagauga

SEQ ID NO: 345400 - RNA, 19 nt, Homo sapiens
  misc_RNA (1)...(19): siRNA sense strand
cagcucaggagagaaauga

SEQ ID NO: 345401 - RNA, 19 nt, Homo sapiens
  misc_RNA (1)...(19): siRNA sense strand
aagacacuguugcagagaa

SEQ ID NO: 345402 - RNA, 19 nt, Homo sapiens
  misc_RNA (1)...(19): siRNA sense strand
cacagaagauaccgagacu

SEQ ID NO: 345403 - RNA, 19 nt, Homo sapiens
  misc_RNA (1)...(19): siRNA sense strand
caaucuccaucaccuuugg

SEQ ID NO: 345404 - RNA, 19 nt, Homo sapiens
  misc_RNA (1)...(19): siRNA sense strand
uuaagucagucagcuuuua

SEQ ID NO: 345405 - RNA, 19 nt, Homo sapiens
  misc_RNA (1)...(19): siRNA sense strand
uuucuacaguguucugguu

SEQ ID NO: 345406 - RNA, 19 nt, Homo sapiens
  misc_RNA (1)...(19): siRNA sense strand
acaaccaccugagcaauac

SEQ ID NO: 345407 - RNA, 19 nt, Homo sapiens
  misc_RNA (1)...(19): siRNA sense strand
ccuggugguucuguauaaa

SEQ ID NO: 345408 - RNA, 19 nt, Homo sapiens
  misc_RNA (1)...(19): siRNA sense strand
uggugugguuggugaauau

SEQ ID NO: 345409 - RNA, 19 nt, Homo sapiens
  misc_RNA (1)...(19): siRNA sense strand
uaucaaguaccucccugaa

SEQ ID NO: 345410 - RNA, 19 nt, Homo sapiens
  misc_RNA (1)...(19): siRNA sense strand
gaagaugaggagcugacau

SEQ ID NO: 345411 - RNA, 19 nt, Homo sapiens
  misc_RNA (1)...(19): siRNA sense strand
uggcuaccauuaagucagu

SEQ ID NO: 345412 - RNA, 19 nt, Homo sapiens
  misc_RNA (1)...(19): siRNA sense strand
gcucuuccaaucuccauca

SEQ ID NO: 345413 - RNA, 19 nt, Homo sapiens
  misc_RNA (1)...(19): siRNA sense strand
ugguuugugccuuacauua

SEQ ID NO: 345414 - RNA, 19 nt, Homo sapiens
  misc_RNA (1)...(19): siRNA sense strand
ugguaaagccucagcaaca

SEQ ID NO: 345415 - RNA, 19 nt, Homo sapiens
  misc_RNA (1)...(19): siRNA sense strand
uggauugggagauuucauu

SEQ ID NO: 345416 - RNA, 19 nt, Homo sapiens
  misc_RNA (1)...(19): siRNA sense strand
gcucucauuuacuccucaa

SEQ ID NO: 345417 - RNA, 19 nt, Homo sapiens
  misc_RNA (1)...(19): siRNA sense strand
gcgccaagcaugugaucau

SEQ ID NO: 345418 - RNA, 19 nt, Homo sapiens
  misc_RNA (1)...(19): siRNA sense strand
gagcugacauugaaauaug

SEQ ID NO: 345419 - RNA, 19 nt, Homo sapiens
  misc_RNA (1)...(19): siRNA sense strand
cagcaggcauaucucauua

SEQ ID NO: 345420 - RNA, 19 nt, Homo sapiens
  misc_RNA (1)...(19): siRNA sense strand
gaaagggagucacaagaca

SEQ ID NO: 345421 - RNA, 19 nt, Homo sapiens
  misc_RNA (1)...(19): siRNA sense strand
ucaaguaccucccugaaug

SEQ ID NO: 345422 - RNA, 19 nt, Homo sapiens
  misc_RNA (1)...(19): siRNA sense strand
ggagcaagaugaggaagaa

SEQ ID NO: 345423 - RNA, 19 nt, Homo sapiens
  misc_RNA (1)...(19): siRNA sense strand
uuaauugguuugugccuua

SEQ ID NO: 345424 - RNA, 19 nt, Homo sapiens
  misc_RNA (1)...(19): siRNA sense strand
ugaaacagcucaggagaga

SEQ ID NO: 345425 - RNA, 19 nt, Homo sapiens
  misc_RNA (1)...(19): siRNA sense strand
gcccugcacucaauucuga

SEQ ID NO: 345426 - RNA, 19 nt, Homo sapiens
  misc_RNA (1)...(19): siRNA sense strand
gacaaccaccugagcaaua

SEQ ID NO: 345427 - RNA, 19 nt, Homo sapiens
  misc_RNA (1)...(19): siRNA sense strand
aaacuuggauugggagauu

SEQ ID NO: 345428 - RNA, 19 nt, Homo sapiens
  misc_RNA (1)...(19): siRNA sense strand
ccaauuagcauuccaucaa

SEQ ID NO: 345429 - RNA, 19 nt, Homo sapiens
  misc_RNA (1)...(19): siRNA sense strand
auccaugccuggcuuauua

SEQ ID NO: 345430 - RNA, 19 nt, Homo sapiens
  misc_RNA (1)...(19): siRNA sense strand
aaacagcucaggagagaaa

SEQ ID NO: 345431 - RNA, 19 nt, Homo sapiens
  misc_RNA (1)...(19): siRNA sense strand
gcacagaaagggagucaca

SEQ ID NO: 345432 - RNA, 19 nt, Homo sapiens
  misc_RNA (1)...(19): siRNA sense strand
caauuagcauuccaucaau

SEQ ID NO: 345433 - RNA, 19 nt, Homo sapiens
  misc_RNA (1)...(19): siRNA sense strand
guagccauauuaauugguu

SEQ ID NO: 345434 - RNA, 19 nt, Homo sapiens
  misc_RNA (1)...(19): siRNA sense strand
gaugaggagcugacauuga

SEQ ID NO: 345435 - RNA, 19 nt, Homo sapiens
  misc_RNA (1)...(19): siRNA sense strand
guuugugccuuacauuauu

SEQ ID NO: 345436 - RNA, 19 nt, Homo sapiens
  misc_RNA (1)...(19): siRNA sense strand
ggucguggcuaccauuaag

SEQ ID NO: 345437 - RNA, 19 nt, Homo sapiens
  misc_RNA (1)...(19): siRNA sense strand
augaggagcugacauugaa

SEQ ID NO: 345438 - RNA, 19 nt, Homo sapiens
  misc_RNA (1)...(19): siRNA sense strand
agagagcccugcacucaau

SEQ ID NO: 345439 - RNA, 19 nt, Homo sapiens
  misc_RNA (1)...(19): siRNA sense strand
gaugggcagcuaaucuaua

SEQ ID NO: 345440 - RNA, 19 nt, Homo sapiens
  misc_RNA (1)...(19): siRNA sense strand
aaauacaggugcuauaagg

SEQ ID NO: 345441 - RNA, 19 nt, Homo sapiens
  misc_RNA (1)...(19): siRNA sense strand
ccucaacaauggugugguu

SEQ ID NO: 345442 - RNA, 19 nt, Homo sapiens
  misc_RNA (1)...(19): siRNA sense strand
acaguguucugguugguaa

SEQ ID NO: 345443 - RNA, 19 nt, Homo sapiens
  misc_RNA (1)...(19): siRNA sense strand
uggugguucuguauaaaua

SEQ ID NO: 345444 - RNA, 19 nt, Homo sapiens
  misc_RNA (1)...(19): siRNA sense strand
ggauugggagauuucauuu

SEQ ID NO: 345445 - RNA, 19 nt, Homo sapiens
  misc_RNA (1)...(19): siRNA sense strand
ucauggcccugguguuuau

SEQ ID NO: 345446 - RNA, 19 nt, Homo sapiens
  misc_RNA (1)...(19): siRNA sense strand
ccagagagcccugcacuca

SEQ ID NO: 345447 - RNA, 19 nt, Homo sapiens
  misc_RNA (1)...(19): siRNA sense strand
gcucaggagagaaaugaaa

SEQ ID NO: 345448 - RNA, 19 nt, Homo sapiens
  misc_RNA (1)...(19): siRNA sense strand
gaaagguccacuucguaug

SEQ ID NO: 345449 - RNA, 19 nt, Homo sapiens
  misc_RNA (1)...(19): siRNA sense strand
cagaagauaccgagacugu

SEQ ID NO: 345450 - RNA, 19 nt, Homo sapiens
  misc_RNA (1)...(19): siRNA sense strand
uaacguugcuguggacuac

SEQ ID NO: 345451 - RNA, 19 nt, Homo sapiens
  misc_RNA (1)...(19): siRNA sense strand
gaaaggggaguaaaacuug

SEQ ID NO: 345452 - RNA, 19 nt, Homo sapiens
  misc_RNA (1)...(19): siRNA sense strand
gcaagaugaggaagaagau

SEQ ID NO: 345453 - RNA, 19 nt, Homo sapiens
  misc_RNA (1)...(19): siRNA sense strand
ccucauggcccugguguuu

SEQ ID NO: 345454 - RNA, 19 nt, Homo sapiens
  misc_RNA (1)...(19): siRNA sense strand
ggacuacauuacuguugca

SEQ ID NO: 345455 - RNA, 19 nt, Homo sapiens
  misc_RNA (1)...(19): siRNA sense strand
ggaaggaugggcagcuaau

SEQ ID NO: 345456 - RNA, 19 nt, Homo sapiens
  misc_RNA (1)...(19): siRNA sense strand
gaaauauggcgccaagcau

SEQ ID NO: 345457 - RNA, 19 nt, Homo sapiens
  misc_RNA (1)...(19): siRNA sense strand
ucugaaugcugccaucaug

SEQ ID NO: 345458 - RNA, 19 nt, Homo sapiens
  misc_RNA (1)...(19): siRNA sense strand
caaaggagaguauccaaaa

SEQ ID NO: 345459 - RNA, 19 nt, Homo sapiens
  misc_RNA (1)...(19): siRNA sense strand
gaagcucaaaggagaguau

SEQ ID NO: 345460 - RNA, 19 nt, Homo sapiens
  misc_RNA (1)...(19): siRNA sense strand
gcacuccugaucuggaauu

SEQ ID NO: 345461 - RNA, 19 nt, Homo sapiens
  misc_RNA (1)...(19): siRNA sense strand
gcuguggacuacauuacug

SEQ ID NO: 345462 - RNA, 19 nt, Homo sapiens
  misc_RNA (1)...(19): siRNA sense strand
gagaacggcaggagcacaa

SEQ ID NO: 345463 - RNA, 19 nt, Homo sapiens
  misc_RNA (1)...(19): siRNA sense strand
gagagaaaugaaacgcuuu

SEQ ID NO: 345464 - RNA, 19 nt, Homo sapiens
  misc_RNA (1)...(19): siRNA sense strand
gguaaagccucagcaacag

SEQ ID NO: 345465 - RNA, 19 nt, Homo sapiens
  misc_RNA (1)...(19): siRNA sense strand
ggagcugacauugaaauau

SEQ ID NO: 345466 - RNA, 19 nt, Homo sapiens
  misc_RNA (1)...(19): siRNA sense strand
ccagcaggcauaucucauu

SEQ ID NO: 345467 - RNA, 19 nt, Homo sapiens
  misc_RNA (1)...(19): siRNA sense strand
gagcugcuguccaggaacu

SEQ ID NO: 345468 - RNA, 19 nt, Homo sapiens
  misc_RNA (1)...(19): siRNA sense strand
ccagagggacagucaucua

SEQ ID NO: 345469 - RNA, 19 nt, Homo sapiens
  misc_RNA (1)...(19): siRNA sense strand
cagaaagggagucacaaga

SEQ ID NO: 345470 - RNA, 19 nt, Homo sapiens
  misc_RNA (1)...(19): siRNA sense strand
ucaaaggagaguauccaaa

SEQ ID NO: 345471 - RNA, 19 nt, Homo sapiens
  misc_RNA (1)...(19): siRNA sense strand
acccugagccauuaucuaa

SEQ ID NO: 345472 - RNA, 19 nt, Homo sapiens
  misc_RNA (1)...(19): siRNA sense strand
aagaugaggagcugacauu

SEQ ID NO: 345473 - RNA, 19 nt, Homo sapiens
  misc_RNA (1)...(19): siRNA sense strand
uggcucaucuuggcuguga

SEQ ID NO: 345474 - RNA, 19 nt, Homo sapiens
  misc_RNA (1)...(19): siRNA sense strand
gcccugguguuuaucaagu

SEQ ID NO: 345475 - RNA, 19 nt, Homo sapiens
  misc_RNA (1)...(19): siRNA sense strand
ggacaaccaccugagcaau

SEQ ID NO: 345476 - RNA, 19 nt, Homo sapiens
  misc_RNA (1)...(19): siRNA sense strand
cauuaagucagucagcuuu

SEQ ID NO: 345477 - RNA, 19 nt, Homo sapiens
  misc_RNA (1)...(19): siRNA sense strand
cuacuuugccacagauuau

SEQ ID NO: 345478 - RNA, 19 nt, Homo sapiens
  misc_RNA (1)...(19): siRNA sense strand
ugaaauauggcgccaagca

SEQ ID NO: 345479 - RNA, 19 nt, Homo sapiens
  misc_RNA (1)...(19): siRNA sense strand
gguuugugccuuacauuau

SEQ ID NO: 345480 - RNA, 19 nt, Homo sapiens
  misc_RNA (1)...(19): siRNA sense strand
ggcaggugguggagcaaga

SEQ ID NO: 345481 - RNA, 19 nt, Homo sapiens
  misc_RNA (1)...(19): siRNA sense strand
ggaaaggggaguaaaacuu

SEQ ID NO: 345482 - RNA, 19 nt, Homo sapiens
  misc_RNA (1)...(19): siRNA sense strand
gaggagcugacauugaaau

SEQ ID NO: 345483 - RNA, 19 nt, Homo sapiens
  misc_RNA (1)...(19): siRNA sense strand
uaucaucucuauuguugcu

SEQ ID NO: 345484 - RNA, 19 nt, Homo sapiens
  misc_RNA (1)...(19): siRNA sense strand
gaacuuuccagcaguaucc

SEQ ID NO: 345485 - RNA, 19 nt, Homo sapiens
  misc_RNA (1)...(19): siRNA sense strand
gcucaucuuggcugugauu

SEQ ID NO: 345486 - RNA, 19 nt, Homo sapiens
  misc_RNA (1)...(19): siRNA sense strand
gguguggugggaaugauuu

SEQ ID NO: 345487 - RNA, 19 nt, Homo sapiens
  misc_RNA (1)...(19): siRNA sense strand
ggacugcguggcucaucuu

SEQ ID NO: 345488 - RNA, 19 nt, Homo sapiens
  misc_RNA (1)...(19): siRNA sense strand
ggaugggcagcuaaucuau

SEQ ID NO: 345489 - RNA, 19 nt, Homo sapiens
  misc_RNA (1)...(19): siRNA sense strand
gaaagcauugccagcucuu

SEQ ID NO: 345490 - RNA, 19 nt, Homo sapiens
  misc_RNA (1)...(19): siRNA sense strand
gugaagacccagaggaaag

SEQ ID NO: 345491 - RNA, 19 nt, Homo sapiens
  misc_RNA (1)...(19): siRNA sense strand
ggugaagacccagaggaaa

SEQ ID NO: 345492 - RNA, 19 nt, Homo sapiens
  misc_RNA (1)...(19): siRNA sense strand
uauccucgcuggugaagac

SEQ ID NO: 345493 - RNA, 19 nt, Homo sapiens
  misc_RNA (1)...(19): siRNA sense strand
gcaggagcacaacgacaga

SEQ ID NO: 345494 - RNA, 19 nt, Homo sapiens
  misc_RNA (1)...(19): siRNA sense strand
ccggaaggaugggcagcua

SEQ ID NO: 345495 - RNA, 19 nt, Homo sapiens
  misc_RNA (1)...(19): siRNA sense strand
agacuggaacacaaccaua

SEQ ID NO: 345496 - RNA, 19 nt, Homo sapiens
  misc_RNA (1)...(19): siRNA sense strand
agacacuguugcagagaau

SEQ ID NO: 345497 - RNA, 19 nt, Homo sapiens
  misc_RNA (1)...(19): siRNA sense strand
ggagucacaagacacuguu

SEQ ID NO: 345498 - RNA, 19 nt, Homo sapiens
  misc_RNA (1)...(19): siRNA sense strand
uaaauacaggugcuauaag

SEQ ID NO: 345499 - RNA, 19 nt, Homo sapiens
  misc_RNA (1)...(19): siRNA sense strand
aagaugaggaagaagauga

SEQ ID NO: 345500 - RNA, 19 nt, Homo sapiens
  misc_RNA (1)...(19): siRNA sense strand
cagcucaggagagaaauga

SEQ ID NO: 345501 - RNA, 19 nt, Homo sapiens
  misc_RNA (1)...(19): siRNA sense strand
aagacacuguugcagagaa

SEQ ID NO: 345502 - RNA, 19 nt, Homo sapiens
  misc_RNA (1)...(19): siRNA sense strand
cacagaagauaccgagacu

SEQ ID NO: 345503 - RNA, 19 nt, Homo sapiens
  misc_RNA (1)...(19): siRNA sense strand
caaucuccaucaccuuugg

SEQ ID NO: 345504 - RNA, 19 nt, Homo sapiens
  misc_RNA (1)...(19): siRNA sense strand
uuaagucagucagcuuuua

SEQ ID NO: 345505 - RNA, 19 nt, Homo sapiens
  misc_RNA (1)...(19): siRNA sense strand
uuucuacaguguucugguu

SEQ ID NO: 345506 - RNA, 19 nt, Homo sapiens
  misc_RNA (1)...(19): siRNA sense strand
acaaccaccugagcaauac

SEQ ID NO: 345507 - RNA, 19 nt, Homo sapiens
  misc_RNA (1)...(19): siRNA sense strand
ccuggugguucuguauaaa

SEQ ID NO: 345508 - RNA, 19 nt, Homo sapiens
  misc_RNA (1)...(19): siRNA sense strand
uggugugguuggugaauau

SEQ ID NO: 345509 - RNA, 19 nt, Homo sapiens
  misc_RNA (1)...(19): siRNA sense strand
uaucaaguaccucccugaa

SEQ ID NO: 345510 - RNA, 19 nt, Homo sapiens
  misc_RNA (1)...(19): siRNA sense strand
gaagaugaggagcugacau

SEQ ID NO: 345511 - RNA, 19 nt, Homo sapiens
  misc_RNA (1)...(19): siRNA sense strand
uggcuaccauuaagucagu

SEQ ID NO: 345512 - RNA, 19 nt, Homo sapiens
  misc_RNA (1)...(19): siRNA sense strand
gcucuuccaaucuccauca

SEQ ID NO: 345513 - RNA, 19 nt, Homo sapiens
  misc_RNA (1)...(19): siRNA sense strand
ugguuugugccuuacauua

SEQ ID NO: 345514 - RNA, 19 nt, Homo sapiens
  misc_RNA (1)...(19): siRNA sense strand
ugguaaagccucagcaaca

SEQ ID NO: 345515 - RNA, 19 nt, Homo sapiens
  misc_RNA (1)...(19): siRNA sense strand
uggauugggagauuucauu

SEQ ID NO: 345516 - RNA, 19 nt, Homo sapiens
  misc_RNA (1)...(19): siRNA sense strand
gcucucauuuacuccucaa

SEQ ID NO: 345517 - RNA, 19 nt, Homo sapiens
  misc_RNA (1)...(19): siRNA sense strand
gcgccaagcaugugaucau

SEQ ID NO: 345518 - RNA, 19 nt, Homo sapiens
  misc_RNA (1)...(19): siRNA sense strand
gagcugacauugaaauaug

SEQ ID NO: 345519 - RNA, 19 nt, Homo sapiens
  misc_RNA (1)...(19): siRNA sense strand
cagcaggcauaucucauua

SEQ ID NO: 345520 - RNA, 19 nt, Homo sapiens
  misc_RNA (1)...(19): siRNA sense strand
gaaagggagucacaagaca

SEQ ID NO: 345521 - RNA, 19 nt, Homo sapiens
  misc_RNA (1)...(19): siRNA sense strand
ucaaguaccucccugaaug

SEQ ID NO: 345522 - RNA, 19 nt, Homo sapiens
  misc_RNA (1)...(19): siRNA sense strand
ggagcaagaugaggaagaa

SEQ ID NO: 345523 - RNA, 19 nt, Homo sapiens
  misc_RNA (1)...(19): siRNA sense strand
ugaaacagcucaggagaga

SEQ ID NO: 345524 - RNA, 19 nt, Homo sapiens
  misc_RNA (1)...(19): siRNA sense strand
gcccugcacucaauucuga

SEQ ID NO: 345525 - RNA, 19 nt, Homo sapiens
  misc_RNA (1)...(19): siRNA sense strand
gacaaccaccugagcaaua

SEQ ID NO: 345526 - RNA, 19 nt, Homo sapiens
  misc_RNA (1)...(19): siRNA sense strand
auccaugccuggcuuauua

SEQ ID NO: 345527 - RNA, 19 nt, Homo sapiens
  misc_RNA (1)...(19): siRNA sense strand
aaacagcucaggagagaaa

SEQ ID NO: 345528 - RNA, 19 nt, Homo sapiens
  misc_RNA (1)...(19): siRNA sense strand
gcacagaaagggagucaca

SEQ ID NO: 345529 - RNA, 19 nt, Homo sapiens
  misc_RNA (1)...(19): siRNA sense strand
gaugaggagcugacauuga

SEQ ID NO: 345530 - RNA, 19 nt, Homo sapiens
  misc_RNA (1)...(19): siRNA sense strand
ggucguggcuaccauuaag

SEQ ID NO: 345531 - RNA, 19 nt, Homo sapiens
  misc_RNA (1)...(19): siRNA sense strand
augaggagcugacauugaa

SEQ ID NO: 345532 - RNA, 19 nt, Homo sapiens
  misc_RNA (1)...(19): siRNA sense strand
agagagcccugcacucaau

SEQ ID NO: 345533 - RNA, 19 nt, Homo sapiens
  misc_RNA (1)...(19): siRNA sense strand
gaugggcagcuaaucuaua

SEQ ID NO: 345534 - RNA, 19 nt, Homo sapiens
  misc_RNA (1)...(19): siRNA sense strand
aaauacaggugcuauaagg

SEQ ID NO: 345535 - RNA, 19 nt, Homo sapiens
  misc_RNA (1)...(19): siRNA sense strand
ccucaacaauggugugguu

SEQ ID NO: 345536 - RNA, 19 nt, Homo sapiens
  misc_RNA (1)...(19): siRNA sense strand
uggugguucuguauaaaua

SEQ ID NO: 345537 - RNA, 19 nt, Homo sapiens
  misc_RNA (1)...(19): siRNA sense strand
ucauggcccugguguuuau

SEQ ID NO: 345538 - RNA, 19 nt, Homo sapiens
  misc_RNA (1)...(19): siRNA sense strand
ccagagagcccugcacuca

SEQ ID NO: 345539 - RNA, 19 nt, Homo sapiens
  misc_RNA (1)...(19): siRNA sense strand
gcucaggagagaaaugaaa

SEQ ID NO: 345540 - RNA, 19 nt, Homo sapiens
  misc_RNA (1)...(19): siRNA sense strand
gaaagguccacuucguaug

SEQ ID NO: 345541 - RNA, 19 nt, Homo sapiens
  misc_RNA (1)...(19): siRNA sense strand
cagaagauaccgagacugu

SEQ ID NO: 345542 - RNA, 19 nt, Homo sapiens
  misc_RNA (1)...(19): siRNA sense strand
uaacguugcuguggacuac

SEQ ID NO: 345543 - RNA, 19 nt, Homo sapiens
  misc_RNA (1)...(19): siRNA sense strand
gcaagaugaggaagaagau

SEQ ID NO: 345544 - RNA, 19 nt, Homo sapiens
  misc_RNA (1)...(19): siRNA sense strand
ccucauggcccugguguuu

SEQ ID NO: 345545 - RNA, 19 nt, Homo sapiens
  misc_RNA (1)...(19): siRNA sense strand
ggacuacauuacuguugca

SEQ ID NO: 345546 - RNA, 19 nt, Homo sapiens
  misc_RNA (1)...(19): siRNA sense strand
ggaaggaugggcagcuaau

SEQ ID NO: 345547 - RNA, 19 nt, Homo sapiens
  misc_RNA (1)...(19): siRNA sense strand
gaaauauggcgccaagcau

SEQ ID NO: 345548 - RNA, 19 nt, Homo sapiens
  misc_RNA (1)...(19): siRNA sense strand
gagaacggcaggagcacaa

SEQ ID NO: 345549 - RNA, 19 nt, Homo sapiens
  misc_RNA (1)...(19): siRNA sense strand
caaaggagaguauccaaaa

SEQ ID NO: 345550 - RNA, 19 nt, Homo sapiens
  misc_RNA (1)...(19): siRNA sense strand
gaagcucaaaggagaguau

SEQ ID NO: 345551 - RNA, 19 nt, Homo sapiens
  misc_RNA (1)...(19): siRNA sense strand
gcacuccugaucuggaauu

SEQ ID NO: 345552 - RNA, 19 nt, Homo sapiens
  misc_RNA (1)...(19): siRNA sense strand
gcuguggacuacauuacug

SEQ ID NO: 345553 - RNA, 19 nt, Homo sapiens
  misc_RNA (1)...(19): siRNA sense strand
ucugaaugcugccaucaug

SEQ ID NO: 345554 - RNA, 19 nt, Homo sapiens
  misc_RNA (1)...(19): siRNA sense strand
gagagaaaugaaacgcuuu

SEQ ID NO: 345555 - RNA, 19 nt, Homo sapiens
  misc_RNA (1)...(19): siRNA sense strand
ggagcugacauugaaauau

SEQ ID NO: 345556 - RNA, 19 nt, Homo sapiens
  misc_RNA (1)...(19): siRNA sense strand
ccagcaggcauaucucauu

SEQ ID NO: 345557 - RNA, 19 nt, Homo sapiens
  misc_RNA (1)...(19): siRNA sense strand
ccagagggacagucaucua

SEQ ID NO: 345558 - RNA, 19 nt, Homo sapiens
  misc_RNA (1)...(19): siRNA sense strand
cagaaagggagucacaaga

SEQ ID NO: 345559 - RNA, 19 nt, Homo sapiens
  misc_RNA (1)...(19): siRNA sense strand
ucaaaggagaguauccaaa

SEQ ID NO: 345560 - RNA, 19 nt, Homo sapiens
  misc_RNA (1)...(19): siRNA sense strand
ccaaguauaaugcagaaag

SEQ ID NO: 345561 - RNA, 19 nt, Homo sapiens
  misc_RNA (1)...(19): siRNA sense strand
aagaugaggagcugacauu

SEQ ID NO: 345562 - RNA, 19 nt, Homo sapiens
  misc_RNA (1)...(19): siRNA sense strand
acccugagccauuaucuaa

SEQ ID NO: 345563 - RNA, 19 nt, Homo sapiens
  misc_RNA (1)...(19): siRNA sense strand
uggcucaucuuggcuguga

SEQ ID NO: 345564 - RNA, 19 nt, Homo sapiens
  misc_RNA (1)...(19): siRNA sense strand
gcccugguguuuaucaagu

SEQ ID NO: 345565 - RNA, 19 nt, Homo sapiens
  misc_RNA (1)...(19): siRNA sense strand
ggacaaccaccugagcaau

SEQ ID NO: 345566 - RNA, 19 nt, Homo sapiens
  misc_RNA (1)...(19): siRNA sense strand
gaggagcugacauugaaau

SEQ ID NO: 345567 - RNA, 19 nt, Homo sapiens
  misc_RNA (1)...(19): siRNA sense strand
ggcaggugguggagcaaga

SEQ ID NO: 345568 - RNA, 19 nt, Homo sapiens
  misc_RNA (1)...(19): siRNA sense strand
cauuaagucagucagcuuu

SEQ ID NO: 345569 - RNA, 19 nt, Homo sapiens
  misc_RNA (1)...(19): siRNA sense strand
ugaaauauggcgccaagca

SEQ ID NO: 345570 - RNA, 19 nt, Homo sapiens
  misc_RNA (1)...(19): siRNA sense strand
uaucaucucuauuguugcu

SEQ ID NO: 345571 - RNA, 19 nt, Homo sapiens
  misc_RNA (1)...(19): siRNA sense strand
gcucaucuuggcugugauu

SEQ ID NO: 345572 - RNA, 19 nt, Homo sapiens
  misc_RNA (1)...(19): siRNA sense strand
gguguggugggaaugauuu

SEQ ID NO: 345573 - RNA, 19 nt, Homo sapiens
  misc_RNA (1)...(19): siRNA sense strand
ggacugcguggcucaucuu

SEQ ID NO: 345574 - RNA, 19 nt, Homo sapiens
  misc_RNA (1)...(19): siRNA sense strand
ggaugggcagcuaaucuau

SEQ ID NO: 345575 - RNA, 19 nt, Homo sapiens
  misc_RNA (1)...(19): siRNA sense strand
gcaggagcacaacgacaga

SEQ ID NO: 345576 - RNA, 19 nt, Homo sapiens
  misc_RNA (1)...(19): siRNA sense strand
ccggaaggaugggcagcua

SEQ ID NO: 345577 - RNA, 19 nt, Homo sapiens
  misc_RNA (1)...(19): siRNA sense strand
agacacuguugcagagaau

SEQ ID NO: 345578 - RNA, 19 nt, Homo sapiens
  misc_RNA (1)...(19): siRNA sense strand
ggagucacaagacacuguu

SEQ ID NO: 345579 - RNA, 19 nt, Homo sapiens
  misc_RNA (1)...(19): siRNA sense strand
aagaugaggaagaagauga

SEQ ID NO: 345580 - RNA, 19 nt, Homo sapiens
  misc_RNA (1)...(19): siRNA sense strand
uaaauacaggugcuauaag

SEQ ID NO: 345581 - RNA, 19 nt, Homo sapiens
  misc_RNA (1)...(19): siRNA sense strand
cagcucaggagagaaauga

SEQ ID NO: 345582 - RNA, 19 nt, Homo sapiens
  misc_RNA (1)...(19): siRNA sense strand
aagacacuguugcagagaa

SEQ ID NO: 345583 - RNA, 19 nt, Homo sapiens
  misc_RNA (1)...(19): siRNA sense strand
uuaagucagucagcuuuua

SEQ ID NO: 345584 - RNA, 19 nt, Homo sapiens
  misc_RNA (1)...(19): siRNA sense strand
acaaccaccugagcaauac

SEQ ID NO: 345585 - RNA, 19 nt, Homo sapiens
  misc_RNA (1)...(19): siRNA sense strand
cacagaagauaccgagacu

SEQ ID NO: 345586 - RNA, 19 nt, Homo sapiens
  misc_RNA (1)...(19): siRNA sense strand
ccuggugguucuguauaaa

SEQ ID NO: 345587 - RNA, 19 nt, Homo sapiens
  misc_RNA (1)...(19): siRNA sense strand
uggugugguuggugaauau

SEQ ID NO: 345588 - RNA, 19 nt, Homo sapiens
  misc_RNA (1)...(19): siRNA sense strand
uaucaaguaccucccugaa

SEQ ID NO: 345589 - RNA, 19 nt, Homo sapiens
  misc_RNA (1)...(19): siRNA sense strand
gaagaugaggagcugacau

SEQ ID NO: 345590 - RNA, 19 nt, Homo sapiens
  misc_RNA (1)...(19): siRNA sense strand
uggcuaccauuaagucagu

SEQ ID NO: 345591 - RNA, 19 nt, Homo sapiens
  misc_RNA (1)...(19): siRNA sense strand
gcucucauuuacuccucaa

SEQ ID NO: 345592 - RNA, 19 nt, Homo sapiens
  misc_RNA (1)...(19): siRNA sense strand
gcgccaagcaugugaucau

SEQ ID NO: 345593 - RNA, 19 nt, Homo sapiens
  misc_RNA (1)...(19): siRNA sense strand
gcuaaucuauaccccauuc

SEQ ID NO: 345594 - RNA, 19 nt, Homo sapiens
  misc_RNA (1)...(19): siRNA sense strand
gaaggaugggcagcuaauc

SEQ ID NO: 345595 - RNA, 19 nt, Homo sapiens
  misc_RNA (1)...(19): siRNA sense strand
cagagggacagucaucuag

SEQ ID NO: 345596 - RNA, 19 nt, Homo sapiens
  misc_RNA (1)...(19): siRNA sense strand
uccuggugguucuguauaa

SEQ ID NO: 345597 - RNA, 19 nt, Homo sapiens
  misc_RNA (1)...(19): siRNA sense strand
gaaugcugccaucaugauc

SEQ ID NO: 345598 - RNA, 19 nt, Homo sapiens
  misc_RNA (1)...(19): siRNA sense strand
ugaaugcugccaucaugau

SEQ ID NO: 345599 - RNA, 19 nt, Homo sapiens
  misc_RNA (1)...(19): siRNA sense strand
cucauuuacuccucaacaa

SEQ ID NO: 345600 - RNA, 19 nt, Homo sapiens
  misc_RNA (1)...(19): siRNA sense strand
caaguaccucccugaaugg

SEQ ID NO: 345601 - RNA, 19 nt, Homo sapiens
  misc_RNA (1)...(19): siRNA sense strand
uaccugcaccguuguccua

SEQ ID NO: 345602 - RNA, 19 nt, Homo sapiens
  misc_RNA (1)...(19): siRNA sense strand
augccuggcuuauuauauc

SEQ ID NO: 345603 - RNA, 19 nt, Homo sapiens
  misc_RNA (1)...(19): siRNA sense strand
cagugucauuguugucaug

SEQ ID NO: 345604 - RNA, 19 nt, Homo sapiens
  misc_RNA (1)...(19): siRNA sense strand
cugcaccguuguccuacuu

SEQ ID NO: 345605 - RNA, 19 nt, Homo sapiens
  misc_RNA (1)...(19): siRNA sense strand
aggaugggcagcuaaucua

SEQ ID NO: 345606 - RNA, 19 nt, Homo sapiens
  misc_RNA (1)...(19): siRNA sense strand
gggagucacaagacacugu

SEQ ID NO: 345607 - RNA, 19 nt, Homo sapiens
  misc_RNA (1)...(19): siRNA sense strand
ccaugccuggcuuauuaua

SEQ ID NO: 345608 - RNA, 19 nt, Homo sapiens
  misc_RNA (1)...(19): siRNA sense strand
gagcugacauugaaauaug

SEQ ID NO: 345609 - RNA, 19 nt, Homo sapiens
  misc_RNA (1)...(19): siRNA sense strand
cagcaggcauaucucauua

SEQ ID NO: 345610 - RNA, 19 nt, Homo sapiens
  misc_RNA (1)...(19): siRNA sense strand
gaaagggagucacaagaca

SEQ ID NO: 345611 - RNA, 19 nt, Homo sapiens
  misc_RNA (1)...(19): siRNA sense strand
ucaaguaccucccugaaug

SEQ ID NO: 345612 - RNA, 19 nt, Homo sapiens
  misc_RNA (1)...(19): siRNA sense strand
ggagcaagaugaggaagaa

SEQ ID NO: 345613 - RNA, 19 nt, Homo sapiens
  misc_RNA (1)...(19): siRNA sense strand
uuaauugguuugugccuua

SEQ ID NO: 345614 - RNA, 19 nt, Homo sapiens
  misc_RNA (1)...(19): siRNA sense strand
ugaaacagcucaggagaga

SEQ ID NO: 345615 - RNA, 19 nt, Homo sapiens
  misc_RNA (1)...(19): siRNA sense strand
gcccugcacucaauucuga

SEQ ID NO: 345616 - RNA, 19 nt, Homo sapiens
  misc_RNA (1)...(19): siRNA sense strand
gacaaccaccugagcaaua

SEQ ID NO: 345617 - RNA, 19 nt, Homo sapiens
  misc_RNA (1)...(19): siRNA sense strand
aaacuuggauugggagauu

SEQ ID NO: 345618 - RNA, 19 nt, Homo sapiens
  misc_RNA (1)...(19): siRNA sense strand
ccaauuagcauuccaucaa

SEQ ID NO: 345619 - RNA, 19 nt, Homo sapiens
  misc_RNA (1)...(19): siRNA sense strand
auccaugccuggcuuauua

SEQ ID NO: 345620 - RNA, 19 nt, Homo sapiens
  misc_RNA (1)...(19): siRNA sense strand
aaacagcucaggagagaaa

SEQ ID NO: 345621 - RNA, 19 nt, Homo sapiens
  misc_RNA (1)...(19): siRNA sense strand
gcacagaaagggagucaca

SEQ ID NO: 345622 - RNA, 19 nt, Homo sapiens
  misc_RNA (1)...(19): siRNA sense strand
caauuagcauuccaucaau

SEQ ID NO: 345623 - RNA, 19 nt, Homo sapiens
  misc_RNA (1)...(19): siRNA sense strand
guagccauauuaauugguu

SEQ ID NO: 345624 - RNA, 19 nt, Homo sapiens
  misc_RNA (1)...(19): siRNA sense strand
gaugaggagcugacauuga

SEQ ID NO: 345625 - RNA, 19 nt, Homo sapiens
  misc_RNA (1)...(19): siRNA sense strand
guuugugccuuacauuauu

SEQ ID NO: 345626 - RNA, 19 nt, Homo sapiens
  misc_RNA (1)...(19): siRNA sense strand
ggucguggcuaccauuaag

SEQ ID NO: 345627 - RNA, 19 nt, Homo sapiens
  misc_RNA (1)...(19): siRNA sense strand
augaggagcugacauugaa

SEQ ID NO: 345628 - RNA, 19 nt, Homo sapiens
  misc_RNA (1)...(19): siRNA sense strand
agagagcccugcacucaau

SEQ ID NO: 345629 - RNA, 19 nt, Homo sapiens
  misc_RNA (1)...(19): siRNA sense strand
gaugggcagcuaaucuaua

SEQ ID NO: 345630 - RNA, 19 nt, Homo sapiens
  misc_RNA (1)...(19): siRNA sense strand
aaauacaggugcuauaagg

SEQ ID NO: 345631 - RNA, 19 nt, Homo sapiens
  misc_RNA (1)...(19): siRNA sense strand
ccucaacaauggugugguu

SEQ ID NO: 345632 - RNA, 19 nt, Homo sapiens
  misc_RNA (1)...(19): siRNA sense strand
acaguguucugguugguaa

SEQ ID NO: 345633 - RNA, 19 nt, Homo sapiens
  misc_RNA (1)...(19): siRNA sense strand
uggugguucuguauaaaua

SEQ ID NO: 345634 - RNA, 19 nt, Homo sapiens
  misc_RNA (1)...(19): siRNA sense strand
ggauugggagauuucauuu

SEQ ID NO: 345635 - RNA, 19 nt, Homo sapiens
  misc_RNA (1)...(19): siRNA sense strand
ucauggcccugguguuuau

SEQ ID NO: 345636 - RNA, 19 nt, Homo sapiens
  misc_RNA (1)...(19): siRNA sense strand
ccagagagcccugcacuca

SEQ ID NO: 345637 - RNA, 19 nt, Homo sapiens
  misc_RNA (1)...(19): siRNA sense strand
gcucaggagagaaaugaaa

SEQ ID NO: 345638 - RNA, 19 nt, Homo sapiens
  misc_RNA (1)...(19): siRNA sense strand
gaaagguccacuucguaug

SEQ ID NO: 345639 - RNA, 19 nt, Homo sapiens
  misc_RNA (1)...(19): siRNA sense strand
cagaagauaccgagacugu

SEQ ID NO: 345640 - RNA, 19 nt, Homo sapiens
  misc_RNA (1)...(19): siRNA sense strand
uaacguugcuguggacuac

SEQ ID NO: 345641 - RNA, 19 nt, Homo sapiens
  misc_RNA (1)...(19): siRNA sense strand
gaaaggggaguaaaacuug

SEQ ID NO: 345642 - RNA, 19 nt, Homo sapiens
  misc_RNA (1)...(19): siRNA sense strand
gcaagaugaggaagaagau

SEQ ID NO: 345643 - RNA, 19 nt, Homo sapiens
  misc_RNA (1)...(19): siRNA sense strand
ccucauggcccugguguuu

SEQ ID NO: 345644 - RNA, 19 nt, Homo sapiens
  misc_RNA (1)...(19): siRNA sense strand
ggacuacauuacuguugca

SEQ ID NO: 345645 - RNA, 19 nt, Homo sapiens
  misc_RNA (1)...(19): siRNA sense strand
ggaaggaugggcagcuaau

SEQ ID NO: 345646 - RNA, 19 nt, Homo sapiens
  misc_RNA (1)...(19): siRNA sense strand
gaaauauggcgccaagcau

SEQ ID NO: 345647 - RNA, 19 nt, Homo sapiens
  misc_RNA (1)...(19): siRNA sense strand
ucugaaugcugccaucaug

SEQ ID NO: 345648 - RNA, 19 nt, Homo sapiens
  misc_RNA (1)...(19): siRNA sense strand
caaaggagaguauccaaaa

SEQ ID NO: 345649 - RNA, 19 nt, Homo sapiens
  misc_RNA (1)...(19): siRNA sense strand
gaagcucaaaggagaguau

SEQ ID NO: 345650 - RNA, 19 nt, Homo sapiens
  misc_RNA (1)...(19): siRNA sense strand
gcacuccugaucuggaauu

SEQ ID NO: 345651 - RNA, 19 nt, Homo sapiens
  misc_RNA (1)...(19): siRNA sense strand
gcuguggacuacauuacug

SEQ ID NO: 345652 - RNA, 19 nt, Homo sapiens
  misc_RNA (1)...(19): siRNA sense strand
gagaacggcaggagcacaa

SEQ ID NO: 345653 - RNA, 19 nt, Homo sapiens
  misc_RNA (1)...(19): siRNA sense strand
gagagaaaugaaacgcuuu

SEQ ID NO: 345654 - RNA, 19 nt, Homo sapiens
  misc_RNA (1)...(19): siRNA sense strand
gguaaagccucagcaacag

SEQ ID NO: 345655 - RNA, 19 nt, Homo sapiens
  misc_RNA (1)...(19): siRNA sense strand
ggagcugacauugaaauau

SEQ ID NO: 345656 - RNA, 19 nt, Homo sapiens
  misc_RNA (1)...(19): siRNA sense strand
ccagcaggcauaucucauu

SEQ ID NO: 345657 - RNA, 19 nt, Homo sapiens
  misc_RNA (1)...(19): siRNA sense strand
gagcugcuguccaggaacu

SEQ ID NO: 345658 - RNA, 19 nt, Homo sapiens
  misc_RNA (1)...(19): siRNA sense strand
ccagagggacagucaucua

SEQ ID NO: 345659 - RNA, 19 nt, Homo sapiens
  misc_RNA (1)...(19): siRNA sense strand
cagaaagggagucacaaga

SEQ ID NO: 345660 - RNA, 19 nt, Homo sapiens
  misc_RNA (1)...(19): siRNA sense strand
ucaaaggagaguauccaaa

SEQ ID NO: 345661 - RNA, 19 nt, Homo sapiens
  misc_RNA (1)...(19): siRNA sense strand
acccugagccauuaucuaa

SEQ ID NO: 345662 - RNA, 19 nt, Homo sapiens
  misc_RNA (1)...(19): siRNA sense strand
aagaugaggagcugacauu

SEQ ID NO: 345663 - RNA, 19 nt, Homo sapiens
  misc_RNA (1)...(19): siRNA sense strand
uggcucaucuuggcuguga

SEQ ID NO: 345664 - RNA, 19 nt, Homo sapiens
  misc_RNA (1)...(19): siRNA sense strand
gcccugguguuuaucaagu

SEQ ID NO: 345665 - RNA, 19 nt, Homo sapiens
  misc_RNA (1)...(19): siRNA sense strand
ggacaaccaccugagcaau

SEQ ID NO: 345666 - RNA, 19 nt, Homo sapiens
  misc_RNA (1)...(19): siRNA sense strand
cauuaagucagucagcuuu

SEQ ID NO: 345667 - RNA, 19 nt, Homo sapiens
  misc_RNA (1)...(19): siRNA sense strand
cuacuuugccacagauuau

SEQ ID NO: 345668 - RNA, 19 nt, Homo sapiens
  misc_RNA (1)...(19): siRNA sense strand
ugaaauauggcgccaagca

SEQ ID NO: 345669 - RNA, 19 nt, Homo sapiens
  misc_RNA (1)...(19): siRNA sense strand
gguuugugccuuacauuau

SEQ ID NO: 345670 - RNA, 19 nt, Homo sapiens
  misc_RNA (1)...(19): siRNA sense strand
ggcaggugguggagcaaga

SEQ ID NO: 345671 - RNA, 19 nt, Homo sapiens
  misc_RNA (1)...(19): siRNA sense strand
ggaaaggggaguaaaacuu

SEQ ID NO: 345672 - RNA, 19 nt, Homo sapiens
  misc_RNA (1)...(19): siRNA sense strand
gaggagcugacauugaaau

SEQ ID NO: 345673 - RNA, 19 nt, Homo sapiens
  misc_RNA (1)...(19): siRNA sense strand
uaucaucucuauuguugcu

SEQ ID NO: 345674 - RNA, 19 nt, Homo sapiens
  misc_RNA (1)...(19): siRNA sense strand
gaacuuuccagcaguaucc

SEQ ID NO: 345675 - RNA, 19 nt, Homo sapiens
  misc_RNA (1)...(19): siRNA sense strand
gcucaucuuggcugugauu

SEQ ID NO: 345676 - RNA, 19 nt, Homo sapiens
  misc_RNA (1)...(19): siRNA sense strand
gguguggugggaaugauuu

SEQ ID NO: 345677 - RNA, 19 nt, Homo sapiens
  misc_RNA (1)...(19): siRNA sense strand
ggacugcguggcucaucuu

SEQ ID NO: 345678 - RNA, 19 nt, Homo sapiens
  misc_RNA (1)...(19): siRNA sense strand
ggaugggcagcuaaucuau

SEQ ID NO: 345679 - RNA, 19 nt, Homo sapiens
  misc_RNA (1)...(19): siRNA sense strand
gaaagcauugccagcucuu

SEQ ID NO: 345680 - RNA, 19 nt, Homo sapiens
  misc_RNA (1)...(19): siRNA sense strand
gugaagacccagaggaaag

SEQ ID NO: 345681 - RNA, 19 nt, Homo sapiens
  misc_RNA (1)...(19): siRNA sense strand
ggugaagacccagaggaaa

SEQ ID NO: 345682 - RNA, 19 nt, Homo sapiens
  misc_RNA (1)...(19): siRNA sense strand
uauccucgcuggugaagac

SEQ ID NO: 345683 - RNA, 19 nt, Homo sapiens
  misc_RNA (1)...(19): siRNA sense strand
gcaggagcacaacgacaga

SEQ ID NO: 345684 - RNA, 19 nt, Homo sapiens
  misc_RNA (1)...(19): siRNA sense strand
ccggaaggaugggcagcua

SEQ ID NO: 345685 - RNA, 19 nt, Homo sapiens
  misc_RNA (1)...(19): siRNA sense strand
agacuggaacacaaccaua

SEQ ID NO: 345686 - RNA, 19 nt, Homo sapiens
  misc_RNA (1)...(19): siRNA sense strand
agacacuguugcagagaau

SEQ ID NO: 345687 - RNA, 19 nt, Homo sapiens
  misc_RNA (1)...(19): siRNA sense strand
ggagucacaagacacuguu

SEQ ID NO: 345688 - RNA, 19 nt, Homo sapiens
  misc_RNA (1)...(19): siRNA sense strand
uaaauacaggugcuauaag

SEQ ID NO: 345689 - RNA, 19 nt, Homo sapiens
  misc_RNA (1)...(19): siRNA sense strand
aagaugaggaagaagauga

SEQ ID NO: 345690 - RNA, 19 nt, Homo sapiens
  misc_RNA (1)...(19): siRNA sense strand
cagcucaggagagaaauga

SEQ ID NO: 345691 - RNA, 19 nt, Homo sapiens
  misc_RNA (1)...(19): siRNA sense strand
aagacacuguugcagagaa

SEQ ID NO: 345692 - RNA, 19 nt, Homo sapiens
  misc_RNA (1)...(19): siRNA sense strand
cacagaagauaccgagacu

SEQ ID NO: 345693 - RNA, 19 nt, Homo sapiens
  misc_RNA (1)...(19): siRNA sense strand
caaucuccaucaccuuugg

SEQ ID NO: 345694 - RNA, 19 nt, Homo sapiens
  misc_RNA (1)...(19): siRNA sense strand
uuaagucagucagcuuuua

SEQ ID NO: 345695 - RNA, 19 nt, Homo sapiens
  misc_RNA (1)...(19): siRNA sense strand
uuucuacaguguucugguu

SEQ ID NO: 345696 - RNA, 19 nt, Homo sapiens
  misc_RNA (1)...(19): siRNA sense strand
acaaccaccugagcaauac

SEQ ID NO: 345697 - RNA, 19 nt, Homo sapiens
  misc_RNA (1)...(19): siRNA sense strand
ccuggugguucuguauaaa

SEQ ID NO: 345698 - RNA, 19 nt, Homo sapiens
  misc_RNA (1)...(19): siRNA sense strand
uggugugguuggugaauau

SEQ ID NO: 345699 - RNA, 19 nt, Homo sapiens
  misc_RNA (1)...(19): siRNA sense strand
uaucaaguaccucccugaa

SEQ ID NO: 345700 - RNA, 19 nt, Homo sapiens
  misc_RNA (1)...(19): siRNA sense strand
gaagaugaggagcugacau

SEQ ID NO: 345701 - RNA, 19 nt, Homo sapiens
  misc_RNA (1)...(19): siRNA sense strand
uggcuaccauuaagucagu

SEQ ID NO: 345702 - RNA, 19 nt, Homo sapiens
  misc_RNA (1)...(19): siRNA sense strand
gcucuuccaaucuccauca

SEQ ID NO: 345703 - RNA, 19 nt, Homo sapiens
  misc_RNA (1)...(19): siRNA sense strand
ugguuugugccuuacauua

SEQ ID NO: 345704 - RNA, 19 nt, Homo sapiens
  misc_RNA (1)...(19): siRNA sense strand
ugguaaagccucagcaaca

SEQ ID NO: 345705 - RNA, 19 nt, Homo sapiens
  misc_RNA (1)...(19): siRNA sense strand
uggauugggagauuucauu

SEQ ID NO: 345706 - RNA, 19 nt, Homo sapiens
  misc_RNA (1)...(19): siRNA sense strand
gcucucauuuacuccucaa

SEQ ID NO: 345707 - RNA, 19 nt, Homo sapiens
  misc_RNA (1)...(19): siRNA sense strand
gcgccaagcaugugaucau

SEQ ID NO: 345708 - RNA, 19 nt, Homo sapiens
  misc_RNA (1)...(19): siRNA sense strand
gagcugacauugaaauaug

SEQ ID NO: 345709 - RNA, 19 nt, Homo sapiens
  misc_RNA (1)...(19): siRNA sense strand
cagcaggcauaucucauua

SEQ ID NO: 345710 - RNA, 19 nt, Homo sapiens
  misc_RNA (1)...(19): siRNA sense strand
gaaagggagucacaagaca

SEQ ID NO: 345711 - RNA, 19 nt, Homo sapiens
  misc_RNA (1)...(19): siRNA sense strand
ucaaguaccucccugaaug

SEQ ID NO: 345712 - RNA, 19 nt, Homo sapiens
  misc_RNA (1)...(19): siRNA sense strand
ggagcaagaugaggaagaa

SEQ ID NO: 345713 - RNA, 19 nt, Homo sapiens
  misc_RNA (1)...(19): siRNA sense strand
uuaauugguuugugccuua

SEQ ID NO: 345714 - RNA, 19 nt, Homo sapiens
  misc_RNA (1)...(19): siRNA sense strand
ugaaacagcucaggagaga

SEQ ID NO: 345715 - RNA, 19 nt, Homo sapiens
  misc_RNA (1)...(19): siRNA sense strand
gcccugcacucaauucuga

SEQ ID NO: 345716 - RNA, 19 nt, Homo sapiens
  misc_RNA (1)...(19): siRNA sense strand
gacaaccaccugagcaaua

SEQ ID NO: 345717 - RNA, 19 nt, Homo sapiens
  misc_RNA (1)...(19): siRNA sense strand
aaacuuggauugggagauu

SEQ ID NO: 345718 - RNA, 19 nt, Homo sapiens
  misc_RNA (1)...(19): siRNA sense strand
ccaauuagcauuccaucaa

SEQ ID NO: 345719 - RNA, 19 nt, Homo sapiens
  misc_RNA (1)...(19): siRNA sense strand
auccaugccuggcuuauua

SEQ ID NO: 345720 - RNA, 19 nt, Homo sapiens
  misc_RNA (1)...(19): siRNA sense strand
aaacagcucaggagagaaa

SEQ ID NO: 345721 - RNA, 19 nt, Homo sapiens
  misc_RNA (1)...(19): siRNA sense strand
gcacagaaagggagucaca

SEQ ID NO: 345722 - RNA, 19 nt, Homo sapiens
  misc_RNA (1)...(19): siRNA sense strand
caauuagcauuccaucaau

SEQ ID NO: 345723 - RNA, 19 nt, Homo sapiens
  misc_RNA (1)...(19): siRNA sense strand
guagccauauuaauugguu

SEQ ID NO: 345724 - RNA, 19 nt, Homo sapiens
  misc_RNA (1)...(19): siRNA sense strand
gaugaggagcugacauuga

SEQ ID NO: 345725 - RNA, 19 nt, Homo sapiens
  misc_RNA (1)...(19): siRNA sense strand
guuugugccuuacauuauu

SEQ ID NO: 345726 - RNA, 19 nt, Homo sapiens
  misc_RNA (1)...(19): siRNA sense strand
ggucguggcuaccauuaag

SEQ ID NO: 345727 - RNA, 19 nt, Homo sapiens
  misc_RNA (1)...(19): siRNA sense strand
augaggagcugacauugaa

SEQ ID NO: 345728 - RNA, 19 nt, Homo sapiens
  misc_RNA (1)...(19): siRNA sense strand
agagagcccugcacucaau

SEQ ID NO: 345729 - RNA, 19 nt, Homo sapiens
  misc_RNA (1)...(19): siRNA sense strand
gaugggcagcuaaucuaua

SEQ ID NO: 345730 - RNA, 19 nt, Homo sapiens
  misc_RNA (1)...(19): siRNA sense strand
aaauacaggugcuauaagg

SEQ ID NO: 345731 - RNA, 19 nt, Homo sapiens
  misc_RNA (1)...(19): siRNA sense strand
ccucaacaauggugugguu

SEQ ID NO: 345732 - RNA, 19 nt, Homo sapiens
  misc_RNA (1)...(19): siRNA sense strand
acaguguucugguugguaa

SEQ ID NO: 345733 - RNA, 19 nt, Homo sapiens
  misc_RNA (1)...(19): siRNA sense strand
uggugguucuguauaaaua

SEQ ID NO: 345734 - RNA, 19 nt, Homo sapiens
  misc_RNA (1)...(19): siRNA sense strand
ggauugggagauuucauuu

SEQ ID NO: 345735 - RNA, 19 nt, Homo sapiens
  misc_RNA (1)...(19): siRNA sense strand
ucauggcccugguguuuau

SEQ ID NO: 345736 - RNA, 19 nt, Homo sapiens
  misc_RNA (1)...(19): siRNA sense strand
ccagagagcccugcacuca

SEQ ID NO: 345737 - RNA, 19 nt, Homo sapiens
  misc_RNA (1)...(19): siRNA sense strand
gcucaggagagaaaugaaa

SEQ ID NO: 345738 - RNA, 19 nt, Homo sapiens
  misc_RNA (1)...(19): siRNA sense strand
gaaagguccacuucguaug

SEQ ID NO: 345739 - RNA, 19 nt, Homo sapiens
  misc_RNA (1)...(19): siRNA sense strand
cagaagauaccgagacugu

SEQ ID NO: 345740 - RNA, 19 nt, Homo sapiens
  misc_RNA (1)...(19): siRNA sense strand
uaacguugcuguggacuac

SEQ ID NO: 345741 - RNA, 19 nt, Homo sapiens
  misc_RNA (1)...(19): siRNA sense strand
gaaaggggaguaaaacuug

SEQ ID NO: 345742 - RNA, 19 nt, Homo sapiens
  misc_RNA (1)...(19): siRNA sense strand
gcaagaugaggaagaagau

SEQ ID NO: 345743 - RNA, 19 nt, Homo sapiens
  misc_RNA (1)...(19): siRNA sense strand
ccucauggcccugguguuu

SEQ ID NO: 345744 - RNA, 19 nt, Homo sapiens
  misc_RNA (1)...(19): siRNA sense strand
ggacuacauuacuguugca

SEQ ID NO: 345745 - RNA, 19 nt, Homo sapiens
  misc_RNA (1)...(19): siRNA sense strand
ggaaggaugggcagcuaau

SEQ ID NO: 345746 - RNA, 19 nt, Homo sapiens
  misc_RNA (1)...(19): siRNA sense strand
gaaauauggcgccaagcau

SEQ ID NO: 345747 - RNA, 19 nt, Homo sapiens
  misc_RNA (1)...(19): siRNA sense strand
ucugaaugcugccaucaug

SEQ ID NO: 345748 - RNA, 19 nt, Homo sapiens
  misc_RNA (1)...(19): siRNA sense strand
caaaggagaguauccaaaa

SEQ ID NO: 345749 - RNA, 19 nt, Homo sapiens
  misc_RNA (1)...(19): siRNA sense strand
gaagcucaaaggagaguau

SEQ ID NO: 345750 - RNA, 19 nt, Homo sapiens
  misc_RNA (1)...(19): siRNA sense strand
gcacuccugaucuggaauu

SEQ ID NO: 345751 - RNA, 19 nt, Homo sapiens
  misc_RNA (1)...(19): siRNA sense strand
gcuguggacuacauuacug

SEQ ID NO: 345752 - RNA, 19 nt, Homo sapiens
  misc_RNA (1)...(19): siRNA sense strand
gagaacggcaggagcacaa

SEQ ID NO: 345753 - RNA, 19 nt, Homo sapiens
  misc_RNA (1)...(19): siRNA sense strand
gagagaaaugaaacgcuuu

SEQ ID NO: 345754 - RNA, 19 nt, Homo sapiens
  misc_RNA (1)...(19): siRNA sense strand
gguaaagccucagcaacag

SEQ ID NO: 345755 - RNA, 19 nt, Homo sapiens
  misc_RNA (1)...(19): siRNA sense strand
ggagcugacauugaaauau

SEQ ID NO: 345756 - RNA, 19 nt, Homo sapiens
  misc_RNA (1)...(19): siRNA sense strand
ccagcaggcauaucucauu

SEQ ID NO: 345757 - RNA, 19 nt, Homo sapiens
  misc_RNA (1)...(19): siRNA sense strand
gagcugcuguccaggaacu

SEQ ID NO: 345758 - RNA, 19 nt, Homo sapiens
  misc_RNA (1)...(19): siRNA sense strand
ccagagggacagucaucua

SEQ ID NO: 345759 - RNA, 19 nt, Homo sapiens
  misc_RNA (1)...(19): siRNA sense strand
cagaaagggagucacaaga

SEQ ID NO: 345760 - RNA, 19 nt, Homo sapiens
  misc_RNA (1)...(19): siRNA sense strand
ucaaaggagaguauccaaa

SEQ ID NO: 345761 - RNA, 19 nt, Homo sapiens
  misc_RNA (1)...(19): siRNA sense strand
acccugagccauuaucuaa

SEQ ID NO: 345762 - RNA, 19 nt, Homo sapiens
  misc_RNA (1)...(19): siRNA sense strand
aagaugaggagcugacauu

SEQ ID NO: 345763 - RNA, 19 nt, Homo sapiens
  misc_RNA (1)...(19): siRNA sense strand
uggcucaucuuggcuguga

SEQ ID NO: 345764 - RNA, 19 nt, Homo sapiens
  misc_RNA (1)...(19): siRNA sense strand
gcccugguguuuaucaagu

SEQ ID NO: 345765 - RNA, 19 nt, Homo sapiens
  misc_RNA (1)...(19): siRNA sense strand
ggacaaccaccugagcaau

SEQ ID NO: 345766 - RNA, 19 nt, Homo sapiens
  misc_RNA (1)...(19): siRNA sense strand
cauuaagucagucagcuuu

SEQ ID NO: 345767 - RNA, 19 nt, Homo sapiens
  misc_RNA (1)...(19): siRNA sense strand
cuacuuugccacagauuau

SEQ ID NO: 345768 - RNA, 19 nt, Homo sapiens
  misc_RNA (1)...(19): siRNA sense strand
ugaaauauggcgccaagca

SEQ ID NO: 345769 - RNA, 19 nt, Homo sapiens
  misc_RNA (1)...(19): siRNA sense strand
gguuugugccuuacauuau

SEQ ID NO: 345770 - RNA, 19 nt, Homo sapiens
  misc_RNA (1)...(19): siRNA sense strand
ggcaggugguggagcaaga

SEQ ID NO: 345771 - RNA, 19 nt, Homo sapiens
  misc_RNA (1)...(19): siRNA sense strand
ggaaaggggaguaaaacuu

SEQ ID NO: 345772 - RNA, 19 nt, Homo sapiens
  misc_RNA (1)...(19): siRNA sense strand
gaggagcugacauugaaau

SEQ ID NO: 345773 - RNA, 19 nt, Homo sapiens
  misc_RNA (1)...(19): siRNA sense strand
uaucaucucuauuguugcu

SEQ ID NO: 345774 - RNA, 19 nt, Homo sapiens
  misc_RNA (1)...(19): siRNA sense strand
gaacuuuccagcaguaucc

SEQ ID NO: 345775 - RNA, 19 nt, Homo sapiens
  misc_RNA (1)...(19): siRNA sense strand
gcucaucuuggcugugauu

SEQ ID NO: 345776 - RNA, 19 nt, Homo sapiens
  misc_RNA (1)...(19): siRNA sense strand
gguguggugggaaugauuu

SEQ ID NO: 345777 - RNA, 19 nt, Homo sapiens
  misc_RNA (1)...(19): siRNA sense strand
ggacugcguggcucaucuu

SEQ ID NO: 345778 - RNA, 19 nt, Homo sapiens
  misc_RNA (1)...(19): siRNA sense strand
ggaugggcagcuaaucuau

SEQ ID NO: 345779 - RNA, 19 nt, Homo sapiens
  misc_RNA (1)...(19): siRNA sense strand
gaaagcauugccagcucuu

SEQ ID NO: 345780 - RNA, 19 nt, Homo sapiens
  misc_RNA (1)...(19): siRNA sense strand
gugaagacccagaggaaag

SEQ ID NO: 345781 - RNA, 19 nt, Homo sapiens
  misc_RNA (1)...(19): siRNA sense strand
ggugaagacccagaggaaa

SEQ ID NO: 345782 - RNA, 19 nt, Homo sapiens
  misc_RNA (1)...(19): siRNA sense strand
uauccucgcuggugaagac

SEQ ID NO: 345783 - RNA, 19 nt, Homo sapiens
  misc_RNA (1)...(19): siRNA sense strand
gcaggagcacaacgacaga

SEQ ID NO: 345784 - RNA, 19 nt, Homo sapiens
  misc_RNA (1)...(19): siRNA sense strand
ccggaaggaugggcagcua

SEQ ID NO: 345785 - RNA, 19 nt, Homo sapiens
  misc_RNA (1)...(19): siRNA sense strand
agacuggaacacaaccaua

SEQ ID NO: 345786 - RNA, 19 nt, Homo sapiens
  misc_RNA (1)...(19): siRNA sense strand
agacacuguugcagagaau

SEQ ID NO: 345787 - RNA, 19 nt, Homo sapiens
  misc_RNA (1)...(19): siRNA sense strand
ggagucacaagacacuguu

SEQ ID NO: 345788 - RNA, 19 nt, Homo sapiens
  misc_RNA (1)...(19): siRNA sense strand
uaaauacaggugcuauaag

SEQ ID NO: 345789 - RNA, 19 nt, Homo sapiens
  misc_RNA (1)...(19): siRNA sense strand
aagaugaggaagaagauga

SEQ ID NO: 345790 - RNA, 19 nt, Homo sapiens
  misc_RNA (1)...(19): siRNA sense strand
cagcucaggagagaaauga

SEQ ID NO: 345791 - RNA, 19 nt, Homo sapiens
  misc_RNA (1)...(19): siRNA sense strand
aagacacuguugcagagaa

SEQ ID NO: 345792 - RNA, 19 nt, Homo sapiens
  misc_RNA (1)...(19): siRNA sense strand
cacagaagauaccgagacu

SEQ ID NO: 345793 - RNA, 19 nt, Homo sapiens
  misc_RNA (1)...(19): siRNA sense strand
caaucuccaucaccuuugg

SEQ ID NO: 345794 - RNA, 19 nt, Homo sapiens
  misc_RNA (1)...(19): siRNA sense strand
uuaagucagucagcuuuua

SEQ ID NO: 345795 - RNA, 19 nt, Homo sapiens
  misc_RNA (1)...(19): siRNA sense strand
uuucuacaguguucugguu

SEQ ID NO: 345796 - RNA, 19 nt, Homo sapiens
  misc_RNA (1)...(19): siRNA sense strand
acaaccaccugagcaauac

SEQ ID NO: 345797 - RNA, 19 nt, Homo sapiens
  misc_RNA (1)...(19): siRNA sense strand
ccuggugguucuguauaaa

SEQ ID NO: 345798 - RNA, 19 nt, Homo sapiens
  misc_RNA (1)...(19): siRNA sense strand
uggugugguuggugaauau

SEQ ID NO: 345799 - RNA, 19 nt, Homo sapiens
  misc_RNA (1)...(19): siRNA sense strand
uaucaaguaccucccugaa

SEQ ID NO: 345800 - RNA, 19 nt, Homo sapiens
  misc_RNA (1)...(19): siRNA sense strand
gaagaugaggagcugacau

SEQ ID NO: 345801 - RNA, 19 nt, Homo sapiens
  misc_RNA (1)...(19): siRNA sense strand
uggcuaccauuaagucagu

SEQ ID NO: 345802 - RNA, 19 nt, Homo sapiens
  misc_RNA (1)...(19): siRNA sense strand
gcucuuccaaucuccauca

SEQ ID NO: 345803 - RNA, 19 nt, Homo sapiens
  misc_RNA (1)...(19): siRNA sense strand
ugguuugugccuuacauua

SEQ ID NO: 345804 - RNA, 19 nt, Homo sapiens
  misc_RNA (1)...(19): siRNA sense strand
ugguaaagccucagcaaca

SEQ ID NO: 345805 - RNA, 19 nt, Homo sapiens
  misc_RNA (1)...(19): siRNA sense strand
uggauugggagauuucauu

SEQ ID NO: 345806 - RNA, 19 nt, Homo sapiens
  misc_RNA (1)...(19): siRNA sense strand
gcucucauuuacuccucaa

SEQ ID NO: 345807 - RNA, 19 nt, Homo sapiens
  misc_RNA (1)...(19): siRNA sense strand
gcgccaagcaugugaucau

SEQ ID NO: 345808 - RNA, 19 nt, Homo sapiens
  misc_RNA (1)...(19): siRNA sense strand
gagcugacauugaaauaug

SEQ ID NO: 345809 - RNA, 19 nt, Homo sapiens
  misc_RNA (1)...(19): siRNA sense strand
cagcaggcauaucucauua

SEQ ID NO: 345810 - RNA, 19 nt, Homo sapiens
  misc_RNA (1)...(19): siRNA sense strand
gaaagggagucacaagaca

SEQ ID NO: 345811 - RNA, 19 nt, Homo sapiens
  misc_RNA (1)...(19): siRNA sense strand
ucaaguaccucccugaaug

SEQ ID NO: 345812 - RNA, 19 nt, Homo sapiens
  misc_RNA (1)...(19): siRNA sense strand
ggagcaagaugaggaagaa

SEQ ID NO: 345813 - RNA, 19 nt, Homo sapiens
  misc_RNA (1)...(19): siRNA sense strand
ugaaacagcucaggagaga

SEQ ID NO: 345814 - RNA, 19 nt, Homo sapiens
  misc_RNA (1)...(19): siRNA sense strand
gcccugcacucaauucuga

SEQ ID NO: 345815 - RNA, 19 nt, Homo sapiens
  misc_RNA (1)...(19): siRNA sense strand
gacaaccaccugagcaaua

SEQ ID NO: 345816 - RNA, 19 nt, Homo sapiens
  misc_RNA (1)...(19): siRNA sense strand
auccaugccuggcuuauua

SEQ ID NO: 345817 - RNA, 19 nt, Homo sapiens
  misc_RNA (1)...(19): siRNA sense strand
aaacagcucaggagagaaa

SEQ ID NO: 345818 - RNA, 19 nt, Homo sapiens
  misc_RNA (1)...(19): siRNA sense strand
gcacagaaagggagucaca

SEQ ID NO: 345819 - RNA, 19 nt, Homo sapiens
  misc_RNA (1)...(19): siRNA sense strand
gaugaggagcugacauuga

SEQ ID NO: 345820 - RNA, 19 nt, Homo sapiens
  misc_RNA (1)...(19): siRNA sense strand
ggucguggcuaccauuaag

SEQ ID NO: 345821 - RNA, 19 nt, Homo sapiens
  misc_RNA (1)...(19): siRNA sense strand
augaggagcugacauugaa

SEQ ID NO: 345822 - RNA, 19 nt, Homo sapiens
  misc_RNA (1)...(19): siRNA sense strand
agagagcccugcacucaau

SEQ ID NO: 345823 - RNA, 19 nt, Homo sapiens
  misc_RNA (1)...(19): siRNA sense strand
gaugggcagcuaaucuaua

SEQ ID NO: 345824 - RNA, 19 nt, Homo sapiens
  misc_RNA (1)...(19): siRNA sense strand
aaauacaggugcuauaagg

SEQ ID NO: 345825 - RNA, 19 nt, Homo sapiens
  misc_RNA (1)...(19): siRNA sense strand
ccucaacaauggugugguu

SEQ ID NO: 345826 - RNA, 19 nt, Homo sapiens
  misc_RNA (1)...(19): siRNA sense strand
uggugguucuguauaaaua

SEQ ID NO: 345827 - RNA, 19 nt, Homo sapiens
  misc_RNA (1)...(19): siRNA sense strand
ucauggcccugguguuuau

SEQ ID NO: 345828 - RNA, 19 nt, Homo sapiens
  misc_RNA (1)...(19): siRNA sense strand
ccagagagcccugcacuca

SEQ ID NO: 345829 - RNA, 19 nt, Homo sapiens
  misc_RNA (1)...(19): siRNA sense strand
gcucaggagagaaaugaaa

SEQ ID NO: 345830 - RNA, 19 nt, Homo sapiens
  misc_RNA (1)...(19): siRNA sense strand
gaaagguccacuucguaug

SEQ ID NO: 345831 - RNA, 19 nt, Homo sapiens
  misc_RNA (1)...(19): siRNA sense strand
cagaagauaccgagacugu

SEQ ID NO: 345832 - RNA, 19 nt, Homo sapiens
  misc_RNA (1)...(19): siRNA sense strand
uaacguugcuguggacuac

SEQ ID NO: 345833 - RNA, 19 nt, Homo sapiens
  misc_RNA (1)...(19): siRNA sense strand
gcaagaugaggaagaagau

SEQ ID NO: 345834 - RNA, 19 nt, Homo sapiens
  misc_RNA (1)...(19): siRNA sense strand
ccucauggcccugguguuu

SEQ ID NO: 345835 - RNA, 19 nt, Homo sapiens
  misc_RNA (1)...(19): siRNA sense strand
ggacuacauuacuguugca

SEQ ID NO: 345836 - RNA, 19 nt, Homo sapiens
  misc_RNA (1)...(19): siRNA sense strand
ggaaggaugggcagcuaau

SEQ ID NO: 345837 - RNA, 19 nt, Homo sapiens
  misc_RNA (1)...(19): siRNA sense strand
gaaauauggcgccaagcau

SEQ ID NO: 345838 - RNA, 19 nt, Homo sapiens
  misc_RNA (1)...(19): siRNA sense strand
gagaacggcaggagcacaa

SEQ ID NO: 345839 - RNA, 19 nt, Homo sapiens
  misc_RNA (1)...(19): siRNA sense strand
caaaggagaguauccaaaa

SEQ ID NO: 345840 - RNA, 19 nt, Homo sapiens
  misc_RNA (1)...(19): siRNA sense strand
gaagcucaaaggagaguau

SEQ ID NO: 345841 - RNA, 19 nt, Homo sapiens
  misc_RNA (1)...(19): siRNA sense strand
gcacuccugaucuggaauu

SEQ ID NO: 345842 - RNA, 19 nt, Homo sapiens
  misc_RNA (1)...(19): siRNA sense strand
gcuguggacuacauuacug

SEQ ID NO: 345843 - RNA, 19 nt, Homo sapiens
  misc_RNA (1)...(19): siRNA sense strand
ucugaaugcugccaucaug

SEQ ID NO: 345844 - RNA, 19 nt, Homo sapiens
  misc_RNA (1)...(19): siRNA sense strand
gagagaaaugaaacgcuuu

SEQ ID NO: 345845 - RNA, 19 nt, Homo sapiens
  misc_RNA (1)...(19): siRNA sense strand
ggagcugacauugaaauau

SEQ ID NO: 345846 - RNA, 19 nt, Homo sapiens
  misc_RNA (1)...(19): siRNA sense strand
ccagcaggcauaucucauu

SEQ ID NO: 345847 - RNA, 19 nt, Homo sapiens
  misc_RNA (1)...(19): siRNA sense strand
ccagagggacagucaucua

SEQ ID NO: 345848 - RNA, 19 nt, Homo sapiens
  misc_RNA (1)...(19): siRNA sense strand
cagaaagggagucacaaga

SEQ ID NO: 345849 - RNA, 19 nt, Homo sapiens
  misc_RNA (1)...(19): siRNA sense strand
ucaaaggagaguauccaaa

SEQ ID NO: 345850 - RNA, 19 nt, Homo sapiens
  misc_RNA (1)...(19): siRNA sense strand
ccaaguauaaugcagaaag

SEQ ID NO: 345851 - RNA, 19 nt, Homo sapiens
  misc_RNA (1)...(19): siRNA sense strand
aagaugaggagcugacauu

SEQ ID NO: 345852 - RNA, 19 nt, Homo sapiens
  misc_RNA (1)...(19): siRNA sense strand
acccugagccauuaucuaa

SEQ ID NO: 345853 - RNA, 19 nt, Homo sapiens
  misc_RNA (1)...(19): siRNA sense strand
uggcucaucuuggcuguga

SEQ ID NO: 345854 - RNA, 19 nt, Homo sapiens
  misc_RNA (1)...(19): siRNA sense strand
gcccugguguuuaucaagu

SEQ ID NO: 345855 - RNA, 19 nt, Homo sapiens
  misc_RNA (1)...(19): siRNA sense strand
ggacaaccaccugagcaau

SEQ ID NO: 345856 - RNA, 19 nt, Homo sapiens
  misc_RNA (1)...(19): siRNA sense strand
gaggagcugacauugaaau

SEQ ID NO: 345857 - RNA, 19 nt, Homo sapiens
  misc_RNA (1)...(19): siRNA sense strand
ggcaggugguggagcaaga

SEQ ID NO: 345858 - RNA, 19 nt, Homo sapiens
  misc_RNA (1)...(19): siRNA sense strand
cauuaagucagucagcuuu

SEQ ID NO: 345859 - RNA, 19 nt, Homo sapiens
  misc_RNA (1)...(19): siRNA sense strand
ugaaauauggcgccaagca

SEQ ID NO: 345860 - RNA, 19 nt, Homo sapiens
  misc_RNA (1)...(19): siRNA sense strand
uaucaucucuauuguugcu

SEQ ID NO: 345861 - RNA, 19 nt, Homo sapiens
  misc_RNA (1)...(19): siRNA sense strand
gcucaucuuggcugugauu

SEQ ID NO: 345862 - RNA, 19 nt, Homo sapiens
  misc_RNA (1)...(19): siRNA sense strand
gguguggugggaaugauuu

SEQ ID NO: 345863 - RNA, 19 nt, Homo sapiens
  misc_RNA (1)...(19): siRNA sense strand
ggacugcguggcucaucuu

SEQ ID NO: 345864 - RNA, 19 nt, Homo sapiens
  misc_RNA (1)...(19): siRNA sense strand
ggaugggcagcuaaucuau

SEQ ID NO: 345865 - RNA, 19 nt, Homo sapiens
  misc_RNA (1)...(19): siRNA sense strand
gcaggagcacaacgacaga

SEQ ID NO: 345866 - RNA, 19 nt, Homo sapiens
  misc_RNA (1)...(19): siRNA sense strand
ccggaaggaugggcagcua

SEQ ID NO: 345867 - RNA, 19 nt, Homo sapiens
  misc_RNA (1)...(19): siRNA sense strand
agacacuguugcagagaau

SEQ ID NO: 345868 - RNA, 19 nt, Homo sapiens
  misc_RNA (1)...(19): siRNA sense strand
ggagucacaagacacuguu

SEQ ID NO: 345869 - RNA, 19 nt, Homo sapiens
  misc_RNA (1)...(19): siRNA sense strand
aagaugaggaagaagauga

SEQ ID NO: 345870 - RNA, 19 nt, Homo sapiens
  misc_RNA (1)...(19): siRNA sense strand
uaaauacaggugcuauaag

SEQ ID NO: 345871 - RNA, 19 nt, Homo sapiens
  misc_RNA (1)...(19): siRNA sense strand
cagcucaggagagaaauga

SEQ ID NO: 345872 - RNA, 19 nt, Homo sapiens
  misc_RNA (1)...(19): siRNA sense strand
aagacacuguugcagagaa

SEQ ID NO: 345873 - RNA, 19 nt, Homo sapiens
  misc_RNA (1)...(19): siRNA sense strand
uuaagucagucagcuuuua

SEQ ID NO: 345874 - RNA, 19 nt, Homo sapiens
  misc_RNA (1)...(19): siRNA sense strand
acaaccaccugagcaauac

SEQ ID NO: 345875 - RNA, 19 nt, Homo sapiens
  misc_RNA (1)...(19): siRNA sense strand
cacagaagauaccgagacu

SEQ ID NO: 345876 - RNA, 19 nt, Homo sapiens
  misc_RNA (1)...(19): siRNA sense strand
ccuggugguucuguauaaa

SEQ ID NO: 345877 - RNA, 19 nt, Homo sapiens
  misc_RNA (1)...(19): siRNA sense strand
uggugugguuggugaauau

SEQ ID NO: 345878 - RNA, 19 nt, Homo sapiens
  misc_RNA (1)...(19): siRNA sense strand
uaucaaguaccucccugaa

SEQ ID NO: 345879 - RNA, 19 nt, Homo sapiens
  misc_RNA (1)...(19): siRNA sense strand
gaagaugaggagcugacau

SEQ ID NO: 345880 - RNA, 19 nt, Homo sapiens
  misc_RNA (1)...(19): siRNA sense strand
uggcuaccauuaagucagu

SEQ ID NO: 345881 - RNA, 19 nt, Homo sapiens
  misc_RNA (1)...(19): siRNA sense strand
gcucucauuuacuccucaa

SEQ ID NO: 345882 - RNA, 19 nt, Homo sapiens
  misc_RNA (1)...(19): siRNA sense strand
gcgccaagcaugugaucau

SEQ ID NO: 345883 - RNA, 19 nt, Homo sapiens
  misc_RNA (1)...(19): siRNA sense strand
gcuaaucuauaccccauuc

SEQ ID NO: 345884 - RNA, 19 nt, Homo sapiens
  misc_RNA (1)...(19): siRNA sense strand
gaaggaugggcagcuaauc

SEQ ID NO: 345885 - RNA, 19 nt, Homo sapiens
  misc_RNA (1)...(19): siRNA sense strand
cagagggacagucaucuag

SEQ ID NO: 345886 - RNA, 19 nt, Homo sapiens
  misc_RNA (1)...(19): siRNA sense strand
uccuggugguucuguauaa

SEQ ID NO: 345887 - RNA, 19 nt, Homo sapiens
  misc_RNA (1)...(19): siRNA sense strand
gaaugcugccaucaugauc

SEQ ID NO: 345888 - RNA, 19 nt, Homo sapiens
  misc_RNA (1)...(19): siRNA sense strand
ugaaugcugccaucaugau

SEQ ID NO: 345889 - RNA, 19 nt, Homo sapiens
  misc_RNA (1)...(19): siRNA sense strand
cucauuuacuccucaacaa

SEQ ID NO: 345890 - RNA, 19 nt, Homo sapiens
  misc_RNA (1)...(19): siRNA sense strand
caaguaccucccugaaugg

SEQ ID NO: 345891 - RNA, 19 nt, Homo sapiens
  misc_RNA (1)...(19): siRNA sense strand
uaccugcaccguuguccua

SEQ ID NO: 345892 - RNA, 19 nt, Homo sapiens
  misc_RNA (1)...(19): siRNA sense strand
augccuggcuuauuauauc

SEQ ID NO: 345893 - RNA, 19 nt, Homo sapiens
  misc_RNA (1)...(19): siRNA sense strand
cagugucauuguugucaug

SEQ ID NO: 345894 - RNA, 19 nt, Homo sapiens
  misc_RNA (1)...(19): siRNA sense strand
cugcaccguuguccuacuu

SEQ ID NO: 345895 - RNA, 19 nt, Homo sapiens
  misc_RNA (1)...(19): siRNA sense strand
aggaugggcagcuaaucua

SEQ ID NO: 345896 - RNA, 19 nt, Homo sapiens
  misc_RNA (1)...(19): siRNA sense strand
gggagucacaagacacugu

SEQ ID NO: 345897 - RNA, 19 nt, Homo sapiens
  misc_RNA (1)...(19): siRNA sense strand
ccaugccuggcuuauuaua

SEQ ID NO: 345898 - RNA, 19 nt, Homo sapiens
  misc_RNA (1)...(19): siRNA sense strand
gaguuaagcugauaaauga

SEQ ID NO: 345899 - RNA, 19 nt, Homo sapiens
  misc_RNA (1)...(19): siRNA sense strand
ggacagaguuaagcugaua

SEQ ID NO: 345900 - RNA, 19 nt, Homo sapiens
  misc_RNA (1)...(19): siRNA sense strand
uuagagaacucaaccaaua

SEQ ID NO: 345901 - RNA, 19 nt, Homo sapiens
  misc_RNA (1)...(19): siRNA sense strand
acagcaagccuuuguauuu

SEQ ID NO: 345902 - RNA, 19 nt, Homo sapiens
  misc_RNA (1)...(19): siRNA sense strand
cgaacuauuuccuccagua

SEQ ID NO: 345903 - RNA, 19 nt, Homo sapiens
  misc_RNA (1)...(19): siRNA sense strand
cagcaagccuuuguauuug

SEQ ID NO: 345904 - RNA, 19 nt, Homo sapiens
  misc_RNA (1)...(19): siRNA sense strand
gcaagcuguuugucuuuga

SEQ ID NO: 345905 - RNA, 19 nt, Homo sapiens
  misc_RNA (1)...(19): siRNA sense strand
caaccgcaacgaacuauuu

SEQ ID NO: 345906 - RNA, 19 nt, Homo sapiens
  misc_RNA (1)...(19): siRNA sense strand
uaaacgaggucaguucaga

SEQ ID NO: 345907 - RNA, 19 nt, Homo sapiens
  misc_RNA (1)...(19): siRNA sense strand
agaggaagccugugagaaa

SEQ ID NO: 345908 - RNA, 19 nt, Homo sapiens
  misc_RNA (1)...(19): siRNA sense strand
gaacaugagcgagcgaguu

SEQ ID NO: 345909 - RNA, 19 nt, Homo sapiens
  misc_RNA (1)...(19): siRNA sense strand
gaagaggaagccugugaga

SEQ ID NO: 345910 - RNA, 19 nt, Homo sapiens
  misc_RNA (1)...(19): siRNA sense strand
aaaugcagcugccgaguca

SEQ ID NO: 345911 - RNA, 19 nt, Homo sapiens
  misc_RNA (1)...(19): siRNA sense strand
gaacuauuuccuccaguau

SEQ ID NO: 345912 - RNA, 19 nt, Homo sapiens
  misc_RNA (1)...(19): siRNA sense strand
ggaaguguuuguuggaaaa

SEQ ID NO: 345913 - RNA, 19 nt, Homo sapiens
  misc_RNA (1)...(19): siRNA sense strand
guauuuggccagaacauga

SEQ ID NO: 345914 - RNA, 19 nt, Homo sapiens
  misc_RNA (1)...(19): siRNA sense strand
acuauuuccuccaguauau

SEQ ID NO: 345915 - RNA, 19 nt, Homo sapiens
  misc_RNA (1)...(19): siRNA sense strand
agaguuaagcugauaaaug

SEQ ID NO: 345916 - RNA, 19 nt, Homo sapiens
  misc_RNA (1)...(19): siRNA sense strand
gcggaaguguuuguuggaa

SEQ ID NO: 345917 - RNA, 19 nt, Homo sapiens
  misc_RNA (1)...(19): siRNA sense strand
ggagagcaauguguuacag

SEQ ID NO: 345918 - RNA, 19 nt, Homo sapiens
  misc_RNA (1)...(19): siRNA sense strand
ccacacagcaagccuuugu

SEQ ID NO: 345919 - RNA, 19 nt, Homo sapiens
  misc_RNA (1)...(19): siRNA sense strand
cggaaguguuuguuggaaa

SEQ ID NO: 345920 - RNA, 19 nt, Homo sapiens
  misc_RNA (1)...(19): siRNA sense strand
ggagaaagagccccagaaa

SEQ ID NO: 345921 - RNA, 19 nt, Homo sapiens
  misc_RNA (1)...(19): siRNA sense strand
gcaauguguuacagaugca

SEQ ID NO: 345922 - RNA, 19 nt, Homo sapiens
  misc_RNA (1)...(19): siRNA sense strand
gaggaagccugugagaaaa

SEQ ID NO: 345923 - RNA, 19 nt, Homo sapiens
  misc_RNA (1)...(19): siRNA sense strand
gagcaauguguuacagaug

SEQ ID NO: 345924 - RNA, 19 nt, Homo sapiens
  misc_RNA (1)...(19): siRNA sense strand
gcucagacucaaugacaug

SEQ ID NO: 345925 - RNA, 19 nt, Homo sapiens
  misc_RNA (1)...(19): siRNA sense strand
guuaagcugauaaaugaga

SEQ ID NO: 345926 - RNA, 19 nt, Homo sapiens
  misc_RNA (1)...(19): siRNA sense strand
guccagcaaugccucugaa

SEQ ID NO: 345927 - RNA, 19 nt, Homo sapiens
  misc_RNA (1)...(19): siRNA sense strand
agagcaauguguuacagau

SEQ ID NO: 345928 - RNA, 19 nt, Homo sapiens
  misc_RNA (1)...(19): siRNA sense strand
acacagcaagccuuuguau

SEQ ID NO: 345929 - RNA, 19 nt, Homo sapiens
  misc_RNA (1)...(19): siRNA sense strand
gaugacggcacacuacagu

SEQ ID NO: 345930 - RNA, 19 nt, Homo sapiens
  misc_RNA (1)...(19): siRNA sense strand
gggcugcucagacucaaug

SEQ ID NO: 345931 - RNA, 19 nt, Homo sapiens
  misc_RNA (1)...(19): siRNA sense strand
gugcaagcuguuugucuuu

SEQ ID NO: 345932 - RNA, 19 nt, Homo sapiens
  misc_RNA (1)...(19): siRNA sense strand
cgacgccuccagcaacaaa

SEQ ID NO: 345933 - RNA, 19 nt, Homo sapiens
  misc_RNA (1)...(19): siRNA sense strand
gagagcaauguguuacaga

SEQ ID NO: 345934 - RNA, 19 nt, Homo sapiens
  misc_RNA (1)...(19): siRNA sense strand
aacaugagcgagcgaguuu

SEQ ID NO: 345935 - RNA, 19 nt, Homo sapiens
  misc_RNA (1)...(19): siRNA sense strand
uacaagcuccgcagccaaa

SEQ ID NO: 345936 - RNA, 19 nt, Homo sapiens
  misc_RNA (1)...(19): siRNA sense strand
ccagcaaugccucugaaga

SEQ ID NO: 345937 - RNA, 19 nt, Homo sapiens
  misc_RNA (1)...(19): siRNA sense strand
ggcggagagcaauguguua

SEQ ID NO: 345938 - RNA, 19 nt, Homo sapiens
  misc_RNA (1)...(19): siRNA sense strand
gagaaagagccccagaaaa

SEQ ID NO: 345939 - RNA, 19 nt, Homo sapiens
  misc_RNA (1)...(19): siRNA sense strand
guauuugggcagaacuuga

SEQ ID NO: 345940 - RNA, 19 nt, Homo sapiens
  misc_RNA (1)...(19): siRNA sense strand
agugcaagcuguuugucuu

SEQ ID NO: 345941 - RNA, 19 nt, Homo sapiens
  misc_RNA (1)...(19): siRNA sense strand
gggacagaguuaagcugau

SEQ ID NO: 345942 - RNA, 19 nt, Homo sapiens
  misc_RNA (1)...(19): siRNA sense strand
gacagaguuaagcugauaa

SEQ ID NO: 345943 - RNA, 19 nt, Homo sapiens
  misc_RNA (1)...(19): siRNA sense strand
guuuagagaacucaaccaa

SEQ ID NO: 345944 - RNA, 19 nt, Homo sapiens
  misc_RNA (1)...(19): siRNA sense strand
ggaggaggcggagagcaau

SEQ ID NO: 345945 - RNA, 19 nt, Homo sapiens
  misc_RNA (1)...(19): siRNA sense strand
ucagaugccaacagggaaa

SEQ ID NO: 345946 - RNA, 19 nt, Homo sapiens
  misc_RNA (1)...(19): siRNA sense strand
caagccagaagcccaagga

SEQ ID NO: 345947 - RNA, 19 nt, Homo sapiens
  misc_RNA (1)...(19): siRNA sense strand
gagaacucaaccaauagug

SEQ ID NO: 345948 - RNA, 19 nt, Homo sapiens
  misc_RNA (1)...(19): siRNA sense strand
cugaagaggaagccuguga

SEQ ID NO: 345949 - RNA, 19 nt, Homo sapiens
  misc_RNA (1)...(19): siRNA sense strand
aagccgacauggagaaugc

SEQ ID NO: 345950 - RNA, 19 nt, Homo sapiens
  misc_RNA (1)...(19): siRNA sense strand
uagagaacucaaccaauag

SEQ ID NO: 345951 - RNA, 19 nt, Homo sapiens
  misc_RNA (1)...(19): siRNA sense strand
gaguuaagcugauaaauga

SEQ ID NO: 345952 - RNA, 19 nt, Homo sapiens
  misc_RNA (1)...(19): siRNA sense strand
ggacagaguuaagcugaua

SEQ ID NO: 345953 - RNA, 19 nt, Homo sapiens
  misc_RNA (1)...(19): siRNA sense strand
uuagagaacucaaccaaua

SEQ ID NO: 345954 - RNA, 19 nt, Homo sapiens
  misc_RNA (1)...(19): siRNA sense strand
acagcaagccuuuguauuu

SEQ ID NO: 345955 - RNA, 19 nt, Homo sapiens
  misc_RNA (1)...(19): siRNA sense strand
cgaacuauuuccuccagua

SEQ ID NO: 345956 - RNA, 19 nt, Homo sapiens
  misc_RNA (1)...(19): siRNA sense strand
cagcaagccuuuguauuug

SEQ ID NO: 345957 - RNA, 19 nt, Homo sapiens
  misc_RNA (1)...(19): siRNA sense strand
gcaagcuguuugucuuuga

SEQ ID NO: 345958 - RNA, 19 nt, Homo sapiens
  misc_RNA (1)...(19): siRNA sense strand
caaccgcaacgaacuauuu

SEQ ID NO: 345959 - RNA, 19 nt, Homo sapiens
  misc_RNA (1)...(19): siRNA sense strand
uaaacgaggucaguucaga

SEQ ID NO: 345960 - RNA, 19 nt, Homo sapiens
  misc_RNA (1)...(19): siRNA sense strand
agaggaagccugugagaaa

SEQ ID NO: 345961 - RNA, 19 nt, Homo sapiens
  misc_RNA (1)...(19): siRNA sense strand
gaacaugagcgagcgaguu

SEQ ID NO: 345962 - RNA, 19 nt, Homo sapiens
  misc_RNA (1)...(19): siRNA sense strand
gaagaggaagccugugaga

SEQ ID NO: 345963 - RNA, 19 nt, Homo sapiens
  misc_RNA (1)...(19): siRNA sense strand
aaaugcagcugccgaguca

SEQ ID NO: 345964 - RNA, 19 nt, Homo sapiens
  misc_RNA (1)...(19): siRNA sense strand
gaacuauuuccuccaguau

SEQ ID NO: 345965 - RNA, 19 nt, Homo sapiens
  misc_RNA (1)...(19): siRNA sense strand
ggaaguguuuguuggaaaa

SEQ ID NO: 345966 - RNA, 19 nt, Homo sapiens
  misc_RNA (1)...(19): siRNA sense strand
guauuuggccagaacauga

SEQ ID NO: 345967 - RNA, 19 nt, Homo sapiens
  misc_RNA (1)...(19): siRNA sense strand
acuauuuccuccaguauau

SEQ ID NO: 345968 - RNA, 19 nt, Homo sapiens
  misc_RNA (1)...(19): siRNA sense strand
agaguuaagcugauaaaug

SEQ ID NO: 345969 - RNA, 19 nt, Homo sapiens
  misc_RNA (1)...(19): siRNA sense strand
gcggaaguguuuguuggaa

SEQ ID NO: 345970 - RNA, 19 nt, Homo sapiens
  misc_RNA (1)...(19): siRNA sense strand
ggagagcaauguguuacag

SEQ ID NO: 345971 - RNA, 19 nt, Homo sapiens
  misc_RNA (1)...(19): siRNA sense strand
ccacacagcaagccuuugu

SEQ ID NO: 345972 - RNA, 19 nt, Homo sapiens
  misc_RNA (1)...(19): siRNA sense strand
cggaaguguuuguuggaaa

SEQ ID NO: 345973 - RNA, 19 nt, Homo sapiens
  misc_RNA (1)...(19): siRNA sense strand
ggagaaagagccccagaaa

SEQ ID NO: 345974 - RNA, 19 nt, Homo sapiens
  misc_RNA (1)...(19): siRNA sense strand
gcaauguguuacagaugca

SEQ ID NO: 345975 - RNA, 19 nt, Homo sapiens
  misc_RNA (1)...(19): siRNA sense strand
gaggaagccugugagaaaa

SEQ ID NO: 345976 - RNA, 19 nt, Homo sapiens
  misc_RNA (1)...(19): siRNA sense strand
gagcaauguguuacagaug

SEQ ID NO: 345977 - RNA, 19 nt, Homo sapiens
  misc_RNA (1)...(19): siRNA sense strand
gcucagacucaaugacaug

SEQ ID NO: 345978 - RNA, 19 nt, Homo sapiens
  misc_RNA (1)...(19): siRNA sense strand
guuaagcugauaaaugaga

SEQ ID NO: 345979 - RNA, 19 nt, Homo sapiens
  misc_RNA (1)...(19): siRNA sense strand
guccagcaaugccucugaa

SEQ ID NO: 345980 - RNA, 19 nt, Homo sapiens
  misc_RNA (1)...(19): siRNA sense strand
agagcaauguguuacagau

SEQ ID NO: 345981 - RNA, 19 nt, Homo sapiens
  misc_RNA (1)...(19): siRNA sense strand
acacagcaagccuuuguau

SEQ ID NO: 345982 - RNA, 19 nt, Homo sapiens
  misc_RNA (1)...(19): siRNA sense strand
gaugacggcacacuacagu

SEQ ID NO: 345983 - RNA, 19 nt, Homo sapiens
  misc_RNA (1)...(19): siRNA sense strand
gggcugcucagacucaaug

SEQ ID NO: 345984 - RNA, 19 nt, Homo sapiens
  misc_RNA (1)...(19): siRNA sense strand
gugcaagcuguuugucuuu

SEQ ID NO: 345985 - RNA, 19 nt, Homo sapiens
  misc_RNA (1)...(19): siRNA sense strand
cgacgccuccagcaacaaa

SEQ ID NO: 345986 - RNA, 19 nt, Homo sapiens
  misc_RNA (1)...(19): siRNA sense strand
gagagcaauguguuacaga

SEQ ID NO: 345987 - RNA, 19 nt, Homo sapiens
  misc_RNA (1)...(19): siRNA sense strand
aacaugagcgagcgaguuu

SEQ ID NO: 345988 - RNA, 19 nt, Homo sapiens
  misc_RNA (1)...(19): siRNA sense strand
uacaagcuccgcagccaaa

SEQ ID NO: 345989 - RNA, 19 nt, Homo sapiens
  misc_RNA (1)...(19): siRNA sense strand
ccagcaaugccucugaaga

SEQ ID NO: 345990 - RNA, 19 nt, Homo sapiens
  misc_RNA (1)...(19): siRNA sense strand
ggcggagagcaauguguua

SEQ ID NO: 345991 - RNA, 19 nt, Homo sapiens
  misc_RNA (1)...(19): siRNA sense strand
gagaaagagccccagaaaa

SEQ ID NO: 345992 - RNA, 19 nt, Homo sapiens
  misc_RNA (1)...(19): siRNA sense strand
guauuugggcagaacuuga

SEQ ID NO: 345993 - RNA, 19 nt, Homo sapiens
  misc_RNA (1)...(19): siRNA sense strand
agugcaagcuguuugucuu

SEQ ID NO: 345994 - RNA, 19 nt, Homo sapiens
  misc_RNA (1)...(19): siRNA sense strand
gggacagaguuaagcugau

SEQ ID NO: 345995 - RNA, 19 nt, Homo sapiens
  misc_RNA (1)...(19): siRNA sense strand
gacagaguuaagcugauaa

SEQ ID NO: 345996 - RNA, 19 nt, Homo sapiens
  misc_RNA (1)...(19): siRNA sense strand
guuuagagaacucaaccaa

SEQ ID NO: 345997 - RNA, 19 nt, Homo sapiens
  misc_RNA (1)...(19): siRNA sense strand
ggaggaggcggagagcaau

SEQ ID NO: 345998 - RNA, 19 nt, Homo sapiens
  misc_RNA (1)...(19): siRNA sense strand
ucagaugccaacagggaaa

SEQ ID NO: 345999 - RNA, 19 nt, Homo sapiens
  misc_RNA (1)...(19): siRNA sense strand
caagccagaagcccaagga

SEQ ID NO: 346000 - RNA, 19 nt, Homo sapiens
  misc_RNA (1)...(19): siRNA sense strand
gagaacucaaccaauagug

SEQ ID NO: 346001 - RNA, 19 nt, Homo sapiens
  misc_RNA (1)...(19): siRNA sense strand
cugaagaggaagccuguga

SEQ ID NO: 346002 - RNA, 19 nt, Homo sapiens
  misc_RNA (1)...(19): siRNA sense strand
aagccgacauggagaaugc

SEQ ID NO: 346003 - RNA, 19 nt, Homo sapiens
  misc_RNA (1)...(19): siRNA sense strand
uagagaacucaaccaauag

SEQ ID NO: 346004 - RNA, 19 nt, Homo sapiens
  misc_RNA (1)...(19): siRNA sense strand
cgaacuauuuccuccagua

SEQ ID NO: 346005 - RNA, 19 nt, Homo sapiens
  misc_RNA (1)...(19): siRNA sense strand
caaccgcaacgaacuauuu

SEQ ID NO: 346006 - RNA, 19 nt, Homo sapiens
  misc_RNA (1)...(19): siRNA sense strand
gaacuauuuccuccaguau

SEQ ID NO: 346007 - RNA, 19 nt, Homo sapiens
  misc_RNA (1)...(19): siRNA sense strand
acuauuuccuccaguauau

SEQ ID NO: 346008 - RNA, 19 nt, Homo sapiens
  misc_RNA (1)...(19): siRNA sense strand
gaguuaagcugauaaauga

SEQ ID NO: 346009 - RNA, 19 nt, Homo sapiens
  misc_RNA (1)...(19): siRNA sense strand
ggacagaguuaagcugaua

SEQ ID NO: 346010 - RNA, 19 nt, Homo sapiens
  misc_RNA (1)...(19): siRNA sense strand
uuagagaacucaaccaaua

SEQ ID NO: 346011 - RNA, 19 nt, Homo sapiens
  misc_RNA (1)...(19): siRNA sense strand
acagcaagccuuuguauuu

SEQ ID NO: 346012 - RNA, 19 nt, Homo sapiens
  misc_RNA (1)...(19): siRNA sense strand
cgaacuauuuccuccagua

SEQ ID NO: 346013 - RNA, 19 nt, Homo sapiens
  misc_RNA (1)...(19): siRNA sense strand
cagcaagccuuuguauuug

SEQ ID NO: 346014 - RNA, 19 nt, Homo sapiens
  misc_RNA (1)...(19): siRNA sense strand
gcaagcuguuugucuuuga

SEQ ID NO: 346015 - RNA, 19 nt, Homo sapiens
  misc_RNA (1)...(19): siRNA sense strand
caaccgcaacgaacuauuu

SEQ ID NO: 346016 - RNA, 19 nt, Homo sapiens
  misc_RNA (1)...(19): siRNA sense strand
uaaacgaggucaguucaga

SEQ ID NO: 346017 - RNA, 19 nt, Homo sapiens
  misc_RNA (1)...(19): siRNA sense strand
agaggaagccugugagaaa

SEQ ID NO: 346018 - RNA, 19 nt, Homo sapiens
  misc_RNA (1)...(19): siRNA sense strand
gaacaugagcgagcgaguu

SEQ ID NO: 346019 - RNA, 19 nt, Homo sapiens
  misc_RNA (1)...(19): siRNA sense strand
gaagaggaagccugugaga

SEQ ID NO: 346020 - RNA, 19 nt, Homo sapiens
  misc_RNA (1)...(19): siRNA sense strand
aaaugcagcugccgaguca

SEQ ID NO: 346021 - RNA, 19 nt, Homo sapiens
  misc_RNA (1)...(19): siRNA sense strand
gaacuauuuccuccaguau

SEQ ID NO: 346022 - RNA, 19 nt, Homo sapiens
  misc_RNA (1)...(19): siRNA sense strand
ggaaguguuuguuggaaaa

SEQ ID NO: 346023 - RNA, 19 nt, Homo sapiens
  misc_RNA (1)...(19): siRNA sense strand
guauuuggccagaacauga

SEQ ID NO: 346024 - RNA, 19 nt, Homo sapiens
  misc_RNA (1)...(19): siRNA sense strand
acuauuuccuccaguauau

SEQ ID NO: 346025 - RNA, 19 nt, Homo sapiens
  misc_RNA (1)...(19): siRNA sense strand
agaguuaagcugauaaaug

SEQ ID NO: 346026 - RNA, 19 nt, Homo sapiens
  misc_RNA (1)...(19): siRNA sense strand
gcggaaguguuuguuggaa

SEQ ID NO: 346027 - RNA, 19 nt, Homo sapiens
  misc_RNA (1)...(19): siRNA sense strand
ggagagcaauguguuacag

SEQ ID NO: 346028 - RNA, 19 nt, Homo sapiens
  misc_RNA (1)...(19): siRNA sense strand
ccacacagcaagccuuugu

SEQ ID NO: 346029 - RNA, 19 nt, Homo sapiens
  misc_RNA (1)...(19): siRNA sense strand
cggaaguguuuguuggaaa

SEQ ID NO: 346030 - RNA, 19 nt, Homo sapiens
  misc_RNA (1)...(19): siRNA sense strand
ggagaaagagccccagaaa

SEQ ID NO: 346031 - RNA, 19 nt, Homo sapiens
  misc_RNA (1)...(19): siRNA sense strand
gcaauguguuacagaugca

SEQ ID NO: 346032 - RNA, 19 nt, Homo sapiens
  misc_RNA (1)...(19): siRNA sense strand
gaggaagccugugagaaaa

SEQ ID NO: 346033 - RNA, 19 nt, Homo sapiens
  misc_RNA (1)...(19): siRNA sense strand
gagcaauguguuacagaug

SEQ ID NO: 346034 - RNA, 19 nt, Homo sapiens
  misc_RNA (1)...(19): siRNA sense strand
gcucagacucaaugacaug

SEQ ID NO: 346035 - RNA, 19 nt, Homo sapiens
  misc_RNA (1)...(19): siRNA sense strand
guuaagcugauaaaugaga

SEQ ID NO: 346036 - RNA, 19 nt, Homo sapiens
  misc_RNA (1)...(19): siRNA sense strand
guccagcaaugccucugaa

SEQ ID NO: 346037 - RNA, 19 nt, Homo sapiens
  misc_RNA (1)...(19): siRNA sense strand
agagcaauguguuacagau

SEQ ID NO: 346038 - RNA, 19 nt, Homo sapiens
  misc_RNA (1)...(19): siRNA sense strand
acacagcaagccuuuguau

SEQ ID NO: 346039 - RNA, 19 nt, Homo sapiens
  misc_RNA (1)...(19): siRNA sense strand
gaugacggcacacuacagu

SEQ ID NO: 346040 - RNA, 19 nt, Homo sapiens
  misc_RNA (1)...(19): siRNA sense strand
gggcugcucagacucaaug

SEQ ID NO: 346041 - RNA, 19 nt, Homo sapiens
  misc_RNA (1)...(19): siRNA sense strand
gugcaagcuguuugucuuu

SEQ ID NO: 346042 - RNA, 19 nt, Homo sapiens
  misc_RNA (1)...(19): siRNA sense strand
cgacgccuccagcaacaaa

SEQ ID NO: 346043 - RNA, 19 nt, Homo sapiens
  misc_RNA (1)...(19): siRNA sense strand
gagagcaauguguuacaga

SEQ ID NO: 346044 - RNA, 19 nt, Homo sapiens
  misc_RNA (1)...(19): siRNA sense strand
aacaugagcgagcgaguuu

SEQ ID NO: 346045 - RNA, 19 nt, Homo sapiens
  misc_RNA (1)...(19): siRNA sense strand
uacaagcuccgcagccaaa

SEQ ID NO: 346046 - RNA, 19 nt, Homo sapiens
  misc_RNA (1)...(19): siRNA sense strand
ccagcaaugccucugaaga

SEQ ID NO: 346047 - RNA, 19 nt, Homo sapiens
  misc_RNA (1)...(19): siRNA sense strand
ggcggagagcaauguguua

SEQ ID NO: 346048 - RNA, 19 nt, Homo sapiens
  misc_RNA (1)...(19): siRNA sense strand
gagaaagagccccagaaaa

SEQ ID NO: 346049 - RNA, 19 nt, Homo sapiens
  misc_RNA (1)...(19): siRNA sense strand
guauuugggcagaacuuga

SEQ ID NO: 346050 - RNA, 19 nt, Homo sapiens
  misc_RNA (1)...(19): siRNA sense strand
agugcaagcuguuugucuu

SEQ ID NO: 346051 - RNA, 19 nt, Homo sapiens
  misc_RNA (1)...(19): siRNA sense strand
gggacagaguuaagcugau

SEQ ID NO: 346052 - RNA, 19 nt, Homo sapiens
  misc_RNA (1)...(19): siRNA sense strand
gacagaguuaagcugauaa

SEQ ID NO: 346053 - RNA, 19 nt, Homo sapiens
  misc_RNA (1)...(19): siRNA sense strand
guuuagagaacucaaccaa

SEQ ID NO: 346054 - RNA, 19 nt, Homo sapiens
  misc_RNA (1)...(19): siRNA sense strand
ggaggaggcggagagcaau

SEQ ID NO: 346055 - RNA, 19 nt, Homo sapiens
  misc_RNA (1)...(19): siRNA sense strand
ucagaugccaacagggaaa

SEQ ID NO: 346056 - RNA, 19 nt, Homo sapiens
  misc_RNA (1)...(19): siRNA sense strand
caagccagaagcccaagga

SEQ ID NO: 346057 - RNA, 19 nt, Homo sapiens
  misc_RNA (1)...(19): siRNA sense strand
gagaacucaaccaauagug

SEQ ID NO: 346058 - RNA, 19 nt, Homo sapiens
  misc_RNA (1)...(19): siRNA sense strand
cugaagaggaagccuguga

SEQ ID NO: 346059 - RNA, 19 nt, Homo sapiens
  misc_RNA (1)...(19): siRNA sense strand
aagccgacauggagaaugc

SEQ ID NO: 346060 - RNA, 19 nt, Homo sapiens
  misc_RNA (1)...(19): siRNA sense strand
uagagaacucaaccaauag

SEQ ID NO: 346061 - RNA, 19 nt, Homo sapiens
  misc_RNA (1)...(19): siRNA sense strand
gaguuaagcugauaaauga

SEQ ID NO: 346062 - RNA, 19 nt, Homo sapiens
  misc_RNA (1)...(19): siRNA sense strand
ggacagaguuaagcugaua

SEQ ID NO: 346063 - RNA, 19 nt, Homo sapiens
  misc_RNA (1)...(19): siRNA sense strand
uuagagaacucaaccaaua

SEQ ID NO: 346064 - RNA, 19 nt, Homo sapiens
  misc_RNA (1)...(19): siRNA sense strand
acagcaagccuuuguauuu

SEQ ID NO: 346065 - RNA, 19 nt, Homo sapiens
  misc_RNA (1)...(19): siRNA sense strand
cgaacuauuuccuccagua

SEQ ID NO: 346066 - RNA, 19 nt, Homo sapiens
  misc_RNA (1)...(19): siRNA sense strand
cagcaagccuuuguauuug

SEQ ID NO: 346067 - RNA, 19 nt, Homo sapiens
  misc_RNA (1)...(19): siRNA sense strand
gcaagcuguuugucuuuga

SEQ ID NO: 346068 - RNA, 19 nt, Homo sapiens
  misc_RNA (1)...(19): siRNA sense strand
caaccgcaacgaacuauuu

SEQ ID NO: 346069 - RNA, 19 nt, Homo sapiens
  misc_RNA (1)...(19): siRNA sense strand
uaaacgaggucaguucaga

SEQ ID NO: 346070 - RNA, 19 nt, Homo sapiens
  misc_RNA (1)...(19): siRNA sense strand
agaggaagccugugagaaa

SEQ ID NO: 346071 - RNA, 19 nt, Homo sapiens
  misc_RNA (1)...(19): siRNA sense strand
gaacaugagcgagcgaguu

SEQ ID NO: 346072 - RNA, 19 nt, Homo sapiens
  misc_RNA (1)...(19): siRNA sense strand
gaagaggaagccugugaga

SEQ ID NO: 346073 - RNA, 19 nt, Homo sapiens
  misc_RNA (1)...(19): siRNA sense strand
aaaugcagcugccgaguca

SEQ ID NO: 346074 - RNA, 19 nt, Homo sapiens
  misc_RNA (1)...(19): siRNA sense strand
gaacuauuuccuccaguau

SEQ ID NO: 346075 - RNA, 19 nt, Homo sapiens
  misc_RNA (1)...(19): siRNA sense strand
ggaaguguuuguuggaaaa

SEQ ID NO: 346076 - RNA, 19 nt, Homo sapiens
  misc_RNA (1)...(19): siRNA sense strand
guauuuggccagaacauga

SEQ ID NO: 346077 - RNA, 19 nt, Homo sapiens
  misc_RNA (1)...(19): siRNA sense strand
acuauuuccuccaguauau

SEQ ID NO: 346078 - RNA, 19 nt, Homo sapiens
  misc_RNA (1)...(19): siRNA sense strand
agaguuaagcugauaaaug

SEQ ID NO: 346079 - RNA, 19 nt, Homo sapiens
  misc_RNA (1)...(19): siRNA sense strand
gcggaaguguuuguuggaa

SEQ ID NO: 346080 - RNA, 19 nt, Homo sapiens
  misc_RNA (1)...(19): siRNA sense strand
ggagagcaauguguuacag

SEQ ID NO: 346081 - RNA, 19 nt, Homo sapiens
  misc_RNA (1)...(19): siRNA sense strand
ccacacagcaagccuuugu

SEQ ID NO: 346082 - RNA, 19 nt, Homo sapiens
  misc_RNA (1)...(19): siRNA sense strand
cggaaguguuuguuggaaa

SEQ ID NO: 346083 - RNA, 19 nt, Homo sapiens
  misc_RNA (1)...(19): siRNA sense strand
ggagaaagagccccagaaa

SEQ ID NO: 346084 - RNA, 19 nt, Homo sapiens
  misc_RNA (1)...(19): siRNA sense strand
gcaauguguuacagaugca

SEQ ID NO: 346085 - RNA, 19 nt, Homo sapiens
  misc_RNA (1)...(19): siRNA sense strand
gaggaagccugugagaaaa

SEQ ID NO: 346086 - RNA, 19 nt, Homo sapiens
  misc_RNA (1)...(19): siRNA sense strand
gagcaauguguuacagaug

SEQ ID NO: 346087 - RNA, 19 nt, Homo sapiens
  misc_RNA (1)...(19): siRNA sense strand
gcucagacucaaugacaug

SEQ ID NO: 346088 - RNA, 19 nt, Homo sapiens
  misc_RNA (1)...(19): siRNA sense strand
guuaagcugauaaaugaga

SEQ ID NO: 346089 - RNA, 19 nt, Homo sapiens
  misc_RNA (1)...(19): siRNA sense strand
guccagcaaugccucugaa

SEQ ID NO: 346090 - RNA, 19 nt, Homo sapiens
  misc_RNA (1)...(19): siRNA sense strand
agagcaauguguuacagau

SEQ ID NO: 346091 - RNA, 19 nt, Homo sapiens
  misc_RNA (1)...(19): siRNA sense strand
acacagcaagccuuuguau

SEQ ID NO: 346092 - RNA, 19 nt, Homo sapiens
  misc_RNA (1)...(19): siRNA sense strand
gaugacggcacacuacagu

SEQ ID NO: 346093 - RNA, 19 nt, Homo sapiens
  misc_RNA (1)...(19): siRNA sense strand
gggcugcucagacucaaug

SEQ ID NO: 346094 - RNA, 19 nt, Homo sapiens
  misc_RNA (1)...(19): siRNA sense strand
gugcaagcuguuugucuuu

SEQ ID NO: 346095 - RNA, 19 nt, Homo sapiens
  misc_RNA (1)...(19): siRNA sense strand
cgacgccuccagcaacaaa

SEQ ID NO: 346096 - RNA, 19 nt, Homo sapiens
  misc_RNA (1)...(19): siRNA sense strand
gagagcaauguguuacaga

SEQ ID NO: 346097 - RNA, 19 nt, Homo sapiens
  misc_RNA (1)...(19): siRNA sense strand
aacaugagcgagcgaguuu

SEQ ID NO: 346098 - RNA, 19 nt, Homo sapiens
  misc_RNA (1)...(19): siRNA sense strand
uacaagcuccgcagccaaa

SEQ ID NO: 346099 - RNA, 19 nt, Homo sapiens
  misc_RNA (1)...(19): siRNA sense strand
ccagcaaugccucugaaga

SEQ ID NO: 346100 - RNA, 19 nt, Homo sapiens
  misc_RNA (1)...(19): siRNA sense strand
ggcggagagcaauguguua

SEQ ID NO: 346101 - RNA, 19 nt, Homo sapiens
  misc_RNA (1)...(19): siRNA sense strand
gagaaagagccccagaaaa

SEQ ID NO: 346102 - RNA, 19 nt, Homo sapiens
  misc_RNA (1)...(19): siRNA sense strand
guauuugggcagaacuuga

SEQ ID NO: 346103 - RNA, 19 nt, Homo sapiens
  misc_RNA (1)...(19): siRNA sense strand
agugcaagcuguuugucuu

SEQ ID NO: 346104 - RNA, 19 nt, Homo sapiens
  misc_RNA (1)...(19): siRNA sense strand
gggacagaguuaagcugau

SEQ ID NO: 346105 - RNA, 19 nt, Homo sapiens
  misc_RNA (1)...(19): siRNA sense strand
gacagaguuaagcugauaa

SEQ ID NO: 346106 - RNA, 19 nt, Homo sapiens
  misc_RNA (1)...(19): siRNA sense strand
guuuagagaacucaaccaa

SEQ ID NO: 346107 - RNA, 19 nt, Homo sapiens
  misc_RNA (1)...(19): siRNA sense strand
ggaggaggcggagagcaau

SEQ ID NO: 346108 - RNA, 19 nt, Homo sapiens
  misc_RNA (1)...(19): siRNA sense strand
ucagaugccaacagggaaa

SEQ ID NO: 346109 - RNA, 19 nt, Homo sapiens
  misc_RNA (1)...(19): siRNA sense strand
caagccagaagcccaagga

SEQ ID NO: 346110 - RNA, 19 nt, Homo sapiens
  misc_RNA (1)...(19): siRNA sense strand
gagaacucaaccaauagug

SEQ ID NO: 346111 - RNA, 19 nt, Homo sapiens
  misc_RNA (1)...(19): siRNA sense strand
cugaagaggaagccuguga

SEQ ID NO: 346112 - RNA, 19 nt, Homo sapiens
  misc_RNA (1)...(19): siRNA sense strand
aagccgacauggagaaugc

SEQ ID NO: 346113 - RNA, 19 nt, Homo sapiens
  misc_RNA (1)...(19): siRNA sense strand
uagagaacucaaccaauag

SEQ ID NO: 346114 - RNA, 19 nt, Homo sapiens
  misc_RNA (1)...(19): siRNA sense strand
gaguuaagcugauaaauga

SEQ ID NO: 346115 - RNA, 19 nt, Homo sapiens
  misc_RNA (1)...(19): siRNA sense strand
ggacagaguuaagcugaua

SEQ ID NO: 346116 - RNA, 19 nt, Homo sapiens
  misc_RNA (1)...(19): siRNA sense strand
uuagagaacucaaccaaua

SEQ ID NO: 346117 - RNA, 19 nt, Homo sapiens
  misc_RNA (1)...(19): siRNA sense strand
acagcaagccuuuguauuu

SEQ ID NO: 346118 - RNA, 19 nt, Homo sapiens
  misc_RNA (1)...(19): siRNA sense strand
cgaacuauuuccuccagua

SEQ ID NO: 346119 - RNA, 19 nt, Homo sapiens
  misc_RNA (1)...(19): siRNA sense strand
cagcaagccuuuguauuug

SEQ ID NO: 346120 - RNA, 19 nt, Homo sapiens
  misc_RNA (1)...(19): siRNA sense strand
gcaagcuguuugucuuuga

SEQ ID NO: 346121 - RNA, 19 nt, Homo sapiens
  misc_RNA (1)...(19): siRNA sense strand
caaccgcaacgaacuauuu

SEQ ID NO: 346122 - RNA, 19 nt, Homo sapiens
  misc_RNA (1)...(19): siRNA sense strand
uaaacgaggucaguucaga

SEQ ID NO: 346123 - RNA, 19 nt, Homo sapiens
  misc_RNA (1)...(19): siRNA sense strand
agaggaagccugugagaaa

SEQ ID NO: 346124 - RNA, 19 nt, Homo sapiens
  misc_RNA (1)...(19): siRNA sense strand
gaacaugagcgagcgaguu

SEQ ID NO: 346125 - RNA, 19 nt, Homo sapiens
  misc_RNA (1)...(19): siRNA sense strand
gaagaggaagccugugaga

SEQ ID NO: 346126 - RNA, 19 nt, Homo sapiens
  misc_RNA (1)...(19): siRNA sense strand
aaaugcagcugccgaguca

SEQ ID NO: 346127 - RNA, 19 nt, Homo sapiens
  misc_RNA (1)...(19): siRNA sense strand
gaacuauuuccuccaguau

SEQ ID NO: 346128 - RNA, 19 nt, Homo sapiens
  misc_RNA (1)...(19): siRNA sense strand
ggaaguguuuguuggaaaa

SEQ ID NO: 346129 - RNA, 19 nt, Homo sapiens
  misc_RNA (1)...(19): siRNA sense strand
guauuuggccagaacauga

SEQ ID NO: 346130 - RNA, 19 nt, Homo sapiens
  misc_RNA (1)...(19): siRNA sense strand
acuauuuccuccaguauau

SEQ ID NO: 346131 - RNA, 19 nt, Homo sapiens
  misc_RNA (1)...(19): siRNA sense strand
agaguuaagcugauaaaug

SEQ ID NO: 346132 - RNA, 19 nt, Homo sapiens
  misc_RNA (1)...(19): siRNA sense strand
gcggaaguguuuguuggaa

SEQ ID NO: 346133 - RNA, 19 nt, Homo sapiens
  misc_RNA (1)...(19): siRNA sense strand
ggagagcaauguguuacag

SEQ ID NO: 346134 - RNA, 19 nt, Homo sapiens
  misc_RNA (1)...(19): siRNA sense strand
ccacacagcaagccuuugu

SEQ ID NO: 346135 - RNA, 19 nt, Homo sapiens
  misc_RNA (1)...(19): siRNA sense strand
cggaaguguuuguuggaaa

SEQ ID NO: 346136 - RNA, 19 nt, Homo sapiens
  misc_RNA (1)...(19): siRNA sense strand
ggagaaagagccccagaaa

SEQ ID NO: 346137 - RNA, 19 nt, Homo sapiens
  misc_RNA (1)...(19): siRNA sense strand
gcaauguguuacagaugca

SEQ ID NO: 346138 - RNA, 19 nt, Homo sapiens
  misc_RNA (1)...(19): siRNA sense strand
gaggaagccugugagaaaa

SEQ ID NO: 346139 - RNA, 19 nt, Homo sapiens
  misc_RNA (1)...(19): siRNA sense strand
gagcaauguguuacagaug

SEQ ID NO: 346140 - RNA, 19 nt, Homo sapiens
  misc_RNA (1)...(19): siRNA sense strand
gcucagacucaaugacaug

SEQ ID NO: 346141 - RNA, 19 nt, Homo sapiens
  misc_RNA (1)...(19): siRNA sense strand
guuaagcugauaaaugaga

SEQ ID NO: 346142 - RNA, 19 nt, Homo sapiens
  misc_RNA (1)...(19): siRNA sense strand
guccagcaaugccucugaa

SEQ ID NO: 346143 - RNA, 19 nt, Homo sapiens
  misc_RNA (1)...(19): siRNA sense strand
agagcaauguguuacagau

SEQ ID NO: 346144 - RNA, 19 nt, Homo sapiens
  misc_RNA (1)...(19): siRNA sense strand
acacagcaagccuuuguau

SEQ ID NO: 346145 - RNA, 19 nt, Homo sapiens
  misc_RNA (1)...(19): siRNA sense strand
gaugacggcacacuacagu

SEQ ID NO: 346146 - RNA, 19 nt, Homo sapiens
  misc_RNA (1)...(19): siRNA sense strand
gggcugcucagacucaaug

SEQ ID NO: 346147 - RNA, 19 nt, Homo sapiens
  misc_RNA (1)...(19): siRNA sense strand
gugcaagcuguuugucuuu

SEQ ID NO: 346148 - RNA, 19 nt, Homo sapiens
  misc_RNA (1)...(19): siRNA sense strand
cgacgccuccagcaacaaa

SEQ ID NO: 346149 - RNA, 19 nt, Homo sapiens
  misc_RNA (1)...(19): siRNA sense strand
gagagcaauguguuacaga

SEQ ID NO: 346150 - RNA, 19 nt, Homo sapiens
  misc_RNA (1)...(19): siRNA sense strand
aacaugagcgagcgaguuu

SEQ ID NO: 346151 - RNA, 19 nt, Homo sapiens
  misc_RNA (1)...(19): siRNA sense strand
uacaagcuccgcagccaaa

SEQ ID NO: 346152 - RNA, 19 nt, Homo sapiens
  misc_RNA (1)...(19): siRNA sense strand
ccagcaaugccucugaaga

SEQ ID NO: 346153 - RNA, 19 nt, Homo sapiens
  misc_RNA (1)...(19): siRNA sense strand
ggcggagagcaauguguua

SEQ ID NO: 346154 - RNA, 19 nt, Homo sapiens
  misc_RNA (1)...(19): siRNA sense strand
gagaaagagccccagaaaa

SEQ ID NO: 346155 - RNA, 19 nt, Homo sapiens
  misc_RNA (1)...(19): siRNA sense strand
guauuugggcagaacuuga

SEQ ID NO: 346156 - RNA, 19 nt, Homo sapiens
  misc_RNA (1)...(19): siRNA sense strand
agugcaagcuguuugucuu

SEQ ID NO: 346157 - RNA, 19 nt, Homo sapiens
  misc_RNA (1)...(19): siRNA sense strand
gggacagaguuaagcugau

SEQ ID NO: 346158 - RNA, 19 nt, Homo sapiens
  misc_RNA (1)...(19): siRNA sense strand
gacagaguuaagcugauaa

SEQ ID NO: 346159 - RNA, 19 nt, Homo sapiens
  misc_RNA (1)...(19): siRNA sense strand
guuuagagaacucaaccaa

SEQ ID NO: 346160 - RNA, 19 nt, Homo sapiens
  misc_RNA (1)...(19): siRNA sense strand
ggaggaggcggagagcaau

SEQ ID NO: 346161 - RNA, 19 nt, Homo sapiens
  misc_RNA (1)...(19): siRNA sense strand
ucagaugccaacagggaaa

SEQ ID NO: 346162 - RNA, 19 nt, Homo sapiens
  misc_RNA (1)...(19): siRNA sense strand
caagccagaagcccaagga

SEQ ID NO: 346163 - RNA, 19 nt, Homo sapiens
  misc_RNA (1)...(19): siRNA sense strand
gagaacucaaccaauagug

SEQ ID NO: 346164 - RNA, 19 nt, Homo sapiens
  misc_RNA (1)...(19): siRNA sense strand
cugaagaggaagccuguga

SEQ ID NO: 346165 - RNA, 19 nt, Homo sapiens
  misc_RNA (1)...(19): siRNA sense strand
aagccgacauggagaaugc

SEQ ID NO: 346166 - RNA, 19 nt, Homo sapiens
  misc_RNA (1)...(19): siRNA sense strand
uagagaacucaaccaauag

SEQ ID NO: 346167 - RNA, 19 nt, Homo sapiens
  misc_RNA (1)...(19): siRNA sense strand
cgaacuauuuccuccagua

SEQ ID NO: 346168 - RNA, 19 nt, Homo sapiens
  misc_RNA (1)...(19): siRNA sense strand
caaccgcaacgaacuauuu

SEQ ID NO: 346169 - RNA, 19 nt, Homo sapiens
  misc_RNA (1)...(19): siRNA sense strand
gaacuauuuccuccaguau

SEQ ID NO: 346170 - RNA, 19 nt, Homo sapiens
  misc_RNA (1)...(19): siRNA sense strand
acuauuuccuccaguauau

SEQ ID NO: 346171 - RNA, 19 nt, Homo sapiens
  misc_RNA (1)...(19): siRNA sense strand
gaguuaagcugauaaauga

SEQ ID NO: 346172 - RNA, 19 nt, Homo sapiens
  misc_RNA (1)...(19): siRNA sense strand
ggacagaguuaagcugaua

SEQ ID NO: 346173 - RNA, 19 nt, Homo sapiens
  misc_RNA (1)...(19): siRNA sense strand
uuagagaacucaaccaaua

SEQ ID NO: 346174 - RNA, 19 nt, Homo sapiens
  misc_RNA (1)...(19): siRNA sense strand
acagcaagccuuuguauuu

SEQ ID NO: 346175 - RNA, 19 nt, Homo sapiens
  misc_RNA (1)...(19): siRNA sense strand
cgaacuauuuccuccagua

SEQ ID NO: 346176 - RNA, 19 nt, Homo sapiens
  misc_RNA (1)...(19): siRNA sense strand
cagcaagccuuuguauuug

SEQ ID NO: 346177 - RNA, 19 nt, Homo sapiens
  misc_RNA (1)...(19): siRNA sense strand
gcaagcuguuugucuuuga

SEQ ID NO: 346178 - RNA, 19 nt, Homo sapiens
  misc_RNA (1)...(19): siRNA sense strand
caaccgcaacgaacuauuu

SEQ ID NO: 346179 - RNA, 19 nt, Homo sapiens
  misc_RNA (1)...(19): siRNA sense strand
uaaacgaggucaguucaga

SEQ ID NO: 346180 - RNA, 19 nt, Homo sapiens
  misc_RNA (1)...(19): siRNA sense strand
agaggaagccugugagaaa

SEQ ID NO: 346181 - RNA, 19 nt, Homo sapiens
  misc_RNA (1)...(19): siRNA sense strand
gaacaugagcgagcgaguu

SEQ ID NO: 346182 - RNA, 19 nt, Homo sapiens
  misc_RNA (1)...(19): siRNA sense strand
gaagaggaagccugugaga

SEQ ID NO: 346183 - RNA, 19 nt, Homo sapiens
  misc_RNA (1)...(19): siRNA sense strand
aaaugcagcugccgaguca

SEQ ID NO: 346184 - RNA, 19 nt, Homo sapiens
  misc_RNA (1)...(19): siRNA sense strand
gaacuauuuccuccaguau

SEQ ID NO: 346185 - RNA, 19 nt, Homo sapiens
  misc_RNA (1)...(19): siRNA sense strand
ggaaguguuuguuggaaaa

SEQ ID NO: 346186 - RNA, 19 nt, Homo sapiens
  misc_RNA (1)...(19): siRNA sense strand
guauuuggccagaacauga

SEQ ID NO: 346187 - RNA, 19 nt, Homo sapiens
  misc_RNA (1)...(19): siRNA sense strand
acuauuuccuccaguauau

SEQ ID NO: 346188 - RNA, 19 nt, Homo sapiens
  misc_RNA (1)...(19): siRNA sense strand
agaguuaagcugauaaaug

SEQ ID NO: 346189 - RNA, 19 nt, Homo sapiens
  misc_RNA (1)...(19): siRNA sense strand
gcggaaguguuuguuggaa

SEQ ID NO: 346190 - RNA, 19 nt, Homo sapiens
  misc_RNA (1)...(19): siRNA sense strand
ggagagcaauguguuacag

SEQ ID NO: 346191 - RNA, 19 nt, Homo sapiens
  misc_RNA (1)...(19): siRNA sense strand
ccacacagcaagccuuugu

SEQ ID NO: 346192 - RNA, 19 nt, Homo sapiens
  misc_RNA (1)...(19): siRNA sense strand
cggaaguguuuguuggaaa

SEQ ID NO: 346193 - RNA, 19 nt, Homo sapiens
  misc_RNA (1)...(19): siRNA sense strand
ggagaaagagccccagaaa

SEQ ID NO: 346194 - RNA, 19 nt, Homo sapiens
  misc_RNA (1)...(19): siRNA sense strand
gcaauguguuacagaugca

SEQ ID NO: 346195 - RNA, 19 nt, Homo sapiens
  misc_RNA (1)...(19): siRNA sense strand
gaggaagccugugagaaaa

SEQ ID NO: 346196 - RNA, 19 nt, Homo sapiens
  misc_RNA (1)...(19): siRNA sense strand
gagcaauguguuacagaug

SEQ ID NO: 346197 - RNA, 19 nt, Homo sapiens
  misc_RNA (1)...(19): siRNA sense strand
gcucagacucaaugacaug

SEQ ID NO: 346198 - RNA, 19 nt, Homo sapiens
  misc_RNA (1)...(19): siRNA sense strand
guuaagcugauaaaugaga

SEQ ID NO: 346199 - RNA, 19 nt, Homo sapiens
  misc_RNA (1)...(19): siRNA sense strand
guccagcaaugccucugaa

SEQ ID NO: 346200 - RNA, 19 nt, Homo sapiens
  misc_RNA (1)...(19): siRNA sense strand
agagcaauguguuacagau

SEQ ID NO: 346201 - RNA, 19 nt, Homo sapiens
  misc_RNA (1)...(19): siRNA sense strand
acacagcaagccuuuguau

SEQ ID NO: 346202 - RNA, 19 nt, Homo sapiens
  misc_RNA (1)...(19): siRNA sense strand
gaugacggcacacuacagu

SEQ ID NO: 346203 - RNA, 19 nt, Homo sapiens
  misc_RNA (1)...(19): siRNA sense strand
gggcugcucagacucaaug

SEQ ID NO: 346204 - RNA, 19 nt, Homo sapiens
  misc_RNA (1)...(19): siRNA sense strand
gugcaagcuguuugucuuu

SEQ ID NO: 346205 - RNA, 19 nt, Homo sapiens
  misc_RNA (1)...(19): siRNA sense strand
cgacgccuccagcaacaaa

SEQ ID NO: 346206 - RNA, 19 nt, Homo sapiens
  misc_RNA (1)...(19): siRNA sense strand
gagagcaauguguuacaga

SEQ ID NO: 346207 - RNA, 19 nt, Homo sapiens
  misc_RNA (1)...(19): siRNA sense strand
aacaugagcgagcgaguuu

SEQ ID NO: 346208 - RNA, 19 nt, Homo sapiens
  misc_RNA (1)...(19): siRNA sense strand
uacaagcuccgcagccaaa

SEQ ID NO: 346209 - RNA, 19 nt, Homo sapiens
  misc_RNA (1)...(19): siRNA sense strand
ccagcaaugccucugaaga

SEQ ID NO: 346210 - RNA, 19 nt, Homo sapiens
  misc_RNA (1)...(19): siRNA sense strand
ggcggagagcaauguguua

SEQ ID NO: 346211 - RNA, 19 nt, Homo sapiens
  misc_RNA (1)...(19): siRNA sense strand
gagaaagagccccagaaaa

SEQ ID NO: 346212 - RNA, 19 nt, Homo sapiens
  misc_RNA (1)...(19): siRNA sense strand
guauuugggcagaacuuga

SEQ ID NO: 346213 - RNA, 19 nt, Homo sapiens
  misc_RNA (1)...(19): siRNA sense strand
agugcaagcuguuugucuu

SEQ ID NO: 346214 - RNA, 19 nt, Homo sapiens
  misc_RNA (1)...(19): siRNA sense strand
gggacagaguuaagcugau

SEQ ID NO: 346215 - RNA, 19 nt, Homo sapiens
  misc_RNA (1)...(19): siRNA sense strand
gacagaguuaagcugauaa

SEQ ID NO: 346216 - RNA, 19 nt, Homo sapiens
  misc_RNA (1)...(19): siRNA sense strand
guuuagagaacucaaccaa

SEQ ID NO: 346217 - RNA, 19 nt, Homo sapiens
  misc_RNA (1)...(19): siRNA sense strand
ggaggaggcggagagcaau

SEQ ID NO: 346218 - RNA, 19 nt, Homo sapiens
  misc_RNA (1)...(19): siRNA sense strand
ucagaugccaacagggaaa

SEQ ID NO: 346219 - RNA, 19 nt, Homo sapiens
  misc_RNA (1)...(19): siRNA sense strand
caagccagaagcccaagga

SEQ ID NO: 346220 - RNA, 19 nt, Homo sapiens
  misc_RNA (1)...(19): siRNA sense strand
gagaacucaaccaauagug

SEQ ID NO: 346221 - RNA, 19 nt, Homo sapiens
  misc_RNA (1)...(19): siRNA sense strand
cugaagaggaagccuguga

SEQ ID NO: 346222 - RNA, 19 nt, Homo sapiens
  misc_RNA (1)...(19): siRNA sense strand
aagccgacauggagaaugc

SEQ ID NO: 346223 - RNA, 19 nt, Homo sapiens
  misc_RNA (1)...(19): siRNA sense strand
uagagaacucaaccaauag

SEQ ID NO: 346224 - RNA, 19 nt, Homo sapiens
  misc_RNA (1)...(19): siRNA sense strand
gaguuaagcugauaaauga

SEQ ID NO: 346225 - RNA, 19 nt, Homo sapiens
  misc_RNA (1)...(19): siRNA sense strand
ggacagaguuaagcugaua

SEQ ID NO: 346226 - RNA, 19 nt, Homo sapiens
  misc_RNA (1)...(19): siRNA sense strand
uuagagaacucaaccaaua

SEQ ID NO: 346227 - RNA, 19 nt, Homo sapiens
  misc_RNA (1)...(19): siRNA sense strand
acagcaagccuuuguauuu

SEQ ID NO: 346228 - RNA, 19 nt, Homo sapiens
  misc_RNA (1)...(19): siRNA sense strand
cgaacuauuuccuccagua

SEQ ID NO: 346229 - RNA, 19 nt, Homo sapiens
  misc_RNA (1)...(19): siRNA sense strand
cagcaagccuuuguauuug

SEQ ID NO: 346230 - RNA, 19 nt, Homo sapiens
  misc_RNA (1)...(19): siRNA sense strand
gcaagcuguuugucuuuga

SEQ ID NO: 346231 - RNA, 19 nt, Homo sapiens
  misc_RNA (1)...(19): siRNA sense strand
caaccgcaacgaacuauuu

SEQ ID NO: 346232 - RNA, 19 nt, Homo sapiens
  misc_RNA (1)...(19): siRNA sense strand
uaaacgaggucaguucaga

SEQ ID NO: 346233 - RNA, 19 nt, Homo sapiens
  misc_RNA (1)...(19): siRNA sense strand
agaggaagccugugagaaa

SEQ ID NO: 346234 - RNA, 19 nt, Homo sapiens
  misc_RNA (1)...(19): siRNA sense strand
gaacaugagcgagcgaguu

SEQ ID NO: 346235 - RNA, 19 nt, Homo sapiens
  misc_RNA (1)...(19): siRNA sense strand
gaagaggaagccugugaga

SEQ ID NO: 346236 - RNA, 19 nt, Homo sapiens
  misc_RNA (1)...(19): siRNA sense strand
aaaugcagcugccgaguca

SEQ ID NO: 346237 - RNA, 19 nt, Homo sapiens
  misc_RNA (1)...(19): siRNA sense strand
gaacuauuuccuccaguau

SEQ ID NO: 346238 - RNA, 19 nt, Homo sapiens
  misc_RNA (1)...(19): siRNA sense strand
ggaaguguuuguuggaaaa

SEQ ID NO: 346239 - RNA, 19 nt, Homo sapiens
  misc_RNA (1)...(19): siRNA sense strand
guauuuggccagaacauga

SEQ ID NO: 346240 - RNA, 19 nt, Homo sapiens
  misc_RNA (1)...(19): siRNA sense strand
acuauuuccuccaguauau

SEQ ID NO: 346241 - RNA, 19 nt, Homo sapiens
  misc_RNA (1)...(19): siRNA sense strand
agaguuaagcugauaaaug

SEQ ID NO: 346242 - RNA, 19 nt, Homo sapiens
  misc_RNA (1)...(19): siRNA sense strand
gcggaaguguuuguuggaa

SEQ ID NO: 346243 - RNA, 19 nt, Homo sapiens
  misc_RNA (1)...(19): siRNA sense strand
ggagagcaauguguuacag

SEQ ID NO: 346244 - RNA, 19 nt, Homo sapiens
  misc_RNA (1)...(19): siRNA sense strand
ccacacagcaagccuuugu

SEQ ID NO: 346245 - RNA, 19 nt, Homo sapiens
  misc_RNA (1)...(19): siRNA sense strand
cggaaguguuuguuggaaa

SEQ ID NO: 346246 - RNA, 19 nt, Homo sapiens
  misc_RNA (1)...(19): siRNA sense strand
ggagaaagagccccagaaa

SEQ ID NO: 346247 - RNA, 19 nt, Homo sapiens
  misc_RNA (1)...(19): siRNA sense strand
gcaauguguuacagaugca

SEQ ID NO: 346248 - RNA, 19 nt, Homo sapiens
  misc_RNA (1)...(19): siRNA sense strand
gaggaagccugugagaaaa

SEQ ID NO: 346249 - RNA, 19 nt, Homo sapiens
  misc_RNA (1)...(19): siRNA sense strand
gagcaauguguuacagaug

SEQ ID NO: 346250 - RNA, 19 nt, Homo sapiens
  misc_RNA (1)...(19): siRNA sense strand
gcucagacucaaugacaug

SEQ ID NO: 346251 - RNA, 19 nt, Homo sapiens
  misc_RNA (1)...(19): siRNA sense strand
guuaagcugauaaaugaga

SEQ ID NO: 346252 - RNA, 19 nt, Homo sapiens
  misc_RNA (1)...(19): siRNA sense strand
guccagcaaugccucugaa

SEQ ID NO: 346253 - RNA, 19 nt, Homo sapiens
  misc_RNA (1)...(19): siRNA sense strand
agagcaauguguuacagau

SEQ ID NO: 346254 - RNA, 19 nt, Homo sapiens
  misc_RNA (1)...(19): siRNA sense strand
acacagcaagccuuuguau

SEQ ID NO: 346255 - RNA, 19 nt, Homo sapiens
  misc_RNA (1)...(19): siRNA sense strand
gaugacggcacacuacagu

SEQ ID NO: 346256 - RNA, 19 nt, Homo sapiens
  misc_RNA (1)...(19): siRNA sense strand
gggcugcucagacucaaug

SEQ ID NO: 346257 - RNA, 19 nt, Homo sapiens
  misc_RNA (1)...(19): siRNA sense strand
gugcaagcuguuugucuuu

SEQ ID NO: 346258 - RNA, 19 nt, Homo sapiens
  misc_RNA (1)...(19): siRNA sense strand
cgacgccuccagcaacaaa

SEQ ID NO: 346259 - RNA, 19 nt, Homo sapiens
  misc_RNA (1)...(19): siRNA sense strand
gagagcaauguguuacaga

SEQ ID NO: 346260 - RNA, 19 nt, Homo sapiens
  misc_RNA (1)...(19): siRNA sense strand
aacaugagcgagcgaguuu

SEQ ID NO: 346261 - RNA, 19 nt, Homo sapiens
  misc_RNA (1)...(19): siRNA sense strand
uacaagcuccgcagccaaa

SEQ ID NO: 346262 - RNA, 19 nt, Homo sapiens
  misc_RNA (1)...(19): siRNA sense strand
ccagcaaugccucugaaga

SEQ ID NO: 346263 - RNA, 19 nt, Homo sapiens
  misc_RNA (1)...(19): siRNA sense strand
ggcggagagcaauguguua

SEQ ID NO: 346264 - RNA, 19 nt, Homo sapiens
  misc_RNA (1)...(19): siRNA sense strand
gagaaagagccccagaaaa

SEQ ID NO: 346265 - RNA, 19 nt, Homo sapiens
  misc_RNA (1)...(19): siRNA sense strand
guauuugggcagaacuuga

SEQ ID NO: 346266 - RNA, 19 nt, Homo sapiens
  misc_RNA (1)...(19): siRNA sense strand
agugcaagcuguuugucuu

SEQ ID NO: 346267 - RNA, 19 nt, Homo sapiens
  misc_RNA (1)...(19): siRNA sense strand
gggacagaguuaagcugau

SEQ ID NO: 346268 - RNA, 19 nt, Homo sapiens
  misc_RNA (1)...(19): siRNA sense strand
gacagaguuaagcugauaa

SEQ ID NO: 346269 - RNA, 19 nt, Homo sapiens
  misc_RNA (1)...(19): siRNA sense strand
guuuagagaacucaaccaa

SEQ ID NO: 346270 - RNA, 19 nt, Homo sapiens
  misc_RNA (1)...(19): siRNA sense strand
ggaggaggcggagagcaau

SEQ ID NO: 346271 - RNA, 19 nt, Homo sapiens
  misc_RNA (1)...(19): siRNA sense strand
ucagaugccaacagggaaa

SEQ ID NO: 346272 - RNA, 19 nt, Homo sapiens
  misc_RNA (1)...(19): siRNA sense strand
caagccagaagcccaagga

SEQ ID NO: 346273 - RNA, 19 nt, Homo sapiens
  misc_RNA (1)...(19): siRNA sense strand
gagaacucaaccaauagug

SEQ ID NO: 346274 - RNA, 19 nt, Homo sapiens
  misc_RNA (1)...(19): siRNA sense strand
cugaagaggaagccuguga

SEQ ID NO: 346275 - RNA, 19 nt, Homo sapiens
  misc_RNA (1)...(19): siRNA sense strand
aagccgacauggagaaugc

SEQ ID NO: 346276 - RNA, 19 nt, Homo sapiens
  misc_RNA (1)...(19): siRNA sense strand
uagagaacucaaccaauag

SEQ ID NO: 346277 - RNA, 19 nt, Homo sapiens
  misc_RNA (1)...(19): siRNA sense strand
gaguuaagcugauaaauga

SEQ ID NO: 346278 - RNA, 19 nt, Homo sapiens
  misc_RNA (1)...(19): siRNA sense strand
ggacagaguuaagcugaua

SEQ ID NO: 346279 - RNA, 19 nt, Homo sapiens
  misc_RNA (1)...(19): siRNA sense strand
uuagagaacucaaccaaua

SEQ ID NO: 346280 - RNA, 19 nt, Homo sapiens
  misc_RNA (1)...(19): siRNA sense strand
acagcaagccuuuguauuu

SEQ ID NO: 346281 - RNA, 19 nt, Homo sapiens
  misc_RNA (1)...(19): siRNA sense strand
cgaacuauuuccuccagua

SEQ ID NO: 346282 - RNA, 19 nt, Homo sapiens
  misc_RNA (1)...(19): siRNA sense strand
cagcaagccuuuguauuug

SEQ ID NO: 346283 - RNA, 19 nt, Homo sapiens
  misc_RNA (1)...(19): siRNA sense strand
gcaagcuguuugucuuuga

SEQ ID NO: 346284 - RNA, 19 nt, Homo sapiens
  misc_RNA (1)...(19): siRNA sense strand
caaccgcaacgaacuauuu

SEQ ID NO: 346285 - RNA, 19 nt, Homo sapiens
  misc_RNA (1)...(19): siRNA sense strand
uaaacgaggucaguucaga

SEQ ID NO: 346286 - RNA, 19 nt, Homo sapiens
  misc_RNA (1)...(19): siRNA sense strand
agaggaagccugugagaaa

SEQ ID NO: 346287 - RNA, 19 nt, Homo sapiens
  misc_RNA (1)...(19): siRNA sense strand
gaacaugagcgagcgaguu

SEQ ID NO: 346288 - RNA, 19 nt, Homo sapiens
  misc_RNA (1)...(19): siRNA sense strand
gaagaggaagccugugaga

SEQ ID NO: 346289 - RNA, 19 nt, Homo sapiens
  misc_RNA (1)...(19): siRNA sense strand
aaaugcagcugccgaguca

SEQ ID NO: 346290 - RNA, 19 nt, Homo sapiens
  misc_RNA (1)...(19): siRNA sense strand
gaacuauuuccuccaguau

SEQ ID NO: 346291 - RNA, 19 nt, Homo sapiens
  misc_RNA (1)...(19): siRNA sense strand
ggaaguguuuguuggaaaa

SEQ ID NO: 346292 - RNA, 19 nt, Homo sapiens
  misc_RNA (1)...(19): siRNA sense strand
guauuuggccagaacauga

SEQ ID NO: 346293 - RNA, 19 nt, Homo sapiens
  misc_RNA (1)...(19): siRNA sense strand
acuauuuccuccaguauau

SEQ ID NO: 346294 - RNA, 19 nt, Homo sapiens
  misc_RNA (1)...(19): siRNA sense strand
agaguuaagcugauaaaug

SEQ ID NO: 346295 - RNA, 19 nt, Homo sapiens
  misc_RNA (1)...(19): siRNA sense strand
gcggaaguguuuguuggaa

SEQ ID NO: 346296 - RNA, 19 nt, Homo sapiens
  misc_RNA (1)...(19): siRNA sense strand
ggagagcaauguguuacag

SEQ ID NO: 346297 - RNA, 19 nt, Homo sapiens
  misc_RNA (1)...(19): siRNA sense strand
ccacacagcaagccuuugu

SEQ ID NO: 346298 - RNA, 19 nt, Homo sapiens
  misc_RNA (1)...(19): siRNA sense strand
cggaaguguuuguuggaaa

SEQ ID NO: 346299 - RNA, 19 nt, Homo sapiens
  misc_RNA (1)...(19): siRNA sense strand
ggagaaagagccccagaaa

SEQ ID NO: 346300 - RNA, 19 nt, Homo sapiens
  misc_RNA (1)...(19): siRNA sense strand
gcaauguguuacagaugca

SEQ ID NO: 346301 - RNA, 19 nt, Homo sapiens
  misc_RNA (1)...(19): siRNA sense strand
gaggaagccugugagaaaa

SEQ ID NO: 346302 - RNA, 19 nt, Homo sapiens
  misc_RNA (1)...(19): siRNA sense strand
gagcaauguguuacagaug

SEQ ID NO: 346303 - RNA, 19 nt, Homo sapiens
  misc_RNA (1)...(19): siRNA sense strand
gcucagacucaaugacaug

SEQ ID NO: 346304 - RNA, 19 nt, Homo sapiens
  misc_RNA (1)...(19): siRNA sense strand
guuaagcugauaaaugaga

SEQ ID NO: 346305 - RNA, 19 nt, Homo sapiens
  misc_RNA (1)...(19): siRNA sense strand
guccagcaaugccucugaa

SEQ ID NO: 346306 - RNA, 19 nt, Homo sapiens
  misc_RNA (1)...(19): siRNA sense strand
agagcaauguguuacagau

SEQ ID NO: 346307 - RNA, 19 nt, Homo sapiens
  misc_RNA (1)...(19): siRNA sense strand
acacagcaagccuuuguau

SEQ ID NO: 346308 - RNA, 19 nt, Homo sapiens
  misc_RNA (1)...(19): siRNA sense strand
gaugacggcacacuacagu

SEQ ID NO: 346309 - RNA, 19 nt, Homo sapiens
  misc_RNA (1)...(19): siRNA sense strand
gggcugcucagacucaaug

SEQ ID NO: 346310 - RNA, 19 nt, Homo sapiens
  misc_RNA (1)...(19): siRNA sense strand
gugcaagcuguuugucuuu

SEQ ID NO: 346311 - RNA, 19 nt, Homo sapiens
  misc_RNA (1)...(19): siRNA sense strand
cgacgccuccagcaacaaa

SEQ ID NO: 346312 - RNA, 19 nt, Homo sapiens
  misc_RNA (1)...(19): siRNA sense strand
gagagcaauguguuacaga

SEQ ID NO: 346313 - RNA, 19 nt, Homo sapiens
  misc_RNA (1)...(19): siRNA sense strand
aacaugagcgagcgaguuu

SEQ ID NO: 346314 - RNA, 19 nt, Homo sapiens
  misc_RNA (1)...(19): siRNA sense strand
uacaagcuccgcagccaaa

SEQ ID NO: 346315 - RNA, 19 nt, Homo sapiens
  misc_RNA (1)...(19): siRNA sense strand
ccagcaaugccucugaaga

SEQ ID NO: 346316 - RNA, 19 nt, Homo sapiens
  misc_RNA (1)...(19): siRNA sense strand
ggcggagagcaauguguua

SEQ ID NO: 346317 - RNA, 19 nt, Homo sapiens
  misc_RNA (1)...(19): siRNA sense strand
gagaaagagccccagaaaa

SEQ ID NO: 346318 - RNA, 19 nt, Homo sapiens
  misc_RNA (1)...(19): siRNA sense strand
guauuugggcagaacuuga

SEQ ID NO: 346319 - RNA, 19 nt, Homo sapiens
  misc_RNA (1)...(19): siRNA sense strand
agugcaagcuguuugucuu

SEQ ID NO: 346320 - RNA, 19 nt, Homo sapiens
  misc_RNA (1)...(19): siRNA sense strand
gggacagaguuaagcugau

SEQ ID NO: 346321 - RNA, 19 nt, Homo sapiens
  misc_RNA (1)...(19): siRNA sense strand
gacagaguuaagcugauaa

SEQ ID NO: 346322 - RNA, 19 nt, Homo sapiens
  misc_RNA (1)...(19): siRNA sense strand
guuuagagaacucaaccaa

SEQ ID NO: 346323 - RNA, 19 nt, Homo sapiens
  misc_RNA (1)...(19): siRNA sense strand
ggaggaggcggagagcaau

SEQ ID NO: 346324 - RNA, 19 nt, Homo sapiens
  misc_RNA (1)...(19): siRNA sense strand
ucagaugccaacagggaaa

SEQ ID NO: 346325 - RNA, 19 nt, Homo sapiens
  misc_RNA (1)...(19): siRNA sense strand
caagccagaagcccaagga

SEQ ID NO: 346326 - RNA, 19 nt, Homo sapiens
  misc_RNA (1)...(19): siRNA sense strand
gagaacucaaccaauagug

SEQ ID NO: 346327 - RNA, 19 nt, Homo sapiens
  misc_RNA (1)...(19): siRNA sense strand
cugaagaggaagccuguga

SEQ ID NO: 346328 - RNA, 19 nt, Homo sapiens
  misc_RNA (1)...(19): siRNA sense strand
aagccgacauggagaaugc

SEQ ID NO: 346329 - RNA, 19 nt, Homo sapiens
  misc_RNA (1)...(19): siRNA sense strand
uagagaacucaaccaauag

SEQ ID NO: 346330 - RNA, 19 nt, Homo sapiens
  misc_RNA (1)...(19): siRNA sense strand
cgaacuauuuccuccagua

SEQ ID NO: 346331 - RNA, 19 nt, Homo sapiens
  misc_RNA (1)...(19): siRNA sense strand
caaccgcaacgaacuauuu

SEQ ID NO: 346332 - RNA, 19 nt, Homo sapiens
  misc_RNA (1)...(19): siRNA sense strand
gaacuauuuccuccaguau

SEQ ID NO: 346333 - RNA, 19 nt, Homo sapiens
  misc_RNA (1)...(19): siRNA sense strand
acuauuuccuccaguauau

SEQ ID NO: 346334 - RNA, 19 nt, Homo sapiens
  misc_RNA (1)...(19): siRNA sense strand
gaguuaagcugauaaauga

SEQ ID NO: 346335 - RNA, 19 nt, Homo sapiens
  misc_RNA (1)...(19): siRNA sense strand
ggacagaguuaagcugaua

SEQ ID NO: 346336 - RNA, 19 nt, Homo sapiens
  misc_RNA (1)...(19): siRNA sense strand
uuagagaacucaaccaaua

SEQ ID NO: 346337 - RNA, 19 nt, Homo sapiens
  misc_RNA (1)...(19): siRNA sense strand
acagcaagccuuuguauuu

SEQ ID NO: 346338 - RNA, 19 nt, Homo sapiens
  misc_RNA (1)...(19): siRNA sense strand
cgaacuauuuccuccagua

SEQ ID NO: 346339 - RNA, 19 nt, Homo sapiens
  misc_RNA (1)...(19): siRNA sense strand
cagcaagccuuuguauuug

SEQ ID NO: 346340 - RNA, 19 nt, Homo sapiens
  misc_RNA (1)...(19): siRNA sense strand
gcaagcuguuugucuuuga

SEQ ID NO: 346341 - RNA, 19 nt, Homo sapiens
  misc_RNA (1)...(19): siRNA sense strand
caaccgcaacgaacuauuu

SEQ ID NO: 346342 - RNA, 19 nt, Homo sapiens
  misc_RNA (1)...(19): siRNA sense strand
uaaacgaggucaguucaga

SEQ ID NO: 346343 - RNA, 19 nt, Homo sapiens
  misc_RNA (1)...(19): siRNA sense strand
agaggaagccugugagaaa

SEQ ID NO: 346344 - RNA, 19 nt, Homo sapiens
  misc_RNA (1)...(19): siRNA sense strand
gaacaugagcgagcgaguu

SEQ ID NO: 346345 - RNA, 19 nt, Homo sapiens
  misc_RNA (1)...(19): siRNA sense strand
gaagaggaagccugugaga

SEQ ID NO: 346346 - RNA, 19 nt, Homo sapiens
  misc_RNA (1)...(19): siRNA sense strand
aaaugcagcugccgaguca

SEQ ID NO: 346347 - RNA, 19 nt, Homo sapiens
  misc_RNA (1)...(19): siRNA sense strand
gaacuauuuccuccaguau

SEQ ID NO: 346348 - RNA, 19 nt, Homo sapiens
  misc_RNA (1)...(19): siRNA sense strand
ggaaguguuuguuggaaaa

SEQ ID NO: 346349 - RNA, 19 nt, Homo sapiens
  misc_RNA (1)...(19): siRNA sense strand
guauuuggccagaacauga

SEQ ID NO: 346350 - RNA, 19 nt, Homo sapiens
  misc_RNA (1)...(19): siRNA sense strand
acuauuuccuccaguauau

SEQ ID NO: 346351 - RNA, 19 nt, Homo sapiens
  misc_RNA (1)...(19): siRNA sense strand
agaguuaagcugauaaaug

SEQ ID NO: 346352 - RNA, 19 nt, Homo sapiens
  misc_RNA (1)...(19): siRNA sense strand
gcggaaguguuuguuggaa

SEQ ID NO: 346353 - RNA, 19 nt, Homo sapiens
  misc_RNA (1)...(19): siRNA sense strand
ggagagcaauguguuacag

SEQ ID NO: 346354 - RNA, 19 nt, Homo sapiens
  misc_RNA (1)...(19): siRNA sense strand
ccacacagcaagccuuugu

SEQ ID NO: 346355 - RNA, 19 nt, Homo sapiens
  misc_RNA (1)...(19): siRNA sense strand
cggaaguguuuguuggaaa

SEQ ID NO: 346356 - RNA, 19 nt, Homo sapiens
  misc_RNA (1)...(19): siRNA sense strand
ggagaaagagccccagaaa

SEQ ID NO: 346357 - RNA, 19 nt, Homo sapiens
  misc_RNA (1)...(19): siRNA sense strand
gcaauguguuacagaugca

SEQ ID NO: 346358 - RNA, 19 nt, Homo sapiens
  misc_RNA (1)...(19): siRNA sense strand
gaggaagccugugagaaaa

SEQ ID NO: 346359 - RNA, 19 nt, Homo sapiens
  misc_RNA (1)...(19): siRNA sense strand
gagcaauguguuacagaug

SEQ ID NO: 346360 - RNA, 19 nt, Homo sapiens
  misc_RNA (1)...(19): siRNA sense strand
gcucagacucaaugacaug

SEQ ID NO: 346361 - RNA, 19 nt, Homo sapiens
  misc_RNA (1)...(19): siRNA sense strand
guuaagcugauaaaugaga

SEQ ID NO: 346362 - RNA, 19 nt, Homo sapiens
  misc_RNA (1)...(19): siRNA sense strand
guccagcaaugccucugaa

SEQ ID NO: 346363 - RNA, 19 nt, Homo sapiens
  misc_RNA (1)...(19): siRNA sense strand
agagcaauguguuacagau

SEQ ID NO: 346364 - RNA, 19 nt, Homo sapiens
  misc_RNA (1)...(19): siRNA sense strand
acacagcaagccuuuguau

SEQ ID NO: 346365 - RNA, 19 nt, Homo sapiens
  misc_RNA (1)...(19): siRNA sense strand
gaugacggcacacuacagu

SEQ ID NO: 346366 - RNA, 19 nt, Homo sapiens
  misc_RNA (1)...(19): siRNA sense strand
gggcugcucagacucaaug

SEQ ID NO: 346367 - RNA, 19 nt, Homo sapiens
  misc_RNA (1)...(19): siRNA sense strand
gugcaagcuguuugucuuu

SEQ ID NO: 346368 - RNA, 19 nt, Homo sapiens
  misc_RNA (1)...(19): siRNA sense strand
cgacgccuccagcaacaaa

SEQ ID NO: 346369 - RNA, 19 nt, Homo sapiens
  misc_RNA (1)...(19): siRNA sense strand
gagagcaauguguuacaga

SEQ ID NO: 346370 - RNA, 19 nt, Homo sapiens
  misc_RNA (1)...(19): siRNA sense strand
aacaugagcgagcgaguuu

SEQ ID NO: 346371 - RNA, 19 nt, Homo sapiens
  misc_RNA (1)...(19): siRNA sense strand
uacaagcuccgcagccaaa

SEQ ID NO: 346372 - RNA, 19 nt, Homo sapiens
  misc_RNA (1)...(19): siRNA sense strand
ccagcaaugccucugaaga

SEQ ID NO: 346373 - RNA, 19 nt, Homo sapiens
  misc_RNA (1)...(19): siRNA sense strand
ggcggagagcaauguguua

SEQ ID NO: 346374 - RNA, 19 nt, Homo sapiens
  misc_RNA (1)...(19): siRNA sense strand
gagaaagagccccagaaaa

SEQ ID NO: 346375 - RNA, 19 nt, Homo sapiens
  misc_RNA (1)...(19): siRNA sense strand
guauuugggcagaacuuga

SEQ ID NO: 346376 - RNA, 19 nt, Homo sapiens
  misc_RNA (1)...(19): siRNA sense strand
agugcaagcuguuugucuu

SEQ ID NO: 346377 - RNA, 19 nt, Homo sapiens
  misc_RNA (1)...(19): siRNA sense strand
gggacagaguuaagcugau

SEQ ID NO: 346378 - RNA, 19 nt, Homo sapiens
  misc_RNA (1)...(19): siRNA sense strand
gacagaguuaagcugauaa

SEQ ID NO: 346379 - RNA, 19 nt, Homo sapiens
  misc_RNA (1)...(19): siRNA sense strand
guuuagagaacucaaccaa

SEQ ID NO: 346380 - RNA, 19 nt, Homo sapiens
  misc_RNA (1)...(19): siRNA sense strand
ggaggaggcggagagcaau

SEQ ID NO: 346381 - RNA, 19 nt, Homo sapiens
  misc_RNA (1)...(19): siRNA sense strand
ucagaugccaacagggaaa

SEQ ID NO: 346382 - RNA, 19 nt, Homo sapiens
  misc_RNA (1)...(19): siRNA sense strand
caagccagaagcccaagga

SEQ ID NO: 346383 - RNA, 19 nt, Homo sapiens
  misc_RNA (1)...(19): siRNA sense strand
gagaacucaaccaauagug

SEQ ID NO: 346384 - RNA, 19 nt, Homo sapiens
  misc_RNA (1)...(19): siRNA sense strand
cugaagaggaagccuguga

SEQ ID NO: 346385 - RNA, 19 nt, Homo sapiens
  misc_RNA (1)...(19): siRNA sense strand
aagccgacauggagaaugc

SEQ ID NO: 346386 - RNA, 19 nt, Homo sapiens
  misc_RNA (1)...(19): siRNA sense strand
uagagaacucaaccaauag

SEQ ID NO: 346387 - RNA, 19 nt, Homo sapiens
  misc_RNA (1)...(19): siRNA sense strand
caaagaagauucaguaaca

SEQ ID NO: 346388 - RNA, 19 nt, Homo sapiens
  misc_RNA (1)...(19): siRNA sense strand
gcagaagaccaguuaauua

SEQ ID NO: 346389 - RNA, 19 nt, Homo sapiens
  misc_RNA (1)...(19): siRNA sense strand
gaagaccaguuaauuaaga

SEQ ID NO: 346390 - RNA, 19 nt, Homo sapiens
  misc_RNA (1)...(19): siRNA sense strand
cagacaaacugaucaauuu

SEQ ID NO: 346391 - RNA, 19 nt, Homo sapiens
  misc_RNA (1)...(19): siRNA sense strand
gcaaacaguggaaauaaua

SEQ ID NO: 346392 - RNA, 19 nt, Homo sapiens
  misc_RNA (1)...(19): siRNA sense strand
ucucagagcuggucaguuu

SEQ ID NO: 346393 - RNA, 19 nt, Homo sapiens
  misc_RNA (1)...(19): siRNA sense strand
caaauugcaugaaauguga

SEQ ID NO: 346394 - RNA, 19 nt, Homo sapiens
  misc_RNA (1)...(19): siRNA sense strand
ucagaaugcuacucaaaua

SEQ ID NO: 346395 - RNA, 19 nt, Homo sapiens
  misc_RNA (1)...(19): siRNA sense strand
gggaacauuuagaaaguua

SEQ ID NO: 346396 - RNA, 19 nt, Homo sapiens
  misc_RNA (1)...(19): siRNA sense strand
aaacagcacuggugaccua

SEQ ID NO: 346397 - RNA, 19 nt, Homo sapiens
  misc_RNA (1)...(19): siRNA sense strand
gcuguucacuggauaauga

SEQ ID NO: 346398 - RNA, 19 nt, Homo sapiens
  misc_RNA (1)...(19): siRNA sense strand
gcuguagccugaaauguaa

SEQ ID NO: 346399 - RNA, 19 nt, Homo sapiens
  misc_RNA (1)...(19): siRNA sense strand
gaugaaugauagccaagua

SEQ ID NO: 346400 - RNA, 19 nt, Homo sapiens
  misc_RNA (1)...(19): siRNA sense strand
ccugaaauguaaacuguua

SEQ ID NO: 346401 - RNA, 19 nt, Homo sapiens
  misc_RNA (1)...(19): siRNA sense strand
gaagccagguuuacauuca

SEQ ID NO: 346402 - RNA, 19 nt, Homo sapiens
  misc_RNA (1)...(19): siRNA sense strand
gaagcuagaguguguguaa

SEQ ID NO: 346403 - RNA, 19 nt, Homo sapiens
  misc_RNA (1)...(19): siRNA sense strand
cagaagaccaguuaauuaa

SEQ ID NO: 346404 - RNA, 19 nt, Homo sapiens
  misc_RNA (1)...(19): siRNA sense strand
gaaggaauaaugacuguga

SEQ ID NO: 346405 - RNA, 19 nt, Homo sapiens
  misc_RNA (1)...(19): siRNA sense strand
gaagggaguggacuacuuu

SEQ ID NO: 346406 - RNA, 19 nt, Homo sapiens
  misc_RNA (1)...(19): siRNA sense strand
cagauugccuugugccuaa

SEQ ID NO: 346407 - RNA, 19 nt, Homo sapiens
  misc_RNA (1)...(19): siRNA sense strand
gccauuaucagaccauuua

SEQ ID NO: 346408 - RNA, 19 nt, Homo sapiens
  misc_RNA (1)...(19): siRNA sense strand
aagcaaccuucuaaucuua

SEQ ID NO: 346409 - RNA, 19 nt, Homo sapiens
  misc_RNA (1)...(19): siRNA sense strand
caagcaaccuucuaaucuu

SEQ ID NO: 346410 - RNA, 19 nt, Homo sapiens
  misc_RNA (1)...(19): siRNA sense strand
agaugcaggucuagauuua

SEQ ID NO: 346411 - RNA, 19 nt, Homo sapiens
  misc_RNA (1)...(19): siRNA sense strand
aaaggaagcuagagugugu

SEQ ID NO: 346412 - RNA, 19 nt, Homo sapiens
  misc_RNA (1)...(19): siRNA sense strand
gaacuugcauuagugaaag

SEQ ID NO: 346413 - RNA, 19 nt, Homo sapiens
  misc_RNA (1)...(19): siRNA sense strand
uagcaagccugccaucuau

SEQ ID NO: 346414 - RNA, 19 nt, Homo sapiens
  misc_RNA (1)...(19): siRNA sense strand
ugugauuucuccacuguua

SEQ ID NO: 346415 - RNA, 19 nt, Homo sapiens
  misc_RNA (1)...(19): siRNA sense strand
ugucugcgauuacaaguuu

SEQ ID NO: 346416 - RNA, 19 nt, Homo sapiens
  misc_RNA (1)...(19): siRNA sense strand
ccagauagcccagauaaug

SEQ ID NO: 346417 - RNA, 19 nt, Homo sapiens
  misc_RNA (1)...(19): siRNA sense strand
gaaguuagggcugaugaaa

SEQ ID NO: 346418 - RNA, 19 nt, Homo sapiens
  misc_RNA (1)...(19): siRNA sense strand
gaaaugugaagccagguuu

SEQ ID NO: 346419 - RNA, 19 nt, Homo sapiens
  misc_RNA (1)...(19): siRNA sense strand
gaucuagggaguccaaauu

SEQ ID NO: 346420 - RNA, 19 nt, Homo sapiens
  misc_RNA (1)...(19): siRNA sense strand
ucucuaaugucgauacaaa

SEQ ID NO: 346421 - RNA, 19 nt, Homo sapiens
  misc_RNA (1)...(19): siRNA sense strand
gaaagugaagaaugugauu

SEQ ID NO: 346422 - RNA, 19 nt, Homo sapiens
  misc_RNA (1)...(19): siRNA sense strand
ggagagcaccacugaagaa

SEQ ID NO: 346423 - RNA, 19 nt, Homo sapiens
  misc_RNA (1)...(19): siRNA sense strand
auaaaugaguccacugaaa

SEQ ID NO: 346424 - RNA, 19 nt, Homo sapiens
  misc_RNA (1)...(19): siRNA sense strand
ggacagaaaggaagcuaga

SEQ ID NO: 346425 - RNA, 19 nt, Homo sapiens
  misc_RNA (1)...(19): siRNA sense strand
gcagcaaauuaucuaucua

SEQ ID NO: 346426 - RNA, 19 nt, Homo sapiens
  misc_RNA (1)...(19): siRNA sense strand
gcaaccuucuaaucuuaaa

SEQ ID NO: 346427 - RNA, 19 nt, Homo sapiens
  misc_RNA (1)...(19): siRNA sense strand
ggaacuugcauuagugaaa

SEQ ID NO: 346428 - RNA, 19 nt, Homo sapiens
  misc_RNA (1)...(19): siRNA sense strand
gcugagaucuccacuagac

SEQ ID NO: 346429 - RNA, 19 nt, Homo sapiens
  misc_RNA (1)...(19): siRNA sense strand
guagcaagccugccaucua

SEQ ID NO: 346430 - RNA, 19 nt, Homo sapiens
  misc_RNA (1)...(19): siRNA sense strand
gcuggucaguuuggaauuu

SEQ ID NO: 346431 - RNA, 19 nt, Homo sapiens
  misc_RNA (1)...(19): siRNA sense strand
caaaaugacuuuccugcaa

SEQ ID NO: 346432 - RNA, 19 nt, Homo sapiens
  misc_RNA (1)...(19): siRNA sense strand
gaggaaagcaagucagaau

SEQ ID NO: 346433 - RNA, 19 nt, Homo sapiens
  misc_RNA (1)...(19): siRNA sense strand
ugagguggcuccaguaugg

SEQ ID NO: 346434 - RNA, 19 nt, Homo sapiens
  misc_RNA (1)...(19): siRNA sense strand
agaacuauauaccagauga

SEQ ID NO: 346435 - RNA, 19 nt, Homo sapiens
  misc_RNA (1)...(19): siRNA sense strand
aaaggaacuugcauuagug

SEQ ID NO: 346436 - RNA, 19 nt, Homo sapiens
  misc_RNA (1)...(19): siRNA sense strand
gcagaugcaggucuagauu

SEQ ID NO: 346437 - RNA, 19 nt, Homo sapiens
  misc_RNA (1)...(19): siRNA sense strand
cuaauuggaaguugacuaa

SEQ ID NO: 346438 - RNA, 19 nt, Homo sapiens
  misc_RNA (1)...(19): siRNA sense strand
aaacucagcaaccaaugua

SEQ ID NO: 346439 - RNA, 19 nt, Homo sapiens
  misc_RNA (1)...(19): siRNA sense strand
gaauucagagaaacaaaug

SEQ ID NO: 346440 - RNA, 19 nt, Homo sapiens
  misc_RNA (1)...(19): siRNA sense strand
gagcaccacugaagaaucc

SEQ ID NO: 346441 - RNA, 19 nt, Homo sapiens
  misc_RNA (1)...(19): siRNA sense strand
guggaaaccuggcuugucu

SEQ ID NO: 346442 - RNA, 19 nt, Homo sapiens
  misc_RNA (1)...(19): siRNA sense strand
gaggagagcaccacugaag

SEQ ID NO: 346443 - RNA, 19 nt, Homo sapiens
  misc_RNA (1)...(19): siRNA sense strand
uguuauacauggacagaaa

SEQ ID NO: 346444 - RNA, 19 nt, Homo sapiens
  misc_RNA (1)...(19): siRNA sense strand
ggagagaagaaauguggaa

SEQ ID NO: 346445 - RNA, 19 nt, Homo sapiens
  misc_RNA (1)...(19): siRNA sense strand
gacccaagcaaccuucuaa

SEQ ID NO: 346446 - RNA, 19 nt, Homo sapiens
  misc_RNA (1)...(19): siRNA sense strand
guauaaaugaguccacuga

SEQ ID NO: 346447 - RNA, 19 nt, Homo sapiens
  misc_RNA (1)...(19): siRNA sense strand
gcuccaaauugcaugaaau

SEQ ID NO: 346448 - RNA, 19 nt, Homo sapiens
  misc_RNA (1)...(19): siRNA sense strand
ggaguggacuacuuuuaaa

SEQ ID NO: 346449 - RNA, 19 nt, Homo sapiens
  misc_RNA (1)...(19): siRNA sense strand
gcacuacagaauuccuuaa

SEQ ID NO: 346450 - RNA, 19 nt, Homo sapiens
  misc_RNA (1)...(19): siRNA sense strand
ugaagguuaugaacaugaa

SEQ ID NO: 346451 - RNA, 19 nt, Homo sapiens
  misc_RNA (1)...(19): siRNA sense strand
ugacggaaguauagguaga

SEQ ID NO: 346452 - RNA, 19 nt, Homo sapiens
  misc_RNA (1)...(19): siRNA sense strand
gaugacggaaguauaggua

SEQ ID NO: 346453 - RNA, 19 nt, Homo sapiens
  misc_RNA (1)...(19): siRNA sense strand
uguccuacuucaucugaua

SEQ ID NO: 346454 - RNA, 19 nt, Homo sapiens
  misc_RNA (1)...(19): siRNA sense strand
cagauagcccagauaauga

SEQ ID NO: 346455 - RNA, 19 nt, Homo sapiens
  misc_RNA (1)...(19): siRNA sense strand
ccaagcaaccuucuaaucu

SEQ ID NO: 346456 - RNA, 19 nt, Homo sapiens
  misc_RNA (1)...(19): siRNA sense strand
guagucaaguuccaucagu

SEQ ID NO: 346457 - RNA, 19 nt, Homo sapiens
  misc_RNA (1)...(19): siRNA sense strand
acacaccagcagcaaauua

SEQ ID NO: 346458 - RNA, 19 nt, Homo sapiens
  misc_RNA (1)...(19): siRNA sense strand
aaaaucagcucuccuagga

SEQ ID NO: 346459 - RNA, 19 nt, Homo sapiens
  misc_RNA (1)...(19): siRNA sense strand
cagcacuggugaccuaaug

SEQ ID NO: 346460 - RNA, 19 nt, Homo sapiens
  misc_RNA (1)...(19): siRNA sense strand
gcaagccugccaucuauca

SEQ ID NO: 346461 - RNA, 19 nt, Homo sapiens
  misc_RNA (1)...(19): siRNA sense strand
gcaagagaacuauauacca

SEQ ID NO: 346462 - RNA, 19 nt, Homo sapiens
  misc_RNA (1)...(19): siRNA sense strand
ccaaauugcaugaaaugug

SEQ ID NO: 346463 - RNA, 19 nt, Homo sapiens
  misc_RNA (1)...(19): siRNA sense strand
gcacuggugaccuaaugaa

SEQ ID NO: 346464 - RNA, 19 nt, Homo sapiens
  misc_RNA (1)...(19): siRNA sense strand
uagugaaagugaagaaugu

SEQ ID NO: 346465 - RNA, 19 nt, Homo sapiens
  misc_RNA (1)...(19): siRNA sense strand
cucaggacaugacuaauug

SEQ ID NO: 346466 - RNA, 19 nt, Homo sapiens
  misc_RNA (1)...(19): siRNA sense strand
ggucuggaaggaauaauga

SEQ ID NO: 346467 - RNA, 19 nt, Homo sapiens
  misc_RNA (1)...(19): siRNA sense strand
uaaugggucuggaaggaau

SEQ ID NO: 346468 - RNA, 19 nt, Homo sapiens
  misc_RNA (1)...(19): siRNA sense strand
gaagugggagagaagaaau

SEQ ID NO: 346469 - RNA, 19 nt, Homo sapiens
  misc_RNA (1)...(19): siRNA sense strand
gagaagaaauguggaaacc

SEQ ID NO: 346470 - RNA, 19 nt, Homo sapiens
  misc_RNA (1)...(19): siRNA sense strand
gaucaaugcagugcuguug

SEQ ID NO: 346471 - RNA, 19 nt, Homo sapiens
  misc_RNA (1)...(19): siRNA sense strand
ugaaaaugcuguugcagaa

SEQ ID NO: 346472 - RNA, 19 nt, Homo sapiens
  misc_RNA (1)...(19): siRNA sense strand
agaagggaguggacuacuu

SEQ ID NO: 346473 - RNA, 19 nt, Homo sapiens
  misc_RNA (1)...(19): siRNA sense strand
ggaaagcaagucagaaugc

SEQ ID NO: 346474 - RNA, 19 nt, Homo sapiens
  misc_RNA (1)...(19): siRNA sense strand
ugaaugauagccaaguaaa

SEQ ID NO: 346475 - RNA, 19 nt, Homo sapiens
  misc_RNA (1)...(19): siRNA sense strand
ugacuuuccugcaaacagu

SEQ ID NO: 346476 - RNA, 19 nt, Homo sapiens
  misc_RNA (1)...(19): siRNA sense strand
gaggaaaugaggccacaga

SEQ ID NO: 346477 - RNA, 19 nt, Homo sapiens
  misc_RNA (1)...(19): siRNA sense strand
gauaugaauucagagaaac

SEQ ID NO: 346478 - RNA, 19 nt, Homo sapiens
  misc_RNA (1)...(19): siRNA sense strand
aaucugccauucagugcua

SEQ ID NO: 346479 - RNA, 19 nt, Homo sapiens
  misc_RNA (1)...(19): siRNA sense strand
cuggugaccuaaugaagaa

SEQ ID NO: 346480 - RNA, 19 nt, Homo sapiens
  misc_RNA (1)...(19): siRNA sense strand
aaaaggaacuugcauuagu

SEQ ID NO: 346481 - RNA, 19 nt, Homo sapiens
  misc_RNA (1)...(19): siRNA sense strand
ucucaggacaugacuaauu

SEQ ID NO: 346482 - RNA, 19 nt, Homo sapiens
  misc_RNA (1)...(19): siRNA sense strand
cagaggagagcaccacuga

SEQ ID NO: 346483 - RNA, 19 nt, Homo sapiens
  misc_RNA (1)...(19): siRNA sense strand
ccuaaugggucuggaagga

SEQ ID NO: 346484 - RNA, 19 nt, Homo sapiens
  misc_RNA (1)...(19): siRNA sense strand
guaaacuguuauacaugga

SEQ ID NO: 346485 - RNA, 19 nt, Homo sapiens
  misc_RNA (1)...(19): siRNA sense strand
ggaaaugaggccacagaag

SEQ ID NO: 346486 - RNA, 19 nt, Homo sapiens
  misc_RNA (1)...(19): siRNA sense strand
caagucagaaugcuacuca

SEQ ID NO: 346487 - RNA, 19 nt, Homo sapiens
  misc_RNA (1)...(19): siRNA sense strand
caaagaagauucaguaaca

SEQ ID NO: 346488 - RNA, 19 nt, Homo sapiens
  misc_RNA (1)...(19): siRNA sense strand
gcagaagaccaguuaauua

SEQ ID NO: 346489 - RNA, 19 nt, Homo sapiens
  misc_RNA (1)...(19): siRNA sense strand
gaagaccaguuaauuaaga

SEQ ID NO: 346490 - RNA, 19 nt, Homo sapiens
  misc_RNA (1)...(19): siRNA sense strand
cagacaaacugaucaauuu

SEQ ID NO: 346491 - RNA, 19 nt, Homo sapiens
  misc_RNA (1)...(19): siRNA sense strand
gcaaacaguggaaauaaua

SEQ ID NO: 346492 - RNA, 19 nt, Homo sapiens
  misc_RNA (1)...(19): siRNA sense strand
ucucagagcuggucaguuu

SEQ ID NO: 346493 - RNA, 19 nt, Homo sapiens
  misc_RNA (1)...(19): siRNA sense strand
caaauugcaugaaauguga

SEQ ID NO: 346494 - RNA, 19 nt, Homo sapiens
  misc_RNA (1)...(19): siRNA sense strand
aaacgaagaugaaacaguu

SEQ ID NO: 346495 - RNA, 19 nt, Homo sapiens
  misc_RNA (1)...(19): siRNA sense strand
ucagaaugcuacucaaaua

SEQ ID NO: 346496 - RNA, 19 nt, Homo sapiens
  misc_RNA (1)...(19): siRNA sense strand
gauacaaaguggaauaaga

SEQ ID NO: 346497 - RNA, 19 nt, Homo sapiens
  misc_RNA (1)...(19): siRNA sense strand
gaaugaaucugcaguuucu

SEQ ID NO: 346498 - RNA, 19 nt, Homo sapiens
  misc_RNA (1)...(19): siRNA sense strand
gggaacauuuagaaaguua

SEQ ID NO: 346499 - RNA, 19 nt, Homo sapiens
  misc_RNA (1)...(19): siRNA sense strand
aaacagcacuggugaccua

SEQ ID NO: 346500 - RNA, 19 nt, Homo sapiens
  misc_RNA (1)...(19): siRNA sense strand
gguguuagaugaauuugaa

SEQ ID NO: 346501 - RNA, 19 nt, Homo sapiens
  misc_RNA (1)...(19): siRNA sense strand
gcuguagccugaaauguaa

SEQ ID NO: 346502 - RNA, 19 nt, Homo sapiens
  misc_RNA (1)...(19): siRNA sense strand
gcuguucacuggauaauga

SEQ ID NO: 346503 - RNA, 19 nt, Homo sapiens
  misc_RNA (1)...(19): siRNA sense strand
gaugaaugauagccaagua

SEQ ID NO: 346504 - RNA, 19 nt, Homo sapiens
  misc_RNA (1)...(19): siRNA sense strand
ccugaaauguaaacuguua

SEQ ID NO: 346505 - RNA, 19 nt, Homo sapiens
  misc_RNA (1)...(19): siRNA sense strand
gaagccagguuuacauuca

SEQ ID NO: 346506 - RNA, 19 nt, Homo sapiens
  misc_RNA (1)...(19): siRNA sense strand
gaagcuagaguguguguaa

SEQ ID NO: 346507 - RNA, 19 nt, Homo sapiens
  misc_RNA (1)...(19): siRNA sense strand
cagaagaccaguuaauuaa

SEQ ID NO: 346508 - RNA, 19 nt, Homo sapiens
  misc_RNA (1)...(19): siRNA sense strand
gaaggaauaaugacuguga

SEQ ID NO: 346509 - RNA, 19 nt, Homo sapiens
  misc_RNA (1)...(19): siRNA sense strand
gaagggaguggacuacuuu

SEQ ID NO: 346510 - RNA, 19 nt, Homo sapiens
  misc_RNA (1)...(19): siRNA sense strand
cagauugccuugugccuaa

SEQ ID NO: 346511 - RNA, 19 nt, Homo sapiens
  misc_RNA (1)...(19): siRNA sense strand
gccauuaucagaccauuua

SEQ ID NO: 346512 - RNA, 19 nt, Homo sapiens
  misc_RNA (1)...(19): siRNA sense strand
aagcaaccuucuaaucuua

SEQ ID NO: 346513 - RNA, 19 nt, Homo sapiens
  misc_RNA (1)...(19): siRNA sense strand
caagcaaccuucuaaucuu

SEQ ID NO: 346514 - RNA, 19 nt, Homo sapiens
  misc_RNA (1)...(19): siRNA sense strand
gaggaucacugugcuaaug

SEQ ID NO: 346515 - RNA, 19 nt, Homo sapiens
  misc_RNA (1)...(19): siRNA sense strand
agaugcaggucuagauuua

SEQ ID NO: 346516 - RNA, 19 nt, Homo sapiens
  misc_RNA (1)...(19): siRNA sense strand
aaaggaagcuagagugugu

SEQ ID NO: 346517 - RNA, 19 nt, Homo sapiens
  misc_RNA (1)...(19): siRNA sense strand
gaacuugcauuagugaaag

SEQ ID NO: 346518 - RNA, 19 nt, Homo sapiens
  misc_RNA (1)...(19): siRNA sense strand
uagcaagccugccaucuau

SEQ ID NO: 346519 - RNA, 19 nt, Homo sapiens
  misc_RNA (1)...(19): siRNA sense strand
ugugauuucuccacuguua

SEQ ID NO: 346520 - RNA, 19 nt, Homo sapiens
  misc_RNA (1)...(19): siRNA sense strand
ugucugcgauuacaaguuu

SEQ ID NO: 346521 - RNA, 19 nt, Homo sapiens
  misc_RNA (1)...(19): siRNA sense strand
ccagauagcccagauaaug

SEQ ID NO: 346522 - RNA, 19 nt, Homo sapiens
  misc_RNA (1)...(19): siRNA sense strand
gaaguuagggcugaugaaa

SEQ ID NO: 346523 - RNA, 19 nt, Homo sapiens
  misc_RNA (1)...(19): siRNA sense strand
gaaaugugaagccagguuu

SEQ ID NO: 346524 - RNA, 19 nt, Homo sapiens
  misc_RNA (1)...(19): siRNA sense strand
gaucuagggaguccaaauu

SEQ ID NO: 346525 - RNA, 19 nt, Homo sapiens
  misc_RNA (1)...(19): siRNA sense strand
ucucuaaugucgauacaaa

SEQ ID NO: 346526 - RNA, 19 nt, Homo sapiens
  misc_RNA (1)...(19): siRNA sense strand
gaaagugaagaaugugauu

SEQ ID NO: 346527 - RNA, 19 nt, Homo sapiens
  misc_RNA (1)...(19): siRNA sense strand
ggagagcaccacugaagaa

SEQ ID NO: 346528 - RNA, 19 nt, Homo sapiens
  misc_RNA (1)...(19): siRNA sense strand
aaucugcaguuucuaauga

SEQ ID NO: 346529 - RNA, 19 nt, Homo sapiens
  misc_RNA (1)...(19): siRNA sense strand
ggacagaaaggaagcuaga

SEQ ID NO: 346530 - RNA, 19 nt, Homo sapiens
  misc_RNA (1)...(19): siRNA sense strand
gcagcaaauuaucuaucua

SEQ ID NO: 346531 - RNA, 19 nt, Homo sapiens
  misc_RNA (1)...(19): siRNA sense strand
auaaaugaguccacugaaa

SEQ ID NO: 346532 - RNA, 19 nt, Homo sapiens
  misc_RNA (1)...(19): siRNA sense strand
gugaaugaaucugcaguuu

SEQ ID NO: 346533 - RNA, 19 nt, Homo sapiens
  misc_RNA (1)...(19): siRNA sense strand
gcaaccuucuaaucuuaaa

SEQ ID NO: 346534 - RNA, 19 nt, Homo sapiens
  misc_RNA (1)...(19): siRNA sense strand
ggacaagguguuagaugaa

SEQ ID NO: 346535 - RNA, 19 nt, Homo sapiens
  misc_RNA (1)...(19): siRNA sense strand
ggaacuugcauuagugaaa

SEQ ID NO: 346536 - RNA, 19 nt, Homo sapiens
  misc_RNA (1)...(19): siRNA sense strand
gcugagaucuccacuagac

SEQ ID NO: 346537 - RNA, 19 nt, Homo sapiens
  misc_RNA (1)...(19): siRNA sense strand
guagcaagccugccaucua

SEQ ID NO: 346538 - RNA, 19 nt, Homo sapiens
  misc_RNA (1)...(19): siRNA sense strand
gcuggucaguuuggaauuu

SEQ ID NO: 346539 - RNA, 19 nt, Homo sapiens
  misc_RNA (1)...(19): siRNA sense strand
caaaaugacuuuccugcaa

SEQ ID NO: 346540 - RNA, 19 nt, Homo sapiens
  misc_RNA (1)...(19): siRNA sense strand
gaggaaagcaagucagaau

SEQ ID NO: 346541 - RNA, 19 nt, Homo sapiens
  misc_RNA (1)...(19): siRNA sense strand
ugagguggcuccaguaugg

SEQ ID NO: 346542 - RNA, 19 nt, Homo sapiens
  misc_RNA (1)...(19): siRNA sense strand
agaacuauauaccagauga

SEQ ID NO: 346543 - RNA, 19 nt, Homo sapiens
  misc_RNA (1)...(19): siRNA sense strand
aaaggaacuugcauuagug

SEQ ID NO: 346544 - RNA, 19 nt, Homo sapiens
  misc_RNA (1)...(19): siRNA sense strand
gcagaugcaggucuagauu

SEQ ID NO: 346545 - RNA, 19 nt, Homo sapiens
  misc_RNA (1)...(19): siRNA sense strand
cuaauuggaaguugacuaa

SEQ ID NO: 346546 - RNA, 19 nt, Homo sapiens
  misc_RNA (1)...(19): siRNA sense strand
aaacucagcaaccaaugua

SEQ ID NO: 346547 - RNA, 19 nt, Homo sapiens
  misc_RNA (1)...(19): siRNA sense strand
guggaaaccuggcuugucu

SEQ ID NO: 346548 - RNA, 19 nt, Homo sapiens
  misc_RNA (1)...(19): siRNA sense strand
gagcaccacugaagaaucc

SEQ ID NO: 346549 - RNA, 19 nt, Homo sapiens
  misc_RNA (1)...(19): siRNA sense strand
gaauucagagaaacaaaug

SEQ ID NO: 346550 - RNA, 19 nt, Homo sapiens
  misc_RNA (1)...(19): siRNA sense strand
gacaagguguuagaugaau

SEQ ID NO: 346551 - RNA, 19 nt, Homo sapiens
  misc_RNA (1)...(19): siRNA sense strand
uguuauacauggacagaaa

SEQ ID NO: 346552 - RNA, 19 nt, Homo sapiens
  misc_RNA (1)...(19): siRNA sense strand
caagguguuagaugaauuu

SEQ ID NO: 346553 - RNA, 19 nt, Homo sapiens
  misc_RNA (1)...(19): siRNA sense strand
gacccaagcaaccuucuaa

SEQ ID NO: 346554 - RNA, 19 nt, Homo sapiens
  misc_RNA (1)...(19): siRNA sense strand
gaggagagcaccacugaag

SEQ ID NO: 346555 - RNA, 19 nt, Homo sapiens
  misc_RNA (1)...(19): siRNA sense strand
ggagagaagaaauguggaa

SEQ ID NO: 346556 - RNA, 19 nt, Homo sapiens
  misc_RNA (1)...(19): siRNA sense strand
guauaaaugaguccacuga

SEQ ID NO: 346557 - RNA, 19 nt, Homo sapiens
  misc_RNA (1)...(19): siRNA sense strand
gcuccaaauugcaugaaau

SEQ ID NO: 346558 - RNA, 19 nt, Homo sapiens
  misc_RNA (1)...(19): siRNA sense strand
ggaguggacuacuuuuaaa

SEQ ID NO: 346559 - RNA, 19 nt, Homo sapiens
  misc_RNA (1)...(19): siRNA sense strand
gcacuacagaauuccuuaa

SEQ ID NO: 346560 - RNA, 19 nt, Homo sapiens
  misc_RNA (1)...(19): siRNA sense strand
ugaagguuaugaacaugaa

SEQ ID NO: 346561 - RNA, 19 nt, Homo sapiens
  misc_RNA (1)...(19): siRNA sense strand
ugacggaaguauagguaga

SEQ ID NO: 346562 - RNA, 19 nt, Homo sapiens
  misc_RNA (1)...(19): siRNA sense strand
gaugacggaaguauaggua

SEQ ID NO: 346563 - RNA, 19 nt, Homo sapiens
  misc_RNA (1)...(19): siRNA sense strand
gaagaggaucacugugcua

SEQ ID NO: 346564 - RNA, 19 nt, Homo sapiens
  misc_RNA (1)...(19): siRNA sense strand
cagauagcccagauaauga

SEQ ID NO: 346565 - RNA, 19 nt, Homo sapiens
  misc_RNA (1)...(19): siRNA sense strand
ccaagcaaccuucuaaucu

SEQ ID NO: 346566 - RNA, 19 nt, Homo sapiens
  misc_RNA (1)...(19): siRNA sense strand
guagucaaguuccaucagu

SEQ ID NO: 346567 - RNA, 19 nt, Homo sapiens
  misc_RNA (1)...(19): siRNA sense strand
acacaccagcagcaaauua

SEQ ID NO: 346568 - RNA, 19 nt, Homo sapiens
  misc_RNA (1)...(19): siRNA sense strand
aaaaucagcucuccuagga

SEQ ID NO: 346569 - RNA, 19 nt, Homo sapiens
  misc_RNA (1)...(19): siRNA sense strand
uguccuacuucaucugaua

SEQ ID NO: 346570 - RNA, 19 nt, Homo sapiens
  misc_RNA (1)...(19): siRNA sense strand
cagcacuggugaccuaaug

SEQ ID NO: 346571 - RNA, 19 nt, Homo sapiens
  misc_RNA (1)...(19): siRNA sense strand
gcaagccugccaucuauca

SEQ ID NO: 346572 - RNA, 19 nt, Homo sapiens
  misc_RNA (1)...(19): siRNA sense strand
ggacuguaaucuaaaucca

SEQ ID NO: 346573 - RNA, 19 nt, Homo sapiens
  misc_RNA (1)...(19): siRNA sense strand
ccaaauugcaugaaaugug

SEQ ID NO: 346574 - RNA, 19 nt, Homo sapiens
  misc_RNA (1)...(19): siRNA sense strand
gcacuggugaccuaaugaa

SEQ ID NO: 346575 - RNA, 19 nt, Homo sapiens
  misc_RNA (1)...(19): siRNA sense strand
gaacaaaacgaagaugaaa

SEQ ID NO: 346576 - RNA, 19 nt, Homo sapiens
  misc_RNA (1)...(19): siRNA sense strand
uagugaaagugaagaaugu

SEQ ID NO: 346577 - RNA, 19 nt, Homo sapiens
  misc_RNA (1)...(19): siRNA sense strand
cucaggacaugacuaauug

SEQ ID NO: 346578 - RNA, 19 nt, Homo sapiens
  misc_RNA (1)...(19): siRNA sense strand
ggucuggaaggaauaauga

SEQ ID NO: 346579 - RNA, 19 nt, Homo sapiens
  misc_RNA (1)...(19): siRNA sense strand
uaaugggucuggaaggaau

SEQ ID NO: 346580 - RNA, 19 nt, Homo sapiens
  misc_RNA (1)...(19): siRNA sense strand
gcaagagaacuauauacca

SEQ ID NO: 346581 - RNA, 19 nt, Homo sapiens
  misc_RNA (1)...(19): siRNA sense strand
gaucaaugcagugcuguug

SEQ ID NO: 346582 - RNA, 19 nt, Homo sapiens
  misc_RNA (1)...(19): siRNA sense strand
ucucaccggcugucauuua

SEQ ID NO: 346583 - RNA, 19 nt, Homo sapiens
  misc_RNA (1)...(19): siRNA sense strand
agaagggaguggacuacuu

SEQ ID NO: 346584 - RNA, 19 nt, Homo sapiens
  misc_RNA (1)...(19): siRNA sense strand
ggaaagcaagucagaaugc

SEQ ID NO: 346585 - RNA, 19 nt, Homo sapiens
  misc_RNA (1)...(19): siRNA sense strand
gagaagaaauguggaaacc

SEQ ID NO: 346586 - RNA, 19 nt, Homo sapiens
  misc_RNA (1)...(19): siRNA sense strand
gaagugggagagaagaaau

SEQ ID NO: 346587 - RNA, 19 nt, Homo sapiens
  misc_RNA (1)...(19): siRNA sense strand
caaagaagauucaguaaca

SEQ ID NO: 346588 - RNA, 19 nt, Homo sapiens
  misc_RNA (1)...(19): siRNA sense strand
gcagaagaccaguuaauua

SEQ ID NO: 346589 - RNA, 19 nt, Homo sapiens
  misc_RNA (1)...(19): siRNA sense strand
gaagaccaguuaauuaaga

SEQ ID NO: 346590 - RNA, 19 nt, Homo sapiens
  misc_RNA (1)...(19): siRNA sense strand
cagacaaacugaucaauuu

SEQ ID NO: 346591 - RNA, 19 nt, Homo sapiens
  misc_RNA (1)...(19): siRNA sense strand
gcaaacaguggaaauaaua

SEQ ID NO: 346592 - RNA, 19 nt, Homo sapiens
  misc_RNA (1)...(19): siRNA sense strand
ucucagagcuggucaguuu

SEQ ID NO: 346593 - RNA, 19 nt, Homo sapiens
  misc_RNA (1)...(19): siRNA sense strand
caaauugcaugaaauguga

SEQ ID NO: 346594 - RNA, 19 nt, Homo sapiens
  misc_RNA (1)...(19): siRNA sense strand
aaacgaagaugaaacaguu

SEQ ID NO: 346595 - RNA, 19 nt, Homo sapiens
  misc_RNA (1)...(19): siRNA sense strand
ucagaaugcuacucaaaua

SEQ ID NO: 346596 - RNA, 19 nt, Homo sapiens
  misc_RNA (1)...(19): siRNA sense strand
gauacaaaguggaauaaga

SEQ ID NO: 346597 - RNA, 19 nt, Homo sapiens
  misc_RNA (1)...(19): siRNA sense strand
gaaugaaucugcaguuucu

SEQ ID NO: 346598 - RNA, 19 nt, Homo sapiens
  misc_RNA (1)...(19): siRNA sense strand
gggaacauuuagaaaguua

SEQ ID NO: 346599 - RNA, 19 nt, Homo sapiens
  misc_RNA (1)...(19): siRNA sense strand
aaacagcacuggugaccua

SEQ ID NO: 346600 - RNA, 19 nt, Homo sapiens
  misc_RNA (1)...(19): siRNA sense strand
gguguuagaugaauuugaa

SEQ ID NO: 346601 - RNA, 19 nt, Homo sapiens
  misc_RNA (1)...(19): siRNA sense strand
gcuguagccugaaauguaa

SEQ ID NO: 346602 - RNA, 19 nt, Homo sapiens
  misc_RNA (1)...(19): siRNA sense strand
gcuguucacuggauaauga

SEQ ID NO: 346603 - RNA, 19 nt, Homo sapiens
  misc_RNA (1)...(19): siRNA sense strand
gaugaaugauagccaagua

SEQ ID NO: 346604 - RNA, 19 nt, Homo sapiens
  misc_RNA (1)...(19): siRNA sense strand
ccugaaauguaaacuguua

SEQ ID NO: 346605 - RNA, 19 nt, Homo sapiens
  misc_RNA (1)...(19): siRNA sense strand
gaagccagguuuacauuca

SEQ ID NO: 346606 - RNA, 19 nt, Homo sapiens
  misc_RNA (1)...(19): siRNA sense strand
gaagcuagaguguguguaa

SEQ ID NO: 346607 - RNA, 19 nt, Homo sapiens
  misc_RNA (1)...(19): siRNA sense strand
cagaagaccaguuaauuaa

SEQ ID NO: 346608 - RNA, 19 nt, Homo sapiens
  misc_RNA (1)...(19): siRNA sense strand
gaaggaauaaugacuguga

SEQ ID NO: 346609 - RNA, 19 nt, Homo sapiens
  misc_RNA (1)...(19): siRNA sense strand
gaagggaguggacuacuuu

SEQ ID NO: 346610 - RNA, 19 nt, Homo sapiens
  misc_RNA (1)...(19): siRNA sense strand
cagauugccuugugccuaa

SEQ ID NO: 346611 - RNA, 19 nt, Homo sapiens
  misc_RNA (1)...(19): siRNA sense strand
gccauuaucagaccauuua

SEQ ID NO: 346612 - RNA, 19 nt, Homo sapiens
  misc_RNA (1)...(19): siRNA sense strand
aagcaaccuucuaaucuua

SEQ ID NO: 346613 - RNA, 19 nt, Homo sapiens
  misc_RNA (1)...(19): siRNA sense strand
caagcaaccuucuaaucuu

SEQ ID NO: 346614 - RNA, 19 nt, Homo sapiens
  misc_RNA (1)...(19): siRNA sense strand
gaggaucacugugcuaaug

SEQ ID NO: 346615 - RNA, 19 nt, Homo sapiens
  misc_RNA (1)...(19): siRNA sense strand
agaugcaggucuagauuua

SEQ ID NO: 346616 - RNA, 19 nt, Homo sapiens
  misc_RNA (1)...(19): siRNA sense strand
aaaggaagcuagagugugu

SEQ ID NO: 346617 - RNA, 19 nt, Homo sapiens
  misc_RNA (1)...(19): siRNA sense strand
gaacuugcauuagugaaag

SEQ ID NO: 346618 - RNA, 19 nt, Homo sapiens
  misc_RNA (1)...(19): siRNA sense strand
uagcaagccugccaucuau

SEQ ID NO: 346619 - RNA, 19 nt, Homo sapiens
  misc_RNA (1)...(19): siRNA sense strand
ugugauuucuccacuguua

SEQ ID NO: 346620 - RNA, 19 nt, Homo sapiens
  misc_RNA (1)...(19): siRNA sense strand
ugucugcgauuacaaguuu

SEQ ID NO: 346621 - RNA, 19 nt, Homo sapiens
  misc_RNA (1)...(19): siRNA sense strand
ccagauagcccagauaaug

SEQ ID NO: 346622 - RNA, 19 nt, Homo sapiens
  misc_RNA (1)...(19): siRNA sense strand
gaaguuagggcugaugaaa

SEQ ID NO: 346623 - RNA, 19 nt, Homo sapiens
  misc_RNA (1)...(19): siRNA sense strand
gaaaugugaagccagguuu

SEQ ID NO: 346624 - RNA, 19 nt, Homo sapiens
  misc_RNA (1)...(19): siRNA sense strand
gaucuagggaguccaaauu

SEQ ID NO: 346625 - RNA, 19 nt, Homo sapiens
  misc_RNA (1)...(19): siRNA sense strand
ucucuaaugucgauacaaa

SEQ ID NO: 346626 - RNA, 19 nt, Homo sapiens
  misc_RNA (1)...(19): siRNA sense strand
gaaagugaagaaugugauu

SEQ ID NO: 346627 - RNA, 19 nt, Homo sapiens
  misc_RNA (1)...(19): siRNA sense strand
ggagagcaccacugaagaa

SEQ ID NO: 346628 - RNA, 19 nt, Homo sapiens
  misc_RNA (1)...(19): siRNA sense strand
aaucugcaguuucuaauga

SEQ ID NO: 346629 - RNA, 19 nt, Homo sapiens
  misc_RNA (1)...(19): siRNA sense strand
ggacagaaaggaagcuaga

SEQ ID NO: 346630 - RNA, 19 nt, Homo sapiens
  misc_RNA (1)...(19): siRNA sense strand
gcagcaaauuaucuaucua

SEQ ID NO: 346631 - RNA, 19 nt, Homo sapiens
  misc_RNA (1)...(19): siRNA sense strand
auaaaugaguccacugaaa

SEQ ID NO: 346632 - RNA, 19 nt, Homo sapiens
  misc_RNA (1)...(19): siRNA sense strand
gugaaugaaucugcaguuu

SEQ ID NO: 346633 - RNA, 19 nt, Homo sapiens
  misc_RNA (1)...(19): siRNA sense strand
gcaaccuucuaaucuuaaa

SEQ ID NO: 346634 - RNA, 19 nt, Homo sapiens
  misc_RNA (1)...(19): siRNA sense strand
ggacaagguguuagaugaa

SEQ ID NO: 346635 - RNA, 19 nt, Homo sapiens
  misc_RNA (1)...(19): siRNA sense strand
ggaacuugcauuagugaaa

SEQ ID NO: 346636 - RNA, 19 nt, Homo sapiens
  misc_RNA (1)...(19): siRNA sense strand
gcugagaucuccacuagac

SEQ ID NO: 346637 - RNA, 19 nt, Homo sapiens
  misc_RNA (1)...(19): siRNA sense strand
guagcaagccugccaucua

SEQ ID NO: 346638 - RNA, 19 nt, Homo sapiens
  misc_RNA (1)...(19): siRNA sense strand
gcuggucaguuuggaauuu

SEQ ID NO: 346639 - RNA, 19 nt, Homo sapiens
  misc_RNA (1)...(19): siRNA sense strand
caaaaugacuuuccugcaa

SEQ ID NO: 346640 - RNA, 19 nt, Homo sapiens
  misc_RNA (1)...(19): siRNA sense strand
gaggaaagcaagucagaau

SEQ ID NO: 346641 - RNA, 19 nt, Homo sapiens
  misc_RNA (1)...(19): siRNA sense strand
ugagguggcuccaguaugg

SEQ ID NO: 346642 - RNA, 19 nt, Homo sapiens
  misc_RNA (1)...(19): siRNA sense strand
agaacuauauaccagauga

SEQ ID NO: 346643 - RNA, 19 nt, Homo sapiens
  misc_RNA (1)...(19): siRNA sense strand
aaaggaacuugcauuagug

SEQ ID NO: 346644 - RNA, 19 nt, Homo sapiens
  misc_RNA (1)...(19): siRNA sense strand
gcagaugcaggucuagauu

SEQ ID NO: 346645 - RNA, 19 nt, Homo sapiens
  misc_RNA (1)...(19): siRNA sense strand
cuaauuggaaguugacuaa

SEQ ID NO: 346646 - RNA, 19 nt, Homo sapiens
  misc_RNA (1)...(19): siRNA sense strand
aaacucagcaaccaaugua

SEQ ID NO: 346647 - RNA, 19 nt, Homo sapiens
  misc_RNA (1)...(19): siRNA sense strand
guggaaaccuggcuugucu

SEQ ID NO: 346648 - RNA, 19 nt, Homo sapiens
  misc_RNA (1)...(19): siRNA sense strand
gagcaccacugaagaaucc

SEQ ID NO: 346649 - RNA, 19 nt, Homo sapiens
  misc_RNA (1)...(19): siRNA sense strand
gaauucagagaaacaaaug

SEQ ID NO: 346650 - RNA, 19 nt, Homo sapiens
  misc_RNA (1)...(19): siRNA sense strand
gacaagguguuagaugaau

SEQ ID NO: 346651 - RNA, 19 nt, Homo sapiens
  misc_RNA (1)...(19): siRNA sense strand
uguuauacauggacagaaa

SEQ ID NO: 346652 - RNA, 19 nt, Homo sapiens
  misc_RNA (1)...(19): siRNA sense strand
caagguguuagaugaauuu

SEQ ID NO: 346653 - RNA, 19 nt, Homo sapiens
  misc_RNA (1)...(19): siRNA sense strand
gacccaagcaaccuucuaa

SEQ ID NO: 346654 - RNA, 19 nt, Homo sapiens
  misc_RNA (1)...(19): siRNA sense strand
gaggagagcaccacugaag

SEQ ID NO: 346655 - RNA, 19 nt, Homo sapiens
  misc_RNA (1)...(19): siRNA sense strand
ggagagaagaaauguggaa

SEQ ID NO: 346656 - RNA, 19 nt, Homo sapiens
  misc_RNA (1)...(19): siRNA sense strand
guauaaaugaguccacuga

SEQ ID NO: 346657 - RNA, 19 nt, Homo sapiens
  misc_RNA (1)...(19): siRNA sense strand
gcuccaaauugcaugaaau

SEQ ID NO: 346658 - RNA, 19 nt, Homo sapiens
  misc_RNA (1)...(19): siRNA sense strand
ggaguggacuacuuuuaaa

SEQ ID NO: 346659 - RNA, 19 nt, Homo sapiens
  misc_RNA (1)...(19): siRNA sense strand
gcacuacagaauuccuuaa

SEQ ID NO: 346660 - RNA, 19 nt, Homo sapiens
  misc_RNA (1)...(19): siRNA sense strand
ugaagguuaugaacaugaa

SEQ ID NO: 346661 - RNA, 19 nt, Homo sapiens
  misc_RNA (1)...(19): siRNA sense strand
ugacggaaguauagguaga

SEQ ID NO: 346662 - RNA, 19 nt, Homo sapiens
  misc_RNA (1)...(19): siRNA sense strand
gaugacggaaguauaggua

SEQ ID NO: 346663 - RNA, 19 nt, Homo sapiens
  misc_RNA (1)...(19): siRNA sense strand
gaagaggaucacugugcua

SEQ ID NO: 346664 - RNA, 19 nt, Homo sapiens
  misc_RNA (1)...(19): siRNA sense strand
cagauagcccagauaauga

SEQ ID NO: 346665 - RNA, 19 nt, Homo sapiens
  misc_RNA (1)...(19): siRNA sense strand
ccaagcaaccuucuaaucu

SEQ ID NO: 346666 - RNA, 19 nt, Homo sapiens
  misc_RNA (1)...(19): siRNA sense strand
guagucaaguuccaucagu

SEQ ID NO: 346667 - RNA, 19 nt, Homo sapiens
  misc_RNA (1)...(19): siRNA sense strand
acacaccagcagcaaauua

SEQ ID NO: 346668 - RNA, 19 nt, Homo sapiens
  misc_RNA (1)...(19): siRNA sense strand
aaaaucagcucuccuagga

SEQ ID NO: 346669 - RNA, 19 nt, Homo sapiens
  misc_RNA (1)...(19): siRNA sense strand
uguccuacuucaucugaua

SEQ ID NO: 346670 - RNA, 19 nt, Homo sapiens
  misc_RNA (1)...(19): siRNA sense strand
cagcacuggugaccuaaug

SEQ ID NO: 346671 - RNA, 19 nt, Homo sapiens
  misc_RNA (1)...(19): siRNA sense strand
gcaagccugccaucuauca

SEQ ID NO: 346672 - RNA, 19 nt, Homo sapiens
  misc_RNA (1)...(19): siRNA sense strand
ggacuguaaucuaaaucca

SEQ ID NO: 346673 - RNA, 19 nt, Homo sapiens
  misc_RNA (1)...(19): siRNA sense strand
ccaaauugcaugaaaugug

SEQ ID NO: 346674 - RNA, 19 nt, Homo sapiens
  misc_RNA (1)...(19): siRNA sense strand
gcacuggugaccuaaugaa

SEQ ID NO: 346675 - RNA, 19 nt, Homo sapiens
  misc_RNA (1)...(19): siRNA sense strand
gaacaaaacgaagaugaaa

SEQ ID NO: 346676 - RNA, 19 nt, Homo sapiens
  misc_RNA (1)...(19): siRNA sense strand
uagugaaagugaagaaugu

SEQ ID NO: 346677 - RNA, 19 nt, Homo sapiens
  misc_RNA (1)...(19): siRNA sense strand
cucaggacaugacuaauug

SEQ ID NO: 346678 - RNA, 19 nt, Homo sapiens
  misc_RNA (1)...(19): siRNA sense strand
ggucuggaaggaauaauga

SEQ ID NO: 346679 - RNA, 19 nt, Homo sapiens
  misc_RNA (1)...(19): siRNA sense strand
uaaugggucuggaaggaau

SEQ ID NO: 346680 - RNA, 19 nt, Homo sapiens
  misc_RNA (1)...(19): siRNA sense strand
gcaagagaacuauauacca

SEQ ID NO: 346681 - RNA, 19 nt, Homo sapiens
  misc_RNA (1)...(19): siRNA sense strand
gaucaaugcagugcuguug

SEQ ID NO: 346682 - RNA, 19 nt, Homo sapiens
  misc_RNA (1)...(19): siRNA sense strand
ucucaccggcugucauuua

SEQ ID NO: 346683 - RNA, 19 nt, Homo sapiens
  misc_RNA (1)...(19): siRNA sense strand
agaagggaguggacuacuu

SEQ ID NO: 346684 - RNA, 19 nt, Homo sapiens
  misc_RNA (1)...(19): siRNA sense strand
ggaaagcaagucagaaugc

SEQ ID NO: 346685 - RNA, 19 nt, Homo sapiens
  misc_RNA (1)...(19): siRNA sense strand
gagaagaaauguggaaacc

SEQ ID NO: 346686 - RNA, 19 nt, Homo sapiens
  misc_RNA (1)...(19): siRNA sense strand
gaagugggagagaagaaau

SEQ ID NO: 346687 - RNA, 19 nt, Homo sapiens
  misc_RNA (1)...(19): siRNA sense strand
caaagaagauucaguaaca

SEQ ID NO: 346688 - RNA, 19 nt, Homo sapiens
  misc_RNA (1)...(19): siRNA sense strand
gcagaagaccaguuaauua

SEQ ID NO: 346689 - RNA, 19 nt, Homo sapiens
  misc_RNA (1)...(19): siRNA sense strand
gaagaccaguuaauuaaga

SEQ ID NO: 346690 - RNA, 19 nt, Homo sapiens
  misc_RNA (1)...(19): siRNA sense strand
cagacaaacugaucaauuu

SEQ ID NO: 346691 - RNA, 19 nt, Homo sapiens
  misc_RNA (1)...(19): siRNA sense strand
gcaaacaguggaaauaaua

SEQ ID NO: 346692 - RNA, 19 nt, Homo sapiens
  misc_RNA (1)...(19): siRNA sense strand
ucucagagcuggucaguuu

SEQ ID NO: 346693 - RNA, 19 nt, Homo sapiens
  misc_RNA (1)...(19): siRNA sense strand
caaauugcaugaaauguga

SEQ ID NO: 346694 - RNA, 19 nt, Homo sapiens
  misc_RNA (1)...(19): siRNA sense strand
ucagaaugcuacucaaaua

SEQ ID NO: 346695 - RNA, 19 nt, Homo sapiens
  misc_RNA (1)...(19): siRNA sense strand
gggaacauuuagaaaguua

SEQ ID NO: 346696 - RNA, 19 nt, Homo sapiens
  misc_RNA (1)...(19): siRNA sense strand
aaacagcacuggugaccua

SEQ ID NO: 346697 - RNA, 19 nt, Homo sapiens
  misc_RNA (1)...(19): siRNA sense strand
gcuguucacuggauaauga

SEQ ID NO: 346698 - RNA, 19 nt, Homo sapiens
  misc_RNA (1)...(19): siRNA sense strand
gcuguagccugaaauguaa

SEQ ID NO: 346699 - RNA, 19 nt, Homo sapiens
  misc_RNA (1)...(19): siRNA sense strand
gaugaaugauagccaagua

SEQ ID NO: 346700 - RNA, 19 nt, Homo sapiens
  misc_RNA (1)...(19): siRNA sense strand
ccugaaauguaaacuguua

SEQ ID NO: 346701 - RNA, 19 nt, Homo sapiens
  misc_RNA (1)...(19): siRNA sense strand
gaagccagguuuacauuca

SEQ ID NO: 346702 - RNA, 19 nt, Homo sapiens
  misc_RNA (1)...(19): siRNA sense strand
gaagcuagaguguguguaa

SEQ ID NO: 346703 - RNA, 19 nt, Homo sapiens
  misc_RNA (1)...(19): siRNA sense strand
cagaagaccaguuaauuaa

SEQ ID NO: 346704 - RNA, 19 nt, Homo sapiens
  misc_RNA (1)...(19): siRNA sense strand
gaaggaauaaugacuguga

SEQ ID NO: 346705 - RNA, 19 nt, Homo sapiens
  misc_RNA (1)...(19): siRNA sense strand
gaagggaguggacuacuuu

SEQ ID NO: 346706 - RNA, 19 nt, Homo sapiens
  misc_RNA (1)...(19): siRNA sense strand
cagauugccuugugccuaa

SEQ ID NO: 346707 - RNA, 19 nt, Homo sapiens
  misc_RNA (1)...(19): siRNA sense strand
gccauuaucagaccauuua

SEQ ID NO: 346708 - RNA, 19 nt, Homo sapiens
  misc_RNA (1)...(19): siRNA sense strand
aagcaaccuucuaaucuua

SEQ ID NO: 346709 - RNA, 19 nt, Homo sapiens
  misc_RNA (1)...(19): siRNA sense strand
caagcaaccuucuaaucuu

SEQ ID NO: 346710 - RNA, 19 nt, Homo sapiens
  misc_RNA (1)...(19): siRNA sense strand
agaugcaggucuagauuua

SEQ ID NO: 346711 - RNA, 19 nt, Homo sapiens
  misc_RNA (1)...(19): siRNA sense strand
aaaggaagcuagagugugu

SEQ ID NO: 346712 - RNA, 19 nt, Homo sapiens
  misc_RNA (1)...(19): siRNA sense strand
gaacuugcauuagugaaag

SEQ ID NO: 346713 - RNA, 19 nt, Homo sapiens
  misc_RNA (1)...(19): siRNA sense strand
uagcaagccugccaucuau

SEQ ID NO: 346714 - RNA, 19 nt, Homo sapiens
  misc_RNA (1)...(19): siRNA sense strand
ugugauuucuccacuguua

SEQ ID NO: 346715 - RNA, 19 nt, Homo sapiens
  misc_RNA (1)...(19): siRNA sense strand
ugucugcgauuacaaguuu

SEQ ID NO: 346716 - RNA, 19 nt, Homo sapiens
  misc_RNA (1)...(19): siRNA sense strand
ccagauagcccagauaaug

SEQ ID NO: 346717 - RNA, 19 nt, Homo sapiens
  misc_RNA (1)...(19): siRNA sense strand
gaaguuagggcugaugaaa

SEQ ID NO: 346718 - RNA, 19 nt, Homo sapiens
  misc_RNA (1)...(19): siRNA sense strand
gaaaugugaagccagguuu

SEQ ID NO: 346719 - RNA, 19 nt, Homo sapiens
  misc_RNA (1)...(19): siRNA sense strand
gaucuagggaguccaaauu

SEQ ID NO: 346720 - RNA, 19 nt, Homo sapiens
  misc_RNA (1)...(19): siRNA sense strand
ucucuaaugucgauacaaa

SEQ ID NO: 346721 - RNA, 19 nt, Homo sapiens
  misc_RNA (1)...(19): siRNA sense strand
gaaagugaagaaugugauu

SEQ ID NO: 346722 - RNA, 19 nt, Homo sapiens
  misc_RNA (1)...(19): siRNA sense strand
ggagagcaccacugaagaa

SEQ ID NO: 346723 - RNA, 19 nt, Homo sapiens
  misc_RNA (1)...(19): siRNA sense strand
auaaaugaguccacugaaa

SEQ ID NO: 346724 - RNA, 19 nt, Homo sapiens
  misc_RNA (1)...(19): siRNA sense strand
ggacagaaaggaagcuaga

SEQ ID NO: 346725 - RNA, 19 nt, Homo sapiens
  misc_RNA (1)...(19): siRNA sense strand
gcagcaaauuaucuaucua

SEQ ID NO: 346726 - RNA, 19 nt, Homo sapiens
  misc_RNA (1)...(19): siRNA sense strand
gcaaccuucuaaucuuaaa

SEQ ID NO: 346727 - RNA, 19 nt, Homo sapiens
  misc_RNA (1)...(19): siRNA sense strand
ggaacuugcauuagugaaa

SEQ ID NO: 346728 - RNA, 19 nt, Homo sapiens
  misc_RNA (1)...(19): siRNA sense strand
gcugagaucuccacuagac

SEQ ID NO: 346729 - RNA, 19 nt, Homo sapiens
  misc_RNA (1)...(19): siRNA sense strand
guagcaagccugccaucua

SEQ ID NO: 346730 - RNA, 19 nt, Homo sapiens
  misc_RNA (1)...(19): siRNA sense strand
gcuggucaguuuggaauuu

SEQ ID NO: 346731 - RNA, 19 nt, Homo sapiens
  misc_RNA (1)...(19): siRNA sense strand
caaaaugacuuuccugcaa

SEQ ID NO: 346732 - RNA, 19 nt, Homo sapiens
  misc_RNA (1)...(19): siRNA sense strand
gaggaaagcaagucagaau

SEQ ID NO: 346733 - RNA, 19 nt, Homo sapiens
  misc_RNA (1)...(19): siRNA sense strand
ugagguggcuccaguaugg

SEQ ID NO: 346734 - RNA, 19 nt, Homo sapiens
  misc_RNA (1)...(19): siRNA sense strand
agaacuauauaccagauga

SEQ ID NO: 346735 - RNA, 19 nt, Homo sapiens
  misc_RNA (1)...(19): siRNA sense strand
aaaggaacuugcauuagug

SEQ ID NO: 346736 - RNA, 19 nt, Homo sapiens
  misc_RNA (1)...(19): siRNA sense strand
gcagaugcaggucuagauu

SEQ ID NO: 346737 - RNA, 19 nt, Homo sapiens
  misc_RNA (1)...(19): siRNA sense strand
cuaauuggaaguugacuaa

SEQ ID NO: 346738 - RNA, 19 nt, Homo sapiens
  misc_RNA (1)...(19): siRNA sense strand
aaacucagcaaccaaugua

SEQ ID NO: 346739 - RNA, 19 nt, Homo sapiens
  misc_RNA (1)...(19): siRNA sense strand
gaauucagagaaacaaaug

SEQ ID NO: 346740 - RNA, 19 nt, Homo sapiens
  misc_RNA (1)...(19): siRNA sense strand
gagcaccacugaagaaucc

SEQ ID NO: 346741 - RNA, 19 nt, Homo sapiens
  misc_RNA (1)...(19): siRNA sense strand
guggaaaccuggcuugucu

SEQ ID NO: 346742 - RNA, 19 nt, Homo sapiens
  misc_RNA (1)...(19): siRNA sense strand
gaggagagcaccacugaag

SEQ ID NO: 346743 - RNA, 19 nt, Homo sapiens
  misc_RNA (1)...(19): siRNA sense strand
uguuauacauggacagaaa

SEQ ID NO: 346744 - RNA, 19 nt, Homo sapiens
  misc_RNA (1)...(19): siRNA sense strand
ggagagaagaaauguggaa

SEQ ID NO: 346745 - RNA, 19 nt, Homo sapiens
  misc_RNA (1)...(19): siRNA sense strand
gacccaagcaaccuucuaa

SEQ ID NO: 346746 - RNA, 19 nt, Homo sapiens
  misc_RNA (1)...(19): siRNA sense strand
guauaaaugaguccacuga

SEQ ID NO: 346747 - RNA, 19 nt, Homo sapiens
  misc_RNA (1)...(19): siRNA sense strand
gcuccaaauugcaugaaau

SEQ ID NO: 346748 - RNA, 19 nt, Homo sapiens
  misc_RNA (1)...(19): siRNA sense strand
ggaguggacuacuuuuaaa

SEQ ID NO: 346749 - RNA, 19 nt, Homo sapiens
  misc_RNA (1)...(19): siRNA sense strand
gcacuacagaauuccuuaa

SEQ ID NO: 346750 - RNA, 19 nt, Homo sapiens
  misc_RNA (1)...(19): siRNA sense strand
ugaagguuaugaacaugaa

SEQ ID NO: 346751 - RNA, 19 nt, Homo sapiens
  misc_RNA (1)...(19): siRNA sense strand
ugacggaaguauagguaga

SEQ ID NO: 346752 - RNA, 19 nt, Homo sapiens
  misc_RNA (1)...(19): siRNA sense strand
gaugacggaaguauaggua

SEQ ID NO: 346753 - RNA, 19 nt, Homo sapiens
  misc_RNA (1)...(19): siRNA sense strand
uguccuacuucaucugaua

SEQ ID NO: 346754 - RNA, 19 nt, Homo sapiens
  misc_RNA (1)...(19): siRNA sense strand
cagauagcccagauaauga

SEQ ID NO: 346755 - RNA, 19 nt, Homo sapiens
  misc_RNA (1)...(19): siRNA sense strand
ccaagcaaccuucuaaucu

SEQ ID NO: 346756 - RNA, 19 nt, Homo sapiens
  misc_RNA (1)...(19): siRNA sense strand
guagucaaguuccaucagu

SEQ ID NO: 346757 - RNA, 19 nt, Homo sapiens
  misc_RNA (1)...(19): siRNA sense strand
acacaccagcagcaaauua

SEQ ID NO: 346758 - RNA, 19 nt, Homo sapiens
  misc_RNA (1)...(19): siRNA sense strand
aaaaucagcucuccuagga

SEQ ID NO: 346759 - RNA, 19 nt, Homo sapiens
  misc_RNA (1)...(19): siRNA sense strand
cagcacuggugaccuaaug

SEQ ID NO: 346760 - RNA, 19 nt, Homo sapiens
  misc_RNA (1)...(19): siRNA sense strand
gcaagccugccaucuauca

SEQ ID NO: 346761 - RNA, 19 nt, Homo sapiens
  misc_RNA (1)...(19): siRNA sense strand
gcaagagaacuauauacca

SEQ ID NO: 346762 - RNA, 19 nt, Homo sapiens
  misc_RNA (1)...(19): siRNA sense strand
ccaaauugcaugaaaugug

SEQ ID NO: 346763 - RNA, 19 nt, Homo sapiens
  misc_RNA (1)...(19): siRNA sense strand
gcacuggugaccuaaugaa

SEQ ID NO: 346764 - RNA, 19 nt, Homo sapiens
  misc_RNA (1)...(19): siRNA sense strand
uagugaaagugaagaaugu

SEQ ID NO: 346765 - RNA, 19 nt, Homo sapiens
  misc_RNA (1)...(19): siRNA sense strand
cucaggacaugacuaauug

SEQ ID NO: 346766 - RNA, 19 nt, Homo sapiens
  misc_RNA (1)...(19): siRNA sense strand
ggucuggaaggaauaauga

SEQ ID NO: 346767 - RNA, 19 nt, Homo sapiens
  misc_RNA (1)...(19): siRNA sense strand
uaaugggucuggaaggaau

SEQ ID NO: 346768 - RNA, 19 nt, Homo sapiens
  misc_RNA (1)...(19): siRNA sense strand
gaagugggagagaagaaau

SEQ ID NO: 346769 - RNA, 19 nt, Homo sapiens
  misc_RNA (1)...(19): siRNA sense strand
gagaagaaauguggaaacc

SEQ ID NO: 346770 - RNA, 19 nt, Homo sapiens
  misc_RNA (1)...(19): siRNA sense strand
gaucaaugcagugcuguug

SEQ ID NO: 346771 - RNA, 19 nt, Homo sapiens
  misc_RNA (1)...(19): siRNA sense strand
ugaaaaugcuguugcagaa

SEQ ID NO: 346772 - RNA, 19 nt, Homo sapiens
  misc_RNA (1)...(19): siRNA sense strand
agaagggaguggacuacuu

SEQ ID NO: 346773 - RNA, 19 nt, Homo sapiens
  misc_RNA (1)...(19): siRNA sense strand
ggaaagcaagucagaaugc

SEQ ID NO: 346774 - RNA, 19 nt, Homo sapiens
  misc_RNA (1)...(19): siRNA sense strand
ugaaugauagccaaguaaa

SEQ ID NO: 346775 - RNA, 19 nt, Homo sapiens
  misc_RNA (1)...(19): siRNA sense strand
ugacuuuccugcaaacagu

SEQ ID NO: 346776 - RNA, 19 nt, Homo sapiens
  misc_RNA (1)...(19): siRNA sense strand
gaggaaaugaggccacaga

SEQ ID NO: 346777 - RNA, 19 nt, Homo sapiens
  misc_RNA (1)...(19): siRNA sense strand
gauaugaauucagagaaac

SEQ ID NO: 346778 - RNA, 19 nt, Homo sapiens
  misc_RNA (1)...(19): siRNA sense strand
aaucugccauucagugcua

SEQ ID NO: 346779 - RNA, 19 nt, Homo sapiens
  misc_RNA (1)...(19): siRNA sense strand
cuggugaccuaaugaagaa

SEQ ID NO: 346780 - RNA, 19 nt, Homo sapiens
  misc_RNA (1)...(19): siRNA sense strand
aaaaggaacuugcauuagu

SEQ ID NO: 346781 - RNA, 19 nt, Homo sapiens
  misc_RNA (1)...(19): siRNA sense strand
ucucaggacaugacuaauu

SEQ ID NO: 346782 - RNA, 19 nt, Homo sapiens
  misc_RNA (1)...(19): siRNA sense strand
cagaggagagcaccacuga

SEQ ID NO: 346783 - RNA, 19 nt, Homo sapiens
  misc_RNA (1)...(19): siRNA sense strand
ccuaaugggucuggaagga

SEQ ID NO: 346784 - RNA, 19 nt, Homo sapiens
  misc_RNA (1)...(19): siRNA sense strand
guaaacuguuauacaugga

SEQ ID NO: 346785 - RNA, 19 nt, Homo sapiens
  misc_RNA (1)...(19): siRNA sense strand
ggaaaugaggccacagaag

SEQ ID NO: 346786 - RNA, 19 nt, Homo sapiens
  misc_RNA (1)...(19): siRNA sense strand
caagucagaaugcuacuca

SEQ ID NO: 346787 - RNA, 19 nt, Homo sapiens
  misc_RNA (1)...(19): siRNA sense strand
caaagaagauucaguaaca

SEQ ID NO: 346788 - RNA, 19 nt, Homo sapiens
  misc_RNA (1)...(19): siRNA sense strand
gcagaagaccaguuaauua

SEQ ID NO: 346789 - RNA, 19 nt, Homo sapiens
  misc_RNA (1)...(19): siRNA sense strand
gaagaccaguuaauuaaga

SEQ ID NO: 346790 - RNA, 19 nt, Homo sapiens
  misc_RNA (1)...(19): siRNA sense strand
cagacaaacugaucaauuu

SEQ ID NO: 346791 - RNA, 19 nt, Homo sapiens
  misc_RNA (1)...(19): siRNA sense strand
gcaaacaguggaaauaaua

SEQ ID NO: 346792 - RNA, 19 nt, Homo sapiens
  misc_RNA (1)...(19): siRNA sense strand
ucucagagcuggucaguuu

SEQ ID NO: 346793 - RNA, 19 nt, Homo sapiens
  misc_RNA (1)...(19): siRNA sense strand
caaauugcaugaaauguga

SEQ ID NO: 346794 - RNA, 19 nt, Homo sapiens
  misc_RNA (1)...(19): siRNA sense strand
aaacgaagaugaaacaguu

SEQ ID NO: 346795 - RNA, 19 nt, Homo sapiens
  misc_RNA (1)...(19): siRNA sense strand
ucagaaugcuacucaaaua

SEQ ID NO: 346796 - RNA, 19 nt, Homo sapiens
  misc_RNA (1)...(19): siRNA sense strand
gauacaaaguggaauaaga

SEQ ID NO: 346797 - RNA, 19 nt, Homo sapiens
  misc_RNA (1)...(19): siRNA sense strand
gaaugaaucugcaguuucu

SEQ ID NO: 346798 - RNA, 19 nt, Homo sapiens
  misc_RNA (1)...(19): siRNA sense strand
gggaacauuuagaaaguua

SEQ ID NO: 346799 - RNA, 19 nt, Homo sapiens
  misc_RNA (1)...(19): siRNA sense strand
aaacagcacuggugaccua

SEQ ID NO: 346800 - RNA, 19 nt, Homo sapiens
  misc_RNA (1)...(19): siRNA sense strand
gguguuagaugaauuugaa

SEQ ID NO: 346801 - RNA, 19 nt, Homo sapiens
  misc_RNA (1)...(19): siRNA sense strand
gcuguagccugaaauguaa

SEQ ID NO: 346802 - RNA, 19 nt, Homo sapiens
  misc_RNA (1)...(19): siRNA sense strand
gcuguucacuggauaauga

SEQ ID NO: 346803 - RNA, 19 nt, Homo sapiens
  misc_RNA (1)...(19): siRNA sense strand
gaugaaugauagccaagua

SEQ ID NO: 346804 - RNA, 19 nt, Homo sapiens
  misc_RNA (1)...(19): siRNA sense strand
ccugaaauguaaacuguua

SEQ ID NO: 346805 - RNA, 19 nt, Homo sapiens
  misc_RNA (1)...(19): siRNA sense strand
gaagccagguuuacauuca

SEQ ID NO: 346806 - RNA, 19 nt, Homo sapiens
  misc_RNA (1)...(19): siRNA sense strand
gaagcuagaguguguguaa

SEQ ID NO: 346807 - RNA, 19 nt, Homo sapiens
  misc_RNA (1)...(19): siRNA sense strand
cagaagaccaguuaauuaa

SEQ ID NO: 346808 - RNA, 19 nt, Homo sapiens
  misc_RNA (1)...(19): siRNA sense strand
gaaggaauaaugacuguga

SEQ ID NO: 346809 - RNA, 19 nt, Homo sapiens
  misc_RNA (1)...(19): siRNA sense strand
gaagggaguggacuacuuu

SEQ ID NO: 346810 - RNA, 19 nt, Homo sapiens
  misc_RNA (1)...(19): siRNA sense strand
cagauugccuugugccuaa

SEQ ID NO: 346811 - RNA, 19 nt, Homo sapiens
  misc_RNA (1)...(19): siRNA sense strand
gccauuaucagaccauuua

SEQ ID NO: 346812 - RNA, 19 nt, Homo sapiens
  misc_RNA (1)...(19): siRNA sense strand
aagcaaccuucuaaucuua

SEQ ID NO: 346813 - RNA, 19 nt, Homo sapiens
  misc_RNA (1)...(19): siRNA sense strand
caagcaaccuucuaaucuu

SEQ ID NO: 346814 - RNA, 19 nt, Homo sapiens
  misc_RNA (1)...(19): siRNA sense strand
gaggaucacugugcuaaug

SEQ ID NO: 346815 - RNA, 19 nt, Homo sapiens
  misc_RNA (1)...(19): siRNA sense strand
agaugcaggucuagauuua

SEQ ID NO: 346816 - RNA, 19 nt, Homo sapiens
  misc_RNA (1)...(19): siRNA sense strand
aaaggaagcuagagugugu

SEQ ID NO: 346817 - RNA, 19 nt, Homo sapiens
  misc_RNA (1)...(19): siRNA sense strand
gaacuugcauuagugaaag

SEQ ID NO: 346818 - RNA, 19 nt, Homo sapiens
  misc_RNA (1)...(19): siRNA sense strand
uagcaagccugccaucuau

SEQ ID NO: 346819 - RNA, 19 nt, Homo sapiens
  misc_RNA (1)...(19): siRNA sense strand
ugugauuucuccacuguua

SEQ ID NO: 346820 - RNA, 19 nt, Homo sapiens
  misc_RNA (1)...(19): siRNA sense strand
ugucugcgauuacaaguuu

SEQ ID NO: 346821 - RNA, 19 nt, Homo sapiens
  misc_RNA (1)...(19): siRNA sense strand
ccagauagcccagauaaug

SEQ ID NO: 346822 - RNA, 19 nt, Homo sapiens
  misc_RNA (1)...(19): siRNA sense strand
gaaguuagggcugaugaaa

SEQ ID NO: 346823 - RNA, 19 nt, Homo sapiens
  misc_RNA (1)...(19): siRNA sense strand
gaaaugugaagccagguuu

SEQ ID NO: 346824 - RNA, 19 nt, Homo sapiens
  misc_RNA (1)...(19): siRNA sense strand
gaucuagggaguccaaauu

SEQ ID NO: 346825 - RNA, 19 nt, Homo sapiens
  misc_RNA (1)...(19): siRNA sense strand
ucucuaaugucgauacaaa

SEQ ID NO: 346826 - RNA, 19 nt, Homo sapiens
  misc_RNA (1)...(19): siRNA sense strand
gaaagugaagaaugugauu

SEQ ID NO: 346827 - RNA, 19 nt, Homo sapiens
  misc_RNA (1)...(19): siRNA sense strand
ggagagcaccacugaagaa

SEQ ID NO: 346828 - RNA, 19 nt, Homo sapiens
  misc_RNA (1)...(19): siRNA sense strand
aaucugcaguuucuaauga

SEQ ID NO: 346829 - RNA, 19 nt, Homo sapiens
  misc_RNA (1)...(19): siRNA sense strand
ggacagaaaggaagcuaga

SEQ ID NO: 346830 - RNA, 19 nt, Homo sapiens
  misc_RNA (1)...(19): siRNA sense strand
gcagcaaauuaucuaucua

SEQ ID NO: 346831 - RNA, 19 nt, Homo sapiens
  misc_RNA (1)...(19): siRNA sense strand
auaaaugaguccacugaaa

SEQ ID NO: 346832 - RNA, 19 nt, Homo sapiens
  misc_RNA (1)...(19): siRNA sense strand
gugaaugaaucugcaguuu

SEQ ID NO: 346833 - RNA, 19 nt, Homo sapiens
  misc_RNA (1)...(19): siRNA sense strand
gcaaccuucuaaucuuaaa

SEQ ID NO: 346834 - RNA, 19 nt, Homo sapiens
  misc_RNA (1)...(19): siRNA sense strand
ggacaagguguuagaugaa

SEQ ID NO: 346835 - RNA, 19 nt, Homo sapiens
  misc_RNA (1)...(19): siRNA sense strand
ggaacuugcauuagugaaa

SEQ ID NO: 346836 - RNA, 19 nt, Homo sapiens
  misc_RNA (1)...(19): siRNA sense strand
gcugagaucuccacuagac

SEQ ID NO: 346837 - RNA, 19 nt, Homo sapiens
  misc_RNA (1)...(19): siRNA sense strand
guagcaagccugccaucua

SEQ ID NO: 346838 - RNA, 19 nt, Homo sapiens
  misc_RNA (1)...(19): siRNA sense strand
gcuggucaguuuggaauuu

SEQ ID NO: 346839 - RNA, 19 nt, Homo sapiens
  misc_RNA (1)...(19): siRNA sense strand
caaaaugacuuuccugcaa

SEQ ID NO: 346840 - RNA, 19 nt, Homo sapiens
  misc_RNA (1)...(19): siRNA sense strand
gaggaaagcaagucagaau

SEQ ID NO: 346841 - RNA, 19 nt, Homo sapiens
  misc_RNA (1)...(19): siRNA sense strand
ugagguggcuccaguaugg

SEQ ID NO: 346842 - RNA, 19 nt, Homo sapiens
  misc_RNA (1)...(19): siRNA sense strand
agaacuauauaccagauga

SEQ ID NO: 346843 - RNA, 19 nt, Homo sapiens
  misc_RNA (1)...(19): siRNA sense strand
aaaggaacuugcauuagug

SEQ ID NO: 346844 - RNA, 19 nt, Homo sapiens
  misc_RNA (1)...(19): siRNA sense strand
gcagaugcaggucuagauu

SEQ ID NO: 346845 - RNA, 19 nt, Homo sapiens
  misc_RNA (1)...(19): siRNA sense strand
cuaauuggaaguugacuaa

SEQ ID NO: 346846 - RNA, 19 nt, Homo sapiens
  misc_RNA (1)...(19): siRNA sense strand
aaacucagcaaccaaugua

SEQ ID NO: 346847 - RNA, 19 nt, Homo sapiens
  misc_RNA (1)...(19): siRNA sense strand
guggaaaccuggcuugucu

SEQ ID NO: 346848 - RNA, 19 nt, Homo sapiens
  misc_RNA (1)...(19): siRNA sense strand
gagcaccacugaagaaucc

SEQ ID NO: 346849 - RNA, 19 nt, Homo sapiens
  misc_RNA (1)...(19): siRNA sense strand
gaauucagagaaacaaaug

SEQ ID NO: 346850 - RNA, 19 nt, Homo sapiens
  misc_RNA (1)...(19): siRNA sense strand
gacaagguguuagaugaau

SEQ ID NO: 346851 - RNA, 19 nt, Homo sapiens
  misc_RNA (1)...(19): siRNA sense strand
uguuauacauggacagaaa

SEQ ID NO: 346852 - RNA, 19 nt, Homo sapiens
  misc_RNA (1)...(19): siRNA sense strand
caagguguuagaugaauuu

SEQ ID NO: 346853 - RNA, 19 nt, Homo sapiens
  misc_RNA (1)...(19): siRNA sense strand
gacccaagcaaccuucuaa

SEQ ID NO: 346854 - RNA, 19 nt, Homo sapiens
  misc_RNA (1)...(19): siRNA sense strand
gaggagagcaccacugaag

SEQ ID NO: 346855 - RNA, 19 nt, Homo sapiens
  misc_RNA (1)...(19): siRNA sense strand
ggagagaagaaauguggaa

SEQ ID NO: 346856 - RNA, 19 nt, Homo sapiens
  misc_RNA (1)...(19): siRNA sense strand
guauaaaugaguccacuga

SEQ ID NO: 346857 - RNA, 19 nt, Homo sapiens
  misc_RNA (1)...(19): siRNA sense strand
gcuccaaauugcaugaaau

SEQ ID NO: 346858 - RNA, 19 nt, Homo sapiens
  misc_RNA (1)...(19): siRNA sense strand
ggaguggacuacuuuuaaa

SEQ ID NO: 346859 - RNA, 19 nt, Homo sapiens
  misc_RNA (1)...(19): siRNA sense strand
gcacuacagaauuccuuaa

SEQ ID NO: 346860 - RNA, 19 nt, Homo sapiens
  misc_RNA (1)...(19): siRNA sense strand
ugaagguuaugaacaugaa

SEQ ID NO: 346861 - RNA, 19 nt, Homo sapiens
  misc_RNA (1)...(19): siRNA sense strand
ugacggaaguauagguaga

SEQ ID NO: 346862 - RNA, 19 nt, Homo sapiens
  misc_RNA (1)...(19): siRNA sense strand
gaugacggaaguauaggua

SEQ ID NO: 346863 - RNA, 19 nt, Homo sapiens
  misc_RNA (1)...(19): siRNA sense strand
gaagaggaucacugugcua

SEQ ID NO: 346864 - RNA, 19 nt, Homo sapiens
  misc_RNA (1)...(19): siRNA sense strand
cagauagcccagauaauga

SEQ ID NO: 346865 - RNA, 19 nt, Homo sapiens
  misc_RNA (1)...(19): siRNA sense strand
ccaagcaaccuucuaaucu

SEQ ID NO: 346866 - RNA, 19 nt, Homo sapiens
  misc_RNA (1)...(19): siRNA sense strand
guagucaaguuccaucagu

SEQ ID NO: 346867 - RNA, 19 nt, Homo sapiens
  misc_RNA (1)...(19): siRNA sense strand
acacaccagcagcaaauua

SEQ ID NO: 346868 - RNA, 19 nt, Homo sapiens
  misc_RNA (1)...(19): siRNA sense strand
aaaaucagcucuccuagga

SEQ ID NO: 346869 - RNA, 19 nt, Homo sapiens
  misc_RNA (1)...(19): siRNA sense strand
uguccuacuucaucugaua

SEQ ID NO: 346870 - RNA, 19 nt, Homo sapiens
  misc_RNA (1)...(19): siRNA sense strand
cagcacuggugaccuaaug

SEQ ID NO: 346871 - RNA, 19 nt, Homo sapiens
  misc_RNA (1)...(19): siRNA sense strand
gcaagccugccaucuauca

SEQ ID NO: 346872 - RNA, 19 nt, Homo sapiens
  misc_RNA (1)...(19): siRNA sense strand
ggacuguaaucuaaaucca

SEQ ID NO: 346873 - RNA, 19 nt, Homo sapiens
  misc_RNA (1)...(19): siRNA sense strand
ccaaauugcaugaaaugug

SEQ ID NO: 346874 - RNA, 19 nt, Homo sapiens
  misc_RNA (1)...(19): siRNA sense strand
gcacuggugaccuaaugaa

SEQ ID NO: 346875 - RNA, 19 nt, Homo sapiens
  misc_RNA (1)...(19): siRNA sense strand
gaacaaaacgaagaugaaa

SEQ ID NO: 346876 - RNA, 19 nt, Homo sapiens
  misc_RNA (1)...(19): siRNA sense strand
uagugaaagugaagaaugu

SEQ ID NO: 346877 - RNA, 19 nt, Homo sapiens
  misc_RNA (1)...(19): siRNA sense strand
cucaggacaugacuaauug

SEQ ID NO: 346878 - RNA, 19 nt, Homo sapiens
  misc_RNA (1)...(19): siRNA sense strand
ggucuggaaggaauaauga

SEQ ID NO: 346879 - RNA, 19 nt, Homo sapiens
  misc_RNA (1)...(19): siRNA sense strand
uaaugggucuggaaggaau

SEQ ID NO: 346880 - RNA, 19 nt, Homo sapiens
  misc_RNA (1)...(19): siRNA sense strand
gcaagagaacuauauacca

SEQ ID NO: 346881 - RNA, 19 nt, Homo sapiens
  misc_RNA (1)...(19): siRNA sense strand
gaucaaugcagugcuguug

SEQ ID NO: 346882 - RNA, 19 nt, Homo sapiens
  misc_RNA (1)...(19): siRNA sense strand
ucucaccggcugucauuua

SEQ ID NO: 346883 - RNA, 19 nt, Homo sapiens
  misc_RNA (1)...(19): siRNA sense strand
agaagggaguggacuacuu

SEQ ID NO: 346884 - RNA, 19 nt, Homo sapiens
  misc_RNA (1)...(19): siRNA sense strand
ggaaagcaagucagaaugc

SEQ ID NO: 346885 - RNA, 19 nt, Homo sapiens
  misc_RNA (1)...(19): siRNA sense strand
gagaagaaauguggaaacc

SEQ ID NO: 346886 - RNA, 19 nt, Homo sapiens
  misc_RNA (1)...(19): siRNA sense strand
gaagugggagagaagaaau

SEQ ID NO: 346887 - RNA, 19 nt, Homo sapiens
  misc_RNA (1)...(19): siRNA sense strand
caaagaagauucaguaaca

SEQ ID NO: 346888 - RNA, 19 nt, Homo sapiens
  misc_RNA (1)...(19): siRNA sense strand
gcagaagaccaguuaauua

SEQ ID NO: 346889 - RNA, 19 nt, Homo sapiens
  misc_RNA (1)...(19): siRNA sense strand
gaagaccaguuaauuaaga

SEQ ID NO: 346890 - RNA, 19 nt, Homo sapiens
  misc_RNA (1)...(19): siRNA sense strand
cagacaaacugaucaauuu

SEQ ID NO: 346891 - RNA, 19 nt, Homo sapiens
  misc_RNA (1)...(19): siRNA sense strand
gcaaacaguggaaauaaua

SEQ ID NO: 346892 - RNA, 19 nt, Homo sapiens
  misc_RNA (1)...(19): siRNA sense strand
ucucagagcuggucaguuu

SEQ ID NO: 346893 - RNA, 19 nt, Homo sapiens
  misc_RNA (1)...(19): siRNA sense strand
caaauugcaugaaauguga

SEQ ID NO: 346894 - RNA, 19 nt, Homo sapiens
  misc_RNA (1)...(19): siRNA sense strand
aaacgaagaugaaacaguu

SEQ ID NO: 346895 - RNA, 19 nt, Homo sapiens
  misc_RNA (1)...(19): siRNA sense strand
ucagaaugcuacucaaaua

SEQ ID NO: 346896 - RNA, 19 nt, Homo sapiens
  misc_RNA (1)...(19): siRNA sense strand
gauacaaaguggaauaaga

SEQ ID NO: 346897 - RNA, 19 nt, Homo sapiens
  misc_RNA (1)...(19): siRNA sense strand
gaaugaaucugcaguuucu

SEQ ID NO: 346898 - RNA, 19 nt, Homo sapiens
  misc_RNA (1)...(19): siRNA sense strand
gggaacauuuagaaaguua

SEQ ID NO: 346899 - RNA, 19 nt, Homo sapiens
  misc_RNA (1)...(19): siRNA sense strand
aaacagcacuggugaccua

SEQ ID NO: 346900 - RNA, 19 nt, Homo sapiens
  misc_RNA (1)...(19): siRNA sense strand
gguguuagaugaauuugaa

SEQ ID NO: 346901 - RNA, 19 nt, Homo sapiens
  misc_RNA (1)...(19): siRNA sense strand
gcuguagccugaaauguaa

SEQ ID NO: 346902 - RNA, 19 nt, Homo sapiens
  misc_RNA (1)...(19): siRNA sense strand
gcuguucacuggauaauga

SEQ ID NO: 346903 - RNA, 19 nt, Homo sapiens
  misc_RNA (1)...(19): siRNA sense strand
gaugaaugauagccaagua

SEQ ID NO: 346904 - RNA, 19 nt, Homo sapiens
  misc_RNA (1)...(19): siRNA sense strand
ccugaaauguaaacuguua

SEQ ID NO: 346905 - RNA, 19 nt, Homo sapiens
  misc_RNA (1)...(19): siRNA sense strand
gaagccagguuuacauuca

SEQ ID NO: 346906 - RNA, 19 nt, Homo sapiens
  misc_RNA (1)...(19): siRNA sense strand
gaagcuagaguguguguaa

SEQ ID NO: 346907 - RNA, 19 nt, Homo sapiens
  misc_RNA (1)...(19): siRNA sense strand
cagaagaccaguuaauuaa

SEQ ID NO: 346908 - RNA, 19 nt, Homo sapiens
  misc_RNA (1)...(19): siRNA sense strand
gaaggaauaaugacuguga

SEQ ID NO: 346909 - RNA, 19 nt, Homo sapiens
  misc_RNA (1)...(19): siRNA sense strand
gaagggaguggacuacuuu

SEQ ID NO: 346910 - RNA, 19 nt, Homo sapiens
  misc_RNA (1)...(19): siRNA sense strand
cagauugccuugugccuaa

SEQ ID NO: 346911 - RNA, 19 nt, Homo sapiens
  misc_RNA (1)...(19): siRNA sense strand
gccauuaucagaccauuua

SEQ ID NO: 346912 - RNA, 19 nt, Homo sapiens
  misc_RNA (1)...(19): siRNA sense strand
aagcaaccuucuaaucuua

SEQ ID NO: 346913 - RNA, 19 nt, Homo sapiens
  misc_RNA (1)...(19): siRNA sense strand
caagcaaccuucuaaucuu

SEQ ID NO: 346914 - RNA, 19 nt, Homo sapiens
  misc_RNA (1)...(19): siRNA sense strand
gaggaucacugugcuaaug

SEQ ID NO: 346915 - RNA, 19 nt, Homo sapiens
  misc_RNA (1)...(19): siRNA sense strand
agaugcaggucuagauuua

SEQ ID NO: 346916 - RNA, 19 nt, Homo sapiens
  misc_RNA (1)...(19): siRNA sense strand
aaaggaagcuagagugugu

SEQ ID NO: 346917 - RNA, 19 nt, Homo sapiens
  misc_RNA (1)...(19): siRNA sense strand
gaacuugcauuagugaaag

SEQ ID NO: 346918 - RNA, 19 nt, Homo sapiens
  misc_RNA (1)...(19): siRNA sense strand
uagcaagccugccaucuau

SEQ ID NO: 346919 - RNA, 19 nt, Homo sapiens
  misc_RNA (1)...(19): siRNA sense strand
ugugauuucuccacuguua

SEQ ID NO: 346920 - RNA, 19 nt, Homo sapiens
  misc_RNA (1)...(19): siRNA sense strand
ugucugcgauuacaaguuu

SEQ ID NO: 346921 - RNA, 19 nt, Homo sapiens
  misc_RNA (1)...(19): siRNA sense strand
ccagauagcccagauaaug

SEQ ID NO: 346922 - RNA, 19 nt, Homo sapiens
  misc_RNA (1)...(19): siRNA sense strand
gaaguuagggcugaugaaa

SEQ ID NO: 346923 - RNA, 19 nt, Homo sapiens
  misc_RNA (1)...(19): siRNA sense strand
gaaaugugaagccagguuu

SEQ ID NO: 346924 - RNA, 19 nt, Homo sapiens
  misc_RNA (1)...(19): siRNA sense strand
gaucuagggaguccaaauu

SEQ ID NO: 346925 - RNA, 19 nt, Homo sapiens
  misc_RNA (1)...(19): siRNA sense strand
ucucuaaugucgauacaaa

SEQ ID NO: 346926 - RNA, 19 nt, Homo sapiens
  misc_RNA (1)...(19): siRNA sense strand
gaaagugaagaaugugauu

SEQ ID NO: 346927 - RNA, 19 nt, Homo sapiens
  misc_RNA (1)...(19): siRNA sense strand
ggagagcaccacugaagaa

SEQ ID NO: 346928 - RNA, 19 nt, Homo sapiens
  misc_RNA (1)...(19): siRNA sense strand
aaucugcaguuucuaauga

SEQ ID NO: 346929 - RNA, 19 nt, Homo sapiens
  misc_RNA (1)...(19): siRNA sense strand
ggacagaaaggaagcuaga

SEQ ID NO: 346930 - RNA, 19 nt, Homo sapiens
  misc_RNA (1)...(19): siRNA sense strand
gcagcaaauuaucuaucua

SEQ ID NO: 346931 - RNA, 19 nt, Homo sapiens
  misc_RNA (1)...(19): siRNA sense strand
auaaaugaguccacugaaa

SEQ ID NO: 346932 - RNA, 19 nt, Homo sapiens
  misc_RNA (1)...(19): siRNA sense strand
gugaaugaaucugcaguuu

SEQ ID NO: 346933 - RNA, 19 nt, Homo sapiens
  misc_RNA (1)...(19): siRNA sense strand
gcaaccuucuaaucuuaaa

SEQ ID NO: 346934 - RNA, 19 nt, Homo sapiens
  misc_RNA (1)...(19): siRNA sense strand
ggacaagguguuagaugaa

SEQ ID NO: 346935 - RNA, 19 nt, Homo sapiens
  misc_RNA (1)...(19): siRNA sense strand
ggaacuugcauuagugaaa

SEQ ID NO: 346936 - RNA, 19 nt, Homo sapiens
  misc_RNA (1)...(19): siRNA sense strand
gcugagaucuccacuagac

SEQ ID NO: 346937 - RNA, 19 nt, Homo sapiens
  misc_RNA (1)...(19): siRNA sense strand
guagcaagccugccaucua

SEQ ID NO: 346938 - RNA, 19 nt, Homo sapiens
  misc_RNA (1)...(19): siRNA sense strand
gcuggucaguuuggaauuu

SEQ ID NO: 346939 - RNA, 19 nt, Homo sapiens
  misc_RNA (1)...(19): siRNA sense strand
caaaaugacuuuccugcaa

SEQ ID NO: 346940 - RNA, 19 nt, Homo sapiens
  misc_RNA (1)...(19): siRNA sense strand
gaggaaagcaagucagaau

SEQ ID NO: 346941 - RNA, 19 nt, Homo sapiens
  misc_RNA (1)...(19): siRNA sense strand
ugagguggcuccaguaugg

SEQ ID NO: 346942 - RNA, 19 nt, Homo sapiens
  misc_RNA (1)...(19): siRNA sense strand
agaacuauauaccagauga

SEQ ID NO: 346943 - RNA, 19 nt, Homo sapiens
  misc_RNA (1)...(19): siRNA sense strand
aaaggaacuugcauuagug

SEQ ID NO: 346944 - RNA, 19 nt, Homo sapiens
  misc_RNA (1)...(19): siRNA sense strand
gcagaugcaggucuagauu

SEQ ID NO: 346945 - RNA, 19 nt, Homo sapiens
  misc_RNA (1)...(19): siRNA sense strand
cuaauuggaaguugacuaa

SEQ ID NO: 346946 - RNA, 19 nt, Homo sapiens
  misc_RNA (1)...(19): siRNA sense strand
aaacucagcaaccaaugua

SEQ ID NO: 346947 - RNA, 19 nt, Homo sapiens
  misc_RNA (1)...(19): siRNA sense strand
guggaaaccuggcuugucu

SEQ ID NO: 346948 - RNA, 19 nt, Homo sapiens
  misc_RNA (1)...(19): siRNA sense strand
gagcaccacugaagaaucc

SEQ ID NO: 346949 - RNA, 19 nt, Homo sapiens
  misc_RNA (1)...(19): siRNA sense strand
gaauucagagaaacaaaug

SEQ ID NO: 346950 - RNA, 19 nt, Homo sapiens
  misc_RNA (1)...(19): siRNA sense strand
gacaagguguuagaugaau

SEQ ID NO: 346951 - RNA, 19 nt, Homo sapiens
  misc_RNA (1)...(19): siRNA sense strand
uguuauacauggacagaaa

SEQ ID NO: 346952 - RNA, 19 nt, Homo sapiens
  misc_RNA (1)...(19): siRNA sense strand
caagguguuagaugaauuu

SEQ ID NO: 346953 - RNA, 19 nt, Homo sapiens
  misc_RNA (1)...(19): siRNA sense strand
gacccaagcaaccuucuaa

SEQ ID NO: 346954 - RNA, 19 nt, Homo sapiens
  misc_RNA (1)...(19): siRNA sense strand
gaggagagcaccacugaag

SEQ ID NO: 346955 - RNA, 19 nt, Homo sapiens
  misc_RNA (1)...(19): siRNA sense strand
ggagagaagaaauguggaa

SEQ ID NO: 346956 - RNA, 19 nt, Homo sapiens
  misc_RNA (1)...(19): siRNA sense strand
guauaaaugaguccacuga

SEQ ID NO: 346957 - RNA, 19 nt, Homo sapiens
  misc_RNA (1)...(19): siRNA sense strand
gcuccaaauugcaugaaau

SEQ ID NO: 346958 - RNA, 19 nt, Homo sapiens
  misc_RNA (1)...(19): siRNA sense strand
ggaguggacuacuuuuaaa

SEQ ID NO: 346959 - RNA, 19 nt, Homo sapiens
  misc_RNA (1)...(19): siRNA sense strand
gcacuacagaauuccuuaa

SEQ ID NO: 346960 - RNA, 19 nt, Homo sapiens
  misc_RNA (1)...(19): siRNA sense strand
ugaagguuaugaacaugaa

SEQ ID NO: 346961 - RNA, 19 nt, Homo sapiens
  misc_RNA (1)...(19): siRNA sense strand
ugacggaaguauagguaga

SEQ ID NO: 346962 - RNA, 19 nt, Homo sapiens
  misc_RNA (1)...(19): siRNA sense strand
gaugacggaaguauaggua

SEQ ID NO: 346963 - RNA, 19 nt, Homo sapiens
  misc_RNA (1)...(19): siRNA sense strand
gaagaggaucacugugcua

SEQ ID NO: 346964 - RNA, 19 nt, Homo sapiens
  misc_RNA (1)...(19): siRNA sense strand
cagauagcccagauaauga

SEQ ID NO: 346965 - RNA, 19 nt, Homo sapiens
  misc_RNA (1)...(19): siRNA sense strand
ccaagcaaccuucuaaucu

SEQ ID NO: 346966 - RNA, 19 nt, Homo sapiens
  misc_RNA (1)...(19): siRNA sense strand
guagucaaguuccaucagu

SEQ ID NO: 346967 - RNA, 19 nt, Homo sapiens
  misc_RNA (1)...(19): siRNA sense strand
acacaccagcagcaaauua

SEQ ID NO: 346968 - RNA, 19 nt, Homo sapiens
  misc_RNA (1)...(19): siRNA sense strand
aaaaucagcucuccuagga

SEQ ID NO: 346969 - RNA, 19 nt, Homo sapiens
  misc_RNA (1)...(19): siRNA sense strand
uguccuacuucaucugaua

SEQ ID NO: 346970 - RNA, 19 nt, Homo sapiens
  misc_RNA (1)...(19): siRNA sense strand
cagcacuggugaccuaaug

SEQ ID NO: 346971 - RNA, 19 nt, Homo sapiens
  misc_RNA (1)...(19): siRNA sense strand
gcaagccugccaucuauca

SEQ ID NO: 346972 - RNA, 19 nt, Homo sapiens
  misc_RNA (1)...(19): siRNA sense strand
ggacuguaaucuaaaucca

SEQ ID NO: 346973 - RNA, 19 nt, Homo sapiens
  misc_RNA (1)...(19): siRNA sense strand
ccaaauugcaugaaaugug

SEQ ID NO: 346974 - RNA, 19 nt, Homo sapiens
  misc_RNA (1)...(19): siRNA sense strand
gcacuggugaccuaaugaa

SEQ ID NO: 346975 - RNA, 19 nt, Homo sapiens
  misc_RNA (1)...(19): siRNA sense strand
gaacaaaacgaagaugaaa

SEQ ID NO: 346976 - RNA, 19 nt, Homo sapiens
  misc_RNA (1)...(19): siRNA sense strand
uagugaaagugaagaaugu

SEQ ID NO: 346977 - RNA, 19 nt, Homo sapiens
  misc_RNA (1)...(19): siRNA sense strand
cucaggacaugacuaauug

SEQ ID NO: 346978 - RNA, 19 nt, Homo sapiens
  misc_RNA (1)...(19): siRNA sense strand
ggucuggaaggaauaauga

SEQ ID NO: 346979 - RNA, 19 nt, Homo sapiens
  misc_RNA (1)...(19): siRNA sense strand
uaaugggucuggaaggaau

SEQ ID NO: 346980 - RNA, 19 nt, Homo sapiens
  misc_RNA (1)...(19): siRNA sense strand
gcaagagaacuauauacca

SEQ ID NO: 346981 - RNA, 19 nt, Homo sapiens
  misc_RNA (1)...(19): siRNA sense strand
gaucaaugcagugcuguug

SEQ ID NO: 346982 - RNA, 19 nt, Homo sapiens
  misc_RNA (1)...(19): siRNA sense strand
ucucaccggcugucauuua

SEQ ID NO: 346983 - RNA, 19 nt, Homo sapiens
  misc_RNA (1)...(19): siRNA sense strand
agaagggaguggacuacuu

SEQ ID NO: 346984 - RNA, 19 nt, Homo sapiens
  misc_RNA (1)...(19): siRNA sense strand
ggaaagcaagucagaaugc

SEQ ID NO: 346985 - RNA, 19 nt, Homo sapiens
  misc_RNA (1)...(19): siRNA sense strand
gagaagaaauguggaaacc

SEQ ID NO: 346986 - RNA, 19 nt, Homo sapiens
  misc_RNA (1)...(19): siRNA sense strand
gaagugggagagaagaaau

SEQ ID NO: 346987 - RNA, 19 nt, Homo sapiens
  misc_RNA (1)...(19): siRNA sense strand
ccacguagaucacuuggau

SEQ ID NO: 346988 - RNA, 19 nt, Homo sapiens
  misc_RNA (1)...(19): siRNA sense strand
ccauuugaauuaccacgua

SEQ ID NO: 346989 - RNA, 19 nt, Homo sapiens
  misc_RNA (1)...(19): siRNA sense strand
gcuuugccgugcaguuaua

SEQ ID NO: 346990 - RNA, 19 nt, Homo sapiens
  misc_RNA (1)...(19): siRNA sense strand
ugaauuaccacguagauca

SEQ ID NO: 346991 - RNA, 19 nt, Homo sapiens
  misc_RNA (1)...(19): siRNA sense strand
cagcauagguggacuuuuc

SEQ ID NO: 346992 - RNA, 19 nt, Homo sapiens
  misc_RNA (1)...(19): siRNA sense strand
ccgcuuugccgugcaguua

SEQ ID NO: 346993 - RNA, 19 nt, Homo sapiens
  misc_RNA (1)...(19): siRNA sense strand
gccgugcaguuauacaaca

SEQ ID NO: 346994 - RNA, 19 nt, Homo sapiens
  misc_RNA (1)...(19): siRNA sense strand
guagaucacuuggauuccu

SEQ ID NO: 346995 - RNA, 19 nt, Homo sapiens
  misc_RNA (1)...(19): siRNA sense strand
uauacaacaccaaccagaa

SEQ ID NO: 346996 - RNA, 19 nt, Homo sapiens
  misc_RNA (1)...(19): siRNA sense strand
ccagaacaccaccgagaag

SEQ ID NO: 346997 - RNA, 19 nt, Homo sapiens
  misc_RNA (1)...(19): siRNA sense strand
gcccuuccauuugaauuac

SEQ ID NO: 346998 - RNA, 19 nt, Homo sapiens
  misc_RNA (1)...(19): siRNA sense strand
ccacguagaucacuuggau

SEQ ID NO: 346999 - RNA, 19 nt, Homo sapiens
  misc_RNA (1)...(19): siRNA sense strand
ccauuugaauuaccacgua

SEQ ID NO: 347000 - RNA, 19 nt, Homo sapiens
  misc_RNA (1)...(19): siRNA sense strand
gcuuugccgugcaguuaua

SEQ ID NO: 347001 - RNA, 19 nt, Homo sapiens
  misc_RNA (1)...(19): siRNA sense strand
ugaauuaccacguagauca

SEQ ID NO: 347002 - RNA, 19 nt, Homo sapiens
  misc_RNA (1)...(19): siRNA sense strand
cagcauagguggacuuuuc

SEQ ID NO: 347003 - RNA, 19 nt, Homo sapiens
  misc_RNA (1)...(19): siRNA sense strand
ccgcuuugccgugcaguua

SEQ ID NO: 347004 - RNA, 19 nt, Homo sapiens
  misc_RNA (1)...(19): siRNA sense strand
gccgugcaguuauacaaca

SEQ ID NO: 347005 - RNA, 19 nt, Homo sapiens
  misc_RNA (1)...(19): siRNA sense strand
guagaucacuuggauuccu

SEQ ID NO: 347006 - RNA, 19 nt, Homo sapiens
  misc_RNA (1)...(19): siRNA sense strand
uauacaacaccaaccagaa

SEQ ID NO: 347007 - RNA, 19 nt, Homo sapiens
  misc_RNA (1)...(19): siRNA sense strand
ccagaacaccaccgagaag

SEQ ID NO: 347008 - RNA, 19 nt, Homo sapiens
  misc_RNA (1)...(19): siRNA sense strand
gcccuuccauuugaauuac

SEQ ID NO: 347009 - RNA, 19 nt, Homo sapiens
  misc_RNA (1)...(19): siRNA sense strand
ccacguagaucacuuggau

SEQ ID NO: 347010 - RNA, 19 nt, Homo sapiens
  misc_RNA (1)...(19): siRNA sense strand
ccauuugaauuaccacgua

SEQ ID NO: 347011 - RNA, 19 nt, Homo sapiens
  misc_RNA (1)...(19): siRNA sense strand
gcuuugccgugcaguuaua

SEQ ID NO: 347012 - RNA, 19 nt, Homo sapiens
  misc_RNA (1)...(19): siRNA sense strand
ugaauuaccacguagauca

SEQ ID NO: 347013 - RNA, 19 nt, Homo sapiens
  misc_RNA (1)...(19): siRNA sense strand
cagcauagguggacuuuuc

SEQ ID NO: 347014 - RNA, 19 nt, Homo sapiens
  misc_RNA (1)...(19): siRNA sense strand
ccgcuuugccgugcaguua

SEQ ID NO: 347015 - RNA, 19 nt, Homo sapiens
  misc_RNA (1)...(19): siRNA sense strand
gccgugcaguuauacaaca

SEQ ID NO: 347016 - RNA, 19 nt, Homo sapiens
  misc_RNA (1)...(19): siRNA sense strand
guagaucacuuggauuccu

SEQ ID NO: 347017 - RNA, 19 nt, Homo sapiens
  misc_RNA (1)...(19): siRNA sense strand
uauacaacaccaaccagaa

SEQ ID NO: 347018 - RNA, 19 nt, Homo sapiens
  misc_RNA (1)...(19): siRNA sense strand
ccagaacaccaccgagaag

SEQ ID NO: 347019 - RNA, 19 nt, Homo sapiens
  misc_RNA (1)...(19): siRNA sense strand
gcccuuccauuugaauuac

SEQ ID NO: 347020 - RNA, 19 nt, Homo sapiens
  misc_RNA (1)...(19): siRNA sense strand
gagggaagaugucucagua

SEQ ID NO: 347021 - RNA, 19 nt, Homo sapiens
  misc_RNA (1)...(19): siRNA sense strand
gaacucaggaacaaacauu

SEQ ID NO: 347022 - RNA, 19 nt, Homo sapiens
  misc_RNA (1)...(19): siRNA sense strand
gaccugagcuggaggaacu

SEQ ID NO: 347023 - RNA, 19 nt, Homo sapiens
  misc_RNA (1)...(19): siRNA sense strand
caucaagguuuacuucaag

SEQ ID NO: 347024 - RNA, 19 nt, Homo sapiens
  misc_RNA (1)...(19): siRNA sense strand
ggccagggcuucgugaaug

SEQ ID NO: 347025 - RNA, 19 nt, Homo sapiens
  misc_RNA (1)...(19): siRNA sense strand
ucaucaagguuuacuucaa

SEQ ID NO: 347026 - RNA, 19 nt, Homo sapiens
  misc_RNA (1)...(19): siRNA sense strand
gccagggcuucgugaauga

SEQ ID NO: 347027 - RNA, 19 nt, Homo sapiens
  misc_RNA (1)...(19): siRNA sense strand
gcagauuggagacaccauu

SEQ ID NO: 347028 - RNA, 19 nt, Homo sapiens
  misc_RNA (1)...(19): siRNA sense strand
uggaggaacucaggaacaa

SEQ ID NO: 347029 - RNA, 19 nt, Homo sapiens
  misc_RNA (1)...(19): siRNA sense strand
ggucaucaagguuuacuuc

SEQ ID NO: 347030 - RNA, 19 nt, Homo sapiens
  misc_RNA (1)...(19): siRNA sense strand
uguacagucugcucaugaa

SEQ ID NO: 347031 - RNA, 19 nt, Homo sapiens
  misc_RNA (1)...(19): siRNA sense strand
ccucucggcucgaauugau

SEQ ID NO: 347032 - RNA, 19 nt, Homo sapiens
  misc_RNA (1)...(19): siRNA sense strand
cuggagagcaugcagauug

SEQ ID NO: 347033 - RNA, 19 nt, Homo sapiens
  misc_RNA (1)...(19): siRNA sense strand
ggagggaagaugucucagu

SEQ ID NO: 347034 - RNA, 19 nt, Homo sapiens
  misc_RNA (1)...(19): siRNA sense strand
ccaaccagaccgagaagga

SEQ ID NO: 347035 - RNA, 19 nt, Homo sapiens
  misc_RNA (1)...(19): siRNA sense strand
cggcucgaauugauggaaa

SEQ ID NO: 347036 - RNA, 19 nt, Homo sapiens
  misc_RNA (1)...(19): siRNA sense strand
ccuaucaucaggacaguga

SEQ ID NO: 347037 - RNA, 19 nt, Homo sapiens
  misc_RNA (1)...(19): siRNA sense strand
ggaggaacucaggaacaaa

SEQ ID NO: 347038 - RNA, 19 nt, Homo sapiens
  misc_RNA (1)...(19): siRNA sense strand
gaggaacucaggaacaaac

SEQ ID NO: 347039 - RNA, 19 nt, Homo sapiens
  misc_RNA (1)...(19): siRNA sense strand
gcgcugcuucgucuucuga

SEQ ID NO: 347040 - RNA, 19 nt, Homo sapiens
  misc_RNA (1)...(19): siRNA sense strand
cagauuggagacaccauug

SEQ ID NO: 347041 - RNA, 19 nt, Homo sapiens
  misc_RNA (1)...(19): siRNA sense strand
ggagcgcugcuucgucuuc

SEQ ID NO: 347042 - RNA, 19 nt, Homo sapiens
  misc_RNA (1)...(19): siRNA sense strand
ugaagucugugggcaugau

SEQ ID NO: 347043 - RNA, 19 nt, Homo sapiens
  misc_RNA (1)...(19): siRNA sense strand
ggacccugaugaccacacu

SEQ ID NO: 347044 - RNA, 19 nt, Homo sapiens
  misc_RNA (1)...(19): siRNA sense strand
cuaccucucggcucgaauu

SEQ ID NO: 347045 - RNA, 19 nt, Homo sapiens
  misc_RNA (1)...(19): siRNA sense strand
cuccagcgaugaugacaag

SEQ ID NO: 347046 - RNA, 19 nt, Homo sapiens
  misc_RNA (1)...(19): siRNA sense strand
gaugauccgggaccaccuu

SEQ ID NO: 347047 - RNA, 19 nt, Homo sapiens
  misc_RNA (1)...(19): siRNA sense strand
cgagagcccggacaucaag

SEQ ID NO: 347048 - RNA, 19 nt, Homo sapiens
  misc_RNA (1)...(19): siRNA sense strand
gcucaucgaccgggagauc

SEQ ID NO: 347049 - RNA, 19 nt, Homo sapiens
  misc_RNA (1)...(19): siRNA sense strand
gagcgcugcuucgucuucu

SEQ ID NO: 347050 - RNA, 19 nt, Homo sapiens
  misc_RNA (1)...(19): siRNA sense strand
gagggaagaugucucagua

SEQ ID NO: 347051 - RNA, 19 nt, Homo sapiens
  misc_RNA (1)...(19): siRNA sense strand
gaacucaggaacaaacauu

SEQ ID NO: 347052 - RNA, 19 nt, Homo sapiens
  misc_RNA (1)...(19): siRNA sense strand
gaccugagcuggaggaacu

SEQ ID NO: 347053 - RNA, 19 nt, Homo sapiens
  misc_RNA (1)...(19): siRNA sense strand
caucaagguuuacuucaag

SEQ ID NO: 347054 - RNA, 19 nt, Homo sapiens
  misc_RNA (1)...(19): siRNA sense strand
ggccagggcuucgugaaug

SEQ ID NO: 347055 - RNA, 19 nt, Homo sapiens
  misc_RNA (1)...(19): siRNA sense strand
ucaucaagguuuacuucaa

SEQ ID NO: 347056 - RNA, 19 nt, Homo sapiens
  misc_RNA (1)...(19): siRNA sense strand
gccagggcuucgugaauga

SEQ ID NO: 347057 - RNA, 19 nt, Homo sapiens
  misc_RNA (1)...(19): siRNA sense strand
gcagauuggagacaccauu

SEQ ID NO: 347058 - RNA, 19 nt, Homo sapiens
  misc_RNA (1)...(19): siRNA sense strand
uggaggaacucaggaacaa

SEQ ID NO: 347059 - RNA, 19 nt, Homo sapiens
  misc_RNA (1)...(19): siRNA sense strand
ggucaucaagguuuacuuc

SEQ ID NO: 347060 - RNA, 19 nt, Homo sapiens
  misc_RNA (1)...(19): siRNA sense strand
ccucucggcucgaauugau

SEQ ID NO: 347061 - RNA, 19 nt, Homo sapiens
  misc_RNA (1)...(19): siRNA sense strand
cuggagagcaugcagauug

SEQ ID NO: 347062 - RNA, 19 nt, Homo sapiens
  misc_RNA (1)...(19): siRNA sense strand
ggagggaagaugucucagu

SEQ ID NO: 347063 - RNA, 19 nt, Homo sapiens
  misc_RNA (1)...(19): siRNA sense strand
ccaaccagaccgagaagga

SEQ ID NO: 347064 - RNA, 19 nt, Homo sapiens
  misc_RNA (1)...(19): siRNA sense strand
cggcucgaauugauggaaa

SEQ ID NO: 347065 - RNA, 19 nt, Homo sapiens
  misc_RNA (1)...(19): siRNA sense strand
ccuaucaucaggacaguga

SEQ ID NO: 347066 - RNA, 19 nt, Homo sapiens
  misc_RNA (1)...(19): siRNA sense strand
ggaggaacucaggaacaaa

SEQ ID NO: 347067 - RNA, 19 nt, Homo sapiens
  misc_RNA (1)...(19): siRNA sense strand
gaggaacucaggaacaaac

SEQ ID NO: 347068 - RNA, 19 nt, Homo sapiens
  misc_RNA (1)...(19): siRNA sense strand
gcgcugcuucgucuucuga

SEQ ID NO: 347069 - RNA, 19 nt, Homo sapiens
  misc_RNA (1)...(19): siRNA sense strand
cagauuggagacaccauug

SEQ ID NO: 347070 - RNA, 19 nt, Homo sapiens
  misc_RNA (1)...(19): siRNA sense strand
ggagcgcugcuucgucuuc

SEQ ID NO: 347071 - RNA, 19 nt, Homo sapiens
  misc_RNA (1)...(19): siRNA sense strand
ugaagucugugggcaugau

SEQ ID NO: 347072 - RNA, 19 nt, Homo sapiens
  misc_RNA (1)...(19): siRNA sense strand
ggacccugaugaccacacu

SEQ ID NO: 347073 - RNA, 19 nt, Homo sapiens
  misc_RNA (1)...(19): siRNA sense strand
cuaccucucggcucgaauu

SEQ ID NO: 347074 - RNA, 19 nt, Homo sapiens
  misc_RNA (1)...(19): siRNA sense strand
cuccagcgaugaugacaag

SEQ ID NO: 347075 - RNA, 19 nt, Homo sapiens
  misc_RNA (1)...(19): siRNA sense strand
gaugauccgggaccaccuu

SEQ ID NO: 347076 - RNA, 19 nt, Homo sapiens
  misc_RNA (1)...(19): siRNA sense strand
cgagagcccggacaucaag

SEQ ID NO: 347077 - RNA, 19 nt, Homo sapiens
  misc_RNA (1)...(19): siRNA sense strand
gcucaucgaccgggagauc

SEQ ID NO: 347078 - RNA, 19 nt, Homo sapiens
  misc_RNA (1)...(19): siRNA sense strand
gagcgcugcuucgucuucu

SEQ ID NO: 347079 - RNA, 19 nt, Homo sapiens
  misc_RNA (1)...(19): siRNA sense strand
ggaaauccgagacaaauua

SEQ ID NO: 347080 - RNA, 19 nt, Homo sapiens
  misc_RNA (1)...(19): siRNA sense strand
gaaacaccgugccgucagu

SEQ ID NO: 347081 - RNA, 19 nt, Homo sapiens
  misc_RNA (1)...(19): siRNA sense strand
gaaguaaauucgggaaagg

SEQ ID NO: 347082 - RNA, 19 nt, Homo sapiens
  misc_RNA (1)...(19): siRNA sense strand
gagacaaauuacucaagga

SEQ ID NO: 347083 - RNA, 19 nt, Homo sapiens
  misc_RNA (1)...(19): siRNA sense strand
ggaaggaggcagaggaaag

SEQ ID NO: 347084 - RNA, 19 nt, Homo sapiens
  misc_RNA (1)...(19): siRNA sense strand
gagaagaaggccaaacaca

SEQ ID NO: 347085 - RNA, 19 nt, Homo sapiens
  misc_RNA (1)...(19): siRNA sense strand
ucaaggacgcggucuguga

SEQ ID NO: 347086 - RNA, 19 nt, Homo sapiens
  misc_RNA (1)...(19): siRNA sense strand
gaagaaaauugaggaauac

SEQ ID NO: 347087 - RNA, 19 nt, Homo sapiens
  misc_RNA (1)...(19): siRNA sense strand
cgccugacguggagaagaa

SEQ ID NO: 347088 - RNA, 19 nt, Homo sapiens
  misc_RNA (1)...(19): siRNA sense strand
gcgagaagaaggccaaaca

SEQ ID NO: 347089 - RNA, 19 nt, Homo sapiens
  misc_RNA (1)...(19): siRNA sense strand
gggaaauccgagacaaauu

SEQ ID NO: 347090 - RNA, 19 nt, Homo sapiens
  misc_RNA (1)...(19): siRNA sense strand
gaggaaggaggcagaggaa

SEQ ID NO: 347091 - RNA, 19 nt, Homo sapiens
  misc_RNA (1)...(19): siRNA sense strand
gaaauccgagacaaauuac

SEQ ID NO: 347092 - RNA, 19 nt, Homo sapiens
  misc_RNA (1)...(19): siRNA sense strand
cagaggaaagcgagaagaa

SEQ ID NO: 347093 - RNA, 19 nt, Homo sapiens
  misc_RNA (1)...(19): siRNA sense strand
gagaaguaaauucgggaaa

SEQ ID NO: 347094 - RNA, 19 nt, Homo sapiens
  misc_RNA (1)...(19): siRNA sense strand
agaaguaaauucgggaaag

SEQ ID NO: 347095 - RNA, 19 nt, Homo sapiens
  misc_RNA (1)...(19): siRNA sense strand
gcugggaaauccgagacaa

SEQ ID NO: 347096 - RNA, 19 nt, Homo sapiens
  misc_RNA (1)...(19): siRNA sense strand
ccacauccgccacaagauc

SEQ ID NO: 347097 - RNA, 19 nt, Homo sapiens
  misc_RNA (1)...(19): siRNA sense strand
uaaauucgggaaaggugaa

SEQ ID NO: 347098 - RNA, 19 nt, Homo sapiens
  misc_RNA (1)...(19): siRNA sense strand
gcagaggaaagcgagaaga

SEQ ID NO: 347099 - RNA, 19 nt, Homo sapiens
  misc_RNA (1)...(19): siRNA sense strand
caaggacgcggucugugau

SEQ ID NO: 347100 - RNA, 19 nt, Homo sapiens
  misc_RNA (1)...(19): siRNA sense strand
gaaggaggcagaggaaagc

SEQ ID NO: 347101 - RNA, 19 nt, Homo sapiens
  misc_RNA (1)...(19): siRNA sense strand
gacgcggucugugaucgaa

SEQ ID NO: 347102 - RNA, 19 nt, Homo sapiens
  misc_RNA (1)...(19): siRNA sense strand
caacgccugacguggagaa

SEQ ID NO: 347103 - RNA, 19 nt, Homo sapiens
  misc_RNA (1)...(19): siRNA sense strand
aaccacauccgccacaaga

SEQ ID NO: 347104 - RNA, 19 nt, Homo sapiens
  misc_RNA (1)...(19): siRNA sense strand
gccgcauccugagaaguaa

SEQ ID NO: 347105 - RNA, 19 nt, Homo sapiens
  misc_RNA (1)...(19): siRNA sense strand
agccgcauccugagaagua

SEQ ID NO: 347106 - RNA, 19 nt, Homo sapiens
  misc_RNA (1)...(19): siRNA sense strand
ggacgcggucugugaucga

SEQ ID NO: 347107 - RNA, 19 nt, Homo sapiens
  misc_RNA (1)...(19): siRNA sense strand
ccaaccacauccgccacaa

SEQ ID NO: 347108 - RNA, 19 nt, Homo sapiens
  misc_RNA (1)...(19): siRNA sense strand
ggaaauccgagacaaauua

SEQ ID NO: 347109 - RNA, 19 nt, Homo sapiens
  misc_RNA (1)...(19): siRNA sense strand
gaaacaccgugccgucagu

SEQ ID NO: 347110 - RNA, 19 nt, Homo sapiens
  misc_RNA (1)...(19): siRNA sense strand
gaaguaaauucgggaaagg

SEQ ID NO: 347111 - RNA, 19 nt, Homo sapiens
  misc_RNA (1)...(19): siRNA sense strand
gagacaaauuacucaagga

SEQ ID NO: 347112 - RNA, 19 nt, Homo sapiens
  misc_RNA (1)...(19): siRNA sense strand
ggaaggaggcagaggaaag

SEQ ID NO: 347113 - RNA, 19 nt, Homo sapiens
  misc_RNA (1)...(19): siRNA sense strand
gagaagaaggccaaacaca

SEQ ID NO: 347114 - RNA, 19 nt, Homo sapiens
  misc_RNA (1)...(19): siRNA sense strand
ucaaggacgcggucuguga

SEQ ID NO: 347115 - RNA, 19 nt, Homo sapiens
  misc_RNA (1)...(19): siRNA sense strand
gaagaaaauugaggaauac

SEQ ID NO: 347116 - RNA, 19 nt, Homo sapiens
  misc_RNA (1)...(19): siRNA sense strand
cgccugacguggagaagaa

SEQ ID NO: 347117 - RNA, 19 nt, Homo sapiens
  misc_RNA (1)...(19): siRNA sense strand
gcgagaagaaggccaaaca

SEQ ID NO: 347118 - RNA, 19 nt, Homo sapiens
  misc_RNA (1)...(19): siRNA sense strand
gggaaauccgagacaaauu

SEQ ID NO: 347119 - RNA, 19 nt, Homo sapiens
  misc_RNA (1)...(19): siRNA sense strand
gaggaaggaggcagaggaa

SEQ ID NO: 347120 - RNA, 19 nt, Homo sapiens
  misc_RNA (1)...(19): siRNA sense strand
gaaauccgagacaaauuac

SEQ ID NO: 347121 - RNA, 19 nt, Homo sapiens
  misc_RNA (1)...(19): siRNA sense strand
cagaggaaagcgagaagaa

SEQ ID NO: 347122 - RNA, 19 nt, Homo sapiens
  misc_RNA (1)...(19): siRNA sense strand
gagaaguaaauucgggaaa

SEQ ID NO: 347123 - RNA, 19 nt, Homo sapiens
  misc_RNA (1)...(19): siRNA sense strand
agaaguaaauucgggaaag

SEQ ID NO: 347124 - RNA, 19 nt, Homo sapiens
  misc_RNA (1)...(19): siRNA sense strand
gcugggaaauccgagacaa

SEQ ID NO: 347125 - RNA, 19 nt, Homo sapiens
  misc_RNA (1)...(19): siRNA sense strand
ccacauccgccacaagauc

SEQ ID NO: 347126 - RNA, 19 nt, Homo sapiens
  misc_RNA (1)...(19): siRNA sense strand
uaaauucgggaaaggugaa

SEQ ID NO: 347127 - RNA, 19 nt, Homo sapiens
  misc_RNA (1)...(19): siRNA sense strand
gcagaggaaagcgagaaga

SEQ ID NO: 347128 - RNA, 19 nt, Homo sapiens
  misc_RNA (1)...(19): siRNA sense strand
caaggacgcggucugugau

SEQ ID NO: 347129 - RNA, 19 nt, Homo sapiens
  misc_RNA (1)...(19): siRNA sense strand
gaaggaggcagaggaaagc

SEQ ID NO: 347130 - RNA, 19 nt, Homo sapiens
  misc_RNA (1)...(19): siRNA sense strand
gacgcggucugugaucgaa

SEQ ID NO: 347131 - RNA, 19 nt, Homo sapiens
  misc_RNA (1)...(19): siRNA sense strand
caacgccugacguggagaa

SEQ ID NO: 347132 - RNA, 19 nt, Homo sapiens
  misc_RNA (1)...(19): siRNA sense strand
aaccacauccgccacaaga

SEQ ID NO: 347133 - RNA, 19 nt, Homo sapiens
  misc_RNA (1)...(19): siRNA sense strand
gccgcauccugagaaguaa

SEQ ID NO: 347134 - RNA, 19 nt, Homo sapiens
  misc_RNA (1)...(19): siRNA sense strand
agccgcauccugagaagua

SEQ ID NO: 347135 - RNA, 19 nt, Homo sapiens
  misc_RNA (1)...(19): siRNA sense strand
ggacgcggucugugaucga

SEQ ID NO: 347136 - RNA, 19 nt, Homo sapiens
  misc_RNA (1)...(19): siRNA sense strand
ccaaccacauccgccacaa

SEQ ID NO: 347137 - RNA, 19 nt, Homo sapiens
  misc_RNA (1)...(19): siRNA sense strand
ggaaauccgagacaaauua

SEQ ID NO: 347138 - RNA, 19 nt, Homo sapiens
  misc_RNA (1)...(19): siRNA sense strand
gaaacaccgugccgucagu

SEQ ID NO: 347139 - RNA, 19 nt, Homo sapiens
  misc_RNA (1)...(19): siRNA sense strand
gaaguaaauucgggaaagg

SEQ ID NO: 347140 - RNA, 19 nt, Homo sapiens
  misc_RNA (1)...(19): siRNA sense strand
gagacaaauuacucaagga

SEQ ID NO: 347141 - RNA, 19 nt, Homo sapiens
  misc_RNA (1)...(19): siRNA sense strand
ggaaggaggcagaggaaag

SEQ ID NO: 347142 - RNA, 19 nt, Homo sapiens
  misc_RNA (1)...(19): siRNA sense strand
gagaagaaggccaaacaca

SEQ ID NO: 347143 - RNA, 19 nt, Homo sapiens
  misc_RNA (1)...(19): siRNA sense strand
ucaaggacgcggucuguga

SEQ ID NO: 347144 - RNA, 19 nt, Homo sapiens
  misc_RNA (1)...(19): siRNA sense strand
gaagaaaauugaggaauac

SEQ ID NO: 347145 - RNA, 19 nt, Homo sapiens
  misc_RNA (1)...(19): siRNA sense strand
cgccugacguggagaagaa

SEQ ID NO: 347146 - RNA, 19 nt, Homo sapiens
  misc_RNA (1)...(19): siRNA sense strand
gcgagaagaaggccaaaca

SEQ ID NO: 347147 - RNA, 19 nt, Homo sapiens
  misc_RNA (1)...(19): siRNA sense strand
gggaaauccgagacaaauu

SEQ ID NO: 347148 - RNA, 19 nt, Homo sapiens
  misc_RNA (1)...(19): siRNA sense strand
gaggaaggaggcagaggaa

SEQ ID NO: 347149 - RNA, 19 nt, Homo sapiens
  misc_RNA (1)...(19): siRNA sense strand
gaaauccgagacaaauuac

SEQ ID NO: 347150 - RNA, 19 nt, Homo sapiens
  misc_RNA (1)...(19): siRNA sense strand
cagaggaaagcgagaagaa

SEQ ID NO: 347151 - RNA, 19 nt, Homo sapiens
  misc_RNA (1)...(19): siRNA sense strand
gagaaguaaauucgggaaa

SEQ ID NO: 347152 - RNA, 19 nt, Homo sapiens
  misc_RNA (1)...(19): siRNA sense strand
agaaguaaauucgggaaag

SEQ ID NO: 347153 - RNA, 19 nt, Homo sapiens
  misc_RNA (1)...(19): siRNA sense strand
gcugggaaauccgagacaa

SEQ ID NO: 347154 - RNA, 19 nt, Homo sapiens
  misc_RNA (1)...(19): siRNA sense strand
ccacauccgccacaagauc

SEQ ID NO: 347155 - RNA, 19 nt, Homo sapiens
  misc_RNA (1)...(19): siRNA sense strand
uaaauucgggaaaggugaa

SEQ ID NO: 347156 - RNA, 19 nt, Homo sapiens
  misc_RNA (1)...(19): siRNA sense strand
gcagaggaaagcgagaaga

SEQ ID NO: 347157 - RNA, 19 nt, Homo sapiens
  misc_RNA (1)...(19): siRNA sense strand
caaggacgcggucugugau

SEQ ID NO: 347158 - RNA, 19 nt, Homo sapiens
  misc_RNA (1)...(19): siRNA sense strand
gaaggaggcagaggaaagc

SEQ ID NO: 347159 - RNA, 19 nt, Homo sapiens
  misc_RNA (1)...(19): siRNA sense strand
gacgcggucugugaucgaa

SEQ ID NO: 347160 - RNA, 19 nt, Homo sapiens
  misc_RNA (1)...(19): siRNA sense strand
caacgccugacguggagaa

SEQ ID NO: 347161 - RNA, 19 nt, Homo sapiens
  misc_RNA (1)...(19): siRNA sense strand
aaccacauccgccacaaga

SEQ ID NO: 347162 - RNA, 19 nt, Homo sapiens
  misc_RNA (1)...(19): siRNA sense strand
gccgcauccugagaaguaa

SEQ ID NO: 347163 - RNA, 19 nt, Homo sapiens
  misc_RNA (1)...(19): siRNA sense strand
agccgcauccugagaagua

SEQ ID NO: 347164 - RNA, 19 nt, Homo sapiens
  misc_RNA (1)...(19): siRNA sense strand
ggacgcggucugugaucga

SEQ ID NO: 347165 - RNA, 19 nt, Homo sapiens
  misc_RNA (1)...(19): siRNA sense strand
ccaaccacauccgccacaa

SEQ ID NO: 347166 - RNA, 19 nt, Homo sapiens
  misc_RNA (1)...(19): siRNA sense strand
ggaaauccgagacaaauua

SEQ ID NO: 347167 - RNA, 19 nt, Homo sapiens
  misc_RNA (1)...(19): siRNA sense strand
gaaacaccgugccgucagu

SEQ ID NO: 347168 - RNA, 19 nt, Homo sapiens
  misc_RNA (1)...(19): siRNA sense strand
gaaguaaauucgggaaagg

SEQ ID NO: 347169 - RNA, 19 nt, Homo sapiens
  misc_RNA (1)...(19): siRNA sense strand
gagacaaauuacucaagga

SEQ ID NO: 347170 - RNA, 19 nt, Homo sapiens
  misc_RNA (1)...(19): siRNA sense strand
ggaaggaggcagaggaaag

SEQ ID NO: 347171 - RNA, 19 nt, Homo sapiens
  misc_RNA (1)...(19): siRNA sense strand
gagaagaaggccaaacaca

SEQ ID NO: 347172 - RNA, 19 nt, Homo sapiens
  misc_RNA (1)...(19): siRNA sense strand
ucaaggacgcggucuguga

SEQ ID NO: 347173 - RNA, 19 nt, Homo sapiens
  misc_RNA (1)...(19): siRNA sense strand
gaagaaaauugaggaauac

SEQ ID NO: 347174 - RNA, 19 nt, Homo sapiens
  misc_RNA (1)...(19): siRNA sense strand
cgccugacguggagaagaa

SEQ ID NO: 347175 - RNA, 19 nt, Homo sapiens
  misc_RNA (1)...(19): siRNA sense strand
gcgagaagaaggccaaaca

SEQ ID NO: 347176 - RNA, 19 nt, Homo sapiens
  misc_RNA (1)...(19): siRNA sense strand
gggaaauccgagacaaauu

SEQ ID NO: 347177 - RNA, 19 nt, Homo sapiens
  misc_RNA (1)...(19): siRNA sense strand
gaggaaggaggcagaggaa

SEQ ID NO: 347178 - RNA, 19 nt, Homo sapiens
  misc_RNA (1)...(19): siRNA sense strand
gaaauccgagacaaauuac

SEQ ID NO: 347179 - RNA, 19 nt, Homo sapiens
  misc_RNA (1)...(19): siRNA sense strand
cagaggaaagcgagaagaa

SEQ ID NO: 347180 - RNA, 19 nt, Homo sapiens
  misc_RNA (1)...(19): siRNA sense strand
gagaaguaaauucgggaaa

SEQ ID NO: 347181 - RNA, 19 nt, Homo sapiens
  misc_RNA (1)...(19): siRNA sense strand
agaaguaaauucgggaaag

SEQ ID NO: 347182 - RNA, 19 nt, Homo sapiens
  misc_RNA (1)...(19): siRNA sense strand
gcugggaaauccgagacaa

SEQ ID NO: 347183 - RNA, 19 nt, Homo sapiens
  misc_RNA (1)...(19): siRNA sense strand
ccacauccgccacaagauc

SEQ ID NO: 347184 - RNA, 19 nt, Homo sapiens
  misc_RNA (1)...(19): siRNA sense strand
uaaauucgggaaaggugaa

SEQ ID NO: 347185 - RNA, 19 nt, Homo sapiens
  misc_RNA (1)...(19): siRNA sense strand
gcagaggaaagcgagaaga

SEQ ID NO: 347186 - RNA, 19 nt, Homo sapiens
  misc_RNA (1)...(19): siRNA sense strand
caaggacgcggucugugau

SEQ ID NO: 347187 - RNA, 19 nt, Homo sapiens
  misc_RNA (1)...(19): siRNA sense strand
gaaggaggcagaggaaagc

SEQ ID NO: 347188 - RNA, 19 nt, Homo sapiens
  misc_RNA (1)...(19): siRNA sense strand
gacgcggucugugaucgaa

SEQ ID NO: 347189 - RNA, 19 nt, Homo sapiens
  misc_RNA (1)...(19): siRNA sense strand
caacgccugacguggagaa

SEQ ID NO: 347190 - RNA, 19 nt, Homo sapiens
  misc_RNA (1)...(19): siRNA sense strand
aaccacauccgccacaaga

SEQ ID NO: 347191 - RNA, 19 nt, Homo sapiens
  misc_RNA (1)...(19): siRNA sense strand
gccgcauccugagaaguaa

SEQ ID NO: 347192 - RNA, 19 nt, Homo sapiens
  misc_RNA (1)...(19): siRNA sense strand
agccgcauccugagaagua

SEQ ID NO: 347193 - RNA, 19 nt, Homo sapiens
  misc_RNA (1)...(19): siRNA sense strand
ggacgcggucugugaucga

SEQ ID NO: 347194 - RNA, 19 nt, Homo sapiens
  misc_RNA (1)...(19): siRNA sense strand
ccaaccacauccgccacaa

SEQ ID NO: 347195 - RNA, 19 nt, Homo sapiens
  misc_RNA (1)...(19): siRNA sense strand
ggaaauccgagacaaauua

SEQ ID NO: 347196 - RNA, 19 nt, Homo sapiens
  misc_RNA (1)...(19): siRNA sense strand
gaaacaccgugccgucagu

SEQ ID NO: 347197 - RNA, 19 nt, Homo sapiens
  misc_RNA (1)...(19): siRNA sense strand
gaaguaaauucgggaaagg

SEQ ID NO: 347198 - RNA, 19 nt, Homo sapiens
  misc_RNA (1)...(19): siRNA sense strand
gagacaaauuacucaagga

SEQ ID NO: 347199 - RNA, 19 nt, Homo sapiens
  misc_RNA (1)...(19): siRNA sense strand
ggaaggaggcagaggaaag

SEQ ID NO: 347200 - RNA, 19 nt, Homo sapiens
  misc_RNA (1)...(19): siRNA sense strand
gagaagaaggccaaacaca

SEQ ID NO: 347201 - RNA, 19 nt, Homo sapiens
  misc_RNA (1)...(19): siRNA sense strand
ucaaggacgcggucuguga

SEQ ID NO: 347202 - RNA, 19 nt, Homo sapiens
  misc_RNA (1)...(19): siRNA sense strand
gaagaaaauugaggaauac

SEQ ID NO: 347203 - RNA, 19 nt, Homo sapiens
  misc_RNA (1)...(19): siRNA sense strand
cgccugacguggagaagaa

SEQ ID NO: 347204 - RNA, 19 nt, Homo sapiens
  misc_RNA (1)...(19): siRNA sense strand
gcgagaagaaggccaaaca

SEQ ID NO: 347205 - RNA, 19 nt, Homo sapiens
  misc_RNA (1)...(19): siRNA sense strand
gggaaauccgagacaaauu

SEQ ID NO: 347206 - RNA, 19 nt, Homo sapiens
  misc_RNA (1)...(19): siRNA sense strand
gaggaaggaggcagaggaa

SEQ ID NO: 347207 - RNA, 19 nt, Homo sapiens
  misc_RNA (1)...(19): siRNA sense strand
gaaauccgagacaaauuac

SEQ ID NO: 347208 - RNA, 19 nt, Homo sapiens
  misc_RNA (1)...(19): siRNA sense strand
cagaggaaagcgagaagaa

SEQ ID NO: 347209 - RNA, 19 nt, Homo sapiens
  misc_RNA (1)...(19): siRNA sense strand
gagaaguaaauucgggaaa

SEQ ID NO: 347210 - RNA, 19 nt, Homo sapiens
  misc_RNA (1)...(19): siRNA sense strand
agaaguaaauucgggaaag

SEQ ID NO: 347211 - RNA, 19 nt, Homo sapiens
  misc_RNA (1)...(19): siRNA sense strand
gcugggaaauccgagacaa

SEQ ID NO: 347212 - RNA, 19 nt, Homo sapiens
  misc_RNA (1)...(19): siRNA sense strand
ccacauccgccacaagauc

SEQ ID NO: 347213 - RNA, 19 nt, Homo sapiens
  misc_RNA (1)...(19): siRNA sense strand
uaaauucgggaaaggugaa

SEQ ID NO: 347214 - RNA, 19 nt, Homo sapiens
  misc_RNA (1)...(19): siRNA sense strand
gcagaggaaagcgagaaga

SEQ ID NO: 347215 - RNA, 19 nt, Homo sapiens
  misc_RNA (1)...(19): siRNA sense strand
caaggacgcggucugugau

SEQ ID NO: 347216 - RNA, 19 nt, Homo sapiens
  misc_RNA (1)...(19): siRNA sense strand
gaaggaggcagaggaaagc

SEQ ID NO: 347217 - RNA, 19 nt, Homo sapiens
  misc_RNA (1)...(19): siRNA sense strand
gacgcggucugugaucgaa

SEQ ID NO: 347218 - RNA, 19 nt, Homo sapiens
  misc_RNA (1)...(19): siRNA sense strand
caacgccugacguggagaa

SEQ ID NO: 347219 - RNA, 19 nt, Homo sapiens
  misc_RNA (1)...(19): siRNA sense strand
aaccacauccgccacaaga

SEQ ID NO: 347220 - RNA, 19 nt, Homo sapiens
  misc_RNA (1)...(19): siRNA sense strand
gccgcauccugagaaguaa

SEQ ID NO: 347221 - RNA, 19 nt, Homo sapiens
  misc_RNA (1)...(19): siRNA sense strand
agccgcauccugagaagua

SEQ ID NO: 347222 - RNA, 19 nt, Homo sapiens
  misc_RNA (1)...(19): siRNA sense strand
ggacgcggucugugaucga

SEQ ID NO: 347223 - RNA, 19 nt, Homo sapiens
  misc_RNA (1)...(19): siRNA sense strand
ccaaccacauccgccacaa

SEQ ID NO: 347224 - RNA, 19 nt, Homo sapiens
  misc_RNA (1)...(19): siRNA sense strand
ggaaauccgagacaaauua

SEQ ID NO: 347225 - RNA, 19 nt, Homo sapiens
  misc_RNA (1)...(19): siRNA sense strand
gaaacaccgugccgucagu

SEQ ID NO: 347226 - RNA, 19 nt, Homo sapiens
  misc_RNA (1)...(19): siRNA sense strand
gaaguaaauucgggaaagg

SEQ ID NO: 347227 - RNA, 19 nt, Homo sapiens
  misc_RNA (1)...(19): siRNA sense strand
gagacaaauuacucaagga

SEQ ID NO: 347228 - RNA, 19 nt, Homo sapiens
  misc_RNA (1)...(19): siRNA sense strand
ggaaggaggcagaggaaag

SEQ ID NO: 347229 - RNA, 19 nt, Homo sapiens
  misc_RNA (1)...(19): siRNA sense strand
gagaagaaggccaaacaca

SEQ ID NO: 347230 - RNA, 19 nt, Homo sapiens
  misc_RNA (1)...(19): siRNA sense strand
ucaaggacgcggucuguga

SEQ ID NO: 347231 - RNA, 19 nt, Homo sapiens
  misc_RNA (1)...(19): siRNA sense strand
gaagaaaauugaggaauac

SEQ ID NO: 347232 - RNA, 19 nt, Homo sapiens
  misc_RNA (1)...(19): siRNA sense strand
cgccugacguggagaagaa

SEQ ID NO: 347233 - RNA, 19 nt, Homo sapiens
  misc_RNA (1)...(19): siRNA sense strand
gcgagaagaaggccaaaca

SEQ ID NO: 347234 - RNA, 19 nt, Homo sapiens
  misc_RNA (1)...(19): siRNA sense strand
gggaaauccgagacaaauu

SEQ ID NO: 347235 - RNA, 19 nt, Homo sapiens
  misc_RNA (1)...(19): siRNA sense strand
gaggaaggaggcagaggaa

SEQ ID NO: 347236 - RNA, 19 nt, Homo sapiens
  misc_RNA (1)...(19): siRNA sense strand
gaaauccgagacaaauuac

SEQ ID NO: 347237 - RNA, 19 nt, Homo sapiens
  misc_RNA (1)...(19): siRNA sense strand
cagaggaaagcgagaagaa

SEQ ID NO: 347238 - RNA, 19 nt, Homo sapiens
  misc_RNA (1)...(19): siRNA sense strand
gagaaguaaauucgggaaa

SEQ ID NO: 347239 - RNA, 19 nt, Homo sapiens
  misc_RNA (1)...(19): siRNA sense strand
agaaguaaauucgggaaag

SEQ ID NO: 347240 - RNA, 19 nt, Homo sapiens
  misc_RNA (1)...(19): siRNA sense strand
gcugggaaauccgagacaa

SEQ ID NO: 347241 - RNA, 19 nt, Homo sapiens
  misc_RNA (1)...(19): siRNA sense strand
ccacauccgccacaagauc

SEQ ID NO: 347242 - RNA, 19 nt, Homo sapiens
  misc_RNA (1)...(19): siRNA sense strand
uaaauucgggaaaggugaa

SEQ ID NO: 347243 - RNA, 19 nt, Homo sapiens
  misc_RNA (1)...(19): siRNA sense strand
gcagaggaaagcgagaaga

SEQ ID NO: 347244 - RNA, 19 nt, Homo sapiens
  misc_RNA (1)...(19): siRNA sense strand
caaggacgcggucugugau

SEQ ID NO: 347245 - RNA, 19 nt, Homo sapiens
  misc_RNA (1)...(19): siRNA sense strand
gaaggaggcagaggaaagc

SEQ ID NO: 347246 - RNA, 19 nt, Homo sapiens
  misc_RNA (1)...(19): siRNA sense strand
gacgcggucugugaucgaa

SEQ ID NO: 347247 - RNA, 19 nt, Homo sapiens
  misc_RNA (1)...(19): siRNA sense strand
caacgccugacguggagaa

SEQ ID NO: 347248 - RNA, 19 nt, Homo sapiens
  misc_RNA (1)...(19): siRNA sense strand
aaccacauccgccacaaga

SEQ ID NO: 347249 - RNA, 19 nt, Homo sapiens
  misc_RNA (1)...(19): siRNA sense strand
gccgcauccugagaaguaa

SEQ ID NO: 347250 - RNA, 19 nt, Homo sapiens
  misc_RNA (1)...(19): siRNA sense strand
agccgcauccugagaagua

SEQ ID NO: 347251 - RNA, 19 nt, Homo sapiens
  misc_RNA (1)...(19): siRNA sense strand
ggacgcggucugugaucga

SEQ ID NO: 347252 - RNA, 19 nt, Homo sapiens
  misc_RNA (1)...(19): siRNA sense strand
ccaaccacauccgccacaa

SEQ ID NO: 347253 - RNA, 19 nt, Homo sapiens
  misc_RNA (1)...(19): siRNA sense strand
ggaaauccgagacaaauua

SEQ ID NO: 347254 - RNA, 19 nt, Homo sapiens
  misc_RNA (1)...(19): siRNA sense strand
gaaacaccgugccgucagu

SEQ ID NO: 347255 - RNA, 19 nt, Homo sapiens
  misc_RNA (1)...(19): siRNA sense strand
gaaguaaauucgggaaagg

SEQ ID NO: 347256 - RNA, 19 nt, Homo sapiens
  misc_RNA (1)...(19): siRNA sense strand
gagacaaauuacucaagga

SEQ ID NO: 347257 - RNA, 19 nt, Homo sapiens
  misc_RNA (1)...(19): siRNA sense strand
ggaaggaggcagaggaaag

SEQ ID NO: 347258 - RNA, 19 nt, Homo sapiens
  misc_RNA (1)...(19): siRNA sense strand
gagaagaaggccaaacaca

SEQ ID NO: 347259 - RNA, 19 nt, Homo sapiens
  misc_RNA (1)...(19): siRNA sense strand
ucaaggacgcggucuguga

SEQ ID NO: 347260 - RNA, 19 nt, Homo sapiens
  misc_RNA (1)...(19): siRNA sense strand
gaagaaaauugaggaauac

SEQ ID NO: 347261 - RNA, 19 nt, Homo sapiens
  misc_RNA (1)...(19): siRNA sense strand
cgccugacguggagaagaa

SEQ ID NO: 347262 - RNA, 19 nt, Homo sapiens
  misc_RNA (1)...(19): siRNA sense strand
gcgagaagaaggccaaaca

SEQ ID NO: 347263 - RNA, 19 nt, Homo sapiens
  misc_RNA (1)...(19): siRNA sense strand
gggaaauccgagacaaauu

SEQ ID NO: 347264 - RNA, 19 nt, Homo sapiens
  misc_RNA (1)...(19): siRNA sense strand
gaggaaggaggcagaggaa

SEQ ID NO: 347265 - RNA, 19 nt, Homo sapiens
  misc_RNA (1)...(19): siRNA sense strand
gaaauccgagacaaauuac

SEQ ID NO: 347266 - RNA, 19 nt, Homo sapiens
  misc_RNA (1)...(19): siRNA sense strand
cagaggaaagcgagaagaa

SEQ ID NO: 347267 - RNA, 19 nt, Homo sapiens
  misc_RNA (1)...(19): siRNA sense strand
gagaaguaaauucgggaaa

SEQ ID NO: 347268 - RNA, 19 nt, Homo sapiens
  misc_RNA (1)...(19): siRNA sense strand
agaaguaaauucgggaaag

SEQ ID NO: 347269 - RNA, 19 nt, Homo sapiens
  misc_RNA (1)...(19): siRNA sense strand
gcugggaaauccgagacaa

SEQ ID NO: 347270 - RNA, 19 nt, Homo sapiens
  misc_RNA (1)...(19): siRNA sense strand
ccacauccgccacaagauc

SEQ ID NO: 347271 - RNA, 19 nt, Homo sapiens
  misc_RNA (1)...(19): siRNA sense strand
uaaauucgggaaaggugaa

SEQ ID NO: 347272 - RNA, 19 nt, Homo sapiens
  misc_RNA (1)...(19): siRNA sense strand
gcagaggaaagcgagaaga

SEQ ID NO: 347273 - RNA, 19 nt, Homo sapiens
  misc_RNA (1)...(19): siRNA sense strand
caaggacgcggucugugau

SEQ ID NO: 347274 - RNA, 19 nt, Homo sapiens
  misc_RNA (1)...(19): siRNA sense strand
gaaggaggcagaggaaagc

SEQ ID NO: 347275 - RNA, 19 nt, Homo sapiens
  misc_RNA (1)...(19): siRNA sense strand
gacgcggucugugaucgaa

SEQ ID NO: 347276 - RNA, 19 nt, Homo sapiens
  misc_RNA (1)...(19): siRNA sense strand
caacgccugacguggagaa

SEQ ID NO: 347277 - RNA, 19 nt, Homo sapiens
  misc_RNA (1)...(19): siRNA sense strand
aaccacauccgccacaaga

SEQ ID NO: 347278 - RNA, 19 nt, Homo sapiens
  misc_RNA (1)...(19): siRNA sense strand
gccgcauccugagaaguaa

SEQ ID NO: 347279 - RNA, 19 nt, Homo sapiens
  misc_RNA (1)...(19): siRNA sense strand
agccgcauccugagaagua

SEQ ID NO: 347280 - RNA, 19 nt, Homo sapiens
  misc_RNA (1)...(19): siRNA sense strand
ggacgcggucugugaucga

SEQ ID NO: 347281 - RNA, 19 nt, Homo sapiens
  misc_RNA (1)...(19): siRNA sense strand
ccaaccacauccgccacaa

SEQ ID NO: 347282 - RNA, 19 nt, Homo sapiens
  misc_RNA (1)...(19): siRNA sense strand
ggacgaugcugccacugua

SEQ ID NO: 347283 - RNA, 19 nt, Homo sapiens
  misc_RNA (1)...(19): siRNA sense strand
gcugaugucuuccaaguau

SEQ ID NO: 347284 - RNA, 19 nt, Homo sapiens
  misc_RNA (1)...(19): siRNA sense strand
gccgggaucuuccugauuu

SEQ ID NO: 347285 - RNA, 19 nt, Homo sapiens
  misc_RNA (1)...(19): siRNA sense strand
aagcagagcuccguggaua

SEQ ID NO: 347286 - RNA, 19 nt, Homo sapiens
  misc_RNA (1)...(19): siRNA sense strand
ggagcacgcuggacucguu

SEQ ID NO: 347287 - RNA, 19 nt, Homo sapiens
  misc_RNA (1)...(19): siRNA sense strand
gcacccacgucaucccuaa

SEQ ID NO: 347288 - RNA, 19 nt, Homo sapiens
  misc_RNA (1)...(19): siRNA sense strand
cagagaaggugcugcaguu

SEQ ID NO: 347289 - RNA, 19 nt, Homo sapiens
  misc_RNA (1)...(19): siRNA sense strand
agaaggugcugcaguuuga

SEQ ID NO: 347290 - RNA, 19 nt, Homo sapiens
  misc_RNA (1)...(19): siRNA sense strand
gcaucgaccugcucaucaa

SEQ ID NO: 347291 - RNA, 19 nt, Homo sapiens
  misc_RNA (1)...(19): siRNA sense strand
ccaccagacugaagauugu

SEQ ID NO: 347292 - RNA, 19 nt, Homo sapiens
  misc_RNA (1)...(19): siRNA sense strand
ccacgagaauggcuucaug

SEQ ID NO: 347293 - RNA, 19 nt, Homo sapiens
  misc_RNA (1)...(19): siRNA sense strand
gcaacaagaaggaguggaa

SEQ ID NO: 347294 - RNA, 19 nt, Homo sapiens
  misc_RNA (1)...(19): siRNA sense strand
agagagugcugaugucuuc

SEQ ID NO: 347295 - RNA, 19 nt, Homo sapiens
  misc_RNA (1)...(19): siRNA sense strand
gaacaacagcaacaagaag

SEQ ID NO: 347296 - RNA, 19 nt, Homo sapiens
  misc_RNA (1)...(19): siRNA sense strand
gcacggcuccuggaagauu

SEQ ID NO: 347297 - RNA, 19 nt, Homo sapiens
  misc_RNA (1)...(19): siRNA sense strand
gcaaggaggaguucacagu

SEQ ID NO: 347298 - RNA, 19 nt, Homo sapiens
  misc_RNA (1)...(19): siRNA sense strand
caagugggcaucuacaaug

SEQ ID NO: 347299 - RNA, 19 nt, Homo sapiens
  misc_RNA (1)...(19): siRNA sense strand
gguggcagauggcaaguuc

SEQ ID NO: 347300 - RNA, 19 nt, Homo sapiens
  misc_RNA (1)...(19): siRNA sense strand
ggacaugcaaggaggaguu

SEQ ID NO: 347301 - RNA, 19 nt, Homo sapiens
  misc_RNA (1)...(19): siRNA sense strand
ggucuacgccauccuaguu

SEQ ID NO: 347302 - RNA, 19 nt, Homo sapiens
  misc_RNA (1)...(19): siRNA sense strand
gcaagugggcaucuacaau

SEQ ID NO: 347303 - RNA, 19 nt, Homo sapiens
  misc_RNA (1)...(19): siRNA sense strand
gaacgagucggcccacauc

SEQ ID NO: 347304 - RNA, 19 nt, Homo sapiens
  misc_RNA (1)...(19): siRNA sense strand
gagaaggugcugcaguuug

SEQ ID NO: 347305 - RNA, 19 nt, Homo sapiens
  misc_RNA (1)...(19): siRNA sense strand
ggaguggaaugggaugaug

SEQ ID NO: 347306 - RNA, 19 nt, Homo sapiens
  misc_RNA (1)...(19): siRNA sense strand
ugacggcccugcugaugga

SEQ ID NO: 347307 - RNA, 19 nt, Homo sapiens
  misc_RNA (1)...(19): siRNA sense strand
gacugaagauugugacgau

SEQ ID NO: 347308 - RNA, 19 nt, Homo sapiens
  misc_RNA (1)...(19): siRNA sense strand
ucaucgagauugccuacaa

SEQ ID NO: 347309 - RNA, 19 nt, Homo sapiens
  misc_RNA (1)...(19): siRNA sense strand
cuaguuagccauccaccua

SEQ ID NO: 347310 - RNA, 19 nt, Homo sapiens
  misc_RNA (1)...(19): siRNA sense strand
gugcugaugucuuccaagu

SEQ ID NO: 347311 - RNA, 19 nt, Homo sapiens
  misc_RNA (1)...(19): siRNA sense strand
uuuccaagcccuucaagua

SEQ ID NO: 347312 - RNA, 19 nt, Homo sapiens
  misc_RNA (1)...(19): siRNA sense strand
uggaagaccuggacaagac

SEQ ID NO: 347313 - RNA, 19 nt, Homo sapiens
  misc_RNA (1)...(19): siRNA sense strand
agacguggguucgguauca

SEQ ID NO: 347314 - RNA, 19 nt, Homo sapiens
  misc_RNA (1)...(19): siRNA sense strand
ggaagcacgagcagauguu

SEQ ID NO: 347315 - RNA, 19 nt, Homo sapiens
  misc_RNA (1)...(19): siRNA sense strand
cuacacagccggcuucuac

SEQ ID NO: 347316 - RNA, 19 nt, Homo sapiens
  misc_RNA (1)...(19): siRNA sense strand
guuaacguguggcggaaga

SEQ ID NO: 347317 - RNA, 19 nt, Homo sapiens
  misc_RNA (1)...(19): siRNA sense strand
cccaagaucgucaacauug

SEQ ID NO: 347318 - RNA, 19 nt, Homo sapiens
  misc_RNA (1)...(19): siRNA sense strand
gugaacaacagcaacaaga

SEQ ID NO: 347319 - RNA, 19 nt, Homo sapiens
  misc_RNA (1)...(19): siRNA sense strand
ccuggaagauucagcucaa

SEQ ID NO: 347320 - RNA, 19 nt, Homo sapiens
  misc_RNA (1)...(19): siRNA sense strand
caagcugcaugccuucauc

SEQ ID NO: 347321 - RNA, 19 nt, Homo sapiens
  misc_RNA (1)...(19): siRNA sense strand
ucaagagagugcugauguc

SEQ ID NO: 347322 - RNA, 19 nt, Homo sapiens
  misc_RNA (1)...(19): siRNA sense strand
cgagaauggcuucauggaa

SEQ ID NO: 347323 - RNA, 19 nt, Homo sapiens
  misc_RNA (1)...(19): siRNA sense strand
gcagagcuccguggauauc

SEQ ID NO: 347324 - RNA, 19 nt, Homo sapiens
  misc_RNA (1)...(19): siRNA sense strand
ugaacaacagcaacaagaa

SEQ ID NO: 347325 - RNA, 19 nt, Homo sapiens
  misc_RNA (1)...(19): siRNA sense strand
caacggcgacccagucaag

SEQ ID NO: 347326 - RNA, 19 nt, Homo sapiens
  misc_RNA (1)...(19): siRNA sense strand
gcaacaccaacaucuggaa

SEQ ID NO: 347327 - RNA, 19 nt, Homo sapiens
  misc_RNA (1)...(19): siRNA sense strand
ccacccgcauguccaucua

SEQ ID NO: 347328 - RNA, 19 nt, Homo sapiens
  misc_RNA (1)...(19): siRNA sense strand
cacaggagcgggugaacaa

SEQ ID NO: 347329 - RNA, 19 nt, Homo sapiens
  misc_RNA (1)...(19): siRNA sense strand
ccaacuacagcaucaugaa

SEQ ID NO: 347330 - RNA, 19 nt, Homo sapiens
  misc_RNA (1)...(19): siRNA sense strand
ggaagauucagcucaaugc

SEQ ID NO: 347331 - RNA, 19 nt, Homo sapiens
  misc_RNA (1)...(19): siRNA sense strand
gaagcacaacuacgagagu

SEQ ID NO: 347332 - RNA, 19 nt, Homo sapiens
  misc_RNA (1)...(19): siRNA sense strand
aaggaggaguucacaguca

SEQ ID NO: 347333 - RNA, 19 nt, Homo sapiens
  misc_RNA (1)...(19): siRNA sense strand
ccaccuccgucacgcacaa

SEQ ID NO: 347334 - RNA, 19 nt, Homo sapiens
  misc_RNA (1)...(19): siRNA sense strand
gcagaugcagcuggccuuu

SEQ ID NO: 347335 - RNA, 19 nt, Homo sapiens
  misc_RNA (1)...(19): siRNA sense strand
ccucaagucccacgagaau

SEQ ID NO: 347336 - RNA, 19 nt, Homo sapiens
  misc_RNA (1)...(19): siRNA sense strand
gcacacaggagcgggugaa

SEQ ID NO: 347337 - RNA, 19 nt, Homo sapiens
  misc_RNA (1)...(19): siRNA sense strand
ccuaaugacaggaagauca

SEQ ID NO: 347338 - RNA, 19 nt, Homo sapiens
  misc_RNA (1)...(19): siRNA sense strand
ccucgaggguaccagaugu

SEQ ID NO: 347339 - RNA, 19 nt, Homo sapiens
  misc_RNA (1)...(19): siRNA sense strand
agagcuccguggauaucua

SEQ ID NO: 347340 - RNA, 19 nt, Homo sapiens
  misc_RNA (1)...(19): siRNA sense strand
ugacuggucgcguggaguu

SEQ ID NO: 347341 - RNA, 19 nt, Homo sapiens
  misc_RNA (1)...(19): siRNA sense strand
caucgagauugccuacaag

SEQ ID NO: 347342 - RNA, 19 nt, Homo sapiens
  misc_RNA (1)...(19): siRNA sense strand
gcaaagacagccccuggaa

SEQ ID NO: 347343 - RNA, 19 nt, Homo sapiens
  misc_RNA (1)...(19): siRNA sense strand
uggagaagcacaacuacga

SEQ ID NO: 347344 - RNA, 19 nt, Homo sapiens
  misc_RNA (1)...(19): siRNA sense strand
ccaggucuacgccauccua

SEQ ID NO: 347345 - RNA, 19 nt, Homo sapiens
  misc_RNA (1)...(19): siRNA sense strand
gaagcacgagcagauguuc

SEQ ID NO: 347346 - RNA, 19 nt, Homo sapiens
  misc_RNA (1)...(19): siRNA sense strand
ccuacaagcggcacaagga

SEQ ID NO: 347347 - RNA, 19 nt, Homo sapiens
  misc_RNA (1)...(19): siRNA sense strand
ucaagucccacgagaaugg

SEQ ID NO: 347348 - RNA, 19 nt, Homo sapiens
  misc_RNA (1)...(19): siRNA sense strand
gaagcagagcuccguggau

SEQ ID NO: 347349 - RNA, 19 nt, Homo sapiens
  misc_RNA (1)...(19): siRNA sense strand
ccucggacaaguuuaucua

SEQ ID NO: 347350 - RNA, 19 nt, Homo sapiens
  misc_RNA (1)...(19): siRNA sense strand
caauggcacccacgucauc

SEQ ID NO: 347351 - RNA, 19 nt, Homo sapiens
  misc_RNA (1)...(19): siRNA sense strand
gcgugugguuugagaugau

SEQ ID NO: 347352 - RNA, 19 nt, Homo sapiens
  misc_RNA (1)...(19): siRNA sense strand
caacaagaaggaguggaau

SEQ ID NO: 347353 - RNA, 19 nt, Homo sapiens
  misc_RNA (1)...(19): siRNA sense strand
accaggagcccuucgugua

SEQ ID NO: 347354 - RNA, 19 nt, Homo sapiens
  misc_RNA (1)...(19): siRNA sense strand
gagugcugaugucuuccaa

SEQ ID NO: 347355 - RNA, 19 nt, Homo sapiens
  misc_RNA (1)...(19): siRNA sense strand
gaaccccucggacaaguuu

SEQ ID NO: 347356 - RNA, 19 nt, Homo sapiens
  misc_RNA (1)...(19): siRNA sense strand
gcucaucaacggcaagaac

SEQ ID NO: 347357 - RNA, 19 nt, Homo sapiens
  misc_RNA (1)...(19): siRNA sense strand
agaugcagcuggccuuugc

SEQ ID NO: 347358 - RNA, 19 nt, Homo sapiens
  misc_RNA (1)...(19): siRNA sense strand
aggaggaguucacagucaa

SEQ ID NO: 347359 - RNA, 19 nt, Homo sapiens
  misc_RNA (1)...(19): siRNA sense strand
ucaagcccacgcugaguga

SEQ ID NO: 347360 - RNA, 19 nt, Homo sapiens
  misc_RNA (1)...(19): siRNA sense strand
cagauguccaccagacuga

SEQ ID NO: 347361 - RNA, 19 nt, Homo sapiens
  misc_RNA (1)...(19): siRNA sense strand
caagagagugcugaugucu

SEQ ID NO: 347362 - RNA, 19 nt, Homo sapiens
  misc_RNA (1)...(19): siRNA sense strand
caagacguggguucgguau

SEQ ID NO: 347363 - RNA, 19 nt, Homo sapiens
  misc_RNA (1)...(19): siRNA sense strand
auauggagaagcacaacua

SEQ ID NO: 347364 - RNA, 19 nt, Homo sapiens
  misc_RNA (1)...(19): siRNA sense strand
ccaggagcccuucguguac

SEQ ID NO: 347365 - RNA, 19 nt, Homo sapiens
  misc_RNA (1)...(19): siRNA sense strand
caacuacagcaucaugaac

SEQ ID NO: 347366 - RNA, 19 nt, Homo sapiens
  misc_RNA (1)...(19): siRNA sense strand
gccaacuacagcaucauga

SEQ ID NO: 347367 - RNA, 19 nt, Homo sapiens
  misc_RNA (1)...(19): siRNA sense strand
gagcgcaucacgggcauca

SEQ ID NO: 347368 - RNA, 19 nt, Homo sapiens
  misc_RNA (1)...(19): siRNA sense strand
ggacgaugcugccacugua

SEQ ID NO: 347369 - RNA, 19 nt, Homo sapiens
  misc_RNA (1)...(19): siRNA sense strand
gcugaugucuuccaaguau

SEQ ID NO: 347370 - RNA, 19 nt, Homo sapiens
  misc_RNA (1)...(19): siRNA sense strand
gccgggaucuuccugauuu

SEQ ID NO: 347371 - RNA, 19 nt, Homo sapiens
  misc_RNA (1)...(19): siRNA sense strand
aagcagagcuccguggaua

SEQ ID NO: 347372 - RNA, 19 nt, Homo sapiens
  misc_RNA (1)...(19): siRNA sense strand
ggagcacgcuggacucguu

SEQ ID NO: 347373 - RNA, 19 nt, Homo sapiens
  misc_RNA (1)...(19): siRNA sense strand
gcacccacgucaucccuaa

SEQ ID NO: 347374 - RNA, 19 nt, Homo sapiens
  misc_RNA (1)...(19): siRNA sense strand
cagagaaggugcugcaguu

SEQ ID NO: 347375 - RNA, 19 nt, Homo sapiens
  misc_RNA (1)...(19): siRNA sense strand
agaaggugcugcaguuuga

SEQ ID NO: 347376 - RNA, 19 nt, Homo sapiens
  misc_RNA (1)...(19): siRNA sense strand
gcaucgaccugcucaucaa

SEQ ID NO: 347377 - RNA, 19 nt, Homo sapiens
  misc_RNA (1)...(19): siRNA sense strand
ccaccagacugaagauugu

SEQ ID NO: 347378 - RNA, 19 nt, Homo sapiens
  misc_RNA (1)...(19): siRNA sense strand
ccacgagaauggcuucaug

SEQ ID NO: 347379 - RNA, 19 nt, Homo sapiens
  misc_RNA (1)...(19): siRNA sense strand
gcaacaagaaggaguggaa

SEQ ID NO: 347380 - RNA, 19 nt, Homo sapiens
  misc_RNA (1)...(19): siRNA sense strand
agagagugcugaugucuuc

SEQ ID NO: 347381 - RNA, 19 nt, Homo sapiens
  misc_RNA (1)...(19): siRNA sense strand
gaacaacagcaacaagaag

SEQ ID NO: 347382 - RNA, 19 nt, Homo sapiens
  misc_RNA (1)...(19): siRNA sense strand
gcacggcuccuggaagauu

SEQ ID NO: 347383 - RNA, 19 nt, Homo sapiens
  misc_RNA (1)...(19): siRNA sense strand
gcaaggaggaguucacagu

SEQ ID NO: 347384 - RNA, 19 nt, Homo sapiens
  misc_RNA (1)...(19): siRNA sense strand
caagugggcaucuacaaug

SEQ ID NO: 347385 - RNA, 19 nt, Homo sapiens
  misc_RNA (1)...(19): siRNA sense strand
gguggcagauggcaaguuc

SEQ ID NO: 347386 - RNA, 19 nt, Homo sapiens
  misc_RNA (1)...(19): siRNA sense strand
ggacaugcaaggaggaguu

SEQ ID NO: 347387 - RNA, 19 nt, Homo sapiens
  misc_RNA (1)...(19): siRNA sense strand
ggucuacgccauccuaguu

SEQ ID NO: 347388 - RNA, 19 nt, Homo sapiens
  misc_RNA (1)...(19): siRNA sense strand
gcaagugggcaucuacaau

SEQ ID NO: 347389 - RNA, 19 nt, Homo sapiens
  misc_RNA (1)...(19): siRNA sense strand
gaacgagucggcccacauc

SEQ ID NO: 347390 - RNA, 19 nt, Homo sapiens
  misc_RNA (1)...(19): siRNA sense strand
gagaaggugcugcaguuug

SEQ ID NO: 347391 - RNA, 19 nt, Homo sapiens
  misc_RNA (1)...(19): siRNA sense strand
ggaguggaaugggaugaug

SEQ ID NO: 347392 - RNA, 19 nt, Homo sapiens
  misc_RNA (1)...(19): siRNA sense strand
ugacggcccugcugaugga

SEQ ID NO: 347393 - RNA, 19 nt, Homo sapiens
  misc_RNA (1)...(19): siRNA sense strand
gacugaagauugugacgau

SEQ ID NO: 347394 - RNA, 19 nt, Homo sapiens
  misc_RNA (1)...(19): siRNA sense strand
ucaucgagauugccuacaa

SEQ ID NO: 347395 - RNA, 19 nt, Homo sapiens
  misc_RNA (1)...(19): siRNA sense strand
cuaguuagccauccaccua

SEQ ID NO: 347396 - RNA, 19 nt, Homo sapiens
  misc_RNA (1)...(19): siRNA sense strand
gugcugaugucuuccaagu

SEQ ID NO: 347397 - RNA, 19 nt, Homo sapiens
  misc_RNA (1)...(19): siRNA sense strand
uuuccaagcccuucaagua

SEQ ID NO: 347398 - RNA, 19 nt, Homo sapiens
  misc_RNA (1)...(19): siRNA sense strand
uggaagaccuggacaagac

SEQ ID NO: 347399 - RNA, 19 nt, Homo sapiens
  misc_RNA (1)...(19): siRNA sense strand
agacguggguucgguauca

SEQ ID NO: 347400 - RNA, 19 nt, Homo sapiens
  misc_RNA (1)...(19): siRNA sense strand
ggaagcacgagcagauguu

SEQ ID NO: 347401 - RNA, 19 nt, Homo sapiens
  misc_RNA (1)...(19): siRNA sense strand
cuacacagccggcuucuac

SEQ ID NO: 347402 - RNA, 19 nt, Homo sapiens
  misc_RNA (1)...(19): siRNA sense strand
guuaacguguggcggaaga

SEQ ID NO: 347403 - RNA, 19 nt, Homo sapiens
  misc_RNA (1)...(19): siRNA sense strand
cccaagaucgucaacauug

SEQ ID NO: 347404 - RNA, 19 nt, Homo sapiens
  misc_RNA (1)...(19): siRNA sense strand
gugaacaacagcaacaaga

SEQ ID NO: 347405 - RNA, 19 nt, Homo sapiens
  misc_RNA (1)...(19): siRNA sense strand
ccuggaagauucagcucaa

SEQ ID NO: 347406 - RNA, 19 nt, Homo sapiens
  misc_RNA (1)...(19): siRNA sense strand
caagcugcaugccuucauc

SEQ ID NO: 347407 - RNA, 19 nt, Homo sapiens
  misc_RNA (1)...(19): siRNA sense strand
ucaagagagugcugauguc

SEQ ID NO: 347408 - RNA, 19 nt, Homo sapiens
  misc_RNA (1)...(19): siRNA sense strand
cgagaauggcuucauggaa

SEQ ID NO: 347409 - RNA, 19 nt, Homo sapiens
  misc_RNA (1)...(19): siRNA sense strand
gcagagcuccguggauauc

SEQ ID NO: 347410 - RNA, 19 nt, Homo sapiens
  misc_RNA (1)...(19): siRNA sense strand
ugaacaacagcaacaagaa

SEQ ID NO: 347411 - RNA, 19 nt, Homo sapiens
  misc_RNA (1)...(19): siRNA sense strand
caacggcgacccagucaag

SEQ ID NO: 347412 - RNA, 19 nt, Homo sapiens
  misc_RNA (1)...(19): siRNA sense strand
gcaacaccaacaucuggaa

SEQ ID NO: 347413 - RNA, 19 nt, Homo sapiens
  misc_RNA (1)...(19): siRNA sense strand
ccacccgcauguccaucua

SEQ ID NO: 347414 - RNA, 19 nt, Homo sapiens
  misc_RNA (1)...(19): siRNA sense strand
cacaggagcgggugaacaa

SEQ ID NO: 347415 - RNA, 19 nt, Homo sapiens
  misc_RNA (1)...(19): siRNA sense strand
ccaacuacagcaucaugaa

SEQ ID NO: 347416 - RNA, 19 nt, Homo sapiens
  misc_RNA (1)...(19): siRNA sense strand
ggaagauucagcucaaugc

SEQ ID NO: 347417 - RNA, 19 nt, Homo sapiens
  misc_RNA (1)...(19): siRNA sense strand
gaagcacaacuacgagagu

SEQ ID NO: 347418 - RNA, 19 nt, Homo sapiens
  misc_RNA (1)...(19): siRNA sense strand
aaggaggaguucacaguca

SEQ ID NO: 347419 - RNA, 19 nt, Homo sapiens
  misc_RNA (1)...(19): siRNA sense strand
ccaccuccgucacgcacaa

SEQ ID NO: 347420 - RNA, 19 nt, Homo sapiens
  misc_RNA (1)...(19): siRNA sense strand
gcagaugcagcuggccuuu

SEQ ID NO: 347421 - RNA, 19 nt, Homo sapiens
  misc_RNA (1)...(19): siRNA sense strand
ccucaagucccacgagaau

SEQ ID NO: 347422 - RNA, 19 nt, Homo sapiens
  misc_RNA (1)...(19): siRNA sense strand
gcacacaggagcgggugaa

SEQ ID NO: 347423 - RNA, 19 nt, Homo sapiens
  misc_RNA (1)...(19): siRNA sense strand
ccuaaugacaggaagauca

SEQ ID NO: 347424 - RNA, 19 nt, Homo sapiens
  misc_RNA (1)...(19): siRNA sense strand
ccucgaggguaccagaugu

SEQ ID NO: 347425 - RNA, 19 nt, Homo sapiens
  misc_RNA (1)...(19): siRNA sense strand
agagcuccguggauaucua

SEQ ID NO: 347426 - RNA, 19 nt, Homo sapiens
  misc_RNA (1)...(19): siRNA sense strand
ugacuggucgcguggaguu

SEQ ID NO: 347427 - RNA, 19 nt, Homo sapiens
  misc_RNA (1)...(19): siRNA sense strand
caucgagauugccuacaag

SEQ ID NO: 347428 - RNA, 19 nt, Homo sapiens
  misc_RNA (1)...(19): siRNA sense strand
gcaaagacagccccuggaa

SEQ ID NO: 347429 - RNA, 19 nt, Homo sapiens
  misc_RNA (1)...(19): siRNA sense strand
uggagaagcacaacuacga

SEQ ID NO: 347430 - RNA, 19 nt, Homo sapiens
  misc_RNA (1)...(19): siRNA sense strand
ccaggucuacgccauccua

SEQ ID NO: 347431 - RNA, 19 nt, Homo sapiens
  misc_RNA (1)...(19): siRNA sense strand
gaagcacgagcagauguuc

SEQ ID NO: 347432 - RNA, 19 nt, Homo sapiens
  misc_RNA (1)...(19): siRNA sense strand
ccuacaagcggcacaagga

SEQ ID NO: 347433 - RNA, 19 nt, Homo sapiens
  misc_RNA (1)...(19): siRNA sense strand
ucaagucccacgagaaugg

SEQ ID NO: 347434 - RNA, 19 nt, Homo sapiens
  misc_RNA (1)...(19): siRNA sense strand
gaagcagagcuccguggau

SEQ ID NO: 347435 - RNA, 19 nt, Homo sapiens
  misc_RNA (1)...(19): siRNA sense strand
ccucggacaaguuuaucua

SEQ ID NO: 347436 - RNA, 19 nt, Homo sapiens
  misc_RNA (1)...(19): siRNA sense strand
caauggcacccacgucauc

SEQ ID NO: 347437 - RNA, 19 nt, Homo sapiens
  misc_RNA (1)...(19): siRNA sense strand
gcgugugguuugagaugau

SEQ ID NO: 347438 - RNA, 19 nt, Homo sapiens
  misc_RNA (1)...(19): siRNA sense strand
caacaagaaggaguggaau

SEQ ID NO: 347439 - RNA, 19 nt, Homo sapiens
  misc_RNA (1)...(19): siRNA sense strand
accaggagcccuucgugua

SEQ ID NO: 347440 - RNA, 19 nt, Homo sapiens
  misc_RNA (1)...(19): siRNA sense strand
gagugcugaugucuuccaa

SEQ ID NO: 347441 - RNA, 19 nt, Homo sapiens
  misc_RNA (1)...(19): siRNA sense strand
gaaccccucggacaaguuu

SEQ ID NO: 347442 - RNA, 19 nt, Homo sapiens
  misc_RNA (1)...(19): siRNA sense strand
gcucaucaacggcaagaac

SEQ ID NO: 347443 - RNA, 19 nt, Homo sapiens
  misc_RNA (1)...(19): siRNA sense strand
agaugcagcuggccuuugc

SEQ ID NO: 347444 - RNA, 19 nt, Homo sapiens
  misc_RNA (1)...(19): siRNA sense strand
aggaggaguucacagucaa

SEQ ID NO: 347445 - RNA, 19 nt, Homo sapiens
  misc_RNA (1)...(19): siRNA sense strand
ucaagcccacgcugaguga

SEQ ID NO: 347446 - RNA, 19 nt, Homo sapiens
  misc_RNA (1)...(19): siRNA sense strand
cagauguccaccagacuga

SEQ ID NO: 347447 - RNA, 19 nt, Homo sapiens
  misc_RNA (1)...(19): siRNA sense strand
caagagagugcugaugucu

SEQ ID NO: 347448 - RNA, 19 nt, Homo sapiens
  misc_RNA (1)...(19): siRNA sense strand
caagacguggguucgguau

SEQ ID NO: 347449 - RNA, 19 nt, Homo sapiens
  misc_RNA (1)...(19): siRNA sense strand
auauggagaagcacaacua

SEQ ID NO: 347450 - RNA, 19 nt, Homo sapiens
  misc_RNA (1)...(19): siRNA sense strand
ccaggagcccuucguguac

SEQ ID NO: 347451 - RNA, 19 nt, Homo sapiens
  misc_RNA (1)...(19): siRNA sense strand
caacuacagcaucaugaac

SEQ ID NO: 347452 - RNA, 19 nt, Homo sapiens
  misc_RNA (1)...(19): siRNA sense strand
gccaacuacagcaucauga

SEQ ID NO: 347453 - RNA, 19 nt, Homo sapiens
  misc_RNA (1)...(19): siRNA sense strand
gagcgcaucacgggcauca

SEQ ID NO: 347454 - RNA, 19 nt, Homo sapiens
  misc_RNA (1)...(19): siRNA sense strand
ggacgaugcugccacugua

SEQ ID NO: 347455 - RNA, 19 nt, Homo sapiens
  misc_RNA (1)...(19): siRNA sense strand
gcugaugucuuccaaguau

SEQ ID NO: 347456 - RNA, 19 nt, Homo sapiens
  misc_RNA (1)...(19): siRNA sense strand
gccgggaucuuccugauuu

SEQ ID NO: 347457 - RNA, 19 nt, Homo sapiens
  misc_RNA (1)...(19): siRNA sense strand
aagcagagcuccguggaua

SEQ ID NO: 347458 - RNA, 19 nt, Homo sapiens
  misc_RNA (1)...(19): siRNA sense strand
ggagcacgcuggacucguu

SEQ ID NO: 347459 - RNA, 19 nt, Homo sapiens
  misc_RNA (1)...(19): siRNA sense strand
gcacccacgucaucccuaa

SEQ ID NO: 347460 - RNA, 19 nt, Homo sapiens
  misc_RNA (1)...(19): siRNA sense strand
cagagaaggugcugcaguu

SEQ ID NO: 347461 - RNA, 19 nt, Homo sapiens
  misc_RNA (1)...(19): siRNA sense strand
agaaggugcugcaguuuga

SEQ ID NO: 347462 - RNA, 19 nt, Homo sapiens
  misc_RNA (1)...(19): siRNA sense strand
gcaucgaccugcucaucaa

SEQ ID NO: 347463 - RNA, 19 nt, Homo sapiens
  misc_RNA (1)...(19): siRNA sense strand
ccaccagacugaagauugu

SEQ ID NO: 347464 - RNA, 19 nt, Homo sapiens
  misc_RNA (1)...(19): siRNA sense strand
ccacgagaauggcuucaug

SEQ ID NO: 347465 - RNA, 19 nt, Homo sapiens
  misc_RNA (1)...(19): siRNA sense strand
gcaacaagaaggaguggaa

SEQ ID NO: 347466 - RNA, 19 nt, Homo sapiens
  misc_RNA (1)...(19): siRNA sense strand
agagagugcugaugucuuc

SEQ ID NO: 347467 - RNA, 19 nt, Homo sapiens
  misc_RNA (1)...(19): siRNA sense strand
gaacaacagcaacaagaag

SEQ ID NO: 347468 - RNA, 19 nt, Homo sapiens
  misc_RNA (1)...(19): siRNA sense strand
gcacggcuccuggaagauu

SEQ ID NO: 347469 - RNA, 19 nt, Homo sapiens
  misc_RNA (1)...(19): siRNA sense strand
gcaaggaggaguucacagu

SEQ ID NO: 347470 - RNA, 19 nt, Homo sapiens
  misc_RNA (1)...(19): siRNA sense strand
caagugggcaucuacaaug

SEQ ID NO: 347471 - RNA, 19 nt, Homo sapiens
  misc_RNA (1)...(19): siRNA sense strand
gguggcagauggcaaguuc

SEQ ID NO: 347472 - RNA, 19 nt, Homo sapiens
  misc_RNA (1)...(19): siRNA sense strand
ggacaugcaaggaggaguu

SEQ ID NO: 347473 - RNA, 19 nt, Homo sapiens
  misc_RNA (1)...(19): siRNA sense strand
ggucuacgccauccuaguu

SEQ ID NO: 347474 - RNA, 19 nt, Homo sapiens
  misc_RNA (1)...(19): siRNA sense strand
gcaagugggcaucuacaau

SEQ ID NO: 347475 - RNA, 19 nt, Homo sapiens
  misc_RNA (1)...(19): siRNA sense strand
gaacgagucggcccacauc

SEQ ID NO: 347476 - RNA, 19 nt, Homo sapiens
  misc_RNA (1)...(19): siRNA sense strand
gagaaggugcugcaguuug

SEQ ID NO: 347477 - RNA, 19 nt, Homo sapiens
  misc_RNA (1)...(19): siRNA sense strand
ggaguggaaugggaugaug

SEQ ID NO: 347478 - RNA, 19 nt, Homo sapiens
  misc_RNA (1)...(19): siRNA sense strand
ugacggcccugcugaugga

SEQ ID NO: 347479 - RNA, 19 nt, Homo sapiens
  misc_RNA (1)...(19): siRNA sense strand
gacugaagauugugacgau

SEQ ID NO: 347480 - RNA, 19 nt, Homo sapiens
  misc_RNA (1)...(19): siRNA sense strand
ucaucgagauugccuacaa

SEQ ID NO: 347481 - RNA, 19 nt, Homo sapiens
  misc_RNA (1)...(19): siRNA sense strand
cuaguuagccauccaccua

SEQ ID NO: 347482 - RNA, 19 nt, Homo sapiens
  misc_RNA (1)...(19): siRNA sense strand
gugcugaugucuuccaagu

SEQ ID NO: 347483 - RNA, 19 nt, Homo sapiens
  misc_RNA (1)...(19): siRNA sense strand
uuuccaagcccuucaagua

SEQ ID NO: 347484 - RNA, 19 nt, Homo sapiens
  misc_RNA (1)...(19): siRNA sense strand
uggaagaccuggacaagac

SEQ ID NO: 347485 - RNA, 19 nt, Homo sapiens
  misc_RNA (1)...(19): siRNA sense strand
agacguggguucgguauca

SEQ ID NO: 347486 - RNA, 19 nt, Homo sapiens
  misc_RNA (1)...(19): siRNA sense strand
ggaagcacgagcagauguu

SEQ ID NO: 347487 - RNA, 19 nt, Homo sapiens
  misc_RNA (1)...(19): siRNA sense strand
cuacacagccggcuucuac

SEQ ID NO: 347488 - RNA, 19 nt, Homo sapiens
  misc_RNA (1)...(19): siRNA sense strand
guuaacguguggcggaaga

SEQ ID NO: 347489 - RNA, 19 nt, Homo sapiens
  misc_RNA (1)...(19): siRNA sense strand
cccaagaucgucaacauug

SEQ ID NO: 347490 - RNA, 19 nt, Homo sapiens
  misc_RNA (1)...(19): siRNA sense strand
gugaacaacagcaacaaga

SEQ ID NO: 347491 - RNA, 19 nt, Homo sapiens
  misc_RNA (1)...(19): siRNA sense strand
ccuggaagauucagcucaa

SEQ ID NO: 347492 - RNA, 19 nt, Homo sapiens
  misc_RNA (1)...(19): siRNA sense strand
caagcugcaugccuucauc

SEQ ID NO: 347493 - RNA, 19 nt, Homo sapiens
  misc_RNA (1)...(19): siRNA sense strand
ucaagagagugcugauguc

SEQ ID NO: 347494 - RNA, 19 nt, Homo sapiens
  misc_RNA (1)...(19): siRNA sense strand
cgagaauggcuucauggaa

SEQ ID NO: 347495 - RNA, 19 nt, Homo sapiens
  misc_RNA (1)...(19): siRNA sense strand
gcagagcuccguggauauc

SEQ ID NO: 347496 - RNA, 19 nt, Homo sapiens
  misc_RNA (1)...(19): siRNA sense strand
ugaacaacagcaacaagaa

SEQ ID NO: 347497 - RNA, 19 nt, Homo sapiens
  misc_RNA (1)...(19): siRNA sense strand
caacggcgacccagucaag

SEQ ID NO: 347498 - RNA, 19 nt, Homo sapiens
  misc_RNA (1)...(19): siRNA sense strand
gcaacaccaacaucuggaa

SEQ ID NO: 347499 - RNA, 19 nt, Homo sapiens
  misc_RNA (1)...(19): siRNA sense strand
ccacccgcauguccaucua

SEQ ID NO: 347500 - RNA, 19 nt, Homo sapiens
  misc_RNA (1)...(19): siRNA sense strand
cacaggagcgggugaacaa

SEQ ID NO: 347501 - RNA, 19 nt, Homo sapiens
  misc_RNA (1)...(19): siRNA sense strand
ccaacuacagcaucaugaa

SEQ ID NO: 347502 - RNA, 19 nt, Homo sapiens
  misc_RNA (1)...(19): siRNA sense strand
ggaagauucagcucaaugc

SEQ ID NO: 347503 - RNA, 19 nt, Homo sapiens
  misc_RNA (1)...(19): siRNA sense strand
gaagcacaacuacgagagu

SEQ ID NO: 347504 - RNA, 19 nt, Homo sapiens
  misc_RNA (1)...(19): siRNA sense strand
aaggaggaguucacaguca

SEQ ID NO: 347505 - RNA, 19 nt, Homo sapiens
  misc_RNA (1)...(19): siRNA sense strand
ccaccuccgucacgcacaa

SEQ ID NO: 347506 - RNA, 19 nt, Homo sapiens
  misc_RNA (1)...(19): siRNA sense strand
gcagaugcagcuggccuuu

SEQ ID NO: 347507 - RNA, 19 nt, Homo sapiens
  misc_RNA (1)...(19): siRNA sense strand
ccucaagucccacgagaau

SEQ ID NO: 347508 - RNA, 19 nt, Homo sapiens
  misc_RNA (1)...(19): siRNA sense strand
gcacacaggagcgggugaa

SEQ ID NO: 347509 - RNA, 19 nt, Homo sapiens
  misc_RNA (1)...(19): siRNA sense strand
ccuaaugacaggaagauca

SEQ ID NO: 347510 - RNA, 19 nt, Homo sapiens
  misc_RNA (1)...(19): siRNA sense strand
ccucgaggguaccagaugu

SEQ ID NO: 347511 - RNA, 19 nt, Homo sapiens
  misc_RNA (1)...(19): siRNA sense strand
agagcuccguggauaucua

SEQ ID NO: 347512 - RNA, 19 nt, Homo sapiens
  misc_RNA (1)...(19): siRNA sense strand
ugacuggucgcguggaguu

SEQ ID NO: 347513 - RNA, 19 nt, Homo sapiens
  misc_RNA (1)...(19): siRNA sense strand
caucgagauugccuacaag

SEQ ID NO: 347514 - RNA, 19 nt, Homo sapiens
  misc_RNA (1)...(19): siRNA sense strand
gcaaagacagccccuggaa

SEQ ID NO: 347515 - RNA, 19 nt, Homo sapiens
  misc_RNA (1)...(19): siRNA sense strand
uggagaagcacaacuacga

SEQ ID NO: 347516 - RNA, 19 nt, Homo sapiens
  misc_RNA (1)...(19): siRNA sense strand
ccaggucuacgccauccua

SEQ ID NO: 347517 - RNA, 19 nt, Homo sapiens
  misc_RNA (1)...(19): siRNA sense strand
gaagcacgagcagauguuc

SEQ ID NO: 347518 - RNA, 19 nt, Homo sapiens
  misc_RNA (1)...(19): siRNA sense strand
ccuacaagcggcacaagga

SEQ ID NO: 347519 - RNA, 19 nt, Homo sapiens
  misc_RNA (1)...(19): siRNA sense strand
ucaagucccacgagaaugg

SEQ ID NO: 347520 - RNA, 19 nt, Homo sapiens
  misc_RNA (1)...(19): siRNA sense strand
gaagcagagcuccguggau

SEQ ID NO: 347521 - RNA, 19 nt, Homo sapiens
  misc_RNA (1)...(19): siRNA sense strand
ccucggacaaguuuaucua

SEQ ID NO: 347522 - RNA, 19 nt, Homo sapiens
  misc_RNA (1)...(19): siRNA sense strand
caauggcacccacgucauc

SEQ ID NO: 347523 - RNA, 19 nt, Homo sapiens
  misc_RNA (1)...(19): siRNA sense strand
gcgugugguuugagaugau

SEQ ID NO: 347524 - RNA, 19 nt, Homo sapiens
  misc_RNA (1)...(19): siRNA sense strand
caacaagaaggaguggaau

SEQ ID NO: 347525 - RNA, 19 nt, Homo sapiens
  misc_RNA (1)...(19): siRNA sense strand
accaggagcccuucgugua

SEQ ID NO: 347526 - RNA, 19 nt, Homo sapiens
  misc_RNA (1)...(19): siRNA sense strand
gagugcugaugucuuccaa

SEQ ID NO: 347527 - RNA, 19 nt, Homo sapiens
  misc_RNA (1)...(19): siRNA sense strand
gaaccccucggacaaguuu

SEQ ID NO: 347528 - RNA, 19 nt, Homo sapiens
  misc_RNA (1)...(19): siRNA sense strand
gcucaucaacggcaagaac

SEQ ID NO: 347529 - RNA, 19 nt, Homo sapiens
  misc_RNA (1)...(19): siRNA sense strand
agaugcagcuggccuuugc

SEQ ID NO: 347530 - RNA, 19 nt, Homo sapiens
  misc_RNA (1)...(19): siRNA sense strand
aggaggaguucacagucaa

SEQ ID NO: 347531 - RNA, 19 nt, Homo sapiens
  misc_RNA (1)...(19): siRNA sense strand
ucaagcccacgcugaguga

SEQ ID NO: 347532 - RNA, 19 nt, Homo sapiens
  misc_RNA (1)...(19): siRNA sense strand
cagauguccaccagacuga

SEQ ID NO: 347533 - RNA, 19 nt, Homo sapiens
  misc_RNA (1)...(19): siRNA sense strand
caagagagugcugaugucu

SEQ ID NO: 347534 - RNA, 19 nt, Homo sapiens
  misc_RNA (1)...(19): siRNA sense strand
caagacguggguucgguau

SEQ ID NO: 347535 - RNA, 19 nt, Homo sapiens
  misc_RNA (1)...(19): siRNA sense strand
auauggagaagcacaacua

SEQ ID NO: 347536 - RNA, 19 nt, Homo sapiens
  misc_RNA (1)...(19): siRNA sense strand
ccaggagcccuucguguac

SEQ ID NO: 347537 - RNA, 19 nt, Homo sapiens
  misc_RNA (1)...(19): siRNA sense strand
caacuacagcaucaugaac

SEQ ID NO: 347538 - RNA, 19 nt, Homo sapiens
  misc_RNA (1)...(19): siRNA sense strand
gccaacuacagcaucauga

SEQ ID NO: 347539 - RNA, 19 nt, Homo sapiens
  misc_RNA (1)...(19): siRNA sense strand
gagcgcaucacgggcauca

SEQ ID NO: 347540 - RNA, 19 nt, Homo sapiens
  misc_RNA (1)...(19): siRNA sense strand
ggacaaugcuuacaaguuu

SEQ ID NO: 347541 - RNA, 19 nt, Homo sapiens
  misc_RNA (1)...(19): siRNA sense strand
guacaaagcuggauucaug

SEQ ID NO: 347542 - RNA, 19 nt, Homo sapiens
  misc_RNA (1)...(19): siRNA sense strand
gauguuggcugcaguauaa

SEQ ID NO: 347543 - RNA, 19 nt, Homo sapiens
  misc_RNA (1)...(19): siRNA sense strand
ccacacaguuucccaaaua

SEQ ID NO: 347544 - RNA, 19 nt, Homo sapiens
  misc_RNA (1)...(19): siRNA sense strand
gcaaauaucucuggagguu

SEQ ID NO: 347545 - RNA, 19 nt, Homo sapiens
  misc_RNA (1)...(19): siRNA sense strand
gaaccaaccuuccauccaa

SEQ ID NO: 347546 - RNA, 19 nt, Homo sapiens
  misc_RNA (1)...(19): siRNA sense strand
ggagaagacauguuaauaa

SEQ ID NO: 347547 - RNA, 19 nt, Homo sapiens
  misc_RNA (1)...(19): siRNA sense strand
ugaaggaacugcuggaauu

SEQ ID NO: 347548 - RNA, 19 nt, Homo sapiens
  misc_RNA (1)...(19): siRNA sense strand
gauaauggcugauaaacag

SEQ ID NO: 347549 - RNA, 19 nt, Homo sapiens
  misc_RNA (1)...(19): siRNA sense strand
gauugaaggugcauuuauu

SEQ ID NO: 347550 - RNA, 19 nt, Homo sapiens
  misc_RNA (1)...(19): siRNA sense strand
caacacaacuccuccuuca

SEQ ID NO: 347551 - RNA, 19 nt, Homo sapiens
  misc_RNA (1)...(19): siRNA sense strand
caauagaggaacugaauua

SEQ ID NO: 347552 - RNA, 19 nt, Homo sapiens
  misc_RNA (1)...(19): siRNA sense strand
gauaaacagucgcaaagga

SEQ ID NO: 347553 - RNA, 19 nt, Homo sapiens
  misc_RNA (1)...(19): siRNA sense strand
gagugaagauugucuauca

SEQ ID NO: 347554 - RNA, 19 nt, Homo sapiens
  misc_RNA (1)...(19): siRNA sense strand
ggccugaagugaaauuuaa

SEQ ID NO: 347555 - RNA, 19 nt, Homo sapiens
  misc_RNA (1)...(19): siRNA sense strand
gaggaaaguugcuguggaa

SEQ ID NO: 347556 - RNA, 19 nt, Homo sapiens
  misc_RNA (1)...(19): siRNA sense strand
gguuauaauucuccugaua

SEQ ID NO: 347557 - RNA, 19 nt, Homo sapiens
  misc_RNA (1)...(19): siRNA sense strand
gaacagaugcuggauauag

SEQ ID NO: 347558 - RNA, 19 nt, Homo sapiens
  misc_RNA (1)...(19): siRNA sense strand
gcagagaauuauuggaaga

SEQ ID NO: 347559 - RNA, 19 nt, Homo sapiens
  misc_RNA (1)...(19): siRNA sense strand
gggagaggaucaagaaaug

SEQ ID NO: 347560 - RNA, 19 nt, Homo sapiens
  misc_RNA (1)...(19): siRNA sense strand
ggucagccgugaauuaaga

SEQ ID NO: 347561 - RNA, 19 nt, Homo sapiens
  misc_RNA (1)...(19): siRNA sense strand
gauauuuccuccugagcua

SEQ ID NO: 347562 - RNA, 19 nt, Homo sapiens
  misc_RNA (1)...(19): siRNA sense strand
gaaggugcauuuauucaag

SEQ ID NO: 347563 - RNA, 19 nt, Homo sapiens
  misc_RNA (1)...(19): siRNA sense strand
uggcagaucucaacgguuu

SEQ ID NO: 347564 - RNA, 19 nt, Homo sapiens
  misc_RNA (1)...(19): siRNA sense strand
gagaaggugcgaaucauaa

SEQ ID NO: 347565 - RNA, 19 nt, Homo sapiens
  misc_RNA (1)...(19): siRNA sense strand
aaaggaaacuggaauaugg

SEQ ID NO: 347566 - RNA, 19 nt, Homo sapiens
  misc_RNA (1)...(19): siRNA sense strand
ucaggaacauggcuucuuu

SEQ ID NO: 347567 - RNA, 19 nt, Homo sapiens
  misc_RNA (1)...(19): siRNA sense strand
gcaugggacuuuauacaau

SEQ ID NO: 347568 - RNA, 19 nt, Homo sapiens
  misc_RNA (1)...(19): siRNA sense strand
aaacaucacugcaguacau

SEQ ID NO: 347569 - RNA, 19 nt, Homo sapiens
  misc_RNA (1)...(19): siRNA sense strand
caugggacuuuauacaaua

SEQ ID NO: 347570 - RNA, 19 nt, Homo sapiens
  misc_RNA (1)...(19): siRNA sense strand
ggauacaggcccauaauug

SEQ ID NO: 347571 - RNA, 19 nt, Homo sapiens
  misc_RNA (1)...(19): siRNA sense strand
cauggacccuugacccuua

SEQ ID NO: 347572 - RNA, 19 nt, Homo sapiens
  misc_RNA (1)...(19): siRNA sense strand
gaauuaagaaugccaaugu

SEQ ID NO: 347573 - RNA, 19 nt, Homo sapiens
  misc_RNA (1)...(19): siRNA sense strand
caaggaaauugaucaaaca

SEQ ID NO: 347574 - RNA, 19 nt, Homo sapiens
  misc_RNA (1)...(19): siRNA sense strand
gaacuuuucuugacuuuug

SEQ ID NO: 347575 - RNA, 19 nt, Homo sapiens
  misc_RNA (1)...(19): siRNA sense strand
gauacaggcccauaauuga

SEQ ID NO: 347576 - RNA, 19 nt, Homo sapiens
  misc_RNA (1)...(19): siRNA sense strand
gaaccugaguguuguaaac

SEQ ID NO: 347577 - RNA, 19 nt, Homo sapiens
  misc_RNA (1)...(19): siRNA sense strand
gaacaucagaacagacauu

SEQ ID NO: 347578 - RNA, 19 nt, Homo sapiens
  misc_RNA (1)...(19): siRNA sense strand
gaaaggaaacuggaauaug

SEQ ID NO: 347579 - RNA, 19 nt, Homo sapiens
  misc_RNA (1)...(19): siRNA sense strand
ggagaaugcgcuagcgaua

SEQ ID NO: 347580 - RNA, 19 nt, Homo sapiens
  misc_RNA (1)...(19): siRNA sense strand
gccaaugccugucugauuc

SEQ ID NO: 347581 - RNA, 19 nt, Homo sapiens
  misc_RNA (1)...(19): siRNA sense strand
ucauaaacauguacaagga

SEQ ID NO: 347582 - RNA, 19 nt, Homo sapiens
  misc_RNA (1)...(19): siRNA sense strand
cgacagauuccuuuaaaug

SEQ ID NO: 347583 - RNA, 19 nt, Homo sapiens
  misc_RNA (1)...(19): siRNA sense strand
gaaacugucccuaaugcaa

SEQ ID NO: 347584 - RNA, 19 nt, Homo sapiens
  misc_RNA (1)...(19): siRNA sense strand
gagaauuauuggaagaaga

SEQ ID NO: 347585 - RNA, 19 nt, Homo sapiens
  misc_RNA (1)...(19): siRNA sense strand
cagcagaacaucuuaguga

SEQ ID NO: 347586 - RNA, 19 nt, Homo sapiens
  misc_RNA (1)...(19): siRNA sense strand
gcaaaggaccaggguguuu

SEQ ID NO: 347587 - RNA, 19 nt, Homo sapiens
  misc_RNA (1)...(19): siRNA sense strand
gaaugccaaugucgaaugu

SEQ ID NO: 347588 - RNA, 19 nt, Homo sapiens
  misc_RNA (1)...(19): siRNA sense strand
gaaaguacaaagcuggauu

SEQ ID NO: 347589 - RNA, 19 nt, Homo sapiens
  misc_RNA (1)...(19): siRNA sense strand
ugacgaagcauuuaaagug

SEQ ID NO: 347590 - RNA, 19 nt, Homo sapiens
  misc_RNA (1)...(19): siRNA sense strand
caaagcagcauccugaaga

SEQ ID NO: 347591 - RNA, 19 nt, Homo sapiens
  misc_RNA (1)...(19): siRNA sense strand
gggauggcauuauuagaga

SEQ ID NO: 347592 - RNA, 19 nt, Homo sapiens
  misc_RNA (1)...(19): siRNA sense strand
ggagaggauugccaagugu

SEQ ID NO: 347593 - RNA, 19 nt, Homo sapiens
  misc_RNA (1)...(19): siRNA sense strand
cuucagagguuaugaguca

SEQ ID NO: 347594 - RNA, 19 nt, Homo sapiens
  misc_RNA (1)...(19): siRNA sense strand
ccaaauauauacaggacau

SEQ ID NO: 347595 - RNA, 19 nt, Homo sapiens
  misc_RNA (1)...(19): siRNA sense strand
cuaagauugugucuaauga

SEQ ID NO: 347596 - RNA, 19 nt, Homo sapiens
  misc_RNA (1)...(19): siRNA sense strand
augcuaagauugugucuaa

SEQ ID NO: 347597 - RNA, 19 nt, Homo sapiens
  misc_RNA (1)...(19): siRNA sense strand
gggaggccaucuacuguga

SEQ ID NO: 347598 - RNA, 19 nt, Homo sapiens
  misc_RNA (1)...(19): siRNA sense strand
guauaaauccagccauuga

SEQ ID NO: 347599 - RNA, 19 nt, Homo sapiens
  misc_RNA (1)...(19): siRNA sense strand
gagaauguauggccauguc

SEQ ID NO: 347600 - RNA, 19 nt, Homo sapiens
  misc_RNA (1)...(19): siRNA sense strand
ucaaacacccuacaaacaa

SEQ ID NO: 347601 - RNA, 19 nt, Homo sapiens
  misc_RNA (1)...(19): siRNA sense strand
caagggagaggaucaagaa

SEQ ID NO: 347602 - RNA, 19 nt, Homo sapiens
  misc_RNA (1)...(19): siRNA sense strand
gaaacuggaauauggaaau

SEQ ID NO: 347603 - RNA, 19 nt, Homo sapiens
  misc_RNA (1)...(19): siRNA sense strand
uacugaagcugagaaauuu

SEQ ID NO: 347604 - RNA, 19 nt, Homo sapiens
  misc_RNA (1)...(19): siRNA sense strand
gaaguaagacaaguccaaa

SEQ ID NO: 347605 - RNA, 19 nt, Homo sapiens
  misc_RNA (1)...(19): siRNA sense strand
acaaugcuguugccuuauu

SEQ ID NO: 347606 - RNA, 19 nt, Homo sapiens
  misc_RNA (1)...(19): siRNA sense strand
guuccgagguugaaauaga

SEQ ID NO: 347607 - RNA, 19 nt, Homo sapiens
  misc_RNA (1)...(19): siRNA sense strand
gcucugugcuggucacuca

SEQ ID NO: 347608 - RNA, 19 nt, Homo sapiens
  misc_RNA (1)...(19): siRNA sense strand
ggaaguugcagccaaaugu

SEQ ID NO: 347609 - RNA, 19 nt, Homo sapiens
  misc_RNA (1)...(19): siRNA sense strand
gaacgauggcagaaucuug

SEQ ID NO: 347610 - RNA, 19 nt, Homo sapiens
  misc_RNA (1)...(19): siRNA sense strand
caagaauuccugccagaaa

SEQ ID NO: 347611 - RNA, 19 nt, Homo sapiens
  misc_RNA (1)...(19): siRNA sense strand
gaagugggaauuuguguca

SEQ ID NO: 347612 - RNA, 19 nt, Homo sapiens
  misc_RNA (1)...(19): siRNA sense strand
ucaaggaagugggaauuug

SEQ ID NO: 347613 - RNA, 19 nt, Homo sapiens
  misc_RNA (1)...(19): siRNA sense strand
gacagauuccuuuaaauga

SEQ ID NO: 347614 - RNA, 19 nt, Homo sapiens
  misc_RNA (1)...(19): siRNA sense strand
gaaggaacugcuggaauuu

SEQ ID NO: 347615 - RNA, 19 nt, Homo sapiens
  misc_RNA (1)...(19): siRNA sense strand
gagaugaaccuggauccua

SEQ ID NO: 347616 - RNA, 19 nt, Homo sapiens
  misc_RNA (1)...(19): siRNA sense strand
ggaggaggcuguggugcuu

SEQ ID NO: 347617 - RNA, 19 nt, Homo sapiens
  misc_RNA (1)...(19): siRNA sense strand
uaaaggaacuuggaaagac

SEQ ID NO: 347618 - RNA, 19 nt, Homo sapiens
  misc_RNA (1)...(19): siRNA sense strand
gaacccaucaucagcaaga

SEQ ID NO: 347619 - RNA, 19 nt, Homo sapiens
  misc_RNA (1)...(19): siRNA sense strand
gguggucagccgugaauua

SEQ ID NO: 347620 - RNA, 19 nt, Homo sapiens
  misc_RNA (1)...(19): siRNA sense strand
gaacugcuggaauuuaaau

SEQ ID NO: 347621 - RNA, 19 nt, Homo sapiens
  misc_RNA (1)...(19): siRNA sense strand
ugaaugaacucucccuuuu

SEQ ID NO: 347622 - RNA, 19 nt, Homo sapiens
  misc_RNA (1)...(19): siRNA sense strand
caguauaaauccagccauu

SEQ ID NO: 347623 - RNA, 19 nt, Homo sapiens
  misc_RNA (1)...(19): siRNA sense strand
gaaaugggacuucugaaaa

SEQ ID NO: 347624 - RNA, 19 nt, Homo sapiens
  misc_RNA (1)...(19): siRNA sense strand
gaucuucauuccaaacauc

SEQ ID NO: 347625 - RNA, 19 nt, Homo sapiens
  misc_RNA (1)...(19): siRNA sense strand
gaucauaagaacaucagaa

SEQ ID NO: 347626 - RNA, 19 nt, Homo sapiens
  misc_RNA (1)...(19): siRNA sense strand
ggaaggaaguaagacaagu

SEQ ID NO: 347627 - RNA, 19 nt, Homo sapiens
  misc_RNA (1)...(19): siRNA sense strand
cgaauacuuuguuuaugga

SEQ ID NO: 347628 - RNA, 19 nt, Homo sapiens
  misc_RNA (1)...(19): siRNA sense strand
gaaaguauacaacacaacu

SEQ ID NO: 347629 - RNA, 19 nt, Homo sapiens
  misc_RNA (1)...(19): siRNA sense strand
gcuaagcgagugaagauug

SEQ ID NO: 347630 - RNA, 19 nt, Homo sapiens
  misc_RNA (1)...(19): siRNA sense strand
uuacugaagcugagaaauu

SEQ ID NO: 347631 - RNA, 19 nt, Homo sapiens
  misc_RNA (1)...(19): siRNA sense strand
gcagacaaguaugaaagug

SEQ ID NO: 347632 - RNA, 19 nt, Homo sapiens
  misc_RNA (1)...(19): siRNA sense strand
aggaacugcuggaauuuaa

SEQ ID NO: 347633 - RNA, 19 nt, Homo sapiens
  misc_RNA (1)...(19): siRNA sense strand
ggaaguaagacaaguccaa

SEQ ID NO: 347634 - RNA, 19 nt, Homo sapiens
  misc_RNA (1)...(19): siRNA sense strand
ugaagaaccugaguguugu

SEQ ID NO: 347635 - RNA, 19 nt, Homo sapiens
  misc_RNA (1)...(19): siRNA sense strand
ggaacgaggagaagacaug

SEQ ID NO: 347636 - RNA, 19 nt, Homo sapiens
  misc_RNA (1)...(19): siRNA sense strand
caaugcuguugccuuauuu

SEQ ID NO: 347637 - RNA, 19 nt, Homo sapiens
  misc_RNA (1)...(19): siRNA sense strand
gcacuggaacgaacagaug

SEQ ID NO: 347638 - RNA, 19 nt, Homo sapiens
  misc_RNA (1)...(19): siRNA sense strand
ggaagcacccacaccagaa

SEQ ID NO: 347639 - RNA, 19 nt, Homo sapiens
  misc_RNA (1)...(19): siRNA sense strand
caaggcaugggacuuuaua

SEQ ID NO: 347640 - RNA, 19 nt, Homo sapiens
  misc_RNA (1)...(19): siRNA sense strand
gaagguggcugcaacuaug

SEQ ID NO: 347641 - RNA, 19 nt, Homo sapiens
  misc_RNA (1)...(19): siRNA sense strand
ggacagaccuccguauuca

SEQ ID NO: 347642 - RNA, 19 nt, Homo sapiens
  misc_RNA (1)...(19): siRNA sense strand
gggaaaaucuguaaugaua

SEQ ID NO: 347643 - RNA, 19 nt, Homo sapiens
  misc_RNA (1)...(19): siRNA sense strand
ggagucaacuguagcagaa

SEQ ID NO: 347644 - RNA, 19 nt, Homo sapiens
  misc_RNA (1)...(19): siRNA sense strand
ggagucaacuguagcagaa

SEQ ID NO: 347645 - RNA, 19 nt, Homo sapiens
  misc_RNA (1)...(19): siRNA sense strand
ccaaugacuucacgucuuu

SEQ ID NO: 347646 - RNA, 19 nt, Homo sapiens
  misc_RNA (1)...(19): siRNA sense strand
agacuacgcuucacugauu

SEQ ID NO: 347647 - RNA, 19 nt, Homo sapiens
  misc_RNA (1)...(19): siRNA sense strand
gcucaggacacgagucuua

SEQ ID NO: 347648 - RNA, 19 nt, Homo sapiens
  misc_RNA (1)...(19): siRNA sense strand
gaauucugguuaucgcaua

SEQ ID NO: 347649 - RNA, 19 nt, Homo sapiens
  misc_RNA (1)...(19): siRNA sense strand
gcucaggacacgagucuua

SEQ ID NO: 347650 - RNA, 19 nt, Homo sapiens
  misc_RNA (1)...(19): siRNA sense strand
gcaccaaccugcucugucu

SEQ ID NO: 347651 - RNA, 19 nt, Homo sapiens
  misc_RNA (1)...(19): siRNA sense strand
cgaagacgcuggugucauc

SEQ ID NO: 347652 - RNA, 19 nt, Homo sapiens
  misc_RNA (1)...(19): siRNA sense strand
gauaccaggcaaauauuua

SEQ ID NO: 347653 - RNA, 19 nt, Homo sapiens
  misc_RNA (1)...(19): siRNA sense strand
ccagaaaguuggccuguca

SEQ ID NO: 347654 - RNA, 19 nt, Homo sapiens
  misc_RNA (1)...(19): siRNA sense strand
aaauugugguggcuucuua

SEQ ID NO: 347655 - RNA, 19 nt, Homo sapiens
  misc_RNA (1)...(19): siRNA sense strand
ucacgucuuugacuuauga

SEQ ID NO: 347656 - RNA, 19 nt, Homo sapiens
  misc_RNA (1)...(19): siRNA sense strand
ucagagauguccagcuuga

SEQ ID NO: 347657 - RNA, 19 nt, Homo sapiens
  misc_RNA (1)...(19): siRNA sense strand
ggacaccaaugaugccaau

SEQ ID NO: 347658 - RNA, 19 nt, Homo sapiens
  misc_RNA (1)...(19): siRNA sense strand
ggacaccaaugaugccaau

SEQ ID NO: 347659 - RNA, 19 nt, Homo sapiens
  misc_RNA (1)...(19): siRNA sense strand
ugaagacgcuggugucauc

SEQ ID NO: 347660 - RNA, 19 nt, Homo sapiens
  misc_RNA (1)...(19): siRNA sense strand
ggacaccaaugaugccaau

SEQ ID NO: 347661 - RNA, 19 nt, Homo sapiens
  misc_RNA (1)...(19): siRNA sense strand
ugaagacgcuggugucauc

SEQ ID NO: 347662 - RNA, 19 nt, Homo sapiens
  misc_RNA (1)...(19): siRNA sense strand
ggacaccaaugaugccaau

SEQ ID NO: 347663 - RNA, 19 nt, Homo sapiens
  misc_RNA (1)...(19): siRNA sense strand
ugaagacgcuggugucauc

SEQ ID NO: 347664 - RNA, 19 nt, Homo sapiens
  misc_RNA (1)...(19): siRNA sense strand
ggacaccaaugaugccaau

SEQ ID NO: 347665 - RNA, 19 nt, Homo sapiens
  misc_RNA (1)...(19): siRNA sense strand
ugaagacgcuggugucauc

SEQ ID NO: 347666 - RNA, 19 nt, Homo sapiens
  misc_RNA (1)...(19): siRNA sense strand
ugaagacgcuggugucauc

SEQ ID NO: 347667 - RNA, 19 nt, Homo sapiens
  misc_RNA (1)...(19): siRNA sense strand
gaagugaauucugguuauc

SEQ ID NO: 347668 - RNA, 19 nt, Homo sapiens
  misc_RNA (1)...(19): siRNA sense strand
uaaguguguuugggaaaua

SEQ ID NO: 347669 - RNA, 19 nt, Homo sapiens
  misc_RNA (1)...(19): siRNA sense strand
gcagaaugcuucagaacac

SEQ ID NO: 347670 - RNA, 19 nt, Homo sapiens
  misc_RNA (1)...(19): siRNA sense strand
caugucagcuccaggaaau

SEQ ID NO: 347671 - RNA, 19 nt, Homo sapiens
  misc_RNA (1)...(19): siRNA sense strand
gaaauccuccauucugaug

SEQ ID NO: 347672 - RNA, 19 nt, Homo sapiens
  misc_RNA (1)...(19): siRNA sense strand
caaaacaacuaccguguga

SEQ ID NO: 347673 - RNA, 19 nt, Homo sapiens
  misc_RNA (1)...(19): siRNA sense strand
ggugucaucugcucaggaa

SEQ ID NO: 347674 - RNA, 19 nt, Homo sapiens
  misc_RNA (1)...(19): siRNA sense strand
ggacaccagugacgccaau

SEQ ID NO: 347675 - RNA, 19 nt, Homo sapiens
  misc_RNA (1)...(19): siRNA sense strand
ugagguuggucaauuuaaa

SEQ ID NO: 347676 - RNA, 19 nt, Homo sapiens
  misc_RNA (1)...(19): siRNA sense strand
ugaagaugcugguguuauc

SEQ ID NO: 347677 - RNA, 19 nt, Homo sapiens
  misc_RNA (1)...(19): siRNA sense strand
gaauggauacuacgagugu

SEQ ID NO: 347678 - RNA, 19 nt, Homo sapiens
  misc_RNA (1)...(19): siRNA sense strand
caacuguaaucaucgugaa

SEQ ID NO: 347679 - RNA, 19 nt, Homo sapiens
  misc_RNA (1)...(19): siRNA sense strand
cgccgaaccuggugauauu

SEQ ID NO: 347680 - RNA, 19 nt, Homo sapiens
  misc_RNA (1)...(19): siRNA sense strand
ccacagucauccuugaaau

SEQ ID NO: 347681 - RNA, 19 nt, Homo sapiens
  misc_RNA (1)...(19): siRNA sense strand
ccauccacguugcuaauaa

SEQ ID NO: 347682 - RNA, 19 nt, Homo sapiens
  misc_RNA (1)...(19): siRNA sense strand
caacuuaccggcauugaca

SEQ ID NO: 347683 - RNA, 19 nt, Homo sapiens
  misc_RNA (1)...(19): siRNA sense strand
gccagaggcuccuucacuu

SEQ ID NO: 347684 - RNA, 19 nt, Homo sapiens
  misc_RNA (1)...(19): siRNA sense strand
ugacugugaucuucagaga

SEQ ID NO: 347685 - RNA, 19 nt, Homo sapiens
  misc_RNA (1)...(19): siRNA sense strand
gaccacagcaucacaagga

SEQ ID NO: 347686 - RNA, 19 nt, Homo sapiens
  misc_RNA (1)...(19): siRNA sense strand
caucgacuauuccaacuuc

SEQ ID NO: 347687 - RNA, 19 nt, Homo sapiens
  misc_RNA (1)...(19): siRNA sense strand
ggaccugaauccaguuugg

SEQ ID NO: 347688 - RNA, 19 nt, Homo sapiens
  misc_RNA (1)...(19): siRNA sense strand
gaagugacaucaguuucca

SEQ ID NO: 347689 - RNA, 19 nt, Homo sapiens
  misc_RNA (1)...(19): siRNA sense strand
guugaaaucuuugauggau

SEQ ID NO: 347690 - RNA, 19 nt, Homo sapiens
  misc_RNA (1)...(19): siRNA sense strand
cauccuacccugcauacua

SEQ ID NO: 347691 - RNA, 19 nt, Homo sapiens
  misc_RNA (1)...(19): siRNA sense strand
uaaauucuacuacgacaga

SEQ ID NO: 347692 - RNA, 19 nt, Homo sapiens
  misc_RNA (1)...(19): siRNA sense strand
gcucagccacccaaauaaa

SEQ ID NO: 347693 - RNA, 19 nt, Homo sapiens
  misc_RNA (1)...(19): siRNA sense strand
gaugacuccuggaccauuc

SEQ ID NO: 347694 - RNA, 19 nt, Homo sapiens
  misc_RNA (1)...(19): siRNA sense strand
cuucagagauguccagcuu

SEQ ID NO: 347695 - RNA, 19 nt, Homo sapiens
  misc_RNA (1)...(19): siRNA sense strand
ggugucaucugcucagcuu

SEQ ID NO: 347696 - RNA, 19 nt, Homo sapiens
  misc_RNA (1)...(19): siRNA sense strand
gaaguccaguauggcaauu

SEQ ID NO: 347697 - RNA, 19 nt, Homo sapiens
  misc_RNA (1)...(19): siRNA sense strand
ucucauugcucgaguuugu

SEQ ID NO: 347698 - RNA, 19 nt, Homo sapiens
  misc_RNA (1)...(19): siRNA sense strand
ggaacuauccaaacaaugc

SEQ ID NO: 347699 - RNA, 19 nt, Homo sapiens
  misc_RNA (1)...(19): siRNA sense strand
ggugucaucugcucagcuu

SEQ ID NO: 347700 - RNA, 19 nt, Homo sapiens
  misc_RNA (1)...(19): siRNA sense strand
ggugucaucugcucagcuu

SEQ ID NO: 347701 - RNA, 19 nt, Homo sapiens
  misc_RNA (1)...(19): siRNA sense strand
gccaaccucucgugcauca

SEQ ID NO: 347702 - RNA, 19 nt, Homo sapiens
  misc_RNA (1)...(19): siRNA sense strand
guucagggccuuccacuuc

SEQ ID NO: 347703 - RNA, 19 nt, Homo sapiens
  misc_RNA (1)...(19): siRNA sense strand
cugaaauccuccauucuga

SEQ ID NO: 347704 - RNA, 19 nt, Homo sapiens
  misc_RNA (1)...(19): siRNA sense strand
gaaccaggacuuguacguu

SEQ ID NO: 347705 - RNA, 19 nt, Homo sapiens
  misc_RNA (1)...(19): siRNA sense strand
caaacaaugccaagugugu

SEQ ID NO: 347706 - RNA, 19 nt, Homo sapiens
  misc_RNA (1)...(19): siRNA sense strand
gaauccaguuuggcucuga

SEQ ID NO: 347707 - RNA, 19 nt, Homo sapiens
  misc_RNA (1)...(19): siRNA sense strand
gaguggagguccuauacca

SEQ ID NO: 347708 - RNA, 19 nt, Homo sapiens
  misc_RNA (1)...(19): siRNA sense strand
caacaucacccguccaaac

SEQ ID NO: 347709 - RNA, 19 nt, Homo sapiens
  misc_RNA (1)...(19): siRNA sense strand
aaugauaccaggcaaauau

SEQ ID NO: 347710 - RNA, 19 nt, Homo sapiens
  misc_RNA (1)...(19): siRNA sense strand
gaaauuggaggcacaccau

SEQ ID NO: 347711 - RNA, 19 nt, Homo sapiens
  misc_RNA (1)...(19): siRNA sense strand
gaguggagguccuguaucg

SEQ ID NO: 347712 - RNA, 19 nt, Homo sapiens
  misc_RNA (1)...(19): siRNA sense strand
gaguggagguccuauacca

SEQ ID NO: 347713 - RNA, 19 nt, Homo sapiens
  misc_RNA (1)...(19): siRNA sense strand
ccauugcccuggaugaugu

SEQ ID NO: 347714 - RNA, 19 nt, Homo sapiens
  misc_RNA (1)...(19): siRNA sense strand
ucaagcaggcagacaauga

SEQ ID NO: 347715 - RNA, 19 nt, Homo sapiens
  misc_RNA (1)...(19): siRNA sense strand
gaccucacaugcaucaaca

SEQ ID NO: 347716 - RNA, 19 nt, Homo sapiens
  misc_RNA (1)...(19): siRNA sense strand
caacuguggccaucaugaa

SEQ ID NO: 347717 - RNA, 19 nt, Homo sapiens
  misc_RNA (1)...(19): siRNA sense strand
aaccugggcuucaguaauc

SEQ ID NO: 347718 - RNA, 19 nt, Homo sapiens
  misc_RNA (1)...(19): siRNA sense strand
caacuguggccaucaugaa

SEQ ID NO: 347719 - RNA, 19 nt, Homo sapiens
  misc_RNA (1)...(19): siRNA sense strand
caacuguggccaucaugaa

SEQ ID NO: 347720 - RNA, 19 nt, Homo sapiens
  misc_RNA (1)...(19): siRNA sense strand
gggacaaguucuaucuaca

SEQ ID NO: 347721 - RNA, 19 nt, Homo sapiens
  misc_RNA (1)...(19): siRNA sense strand
gcugaaauccuccauucug

SEQ ID NO: 347722 - RNA, 19 nt, Homo sapiens
  misc_RNA (1)...(19): siRNA sense strand
acaaugacaccaucgacua

SEQ ID NO: 347723 - RNA, 19 nt, Homo sapiens
  misc_RNA (1)...(19): siRNA sense strand
gcauaaaccugggcuucag

SEQ ID NO: 347724 - RNA, 19 nt, Homo sapiens
  misc_RNA (1)...(19): siRNA sense strand
caacuguggccaucacgaa

SEQ ID NO: 347725 - RNA, 19 nt, Homo sapiens
  misc_RNA (1)...(19): siRNA sense strand
gauggaucauugaauagca

SEQ ID NO: 347726 - RNA, 19 nt, Homo sapiens
  misc_RNA (1)...(19): siRNA sense strand
ggcaaauauuuacaucuuc

SEQ ID NO: 347727 - RNA, 19 nt, Homo sapiens
  misc_RNA (1)...(19): siRNA sense strand
guaaugauaccaggcaaau

SEQ ID NO: 347728 - RNA, 19 nt, Homo sapiens
  misc_RNA (1)...(19): siRNA sense strand
cugcucagccacccaaaua

SEQ ID NO: 347729 - RNA, 19 nt, Homo sapiens
  misc_RNA (1)...(19): siRNA sense strand
ccguguaccugcguuguaa

SEQ ID NO: 347730 - RNA, 19 nt, Homo sapiens
  misc_RNA (1)...(19): siRNA sense strand
gacaccauguacauugcua

SEQ ID NO: 347731 - RNA, 19 nt, Homo sapiens
  misc_RNA (1)...(19): siRNA sense strand
uaucgacaccugcuccuuu

SEQ ID NO: 347732 - RNA, 19 nt, Homo sapiens
  misc_RNA (1)...(19): siRNA sense strand
ccaacaaugcuaagugugu

SEQ ID NO: 347733 - RNA, 19 nt, Homo sapiens
  misc_RNA (1)...(19): siRNA sense strand
gucuuugacuuaugaucua

SEQ ID NO: 347734 - RNA, 19 nt, Homo sapiens
  misc_RNA (1)...(19): siRNA sense strand
cgggaacuauccaaacaau

SEQ ID NO: 347735 - RNA, 19 nt, Homo sapiens
  misc_RNA (1)...(19): siRNA sense strand
ccaggcaaauauuuacauc

SEQ ID NO: 347736 - RNA, 19 nt, Homo sapiens
  misc_RNA (1)...(19): siRNA sense strand
ggacaaguucuaucuacag

SEQ ID NO: 347737 - RNA, 19 nt, Homo sapiens
  misc_RNA (1)...(19): siRNA sense strand
ucccacaacuguaaucauc

SEQ ID NO: 347738 - RNA, 19 nt, Homo sapiens
  misc_RNA (1)...(19): siRNA sense strand
cuaccgaggcuguguguug

SEQ ID NO: 347739 - RNA, 19 nt, Homo sapiens
  misc_RNA (1)...(19): siRNA sense strand
gcugcagaaugcuucagaa

SEQ ID NO: 347740 - RNA, 19 nt, Homo sapiens
  misc_RNA (1)...(19): siRNA sense strand
gaagguggcugcaacuaug

SEQ ID NO: 347741 - RNA, 19 nt, Homo sapiens
  misc_RNA (1)...(19): siRNA sense strand
ggacagaccuccguauuca

SEQ ID NO: 347742 - RNA, 19 nt, Homo sapiens
  misc_RNA (1)...(19): siRNA sense strand
gggaaaaucuguaaugaua

SEQ ID NO: 347743 - RNA, 19 nt, Homo sapiens
  misc_RNA (1)...(19): siRNA sense strand
ggagucaacuguagcagaa

SEQ ID NO: 347744 - RNA, 19 nt, Homo sapiens
  misc_RNA (1)...(19): siRNA sense strand
ggagucaacuguagcagaa

SEQ ID NO: 347745 - RNA, 19 nt, Homo sapiens
  misc_RNA (1)...(19): siRNA sense strand
ccaaugacuucacgucuuu

SEQ ID NO: 347746 - RNA, 19 nt, Homo sapiens
  misc_RNA (1)...(19): siRNA sense strand
agacuacgcuucacugauu

SEQ ID NO: 347747 - RNA, 19 nt, Homo sapiens
  misc_RNA (1)...(19): siRNA sense strand
gcucaggacacgagucuua

SEQ ID NO: 347748 - RNA, 19 nt, Homo sapiens
  misc_RNA (1)...(19): siRNA sense strand
gaauucugguuaucgcaua

SEQ ID NO: 347749 - RNA, 19 nt, Homo sapiens
  misc_RNA (1)...(19): siRNA sense strand
gcucaggacacgagucuua

SEQ ID NO: 347750 - RNA, 19 nt, Homo sapiens
  misc_RNA (1)...(19): siRNA sense strand
gcaccaaccugcucugucu

SEQ ID NO: 347751 - RNA, 19 nt, Homo sapiens
  misc_RNA (1)...(19): siRNA sense strand
cgaagacgcuggugucauc

SEQ ID NO: 347752 - RNA, 19 nt, Homo sapiens
  misc_RNA (1)...(19): siRNA sense strand
gauaccaggcaaauauuua

SEQ ID NO: 347753 - RNA, 19 nt, Homo sapiens
  misc_RNA (1)...(19): siRNA sense strand
ccagaaaguuggccuguca

SEQ ID NO: 347754 - RNA, 19 nt, Homo sapiens
  misc_RNA (1)...(19): siRNA sense strand
aaauugugguggcuucuua

SEQ ID NO: 347755 - RNA, 19 nt, Homo sapiens
  misc_RNA (1)...(19): siRNA sense strand
ucacgucuuugacuuauga

SEQ ID NO: 347756 - RNA, 19 nt, Homo sapiens
  misc_RNA (1)...(19): siRNA sense strand
ucagagauguccagcuuga

SEQ ID NO: 347757 - RNA, 19 nt, Homo sapiens
  misc_RNA (1)...(19): siRNA sense strand
ggacaccaaugaugccaau

SEQ ID NO: 347758 - RNA, 19 nt, Homo sapiens
  misc_RNA (1)...(19): siRNA sense strand
ggacaccaaugaugccaau

SEQ ID NO: 347759 - RNA, 19 nt, Homo sapiens
  misc_RNA (1)...(19): siRNA sense strand
ugaagacgcuggugucauc

SEQ ID NO: 347760 - RNA, 19 nt, Homo sapiens
  misc_RNA (1)...(19): siRNA sense strand
ggacaccaaugaugccaau

SEQ ID NO: 347761 - RNA, 19 nt, Homo sapiens
  misc_RNA (1)...(19): siRNA sense strand
ugaagacgcuggugucauc

SEQ ID NO: 347762 - RNA, 19 nt, Homo sapiens
  misc_RNA (1)...(19): siRNA sense strand
ggacaccaaugaugccaau

SEQ ID NO: 347763 - RNA, 19 nt, Homo sapiens
  misc_RNA (1)...(19): siRNA sense strand
ugaagacgcuggugucauc

SEQ ID NO: 347764 - RNA, 19 nt, Homo sapiens
  misc_RNA (1)...(19): siRNA sense strand
ggacaccaaugaugccaau

SEQ ID NO: 347765 - RNA, 19 nt, Homo sapiens
  misc_RNA (1)...(19): siRNA sense strand
ugaagacgcuggugucauc

SEQ ID NO: 347766 - RNA, 19 nt, Homo sapiens
  misc_RNA (1)...(19): siRNA sense strand
ggacaccaaugaugccaau

SEQ ID NO: 347767 - RNA, 19 nt, Homo sapiens
  misc_RNA (1)...(19): siRNA sense strand
ugaagacgcuggugucauc

SEQ ID NO: 347768 - RNA, 19 nt, Homo sapiens
  misc_RNA (1)...(19): siRNA sense strand
ggacaccaaugaugccaau

SEQ ID NO: 347769 - RNA, 19 nt, Homo sapiens
  misc_RNA (1)...(19): siRNA sense strand
ugaagacgcuggugucauc

SEQ ID NO: 347770 - RNA, 19 nt, Homo sapiens
  misc_RNA (1)...(19): siRNA sense strand
ugaagacgcuggugucauc

SEQ ID NO: 347771 - RNA, 19 nt, Homo sapiens
  misc_RNA (1)...(19): siRNA sense strand
ugaagacgcuggugucauc

SEQ ID NO: 347772 - RNA, 19 nt, Homo sapiens
  misc_RNA (1)...(19): siRNA sense strand
gaagugaauucugguuauc

SEQ ID NO: 347773 - RNA, 19 nt, Homo sapiens
  misc_RNA (1)...(19): siRNA sense strand
uaaguguguuugggaaaua

SEQ ID NO: 347774 - RNA, 19 nt, Homo sapiens
  misc_RNA (1)...(19): siRNA sense strand
gcagaaugcuucagaacac

SEQ ID NO: 347775 - RNA, 19 nt, Homo sapiens
  misc_RNA (1)...(19): siRNA sense strand
caugucagcuccaggaaau

SEQ ID NO: 347776 - RNA, 19 nt, Homo sapiens
  misc_RNA (1)...(19): siRNA sense strand
gaaauccuccauucugaug

SEQ ID NO: 347777 - RNA, 19 nt, Homo sapiens
  misc_RNA (1)...(19): siRNA sense strand
caaaacaacuaccguguga

SEQ ID NO: 347778 - RNA, 19 nt, Homo sapiens
  misc_RNA (1)...(19): siRNA sense strand
ggugucaucugcucaggaa

SEQ ID NO: 347779 - RNA, 19 nt, Homo sapiens
  misc_RNA (1)...(19): siRNA sense strand
ggacaccagugacgccaau

SEQ ID NO: 347780 - RNA, 19 nt, Homo sapiens
  misc_RNA (1)...(19): siRNA sense strand
ugagguuggucaauuuaaa

SEQ ID NO: 347781 - RNA, 19 nt, Homo sapiens
  misc_RNA (1)...(19): siRNA sense strand
ggacaccagugacgccaau

SEQ ID NO: 347782 - RNA, 19 nt, Homo sapiens
  misc_RNA (1)...(19): siRNA sense strand
ugaagaugcugguguuauc

SEQ ID NO: 347783 - RNA, 19 nt, Homo sapiens
  misc_RNA (1)...(19): siRNA sense strand
gaauggauacuacgagugu

SEQ ID NO: 347784 - RNA, 19 nt, Homo sapiens
  misc_RNA (1)...(19): siRNA sense strand
caacuguaaucaucgugaa

SEQ ID NO: 347785 - RNA, 19 nt, Homo sapiens
  misc_RNA (1)...(19): siRNA sense strand
cgccgaaccuggugauauu

SEQ ID NO: 347786 - RNA, 19 nt, Homo sapiens
  misc_RNA (1)...(19): siRNA sense strand
ccacagucauccuugaaau

SEQ ID NO: 347787 - RNA, 19 nt, Homo sapiens
  misc_RNA (1)...(19): siRNA sense strand
ccauccacguugcuaauaa

SEQ ID NO: 347788 - RNA, 19 nt, Homo sapiens
  misc_RNA (1)...(19): siRNA sense strand
caacuuaccggcauugaca

SEQ ID NO: 347789 - RNA, 19 nt, Homo sapiens
  misc_RNA (1)...(19): siRNA sense strand
gccagaggcuccuucacuu

SEQ ID NO: 347790 - RNA, 19 nt, Homo sapiens
  misc_RNA (1)...(19): siRNA sense strand
ugacugugaucuucagaga

SEQ ID NO: 347791 - RNA, 19 nt, Homo sapiens
  misc_RNA (1)...(19): siRNA sense strand
gaccacagcaucacaagga

SEQ ID NO: 347792 - RNA, 19 nt, Homo sapiens
  misc_RNA (1)...(19): siRNA sense strand
caucgacuauuccaacuuc

SEQ ID NO: 347793 - RNA, 19 nt, Homo sapiens
  misc_RNA (1)...(19): siRNA sense strand
ggaccugaauccaguuugg

SEQ ID NO: 347794 - RNA, 19 nt, Homo sapiens
  misc_RNA (1)...(19): siRNA sense strand
gaagugacaucaguuucca

SEQ ID NO: 347795 - RNA, 19 nt, Homo sapiens
  misc_RNA (1)...(19): siRNA sense strand
guugaaaucuuugauggau

SEQ ID NO: 347796 - RNA, 19 nt, Homo sapiens
  misc_RNA (1)...(19): siRNA sense strand
cauccuacccugcauacua

SEQ ID NO: 347797 - RNA, 19 nt, Homo sapiens
  misc_RNA (1)...(19): siRNA sense strand
uaaauucuacuacgacaga

SEQ ID NO: 347798 - RNA, 19 nt, Homo sapiens
  misc_RNA (1)...(19): siRNA sense strand
gcucagccacccaaauaaa

SEQ ID NO: 347799 - RNA, 19 nt, Homo sapiens
  misc_RNA (1)...(19): siRNA sense strand
ggaccugaauccaguuugg

SEQ ID NO: 347800 - RNA, 19 nt, Homo sapiens
  misc_RNA (1)...(19): siRNA sense strand
gaugacuccuggaccauuc

SEQ ID NO: 347801 - RNA, 19 nt, Homo sapiens
  misc_RNA (1)...(19): siRNA sense strand
cuucagagauguccagcuu

SEQ ID NO: 347802 - RNA, 19 nt, Homo sapiens
  misc_RNA (1)...(19): siRNA sense strand
ggugucaucugcucagcuu

SEQ ID NO: 347803 - RNA, 19 nt, Homo sapiens
  misc_RNA (1)...(19): siRNA sense strand
gaaguccaguauggcaauu

SEQ ID NO: 347804 - RNA, 19 nt, Homo sapiens
  misc_RNA (1)...(19): siRNA sense strand
ucucauugcucgaguuugu

SEQ ID NO: 347805 - RNA, 19 nt, Homo sapiens
  misc_RNA (1)...(19): siRNA sense strand
ggaacuauccaaacaaugc

SEQ ID NO: 347806 - RNA, 19 nt, Homo sapiens
  misc_RNA (1)...(19): siRNA sense strand
ggugucaucugcucagcuu

SEQ ID NO: 347807 - RNA, 19 nt, Homo sapiens
  misc_RNA (1)...(19): siRNA sense strand
ggugucaucugcucagcuu

SEQ ID NO: 347808 - RNA, 19 nt, Homo sapiens
  misc_RNA (1)...(19): siRNA sense strand
ggugucaucugcucagcuu

SEQ ID NO: 347809 - RNA, 19 nt, Homo sapiens
  misc_RNA (1)...(19): siRNA sense strand
gccaaccucucgugcauca

SEQ ID NO: 347810 - RNA, 19 nt, Homo sapiens
  misc_RNA (1)...(19): siRNA sense strand
guucagggccuuccacuuc

SEQ ID NO: 347811 - RNA, 19 nt, Homo sapiens
  misc_RNA (1)...(19): siRNA sense strand
cugaaauccuccauucuga

SEQ ID NO: 347812 - RNA, 19 nt, Homo sapiens
  misc_RNA (1)...(19): siRNA sense strand
gaaccaggacuuguacguu

SEQ ID NO: 347813 - RNA, 19 nt, Homo sapiens
  misc_RNA (1)...(19): siRNA sense strand
caaacaaugccaagugugu

SEQ ID NO: 347814 - RNA, 19 nt, Homo sapiens
  misc_RNA (1)...(19): siRNA sense strand
gaauccaguuuggcucuga

SEQ ID NO: 347815 - RNA, 19 nt, Homo sapiens
  misc_RNA (1)...(19): siRNA sense strand
gaguggagguccuauacca

SEQ ID NO: 347816 - RNA, 19 nt, Homo sapiens
  misc_RNA (1)...(19): siRNA sense strand
caacaucacccguccaaac

SEQ ID NO: 347817 - RNA, 19 nt, Homo sapiens
  misc_RNA (1)...(19): siRNA sense strand
aaugauaccaggcaaauau

SEQ ID NO: 347818 - RNA, 19 nt, Homo sapiens
  misc_RNA (1)...(19): siRNA sense strand
gaaauuggaggcacaccau

SEQ ID NO: 347819 - RNA, 19 nt, Homo sapiens
  misc_RNA (1)...(19): siRNA sense strand
gaguggagguccuguaucg

SEQ ID NO: 347820 - RNA, 19 nt, Homo sapiens
  misc_RNA (1)...(19): siRNA sense strand
gaguggagguccuauacca

SEQ ID NO: 347821 - RNA, 19 nt, Homo sapiens
  misc_RNA (1)...(19): siRNA sense strand
ccauugcccuggaugaugu

SEQ ID NO: 347822 - RNA, 19 nt, Homo sapiens
  misc_RNA (1)...(19): siRNA sense strand
ucaagcaggcagacaauga

SEQ ID NO: 347823 - RNA, 19 nt, Homo sapiens
  misc_RNA (1)...(19): siRNA sense strand
gaccucacaugcaucaaca

SEQ ID NO: 347824 - RNA, 19 nt, Homo sapiens
  misc_RNA (1)...(19): siRNA sense strand
gaccucacaugcaucaaca

SEQ ID NO: 347825 - RNA, 19 nt, Homo sapiens
  misc_RNA (1)...(19): siRNA sense strand
caacuguggccaucaugaa

SEQ ID NO: 347826 - RNA, 19 nt, Homo sapiens
  misc_RNA (1)...(19): siRNA sense strand
aaccugggcuucaguaauc

SEQ ID NO: 347827 - RNA, 19 nt, Homo sapiens
  misc_RNA (1)...(19): siRNA sense strand
caacuguggccaucaugaa

SEQ ID NO: 347828 - RNA, 19 nt, Homo sapiens
  misc_RNA (1)...(19): siRNA sense strand
caacuguggccaucaugaa

SEQ ID NO: 347829 - RNA, 19 nt, Homo sapiens
  misc_RNA (1)...(19): siRNA sense strand
caacuguggccaucaugaa

SEQ ID NO: 347830 - RNA, 19 nt, Homo sapiens
  misc_RNA (1)...(19): siRNA sense strand
caacuguggccaucaugaa

SEQ ID NO: 347831 - RNA, 19 nt, Homo sapiens
  misc_RNA (1)...(19): siRNA sense strand
caacuguggccaucaugaa

SEQ ID NO: 347832 - RNA, 19 nt, Homo sapiens
  misc_RNA (1)...(19): siRNA sense strand
gggacaaguucuaucuaca

SEQ ID NO: 347833 - RNA, 19 nt, Homo sapiens
  misc_RNA (1)...(19): siRNA sense strand
gcugaaauccuccauucug

SEQ ID NO: 347834 - RNA, 19 nt, Homo sapiens
  misc_RNA (1)...(19): siRNA sense strand
acaaugacaccaucgacua

SEQ ID NO: 347835 - RNA, 19 nt, Homo sapiens
  misc_RNA (1)...(19): siRNA sense strand
gcauaaaccugggcuucag

SEQ ID NO: 347836 - RNA, 19 nt, Homo sapiens
  misc_RNA (1)...(19): siRNA sense strand
caacuguggccaucacgaa

SEQ ID NO: 347837 - RNA, 19 nt, Homo sapiens
  misc_RNA (1)...(19): siRNA sense strand
gauggaucauugaauagca

SEQ ID NO: 347838 - RNA, 19 nt, Homo sapiens
  misc_RNA (1)...(19): siRNA sense strand
ggcaaauauuuacaucuuc

SEQ ID NO: 347839 - RNA, 19 nt, Homo sapiens
  misc_RNA (1)...(19): siRNA sense strand
guaaugauaccaggcaaau

SEQ ID NO: 347840 - RNA, 19 nt, Homo sapiens
  misc_RNA (1)...(19): siRNA sense strand
gaagguggcugcaacuaug

SEQ ID NO: 347841 - RNA, 19 nt, Homo sapiens
  misc_RNA (1)...(19): siRNA sense strand
ggacagaccuccguauuca

SEQ ID NO: 347842 - RNA, 19 nt, Homo sapiens
  misc_RNA (1)...(19): siRNA sense strand
gggaaaaucuguaaugaua

SEQ ID NO: 347843 - RNA, 19 nt, Homo sapiens
  misc_RNA (1)...(19): siRNA sense strand
ggagucaacuguagcagaa

SEQ ID NO: 347844 - RNA, 19 nt, Homo sapiens
  misc_RNA (1)...(19): siRNA sense strand
ggagucaacuguagcagaa

SEQ ID NO: 347845 - RNA, 19 nt, Homo sapiens
  misc_RNA (1)...(19): siRNA sense strand
ccaaugacuucacgucuuu

SEQ ID NO: 347846 - RNA, 19 nt, Homo sapiens
  misc_RNA (1)...(19): siRNA sense strand
agacuacgcuucacugauu

SEQ ID NO: 347847 - RNA, 19 nt, Homo sapiens
  misc_RNA (1)...(19): siRNA sense strand
gcucaggacacgagucuua

SEQ ID NO: 347848 - RNA, 19 nt, Homo sapiens
  misc_RNA (1)...(19): siRNA sense strand
gaauucugguuaucgcaua

SEQ ID NO: 347849 - RNA, 19 nt, Homo sapiens
  misc_RNA (1)...(19): siRNA sense strand
gcucaggacacgagucuua

SEQ ID NO: 347850 - RNA, 19 nt, Homo sapiens
  misc_RNA (1)...(19): siRNA sense strand
gcaccaaccugcucugucu

SEQ ID NO: 347851 - RNA, 19 nt, Homo sapiens
  misc_RNA (1)...(19): siRNA sense strand
cgaagacgcuggugucauc

SEQ ID NO: 347852 - RNA, 19 nt, Homo sapiens
  misc_RNA (1)...(19): siRNA sense strand
gauaccaggcaaauauuua

SEQ ID NO: 347853 - RNA, 19 nt, Homo sapiens
  misc_RNA (1)...(19): siRNA sense strand
ccagaaaguuggccuguca

SEQ ID NO: 347854 - RNA, 19 nt, Homo sapiens
  misc_RNA (1)...(19): siRNA sense strand
aaauugugguggcuucuua

SEQ ID NO: 347855 - RNA, 19 nt, Homo sapiens
  misc_RNA (1)...(19): siRNA sense strand
ucacgucuuugacuuauga

SEQ ID NO: 347856 - RNA, 19 nt, Homo sapiens
  misc_RNA (1)...(19): siRNA sense strand
ucagagauguccagcuuga

SEQ ID NO: 347857 - RNA, 19 nt, Homo sapiens
  misc_RNA (1)...(19): siRNA sense strand
ggacaccaaugaugccaau

SEQ ID NO: 347858 - RNA, 19 nt, Homo sapiens
  misc_RNA (1)...(19): siRNA sense strand
ggacaccaaugaugccaau

SEQ ID NO: 347859 - RNA, 19 nt, Homo sapiens
  misc_RNA (1)...(19): siRNA sense strand
ugaagacgcuggugucauc

SEQ ID NO: 347860 - RNA, 19 nt, Homo sapiens
  misc_RNA (1)...(19): siRNA sense strand
ggacaccaaugaugccaau

SEQ ID NO: 347861 - RNA, 19 nt, Homo sapiens
  misc_RNA (1)...(19): siRNA sense strand
ugaagacgcuggugucauc

SEQ ID NO: 347862 - RNA, 19 nt, Homo sapiens
  misc_RNA (1)...(19): siRNA sense strand
ggacaccaaugaugccaau

SEQ ID NO: 347863 - RNA, 19 nt, Homo sapiens
  misc_RNA (1)...(19): siRNA sense strand
ugaagacgcuggugucauc

SEQ ID NO: 347864 - RNA, 19 nt, Homo sapiens
  misc_RNA (1)...(19): siRNA sense strand
ggacaccaaugaugccaau

SEQ ID NO: 347865 - RNA, 19 nt, Homo sapiens
  misc_RNA (1)...(19): siRNA sense strand
ugaagacgcuggugucauc

SEQ ID NO: 347866 - RNA, 19 nt, Homo sapiens
  misc_RNA (1)...(19): siRNA sense strand
ggacaccaaugaugccaau

SEQ ID NO: 347867 - RNA, 19 nt, Homo sapiens
  misc_RNA (1)...(19): siRNA sense strand
ugaagacgcuggugucauc

SEQ ID NO: 347868 - RNA, 19 nt, Homo sapiens
  misc_RNA (1)...(19): siRNA sense strand
ggacaccaaugaugccaau

SEQ ID NO: 347869 - RNA, 19 nt, Homo sapiens
  misc_RNA (1)...(19): siRNA sense strand
ugaagacgcuggugucauc

SEQ ID NO: 347870 - RNA, 19 nt, Homo sapiens
  misc_RNA (1)...(19): siRNA sense strand
ugaagacgcuggugucauc

SEQ ID NO: 347871 - RNA, 19 nt, Homo sapiens
  misc_RNA (1)...(19): siRNA sense strand
ugaagacgcuggugucauc

SEQ ID NO: 347872 - RNA, 19 nt, Homo sapiens
  misc_RNA (1)...(19): siRNA sense strand
gaagugaauucugguuauc

SEQ ID NO: 347873 - RNA, 19 nt, Homo sapiens
  misc_RNA (1)...(19): siRNA sense strand
uaaguguguuugggaaaua

SEQ ID NO: 347874 - RNA, 19 nt, Homo sapiens
  misc_RNA (1)...(19): siRNA sense strand
gcagaaugcuucagaacac

SEQ ID NO: 347875 - RNA, 19 nt, Homo sapiens
  misc_RNA (1)...(19): siRNA sense strand
caugucagcuccaggaaau

SEQ ID NO: 347876 - RNA, 19 nt, Homo sapiens
  misc_RNA (1)...(19): siRNA sense strand
gaaauccuccauucugaug

SEQ ID NO: 347877 - RNA, 19 nt, Homo sapiens
  misc_RNA (1)...(19): siRNA sense strand
caaaacaacuaccguguga

SEQ ID NO: 347878 - RNA, 19 nt, Homo sapiens
  misc_RNA (1)...(19): siRNA sense strand
ggugucaucugcucaggaa

SEQ ID NO: 347879 - RNA, 19 nt, Homo sapiens
  misc_RNA (1)...(19): siRNA sense strand
ggacaccagugacgccaau

SEQ ID NO: 347880 - RNA, 19 nt, Homo sapiens
  misc_RNA (1)...(19): siRNA sense strand
ugagguuggucaauuuaaa

SEQ ID NO: 347881 - RNA, 19 nt, Homo sapiens
  misc_RNA (1)...(19): siRNA sense strand
ggacaccagugacgccaau

SEQ ID NO: 347882 - RNA, 19 nt, Homo sapiens
  misc_RNA (1)...(19): siRNA sense strand
ugaagaugcugguguuauc

SEQ ID NO: 347883 - RNA, 19 nt, Homo sapiens
  misc_RNA (1)...(19): siRNA sense strand
gaauggauacuacgagugu

SEQ ID NO: 347884 - RNA, 19 nt, Homo sapiens
  misc_RNA (1)...(19): siRNA sense strand
caacuguaaucaucgugaa

SEQ ID NO: 347885 - RNA, 19 nt, Homo sapiens
  misc_RNA (1)...(19): siRNA sense strand
cgccgaaccuggugauauu

SEQ ID NO: 347886 - RNA, 19 nt, Homo sapiens
  misc_RNA (1)...(19): siRNA sense strand
ccacagucauccuugaaau

SEQ ID NO: 347887 - RNA, 19 nt, Homo sapiens
  misc_RNA (1)...(19): siRNA sense strand
ccauccacguugcuaauaa

SEQ ID NO: 347888 - RNA, 19 nt, Homo sapiens
  misc_RNA (1)...(19): siRNA sense strand
caacuuaccggcauugaca

SEQ ID NO: 347889 - RNA, 19 nt, Homo sapiens
  misc_RNA (1)...(19): siRNA sense strand
gccagaggcuccuucacuu

SEQ ID NO: 347890 - RNA, 19 nt, Homo sapiens
  misc_RNA (1)...(19): siRNA sense strand
ugacugugaucuucagaga

SEQ ID NO: 347891 - RNA, 19 nt, Homo sapiens
  misc_RNA (1)...(19): siRNA sense strand
gaccacagcaucacaagga

SEQ ID NO: 347892 - RNA, 19 nt, Homo sapiens
  misc_RNA (1)...(19): siRNA sense strand
caucgacuauuccaacuuc

SEQ ID NO: 347893 - RNA, 19 nt, Homo sapiens
  misc_RNA (1)...(19): siRNA sense strand
ggaccugaauccaguuugg

SEQ ID NO: 347894 - RNA, 19 nt, Homo sapiens
  misc_RNA (1)...(19): siRNA sense strand
gaagugacaucaguuucca

SEQ ID NO: 347895 - RNA, 19 nt, Homo sapiens
  misc_RNA (1)...(19): siRNA sense strand
guugaaaucuuugauggau

SEQ ID NO: 347896 - RNA, 19 nt, Homo sapiens
  misc_RNA (1)...(19): siRNA sense strand
cauccuacccugcauacua

SEQ ID NO: 347897 - RNA, 19 nt, Homo sapiens
  misc_RNA (1)...(19): siRNA sense strand
uaaauucuacuacgacaga

SEQ ID NO: 347898 - RNA, 19 nt, Homo sapiens
  misc_RNA (1)...(19): siRNA sense strand
gcucagccacccaaauaaa

SEQ ID NO: 347899 - RNA, 19 nt, Homo sapiens
  misc_RNA (1)...(19): siRNA sense strand
ggaccugaauccaguuugg

SEQ ID NO: 347900 - RNA, 19 nt, Homo sapiens
  misc_RNA (1)...(19): siRNA sense strand
gaugacuccuggaccauuc

SEQ ID NO: 347901 - RNA, 19 nt, Homo sapiens
  misc_RNA (1)...(19): siRNA sense strand
cuucagagauguccagcuu

SEQ ID NO: 347902 - RNA, 19 nt, Homo sapiens
  misc_RNA (1)...(19): siRNA sense strand
ggugucaucugcucagcuu

SEQ ID NO: 347903 - RNA, 19 nt, Homo sapiens
  misc_RNA (1)...(19): siRNA sense strand
gaaguccaguauggcaauu

SEQ ID NO: 347904 - RNA, 19 nt, Homo sapiens
  misc_RNA (1)...(19): siRNA sense strand
ucucauugcucgaguuugu

SEQ ID NO: 347905 - RNA, 19 nt, Homo sapiens
  misc_RNA (1)...(19): siRNA sense strand
ggaacuauccaaacaaugc

SEQ ID NO: 347906 - RNA, 19 nt, Homo sapiens
  misc_RNA (1)...(19): siRNA sense strand
ggugucaucugcucagcuu

SEQ ID NO: 347907 - RNA, 19 nt, Homo sapiens
  misc_RNA (1)...(19): siRNA sense strand
ggugucaucugcucagcuu

SEQ ID NO: 347908 - RNA, 19 nt, Homo sapiens
  misc_RNA (1)...(19): siRNA sense strand
ggugucaucugcucagcuu

SEQ ID NO: 347909 - RNA, 19 nt, Homo sapiens
  misc_RNA (1)...(19): siRNA sense strand
gccaaccucucgugcauca

SEQ ID NO: 347910 - RNA, 19 nt, Homo sapiens
  misc_RNA (1)...(19): siRNA sense strand
guucagggccuuccacuuc

SEQ ID NO: 347911 - RNA, 19 nt, Homo sapiens
  misc_RNA (1)...(19): siRNA sense strand
cugaaauccuccauucuga

SEQ ID NO: 347912 - RNA, 19 nt, Homo sapiens
  misc_RNA (1)...(19): siRNA sense strand
gaaccaggacuuguacguu

SEQ ID NO: 347913 - RNA, 19 nt, Homo sapiens
  misc_RNA (1)...(19): siRNA sense strand
caaacaaugccaagugugu

SEQ ID NO: 347914 - RNA, 19 nt, Homo sapiens
  misc_RNA (1)...(19): siRNA sense strand
gaauccaguuuggcucuga

SEQ ID NO: 347915 - RNA, 19 nt, Homo sapiens
  misc_RNA (1)...(19): siRNA sense strand
gaguggagguccuauacca

SEQ ID NO: 347916 - RNA, 19 nt, Homo sapiens
  misc_RNA (1)...(19): siRNA sense strand
caacaucacccguccaaac

SEQ ID NO: 347917 - RNA, 19 nt, Homo sapiens
  misc_RNA (1)...(19): siRNA sense strand
aaugauaccaggcaaauau

SEQ ID NO: 347918 - RNA, 19 nt, Homo sapiens
  misc_RNA (1)...(19): siRNA sense strand
gaaauuggaggcacaccau

SEQ ID NO: 347919 - RNA, 19 nt, Homo sapiens
  misc_RNA (1)...(19): siRNA sense strand
gaguggagguccuguaucg

SEQ ID NO: 347920 - RNA, 19 nt, Homo sapiens
  misc_RNA (1)...(19): siRNA sense strand
gaguggagguccuauacca

SEQ ID NO: 347921 - RNA, 19 nt, Homo sapiens
  misc_RNA (1)...(19): siRNA sense strand
ccauugcccuggaugaugu

SEQ ID NO: 347922 - RNA, 19 nt, Homo sapiens
  misc_RNA (1)...(19): siRNA sense strand
ucaagcaggcagacaauga

SEQ ID NO: 347923 - RNA, 19 nt, Homo sapiens
  misc_RNA (1)...(19): siRNA sense strand
ccauugcccuggaugaugu

SEQ ID NO: 347924 - RNA, 19 nt, Homo sapiens
  misc_RNA (1)...(19): siRNA sense strand
gaccucacaugcaucaaca

SEQ ID NO: 347925 - RNA, 19 nt, Homo sapiens
  misc_RNA (1)...(19): siRNA sense strand
gaccucacaugcaucaaca

SEQ ID NO: 347926 - RNA, 19 nt, Homo sapiens
  misc_RNA (1)...(19): siRNA sense strand
caacuguggccaucaugaa

SEQ ID NO: 347927 - RNA, 19 nt, Homo sapiens
  misc_RNA (1)...(19): siRNA sense strand
aaccugggcuucaguaauc

SEQ ID NO: 347928 - RNA, 19 nt, Homo sapiens
  misc_RNA (1)...(19): siRNA sense strand
caacuguggccaucaugaa

SEQ ID NO: 347929 - RNA, 19 nt, Homo sapiens
  misc_RNA (1)...(19): siRNA sense strand
caacuguggccaucaugaa

SEQ ID NO: 347930 - RNA, 19 nt, Homo sapiens
  misc_RNA (1)...(19): siRNA sense strand
caacuguggccaucaugaa

SEQ ID NO: 347931 - RNA, 19 nt, Homo sapiens
  misc_RNA (1)...(19): siRNA sense strand
caacuguggccaucaugaa

SEQ ID NO: 347932 - RNA, 19 nt, Homo sapiens
  misc_RNA (1)...(19): siRNA sense strand
caacuguggccaucaugaa

SEQ ID NO: 347933 - RNA, 19 nt, Homo sapiens
  misc_RNA (1)...(19): siRNA sense strand
gggacaaguucuaucuaca

SEQ ID NO: 347934 - RNA, 19 nt, Homo sapiens
  misc_RNA (1)...(19): siRNA sense strand
gcugaaauccuccauucug

SEQ ID NO: 347935 - RNA, 19 nt, Homo sapiens
  misc_RNA (1)...(19): siRNA sense strand
acaaugacaccaucgacua

SEQ ID NO: 347936 - RNA, 19 nt, Homo sapiens
  misc_RNA (1)...(19): siRNA sense strand
gcauaaaccugggcuucag

SEQ ID NO: 347937 - RNA, 19 nt, Homo sapiens
  misc_RNA (1)...(19): siRNA sense strand
caacuguggccaucacgaa

SEQ ID NO: 347938 - RNA, 19 nt, Homo sapiens
  misc_RNA (1)...(19): siRNA sense strand
guaaugauaccaggcaaau

SEQ ID NO: 347939 - RNA, 19 nt, Homo sapiens
  misc_RNA (1)...(19): siRNA sense strand
ggcaaauauuuacaucuuc

SEQ ID NO: 347940 - RNA, 19 nt, Homo sapiens
  misc_RNA (1)...(19): siRNA sense strand
gaagggagcuuugucuaua

SEQ ID NO: 347941 - RNA, 19 nt, Homo sapiens
  misc_RNA (1)...(19): siRNA sense strand
gaucagaguuugacuuuga

SEQ ID NO: 347942 - RNA, 19 nt, Homo sapiens
  misc_RNA (1)...(19): siRNA sense strand
ggaagagacuggaauguug

SEQ ID NO: 347943 - RNA, 19 nt, Homo sapiens
  misc_RNA (1)...(19): siRNA sense strand
guaccuauaugcugaauaa

SEQ ID NO: 347944 - RNA, 19 nt, Homo sapiens
  misc_RNA (1)...(19): siRNA sense strand
guaagcagcucaucuguga

SEQ ID NO: 347945 - RNA, 19 nt, Homo sapiens
  misc_RNA (1)...(19): siRNA sense strand
gaucaaccguguuaugaaa

SEQ ID NO: 347946 - RNA, 19 nt, Homo sapiens
  misc_RNA (1)...(19): siRNA sense strand
gaauaaacccauugaagaa

SEQ ID NO: 347947 - RNA, 19 nt, Homo sapiens
  misc_RNA (1)...(19): siRNA sense strand
gaaguacauugcuauaguu

SEQ ID NO: 347948 - RNA, 19 nt, Homo sapiens
  misc_RNA (1)...(19): siRNA sense strand
ggaaguacauugcuauagu

SEQ ID NO: 347949 - RNA, 19 nt, Homo sapiens
  misc_RNA (1)...(19): siRNA sense strand
caagaagaaugacaucuau

SEQ ID NO: 347950 - RNA, 19 nt, Homo sapiens
  misc_RNA (1)...(19): siRNA sense strand
cagaacugaugauuacuua

SEQ ID NO: 347951 - RNA, 19 nt, Homo sapiens
  misc_RNA (1)...(19): siRNA sense strand
gaaaugaagcgcaagaaga

SEQ ID NO: 347952 - RNA, 19 nt, Homo sapiens
  misc_RNA (1)...(19): siRNA sense strand
gucaagacguuauagauuu

SEQ ID NO: 347953 - RNA, 19 nt, Homo sapiens
  misc_RNA (1)...(19): siRNA sense strand
gcaagaagaaugacaucua

SEQ ID NO: 347954 - RNA, 19 nt, Homo sapiens
  misc_RNA (1)...(19): siRNA sense strand
cuaaugggauuguuugaaa

SEQ ID NO: 347955 - RNA, 19 nt, Homo sapiens
  misc_RNA (1)...(19): siRNA sense strand
gaacugaugauuacuuaga

SEQ ID NO: 347956 - RNA, 19 nt, Homo sapiens
  misc_RNA (1)...(19): siRNA sense strand
aaacgucgcuucaggaaau

SEQ ID NO: 347957 - RNA, 19 nt, Homo sapiens
  misc_RNA (1)...(19): siRNA sense strand
uaacaccauuggaagauuu

SEQ ID NO: 347958 - RNA, 19 nt, Homo sapiens
  misc_RNA (1)...(19): siRNA sense strand
gaagaaaucauuguacaga

SEQ ID NO: 347959 - RNA, 19 nt, Homo sapiens
  misc_RNA (1)...(19): siRNA sense strand
ccaaguuccuuauggcuaa

SEQ ID NO: 347960 - RNA, 19 nt, Homo sapiens
  misc_RNA (1)...(19): siRNA sense strand
guuaagaugcugcuuuaua

SEQ ID NO: 347961 - RNA, 19 nt, Homo sapiens
  misc_RNA (1)...(19): siRNA sense strand
uuacagaacugaugauuac

SEQ ID NO: 347962 - RNA, 19 nt, Homo sapiens
  misc_RNA (1)...(19): siRNA sense strand
gaacagaaagccagaucuu

SEQ ID NO: 347963 - RNA, 19 nt, Homo sapiens
  misc_RNA (1)...(19): siRNA sense strand
ggaaccaauugaacagaaa

SEQ ID NO: 347964 - RNA, 19 nt, Homo sapiens
  misc_RNA (1)...(19): siRNA sense strand
guacaacuguggaaaccaa

SEQ ID NO: 347965 - RNA, 19 nt, Homo sapiens
  misc_RNA (1)...(19): siRNA sense strand
guacauugcuauaguuagu

SEQ ID NO: 347966 - RNA, 19 nt, Homo sapiens
  misc_RNA (1)...(19): siRNA sense strand
guaacucgcuaucuggauu

SEQ ID NO: 347967 - RNA, 19 nt, Homo sapiens
  misc_RNA (1)...(19): siRNA sense strand
caagggaaguacauugcua

SEQ ID NO: 347968 - RNA, 19 nt, Homo sapiens
  misc_RNA (1)...(19): siRNA sense strand
gucaugcucuugcacuuua

SEQ ID NO: 347969 - RNA, 19 nt, Homo sapiens
  misc_RNA (1)...(19): siRNA sense strand
ccaaggagccugagaagga

SEQ ID NO: 347970 - RNA, 19 nt, Homo sapiens
  misc_RNA (1)...(19): siRNA sense strand
ugaauaaacccauugaaga

SEQ ID NO: 347971 - RNA, 19 nt, Homo sapiens
  misc_RNA (1)...(19): siRNA sense strand
gcuaagugcuauuuaugga

SEQ ID NO: 347972 - RNA, 19 nt, Homo sapiens
  misc_RNA (1)...(19): siRNA sense strand
ccaagucaaucgaaaguca

SEQ ID NO: 347973 - RNA, 19 nt, Homo sapiens
  misc_RNA (1)...(19): siRNA sense strand
gaugacaggaucagaguuu

SEQ ID NO: 347974 - RNA, 19 nt, Homo sapiens
  misc_RNA (1)...(19): siRNA sense strand
gacaacgugugaugacauu

SEQ ID NO: 347975 - RNA, 19 nt, Homo sapiens
  misc_RNA (1)...(19): siRNA sense strand
gaagagacuggaauguuga

SEQ ID NO: 347976 - RNA, 19 nt, Homo sapiens
  misc_RNA (1)...(19): siRNA sense strand
gaaaguucuucauauggau

SEQ ID NO: 347977 - RNA, 19 nt, Homo sapiens
  misc_RNA (1)...(19): siRNA sense strand
gcacaagggaaguacauug

SEQ ID NO: 347978 - RNA, 19 nt, Homo sapiens
  misc_RNA (1)...(19): siRNA sense strand
ggucaagacguuauagauu

SEQ ID NO: 347979 - RNA, 19 nt, Homo sapiens
  misc_RNA (1)...(19): siRNA sense strand
cagaagcccuggcaucuag

SEQ ID NO: 347980 - RNA, 19 nt, Homo sapiens
  misc_RNA (1)...(19): siRNA sense strand
gaaauuuguuagcaucagu

SEQ ID NO: 347981 - RNA, 19 nt, Homo sapiens
  misc_RNA (1)...(19): siRNA sense strand
ugguuaagaugcugcuuua

SEQ ID NO: 347982 - RNA, 19 nt, Homo sapiens
  misc_RNA (1)...(19): siRNA sense strand
gguauaaugucagugaaug

SEQ ID NO: 347983 - RNA, 19 nt, Homo sapiens
  misc_RNA (1)...(19): siRNA sense strand
caacgugugaugacauuaa

SEQ ID NO: 347984 - RNA, 19 nt, Homo sapiens
  misc_RNA (1)...(19): siRNA sense strand
agacuggaauguugacuug

SEQ ID NO: 347985 - RNA, 19 nt, Homo sapiens
  misc_RNA (1)...(19): siRNA sense strand
uuaagaugcugcuuuauac

SEQ ID NO: 347986 - RNA, 19 nt, Homo sapiens
  misc_RNA (1)...(19): siRNA sense strand
ggaaaucagaccagcuuug

SEQ ID NO: 347987 - RNA, 19 nt, Homo sapiens
  misc_RNA (1)...(19): siRNA sense strand
caaggagccugagaaggaa

SEQ ID NO: 347988 - RNA, 19 nt, Homo sapiens
  misc_RNA (1)...(19): siRNA sense strand
gcaaggcuaagugcuauuu

SEQ ID NO: 347989 - RNA, 19 nt, Homo sapiens
  misc_RNA (1)...(19): siRNA sense strand
cgagauguguauaagaaau

SEQ ID NO: 347990 - RNA, 19 nt, Homo sapiens
  misc_RNA (1)...(19): siRNA sense strand
gcuaauggucagcugguua

SEQ ID NO: 347991 - RNA, 19 nt, Homo sapiens
  misc_RNA (1)...(19): siRNA sense strand
caucuagccuaaugggauu

SEQ ID NO: 347992 - RNA, 19 nt, Homo sapiens
  misc_RNA (1)...(19): siRNA sense strand
ggagaaauugcucgcugua

SEQ ID NO: 347993 - RNA, 19 nt, Homo sapiens
  misc_RNA (1)...(19): siRNA sense strand
aaaugaagcgcaagaagaa

SEQ ID NO: 347994 - RNA, 19 nt, Homo sapiens
  misc_RNA (1)...(19): siRNA sense strand
gaguuugacuuugaggaaa

SEQ ID NO: 347995 - RNA, 19 nt, Homo sapiens
  misc_RNA (1)...(19): siRNA sense strand
gcagaagcccuggcaucua

SEQ ID NO: 347996 - RNA, 19 nt, Homo sapiens
  misc_RNA (1)...(19): siRNA sense strand
gugcaucuauaacaccauu

SEQ ID NO: 347997 - RNA, 19 nt, Homo sapiens
  misc_RNA (1)...(19): siRNA sense strand
gcccuggcaucuagccuaa

SEQ ID NO: 347998 - RNA, 19 nt, Homo sapiens
  misc_RNA (1)...(19): siRNA sense strand
gaaaucagaccagcuuugg

SEQ ID NO: 347999 - RNA, 19 nt, Homo sapiens
  misc_RNA (1)...(19): siRNA sense strand
uaaaagaucggguagaaaa

SEQ ID NO: 348000 - RNA, 19 nt, Homo sapiens
  misc_RNA (1)...(19): siRNA sense strand
agaaauugcucgcuguaag

SEQ ID NO: 348001 - RNA, 19 nt, Homo sapiens
  misc_RNA (1)...(19): siRNA sense strand
gcacuuuacagaacugaug

SEQ ID NO: 348002 - RNA, 19 nt, Homo sapiens
  misc_RNA (1)...(19): siRNA sense strand
gaucaccacccgagucaau

SEQ ID NO: 348003 - RNA, 19 nt, Homo sapiens
  misc_RNA (1)...(19): siRNA sense strand
ggccaggugaucagaguua

SEQ ID NO: 348004 - RNA, 19 nt, Homo sapiens
  misc_RNA (1)...(19): siRNA sense strand
ugcgagauguguauaagaa

SEQ ID NO: 348005 - RNA, 19 nt, Homo sapiens
  misc_RNA (1)...(19): siRNA sense strand
ugauuugggucaagacguu

SEQ ID NO: 348006 - RNA, 19 nt, Homo sapiens
  misc_RNA (1)...(19): siRNA sense strand
gaaccaagucaaucgaaag

SEQ ID NO: 348007 - RNA, 19 nt, Homo sapiens
  misc_RNA (1)...(19): siRNA sense strand
agagguaacucgcuaucug

SEQ ID NO: 348008 - RNA, 19 nt, Homo sapiens
  misc_RNA (1)...(19): siRNA sense strand
gacggaauguauccuguca

SEQ ID NO: 348009 - RNA, 19 nt, Homo sapiens
  misc_RNA (1)...(19): siRNA sense strand
ggaaaugaagcgcaagaag

SEQ ID NO: 348010 - RNA, 19 nt, Homo sapiens
  misc_RNA (1)...(19): siRNA sense strand
caggugaucagaguuauuu

SEQ ID NO: 348011 - RNA, 19 nt, Homo sapiens
  misc_RNA (1)...(19): siRNA sense strand
gucagugaauggcaagaaa

SEQ ID NO: 348012 - RNA, 19 nt, Homo sapiens
  misc_RNA (1)...(19): siRNA sense strand
uugaaggcauugauccuaa

SEQ ID NO: 348013 - RNA, 19 nt, Homo sapiens
  misc_RNA (1)...(19): siRNA sense strand
aagggagcuuugucuauaa

SEQ ID NO: 348014 - RNA, 19 nt, Homo sapiens
  misc_RNA (1)...(19): siRNA sense strand
gcauugauccuaagaagac

SEQ ID NO: 348015 - RNA, 19 nt, Homo sapiens
  misc_RNA (1)...(19): siRNA sense strand
gagaaauugcucgcuguaa

SEQ ID NO: 348016 - RNA, 19 nt, Homo sapiens
  misc_RNA (1)...(19): siRNA sense strand
uguaaaaucugaaggagaa

SEQ ID NO: 348017 - RNA, 19 nt, Homo sapiens
  misc_RNA (1)...(19): siRNA sense strand
caucagugaccuccuggua

SEQ ID NO: 348018 - RNA, 19 nt, Homo sapiens
  misc_RNA (1)...(19): siRNA sense strand
gaaagucagauaucuacgu

SEQ ID NO: 348019 - RNA, 19 nt, Homo sapiens
  misc_RNA (1)...(19): siRNA sense strand
agaaccaagucaaucgaaa

SEQ ID NO: 348020 - RNA, 19 nt, Homo sapiens
  misc_RNA (1)...(19): siRNA sense strand
gagacaacgugugaugaca

SEQ ID NO: 348021 - RNA, 19 nt, Homo sapiens
  misc_RNA (1)...(19): siRNA sense strand
cuaauggucagcugguuaa

SEQ ID NO: 348022 - RNA, 19 nt, Homo sapiens
  misc_RNA (1)...(19): siRNA sense strand
gaaccaauugaacagaaau

SEQ ID NO: 348023 - RNA, 19 nt, Homo sapiens
  misc_RNA (1)...(19): siRNA sense strand
gcucuugcacuuuacagaa

SEQ ID NO: 348024 - RNA, 19 nt, Homo sapiens
  misc_RNA (1)...(19): siRNA sense strand
uagaucaaccguguuauga

SEQ ID NO: 348025 - RNA, 19 nt, Homo sapiens
  misc_RNA (1)...(19): siRNA sense strand
ucagguauaaugucaguga

SEQ ID NO: 348026 - RNA, 19 nt, Homo sapiens
  misc_RNA (1)...(19): siRNA sense strand
gaucauuauuccacagaac

SEQ ID NO: 348027 - RNA, 19 nt, Homo sapiens
  misc_RNA (1)...(19): siRNA sense strand
ugaagggagcuuugucuau

SEQ ID NO: 348028 - RNA, 19 nt, Homo sapiens
  misc_RNA (1)...(19): siRNA sense strand
uggaaccaauugaacagaa

SEQ ID NO: 348029 - RNA, 19 nt, Homo sapiens
  misc_RNA (1)...(19): siRNA sense strand
ccaucaagaacaccaauga

SEQ ID NO: 348030 - RNA, 19 nt, Homo sapiens
  misc_RNA (1)...(19): siRNA sense strand
uaaacccauugaagaaauc

SEQ ID NO: 348031 - RNA, 19 nt, Homo sapiens
  misc_RNA (1)...(19): siRNA sense strand
aaggcuaagugcuauuuau

SEQ ID NO: 348032 - RNA, 19 nt, Homo sapiens
  misc_RNA (1)...(19): siRNA sense strand
caaggcuaagugcuauuua

SEQ ID NO: 348033 - RNA, 19 nt, Homo sapiens
  misc_RNA (1)...(19): siRNA sense strand
gaaauuccuaguguauguu

SEQ ID NO: 348034 - RNA, 19 nt, Homo sapiens
  misc_RNA (1)...(19): siRNA sense strand
gaaggcauugauccuaaga

SEQ ID NO: 348035 - RNA, 19 nt, Homo sapiens
  misc_RNA (1)...(19): siRNA sense strand
gugaauggcaagaaaguuc

SEQ ID NO: 348036 - RNA, 19 nt, Homo sapiens
  misc_RNA (1)...(19): siRNA sense strand
ccacagaaccaagucaauc

SEQ ID NO: 348037 - RNA, 19 nt, Homo sapiens
  misc_RNA (1)...(19): siRNA sense strand
guacagaauggaaaaguaa

SEQ ID NO: 348038 - RNA, 19 nt, Homo sapiens
  misc_RNA (1)...(19): siRNA sense strand
uauaagaggaugacaggau

SEQ ID NO: 348039 - RNA, 19 nt, Homo sapiens
  misc_RNA (1)...(19): siRNA sense strand
gaggaaaugaagcgcaaga

SEQ ID NO: 348040 - RNA, 19 nt, Homo sapiens
  misc_RNA (1)...(19): siRNA sense strand
cccuaguacugucuucuuu

SEQ ID NO: 348041 - RNA, 19 nt, Homo sapiens
  misc_RNA (1)...(19): siRNA sense strand
cuccucagcucccagaaga

SEQ ID NO: 348042 - RNA, 19 nt, Homo sapiens
  misc_RNA (1)...(19): siRNA sense strand
cacucuaccuggcccauga

SEQ ID NO: 348043 - RNA, 19 nt, Homo sapiens
  misc_RNA (1)...(19): siRNA sense strand
gcaucuacuucgucuacuc

SEQ ID NO: 348044 - RNA, 19 nt, Homo sapiens
  misc_RNA (1)...(19): siRNA sense strand
cuaguacugucuucuuugg

SEQ ID NO: 348045 - RNA, 19 nt, Homo sapiens
  misc_RNA (1)...(19): siRNA sense strand
gcucuucuccucccaguac

SEQ ID NO: 348046 - RNA, 19 nt, Homo sapiens
  misc_RNA (1)...(19): siRNA sense strand
cccaugagguccagcucuu

SEQ ID NO: 348047 - RNA, 19 nt, Homo sapiens
  misc_RNA (1)...(19): siRNA sense strand
gcucccagaagauggugua

SEQ ID NO: 348048 - RNA, 19 nt, Homo sapiens
  misc_RNA (1)...(19): siRNA sense strand
cccagaagaugguguaucc

SEQ ID NO: 348049 - RNA, 19 nt, Homo sapiens
  misc_RNA (1)...(19): siRNA sense strand
gcuauccacccacacagau

SEQ ID NO: 348050 - RNA, 19 nt, Homo sapiens
  misc_RNA (1)...(19): siRNA sense strand
ccaguggcaucuacuucgu

SEQ ID NO: 348051 - RNA, 19 nt, Homo sapiens
  misc_RNA (1)...(19): siRNA sense strand
guccucagcccuaguacug

SEQ ID NO: 348052 - RNA, 19 nt, Homo sapiens
  misc_RNA (1)...(19): siRNA sense strand
gagccaugcuagccaauaa

SEQ ID NO: 348053 - RNA, 19 nt, Homo sapiens
  misc_RNA (1)...(19): siRNA sense strand
agaaagcagcgaaggaaua

SEQ ID NO: 348054 - RNA, 19 nt, Homo sapiens
  misc_RNA (1)...(19): siRNA sense strand
gaaagcagcgaaggaauag

SEQ ID NO: 348055 - RNA, 19 nt, Homo sapiens
  misc_RNA (1)...(19): siRNA sense strand
gugcaggugugguuucaga

SEQ ID NO: 348056 - RNA, 19 nt, Homo sapiens
  misc_RNA (1)...(19): siRNA sense strand
ggaauaggacaaccuucaa

SEQ ID NO: 348057 - RNA, 19 nt, Homo sapiens
  misc_RNA (1)...(19): siRNA sense strand
gaauaggacaaccuucaau

SEQ ID NO: 348058 - RNA, 19 nt, Homo sapiens
  misc_RNA (1)...(19): siRNA sense strand
aauaggacaaccuucaaua

SEQ ID NO: 348059 - RNA, 19 nt, Homo sapiens
  misc_RNA (1)...(19): siRNA sense strand
cacacuauccugaugcuuu

SEQ ID NO: 348060 - RNA, 19 nt, Homo sapiens
  misc_RNA (1)...(19): siRNA sense strand
gaaugagagagccaugcua

SEQ ID NO: 348061 - RNA, 19 nt, Homo sapiens
  misc_RNA (1)...(19): siRNA sense strand
gcuccgagacccaccgauu

SEQ ID NO: 348062 - RNA, 19 nt, Homo sapiens
  misc_RNA (1)...(19): siRNA sense strand
ggacagcgucuccguacag

SEQ ID NO: 348063 - RNA, 19 nt, Homo sapiens
  misc_RNA (1)...(19): siRNA sense strand
gagugcaggugugguuuca

SEQ ID NO: 348064 - RNA, 19 nt, Homo sapiens
  misc_RNA (1)...(19): siRNA sense strand
agagaaagcagcgaaggaa

SEQ ID NO: 348065 - RNA, 19 nt, Homo sapiens
  misc_RNA (1)...(19): siRNA sense strand
acgcuucccuccucaaauc

SEQ ID NO: 348066 - RNA, 19 nt, Homo sapiens
  misc_RNA (1)...(19): siRNA sense strand
gagaaagcagcgaaggaau

SEQ ID NO: 348067 - RNA, 19 nt, Homo sapiens
  misc_RNA (1)...(19): siRNA sense strand
aggacaaccuucaauagca

SEQ ID NO: 348068 - RNA, 19 nt, Homo sapiens
  misc_RNA (1)...(19): siRNA sense strand
cgagagugcaggugugguu

SEQ ID NO: 348069 - RNA, 19 nt, Homo sapiens
  misc_RNA (1)...(19): siRNA sense strand
aaacgcuucccuccucaaa

SEQ ID NO: 348070 - RNA, 19 nt, Homo sapiens
  misc_RNA (1)...(19): siRNA sense strand
cggcacaggcggaugagaa

SEQ ID NO: 348071 - RNA, 19 nt, Homo sapiens
  misc_RNA (1)...(19): siRNA sense strand
cuccgagacccaccgauua

SEQ ID NO: 348072 - RNA, 19 nt, Homo sapiens
  misc_RNA (1)...(19): siRNA sense strand
cggacacacuauccugaug

SEQ ID NO: 348073 - RNA, 19 nt, Homo sapiens
  misc_RNA (1)...(19): siRNA sense strand
acacuauccugaugcuuuu

SEQ ID NO: 348074 - RNA, 19 nt, Homo sapiens
  misc_RNA (1)...(19): siRNA sense strand
ggaaugagagagccaugcu

SEQ ID NO: 348075 - RNA, 19 nt, Homo sapiens
  misc_RNA (1)...(19): siRNA sense strand
gagagugcaggugugguuu

SEQ ID NO: 348076 - RNA, 19 nt, Homo sapiens
  misc_RNA (1)...(19): siRNA sense strand
aagcagcgaaggaauagga

SEQ ID NO: 348077 - RNA, 19 nt, Homo sapiens
  misc_RNA (1)...(19): siRNA sense strand
ggacaaugaccagcugaac

SEQ ID NO: 348078 - RNA, 19 nt, Homo sapiens
  misc_RNA (1)...(19): siRNA sense strand
acaaugaccagcugaacuc

SEQ ID NO: 348079 - RNA, 19 nt, Homo sapiens
  misc_RNA (1)...(19): siRNA sense strand
gacaaugaccagcugaacu

SEQ ID NO: 348080 - RNA, 19 nt, Homo sapiens
  misc_RNA (1)...(19): siRNA sense strand
cagcgaaggaauaggacaa

SEQ ID NO: 348081 - RNA, 19 nt, Homo sapiens
  misc_RNA (1)...(19): siRNA sense strand
ucuuugagcggacacacua

SEQ ID NO: 348082 - RNA, 19 nt, Homo sapiens
  misc_RNA (1)...(19): siRNA sense strand
gagccaugcuagccaauaa

SEQ ID NO: 348083 - RNA, 19 nt, Homo sapiens
  misc_RNA (1)...(19): siRNA sense strand
caacauggccaacagcauu

SEQ ID NO: 348084 - RNA, 19 nt, Homo sapiens
  misc_RNA (1)...(19): siRNA sense strand
ggccaaggaauauaguuua

SEQ ID NO: 348085 - RNA, 19 nt, Homo sapiens
  misc_RNA (1)...(19): siRNA sense strand
ggaaccaggugccaacagu

SEQ ID NO: 348086 - RNA, 19 nt, Homo sapiens
  misc_RNA (1)...(19): siRNA sense strand
agaaagcagcgaaggaaua

SEQ ID NO: 348087 - RNA, 19 nt, Homo sapiens
  misc_RNA (1)...(19): siRNA sense strand
gaaagcagcgaaggaauag

SEQ ID NO: 348088 - RNA, 19 nt, Homo sapiens
  misc_RNA (1)...(19): siRNA sense strand
gacugaaggccaaggaaua

SEQ ID NO: 348089 - RNA, 19 nt, Homo sapiens
  misc_RNA (1)...(19): siRNA sense strand
gugcaggugugguuucaga

SEQ ID NO: 348090 - RNA, 19 nt, Homo sapiens
  misc_RNA (1)...(19): siRNA sense strand
caaggaauauaguuuacag

SEQ ID NO: 348091 - RNA, 19 nt, Homo sapiens
  misc_RNA (1)...(19): siRNA sense strand
ccacaugugccaacaauag

SEQ ID NO: 348092 - RNA, 19 nt, Homo sapiens
  misc_RNA (1)...(19): siRNA sense strand
ggaauaggacaaccuucaa

SEQ ID NO: 348093 - RNA, 19 nt, Homo sapiens
  misc_RNA (1)...(19): siRNA sense strand
gaauaggacaaccuucaau

SEQ ID NO: 348094 - RNA, 19 nt, Homo sapiens
  misc_RNA (1)...(19): siRNA sense strand
aauaggacaaccuucaaua

SEQ ID NO: 348095 - RNA, 19 nt, Homo sapiens
  misc_RNA (1)...(19): siRNA sense strand
cacacuauccugaugcuuu

SEQ ID NO: 348096 - RNA, 19 nt, Homo sapiens
  misc_RNA (1)...(19): siRNA sense strand
gaaugagagagccaugcua

SEQ ID NO: 348097 - RNA, 19 nt, Homo sapiens
  misc_RNA (1)...(19): siRNA sense strand
gccaaggaauauaguuuac

SEQ ID NO: 348098 - RNA, 19 nt, Homo sapiens
  misc_RNA (1)...(19): siRNA sense strand
gcuccgagacccaccgauu

SEQ ID NO: 348099 - RNA, 19 nt, Homo sapiens
  misc_RNA (1)...(19): siRNA sense strand
ggacagcgucuccguacag

SEQ ID NO: 348100 - RNA, 19 nt, Homo sapiens
  misc_RNA (1)...(19): siRNA sense strand
gagugcaggugugguuuca

SEQ ID NO: 348101 - RNA, 19 nt, Homo sapiens
  misc_RNA (1)...(19): siRNA sense strand
gcaucaacauggccaacag

SEQ ID NO: 348102 - RNA, 19 nt, Homo sapiens
  misc_RNA (1)...(19): siRNA sense strand
cgccauggcuacuuauucu

SEQ ID NO: 348103 - RNA, 19 nt, Homo sapiens
  misc_RNA (1)...(19): siRNA sense strand
agagaaagcagcgaaggaa

SEQ ID NO: 348104 - RNA, 19 nt, Homo sapiens
  misc_RNA (1)...(19): siRNA sense strand
acgcuucccuccucaaauc

SEQ ID NO: 348105 - RNA, 19 nt, Homo sapiens
  misc_RNA (1)...(19): siRNA sense strand
gagaaagcagcgaaggaau

SEQ ID NO: 348106 - RNA, 19 nt, Homo sapiens
  misc_RNA (1)...(19): siRNA sense strand
aggacaaccuucaauagca

SEQ ID NO: 348107 - RNA, 19 nt, Homo sapiens
  misc_RNA (1)...(19): siRNA sense strand
cagcauugccaaccugaga

SEQ ID NO: 348108 - RNA, 19 nt, Homo sapiens
  misc_RNA (1)...(19): siRNA sense strand
cgagagugcaggugugguu

SEQ ID NO: 348109 - RNA, 19 nt, Homo sapiens
  misc_RNA (1)...(19): siRNA sense strand
cuacuuauucugccacaug

SEQ ID NO: 348110 - RNA, 19 nt, Homo sapiens
  misc_RNA (1)...(19): siRNA sense strand
cggcacaggcggaugagaa

SEQ ID NO: 348111 - RNA, 19 nt, Homo sapiens
  misc_RNA (1)...(19): siRNA sense strand
aaacgcuucccuccucaaa

SEQ ID NO: 348112 - RNA, 19 nt, Homo sapiens
  misc_RNA (1)...(19): siRNA sense strand
cuccgagacccaccgauua

SEQ ID NO: 348113 - RNA, 19 nt, Homo sapiens
  misc_RNA (1)...(19): siRNA sense strand
ugaaggccaaggaauauag

SEQ ID NO: 348114 - RNA, 19 nt, Homo sapiens
  misc_RNA (1)...(19): siRNA sense strand
cggacacacuauccugaug

SEQ ID NO: 348115 - RNA, 19 nt, Homo sapiens
  misc_RNA (1)...(19): siRNA sense strand
gaaggccaaggaauauagu

SEQ ID NO: 348116 - RNA, 19 nt, Homo sapiens
  misc_RNA (1)...(19): siRNA sense strand
ugccacaugugccaacaau

SEQ ID NO: 348117 - RNA, 19 nt, Homo sapiens
  misc_RNA (1)...(19): siRNA sense strand
acacuauccugaugcuuuu

SEQ ID NO: 348118 - RNA, 19 nt, Homo sapiens
  misc_RNA (1)...(19): siRNA sense strand
gcgccauggcuacuuauuc

SEQ ID NO: 348119 - RNA, 19 nt, Homo sapiens
  misc_RNA (1)...(19): siRNA sense strand
ggaaugagagagccaugcu

SEQ ID NO: 348120 - RNA, 19 nt, Homo sapiens
  misc_RNA (1)...(19): siRNA sense strand
gagagugcaggugugguuu

SEQ ID NO: 348121 - RNA, 19 nt, Homo sapiens
  misc_RNA (1)...(19): siRNA sense strand
aagcagcgaaggaauagga

SEQ ID NO: 348122 - RNA, 19 nt, Homo sapiens
  misc_RNA (1)...(19): siRNA sense strand
ggacaaugaccagcugaac

SEQ ID NO: 348123 - RNA, 19 nt, Homo sapiens
  misc_RNA (1)...(19): siRNA sense strand
acaaugaccagcugaacuc

SEQ ID NO: 348124 - RNA, 19 nt, Homo sapiens
  misc_RNA (1)...(19): siRNA sense strand
gagacugaaggccaaggaa

SEQ ID NO: 348125 - RNA, 19 nt, Homo sapiens
  misc_RNA (1)...(19): siRNA sense strand
gacaaugaccagcugaacu

SEQ ID NO: 348126 - RNA, 19 nt, Homo sapiens
  misc_RNA (1)...(19): siRNA sense strand
cagcgaaggaauaggacaa

SEQ ID NO: 348127 - RNA, 19 nt, Homo sapiens
  misc_RNA (1)...(19): siRNA sense strand
ucuuugagcggacacacua

SEQ ID NO: 348128 - RNA, 19 nt, Homo sapiens
  misc_RNA (1)...(19): siRNA sense strand
gaacguaacugugcaaugc

SEQ ID NO: 348129 - RNA, 19 nt, Homo sapiens
  misc_RNA (1)...(19): siRNA sense strand
gaaccgaacaggaaauauu

SEQ ID NO: 348130 - RNA, 19 nt, Homo sapiens
  misc_RNA (1)...(19): siRNA sense strand
ggauugguguguuucguaa

SEQ ID NO: 348131 - RNA, 19 nt, Homo sapiens
  misc_RNA (1)...(19): siRNA sense strand
gcagaaagcacguccuugu

SEQ ID NO: 348132 - RNA, 19 nt, Homo sapiens
  misc_RNA (1)...(19): siRNA sense strand
acauguacguggacuuaua

SEQ ID NO: 348133 - RNA, 19 nt, Homo sapiens
  misc_RNA (1)...(19): siRNA sense strand
gaacucuucuagucugcuu

SEQ ID NO: 348134 - RNA, 19 nt, Homo sapiens
  misc_RNA (1)...(19): siRNA sense strand
caauaaaugguuuggcuuu

SEQ ID NO: 348135 - RNA, 19 nt, Homo sapiens
  misc_RNA (1)...(19): siRNA sense strand
ccugauggccacuguguua

SEQ ID NO: 348136 - RNA, 19 nt, Homo sapiens
  misc_RNA (1)...(19): siRNA sense strand
uaaaugguuuggcuuucaa

SEQ ID NO: 348137 - RNA, 19 nt, Homo sapiens
  misc_RNA (1)...(19): siRNA sense strand
gauuacauauuccaacagu

SEQ ID NO: 348138 - RNA, 19 nt, Homo sapiens
  misc_RNA (1)...(19): siRNA sense strand
ccaaguagaauuaaaccuu

SEQ ID NO: 348139 - RNA, 19 nt, Homo sapiens
  misc_RNA (1)...(19): siRNA sense strand
cuucuagucugcuuucuau

SEQ ID NO: 348140 - RNA, 19 nt, Homo sapiens
  misc_RNA (1)...(19): siRNA sense strand
cuacauguacguggacuua

SEQ ID NO: 348141 - RNA, 19 nt, Homo sapiens
  misc_RNA (1)...(19): siRNA sense strand
aggaguggauuacauauuc

SEQ ID NO: 348142 - RNA, 19 nt, Homo sapiens
  misc_RNA (1)...(19): siRNA sense strand
uaacagcagucaucaucca

SEQ ID NO: 348143 - RNA, 19 nt, Homo sapiens
  misc_RNA (1)...(19): siRNA sense strand
caaagccgcagcaaaggaa

SEQ ID NO: 348144 - RNA, 19 nt, Homo sapiens
  misc_RNA (1)...(19): siRNA sense strand
ggaaaccuaaaggcaauaa

SEQ ID NO: 348145 - RNA, 19 nt, Homo sapiens
  misc_RNA (1)...(19): siRNA sense strand
cuaggaaucauuugcauug

SEQ ID NO: 348146 - RNA, 19 nt, Homo sapiens
  misc_RNA (1)...(19): siRNA sense strand
gcacguccuuguggccauu

SEQ ID NO: 348147 - RNA, 19 nt, Homo sapiens
  misc_RNA (1)...(19): siRNA sense strand
agucugcuuucuauagaua

SEQ ID NO: 348148 - RNA, 19 nt, Homo sapiens
  misc_RNA (1)...(19): siRNA sense strand
gaggaguggauuacauauu

SEQ ID NO: 348149 - RNA, 19 nt, Homo sapiens
  misc_RNA (1)...(19): siRNA sense strand
cuagucugcuuucuauaga

SEQ ID NO: 348150 - RNA, 19 nt, Homo sapiens
  misc_RNA (1)...(19): siRNA sense strand
ucaaaaugcuucucugaau

SEQ ID NO: 348151 - RNA, 19 nt, Homo sapiens
  misc_RNA (1)...(19): siRNA sense strand
aaggaaaccuaaaggcaau

SEQ ID NO: 348152 - RNA, 19 nt, Homo sapiens
  misc_RNA (1)...(19): siRNA sense strand
auauaugacugccaagguu

SEQ ID NO: 348153 - RNA, 19 nt, Homo sapiens
  misc_RNA (1)...(19): siRNA sense strand
uacguggacuuauaucaga

SEQ ID NO: 348154 - RNA, 19 nt, Homo sapiens
  misc_RNA (1)...(19): siRNA sense strand
aaacaaagaggaaccuucu

SEQ ID NO: 348155 - RNA, 19 nt, Homo sapiens
  misc_RNA (1)...(19): siRNA sense strand
cagaucaugcugaacguaa

SEQ ID NO: 348156 - RNA, 19 nt, Homo sapiens
  misc_RNA (1)...(19): siRNA sense strand
gggugacaauaaaugguuu

SEQ ID NO: 348157 - RNA, 19 nt, Homo sapiens
  misc_RNA (1)...(19): siRNA sense strand
gcaggccugugcuucaaag

SEQ ID NO: 348158 - RNA, 19 nt, Homo sapiens
  misc_RNA (1)...(19): siRNA sense strand
uuaccuuccucauggauug

SEQ ID NO: 348159 - RNA, 19 nt, Homo sapiens
  misc_RNA (1)...(19): siRNA sense strand
aaagaggaaccuucucaga

SEQ ID NO: 348160 - RNA, 19 nt, Homo sapiens
  misc_RNA (1)...(19): siRNA sense strand
cagcaaaggaaaccuaaag

SEQ ID NO: 348161 - RNA, 19 nt, Homo sapiens
  misc_RNA (1)...(19): siRNA sense strand
gaaaccuaaaggcaauaaa

SEQ ID NO: 348162 - RNA, 19 nt, Homo sapiens
  misc_RNA (1)...(19): siRNA sense strand
acaaagaggaaccuucuca

SEQ ID NO: 348163 - RNA, 19 nt, Homo sapiens
  misc_RNA (1)...(19): siRNA sense strand
caucauccaugggugacaa

SEQ ID NO: 348164 - RNA, 19 nt, Homo sapiens
  misc_RNA (1)...(19): siRNA sense strand
ccucauggauugguguguu

SEQ ID NO: 348165 - RNA, 19 nt, Homo sapiens
  misc_RNA (1)...(19): siRNA sense strand
auccaugggugacaauaaa

SEQ ID NO: 348166 - RNA, 19 nt, Homo sapiens
  misc_RNA (1)...(19): siRNA sense strand
auaaaugguuuggcuuuca

SEQ ID NO: 348167 - RNA, 19 nt, Homo sapiens
  misc_RNA (1)...(19): siRNA sense strand
caaaaugcuucucugaauc

SEQ ID NO: 348168 - RNA, 19 nt, Homo sapiens
  misc_RNA (1)...(19): siRNA sense strand
gagguccuaggaaucauuu

SEQ ID NO: 348169 - RNA, 19 nt, Homo sapiens
  misc_RNA (1)...(19): siRNA sense strand
ggccugugcuucaaagaac

SEQ ID NO: 348170 - RNA, 19 nt, Homo sapiens
  misc_RNA (1)...(19): siRNA sense strand
cguaacagcagucaucauc

SEQ ID NO: 348171 - RNA, 19 nt, Homo sapiens
  misc_RNA (1)...(19): siRNA sense strand
ccaaagccgcagcaaagga

SEQ ID NO: 348172 - RNA, 19 nt, Homo sapiens
  misc_RNA (1)...(19): siRNA sense strand
gauaaaagacucagaucau

SEQ ID NO: 348173 - RNA, 19 nt, Homo sapiens
  misc_RNA (1)...(19): siRNA sense strand
cugaggaguggauuacaua

SEQ ID NO: 348174 - RNA, 19 nt, Homo sapiens
  misc_RNA (1)...(19): siRNA sense strand
gaauacaagaacgcagaaa

SEQ ID NO: 348175 - RNA, 19 nt, Homo sapiens
  misc_RNA (1)...(19): siRNA sense strand
augcuucucugaaucauca

SEQ ID NO: 348176 - RNA, 19 nt, Homo sapiens
  misc_RNA (1)...(19): siRNA sense strand
gcaauaaaagcuccauuuc

SEQ ID NO: 348177 - RNA, 19 nt, Homo sapiens
  misc_RNA (1)...(19): siRNA sense strand
guacguggacuuauaucag

SEQ ID NO: 348178 - RNA, 19 nt, Homo sapiens
  misc_RNA (1)...(19): siRNA sense strand
cauccaugggugacaauaa

SEQ ID NO: 348179 - RNA, 19 nt, Homo sapiens
  misc_RNA (1)...(19): siRNA sense strand
gcagcaaaggaaaccuaaa

SEQ ID NO: 348180 - RNA, 19 nt, Homo sapiens
  misc_RNA (1)...(19): siRNA sense strand
ccugaggaguggauuacau

SEQ ID NO: 348181 - RNA, 19 nt, Homo sapiens
  misc_RNA (1)...(19): siRNA sense strand
gacccaaagccgcagcaaa

SEQ ID NO: 348182 - RNA, 19 nt, Homo sapiens
  misc_RNA (1)...(19): siRNA sense strand
uauaugacugccaagguuu

SEQ ID NO: 348183 - RNA, 19 nt, Homo sapiens
  misc_RNA (1)...(19): siRNA sense strand
cauguacguggacuuauau

SEQ ID NO: 348184 - RNA, 19 nt, Homo sapiens
  misc_RNA (1)...(19): siRNA sense strand
aauaaaagcuccauuucag

SEQ ID NO: 348185 - RNA, 19 nt, Homo sapiens
  misc_RNA (1)...(19): siRNA sense strand
aauaaaugguuuggcuuuc

SEQ ID NO: 348186 - RNA, 19 nt, Homo sapiens
  misc_RNA (1)...(19): siRNA sense strand
ucaggaaccgaacaggaaa

SEQ ID NO: 348187 - RNA, 19 nt, Homo sapiens
  misc_RNA (1)...(19): siRNA sense strand
gauggccacuguguuaaaa

SEQ ID NO: 348188 - RNA, 19 nt, Homo sapiens
  misc_RNA (1)...(19): siRNA sense strand
cagaaagcacguccuugug

SEQ ID NO: 348189 - RNA, 19 nt, Homo sapiens
  misc_RNA (1)...(19): siRNA sense strand
agaccaguguggaucuuca

SEQ ID NO: 348190 - RNA, 19 nt, Homo sapiens
  misc_RNA (1)...(19): siRNA sense strand
cucauggauugguguguuu

SEQ ID NO: 348191 - RNA, 19 nt, Homo sapiens
  misc_RNA (1)...(19): siRNA sense strand
cgaauacaagaacgcagaa

SEQ ID NO: 348192 - RNA, 19 nt, Homo sapiens
  misc_RNA (1)...(19): siRNA sense strand
cauuugcauuguccugaug

SEQ ID NO: 348193 - RNA, 19 nt, Homo sapiens
  misc_RNA (1)...(19): siRNA sense strand
caauaaaagcuccauuuca

SEQ ID NO: 348194 - RNA, 19 nt, Homo sapiens
  misc_RNA (1)...(19): siRNA sense strand
acguaacugugcaaugcua

SEQ ID NO: 348195 - RNA, 19 nt, Homo sapiens
  misc_RNA (1)...(19): siRNA sense strand
ggcaauaaaagcuccauuu

SEQ ID NO: 348196 - RNA, 19 nt, Homo sapiens
  misc_RNA (1)...(19): siRNA sense strand
gcucacugccgagguccua

SEQ ID NO: 348197 - RNA, 19 nt, Homo sapiens
  misc_RNA (1)...(19): siRNA sense strand
ucuagucugcuuucuauag

SEQ ID NO: 348198 - RNA, 19 nt, Homo sapiens
  misc_RNA (1)...(19): siRNA sense strand
ggaguggauuacauauucc

SEQ ID NO: 348199 - RNA, 19 nt, Homo sapiens
  misc_RNA (1)...(19): siRNA sense strand
ugauggccacuguguuaaa

SEQ ID NO: 348200 - RNA, 19 nt, Homo sapiens
  misc_RNA (1)...(19): siRNA sense strand
cugccgagguccuaggaau

SEQ ID NO: 348201 - RNA, 19 nt, Homo sapiens
  misc_RNA (1)...(19): siRNA sense strand
ggcuuucaaacaugagaua

SEQ ID NO: 348202 - RNA, 19 nt, Homo sapiens
  misc_RNA (1)...(19): siRNA sense strand
ggaaccgaacaggaaauau

SEQ ID NO: 348203 - RNA, 19 nt, Homo sapiens
  misc_RNA (1)...(19): siRNA sense strand
ucauuugcauuguccugau

SEQ ID NO: 348204 - RNA, 19 nt, Homo sapiens
  misc_RNA (1)...(19): siRNA sense strand
gccgagguccuaggaauca

SEQ ID NO: 348205 - RNA, 19 nt, Homo sapiens
  misc_RNA (1)...(19): siRNA sense strand
gaacguaacugugcaaugc

SEQ ID NO: 348206 - RNA, 19 nt, Homo sapiens
  misc_RNA (1)...(19): siRNA sense strand
gaaccgaacaggaaauauu

SEQ ID NO: 348207 - RNA, 19 nt, Homo sapiens
  misc_RNA (1)...(19): siRNA sense strand
ggauugguguguuucguaa

SEQ ID NO: 348208 - RNA, 19 nt, Homo sapiens
  misc_RNA (1)...(19): siRNA sense strand
gcagaaagcacguccuugu

SEQ ID NO: 348209 - RNA, 19 nt, Homo sapiens
  misc_RNA (1)...(19): siRNA sense strand
acauguacguggacuuaua

SEQ ID NO: 348210 - RNA, 19 nt, Homo sapiens
  misc_RNA (1)...(19): siRNA sense strand
gaacucuucuagucugcuu

SEQ ID NO: 348211 - RNA, 19 nt, Homo sapiens
  misc_RNA (1)...(19): siRNA sense strand
caauaaaugguuuggcuuu

SEQ ID NO: 348212 - RNA, 19 nt, Homo sapiens
  misc_RNA (1)...(19): siRNA sense strand
ccugauggccacuguguua

SEQ ID NO: 348213 - RNA, 19 nt, Homo sapiens
  misc_RNA (1)...(19): siRNA sense strand
uaaaugguuuggcuuucaa

SEQ ID NO: 348214 - RNA, 19 nt, Homo sapiens
  misc_RNA (1)...(19): siRNA sense strand
gauuacauauuccaacagu

SEQ ID NO: 348215 - RNA, 19 nt, Homo sapiens
  misc_RNA (1)...(19): siRNA sense strand
ccaaguagaauuaaaccuu

SEQ ID NO: 348216 - RNA, 19 nt, Homo sapiens
  misc_RNA (1)...(19): siRNA sense strand
cuucuagucugcuuucuau

SEQ ID NO: 348217 - RNA, 19 nt, Homo sapiens
  misc_RNA (1)...(19): siRNA sense strand
cuacauguacguggacuua

SEQ ID NO: 348218 - RNA, 19 nt, Homo sapiens
  misc_RNA (1)...(19): siRNA sense strand
aggaguggauuacauauuc

SEQ ID NO: 348219 - RNA, 19 nt, Homo sapiens
  misc_RNA (1)...(19): siRNA sense strand
uaacagcagucaucaucca

SEQ ID NO: 348220 - RNA, 19 nt, Homo sapiens
  misc_RNA (1)...(19): siRNA sense strand
caaagccgcagcaaaggaa

SEQ ID NO: 348221 - RNA, 19 nt, Homo sapiens
  misc_RNA (1)...(19): siRNA sense strand
ggaaaccuaaaggcaauaa

SEQ ID NO: 348222 - RNA, 19 nt, Homo sapiens
  misc_RNA (1)...(19): siRNA sense strand
cuaggaaucauuugcauug

SEQ ID NO: 348223 - RNA, 19 nt, Homo sapiens
  misc_RNA (1)...(19): siRNA sense strand
gcacguccuuguggccauu

SEQ ID NO: 348224 - RNA, 19 nt, Homo sapiens
  misc_RNA (1)...(19): siRNA sense strand
agucugcuuucuauagaua

SEQ ID NO: 348225 - RNA, 19 nt, Homo sapiens
  misc_RNA (1)...(19): siRNA sense strand
gaggaguggauuacauauu

SEQ ID NO: 348226 - RNA, 19 nt, Homo sapiens
  misc_RNA (1)...(19): siRNA sense strand
cuagucugcuuucuauaga

SEQ ID NO: 348227 - RNA, 19 nt, Homo sapiens
  misc_RNA (1)...(19): siRNA sense strand
ucaaaaugcuucucugaau

SEQ ID NO: 348228 - RNA, 19 nt, Homo sapiens
  misc_RNA (1)...(19): siRNA sense strand
aaggaaaccuaaaggcaau

SEQ ID NO: 348229 - RNA, 19 nt, Homo sapiens
  misc_RNA (1)...(19): siRNA sense strand
auauaugacugccaagguu

SEQ ID NO: 348230 - RNA, 19 nt, Homo sapiens
  misc_RNA (1)...(19): siRNA sense strand
uacguggacuuauaucaga

SEQ ID NO: 348231 - RNA, 19 nt, Homo sapiens
  misc_RNA (1)...(19): siRNA sense strand
aaacaaagaggaaccuucu

SEQ ID NO: 348232 - RNA, 19 nt, Homo sapiens
  misc_RNA (1)...(19): siRNA sense strand
cagaucaugcugaacguaa

SEQ ID NO: 348233 - RNA, 19 nt, Homo sapiens
  misc_RNA (1)...(19): siRNA sense strand
gggugacaauaaaugguuu

SEQ ID NO: 348234 - RNA, 19 nt, Homo sapiens
  misc_RNA (1)...(19): siRNA sense strand
gcaggccugugcuucaaag

SEQ ID NO: 348235 - RNA, 19 nt, Homo sapiens
  misc_RNA (1)...(19): siRNA sense strand
uuaccuuccucauggauug

SEQ ID NO: 348236 - RNA, 19 nt, Homo sapiens
  misc_RNA (1)...(19): siRNA sense strand
aaagaggaaccuucucaga

SEQ ID NO: 348237 - RNA, 19 nt, Homo sapiens
  misc_RNA (1)...(19): siRNA sense strand
cagcaaaggaaaccuaaag

SEQ ID NO: 348238 - RNA, 19 nt, Homo sapiens
  misc_RNA (1)...(19): siRNA sense strand
gaaaccuaaaggcaauaaa

SEQ ID NO: 348239 - RNA, 19 nt, Homo sapiens
  misc_RNA (1)...(19): siRNA sense strand
acaaagaggaaccuucuca

SEQ ID NO: 348240 - RNA, 19 nt, Homo sapiens
  misc_RNA (1)...(19): siRNA sense strand
caucauccaugggugacaa

SEQ ID NO: 348241 - RNA, 19 nt, Homo sapiens
  misc_RNA (1)...(19): siRNA sense strand
ccucauggauugguguguu

SEQ ID NO: 348242 - RNA, 19 nt, Homo sapiens
  misc_RNA (1)...(19): siRNA sense strand
auccaugggugacaauaaa

SEQ ID NO: 348243 - RNA, 19 nt, Homo sapiens
  misc_RNA (1)...(19): siRNA sense strand
auaaaugguuuggcuuuca

SEQ ID NO: 348244 - RNA, 19 nt, Homo sapiens
  misc_RNA (1)...(19): siRNA sense strand
caaaaugcuucucugaauc

SEQ ID NO: 348245 - RNA, 19 nt, Homo sapiens
  misc_RNA (1)...(19): siRNA sense strand
gagguccuaggaaucauuu

SEQ ID NO: 348246 - RNA, 19 nt, Homo sapiens
  misc_RNA (1)...(19): siRNA sense strand
ggccugugcuucaaagaac

SEQ ID NO: 348247 - RNA, 19 nt, Homo sapiens
  misc_RNA (1)...(19): siRNA sense strand
cguaacagcagucaucauc

SEQ ID NO: 348248 - RNA, 19 nt, Homo sapiens
  misc_RNA (1)...(19): siRNA sense strand
ccaaagccgcagcaaagga

SEQ ID NO: 348249 - RNA, 19 nt, Homo sapiens
  misc_RNA (1)...(19): siRNA sense strand
gauaaaagacucagaucau

SEQ ID NO: 348250 - RNA, 19 nt, Homo sapiens
  misc_RNA (1)...(19): siRNA sense strand
cugaggaguggauuacaua

SEQ ID NO: 348251 - RNA, 19 nt, Homo sapiens
  misc_RNA (1)...(19): siRNA sense strand
gaauacaagaacgcagaaa

SEQ ID NO: 348252 - RNA, 19 nt, Homo sapiens
  misc_RNA (1)...(19): siRNA sense strand
augcuucucugaaucauca

SEQ ID NO: 348253 - RNA, 19 nt, Homo sapiens
  misc_RNA (1)...(19): siRNA sense strand
gcaauaaaagcuccauuuc

SEQ ID NO: 348254 - RNA, 19 nt, Homo sapiens
  misc_RNA (1)...(19): siRNA sense strand
guacguggacuuauaucag

SEQ ID NO: 348255 - RNA, 19 nt, Homo sapiens
  misc_RNA (1)...(19): siRNA sense strand
cauccaugggugacaauaa

SEQ ID NO: 348256 - RNA, 19 nt, Homo sapiens
  misc_RNA (1)...(19): siRNA sense strand
gcagcaaaggaaaccuaaa

SEQ ID NO: 348257 - RNA, 19 nt, Homo sapiens
  misc_RNA (1)...(19): siRNA sense strand
ccugaggaguggauuacau

SEQ ID NO: 348258 - RNA, 19 nt, Homo sapiens
  misc_RNA (1)...(19): siRNA sense strand
gacccaaagccgcagcaaa

SEQ ID NO: 348259 - RNA, 19 nt, Homo sapiens
  misc_RNA (1)...(19): siRNA sense strand
uauaugacugccaagguuu

SEQ ID NO: 348260 - RNA, 19 nt, Homo sapiens
  misc_RNA (1)...(19): siRNA sense strand
cauguacguggacuuauau

SEQ ID NO: 348261 - RNA, 19 nt, Homo sapiens
  misc_RNA (1)...(19): siRNA sense strand
aauaaaagcuccauuucag

SEQ ID NO: 348262 - RNA, 19 nt, Homo sapiens
  misc_RNA (1)...(19): siRNA sense strand
aauaaaugguuuggcuuuc

SEQ ID NO: 348263 - RNA, 19 nt, Homo sapiens
  misc_RNA (1)...(19): siRNA sense strand
ucaggaaccgaacaggaaa

SEQ ID NO: 348264 - RNA, 19 nt, Homo sapiens
  misc_RNA (1)...(19): siRNA sense strand
gauggccacuguguuaaaa

SEQ ID NO: 348265 - RNA, 19 nt, Homo sapiens
  misc_RNA (1)...(19): siRNA sense strand
cagaaagcacguccuugug

SEQ ID NO: 348266 - RNA, 19 nt, Homo sapiens
  misc_RNA (1)...(19): siRNA sense strand
agaccaguguggaucuuca

SEQ ID NO: 348267 - RNA, 19 nt, Homo sapiens
  misc_RNA (1)...(19): siRNA sense strand
cucauggauugguguguuu

SEQ ID NO: 348268 - RNA, 19 nt, Homo sapiens
  misc_RNA (1)...(19): siRNA sense strand
cgaauacaagaacgcagaa

SEQ ID NO: 348269 - RNA, 19 nt, Homo sapiens
  misc_RNA (1)...(19): siRNA sense strand
cauuugcauuguccugaug

SEQ ID NO: 348270 - RNA, 19 nt, Homo sapiens
  misc_RNA (1)...(19): siRNA sense strand
caauaaaagcuccauuuca

SEQ ID NO: 348271 - RNA, 19 nt, Homo sapiens
  misc_RNA (1)...(19): siRNA sense strand
acguaacugugcaaugcua

SEQ ID NO: 348272 - RNA, 19 nt, Homo sapiens
  misc_RNA (1)...(19): siRNA sense strand
ggcaauaaaagcuccauuu

SEQ ID NO: 348273 - RNA, 19 nt, Homo sapiens
  misc_RNA (1)...(19): siRNA sense strand
gcucacugccgagguccua

SEQ ID NO: 348274 - RNA, 19 nt, Homo sapiens
  misc_RNA (1)...(19): siRNA sense strand
ucuagucugcuuucuauag

SEQ ID NO: 348275 - RNA, 19 nt, Homo sapiens
  misc_RNA (1)...(19): siRNA sense strand
ggaguggauuacauauucc

SEQ ID NO: 348276 - RNA, 19 nt, Homo sapiens
  misc_RNA (1)...(19): siRNA sense strand
ugauggccacuguguuaaa

SEQ ID NO: 348277 - RNA, 19 nt, Homo sapiens
  misc_RNA (1)...(19): siRNA sense strand
cugccgagguccuaggaau

SEQ ID NO: 348278 - RNA, 19 nt, Homo sapiens
  misc_RNA (1)...(19): siRNA sense strand
ggcuuucaaacaugagaua

SEQ ID NO: 348279 - RNA, 19 nt, Homo sapiens
  misc_RNA (1)...(19): siRNA sense strand
ggaaccgaacaggaaauau

SEQ ID NO: 348280 - RNA, 19 nt, Homo sapiens
  misc_RNA (1)...(19): siRNA sense strand
ucauuugcauuguccugau

SEQ ID NO: 348281 - RNA, 19 nt, Homo sapiens
  misc_RNA (1)...(19): siRNA sense strand
gccgagguccuaggaauca

SEQ ID NO: 348282 - RNA, 19 nt, Homo sapiens
  misc_RNA (1)...(19): siRNA sense strand
caacauagaacuccagaaa

SEQ ID NO: 348283 - RNA, 19 nt, Homo sapiens
  misc_RNA (1)...(19): siRNA sense strand
gagcuccagucaacaauuu

SEQ ID NO: 348284 - RNA, 19 nt, Homo sapiens
  misc_RNA (1)...(19): siRNA sense strand
guaagcaacagcucauuua

SEQ ID NO: 348285 - RNA, 19 nt, Homo sapiens
  misc_RNA (1)...(19): siRNA sense strand
gcucugcacucucccagua

SEQ ID NO: 348286 - RNA, 19 nt, Homo sapiens
  misc_RNA (1)...(19): siRNA sense strand
gaugaauccugugaagaua

SEQ ID NO: 348287 - RNA, 19 nt, Homo sapiens
  misc_RNA (1)...(19): siRNA sense strand
acauagaacuccagaaaga

SEQ ID NO: 348288 - RNA, 19 nt, Homo sapiens
  misc_RNA (1)...(19): siRNA sense strand
aaacacagaugaacuggau

SEQ ID NO: 348289 - RNA, 19 nt, Homo sapiens
  misc_RNA (1)...(19): siRNA sense strand
gugcaacuguuacuucauu

SEQ ID NO: 348290 - RNA, 19 nt, Homo sapiens
  misc_RNA (1)...(19): siRNA sense strand
gaaaugcuuuagaugaauc

SEQ ID NO: 348291 - RNA, 19 nt, Homo sapiens
  misc_RNA (1)...(19): siRNA sense strand
ggaaaugcuuuagaugaau

SEQ ID NO: 348292 - RNA, 19 nt, Homo sapiens
  misc_RNA (1)...(19): siRNA sense strand
gagaauggcucugcacucu

SEQ ID NO: 348293 - RNA, 19 nt, Homo sapiens
  misc_RNA (1)...(19): siRNA sense strand
uggaaaugcuuuagaugaa

SEQ ID NO: 348294 - RNA, 19 nt, Homo sapiens
  misc_RNA (1)...(19): siRNA sense strand
ugaauccugugaagauaaa

SEQ ID NO: 348295 - RNA, 19 nt, Homo sapiens
  misc_RNA (1)...(19): siRNA sense strand
gaacgaaagucggcaucuc

SEQ ID NO: 348296 - RNA, 19 nt, Homo sapiens
  misc_RNA (1)...(19): siRNA sense strand
agaacugcauagcguauaa

SEQ ID NO: 348297 - RNA, 19 nt, Homo sapiens
  misc_RNA (1)...(19): siRNA sense strand
cagaugaacuggauuuuau

SEQ ID NO: 348298 - RNA, 19 nt, Homo sapiens
  misc_RNA (1)...(19): siRNA sense strand
ggauuggacucucuuacag

SEQ ID NO: 348299 - RNA, 19 nt, Homo sapiens
  misc_RNA (1)...(19): siRNA sense strand
caaauggaaaugcuuuaga

SEQ ID NO: 348300 - RNA, 19 nt, Homo sapiens
  misc_RNA (1)...(19): siRNA sense strand
uaagcaacagcucauuuaa

SEQ ID NO: 348301 - RNA, 19 nt, Homo sapiens
  misc_RNA (1)...(19): siRNA sense strand
acacagaugaacuggauuu

SEQ ID NO: 348302 - RNA, 19 nt, Homo sapiens
  misc_RNA (1)...(19): siRNA sense strand
gcauagcguauaauccaaa

SEQ ID NO: 348303 - RNA, 19 nt, Homo sapiens
  misc_RNA (1)...(19): siRNA sense strand
gaguauugagccagcauuu

SEQ ID NO: 348304 - RNA, 19 nt, Homo sapiens
  misc_RNA (1)...(19): siRNA sense strand
uuuaugagcuccagucaac

SEQ ID NO: 348305 - RNA, 19 nt, Homo sapiens
  misc_RNA (1)...(19): siRNA sense strand
guauugagccagcauuuac

SEQ ID NO: 348306 - RNA, 19 nt, Homo sapiens
  misc_RNA (1)...(19): siRNA sense strand
guuacuucauuuccaguga

SEQ ID NO: 348307 - RNA, 19 nt, Homo sapiens
  misc_RNA (1)...(19): siRNA sense strand
uuagaugaauccugugaag

SEQ ID NO: 348308 - RNA, 19 nt, Homo sapiens
  misc_RNA (1)...(19): siRNA sense strand
gcacucucccaguaucuau

SEQ ID NO: 348309 - RNA, 19 nt, Homo sapiens
  misc_RNA (1)...(19): siRNA sense strand
gagcacaccgccugguugu

SEQ ID NO: 348310 - RNA, 19 nt, Homo sapiens
  misc_RNA (1)...(19): siRNA sense strand
ucagaaauccagccugcuu

SEQ ID NO: 348311 - RNA, 19 nt, Homo sapiens
  misc_RNA (1)...(19): siRNA sense strand
cagaaaacuuggaacgaaa

SEQ ID NO: 348312 - RNA, 19 nt, Homo sapiens
  misc_RNA (1)...(19): siRNA sense strand
cauagcguauaauccaaau

SEQ ID NO: 348313 - RNA, 19 nt, Homo sapiens
  misc_RNA (1)...(19): siRNA sense strand
gcaacuguuacuucauuuc

SEQ ID NO: 348314 - RNA, 19 nt, Homo sapiens
  misc_RNA (1)...(19): siRNA sense strand
uguaagcaacagcucauuu

SEQ ID NO: 348315 - RNA, 19 nt, Homo sapiens
  misc_RNA (1)...(19): siRNA sense strand
ggguaccggugcaacuguu

SEQ ID NO: 348316 - RNA, 19 nt, Homo sapiens
  misc_RNA (1)...(19): siRNA sense strand
agaugaauccugugaagau

SEQ ID NO: 348317 - RNA, 19 nt, Homo sapiens
  misc_RNA (1)...(19): siRNA sense strand
gaacugcauagcguauaau

SEQ ID NO: 348318 - RNA, 19 nt, Homo sapiens
  misc_RNA (1)...(19): siRNA sense strand
acagaaaacuuggaacgaa

SEQ ID NO: 348319 - RNA, 19 nt, Homo sapiens
  misc_RNA (1)...(19): siRNA sense strand
gguaccggugcaacuguua

SEQ ID NO: 348320 - RNA, 19 nt, Homo sapiens
  misc_RNA (1)...(19): siRNA sense strand
caguaucuauuuccaucau

SEQ ID NO: 348321 - RNA, 19 nt, Homo sapiens
  misc_RNA (1)...(19): siRNA sense strand
gacucugacugcuguucuu

SEQ ID NO: 348322 - RNA, 19 nt, Homo sapiens
  misc_RNA (1)...(19): siRNA sense strand
aaagaacugcauagcguau

SEQ ID NO: 348323 - RNA, 19 nt, Homo sapiens
  misc_RNA (1)...(19): siRNA sense strand
uaugagcuccagucaacaa

SEQ ID NO: 348324 - RNA, 19 nt, Homo sapiens
  misc_RNA (1)...(19): siRNA sense strand
uagcguauaauccaaaugg

SEQ ID NO: 348325 - RNA, 19 nt, Homo sapiens
  misc_RNA (1)...(19): siRNA sense strand
cggugcaacuguuacuuca

SEQ ID NO: 348326 - RNA, 19 nt, Homo sapiens
  misc_RNA (1)...(19): siRNA sense strand
ccaaauggaaaugcuuuag

SEQ ID NO: 348327 - RNA, 19 nt, Homo sapiens
  misc_RNA (1)...(19): siRNA sense strand
ccagccugcuucagcuuca

SEQ ID NO: 348328 - RNA, 19 nt, Homo sapiens
  misc_RNA (1)...(19): siRNA sense strand
auggaaaugcuuuagauga

SEQ ID NO: 348329 - RNA, 19 nt, Homo sapiens
  misc_RNA (1)...(19): siRNA sense strand
ccagugaacagaaaacuug

SEQ ID NO: 348330 - RNA, 19 nt, Homo sapiens
  misc_RNA (1)...(19): siRNA sense strand
aguauugagccagcauuua

SEQ ID NO: 348331 - RNA, 19 nt, Homo sapiens
  misc_RNA (1)...(19): siRNA sense strand
uuacuggauuggacucucu

SEQ ID NO: 348332 - RNA, 19 nt, Homo sapiens
  misc_RNA (1)...(19): siRNA sense strand
uccaggacccaacauagaa

SEQ ID NO: 348333 - RNA, 19 nt, Homo sapiens
  misc_RNA (1)...(19): siRNA sense strand
caacauagaacuccagaaa

SEQ ID NO: 348334 - RNA, 19 nt, Homo sapiens
  misc_RNA (1)...(19): siRNA sense strand
gagcuccagucaacaauuu

SEQ ID NO: 348335 - RNA, 19 nt, Homo sapiens
  misc_RNA (1)...(19): siRNA sense strand
guaagcaacagcucauuua

SEQ ID NO: 348336 - RNA, 19 nt, Homo sapiens
  misc_RNA (1)...(19): siRNA sense strand
gcucugcacucucccagua

SEQ ID NO: 348337 - RNA, 19 nt, Homo sapiens
  misc_RNA (1)...(19): siRNA sense strand
gaugaauccugugaagaua

SEQ ID NO: 348338 - RNA, 19 nt, Homo sapiens
  misc_RNA (1)...(19): siRNA sense strand
acauagaacuccagaaaga

SEQ ID NO: 348339 - RNA, 19 nt, Homo sapiens
  misc_RNA (1)...(19): siRNA sense strand
aaacacagaugaacuggau

SEQ ID NO: 348340 - RNA, 19 nt, Homo sapiens
  misc_RNA (1)...(19): siRNA sense strand
gugcaacuguuacuucauu

SEQ ID NO: 348341 - RNA, 19 nt, Homo sapiens
  misc_RNA (1)...(19): siRNA sense strand
gaaaugcuuuagaugaauc

SEQ ID NO: 348342 - RNA, 19 nt, Homo sapiens
  misc_RNA (1)...(19): siRNA sense strand
ggaaaugcuuuagaugaau

SEQ ID NO: 348343 - RNA, 19 nt, Homo sapiens
  misc_RNA (1)...(19): siRNA sense strand
gagaauggcucugcacucu

SEQ ID NO: 348344 - RNA, 19 nt, Homo sapiens
  misc_RNA (1)...(19): siRNA sense strand
uggaaaugcuuuagaugaa

SEQ ID NO: 348345 - RNA, 19 nt, Homo sapiens
  misc_RNA (1)...(19): siRNA sense strand
ugaauccugugaagauaaa

SEQ ID NO: 348346 - RNA, 19 nt, Homo sapiens
  misc_RNA (1)...(19): siRNA sense strand
gaacgaaagucggcaucuc

SEQ ID NO: 348347 - RNA, 19 nt, Homo sapiens
  misc_RNA (1)...(19): siRNA sense strand
agaacugcauagcguauaa

SEQ ID NO: 348348 - RNA, 19 nt, Homo sapiens
  misc_RNA (1)...(19): siRNA sense strand
cagaugaacuggauuuuau

SEQ ID NO: 348349 - RNA, 19 nt, Homo sapiens
  misc_RNA (1)...(19): siRNA sense strand
ggauuggacucucuuacag

SEQ ID NO: 348350 - RNA, 19 nt, Homo sapiens
  misc_RNA (1)...(19): siRNA sense strand
caaauggaaaugcuuuaga

SEQ ID NO: 348351 - RNA, 19 nt, Homo sapiens
  misc_RNA (1)...(19): siRNA sense strand
uaagcaacagcucauuuaa

SEQ ID NO: 348352 - RNA, 19 nt, Homo sapiens
  misc_RNA (1)...(19): siRNA sense strand
acacagaugaacuggauuu

SEQ ID NO: 348353 - RNA, 19 nt, Homo sapiens
  misc_RNA (1)...(19): siRNA sense strand
gcauagcguauaauccaaa

SEQ ID NO: 348354 - RNA, 19 nt, Homo sapiens
  misc_RNA (1)...(19): siRNA sense strand
gaguauugagccagcauuu

SEQ ID NO: 348355 - RNA, 19 nt, Homo sapiens
  misc_RNA (1)...(19): siRNA sense strand
uuuaugagcuccagucaac

SEQ ID NO: 348356 - RNA, 19 nt, Homo sapiens
  misc_RNA (1)...(19): siRNA sense strand
guauugagccagcauuuac

SEQ ID NO: 348357 - RNA, 19 nt, Homo sapiens
  misc_RNA (1)...(19): siRNA sense strand
guuacuucauuuccaguga

SEQ ID NO: 348358 - RNA, 19 nt, Homo sapiens
  misc_RNA (1)...(19): siRNA sense strand
uuagaugaauccugugaag

SEQ ID NO: 348359 - RNA, 19 nt, Homo sapiens
  misc_RNA (1)...(19): siRNA sense strand
gcacucucccaguaucuau

SEQ ID NO: 348360 - RNA, 19 nt, Homo sapiens
  misc_RNA (1)...(19): siRNA sense strand
gagcacaccgccugguugu

SEQ ID NO: 348361 - RNA, 19 nt, Homo sapiens
  misc_RNA (1)...(19): siRNA sense strand
ucagaaauccagccugcuu

SEQ ID NO: 348362 - RNA, 19 nt, Homo sapiens
  misc_RNA (1)...(19): siRNA sense strand
cagaaaacuuggaacgaaa

SEQ ID NO: 348363 - RNA, 19 nt, Homo sapiens
  misc_RNA (1)...(19): siRNA sense strand
cauagcguauaauccaaau

SEQ ID NO: 348364 - RNA, 19 nt, Homo sapiens
  misc_RNA (1)...(19): siRNA sense strand
gcaacuguuacuucauuuc

SEQ ID NO: 348365 - RNA, 19 nt, Homo sapiens
  misc_RNA (1)...(19): siRNA sense strand
uguaagcaacagcucauuu

SEQ ID NO: 348366 - RNA, 19 nt, Homo sapiens
  misc_RNA (1)...(19): siRNA sense strand
ggguaccggugcaacuguu

SEQ ID NO: 348367 - RNA, 19 nt, Homo sapiens
  misc_RNA (1)...(19): siRNA sense strand
agaugaauccugugaagau

SEQ ID NO: 348368 - RNA, 19 nt, Homo sapiens
  misc_RNA (1)...(19): siRNA sense strand
gaacugcauagcguauaau

SEQ ID NO: 348369 - RNA, 19 nt, Homo sapiens
  misc_RNA (1)...(19): siRNA sense strand
acagaaaacuuggaacgaa

SEQ ID NO: 348370 - RNA, 19 nt, Homo sapiens
  misc_RNA (1)...(19): siRNA sense strand
gguaccggugcaacuguua

SEQ ID NO: 348371 - RNA, 19 nt, Homo sapiens
  misc_RNA (1)...(19): siRNA sense strand
caguaucuauuuccaucau

SEQ ID NO: 348372 - RNA, 19 nt, Homo sapiens
  misc_RNA (1)...(19): siRNA sense strand
gacucugacugcuguucuu

SEQ ID NO: 348373 - RNA, 19 nt, Homo sapiens
  misc_RNA (1)...(19): siRNA sense strand
aaagaacugcauagcguau

SEQ ID NO: 348374 - RNA, 19 nt, Homo sapiens
  misc_RNA (1)...(19): siRNA sense strand
uaugagcuccagucaacaa

SEQ ID NO: 348375 - RNA, 19 nt, Homo sapiens
  misc_RNA (1)...(19): siRNA sense strand
uagcguauaauccaaaugg

SEQ ID NO: 348376 - RNA, 19 nt, Homo sapiens
  misc_RNA (1)...(19): siRNA sense strand
cggugcaacuguuacuuca

SEQ ID NO: 348377 - RNA, 19 nt, Homo sapiens
  misc_RNA (1)...(19): siRNA sense strand
ccaaauggaaaugcuuuag

SEQ ID NO: 348378 - RNA, 19 nt, Homo sapiens
  misc_RNA (1)...(19): siRNA sense strand
ccagccugcuucagcuuca

SEQ ID NO: 348379 - RNA, 19 nt, Homo sapiens
  misc_RNA (1)...(19): siRNA sense strand
auggaaaugcuuuagauga

SEQ ID NO: 348380 - RNA, 19 nt, Homo sapiens
  misc_RNA (1)...(19): siRNA sense strand
ccagugaacagaaaacuug

SEQ ID NO: 348381 - RNA, 19 nt, Homo sapiens
  misc_RNA (1)...(19): siRNA sense strand
aguauugagccagcauuua

SEQ ID NO: 348382 - RNA, 19 nt, Homo sapiens
  misc_RNA (1)...(19): siRNA sense strand
uuacuggauuggacucucu

SEQ ID NO: 348383 - RNA, 19 nt, Homo sapiens
  misc_RNA (1)...(19): siRNA sense strand
uccaggacccaacauagaa

SEQ ID NO: 348384 - RNA, 19 nt, Homo sapiens
  misc_RNA (1)...(19): siRNA sense strand
ggaagaagcuugcugaguu

SEQ ID NO: 348385 - RNA, 19 nt, Homo sapiens
  misc_RNA (1)...(19): siRNA sense strand
agaaagagcugaacaagaa

SEQ ID NO: 348386 - RNA, 19 nt, Homo sapiens
  misc_RNA (1)...(19): siRNA sense strand
ggaagcagcugauuauuag

SEQ ID NO: 348387 - RNA, 19 nt, Homo sapiens
  misc_RNA (1)...(19): siRNA sense strand
gaagauuacuacaccgaua

SEQ ID NO: 348388 - RNA, 19 nt, Homo sapiens
  misc_RNA (1)...(19): siRNA sense strand
gcaagucacccaucagaua

SEQ ID NO: 348389 - RNA, 19 nt, Homo sapiens
  misc_RNA (1)...(19): siRNA sense strand
gcaauaggguggcacagaa

SEQ ID NO: 348390 - RNA, 19 nt, Homo sapiens
  misc_RNA (1)...(19): siRNA sense strand
cuacagagaucccacacua

SEQ ID NO: 348391 - RNA, 19 nt, Homo sapiens
  misc_RNA (1)...(19): siRNA sense strand
gaagaaggcuuuuaagaug

SEQ ID NO: 348392 - RNA, 19 nt, Homo sapiens
  misc_RNA (1)...(19): siRNA sense strand
gagcuugugugcccugaua

SEQ ID NO: 348393 - RNA, 19 nt, Homo sapiens
  misc_RNA (1)...(19): siRNA sense strand
ggagcuaccuuccugugua

SEQ ID NO: 348394 - RNA, 19 nt, Homo sapiens
  misc_RNA (1)...(19): siRNA sense strand
ggaaugaccugccaguaca

SEQ ID NO: 348395 - RNA, 19 nt, Homo sapiens
  misc_RNA (1)...(19): siRNA sense strand
gaagugagcgcaagcuuga

SEQ ID NO: 348396 - RNA, 19 nt, Homo sapiens
  misc_RNA (1)...(19): siRNA sense strand
gaagauucaugcaggaaga

SEQ ID NO: 348397 - RNA, 19 nt, Homo sapiens
  misc_RNA (1)...(19): siRNA sense strand
gaagaagcuugcugaguuc

SEQ ID NO: 348398 - RNA, 19 nt, Homo sapiens
  misc_RNA (1)...(19): siRNA sense strand
ccacacuacuuccggcuua

SEQ ID NO: 348399 - RNA, 19 nt, Homo sapiens
  misc_RNA (1)...(19): siRNA sense strand
gaacuacauugggauaaau

SEQ ID NO: 348400 - RNA, 19 nt, Homo sapiens
  misc_RNA (1)...(19): siRNA sense strand
ugaaauugguccaguuuau

SEQ ID NO: 348401 - RNA, 19 nt, Homo sapiens
  misc_RNA (1)...(19): siRNA sense strand
ggccaaggcuccuaugaug

SEQ ID NO: 348402 - RNA, 19 nt, Homo sapiens
  misc_RNA (1)...(19): siRNA sense strand
gagaugguguuuacucaga

SEQ ID NO: 348403 - RNA, 19 nt, Homo sapiens
  misc_RNA (1)...(19): siRNA sense strand
ggaaaggccugaggaugug

SEQ ID NO: 348404 - RNA, 19 nt, Homo sapiens
  misc_RNA (1)...(19): siRNA sense strand
ggagaccuauguuccagaa

SEQ ID NO: 348405 - RNA, 19 nt, Homo sapiens
  misc_RNA (1)...(19): siRNA sense strand
cccgggacaugcuauauua

SEQ ID NO: 348406 - RNA, 19 nt, Homo sapiens
  misc_RNA (1)...(19): siRNA sense strand
gagagaugguguuuacuca

SEQ ID NO: 348407 - RNA, 19 nt, Homo sapiens
  misc_RNA (1)...(19): siRNA sense strand
ggugaaaggcucaguagaa

SEQ ID NO: 348408 - RNA, 19 nt, Homo sapiens
  misc_RNA (1)...(19): siRNA sense strand
gcuaggaagcagcugauua

SEQ ID NO: 348409 - RNA, 19 nt, Homo sapiens
  misc_RNA (1)...(19): siRNA sense strand
ggaugaguuugaaauguug

SEQ ID NO: 348410 - RNA, 19 nt, Homo sapiens
  misc_RNA (1)...(19): siRNA sense strand
gaagacaaccaucacacuu

SEQ ID NO: 348411 - RNA, 19 nt, Homo sapiens
  misc_RNA (1)...(19): siRNA sense strand
gaagcuugcugaguucgaa

SEQ ID NO: 348412 - RNA, 19 nt, Homo sapiens
  misc_RNA (1)...(19): siRNA sense strand
cacagaagcucaucucagu

SEQ ID NO: 348413 - RNA, 19 nt, Homo sapiens
  misc_RNA (1)...(19): siRNA sense strand
gagagcagcuggauuuuau

SEQ ID NO: 348414 - RNA, 19 nt, Homo sapiens
  misc_RNA (1)...(19): siRNA sense strand
ggagaacuacauugggaua

SEQ ID NO: 348415 - RNA, 19 nt, Homo sapiens
  misc_RNA (1)...(19): siRNA sense strand
ccaguacauuguccaguuu

SEQ ID NO: 348416 - RNA, 19 nt, Homo sapiens
  misc_RNA (1)...(19): siRNA sense strand
gagcuaccuuccuguguau

SEQ ID NO: 348417 - RNA, 19 nt, Homo sapiens
  misc_RNA (1)...(19): siRNA sense strand
ggaauugggcagcugauug

SEQ ID NO: 348418 - RNA, 19 nt, Homo sapiens
  misc_RNA (1)...(19): siRNA sense strand
agagagagaugguguuuac

SEQ ID NO: 348419 - RNA, 19 nt, Homo sapiens
  misc_RNA (1)...(19): siRNA sense strand
gccaguacauuguccaguu

SEQ ID NO: 348420 - RNA, 19 nt, Homo sapiens
  misc_RNA (1)...(19): siRNA sense strand
gaccaacacuacagagauc

SEQ ID NO: 348421 - RNA, 19 nt, Homo sapiens
  misc_RNA (1)...(19): siRNA sense strand
caaaacagccugagcaaaa

SEQ ID NO: 348422 - RNA, 19 nt, Homo sapiens
  misc_RNA (1)...(19): siRNA sense strand
agacaaccaucacacuuau

SEQ ID NO: 348423 - RNA, 19 nt, Homo sapiens
  misc_RNA (1)...(19): siRNA sense strand
ugaguucgaagaugaguua

SEQ ID NO: 348424 - RNA, 19 nt, Homo sapiens
  misc_RNA (1)...(19): siRNA sense strand
gaaauugguccaguuuaug

SEQ ID NO: 348425 - RNA, 19 nt, Homo sapiens
  misc_RNA (1)...(19): siRNA sense strand
gaacccuucgccugaauaa

SEQ ID NO: 348426 - RNA, 19 nt, Homo sapiens
  misc_RNA (1)...(19): siRNA sense strand
ggacugcaaguggccauua

SEQ ID NO: 348427 - RNA, 19 nt, Homo sapiens
  misc_RNA (1)...(19): siRNA sense strand
gaagaaagagcugaacaag

SEQ ID NO: 348428 - RNA, 19 nt, Homo sapiens
  misc_RNA (1)...(19): siRNA sense strand
gcccugagauccugcacaa

SEQ ID NO: 348429 - RNA, 19 nt, Homo sapiens
  misc_RNA (1)...(19): siRNA sense strand
aggaagcagcugauuauua

SEQ ID NO: 348430 - RNA, 19 nt, Homo sapiens
  misc_RNA (1)...(19): siRNA sense strand
uggaugaguuugaaauguu

SEQ ID NO: 348431 - RNA, 19 nt, Homo sapiens
  misc_RNA (1)...(19): siRNA sense strand
cgucucagcccuucaguuu

SEQ ID NO: 348432 - RNA, 19 nt, Homo sapiens
  misc_RNA (1)...(19): siRNA sense strand
gcccagcacuucauacgau

SEQ ID NO: 348433 - RNA, 19 nt, Homo sapiens
  misc_RNA (1)...(19): siRNA sense strand
ggaaguccuccuuguauuc

SEQ ID NO: 348434 - RNA, 19 nt, Homo sapiens
  misc_RNA (1)...(19): siRNA sense strand
ugaagagugucuccagaug

SEQ ID NO: 348435 - RNA, 19 nt, Homo sapiens
  misc_RNA (1)...(19): siRNA sense strand
ccaaagaaaggaccagaga

SEQ ID NO: 348436 - RNA, 19 nt, Homo sapiens
  misc_RNA (1)...(19): siRNA sense strand
aggaagagcugacccaucu

SEQ ID NO: 348437 - RNA, 19 nt, Homo sapiens
  misc_RNA (1)...(19): siRNA sense strand
cuggagagcucacagacuu

SEQ ID NO: 348438 - RNA, 19 nt, Homo sapiens
  misc_RNA (1)...(19): siRNA sense strand
gccagaagcaggaguguga

SEQ ID NO: 348439 - RNA, 19 nt, Homo sapiens
  misc_RNA (1)...(19): siRNA sense strand
agaccuauguuccagaaga

SEQ ID NO: 348440 - RNA, 19 nt, Homo sapiens
  misc_RNA (1)...(19): siRNA sense strand
ggagagcucacagacuuaa

SEQ ID NO: 348441 - RNA, 19 nt, Homo sapiens
  misc_RNA (1)...(19): siRNA sense strand
guucaaaacugacauuuag

SEQ ID NO: 348442 - RNA, 19 nt, Homo sapiens
  misc_RNA (1)...(19): siRNA sense strand
gcucccagcugaccagaca

SEQ ID NO: 348443 - RNA, 19 nt, Homo sapiens
  misc_RNA (1)...(19): siRNA sense strand
ccacugaggacccguguga

SEQ ID NO: 348444 - RNA, 19 nt, Homo sapiens
  misc_RNA (1)...(19): siRNA sense strand
aagacaaccaucacacuua

SEQ ID NO: 348445 - RNA, 19 nt, Homo sapiens
  misc_RNA (1)...(19): siRNA sense strand
gaucagcgacugccacauc

SEQ ID NO: 348446 - RNA, 19 nt, Homo sapiens
  misc_RNA (1)...(19): siRNA sense strand
cauggaauuuaacuccuaa

SEQ ID NO: 348447 - RNA, 19 nt, Homo sapiens
  misc_RNA (1)...(19): siRNA sense strand
aaagaagccagcaccgaua

SEQ ID NO: 348448 - RNA, 19 nt, Homo sapiens
  misc_RNA (1)...(19): siRNA sense strand
gcuccuaugaugagagaua

SEQ ID NO: 348449 - RNA, 19 nt, Homo sapiens
  misc_RNA (1)...(19): siRNA sense strand
gauaggagaauuccagagu

SEQ ID NO: 348450 - RNA, 19 nt, Homo sapiens
  misc_RNA (1)...(19): siRNA sense strand
agccugacauggaauuuaa

SEQ ID NO: 348451 - RNA, 19 nt, Homo sapiens
  misc_RNA (1)...(19): siRNA sense strand
cgugaggccugcacagcua

SEQ ID NO: 348452 - RNA, 19 nt, Homo sapiens
  misc_RNA (1)...(19): siRNA sense strand
gaccagccuucccaacaug

SEQ ID NO: 348453 - RNA, 19 nt, Homo sapiens
  misc_RNA (1)...(19): siRNA sense strand
cuaaggagagcucugauug

SEQ ID NO: 348454 - RNA, 19 nt, Homo sapiens
  misc_RNA (1)...(19): siRNA sense strand
acauugaggcugucuuuaa

SEQ ID NO: 348455 - RNA, 19 nt, Homo sapiens
  misc_RNA (1)...(19): siRNA sense strand
agaacuacauugggauaaa

SEQ ID NO: 348456 - RNA, 19 nt, Homo sapiens
  misc_RNA (1)...(19): siRNA sense strand
cuaggaagcagcugauuau

SEQ ID NO: 348457 - RNA, 19 nt, Homo sapiens
  misc_RNA (1)...(19): siRNA sense strand
gggacaugcuauauuagug

SEQ ID NO: 348458 - RNA, 19 nt, Homo sapiens
  misc_RNA (1)...(19): siRNA sense strand
agagagagcuagacagacu

SEQ ID NO: 348459 - RNA, 19 nt, Homo sapiens
  misc_RNA (1)...(19): siRNA sense strand
gaucuauauuucuggugaa

SEQ ID NO: 348460 - RNA, 19 nt, Homo sapiens
  misc_RNA (1)...(19): siRNA sense strand
gcagccagguggagguuag

SEQ ID NO: 348461 - RNA, 19 nt, Homo sapiens
  misc_RNA (1)...(19): siRNA sense strand
aaugguggcuccuggaaug

SEQ ID NO: 348462 - RNA, 19 nt, Homo sapiens
  misc_RNA (1)...(19): siRNA sense strand
ugccgaagcuacuggacua

SEQ ID NO: 348463 - RNA, 19 nt, Homo sapiens
  misc_RNA (1)...(19): siRNA sense strand
gcaguaccaucuacaucuc

SEQ ID NO: 348464 - RNA, 19 nt, Homo sapiens
  misc_RNA (1)...(19): siRNA sense strand
ggucaucggcgacgaagug

SEQ ID NO: 348465 - RNA, 19 nt, Homo sapiens
  misc_RNA (1)...(19): siRNA sense strand
ccauuaccaucucuaagga

SEQ ID NO: 348466 - RNA, 19 nt, Homo sapiens
  misc_RNA (1)...(19): siRNA sense strand
uaaaugugaagaaggcuuu

SEQ ID NO: 348467 - RNA, 19 nt, Homo sapiens
  misc_RNA (1)...(19): siRNA sense strand
uugcugaguucgaagauga

SEQ ID NO: 348468 - RNA, 19 nt, Homo sapiens
  misc_RNA (1)...(19): siRNA sense strand
uuugggaccugcuuuguga

SEQ ID NO: 348469 - RNA, 19 nt, Homo sapiens
  misc_RNA (1)...(19): siRNA sense strand
caucggaauucagccauga

SEQ ID NO: 348470 - RNA, 19 nt, Homo sapiens
  misc_RNA (1)...(19): siRNA sense strand
ggccugcccucaucaucaa

SEQ ID NO: 348471 - RNA, 19 nt, Homo sapiens
  misc_RNA (1)...(19): siRNA sense strand
aaauguggguuucaguguu

SEQ ID NO: 348472 - RNA, 19 nt, Homo sapiens
  misc_RNA (1)...(19): siRNA sense strand
auaggagaauuccagagua

SEQ ID NO: 348473 - RNA, 19 nt, Homo sapiens
  misc_RNA (1)...(19): siRNA sense strand
caaagaaaggaccagagaa

SEQ ID NO: 348474 - RNA, 19 nt, Homo sapiens
  misc_RNA (1)...(19): siRNA sense strand
cauugaggcugucuuuaag

SEQ ID NO: 348475 - RNA, 19 nt, Homo sapiens
  misc_RNA (1)...(19): siRNA sense strand
uggaaguccuccuuguauu

SEQ ID NO: 348476 - RNA, 19 nt, Homo sapiens
  misc_RNA (1)...(19): siRNA sense strand
gaccaccuccuacacuauu

SEQ ID NO: 348477 - RNA, 19 nt, Homo sapiens
  misc_RNA (1)...(19): siRNA sense strand
uugggcagcugauugcuuu

SEQ ID NO: 348478 - RNA, 19 nt, Homo sapiens
  misc_RNA (1)...(19): siRNA sense strand
gagagagagaugguguuua

SEQ ID NO: 348479 - RNA, 19 nt, Homo sapiens
  misc_RNA (1)...(19): siRNA sense strand
cccaagauaucucgcacuu

SEQ ID NO: 348480 - RNA, 19 nt, Homo sapiens
  misc_RNA (1)...(19): siRNA sense strand
uuuaagauguggaacaaca

SEQ ID NO: 348481 - RNA, 19 nt, Homo sapiens
  misc_RNA (1)...(19): siRNA sense strand
gugaaaggcucaguagaac

SEQ ID NO: 348482 - RNA, 19 nt, Homo sapiens
  misc_RNA (1)...(19): siRNA sense strand
gcagcugauuauuagaaau

SEQ ID NO: 348483 - RNA, 19 nt, Homo sapiens
  misc_RNA (1)...(19): siRNA sense strand
ucgagagccuugucagguu

SEQ ID NO: 348484 - RNA, 19 nt, Homo sapiens
  misc_RNA (1)...(19): siRNA sense strand
ggaagaagcuugcugaguu

SEQ ID NO: 348485 - RNA, 19 nt, Homo sapiens
  misc_RNA (1)...(19): siRNA sense strand
agaaagagcugaacaagaa

SEQ ID NO: 348486 - RNA, 19 nt, Homo sapiens
  misc_RNA (1)...(19): siRNA sense strand
gaagauuacuacaccgaua

SEQ ID NO: 348487 - RNA, 19 nt, Homo sapiens
  misc_RNA (1)...(19): siRNA sense strand
ggaaugaccugccaguaca

SEQ ID NO: 348488 - RNA, 19 nt, Homo sapiens
  misc_RNA (1)...(19): siRNA sense strand
gaagugagcgcaagcuuga

SEQ ID NO: 348489 - RNA, 19 nt, Homo sapiens
  misc_RNA (1)...(19): siRNA sense strand
gaagauucaugcaggaaga

SEQ ID NO: 348490 - RNA, 19 nt, Homo sapiens
  misc_RNA (1)...(19): siRNA sense strand
gaagaagcuugcugaguuc

SEQ ID NO: 348491 - RNA, 19 nt, Homo sapiens
  misc_RNA (1)...(19): siRNA sense strand
ugaaauugguccaguuuau

SEQ ID NO: 348492 - RNA, 19 nt, Homo sapiens
  misc_RNA (1)...(19): siRNA sense strand
cccgggacaugcuauauua

SEQ ID NO: 348493 - RNA, 19 nt, Homo sapiens
  misc_RNA (1)...(19): siRNA sense strand
ggaugaguuugaaauguug

SEQ ID NO: 348494 - RNA, 19 nt, Homo sapiens
  misc_RNA (1)...(19): siRNA sense strand
gaagcuugcugaguucgaa

SEQ ID NO: 348495 - RNA, 19 nt, Homo sapiens
  misc_RNA (1)...(19): siRNA sense strand
ccaguacauuguccaguuu

SEQ ID NO: 348496 - RNA, 19 nt, Homo sapiens
  misc_RNA (1)...(19): siRNA sense strand
gccaguacauuguccaguu

SEQ ID NO: 348497 - RNA, 19 nt, Homo sapiens
  misc_RNA (1)...(19): siRNA sense strand
ugaguucgaagaugaguua

SEQ ID NO: 348498 - RNA, 19 nt, Homo sapiens
  misc_RNA (1)...(19): siRNA sense strand
gaaauugguccaguuuaug

SEQ ID NO: 348499 - RNA, 19 nt, Homo sapiens
  misc_RNA (1)...(19): siRNA sense strand
gaagaaagagcugaacaag

SEQ ID NO: 348500 - RNA, 19 nt, Homo sapiens
  misc_RNA (1)...(19): siRNA sense strand
ggaaguccuccuuguauuc

SEQ ID NO: 348501 - RNA, 19 nt, Homo sapiens
  misc_RNA (1)...(19): siRNA sense strand
ugaagagugucuccagaug

SEQ ID NO: 348502 - RNA, 19 nt, Homo sapiens
  misc_RNA (1)...(19): siRNA sense strand
uggaugaguuugaaauguu

SEQ ID NO: 348503 - RNA, 19 nt, Homo sapiens
  misc_RNA (1)...(19): siRNA sense strand
ccaaagaaaggaccagaga

SEQ ID NO: 348504 - RNA, 19 nt, Homo sapiens
  misc_RNA (1)...(19): siRNA sense strand
guucaaaacugacauuuag

SEQ ID NO: 348505 - RNA, 19 nt, Homo sapiens
  misc_RNA (1)...(19): siRNA sense strand
cauggaauuuaacuccuaa

SEQ ID NO: 348506 - RNA, 19 nt, Homo sapiens
  misc_RNA (1)...(19): siRNA sense strand
aaagaagccagcaccgaua

SEQ ID NO: 348507 - RNA, 19 nt, Homo sapiens
  misc_RNA (1)...(19): siRNA sense strand
gauaggagaauuccagagu

SEQ ID NO: 348508 - RNA, 19 nt, Homo sapiens
  misc_RNA (1)...(19): siRNA sense strand
agccugacauggaauuuaa

SEQ ID NO: 348509 - RNA, 19 nt, Homo sapiens
  misc_RNA (1)...(19): siRNA sense strand
gggacaugcuauauuagug

SEQ ID NO: 348510 - RNA, 19 nt, Homo sapiens
  misc_RNA (1)...(19): siRNA sense strand
agagagagcuagacagacu

SEQ ID NO: 348511 - RNA, 19 nt, Homo sapiens
  misc_RNA (1)...(19): siRNA sense strand
ggucaucggcgacgaagug

SEQ ID NO: 348512 - RNA, 19 nt, Homo sapiens
  misc_RNA (1)...(19): siRNA sense strand
aaugguggcuccuggaaug

SEQ ID NO: 348513 - RNA, 19 nt, Homo sapiens
  misc_RNA (1)...(19): siRNA sense strand
uugcugaguucgaagauga

SEQ ID NO: 348514 - RNA, 19 nt, Homo sapiens
  misc_RNA (1)...(19): siRNA sense strand
aaauguggguuucaguguu

SEQ ID NO: 348515 - RNA, 19 nt, Homo sapiens
  misc_RNA (1)...(19): siRNA sense strand
auaggagaauuccagagua

SEQ ID NO: 348516 - RNA, 19 nt, Homo sapiens
  misc_RNA (1)...(19): siRNA sense strand
caaagaaaggaccagagaa

SEQ ID NO: 348517 - RNA, 19 nt, Homo sapiens
  misc_RNA (1)...(19): siRNA sense strand
uggaaguccuccuuguauu

SEQ ID NO: 348518 - RNA, 19 nt, Homo sapiens
  misc_RNA (1)...(19): siRNA sense strand
ucgagagccuugucagguu

SEQ ID NO: 348519 - RNA, 19 nt, Homo sapiens
  misc_RNA (1)...(19): siRNA sense strand
ggaaugguggcuccuggaa

SEQ ID NO: 348520 - RNA, 19 nt, Homo sapiens
  misc_RNA (1)...(19): siRNA sense strand
gaaccucucaagaaagcaa

SEQ ID NO: 348521 - RNA, 19 nt, Homo sapiens
  misc_RNA (1)...(19): siRNA sense strand
acauggaauuuaacuccua

SEQ ID NO: 348522 - RNA, 19 nt, Homo sapiens
  misc_RNA (1)...(19): siRNA sense strand
cuacggaaacaucauuuga

SEQ ID NO: 348523 - RNA, 19 nt, Homo sapiens
  misc_RNA (1)...(19): siRNA sense strand
cccaagauaucucgcacuu

SEQ ID NO: 348524 - RNA, 19 nt, Homo sapiens
  misc_RNA (1)...(19): siRNA sense strand
aaauugguccaguuuauga

SEQ ID NO: 348525 - RNA, 19 nt, Homo sapiens
  misc_RNA (1)...(19): siRNA sense strand
acagagagagcuagacaga

SEQ ID NO: 348526 - RNA, 19 nt, Homo sapiens
  misc_RNA (1)...(19): siRNA sense strand
ccagucagcccacacacuu

SEQ ID NO: 348527 - RNA, 19 nt, Homo sapiens
  misc_RNA (1)...(19): siRNA sense strand
ccacagagagagcuagaca

SEQ ID NO: 348528 - RNA, 19 nt, Homo sapiens
  misc_RNA (1)...(19): siRNA sense strand
aauguggguuucaguguug

SEQ ID NO: 348529 - RNA, 19 nt, Homo sapiens
  misc_RNA (1)...(19): siRNA sense strand
uaauugcgcugcagaacac

SEQ ID NO: 348530 - RNA, 19 nt, Homo sapiens
  misc_RNA (1)...(19): siRNA sense strand
uaugaaauugguccaguuu

SEQ ID NO: 348531 - RNA, 19 nt, Homo sapiens
  misc_RNA (1)...(19): siRNA sense strand
cagcaccgauaggagaauu

SEQ ID NO: 348532 - RNA, 19 nt, Homo sapiens
  misc_RNA (1)...(19): siRNA sense strand
guacucagccgaggucauc

SEQ ID NO: 348533 - RNA, 19 nt, Homo sapiens
  misc_RNA (1)...(19): siRNA sense strand
gaagccagcaccgauagga

SEQ ID NO: 348534 - RNA, 19 nt, Homo sapiens
  misc_RNA (1)...(19): siRNA sense strand
ucgcugcgcacccaagaua

SEQ ID NO: 348535 - RNA, 19 nt, Homo sapiens
  misc_RNA (1)...(19): siRNA sense strand
cagguugccuccagugaag

SEQ ID NO: 348536 - RNA, 19 nt, Homo sapiens
  misc_RNA (1)...(19): siRNA sense strand
aauccugccuucgguguuu

SEQ ID NO: 348537 - RNA, 19 nt, Homo sapiens
  misc_RNA (1)...(19): siRNA sense strand
gaacaaccuccuuuuggaa

SEQ ID NO: 348538 - RNA, 19 nt, Homo sapiens
  misc_RNA (1)...(19): siRNA sense strand
guaauugcgcugcagaaca

SEQ ID NO: 348539 - RNA, 19 nt, Homo sapiens
  misc_RNA (1)...(19): siRNA sense strand
uaggagaauuccagaguac

SEQ ID NO: 348540 - RNA, 19 nt, Homo sapiens
  misc_RNA (1)...(19): siRNA sense strand
gcgaguugcuacggaaaca

SEQ ID NO: 348541 - RNA, 19 nt, Homo sapiens
  misc_RNA (1)...(19): siRNA sense strand
agaagaaagagcugaacaa

SEQ ID NO: 348542 - RNA, 19 nt, Homo sapiens
  misc_RNA (1)...(19): siRNA sense strand
uuuaugagaugguaauugc

SEQ ID NO: 348543 - RNA, 19 nt, Homo sapiens
  misc_RNA (1)...(19): siRNA sense strand
cuagcuaagccaccaauug

SEQ ID NO: 348544 - RNA, 19 nt, Homo sapiens
  misc_RNA (1)...(19): siRNA sense strand
cagccugacauggaauuua

SEQ ID NO: 348545 - RNA, 19 nt, Homo sapiens
  misc_RNA (1)...(19): siRNA sense strand
guggacagccugacaugga

SEQ ID NO: 348546 - RNA, 19 nt, Homo sapiens
  misc_RNA (1)...(19): siRNA sense strand
uggacagccugacauggaa

SEQ ID NO: 348547 - RNA, 19 nt, Homo sapiens
  misc_RNA (1)...(19): siRNA sense strand
uuaugaaauugguccaguu

SEQ ID NO: 348548 - RNA, 19 nt, Homo sapiens
  misc_RNA (1)...(19): siRNA sense strand
uagcuaagccaccaauugg

SEQ ID NO: 348549 - RNA, 19 nt, Homo sapiens
  misc_RNA (1)...(19): siRNA sense strand
gagaauuccagaguacaga

SEQ ID NO: 348550 - RNA, 19 nt, Homo sapiens
  misc_RNA (1)...(19): siRNA sense strand
guguauagacagcgaguug

SEQ ID NO: 348551 - RNA, 19 nt, Homo sapiens
  misc_RNA (1)...(19): siRNA sense strand
ugugguuacugccucauug

SEQ ID NO: 348552 - RNA, 19 nt, Homo sapiens
  misc_RNA (1)...(19): siRNA sense strand
ucacagauuaugaaauugg

SEQ ID NO: 348553 - RNA, 19 nt, Homo sapiens
  misc_RNA (1)...(19): siRNA sense strand
uaacuccuaaggccaaaga

SEQ ID NO: 348554 - RNA, 19 nt, Homo sapiens
  misc_RNA (1)...(19): siRNA sense strand
aagaaagagcugaacaaga

SEQ ID NO: 348555 - RNA, 19 nt, Homo sapiens
  misc_RNA (1)...(19): siRNA sense strand
ccuggaaguccuccuugua

SEQ ID NO: 348556 - RNA, 19 nt, Homo sapiens
  misc_RNA (1)...(19): siRNA sense strand
cagauucgggagcucuaua

SEQ ID NO: 348557 - RNA, 19 nt, Homo sapiens
  misc_RNA (1)...(19): siRNA sense strand
aaagaaaggaccagagaac

SEQ ID NO: 348558 - RNA, 19 nt, Homo sapiens
  misc_RNA (1)...(19): siRNA sense strand
aagagugucuccagauggu

SEQ ID NO: 348559 - RNA, 19 nt, Homo sapiens
  misc_RNA (1)...(19): siRNA sense strand
ugaacaaccuccuuuugga

SEQ ID NO: 348560 - RNA, 19 nt, Homo sapiens
  misc_RNA (1)...(19): siRNA sense strand
gcuggccaccacuaaguuu

SEQ ID NO: 348561 - RNA, 19 nt, Homo sapiens
  misc_RNA (1)...(19): siRNA sense strand
gcggcuggaugaguuugaa

SEQ ID NO: 348562 - RNA, 19 nt, Homo sapiens
  misc_RNA (1)...(19): siRNA sense strand
gaaagagcugaacaagaag

SEQ ID NO: 348563 - RNA, 19 nt, Homo sapiens
  misc_RNA (1)...(19): siRNA sense strand
gaaugguggcuccuggaau

SEQ ID NO: 348564 - RNA, 19 nt, Homo sapiens
  misc_RNA (1)...(19): siRNA sense strand
gugcugauacuccaguguu

SEQ ID NO: 348565 - RNA, 19 nt, Homo sapiens
  misc_RNA (1)...(19): siRNA sense strand
acucugaggccuuccacua

SEQ ID NO: 348566 - RNA, 19 nt, Homo sapiens
  misc_RNA (1)...(19): siRNA sense strand
gaagcguuccguccagaag

SEQ ID NO: 348567 - RNA, 19 nt, Homo sapiens
  misc_RNA (1)...(19): siRNA sense strand
gcuacggaaacaucauuug

SEQ ID NO: 348568 - RNA, 19 nt, Homo sapiens
  misc_RNA (1)...(19): siRNA sense strand
cauugcaaccgucggcuuu

SEQ ID NO: 348569 - RNA, 19 nt, Homo sapiens
  misc_RNA (1)...(19): siRNA sense strand
uucgggagcucuauaagca

SEQ ID NO: 348570 - RNA, 19 nt, Homo sapiens
  misc_RNA (1)...(19): siRNA sense strand
cuccaguguuucuagcuaa

SEQ ID NO: 348571 - RNA, 19 nt, Homo sapiens
  misc_RNA (1)...(19): siRNA sense strand
gauacuccaguguuucuag

SEQ ID NO: 348572 - RNA, 19 nt, Homo sapiens
  misc_RNA (1)...(19): siRNA sense strand
ggagaauuccagaguacag

SEQ ID NO: 348573 - RNA, 19 nt, Homo sapiens
  misc_RNA (1)...(19): siRNA sense strand
ucugaggccuuccacuaca

SEQ ID NO: 348574 - RNA, 19 nt, Homo sapiens
  misc_RNA (1)...(19): siRNA sense strand
gcuggaugaguuugaaaug

SEQ ID NO: 348575 - RNA, 19 nt, Homo sapiens
  misc_RNA (1)...(19): siRNA sense strand
gugaagagugucuccagau

SEQ ID NO: 348576 - RNA, 19 nt, Homo sapiens
  misc_RNA (1)...(19): siRNA sense strand
ccaaaacgcggaggucuuu

SEQ ID NO: 348577 - RNA, 19 nt, Homo sapiens
  misc_RNA (1)...(19): siRNA sense strand
cuggaaguccuccuuguau

SEQ ID NO: 348578 - RNA, 19 nt, Homo sapiens
  misc_RNA (1)...(19): siRNA sense strand
acaagcuggccaccacuaa

SEQ ID NO: 348579 - RNA, 19 nt, Homo sapiens
  misc_RNA (1)...(19): siRNA sense strand
uaagccaccaauuggguuu

SEQ ID NO: 348580 - RNA, 19 nt, Homo sapiens
  misc_RNA (1)...(19): siRNA sense strand
acuccaguguuucuagcua

SEQ ID NO: 348581 - RNA, 19 nt, Homo sapiens
  misc_RNA (1)...(19): siRNA sense strand
gauauggaggcaagucucu

SEQ ID NO: 348582 - RNA, 19 nt, Homo sapiens
  misc_RNA (1)...(19): siRNA sense strand
cagaagaaagagcugaaca

SEQ ID NO: 348583 - RNA, 19 nt, Homo sapiens
  misc_RNA (1)...(19): siRNA sense strand
cuggaugaguuugaaaugu

SEQ ID NO: 348584 - RNA, 19 nt, Homo sapiens
  misc_RNA (1)...(19): siRNA sense strand
ggaagaagcuugcugaguu

SEQ ID NO: 348585 - RNA, 19 nt, Homo sapiens
  misc_RNA (1)...(19): siRNA sense strand
agaaagagcugaacaagaa

SEQ ID NO: 348586 - RNA, 19 nt, Homo sapiens
  misc_RNA (1)...(19): siRNA sense strand
ggaagcagcugauuauuag

SEQ ID NO: 348587 - RNA, 19 nt, Homo sapiens
  misc_RNA (1)...(19): siRNA sense strand
gaagauuacuacaccgaua

SEQ ID NO: 348588 - RNA, 19 nt, Homo sapiens
  misc_RNA (1)...(19): siRNA sense strand
ggaaugaccugccaguaca

SEQ ID NO: 348589 - RNA, 19 nt, Homo sapiens
  misc_RNA (1)...(19): siRNA sense strand
gaagugagcgcaagcuuga

SEQ ID NO: 348590 - RNA, 19 nt, Homo sapiens
  misc_RNA (1)...(19): siRNA sense strand
gaagauucaugcaggaaga

SEQ ID NO: 348591 - RNA, 19 nt, Homo sapiens
  misc_RNA (1)...(19): siRNA sense strand
gaagaagcuugcugaguuc

SEQ ID NO: 348592 - RNA, 19 nt, Homo sapiens
  misc_RNA (1)...(19): siRNA sense strand
ugaaauugguccaguuuau

SEQ ID NO: 348593 - RNA, 19 nt, Homo sapiens
  misc_RNA (1)...(19): siRNA sense strand
cccgggacaugcuauauua

SEQ ID NO: 348594 - RNA, 19 nt, Homo sapiens
  misc_RNA (1)...(19): siRNA sense strand
gcuaggaagcagcugauua

SEQ ID NO: 348595 - RNA, 19 nt, Homo sapiens
  misc_RNA (1)...(19): siRNA sense strand
ggaugaguuugaaauguug

SEQ ID NO: 348596 - RNA, 19 nt, Homo sapiens
  misc_RNA (1)...(19): siRNA sense strand
gaagcuugcugaguucgaa

SEQ ID NO: 348597 - RNA, 19 nt, Homo sapiens
  misc_RNA (1)...(19): siRNA sense strand
ccaguacauuguccaguuu

SEQ ID NO: 348598 - RNA, 19 nt, Homo sapiens
  misc_RNA (1)...(19): siRNA sense strand
ggaauugggcagcugauug

SEQ ID NO: 348599 - RNA, 19 nt, Homo sapiens
  misc_RNA (1)...(19): siRNA sense strand
gccaguacauuguccaguu

SEQ ID NO: 348600 - RNA, 19 nt, Homo sapiens
  misc_RNA (1)...(19): siRNA sense strand
ugaguucgaagaugaguua

SEQ ID NO: 348601 - RNA, 19 nt, Homo sapiens
  misc_RNA (1)...(19): siRNA sense strand
gaaauugguccaguuuaug

SEQ ID NO: 348602 - RNA, 19 nt, Homo sapiens
  misc_RNA (1)...(19): siRNA sense strand
gaagaaagagcugaacaag

SEQ ID NO: 348603 - RNA, 19 nt, Homo sapiens
  misc_RNA (1)...(19): siRNA sense strand
aggaagcagcugauuauua

SEQ ID NO: 348604 - RNA, 19 nt, Homo sapiens
  misc_RNA (1)...(19): siRNA sense strand
uggaugaguuugaaauguu

SEQ ID NO: 348605 - RNA, 19 nt, Homo sapiens
  misc_RNA (1)...(19): siRNA sense strand
ggaaguccuccuuguauuc

SEQ ID NO: 348606 - RNA, 19 nt, Homo sapiens
  misc_RNA (1)...(19): siRNA sense strand
gcccagcacuucauacgau

SEQ ID NO: 348607 - RNA, 19 nt, Homo sapiens
  misc_RNA (1)...(19): siRNA sense strand
ugaagagugucuccagaug

SEQ ID NO: 348608 - RNA, 19 nt, Homo sapiens
  misc_RNA (1)...(19): siRNA sense strand
ccaaagaaaggaccagaga

SEQ ID NO: 348609 - RNA, 19 nt, Homo sapiens
  misc_RNA (1)...(19): siRNA sense strand
cuggagagcucacagacuu

SEQ ID NO: 348610 - RNA, 19 nt, Homo sapiens
  misc_RNA (1)...(19): siRNA sense strand
ggagagcucacagacuuaa

SEQ ID NO: 348611 - RNA, 19 nt, Homo sapiens
  misc_RNA (1)...(19): siRNA sense strand
guucaaaacugacauuuag

SEQ ID NO: 348612 - RNA, 19 nt, Homo sapiens
  misc_RNA (1)...(19): siRNA sense strand
cauggaauuuaacuccuaa

SEQ ID NO: 348613 - RNA, 19 nt, Homo sapiens
  misc_RNA (1)...(19): siRNA sense strand
aaagaagccagcaccgaua

SEQ ID NO: 348614 - RNA, 19 nt, Homo sapiens
  misc_RNA (1)...(19): siRNA sense strand
gauaggagaauuccagagu

SEQ ID NO: 348615 - RNA, 19 nt, Homo sapiens
  misc_RNA (1)...(19): siRNA sense strand
agccugacauggaauuuaa

SEQ ID NO: 348616 - RNA, 19 nt, Homo sapiens
  misc_RNA (1)...(19): siRNA sense strand
cuaggaagcagcugauuau

SEQ ID NO: 348617 - RNA, 19 nt, Homo sapiens
  misc_RNA (1)...(19): siRNA sense strand
gggacaugcuauauuagug

SEQ ID NO: 348618 - RNA, 19 nt, Homo sapiens
  misc_RNA (1)...(19): siRNA sense strand
agagagagcuagacagacu

SEQ ID NO: 348619 - RNA, 19 nt, Homo sapiens
  misc_RNA (1)...(19): siRNA sense strand
gaucuauauuucuggugaa

SEQ ID NO: 348620 - RNA, 19 nt, Homo sapiens
  misc_RNA (1)...(19): siRNA sense strand
ggucaucggcgacgaagug

SEQ ID NO: 348621 - RNA, 19 nt, Homo sapiens
  misc_RNA (1)...(19): siRNA sense strand
aaugguggcuccuggaaug

SEQ ID NO: 348622 - RNA, 19 nt, Homo sapiens
  misc_RNA (1)...(19): siRNA sense strand
uugcugaguucgaagauga

SEQ ID NO: 348623 - RNA, 19 nt, Homo sapiens
  misc_RNA (1)...(19): siRNA sense strand
aaauguggguuucaguguu

SEQ ID NO: 348624 - RNA, 19 nt, Homo sapiens
  misc_RNA (1)...(19): siRNA sense strand
auaggagaauuccagagua

SEQ ID NO: 348625 - RNA, 19 nt, Homo sapiens
  misc_RNA (1)...(19): siRNA sense strand
caaagaaaggaccagagaa

SEQ ID NO: 348626 - RNA, 19 nt, Homo sapiens
  misc_RNA (1)...(19): siRNA sense strand
uggaaguccuccuuguauu

SEQ ID NO: 348627 - RNA, 19 nt, Homo sapiens
  misc_RNA (1)...(19): siRNA sense strand
cccaagauaucucgcacuu

SEQ ID NO: 348628 - RNA, 19 nt, Homo sapiens
  misc_RNA (1)...(19): siRNA sense strand
gcagcugauuauuagaaau

SEQ ID NO: 348629 - RNA, 19 nt, Homo sapiens
  misc_RNA (1)...(19): siRNA sense strand
uugggcagcugauugcuuu

SEQ ID NO: 348630 - RNA, 19 nt, Homo sapiens
  misc_RNA (1)...(19): siRNA sense strand
ggaaugguggcuccuggaa

SEQ ID NO: 348631 - RNA, 19 nt, Homo sapiens
  misc_RNA (1)...(19): siRNA sense strand
gaaccucucaagaaagcaa

SEQ ID NO: 348632 - RNA, 19 nt, Homo sapiens
  misc_RNA (1)...(19): siRNA sense strand
acauggaauuuaacuccua

SEQ ID NO: 348633 - RNA, 19 nt, Homo sapiens
  misc_RNA (1)...(19): siRNA sense strand
cuacggaaacaucauuuga

SEQ ID NO: 348634 - RNA, 19 nt, Homo sapiens
  misc_RNA (1)...(19): siRNA sense strand
ucgagagccuugucagguu

SEQ ID NO: 348635 - RNA, 19 nt, Homo sapiens
  misc_RNA (1)...(19): siRNA sense strand
aaauugguccaguuuauga

SEQ ID NO: 348636 - RNA, 19 nt, Homo sapiens
  misc_RNA (1)...(19): siRNA sense strand
acagagagagcuagacaga

SEQ ID NO: 348637 - RNA, 19 nt, Homo sapiens
  misc_RNA (1)...(19): siRNA sense strand
ccagucagcccacacacuu

SEQ ID NO: 348638 - RNA, 19 nt, Homo sapiens
  misc_RNA (1)...(19): siRNA sense strand
ccacagagagagcuagaca

SEQ ID NO: 348639 - RNA, 19 nt, Homo sapiens
  misc_RNA (1)...(19): siRNA sense strand
aauguggguuucaguguug

SEQ ID NO: 348640 - RNA, 19 nt, Homo sapiens
  misc_RNA (1)...(19): siRNA sense strand
uaauugcgcugcagaacac

SEQ ID NO: 348641 - RNA, 19 nt, Homo sapiens
  misc_RNA (1)...(19): siRNA sense strand
uaugaaauugguccaguuu

SEQ ID NO: 348642 - RNA, 19 nt, Homo sapiens
  misc_RNA (1)...(19): siRNA sense strand
cagcaccgauaggagaauu

SEQ ID NO: 348643 - RNA, 19 nt, Homo sapiens
  misc_RNA (1)...(19): siRNA sense strand
gaagccagcaccgauagga

SEQ ID NO: 348644 - RNA, 19 nt, Homo sapiens
  misc_RNA (1)...(19): siRNA sense strand
cagcugauuauuagaaaug

SEQ ID NO: 348645 - RNA, 19 nt, Homo sapiens
  misc_RNA (1)...(19): siRNA sense strand
gcagcugauugcuuuggau

SEQ ID NO: 348646 - RNA, 19 nt, Homo sapiens
  misc_RNA (1)...(19): siRNA sense strand
ucgcugcgcacccaagaua

SEQ ID NO: 348647 - RNA, 19 nt, Homo sapiens
  misc_RNA (1)...(19): siRNA sense strand
guacucagccgaggucauc

SEQ ID NO: 348648 - RNA, 19 nt, Homo sapiens
  misc_RNA (1)...(19): siRNA sense strand
cagguugccuccagugaag

SEQ ID NO: 348649 - RNA, 19 nt, Homo sapiens
  misc_RNA (1)...(19): siRNA sense strand
gcugauugcuuuggaucug

SEQ ID NO: 348650 - RNA, 19 nt, Homo sapiens
  misc_RNA (1)...(19): siRNA sense strand
gaauugggcagcugauugc

SEQ ID NO: 348651 - RNA, 19 nt, Homo sapiens
  misc_RNA (1)...(19): siRNA sense strand
aauccugccuucgguguuu

SEQ ID NO: 348652 - RNA, 19 nt, Homo sapiens
  misc_RNA (1)...(19): siRNA sense strand
gaacaaccuccuuuuggaa

SEQ ID NO: 348653 - RNA, 19 nt, Homo sapiens
  misc_RNA (1)...(19): siRNA sense strand
guaauugcgcugcagaaca

SEQ ID NO: 348654 - RNA, 19 nt, Homo sapiens
  misc_RNA (1)...(19): siRNA sense strand
uaggagaauuccagaguac

SEQ ID NO: 348655 - RNA, 19 nt, Homo sapiens
  misc_RNA (1)...(19): siRNA sense strand
gcgaguugcuacggaaaca

SEQ ID NO: 348656 - RNA, 19 nt, Homo sapiens
  misc_RNA (1)...(19): siRNA sense strand
agaagaaagagcugaacaa

SEQ ID NO: 348657 - RNA, 19 nt, Homo sapiens
  misc_RNA (1)...(19): siRNA sense strand
uuuaugagaugguaauugc

SEQ ID NO: 348658 - RNA, 19 nt, Homo sapiens
  misc_RNA (1)...(19): siRNA sense strand
cuagcuaagccaccaauug

SEQ ID NO: 348659 - RNA, 19 nt, Homo sapiens
  misc_RNA (1)...(19): siRNA sense strand
cagccugacauggaauuua

SEQ ID NO: 348660 - RNA, 19 nt, Homo sapiens
  misc_RNA (1)...(19): siRNA sense strand
guggacagccugacaugga

SEQ ID NO: 348661 - RNA, 19 nt, Homo sapiens
  misc_RNA (1)...(19): siRNA sense strand
uggacagccugacauggaa

SEQ ID NO: 348662 - RNA, 19 nt, Homo sapiens
  misc_RNA (1)...(19): siRNA sense strand
uaacagcccagcacuucau

SEQ ID NO: 348663 - RNA, 19 nt, Homo sapiens
  misc_RNA (1)...(19): siRNA sense strand
uuaugaaauugguccaguu

SEQ ID NO: 348664 - RNA, 19 nt, Homo sapiens
  misc_RNA (1)...(19): siRNA sense strand
uagcuaagccaccaauugg

SEQ ID NO: 348665 - RNA, 19 nt, Homo sapiens
  misc_RNA (1)...(19): siRNA sense strand
gagaauuccagaguacaga

SEQ ID NO: 348666 - RNA, 19 nt, Homo sapiens
  misc_RNA (1)...(19): siRNA sense strand
guguauagacagcgaguug

SEQ ID NO: 348667 - RNA, 19 nt, Homo sapiens
  misc_RNA (1)...(19): siRNA sense strand
aagcagcugauuauuagaa

SEQ ID NO: 348668 - RNA, 19 nt, Homo sapiens
  misc_RNA (1)...(19): siRNA sense strand
ugugguuacugccucauug

SEQ ID NO: 348669 - RNA, 19 nt, Homo sapiens
  misc_RNA (1)...(19): siRNA sense strand
ucacagauuaugaaauugg

SEQ ID NO: 348670 - RNA, 19 nt, Homo sapiens
  misc_RNA (1)...(19): siRNA sense strand
uaacuccuaaggccaaaga

SEQ ID NO: 348671 - RNA, 19 nt, Homo sapiens
  misc_RNA (1)...(19): siRNA sense strand
aagaaagagcugaacaaga

SEQ ID NO: 348672 - RNA, 19 nt, Homo sapiens
  misc_RNA (1)...(19): siRNA sense strand
aaagaaaggaccagagaac

SEQ ID NO: 348673 - RNA, 19 nt, Homo sapiens
  misc_RNA (1)...(19): siRNA sense strand
cagauucgggagcucuaua

SEQ ID NO: 348674 - RNA, 19 nt, Homo sapiens
  misc_RNA (1)...(19): siRNA sense strand
ccuggaaguccuccuugua

SEQ ID NO: 348675 - RNA, 19 nt, Homo sapiens
  misc_RNA (1)...(19): siRNA sense strand
aagagugucuccagauggu

SEQ ID NO: 348676 - RNA, 19 nt, Homo sapiens
  misc_RNA (1)...(19): siRNA sense strand
ugaacaaccuccuuuugga

SEQ ID NO: 348677 - RNA, 19 nt, Homo sapiens
  misc_RNA (1)...(19): siRNA sense strand
gcuggccaccacuaaguuu

SEQ ID NO: 348678 - RNA, 19 nt, Homo sapiens
  misc_RNA (1)...(19): siRNA sense strand
gcggcuggaugaguuugaa

SEQ ID NO: 348679 - RNA, 19 nt, Homo sapiens
  misc_RNA (1)...(19): siRNA sense strand
gaaagagcugaacaagaag

SEQ ID NO: 348680 - RNA, 19 nt, Homo sapiens
  misc_RNA (1)...(19): siRNA sense strand
acucugaggccuuccacua

SEQ ID NO: 348681 - RNA, 19 nt, Homo sapiens
  misc_RNA (1)...(19): siRNA sense strand
gaaugguggcuccuggaau

SEQ ID NO: 348682 - RNA, 19 nt, Homo sapiens
  misc_RNA (1)...(19): siRNA sense strand
gugcugauacuccaguguu

SEQ ID NO: 348683 - RNA, 19 nt, Homo sapiens
  misc_RNA (1)...(19): siRNA sense strand
gaagcguuccguccagaag

SEQ ID NO: 348684 - RNA, 19 nt, Homo sapiens
  misc_RNA (1)...(19): siRNA sense strand
ggaagaagcuugcugaguu

SEQ ID NO: 348685 - RNA, 19 nt, Homo sapiens
  misc_RNA (1)...(19): siRNA sense strand
agaaagagcugaacaagaa

SEQ ID NO: 348686 - RNA, 19 nt, Homo sapiens
  misc_RNA (1)...(19): siRNA sense strand
ggaagcagcugauuauuag

SEQ ID NO: 348687 - RNA, 19 nt, Homo sapiens
  misc_RNA (1)...(19): siRNA sense strand
gaagauuacuacaccgaua

SEQ ID NO: 348688 - RNA, 19 nt, Homo sapiens
  misc_RNA (1)...(19): siRNA sense strand
gcaagucacccaucagaua

SEQ ID NO: 348689 - RNA, 19 nt, Homo sapiens
  misc_RNA (1)...(19): siRNA sense strand
gcaauaggguggcacagaa

SEQ ID NO: 348690 - RNA, 19 nt, Homo sapiens
  misc_RNA (1)...(19): siRNA sense strand
cuacagagaucccacacua

SEQ ID NO: 348691 - RNA, 19 nt, Homo sapiens
  misc_RNA (1)...(19): siRNA sense strand
gcacaaagacacagacuug

SEQ ID NO: 348692 - RNA, 19 nt, Homo sapiens
  misc_RNA (1)...(19): siRNA sense strand
gaagaaggcuuuuaagaug

SEQ ID NO: 348693 - RNA, 19 nt, Homo sapiens
  misc_RNA (1)...(19): siRNA sense strand
gagcuugugugcccugaua

SEQ ID NO: 348694 - RNA, 19 nt, Homo sapiens
  misc_RNA (1)...(19): siRNA sense strand
ggagcuaccuuccugugua

SEQ ID NO: 348695 - RNA, 19 nt, Homo sapiens
  misc_RNA (1)...(19): siRNA sense strand
ggaaugaccugccaguaca

SEQ ID NO: 348696 - RNA, 19 nt, Homo sapiens
  misc_RNA (1)...(19): siRNA sense strand
gaagugagcgcaagcuuga

SEQ ID NO: 348697 - RNA, 19 nt, Homo sapiens
  misc_RNA (1)...(19): siRNA sense strand
gaagauucaugcaggaaga

SEQ ID NO: 348698 - RNA, 19 nt, Homo sapiens
  misc_RNA (1)...(19): siRNA sense strand
gaagaagcuugcugaguuc

SEQ ID NO: 348699 - RNA, 19 nt, Homo sapiens
  misc_RNA (1)...(19): siRNA sense strand
ccacacuacuuccggcuua

SEQ ID NO: 348700 - RNA, 19 nt, Homo sapiens
  misc_RNA (1)...(19): siRNA sense strand
gaacuacauugggauaaau

SEQ ID NO: 348701 - RNA, 19 nt, Homo sapiens
  misc_RNA (1)...(19): siRNA sense strand
ugaaauugguccaguuuau

SEQ ID NO: 348702 - RNA, 19 nt, Homo sapiens
  misc_RNA (1)...(19): siRNA sense strand
ggccaaggcuccuaugaug

SEQ ID NO: 348703 - RNA, 19 nt, Homo sapiens
  misc_RNA (1)...(19): siRNA sense strand
gagaugguguuuacucaga

SEQ ID NO: 348704 - RNA, 19 nt, Homo sapiens
  misc_RNA (1)...(19): siRNA sense strand
ggaaaggccugaggaugug

SEQ ID NO: 348705 - RNA, 19 nt, Homo sapiens
  misc_RNA (1)...(19): siRNA sense strand
ggagaccuauguuccagaa

SEQ ID NO: 348706 - RNA, 19 nt, Homo sapiens
  misc_RNA (1)...(19): siRNA sense strand
aaacauugcccagggauua

SEQ ID NO: 348707 - RNA, 19 nt, Homo sapiens
  misc_RNA (1)...(19): siRNA sense strand
cccgggacaugcuauauua

SEQ ID NO: 348708 - RNA, 19 nt, Homo sapiens
  misc_RNA (1)...(19): siRNA sense strand
gagagaugguguuuacuca

SEQ ID NO: 348709 - RNA, 19 nt, Homo sapiens
  misc_RNA (1)...(19): siRNA sense strand
ggugaaaggcucaguagaa

SEQ ID NO: 348710 - RNA, 19 nt, Homo sapiens
  misc_RNA (1)...(19): siRNA sense strand
gcuaggaagcagcugauua

SEQ ID NO: 348711 - RNA, 19 nt, Homo sapiens
  misc_RNA (1)...(19): siRNA sense strand
ggaugaguuugaaauguug

SEQ ID NO: 348712 - RNA, 19 nt, Homo sapiens
  misc_RNA (1)...(19): siRNA sense strand
gaagacaaccaucacacuu

SEQ ID NO: 348713 - RNA, 19 nt, Homo sapiens
  misc_RNA (1)...(19): siRNA sense strand
gaagcuugcugaguucgaa

SEQ ID NO: 348714 - RNA, 19 nt, Homo sapiens
  misc_RNA (1)...(19): siRNA sense strand
cacagaagcucaucucagu

SEQ ID NO: 348715 - RNA, 19 nt, Homo sapiens
  misc_RNA (1)...(19): siRNA sense strand
gagagcagcuggauuuuau

SEQ ID NO: 348716 - RNA, 19 nt, Homo sapiens
  misc_RNA (1)...(19): siRNA sense strand
ggagaacuacauugggaua

SEQ ID NO: 348717 - RNA, 19 nt, Homo sapiens
  misc_RNA (1)...(19): siRNA sense strand
ccaguacauuguccaguuu

SEQ ID NO: 348718 - RNA, 19 nt, Homo sapiens
  misc_RNA (1)...(19): siRNA sense strand
gagcuaccuuccuguguau

SEQ ID NO: 348719 - RNA, 19 nt, Homo sapiens
  misc_RNA (1)...(19): siRNA sense strand
ggaauugggcagcugauug

SEQ ID NO: 348720 - RNA, 19 nt, Homo sapiens
  misc_RNA (1)...(19): siRNA sense strand
agagagagaugguguuuac

SEQ ID NO: 348721 - RNA, 19 nt, Homo sapiens
  misc_RNA (1)...(19): siRNA sense strand
gccaguacauuguccaguu

SEQ ID NO: 348722 - RNA, 19 nt, Homo sapiens
  misc_RNA (1)...(19): siRNA sense strand
gaccaacacuacagagauc

SEQ ID NO: 348723 - RNA, 19 nt, Homo sapiens
  misc_RNA (1)...(19): siRNA sense strand
caaaacagccugagcaaaa

SEQ ID NO: 348724 - RNA, 19 nt, Homo sapiens
  misc_RNA (1)...(19): siRNA sense strand
agacaaccaucacacuuau

SEQ ID NO: 348725 - RNA, 19 nt, Homo sapiens
  misc_RNA (1)...(19): siRNA sense strand
ugaguucgaagaugaguua

SEQ ID NO: 348726 - RNA, 19 nt, Homo sapiens
  misc_RNA (1)...(19): siRNA sense strand
ccuaggcccucaugauuug

SEQ ID NO: 348727 - RNA, 19 nt, Homo sapiens
  misc_RNA (1)...(19): siRNA sense strand
gaaauugguccaguuuaug

SEQ ID NO: 348728 - RNA, 19 nt, Homo sapiens
  misc_RNA (1)...(19): siRNA sense strand
gaacccuucgccugaauaa

SEQ ID NO: 348729 - RNA, 19 nt, Homo sapiens
  misc_RNA (1)...(19): siRNA sense strand
ggacugcaaguggccauua

SEQ ID NO: 348730 - RNA, 19 nt, Homo sapiens
  misc_RNA (1)...(19): siRNA sense strand
gaagaaagagcugaacaag

SEQ ID NO: 348731 - RNA, 19 nt, Homo sapiens
  misc_RNA (1)...(19): siRNA sense strand
gcccugagauccugcacaa

SEQ ID NO: 348732 - RNA, 19 nt, Homo sapiens
  misc_RNA (1)...(19): siRNA sense strand
aggaagcagcugauuauua

SEQ ID NO: 348733 - RNA, 19 nt, Homo sapiens
  misc_RNA (1)...(19): siRNA sense strand
uggaugaguuugaaauguu

SEQ ID NO: 348734 - RNA, 19 nt, Homo sapiens
  misc_RNA (1)...(19): siRNA sense strand
ggaaguccuccuuguauuc

SEQ ID NO: 348735 - RNA, 19 nt, Homo sapiens
  misc_RNA (1)...(19): siRNA sense strand
cgucucagcccuucaguuu

SEQ ID NO: 348736 - RNA, 19 nt, Homo sapiens
  misc_RNA (1)...(19): siRNA sense strand
gcccagcacuucauacgau

SEQ ID NO: 348737 - RNA, 19 nt, Homo sapiens
  misc_RNA (1)...(19): siRNA sense strand
ugaagagugucuccagaug

SEQ ID NO: 348738 - RNA, 19 nt, Homo sapiens
  misc_RNA (1)...(19): siRNA sense strand
ccaaagaaaggaccagaga

SEQ ID NO: 348739 - RNA, 19 nt, Homo sapiens
  misc_RNA (1)...(19): siRNA sense strand
aggaagagcugacccaucu

SEQ ID NO: 348740 - RNA, 19 nt, Homo sapiens
  misc_RNA (1)...(19): siRNA sense strand
cuggagagcucacagacuu

SEQ ID NO: 348741 - RNA, 19 nt, Homo sapiens
  misc_RNA (1)...(19): siRNA sense strand
gccagaagcaggaguguga

SEQ ID NO: 348742 - RNA, 19 nt, Homo sapiens
  misc_RNA (1)...(19): siRNA sense strand
agaccuauguuccagaaga

SEQ ID NO: 348743 - RNA, 19 nt, Homo sapiens
  misc_RNA (1)...(19): siRNA sense strand
ggagagcucacagacuuaa

SEQ ID NO: 348744 - RNA, 19 nt, Homo sapiens
  misc_RNA (1)...(19): siRNA sense strand
guucaaaacugacauuuag

SEQ ID NO: 348745 - RNA, 19 nt, Homo sapiens
  misc_RNA (1)...(19): siRNA sense strand
gcucccagcugaccagaca

SEQ ID NO: 348746 - RNA, 19 nt, Homo sapiens
  misc_RNA (1)...(19): siRNA sense strand
ccacugaggacccguguga

SEQ ID NO: 348747 - RNA, 19 nt, Homo sapiens
  misc_RNA (1)...(19): siRNA sense strand
aagacaaccaucacacuua

SEQ ID NO: 348748 - RNA, 19 nt, Homo sapiens
  misc_RNA (1)...(19): siRNA sense strand
gaucagcgacugccacauc

SEQ ID NO: 348749 - RNA, 19 nt, Homo sapiens
  misc_RNA (1)...(19): siRNA sense strand
cauggaauuuaacuccuaa

SEQ ID NO: 348750 - RNA, 19 nt, Homo sapiens
  misc_RNA (1)...(19): siRNA sense strand
aaagaagccagcaccgaua

SEQ ID NO: 348751 - RNA, 19 nt, Homo sapiens
  misc_RNA (1)...(19): siRNA sense strand
gcuccuaugaugagagaua

SEQ ID NO: 348752 - RNA, 19 nt, Homo sapiens
  misc_RNA (1)...(19): siRNA sense strand
gauaggagaauuccagagu

SEQ ID NO: 348753 - RNA, 19 nt, Homo sapiens
  misc_RNA (1)...(19): siRNA sense strand
agccugacauggaauuuaa

SEQ ID NO: 348754 - RNA, 19 nt, Homo sapiens
  misc_RNA (1)...(19): siRNA sense strand
cgugaggccugcacagcua

SEQ ID NO: 348755 - RNA, 19 nt, Homo sapiens
  misc_RNA (1)...(19): siRNA sense strand
gaccagccuucccaacaug

SEQ ID NO: 348756 - RNA, 19 nt, Homo sapiens
  misc_RNA (1)...(19): siRNA sense strand
cuaaggagagcucugauug

SEQ ID NO: 348757 - RNA, 19 nt, Homo sapiens
  misc_RNA (1)...(19): siRNA sense strand
acauugaggcugucuuuaa

SEQ ID NO: 348758 - RNA, 19 nt, Homo sapiens
  misc_RNA (1)...(19): siRNA sense strand
agaacuacauugggauaaa

SEQ ID NO: 348759 - RNA, 19 nt, Homo sapiens
  misc_RNA (1)...(19): siRNA sense strand
cuaggaagcagcugauuau

SEQ ID NO: 348760 - RNA, 19 nt, Homo sapiens
  misc_RNA (1)...(19): siRNA sense strand
gggacaugcuauauuagug

SEQ ID NO: 348761 - RNA, 19 nt, Homo sapiens
  misc_RNA (1)...(19): siRNA sense strand
agagagagcuagacagacu

SEQ ID NO: 348762 - RNA, 19 nt, Homo sapiens
  misc_RNA (1)...(19): siRNA sense strand
gaucuauauuucuggugaa

SEQ ID NO: 348763 - RNA, 19 nt, Homo sapiens
  misc_RNA (1)...(19): siRNA sense strand
gcagccagguggagguuag

SEQ ID NO: 348764 - RNA, 19 nt, Homo sapiens
  misc_RNA (1)...(19): siRNA sense strand
aaugguggcuccuggaaug

SEQ ID NO: 348765 - RNA, 19 nt, Homo sapiens
  misc_RNA (1)...(19): siRNA sense strand
ugccgaagcuacuggacua

SEQ ID NO: 348766 - RNA, 19 nt, Homo sapiens
  misc_RNA (1)...(19): siRNA sense strand
gcaguaccaucuacaucuc

SEQ ID NO: 348767 - RNA, 19 nt, Homo sapiens
  misc_RNA (1)...(19): siRNA sense strand
ccauuaccaucucuaagga

SEQ ID NO: 348768 - RNA, 19 nt, Homo sapiens
  misc_RNA (1)...(19): siRNA sense strand
ggucaucggcgacgaagug

SEQ ID NO: 348769 - RNA, 19 nt, Homo sapiens
  misc_RNA (1)...(19): siRNA sense strand
uaaaugugaagaaggcuuu

SEQ ID NO: 348770 - RNA, 19 nt, Homo sapiens
  misc_RNA (1)...(19): siRNA sense strand
uugcugaguucgaagauga

SEQ ID NO: 348771 - RNA, 19 nt, Homo sapiens
  misc_RNA (1)...(19): siRNA sense strand
uuugggaccugcuuuguga

SEQ ID NO: 348772 - RNA, 19 nt, Homo sapiens
  misc_RNA (1)...(19): siRNA sense strand
caucggaauucagccauga

SEQ ID NO: 348773 - RNA, 19 nt, Homo sapiens
  misc_RNA (1)...(19): siRNA sense strand
ggccugcccucaucaucaa

SEQ ID NO: 348774 - RNA, 19 nt, Homo sapiens
  misc_RNA (1)...(19): siRNA sense strand
aaauguggguuucaguguu

SEQ ID NO: 348775 - RNA, 19 nt, Homo sapiens
  misc_RNA (1)...(19): siRNA sense strand
auaggagaauuccagagua

SEQ ID NO: 348776 - RNA, 19 nt, Homo sapiens
  misc_RNA (1)...(19): siRNA sense strand
caaagaaaggaccagagaa

SEQ ID NO: 348777 - RNA, 19 nt, Homo sapiens
  misc_RNA (1)...(19): siRNA sense strand
cauugaggcugucuuuaag

SEQ ID NO: 348778 - RNA, 19 nt, Homo sapiens
  misc_RNA (1)...(19): siRNA sense strand
uggaaguccuccuuguauu

SEQ ID NO: 348779 - RNA, 19 nt, Homo sapiens
  misc_RNA (1)...(19): siRNA sense strand
gaccaccuccuacacuauu

SEQ ID NO: 348780 - RNA, 19 nt, Homo sapiens
  misc_RNA (1)...(19): siRNA sense strand
cccaagauaucucgcacuu

SEQ ID NO: 348781 - RNA, 19 nt, Homo sapiens
  misc_RNA (1)...(19): siRNA sense strand
gauuuguccucagagcuaa

SEQ ID NO: 348782 - RNA, 19 nt, Homo sapiens
  misc_RNA (1)...(19): siRNA sense strand
gagagagagaugguguuua

SEQ ID NO: 348783 - RNA, 19 nt, Homo sapiens
  misc_RNA (1)...(19): siRNA sense strand
ucgagagccuugucagguu

SEQ ID NO: 348784 - RNA, 19 nt, Homo sapiens
  misc_RNA (1)...(19): siRNA sense strand
ggaagaagcuugcugaguu

SEQ ID NO: 348785 - RNA, 19 nt, Homo sapiens
  misc_RNA (1)...(19): siRNA sense strand
agaaagagcugaacaagaa

SEQ ID NO: 348786 - RNA, 19 nt, Homo sapiens
  misc_RNA (1)...(19): siRNA sense strand
ggaagcagcugauuauuag

SEQ ID NO: 348787 - RNA, 19 nt, Homo sapiens
  misc_RNA (1)...(19): siRNA sense strand
gaagauuacuacaccgaua

SEQ ID NO: 348788 - RNA, 19 nt, Homo sapiens
  misc_RNA (1)...(19): siRNA sense strand
ggaaugaccugccaguaca

SEQ ID NO: 348789 - RNA, 19 nt, Homo sapiens
  misc_RNA (1)...(19): siRNA sense strand
gaagugagcgcaagcuuga

SEQ ID NO: 348790 - RNA, 19 nt, Homo sapiens
  misc_RNA (1)...(19): siRNA sense strand
gaagauucaugcaggaaga

SEQ ID NO: 348791 - RNA, 19 nt, Homo sapiens
  misc_RNA (1)...(19): siRNA sense strand
gaagaagcuugcugaguuc

SEQ ID NO: 348792 - RNA, 19 nt, Homo sapiens
  misc_RNA (1)...(19): siRNA sense strand
ugaaauugguccaguuuau

SEQ ID NO: 348793 - RNA, 19 nt, Homo sapiens
  misc_RNA (1)...(19): siRNA sense strand
cccgggacaugcuauauua

SEQ ID NO: 348794 - RNA, 19 nt, Homo sapiens
  misc_RNA (1)...(19): siRNA sense strand
gcuaggaagcagcugauua

SEQ ID NO: 348795 - RNA, 19 nt, Homo sapiens
  misc_RNA (1)...(19): siRNA sense strand
ggaugaguuugaaauguug

SEQ ID NO: 348796 - RNA, 19 nt, Homo sapiens
  misc_RNA (1)...(19): siRNA sense strand
gaagcuugcugaguucgaa

SEQ ID NO: 348797 - RNA, 19 nt, Homo sapiens
  misc_RNA (1)...(19): siRNA sense strand
ccaguacauuguccaguuu

SEQ ID NO: 348798 - RNA, 19 nt, Homo sapiens
  misc_RNA (1)...(19): siRNA sense strand
ggaauugggcagcugauug

SEQ ID NO: 348799 - RNA, 19 nt, Homo sapiens
  misc_RNA (1)...(19): siRNA sense strand
gccaguacauuguccaguu

SEQ ID NO: 348800 - RNA, 19 nt, Homo sapiens
  misc_RNA (1)...(19): siRNA sense strand
ugaguucgaagaugaguua

SEQ ID NO: 348801 - RNA, 19 nt, Homo sapiens
  misc_RNA (1)...(19): siRNA sense strand
gaaauugguccaguuuaug

SEQ ID NO: 348802 - RNA, 19 nt, Homo sapiens
  misc_RNA (1)...(19): siRNA sense strand
gaagaaagagcugaacaag

SEQ ID NO: 348803 - RNA, 19 nt, Homo sapiens
  misc_RNA (1)...(19): siRNA sense strand
aggaagcagcugauuauua

SEQ ID NO: 348804 - RNA, 19 nt, Homo sapiens
  misc_RNA (1)...(19): siRNA sense strand
uggaugaguuugaaauguu

SEQ ID NO: 348805 - RNA, 19 nt, Homo sapiens
  misc_RNA (1)...(19): siRNA sense strand
ggaaguccuccuuguauuc

SEQ ID NO: 348806 - RNA, 19 nt, Homo sapiens
  misc_RNA (1)...(19): siRNA sense strand
gcccagcacuucauacgau

SEQ ID NO: 348807 - RNA, 19 nt, Homo sapiens
  misc_RNA (1)...(19): siRNA sense strand
ugaagagugucuccagaug

SEQ ID NO: 348808 - RNA, 19 nt, Homo sapiens
  misc_RNA (1)...(19): siRNA sense strand
ccaaagaaaggaccagaga

SEQ ID NO: 348809 - RNA, 19 nt, Homo sapiens
  misc_RNA (1)...(19): siRNA sense strand
cuggagagcucacagacuu

SEQ ID NO: 348810 - RNA, 19 nt, Homo sapiens
  misc_RNA (1)...(19): siRNA sense strand
ggagagcucacagacuuaa

SEQ ID NO: 348811 - RNA, 19 nt, Homo sapiens
  misc_RNA (1)...(19): siRNA sense strand
guucaaaacugacauuuag

SEQ ID NO: 348812 - RNA, 19 nt, Homo sapiens
  misc_RNA (1)...(19): siRNA sense strand
cauggaauuuaacuccuaa

SEQ ID NO: 348813 - RNA, 19 nt, Homo sapiens
  misc_RNA (1)...(19): siRNA sense strand
aaagaagccagcaccgaua

SEQ ID NO: 348814 - RNA, 19 nt, Homo sapiens
  misc_RNA (1)...(19): siRNA sense strand
gauaggagaauuccagagu

SEQ ID NO: 348815 - RNA, 19 nt, Homo sapiens
  misc_RNA (1)...(19): siRNA sense strand
agccugacauggaauuuaa

SEQ ID NO: 348816 - RNA, 19 nt, Homo sapiens
  misc_RNA (1)...(19): siRNA sense strand
cuaggaagcagcugauuau

SEQ ID NO: 348817 - RNA, 19 nt, Homo sapiens
  misc_RNA (1)...(19): siRNA sense strand
gggacaugcuauauuagug

SEQ ID NO: 348818 - RNA, 19 nt, Homo sapiens
  misc_RNA (1)...(19): siRNA sense strand
agagagagcuagacagacu

SEQ ID NO: 348819 - RNA, 19 nt, Homo sapiens
  misc_RNA (1)...(19): siRNA sense strand
gaucuauauuucuggugaa

SEQ ID NO: 348820 - RNA, 19 nt, Homo sapiens
  misc_RNA (1)...(19): siRNA sense strand
ggucaucggcgacgaagug

SEQ ID NO: 348821 - RNA, 19 nt, Homo sapiens
  misc_RNA (1)...(19): siRNA sense strand
aaugguggcuccuggaaug

SEQ ID NO: 348822 - RNA, 19 nt, Homo sapiens
  misc_RNA (1)...(19): siRNA sense strand
uugcugaguucgaagauga

SEQ ID NO: 348823 - RNA, 19 nt, Homo sapiens
  misc_RNA (1)...(19): siRNA sense strand
aaauguggguuucaguguu

SEQ ID NO: 348824 - RNA, 19 nt, Homo sapiens
  misc_RNA (1)...(19): siRNA sense strand
auaggagaauuccagagua

SEQ ID NO: 348825 - RNA, 19 nt, Homo sapiens
  misc_RNA (1)...(19): siRNA sense strand
caaagaaaggaccagagaa

SEQ ID NO: 348826 - RNA, 19 nt, Homo sapiens
  misc_RNA (1)...(19): siRNA sense strand
uggaaguccuccuuguauu

SEQ ID NO: 348827 - RNA, 19 nt, Homo sapiens
  misc_RNA (1)...(19): siRNA sense strand
cccaagauaucucgcacuu

SEQ ID NO: 348828 - RNA, 19 nt, Homo sapiens
  misc_RNA (1)...(19): siRNA sense strand
gcagcugauuauuagaaau

SEQ ID NO: 348829 - RNA, 19 nt, Homo sapiens
  misc_RNA (1)...(19): siRNA sense strand
uugggcagcugauugcuuu

SEQ ID NO: 348830 - RNA, 19 nt, Homo sapiens
  misc_RNA (1)...(19): siRNA sense strand
ggaaugguggcuccuggaa

SEQ ID NO: 348831 - RNA, 19 nt, Homo sapiens
  misc_RNA (1)...(19): siRNA sense strand
gaaccucucaagaaagcaa

SEQ ID NO: 348832 - RNA, 19 nt, Homo sapiens
  misc_RNA (1)...(19): siRNA sense strand
acauggaauuuaacuccua

SEQ ID NO: 348833 - RNA, 19 nt, Homo sapiens
  misc_RNA (1)...(19): siRNA sense strand
cuacggaaacaucauuuga

SEQ ID NO: 348834 - RNA, 19 nt, Homo sapiens
  misc_RNA (1)...(19): siRNA sense strand
ucgagagccuugucagguu

SEQ ID NO: 348835 - RNA, 19 nt, Homo sapiens
  misc_RNA (1)...(19): siRNA sense strand
aaauugguccaguuuauga

SEQ ID NO: 348836 - RNA, 19 nt, Homo sapiens
  misc_RNA (1)...(19): siRNA sense strand
acagagagagcuagacaga

SEQ ID NO: 348837 - RNA, 19 nt, Homo sapiens
  misc_RNA (1)...(19): siRNA sense strand
ccagucagcccacacacuu

SEQ ID NO: 348838 - RNA, 19 nt, Homo sapiens
  misc_RNA (1)...(19): siRNA sense strand
ccacagagagagcuagaca

SEQ ID NO: 348839 - RNA, 19 nt, Homo sapiens
  misc_RNA (1)...(19): siRNA sense strand
aauguggguuucaguguug

SEQ ID NO: 348840 - RNA, 19 nt, Homo sapiens
  misc_RNA (1)...(19): siRNA sense strand
uaauugcgcugcagaacac

SEQ ID NO: 348841 - RNA, 19 nt, Homo sapiens
  misc_RNA (1)...(19): siRNA sense strand
uaugaaauugguccaguuu

SEQ ID NO: 348842 - RNA, 19 nt, Homo sapiens
  misc_RNA (1)...(19): siRNA sense strand
cagcaccgauaggagaauu

SEQ ID NO: 348843 - RNA, 19 nt, Homo sapiens
  misc_RNA (1)...(19): siRNA sense strand
gaagccagcaccgauagga

SEQ ID NO: 348844 - RNA, 19 nt, Homo sapiens
  misc_RNA (1)...(19): siRNA sense strand
cagcugauuauuagaaaug

SEQ ID NO: 348845 - RNA, 19 nt, Homo sapiens
  misc_RNA (1)...(19): siRNA sense strand
gcagcugauugcuuuggau

SEQ ID NO: 348846 - RNA, 19 nt, Homo sapiens
  misc_RNA (1)...(19): siRNA sense strand
ucgcugcgcacccaagaua

SEQ ID NO: 348847 - RNA, 19 nt, Homo sapiens
  misc_RNA (1)...(19): siRNA sense strand
guacucagccgaggucauc

SEQ ID NO: 348848 - RNA, 19 nt, Homo sapiens
  misc_RNA (1)...(19): siRNA sense strand
cagguugccuccagugaag

SEQ ID NO: 348849 - RNA, 19 nt, Homo sapiens
  misc_RNA (1)...(19): siRNA sense strand
gcugauugcuuuggaucug

SEQ ID NO: 348850 - RNA, 19 nt, Homo sapiens
  misc_RNA (1)...(19): siRNA sense strand
gaauugggcagcugauugc

SEQ ID NO: 348851 - RNA, 19 nt, Homo sapiens
  misc_RNA (1)...(19): siRNA sense strand
aauccugccuucgguguuu

SEQ ID NO: 348852 - RNA, 19 nt, Homo sapiens
  misc_RNA (1)...(19): siRNA sense strand
gaacaaccuccuuuuggaa

SEQ ID NO: 348853 - RNA, 19 nt, Homo sapiens
  misc_RNA (1)...(19): siRNA sense strand
guaauugcgcugcagaaca

SEQ ID NO: 348854 - RNA, 19 nt, Homo sapiens
  misc_RNA (1)...(19): siRNA sense strand
uaggagaauuccagaguac

SEQ ID NO: 348855 - RNA, 19 nt, Homo sapiens
  misc_RNA (1)...(19): siRNA sense strand
gcgaguugcuacggaaaca

SEQ ID NO: 348856 - RNA, 19 nt, Homo sapiens
  misc_RNA (1)...(19): siRNA sense strand
agaagaaagagcugaacaa

SEQ ID NO: 348857 - RNA, 19 nt, Homo sapiens
  misc_RNA (1)...(19): siRNA sense strand
uuuaugagaugguaauugc

SEQ ID NO: 348858 - RNA, 19 nt, Homo sapiens
  misc_RNA (1)...(19): siRNA sense strand
cuagcuaagccaccaauug

SEQ ID NO: 348859 - RNA, 19 nt, Homo sapiens
  misc_RNA (1)...(19): siRNA sense strand
cagccugacauggaauuua

SEQ ID NO: 348860 - RNA, 19 nt, Homo sapiens
  misc_RNA (1)...(19): siRNA sense strand
guggacagccugacaugga

SEQ ID NO: 348861 - RNA, 19 nt, Homo sapiens
  misc_RNA (1)...(19): siRNA sense strand
uggacagccugacauggaa

SEQ ID NO: 348862 - RNA, 19 nt, Homo sapiens
  misc_RNA (1)...(19): siRNA sense strand
uaacagcccagcacuucau

SEQ ID NO: 348863 - RNA, 19 nt, Homo sapiens
  misc_RNA (1)...(19): siRNA sense strand
uuaugaaauugguccaguu

SEQ ID NO: 348864 - RNA, 19 nt, Homo sapiens
  misc_RNA (1)...(19): siRNA sense strand
uagcuaagccaccaauugg

SEQ ID NO: 348865 - RNA, 19 nt, Homo sapiens
  misc_RNA (1)...(19): siRNA sense strand
gagaauuccagaguacaga

SEQ ID NO: 348866 - RNA, 19 nt, Homo sapiens
  misc_RNA (1)...(19): siRNA sense strand
guguauagacagcgaguug

SEQ ID NO: 348867 - RNA, 19 nt, Homo sapiens
  misc_RNA (1)...(19): siRNA sense strand
aagcagcugauuauuagaa

SEQ ID NO: 348868 - RNA, 19 nt, Homo sapiens
  misc_RNA (1)...(19): siRNA sense strand
ugugguuacugccucauug

SEQ ID NO: 348869 - RNA, 19 nt, Homo sapiens
  misc_RNA (1)...(19): siRNA sense strand
ucacagauuaugaaauugg

SEQ ID NO: 348870 - RNA, 19 nt, Homo sapiens
  misc_RNA (1)...(19): siRNA sense strand
uaacuccuaaggccaaaga

SEQ ID NO: 348871 - RNA, 19 nt, Homo sapiens
  misc_RNA (1)...(19): siRNA sense strand
aagaaagagcugaacaaga

SEQ ID NO: 348872 - RNA, 19 nt, Homo sapiens
  misc_RNA (1)...(19): siRNA sense strand
aaagaaaggaccagagaac

SEQ ID NO: 348873 - RNA, 19 nt, Homo sapiens
  misc_RNA (1)...(19): siRNA sense strand
cagauucgggagcucuaua

SEQ ID NO: 348874 - RNA, 19 nt, Homo sapiens
  misc_RNA (1)...(19): siRNA sense strand
ccuggaaguccuccuugua

SEQ ID NO: 348875 - RNA, 19 nt, Homo sapiens
  misc_RNA (1)...(19): siRNA sense strand
aagagugucuccagauggu

SEQ ID NO: 348876 - RNA, 19 nt, Homo sapiens
  misc_RNA (1)...(19): siRNA sense strand
ugaacaaccuccuuuugga

SEQ ID NO: 348877 - RNA, 19 nt, Homo sapiens
  misc_RNA (1)...(19): siRNA sense strand
gcuggccaccacuaaguuu

SEQ ID NO: 348878 - RNA, 19 nt, Homo sapiens
  misc_RNA (1)...(19): siRNA sense strand
gcggcuggaugaguuugaa

SEQ ID NO: 348879 - RNA, 19 nt, Homo sapiens
  misc_RNA (1)...(19): siRNA sense strand
gaaagagcugaacaagaag

SEQ ID NO: 348880 - RNA, 19 nt, Homo sapiens
  misc_RNA (1)...(19): siRNA sense strand
acucugaggccuuccacua

SEQ ID NO: 348881 - RNA, 19 nt, Homo sapiens
  misc_RNA (1)...(19): siRNA sense strand
gaaugguggcuccuggaau

SEQ ID NO: 348882 - RNA, 19 nt, Homo sapiens
  misc_RNA (1)...(19): siRNA sense strand
gugcugauacuccaguguu

SEQ ID NO: 348883 - RNA, 19 nt, Homo sapiens
  misc_RNA (1)...(19): siRNA sense strand
gaagcguuccguccagaag

SEQ ID NO: 348884 - RNA, 19 nt, Homo sapiens
  misc_RNA (1)...(19): siRNA sense strand
ggaagaagcuugcugaguu

SEQ ID NO: 348885 - RNA, 19 nt, Homo sapiens
  misc_RNA (1)...(19): siRNA sense strand
agaaagagcugaacaagaa

SEQ ID NO: 348886 - RNA, 19 nt, Homo sapiens
  misc_RNA (1)...(19): siRNA sense strand
ggaagcagcugauuauuag

SEQ ID NO: 348887 - RNA, 19 nt, Homo sapiens
  misc_RNA (1)...(19): siRNA sense strand
gaagauuacuacaccgaua

SEQ ID NO: 348888 - RNA, 19 nt, Homo sapiens
  misc_RNA (1)...(19): siRNA sense strand
gcaagucacccaucagaua

SEQ ID NO: 348889 - RNA, 19 nt, Homo sapiens
  misc_RNA (1)...(19): siRNA sense strand
gcaauaggguggcacagaa

SEQ ID NO: 348890 - RNA, 19 nt, Homo sapiens
  misc_RNA (1)...(19): siRNA sense strand
cuacagagaucccacacua

SEQ ID NO: 348891 - RNA, 19 nt, Homo sapiens
  misc_RNA (1)...(19): siRNA sense strand
gaagaaggcuuuuaagaug

SEQ ID NO: 348892 - RNA, 19 nt, Homo sapiens
  misc_RNA (1)...(19): siRNA sense strand
gagcuugugugcccugaua

SEQ ID NO: 348893 - RNA, 19 nt, Homo sapiens
  misc_RNA (1)...(19): siRNA sense strand
ggagcuaccuuccugugua

SEQ ID NO: 348894 - RNA, 19 nt, Homo sapiens
  misc_RNA (1)...(19): siRNA sense strand
ggaaugaccugccaguaca

SEQ ID NO: 348895 - RNA, 19 nt, Homo sapiens
  misc_RNA (1)...(19): siRNA sense strand
gaagugagcgcaagcuuga

SEQ ID NO: 348896 - RNA, 19 nt, Homo sapiens
  misc_RNA (1)...(19): siRNA sense strand
gaagauucaugcaggaaga

SEQ ID NO: 348897 - RNA, 19 nt, Homo sapiens
  misc_RNA (1)...(19): siRNA sense strand
gaagaagcuugcugaguuc

SEQ ID NO: 348898 - RNA, 19 nt, Homo sapiens
  misc_RNA (1)...(19): siRNA sense strand
ccacacuacuuccggcuua

SEQ ID NO: 348899 - RNA, 19 nt, Homo sapiens
  misc_RNA (1)...(19): siRNA sense strand
gaacuacauugggauaaau

SEQ ID NO: 348900 - RNA, 19 nt, Homo sapiens
  misc_RNA (1)...(19): siRNA sense strand
ugaaauugguccaguuuau

SEQ ID NO: 348901 - RNA, 19 nt, Homo sapiens
  misc_RNA (1)...(19): siRNA sense strand
ggccaaggcuccuaugaug

SEQ ID NO: 348902 - RNA, 19 nt, Homo sapiens
  misc_RNA (1)...(19): siRNA sense strand
gagaugguguuuacucaga

SEQ ID NO: 348903 - RNA, 19 nt, Homo sapiens
  misc_RNA (1)...(19): siRNA sense strand
ggaaaggccugaggaugug

SEQ ID NO: 348904 - RNA, 19 nt, Homo sapiens
  misc_RNA (1)...(19): siRNA sense strand
ggagaccuauguuccagaa

SEQ ID NO: 348905 - RNA, 19 nt, Homo sapiens
  misc_RNA (1)...(19): siRNA sense strand
cccgggacaugcuauauua

SEQ ID NO: 348906 - RNA, 19 nt, Homo sapiens
  misc_RNA (1)...(19): siRNA sense strand
gagagaugguguuuacuca

SEQ ID NO: 348907 - RNA, 19 nt, Homo sapiens
  misc_RNA (1)...(19): siRNA sense strand
ggugaaaggcucaguagaa

SEQ ID NO: 348908 - RNA, 19 nt, Homo sapiens
  misc_RNA (1)...(19): siRNA sense strand
gcuaggaagcagcugauua

SEQ ID NO: 348909 - RNA, 19 nt, Homo sapiens
  misc_RNA (1)...(19): siRNA sense strand
ggaugaguuugaaauguug

SEQ ID NO: 348910 - RNA, 19 nt, Homo sapiens
  misc_RNA (1)...(19): siRNA sense strand
gaagacaaccaucacacuu

SEQ ID NO: 348911 - RNA, 19 nt, Homo sapiens
  misc_RNA (1)...(19): siRNA sense strand
gaagcuugcugaguucgaa

SEQ ID NO: 348912 - RNA, 19 nt, Homo sapiens
  misc_RNA (1)...(19): siRNA sense strand
cacagaagcucaucucagu

SEQ ID NO: 348913 - RNA, 19 nt, Homo sapiens
  misc_RNA (1)...(19): siRNA sense strand
gagagcagcuggauuuuau

SEQ ID NO: 348914 - RNA, 19 nt, Homo sapiens
  misc_RNA (1)...(19): siRNA sense strand
ggagaacuacauugggaua

SEQ ID NO: 348915 - RNA, 19 nt, Homo sapiens
  misc_RNA (1)...(19): siRNA sense strand
ccaguacauuguccaguuu

SEQ ID NO: 348916 - RNA, 19 nt, Homo sapiens
  misc_RNA (1)...(19): siRNA sense strand
gagcuaccuuccuguguau

SEQ ID NO: 348917 - RNA, 19 nt, Homo sapiens
  misc_RNA (1)...(19): siRNA sense strand
ggaauugggcagcugauug

SEQ ID NO: 348918 - RNA, 19 nt, Homo sapiens
  misc_RNA (1)...(19): siRNA sense strand
agagagagaugguguuuac

SEQ ID NO: 348919 - RNA, 19 nt, Homo sapiens
  misc_RNA (1)...(19): siRNA sense strand
gccaguacauuguccaguu

SEQ ID NO: 348920 - RNA, 19 nt, Homo sapiens
  misc_RNA (1)...(19): siRNA sense strand
gaccaacacuacagagauc

SEQ ID NO: 348921 - RNA, 19 nt, Homo sapiens
  misc_RNA (1)...(19): siRNA sense strand
caaaacagccugagcaaaa

SEQ ID NO: 348922 - RNA, 19 nt, Homo sapiens
  misc_RNA (1)...(19): siRNA sense strand
agacaaccaucacacuuau

SEQ ID NO: 348923 - RNA, 19 nt, Homo sapiens
  misc_RNA (1)...(19): siRNA sense strand
ugaguucgaagaugaguua

SEQ ID NO: 348924 - RNA, 19 nt, Homo sapiens
  misc_RNA (1)...(19): siRNA sense strand
gaaauugguccaguuuaug

SEQ ID NO: 348925 - RNA, 19 nt, Homo sapiens
  misc_RNA (1)...(19): siRNA sense strand
gaacccuucgccugaauaa

SEQ ID NO: 348926 - RNA, 19 nt, Homo sapiens
  misc_RNA (1)...(19): siRNA sense strand
ggacugcaaguggccauua

SEQ ID NO: 348927 - RNA, 19 nt, Homo sapiens
  misc_RNA (1)...(19): siRNA sense strand
gaagaaagagcugaacaag

SEQ ID NO: 348928 - RNA, 19 nt, Homo sapiens
  misc_RNA (1)...(19): siRNA sense strand
gcccugagauccugcacaa

SEQ ID NO: 348929 - RNA, 19 nt, Homo sapiens
  misc_RNA (1)...(19): siRNA sense strand
aggaagcagcugauuauua

SEQ ID NO: 348930 - RNA, 19 nt, Homo sapiens
  misc_RNA (1)...(19): siRNA sense strand
uggaugaguuugaaauguu

SEQ ID NO: 348931 - RNA, 19 nt, Homo sapiens
  misc_RNA (1)...(19): siRNA sense strand
cgucucagcccuucaguuu

SEQ ID NO: 348932 - RNA, 19 nt, Homo sapiens
  misc_RNA (1)...(19): siRNA sense strand
gcccagcacuucauacgau

SEQ ID NO: 348933 - RNA, 19 nt, Homo sapiens
  misc_RNA (1)...(19): siRNA sense strand
ggaaguccuccuuguauuc

SEQ ID NO: 348934 - RNA, 19 nt, Homo sapiens
  misc_RNA (1)...(19): siRNA sense strand
ugaagagugucuccagaug

SEQ ID NO: 348935 - RNA, 19 nt, Homo sapiens
  misc_RNA (1)...(19): siRNA sense strand
ccaaagaaaggaccagaga

SEQ ID NO: 348936 - RNA, 19 nt, Homo sapiens
  misc_RNA (1)...(19): siRNA sense strand
aggaagagcugacccaucu

SEQ ID NO: 348937 - RNA, 19 nt, Homo sapiens
  misc_RNA (1)...(19): siRNA sense strand
cuggagagcucacagacuu

SEQ ID NO: 348938 - RNA, 19 nt, Homo sapiens
  misc_RNA (1)...(19): siRNA sense strand
gccagaagcaggaguguga

SEQ ID NO: 348939 - RNA, 19 nt, Homo sapiens
  misc_RNA (1)...(19): siRNA sense strand
agaccuauguuccagaaga

SEQ ID NO: 348940 - RNA, 19 nt, Homo sapiens
  misc_RNA (1)...(19): siRNA sense strand
ggagagcucacagacuuaa

SEQ ID NO: 348941 - RNA, 19 nt, Homo sapiens
  misc_RNA (1)...(19): siRNA sense strand
guucaaaacugacauuuag

SEQ ID NO: 348942 - RNA, 19 nt, Homo sapiens
  misc_RNA (1)...(19): siRNA sense strand
gcucccagcugaccagaca

SEQ ID NO: 348943 - RNA, 19 nt, Homo sapiens
  misc_RNA (1)...(19): siRNA sense strand
ccacugaggacccguguga

SEQ ID NO: 348944 - RNA, 19 nt, Homo sapiens
  misc_RNA (1)...(19): siRNA sense strand
aagacaaccaucacacuua

SEQ ID NO: 348945 - RNA, 19 nt, Homo sapiens
  misc_RNA (1)...(19): siRNA sense strand
gaucagcgacugccacauc

SEQ ID NO: 348946 - RNA, 19 nt, Homo sapiens
  misc_RNA (1)...(19): siRNA sense strand
cauggaauuuaacuccuaa

SEQ ID NO: 348947 - RNA, 19 nt, Homo sapiens
  misc_RNA (1)...(19): siRNA sense strand
aaagaagccagcaccgaua

SEQ ID NO: 348948 - RNA, 19 nt, Homo sapiens
  misc_RNA (1)...(19): siRNA sense strand
gcuccuaugaugagagaua

SEQ ID NO: 348949 - RNA, 19 nt, Homo sapiens
  misc_RNA (1)...(19): siRNA sense strand
gauaggagaauuccagagu

SEQ ID NO: 348950 - RNA, 19 nt, Homo sapiens
  misc_RNA (1)...(19): siRNA sense strand
agccugacauggaauuuaa

SEQ ID NO: 348951 - RNA, 19 nt, Homo sapiens
  misc_RNA (1)...(19): siRNA sense strand
cgugaggccugcacagcua

SEQ ID NO: 348952 - RNA, 19 nt, Homo sapiens
  misc_RNA (1)...(19): siRNA sense strand
gaccagccuucccaacaug

SEQ ID NO: 348953 - RNA, 19 nt, Homo sapiens
  misc_RNA (1)...(19): siRNA sense strand
cuaaggagagcucugauug

SEQ ID NO: 348954 - RNA, 19 nt, Homo sapiens
  misc_RNA (1)...(19): siRNA sense strand
acauugaggcugucuuuaa

SEQ ID NO: 348955 - RNA, 19 nt, Homo sapiens
  misc_RNA (1)...(19): siRNA sense strand
agaacuacauugggauaaa

SEQ ID NO: 348956 - RNA, 19 nt, Homo sapiens
  misc_RNA (1)...(19): siRNA sense strand
cuaggaagcagcugauuau

SEQ ID NO: 348957 - RNA, 19 nt, Homo sapiens
  misc_RNA (1)...(19): siRNA sense strand
gggacaugcuauauuagug

SEQ ID NO: 348958 - RNA, 19 nt, Homo sapiens
  misc_RNA (1)...(19): siRNA sense strand
agagagagcuagacagacu

SEQ ID NO: 348959 - RNA, 19 nt, Homo sapiens
  misc_RNA (1)...(19): siRNA sense strand
gaucuauauuucuggugaa

SEQ ID NO: 348960 - RNA, 19 nt, Homo sapiens
  misc_RNA (1)...(19): siRNA sense strand
gcagccagguggagguuag

SEQ ID NO: 348961 - RNA, 19 nt, Homo sapiens
  misc_RNA (1)...(19): siRNA sense strand
aaugguggcuccuggaaug

SEQ ID NO: 348962 - RNA, 19 nt, Homo sapiens
  misc_RNA (1)...(19): siRNA sense strand
ugccgaagcuacuggacua

SEQ ID NO: 348963 - RNA, 19 nt, Homo sapiens
  misc_RNA (1)...(19): siRNA sense strand
gcaguaccaucuacaucuc

SEQ ID NO: 348964 - RNA, 19 nt, Homo sapiens
  misc_RNA (1)...(19): siRNA sense strand
ggucaucggcgacgaagug

SEQ ID NO: 348965 - RNA, 19 nt, Homo sapiens
  misc_RNA (1)...(19): siRNA sense strand
ccauuaccaucucuaagga

SEQ ID NO: 348966 - RNA, 19 nt, Homo sapiens
  misc_RNA (1)...(19): siRNA sense strand
uaaaugugaagaaggcuuu

SEQ ID NO: 348967 - RNA, 19 nt, Homo sapiens
  misc_RNA (1)...(19): siRNA sense strand
uugcugaguucgaagauga

SEQ ID NO: 348968 - RNA, 19 nt, Homo sapiens
  misc_RNA (1)...(19): siRNA sense strand
uuugggaccugcuuuguga

SEQ ID NO: 348969 - RNA, 19 nt, Homo sapiens
  misc_RNA (1)...(19): siRNA sense strand
caucggaauucagccauga

SEQ ID NO: 348970 - RNA, 19 nt, Homo sapiens
  misc_RNA (1)...(19): siRNA sense strand
ggccugcccucaucaucaa

SEQ ID NO: 348971 - RNA, 19 nt, Homo sapiens
  misc_RNA (1)...(19): siRNA sense strand
aaauguggguuucaguguu

SEQ ID NO: 348972 - RNA, 19 nt, Homo sapiens
  misc_RNA (1)...(19): siRNA sense strand
auaggagaauuccagagua

SEQ ID NO: 348973 - RNA, 19 nt, Homo sapiens
  misc_RNA (1)...(19): siRNA sense strand
caaagaaaggaccagagaa

SEQ ID NO: 348974 - RNA, 19 nt, Homo sapiens
  misc_RNA (1)...(19): siRNA sense strand
cauugaggcugucuuuaag

SEQ ID NO: 348975 - RNA, 19 nt, Homo sapiens
  misc_RNA (1)...(19): siRNA sense strand
uggaaguccuccuuguauu

SEQ ID NO: 348976 - RNA, 19 nt, Homo sapiens
  misc_RNA (1)...(19): siRNA sense strand
gaccaccuccuacacuauu

SEQ ID NO: 348977 - RNA, 19 nt, Homo sapiens
  misc_RNA (1)...(19): siRNA sense strand
uugggcagcugauugcuuu

SEQ ID NO: 348978 - RNA, 19 nt, Homo sapiens
  misc_RNA (1)...(19): siRNA sense strand
gagagagagaugguguuua

SEQ ID NO: 348979 - RNA, 19 nt, Homo sapiens
  misc_RNA (1)...(19): siRNA sense strand
cccaagauaucucgcacuu

SEQ ID NO: 348980 - RNA, 19 nt, Homo sapiens
  misc_RNA (1)...(19): siRNA sense strand
uuuaagauguggaacaaca

SEQ ID NO: 348981 - RNA, 19 nt, Homo sapiens
  misc_RNA (1)...(19): siRNA sense strand
gugaaaggcucaguagaac

SEQ ID NO: 348982 - RNA, 19 nt, Homo sapiens
  misc_RNA (1)...(19): siRNA sense strand
gcagcugauuauuagaaau

SEQ ID NO: 348983 - RNA, 19 nt, Homo sapiens
  misc_RNA (1)...(19): siRNA sense strand
ucgagagccuugucagguu

SEQ ID NO: 348984 - RNA, 19 nt, Homo sapiens
  misc_RNA (1)...(19): siRNA sense strand
ggaagaagcuugcugaguu

SEQ ID NO: 348985 - RNA, 19 nt, Homo sapiens
  misc_RNA (1)...(19): siRNA sense strand
agaaagagcugaacaagaa

SEQ ID NO: 348986 - RNA, 19 nt, Homo sapiens
  misc_RNA (1)...(19): siRNA sense strand
gaagauuacuacaccgaua

SEQ ID NO: 348987 - RNA, 19 nt, Homo sapiens
  misc_RNA (1)...(19): siRNA sense strand
ggaaugaccugccaguaca

SEQ ID NO: 348988 - RNA, 19 nt, Homo sapiens
  misc_RNA (1)...(19): siRNA sense strand
gaagugagcgcaagcuuga

SEQ ID NO: 348989 - RNA, 19 nt, Homo sapiens
  misc_RNA (1)...(19): siRNA sense strand
gaagauucaugcaggaaga

SEQ ID NO: 348990 - RNA, 19 nt, Homo sapiens
  misc_RNA (1)...(19): siRNA sense strand
gaagaagcuugcugaguuc

SEQ ID NO: 348991 - RNA, 19 nt, Homo sapiens
  misc_RNA (1)...(19): siRNA sense strand
ugaaauugguccaguuuau

SEQ ID NO: 348992 - RNA, 19 nt, Homo sapiens
  misc_RNA (1)...(19): siRNA sense strand
cccgggacaugcuauauua

SEQ ID NO: 348993 - RNA, 19 nt, Homo sapiens
  misc_RNA (1)...(19): siRNA sense strand
ggaugaguuugaaauguug

SEQ ID NO: 348994 - RNA, 19 nt, Homo sapiens
  misc_RNA (1)...(19): siRNA sense strand
gaagcuugcugaguucgaa

SEQ ID NO: 348995 - RNA, 19 nt, Homo sapiens
  misc_RNA (1)...(19): siRNA sense strand
ccaguacauuguccaguuu

SEQ ID NO: 348996 - RNA, 19 nt, Homo sapiens
  misc_RNA (1)...(19): siRNA sense strand
gccaguacauuguccaguu

SEQ ID NO: 348997 - RNA, 19 nt, Homo sapiens
  misc_RNA (1)...(19): siRNA sense strand
ugaguucgaagaugaguua

SEQ ID NO: 348998 - RNA, 19 nt, Homo sapiens
  misc_RNA (1)...(19): siRNA sense strand
gaaauugguccaguuuaug

SEQ ID NO: 348999 - RNA, 19 nt, Homo sapiens
  misc_RNA (1)...(19): siRNA sense strand
gaagaaagagcugaacaag

SEQ ID NO: 349000 - RNA, 19 nt, Homo sapiens
  misc_RNA (1)...(19): siRNA sense strand
ggaaguccuccuuguauuc

SEQ ID NO: 349001 - RNA, 19 nt, Homo sapiens
  misc_RNA (1)...(19): siRNA sense strand
ugaagagugucuccagaug

SEQ ID NO: 349002 - RNA, 19 nt, Homo sapiens
  misc_RNA (1)...(19): siRNA sense strand
uggaugaguuugaaauguu

SEQ ID NO: 349003 - RNA, 19 nt, Homo sapiens
  misc_RNA (1)...(19): siRNA sense strand
ccaaagaaaggaccagaga

SEQ ID NO: 349004 - RNA, 19 nt, Homo sapiens
  misc_RNA (1)...(19): siRNA sense strand
guucaaaacugacauuuag

SEQ ID NO: 349005 - RNA, 19 nt, Homo sapiens
  misc_RNA (1)...(19): siRNA sense strand
cauggaauuuaacuccuaa

SEQ ID NO: 349006 - RNA, 19 nt, Homo sapiens
  misc_RNA (1)...(19): siRNA sense strand
aaagaagccagcaccgaua

SEQ ID NO: 349007 - RNA, 19 nt, Homo sapiens
  misc_RNA (1)...(19): siRNA sense strand
gauaggagaauuccagagu

SEQ ID NO: 349008 - RNA, 19 nt, Homo sapiens
  misc_RNA (1)...(19): siRNA sense strand
agccugacauggaauuuaa

SEQ ID NO: 349009 - RNA, 19 nt, Homo sapiens
  misc_RNA (1)...(19): siRNA sense strand
gggacaugcuauauuagug

SEQ ID NO: 349010 - RNA, 19 nt, Homo sapiens
  misc_RNA (1)...(19): siRNA sense strand
agagagagcuagacagacu

SEQ ID NO: 349011 - RNA, 19 nt, Homo sapiens
  misc_RNA (1)...(19): siRNA sense strand
ggucaucggcgacgaagug

SEQ ID NO: 349012 - RNA, 19 nt, Homo sapiens
  misc_RNA (1)...(19): siRNA sense strand
aaugguggcuccuggaaug

SEQ ID NO: 349013 - RNA, 19 nt, Homo sapiens
  misc_RNA (1)...(19): siRNA sense strand
uugcugaguucgaagauga

SEQ ID NO: 349014 - RNA, 19 nt, Homo sapiens
  misc_RNA (1)...(19): siRNA sense strand
aaauguggguuucaguguu

SEQ ID NO: 349015 - RNA, 19 nt, Homo sapiens
  misc_RNA (1)...(19): siRNA sense strand
auaggagaauuccagagua

SEQ ID NO: 349016 - RNA, 19 nt, Homo sapiens
  misc_RNA (1)...(19): siRNA sense strand
caaagaaaggaccagagaa

SEQ ID NO: 349017 - RNA, 19 nt, Homo sapiens
  misc_RNA (1)...(19): siRNA sense strand
uggaaguccuccuuguauu

SEQ ID NO: 349018 - RNA, 19 nt, Homo sapiens
  misc_RNA (1)...(19): siRNA sense strand
ucgagagccuugucagguu

SEQ ID NO: 349019 - RNA, 19 nt, Homo sapiens
  misc_RNA (1)...(19): siRNA sense strand
ggaaugguggcuccuggaa

SEQ ID NO: 349020 - RNA, 19 nt, Homo sapiens
  misc_RNA (1)...(19): siRNA sense strand
gaaccucucaagaaagcaa

SEQ ID NO: 349021 - RNA, 19 nt, Homo sapiens
  misc_RNA (1)...(19): siRNA sense strand
acauggaauuuaacuccua

SEQ ID NO: 349022 - RNA, 19 nt, Homo sapiens
  misc_RNA (1)...(19): siRNA sense strand
cuacggaaacaucauuuga

SEQ ID NO: 349023 - RNA, 19 nt, Homo sapiens
  misc_RNA (1)...(19): siRNA sense strand
cccaagauaucucgcacuu

SEQ ID NO: 349024 - RNA, 19 nt, Homo sapiens
  misc_RNA (1)...(19): siRNA sense strand
aaauugguccaguuuauga

SEQ ID NO: 349025 - RNA, 19 nt, Homo sapiens
  misc_RNA (1)...(19): siRNA sense strand
acagagagagcuagacaga

SEQ ID NO: 349026 - RNA, 19 nt, Homo sapiens
  misc_RNA (1)...(19): siRNA sense strand
ccagucagcccacacacuu

SEQ ID NO: 349027 - RNA, 19 nt, Homo sapiens
  misc_RNA (1)...(19): siRNA sense strand
ccacagagagagcuagaca

SEQ ID NO: 349028 - RNA, 19 nt, Homo sapiens
  misc_RNA (1)...(19): siRNA sense strand
aauguggguuucaguguug

SEQ ID NO: 349029 - RNA, 19 nt, Homo sapiens
  misc_RNA (1)...(19): siRNA sense strand
uaauugcgcugcagaacac

SEQ ID NO: 349030 - RNA, 19 nt, Homo sapiens
  misc_RNA (1)...(19): siRNA sense strand
uaugaaauugguccaguuu

SEQ ID NO: 349031 - RNA, 19 nt, Homo sapiens
  misc_RNA (1)...(19): siRNA sense strand
cagcaccgauaggagaauu

SEQ ID NO: 349032 - RNA, 19 nt, Homo sapiens
  misc_RNA (1)...(19): siRNA sense strand
guacucagccgaggucauc

SEQ ID NO: 349033 - RNA, 19 nt, Homo sapiens
  misc_RNA (1)...(19): siRNA sense strand
gaagccagcaccgauagga

SEQ ID NO: 349034 - RNA, 19 nt, Homo sapiens
  misc_RNA (1)...(19): siRNA sense strand
ucgcugcgcacccaagaua

SEQ ID NO: 349035 - RNA, 19 nt, Homo sapiens
  misc_RNA (1)...(19): siRNA sense strand
cagguugccuccagugaag

SEQ ID NO: 349036 - RNA, 19 nt, Homo sapiens
  misc_RNA (1)...(19): siRNA sense strand
aauccugccuucgguguuu

SEQ ID NO: 349037 - RNA, 19 nt, Homo sapiens
  misc_RNA (1)...(19): siRNA sense strand
gaacaaccuccuuuuggaa

SEQ ID NO: 349038 - RNA, 19 nt, Homo sapiens
  misc_RNA (1)...(19): siRNA sense strand
guaauugcgcugcagaaca

SEQ ID NO: 349039 - RNA, 19 nt, Homo sapiens
  misc_RNA (1)...(19): siRNA sense strand
uaggagaauuccagaguac

SEQ ID NO: 349040 - RNA, 19 nt, Homo sapiens
  misc_RNA (1)...(19): siRNA sense strand
gcgaguugcuacggaaaca

SEQ ID NO: 349041 - RNA, 19 nt, Homo sapiens
  misc_RNA (1)...(19): siRNA sense strand
agaagaaagagcugaacaa

SEQ ID NO: 349042 - RNA, 19 nt, Homo sapiens
  misc_RNA (1)...(19): siRNA sense strand
uuuaugagaugguaauugc

SEQ ID NO: 349043 - RNA, 19 nt, Homo sapiens
  misc_RNA (1)...(19): siRNA sense strand
cuagcuaagccaccaauug

SEQ ID NO: 349044 - RNA, 19 nt, Homo sapiens
  misc_RNA (1)...(19): siRNA sense strand
cagccugacauggaauuua

SEQ ID NO: 349045 - RNA, 19 nt, Homo sapiens
  misc_RNA (1)...(19): siRNA sense strand
guggacagccugacaugga

SEQ ID NO: 349046 - RNA, 19 nt, Homo sapiens
  misc_RNA (1)...(19): siRNA sense strand
uggacagccugacauggaa

SEQ ID NO: 349047 - RNA, 19 nt, Homo sapiens
  misc_RNA (1)...(19): siRNA sense strand
uuaugaaauugguccaguu

SEQ ID NO: 349048 - RNA, 19 nt, Homo sapiens
  misc_RNA (1)...(19): siRNA sense strand
uagcuaagccaccaauugg

SEQ ID NO: 349049 - RNA, 19 nt, Homo sapiens
  misc_RNA (1)...(19): siRNA sense strand
gagaauuccagaguacaga

SEQ ID NO: 349050 - RNA, 19 nt, Homo sapiens
  misc_RNA (1)...(19): siRNA sense strand
guguauagacagcgaguug

SEQ ID NO: 349051 - RNA, 19 nt, Homo sapiens
  misc_RNA (1)...(19): siRNA sense strand
ugugguuacugccucauug

SEQ ID NO: 349052 - RNA, 19 nt, Homo sapiens
  misc_RNA (1)...(19): siRNA sense strand
ucacagauuaugaaauugg

SEQ ID NO: 349053 - RNA, 19 nt, Homo sapiens
  misc_RNA (1)...(19): siRNA sense strand
uaacuccuaaggccaaaga

SEQ ID NO: 349054 - RNA, 19 nt, Homo sapiens
  misc_RNA (1)...(19): siRNA sense strand
aagaaagagcugaacaaga

SEQ ID NO: 349055 - RNA, 19 nt, Homo sapiens
  misc_RNA (1)...(19): siRNA sense strand
ccuggaaguccuccuugua

SEQ ID NO: 349056 - RNA, 19 nt, Homo sapiens
  misc_RNA (1)...(19): siRNA sense strand
cagauucgggagcucuaua

SEQ ID NO: 349057 - RNA, 19 nt, Homo sapiens
  misc_RNA (1)...(19): siRNA sense strand
aaagaaaggaccagagaac

SEQ ID NO: 349058 - RNA, 19 nt, Homo sapiens
  misc_RNA (1)...(19): siRNA sense strand
aagagugucuccagauggu

SEQ ID NO: 349059 - RNA, 19 nt, Homo sapiens
  misc_RNA (1)...(19): siRNA sense strand
ugaacaaccuccuuuugga

SEQ ID NO: 349060 - RNA, 19 nt, Homo sapiens
  misc_RNA (1)...(19): siRNA sense strand
gcuggccaccacuaaguuu

SEQ ID NO: 349061 - RNA, 19 nt, Homo sapiens
  misc_RNA (1)...(19): siRNA sense strand
gcggcuggaugaguuugaa

SEQ ID NO: 349062 - RNA, 19 nt, Homo sapiens
  misc_RNA (1)...(19): siRNA sense strand
gaaagagcugaacaagaag

SEQ ID NO: 349063 - RNA, 19 nt, Homo sapiens
  misc_RNA (1)...(19): siRNA sense strand
gaaugguggcuccuggaau

SEQ ID NO: 349064 - RNA, 19 nt, Homo sapiens
  misc_RNA (1)...(19): siRNA sense strand
gugcugauacuccaguguu

SEQ ID NO: 349065 - RNA, 19 nt, Homo sapiens
  misc_RNA (1)...(19): siRNA sense strand
acucugaggccuuccacua

SEQ ID NO: 349066 - RNA, 19 nt, Homo sapiens
  misc_RNA (1)...(19): siRNA sense strand
gaagcguuccguccagaag

SEQ ID NO: 349067 - RNA, 19 nt, Homo sapiens
  misc_RNA (1)...(19): siRNA sense strand
gcuacggaaacaucauuug

SEQ ID NO: 349068 - RNA, 19 nt, Homo sapiens
  misc_RNA (1)...(19): siRNA sense strand
cauugcaaccgucggcuuu

SEQ ID NO: 349069 - RNA, 19 nt, Homo sapiens
  misc_RNA (1)...(19): siRNA sense strand
uucgggagcucuauaagca

SEQ ID NO: 349070 - RNA, 19 nt, Homo sapiens
  misc_RNA (1)...(19): siRNA sense strand
cuccaguguuucuagcuaa

SEQ ID NO: 349071 - RNA, 19 nt, Homo sapiens
  misc_RNA (1)...(19): siRNA sense strand
gauacuccaguguuucuag

SEQ ID NO: 349072 - RNA, 19 nt, Homo sapiens
  misc_RNA (1)...(19): siRNA sense strand
ggagaauuccagaguacag

SEQ ID NO: 349073 - RNA, 19 nt, Homo sapiens
  misc_RNA (1)...(19): siRNA sense strand
ucugaggccuuccacuaca

SEQ ID NO: 349074 - RNA, 19 nt, Homo sapiens
  misc_RNA (1)...(19): siRNA sense strand
gcuggaugaguuugaaaug

SEQ ID NO: 349075 - RNA, 19 nt, Homo sapiens
  misc_RNA (1)...(19): siRNA sense strand
gugaagagugucuccagau

SEQ ID NO: 349076 - RNA, 19 nt, Homo sapiens
  misc_RNA (1)...(19): siRNA sense strand
ccaaaacgcggaggucuuu

SEQ ID NO: 349077 - RNA, 19 nt, Homo sapiens
  misc_RNA (1)...(19): siRNA sense strand
cuggaaguccuccuuguau

SEQ ID NO: 349078 - RNA, 19 nt, Homo sapiens
  misc_RNA (1)...(19): siRNA sense strand
acaagcuggccaccacuaa

SEQ ID NO: 349079 - RNA, 19 nt, Homo sapiens
  misc_RNA (1)...(19): siRNA sense strand
uaagccaccaauuggguuu

SEQ ID NO: 349080 - RNA, 19 nt, Homo sapiens
  misc_RNA (1)...(19): siRNA sense strand
acuccaguguuucuagcua

SEQ ID NO: 349081 - RNA, 19 nt, Homo sapiens
  misc_RNA (1)...(19): siRNA sense strand
gauauggaggcaagucucu

SEQ ID NO: 349082 - RNA, 19 nt, Homo sapiens
  misc_RNA (1)...(19): siRNA sense strand
cagaagaaagagcugaaca

SEQ ID NO: 349083 - RNA, 19 nt, Homo sapiens
  misc_RNA (1)...(19): siRNA sense strand
cuggaugaguuugaaaugu

SEQ ID NO: 349084 - RNA, 19 nt, Homo sapiens
  misc_RNA (1)...(19): siRNA sense strand
ggaagaagcuugcugaguu

SEQ ID NO: 349085 - RNA, 19 nt, Homo sapiens
  misc_RNA (1)...(19): siRNA sense strand
agaaagagcugaacaagaa

SEQ ID NO: 349086 - RNA, 19 nt, Homo sapiens
  misc_RNA (1)...(19): siRNA sense strand
ggaagcagcugauuauuag

SEQ ID NO: 349087 - RNA, 19 nt, Homo sapiens
  misc_RNA (1)...(19): siRNA sense strand
gaagauuacuacaccgaua

SEQ ID NO: 349088 - RNA, 19 nt, Homo sapiens
  misc_RNA (1)...(19): siRNA sense strand
ggaaugaccugccaguaca

SEQ ID NO: 349089 - RNA, 19 nt, Homo sapiens
  misc_RNA (1)...(19): siRNA sense strand
gaagugagcgcaagcuuga

SEQ ID NO: 349090 - RNA, 19 nt, Homo sapiens
  misc_RNA (1)...(19): siRNA sense strand
gaagauucaugcaggaaga

SEQ ID NO: 349091 - RNA, 19 nt, Homo sapiens
  misc_RNA (1)...(19): siRNA sense strand
gaagaagcuugcugaguuc

SEQ ID NO: 349092 - RNA, 19 nt, Homo sapiens
  misc_RNA (1)...(19): siRNA sense strand
ugaaauugguccaguuuau

SEQ ID NO: 349093 - RNA, 19 nt, Homo sapiens
  misc_RNA (1)...(19): siRNA sense strand
cccgggacaugcuauauua

SEQ ID NO: 349094 - RNA, 19 nt, Homo sapiens
  misc_RNA (1)...(19): siRNA sense strand
gcuaggaagcagcugauua

SEQ ID NO: 349095 - RNA, 19 nt, Homo sapiens
  misc_RNA (1)...(19): siRNA sense strand
ggaugaguuugaaauguug

SEQ ID NO: 349096 - RNA, 19 nt, Homo sapiens
  misc_RNA (1)...(19): siRNA sense strand
gaagcuugcugaguucgaa

SEQ ID NO: 349097 - RNA, 19 nt, Homo sapiens
  misc_RNA (1)...(19): siRNA sense strand
ccaguacauuguccaguuu

SEQ ID NO: 349098 - RNA, 19 nt, Homo sapiens
  misc_RNA (1)...(19): siRNA sense strand
ggaauugggcagcugauug

SEQ ID NO: 349099 - RNA, 19 nt, Homo sapiens
  misc_RNA (1)...(19): siRNA sense strand
gccaguacauuguccaguu

SEQ ID NO: 349100 - RNA, 19 nt, Homo sapiens
  misc_RNA (1)...(19): siRNA sense strand
ugaguucgaagaugaguua

SEQ ID NO: 349101 - RNA, 19 nt, Homo sapiens
  misc_RNA (1)...(19): siRNA sense strand
gaaauugguccaguuuaug

SEQ ID NO: 349102 - RNA, 19 nt, Homo sapiens
  misc_RNA (1)...(19): siRNA sense strand
gaagaaagagcugaacaag

SEQ ID NO: 349103 - RNA, 19 nt, Homo sapiens
  misc_RNA (1)...(19): siRNA sense strand
aggaagcagcugauuauua

SEQ ID NO: 349104 - RNA, 19 nt, Homo sapiens
  misc_RNA (1)...(19): siRNA sense strand
uggaugaguuugaaauguu

SEQ ID NO: 349105 - RNA, 19 nt, Homo sapiens
  misc_RNA (1)...(19): siRNA sense strand
ggaaguccuccuuguauuc

SEQ ID NO: 349106 - RNA, 19 nt, Homo sapiens
  misc_RNA (1)...(19): siRNA sense strand
gcccagcacuucauacgau

SEQ ID NO: 349107 - RNA, 19 nt, Homo sapiens
  misc_RNA (1)...(19): siRNA sense strand
ugaagagugucuccagaug

SEQ ID NO: 349108 - RNA, 19 nt, Homo sapiens
  misc_RNA (1)...(19): siRNA sense strand
ccaaagaaaggaccagaga

SEQ ID NO: 349109 - RNA, 19 nt, Homo sapiens
  misc_RNA (1)...(19): siRNA sense strand
cuggagagcucacagacuu

SEQ ID NO: 349110 - RNA, 19 nt, Homo sapiens
  misc_RNA (1)...(19): siRNA sense strand
ggagagcucacagacuuaa

SEQ ID NO: 349111 - RNA, 19 nt, Homo sapiens
  misc_RNA (1)...(19): siRNA sense strand
guucaaaacugacauuuag

SEQ ID NO: 349112 - RNA, 19 nt, Homo sapiens
  misc_RNA (1)...(19): siRNA sense strand
cauggaauuuaacuccuaa

SEQ ID NO: 349113 - RNA, 19 nt, Homo sapiens
  misc_RNA (1)...(19): siRNA sense strand
aaagaagccagcaccgaua

SEQ ID NO: 349114 - RNA, 19 nt, Homo sapiens
  misc_RNA (1)...(19): siRNA sense strand
gauaggagaauuccagagu

SEQ ID NO: 349115 - RNA, 19 nt, Homo sapiens
  misc_RNA (1)...(19): siRNA sense strand
agccugacauggaauuuaa

SEQ ID NO: 349116 - RNA, 19 nt, Homo sapiens
  misc_RNA (1)...(19): siRNA sense strand
cuaggaagcagcugauuau

SEQ ID NO: 349117 - RNA, 19 nt, Homo sapiens
  misc_RNA (1)...(19): siRNA sense strand
gggacaugcuauauuagug

SEQ ID NO: 349118 - RNA, 19 nt, Homo sapiens
  misc_RNA (1)...(19): siRNA sense strand
agagagagcuagacagacu

SEQ ID NO: 349119 - RNA, 19 nt, Homo sapiens
  misc_RNA (1)...(19): siRNA sense strand
gaucuauauuucuggugaa

SEQ ID NO: 349120 - RNA, 19 nt, Homo sapiens
  misc_RNA (1)...(19): siRNA sense strand
ggucaucggcgacgaagug

SEQ ID NO: 349121 - RNA, 19 nt, Homo sapiens
  misc_RNA (1)...(19): siRNA sense strand
aaugguggcuccuggaaug

SEQ ID NO: 349122 - RNA, 19 nt, Homo sapiens
  misc_RNA (1)...(19): siRNA sense strand
uugcugaguucgaagauga

SEQ ID NO: 349123 - RNA, 19 nt, Homo sapiens
  misc_RNA (1)...(19): siRNA sense strand
aaauguggguuucaguguu

SEQ ID NO: 349124 - RNA, 19 nt, Homo sapiens
  misc_RNA (1)...(19): siRNA sense strand
auaggagaauuccagagua

SEQ ID NO: 349125 - RNA, 19 nt, Homo sapiens
  misc_RNA (1)...(19): siRNA sense strand
caaagaaaggaccagagaa

SEQ ID NO: 349126 - RNA, 19 nt, Homo sapiens
  misc_RNA (1)...(19): siRNA sense strand
uggaaguccuccuuguauu

SEQ ID NO: 349127 - RNA, 19 nt, Homo sapiens
  misc_RNA (1)...(19): siRNA sense strand
cccaagauaucucgcacuu

SEQ ID NO: 349128 - RNA, 19 nt, Homo sapiens
  misc_RNA (1)...(19): siRNA sense strand
gcagcugauuauuagaaau

SEQ ID NO: 349129 - RNA, 19 nt, Homo sapiens
  misc_RNA (1)...(19): siRNA sense strand
uugggcagcugauugcuuu

SEQ ID NO: 349130 - RNA, 19 nt, Homo sapiens
  misc_RNA (1)...(19): siRNA sense strand
ggaaugguggcuccuggaa

SEQ ID NO: 349131 - RNA, 19 nt, Homo sapiens
  misc_RNA (1)...(19): siRNA sense strand
gaaccucucaagaaagcaa

SEQ ID NO: 349132 - RNA, 19 nt, Homo sapiens
  misc_RNA (1)...(19): siRNA sense strand
acauggaauuuaacuccua

SEQ ID NO: 349133 - RNA, 19 nt, Homo sapiens
  misc_RNA (1)...(19): siRNA sense strand
cuacggaaacaucauuuga

SEQ ID NO: 349134 - RNA, 19 nt, Homo sapiens
  misc_RNA (1)...(19): siRNA sense strand
ucgagagccuugucagguu

SEQ ID NO: 349135 - RNA, 19 nt, Homo sapiens
  misc_RNA (1)...(19): siRNA sense strand
aaauugguccaguuuauga

SEQ ID NO: 349136 - RNA, 19 nt, Homo sapiens
  misc_RNA (1)...(19): siRNA sense strand
acagagagagcuagacaga

SEQ ID NO: 349137 - RNA, 19 nt, Homo sapiens
  misc_RNA (1)...(19): siRNA sense strand
ccagucagcccacacacuu

SEQ ID NO: 349138 - RNA, 19 nt, Homo sapiens
  misc_RNA (1)...(19): siRNA sense strand
ccacagagagagcuagaca

SEQ ID NO: 349139 - RNA, 19 nt, Homo sapiens
  misc_RNA (1)...(19): siRNA sense strand
aauguggguuucaguguug

SEQ ID NO: 349140 - RNA, 19 nt, Homo sapiens
  misc_RNA (1)...(19): siRNA sense strand
uaauugcgcugcagaacac

SEQ ID NO: 349141 - RNA, 19 nt, Homo sapiens
  misc_RNA (1)...(19): siRNA sense strand
uaugaaauugguccaguuu

SEQ ID NO: 349142 - RNA, 19 nt, Homo sapiens
  misc_RNA (1)...(19): siRNA sense strand
cagcaccgauaggagaauu

SEQ ID NO: 349143 - RNA, 19 nt, Homo sapiens
  misc_RNA (1)...(19): siRNA sense strand
gaagccagcaccgauagga

SEQ ID NO: 349144 - RNA, 19 nt, Homo sapiens
  misc_RNA (1)...(19): siRNA sense strand
cagcugauuauuagaaaug

SEQ ID NO: 349145 - RNA, 19 nt, Homo sapiens
  misc_RNA (1)...(19): siRNA sense strand
gcagcugauugcuuuggau

SEQ ID NO: 349146 - RNA, 19 nt, Homo sapiens
  misc_RNA (1)...(19): siRNA sense strand
ucgcugcgcacccaagaua

SEQ ID NO: 349147 - RNA, 19 nt, Homo sapiens
  misc_RNA (1)...(19): siRNA sense strand
guacucagccgaggucauc

SEQ ID NO: 349148 - RNA, 19 nt, Homo sapiens
  misc_RNA (1)...(19): siRNA sense strand
cagguugccuccagugaag

SEQ ID NO: 349149 - RNA, 19 nt, Homo sapiens
  misc_RNA (1)...(19): siRNA sense strand
gcugauugcuuuggaucug

SEQ ID NO: 349150 - RNA, 19 nt, Homo sapiens
  misc_RNA (1)...(19): siRNA sense strand
gaauugggcagcugauugc

SEQ ID NO: 349151 - RNA, 19 nt, Homo sapiens
  misc_RNA (1)...(19): siRNA sense strand
aauccugccuucgguguuu

SEQ ID NO: 349152 - RNA, 19 nt, Homo sapiens
  misc_RNA (1)...(19): siRNA sense strand
gaacaaccuccuuuuggaa

SEQ ID NO: 349153 - RNA, 19 nt, Homo sapiens
  misc_RNA (1)...(19): siRNA sense strand
guaauugcgcugcagaaca

SEQ ID NO: 349154 - RNA, 19 nt, Homo sapiens
  misc_RNA (1)...(19): siRNA sense strand
uaggagaauuccagaguac

SEQ ID NO: 349155 - RNA, 19 nt, Homo sapiens
  misc_RNA (1)...(19): siRNA sense strand
gcgaguugcuacggaaaca

SEQ ID NO: 349156 - RNA, 19 nt, Homo sapiens
  misc_RNA (1)...(19): siRNA sense strand
agaagaaagagcugaacaa

SEQ ID NO: 349157 - RNA, 19 nt, Homo sapiens
  misc_RNA (1)...(19): siRNA sense strand
uuuaugagaugguaauugc

SEQ ID NO: 349158 - RNA, 19 nt, Homo sapiens
  misc_RNA (1)...(19): siRNA sense strand
cuagcuaagccaccaauug

SEQ ID NO: 349159 - RNA, 19 nt, Homo sapiens
  misc_RNA (1)...(19): siRNA sense strand
cagccugacauggaauuua

SEQ ID NO: 349160 - RNA, 19 nt, Homo sapiens
  misc_RNA (1)...(19): siRNA sense strand
guggacagccugacaugga

SEQ ID NO: 349161 - RNA, 19 nt, Homo sapiens
  misc_RNA (1)...(19): siRNA sense strand
uggacagccugacauggaa

SEQ ID NO: 349162 - RNA, 19 nt, Homo sapiens
  misc_RNA (1)...(19): siRNA sense strand
uaacagcccagcacuucau

SEQ ID NO: 349163 - RNA, 19 nt, Homo sapiens
  misc_RNA (1)...(19): siRNA sense strand
uuaugaaauugguccaguu

SEQ ID NO: 349164 - RNA, 19 nt, Homo sapiens
  misc_RNA (1)...(19): siRNA sense strand
uagcuaagccaccaauugg

SEQ ID NO: 349165 - RNA, 19 nt, Homo sapiens
  misc_RNA (1)...(19): siRNA sense strand
gagaauuccagaguacaga

SEQ ID NO: 349166 - RNA, 19 nt, Homo sapiens
  misc_RNA (1)...(19): siRNA sense strand
guguauagacagcgaguug

SEQ ID NO: 349167 - RNA, 19 nt, Homo sapiens
  misc_RNA (1)...(19): siRNA sense strand
aagcagcugauuauuagaa

SEQ ID NO: 349168 - RNA, 19 nt, Homo sapiens
  misc_RNA (1)...(19): siRNA sense strand
ugugguuacugccucauug

SEQ ID NO: 349169 - RNA, 19 nt, Homo sapiens
  misc_RNA (1)...(19): siRNA sense strand
ucacagauuaugaaauugg

SEQ ID NO: 349170 - RNA, 19 nt, Homo sapiens
  misc_RNA (1)...(19): siRNA sense strand
uaacuccuaaggccaaaga

SEQ ID NO: 349171 - RNA, 19 nt, Homo sapiens
  misc_RNA (1)...(19): siRNA sense strand
aagaaagagcugaacaaga

SEQ ID NO: 349172 - RNA, 19 nt, Homo sapiens
  misc_RNA (1)...(19): siRNA sense strand
aaagaaaggaccagagaac

SEQ ID NO: 349173 - RNA, 19 nt, Homo sapiens
  misc_RNA (1)...(19): siRNA sense strand
cagauucgggagcucuaua

SEQ ID NO: 349174 - RNA, 19 nt, Homo sapiens
  misc_RNA (1)...(19): siRNA sense strand
ccuggaaguccuccuugua

SEQ ID NO: 349175 - RNA, 19 nt, Homo sapiens
  misc_RNA (1)...(19): siRNA sense strand
aagagugucuccagauggu

SEQ ID NO: 349176 - RNA, 19 nt, Homo sapiens
  misc_RNA (1)...(19): siRNA sense strand
ugaacaaccuccuuuugga

SEQ ID NO: 349177 - RNA, 19 nt, Homo sapiens
  misc_RNA (1)...(19): siRNA sense strand
gcuggccaccacuaaguuu

SEQ ID NO: 349178 - RNA, 19 nt, Homo sapiens
  misc_RNA (1)...(19): siRNA sense strand
gcggcuggaugaguuugaa

SEQ ID NO: 349179 - RNA, 19 nt, Homo sapiens
  misc_RNA (1)...(19): siRNA sense strand
gaaagagcugaacaagaag

SEQ ID NO: 349180 - RNA, 19 nt, Homo sapiens
  misc_RNA (1)...(19): siRNA sense strand
acucugaggccuuccacua

SEQ ID NO: 349181 - RNA, 19 nt, Homo sapiens
  misc_RNA (1)...(19): siRNA sense strand
gaaugguggcuccuggaau

SEQ ID NO: 349182 - RNA, 19 nt, Homo sapiens
  misc_RNA (1)...(19): siRNA sense strand
gugcugauacuccaguguu

SEQ ID NO: 349183 - RNA, 19 nt, Homo sapiens
  misc_RNA (1)...(19): siRNA sense strand
gaagcguuccguccagaag

SEQ ID NO: 349184 - RNA, 19 nt, Homo sapiens
  misc_RNA (1)...(19): siRNA sense strand
ggaagaagcuugcugaguu

SEQ ID NO: 349185 - RNA, 19 nt, Homo sapiens
  misc_RNA (1)...(19): siRNA sense strand
agaaagagcugaacaagaa

SEQ ID NO: 349186 - RNA, 19 nt, Homo sapiens
  misc_RNA (1)...(19): siRNA sense strand
ggaagcagcugauuauuag

SEQ ID NO: 349187 - RNA, 19 nt, Homo sapiens
  misc_RNA (1)...(19): siRNA sense strand
gaagauuacuacaccgaua

SEQ ID NO: 349188 - RNA, 19 nt, Homo sapiens
  misc_RNA (1)...(19): siRNA sense strand
gcaagucacccaucagaua

SEQ ID NO: 349189 - RNA, 19 nt, Homo sapiens
  misc_RNA (1)...(19): siRNA sense strand
gcaauaggguggcacagaa

SEQ ID NO: 349190 - RNA, 19 nt, Homo sapiens
  misc_RNA (1)...(19): siRNA sense strand
cuacagagaucccacacua

SEQ ID NO: 349191 - RNA, 19 nt, Homo sapiens
  misc_RNA (1)...(19): siRNA sense strand
gcacaaagacacagacuug

SEQ ID NO: 349192 - RNA, 19 nt, Homo sapiens
  misc_RNA (1)...(19): siRNA sense strand
gaagaaggcuuuuaagaug

SEQ ID NO: 349193 - RNA, 19 nt, Homo sapiens
  misc_RNA (1)...(19): siRNA sense strand
gagcuugugugcccugaua

SEQ ID NO: 349194 - RNA, 19 nt, Homo sapiens
  misc_RNA (1)...(19): siRNA sense strand
ggagcuaccuuccugugua

SEQ ID NO: 349195 - RNA, 19 nt, Homo sapiens
  misc_RNA (1)...(19): siRNA sense strand
ggaaugaccugccaguaca

SEQ ID NO: 349196 - RNA, 19 nt, Homo sapiens
  misc_RNA (1)...(19): siRNA sense strand
gaagugagcgcaagcuuga

SEQ ID NO: 349197 - RNA, 19 nt, Homo sapiens
  misc_RNA (1)...(19): siRNA sense strand
gaagauucaugcaggaaga

SEQ ID NO: 349198 - RNA, 19 nt, Homo sapiens
  misc_RNA (1)...(19): siRNA sense strand
gaagaagcuugcugaguuc

SEQ ID NO: 349199 - RNA, 19 nt, Homo sapiens
  misc_RNA (1)...(19): siRNA sense strand
ccacacuacuuccggcuua

SEQ ID NO: 349200 - RNA, 19 nt, Homo sapiens
  misc_RNA (1)...(19): siRNA sense strand
gaacuacauugggauaaau

SEQ ID NO: 349201 - RNA, 19 nt, Homo sapiens
  misc_RNA (1)...(19): siRNA sense strand
ugaaauugguccaguuuau

SEQ ID NO: 349202 - RNA, 19 nt, Homo sapiens
  misc_RNA (1)...(19): siRNA sense strand
ggccaaggcuccuaugaug

SEQ ID NO: 349203 - RNA, 19 nt, Homo sapiens
  misc_RNA (1)...(19): siRNA sense strand
gagaugguguuuacucaga

SEQ ID NO: 349204 - RNA, 19 nt, Homo sapiens
  misc_RNA (1)...(19): siRNA sense strand
ggaaaggccugaggaugug

SEQ ID NO: 349205 - RNA, 19 nt, Homo sapiens
  misc_RNA (1)...(19): siRNA sense strand
ggagaccuauguuccagaa

SEQ ID NO: 349206 - RNA, 19 nt, Homo sapiens
  misc_RNA (1)...(19): siRNA sense strand
aaacauugcccagggauua

SEQ ID NO: 349207 - RNA, 19 nt, Homo sapiens
  misc_RNA (1)...(19): siRNA sense strand
cccgggacaugcuauauua

SEQ ID NO: 349208 - RNA, 19 nt, Homo sapiens
  misc_RNA (1)...(19): siRNA sense strand
gagagaugguguuuacuca

SEQ ID NO: 349209 - RNA, 19 nt, Homo sapiens
  misc_RNA (1)...(19): siRNA sense strand
ggugaaaggcucaguagaa

SEQ ID NO: 349210 - RNA, 19 nt, Homo sapiens
  misc_RNA (1)...(19): siRNA sense strand
gcuaggaagcagcugauua

SEQ ID NO: 349211 - RNA, 19 nt, Homo sapiens
  misc_RNA (1)...(19): siRNA sense strand
ggaugaguuugaaauguug

SEQ ID NO: 349212 - RNA, 19 nt, Homo sapiens
  misc_RNA (1)...(19): siRNA sense strand
gaagacaaccaucacacuu

SEQ ID NO: 349213 - RNA, 19 nt, Homo sapiens
  misc_RNA (1)...(19): siRNA sense strand
gaagcuugcugaguucgaa

SEQ ID NO: 349214 - RNA, 19 nt, Homo sapiens
  misc_RNA (1)...(19): siRNA sense strand
cacagaagcucaucucagu

SEQ ID NO: 349215 - RNA, 19 nt, Homo sapiens
  misc_RNA (1)...(19): siRNA sense strand
gagagcagcuggauuuuau

SEQ ID NO: 349216 - RNA, 19 nt, Homo sapiens
  misc_RNA (1)...(19): siRNA sense strand
ggagaacuacauugggaua

SEQ ID NO: 349217 - RNA, 19 nt, Homo sapiens
  misc_RNA (1)...(19): siRNA sense strand
ccaguacauuguccaguuu

SEQ ID NO: 349218 - RNA, 19 nt, Homo sapiens
  misc_RNA (1)...(19): siRNA sense strand
gagcuaccuuccuguguau

SEQ ID NO: 349219 - RNA, 19 nt, Homo sapiens
  misc_RNA (1)...(19): siRNA sense strand
ggaauugggcagcugauug

SEQ ID NO: 349220 - RNA, 19 nt, Homo sapiens
  misc_RNA (1)...(19): siRNA sense strand
agagagagaugguguuuac

SEQ ID NO: 349221 - RNA, 19 nt, Homo sapiens
  misc_RNA (1)...(19): siRNA sense strand
gccaguacauuguccaguu

SEQ ID NO: 349222 - RNA, 19 nt, Homo sapiens
  misc_RNA (1)...(19): siRNA sense strand
gaccaacacuacagagauc

SEQ ID NO: 349223 - RNA, 19 nt, Homo sapiens
  misc_RNA (1)...(19): siRNA sense strand
caaaacagccugagcaaaa

SEQ ID NO: 349224 - RNA, 19 nt, Homo sapiens
  misc_RNA (1)...(19): siRNA sense strand
agacaaccaucacacuuau

SEQ ID NO: 349225 - RNA, 19 nt, Homo sapiens
  misc_RNA (1)...(19): siRNA sense strand
ugaguucgaagaugaguua

SEQ ID NO: 349226 - RNA, 19 nt, Homo sapiens
  misc_RNA (1)...(19): siRNA sense strand
ccuaggcccucaugauuug

SEQ ID NO: 349227 - RNA, 19 nt, Homo sapiens
  misc_RNA (1)...(19): siRNA sense strand
gaaauugguccaguuuaug

SEQ ID NO: 349228 - RNA, 19 nt, Homo sapiens
  misc_RNA (1)...(19): siRNA sense strand
gaacccuucgccugaauaa

SEQ ID NO: 349229 - RNA, 19 nt, Homo sapiens
  misc_RNA (1)...(19): siRNA sense strand
ggacugcaaguggccauua

SEQ ID NO: 349230 - RNA, 19 nt, Homo sapiens
  misc_RNA (1)...(19): siRNA sense strand
gaagaaagagcugaacaag

SEQ ID NO: 349231 - RNA, 19 nt, Homo sapiens
  misc_RNA (1)...(19): siRNA sense strand
gcccugagauccugcacaa

SEQ ID NO: 349232 - RNA, 19 nt, Homo sapiens
  misc_RNA (1)...(19): siRNA sense strand
aggaagcagcugauuauua

SEQ ID NO: 349233 - RNA, 19 nt, Homo sapiens
  misc_RNA (1)...(19): siRNA sense strand
uggaugaguuugaaauguu

SEQ ID NO: 349234 - RNA, 19 nt, Homo sapiens
  misc_RNA (1)...(19): siRNA sense strand
ggaaguccuccuuguauuc

SEQ ID NO: 349235 - RNA, 19 nt, Homo sapiens
  misc_RNA (1)...(19): siRNA sense strand
cgucucagcccuucaguuu

SEQ ID NO: 349236 - RNA, 19 nt, Homo sapiens
  misc_RNA (1)...(19): siRNA sense strand
gcccagcacuucauacgau

SEQ ID NO: 349237 - RNA, 19 nt, Homo sapiens
  misc_RNA (1)...(19): siRNA sense strand
ugaagagugucuccagaug

SEQ ID NO: 349238 - RNA, 19 nt, Homo sapiens
  misc_RNA (1)...(19): siRNA sense strand
ccaaagaaaggaccagaga

SEQ ID NO: 349239 - RNA, 19 nt, Homo sapiens
  misc_RNA (1)...(19): siRNA sense strand
aggaagagcugacccaucu

SEQ ID NO: 349240 - RNA, 19 nt, Homo sapiens
  misc_RNA (1)...(19): siRNA sense strand
cuggagagcucacagacuu

SEQ ID NO: 349241 - RNA, 19 nt, Homo sapiens
  misc_RNA (1)...(19): siRNA sense strand
gccagaagcaggaguguga

SEQ ID NO: 349242 - RNA, 19 nt, Homo sapiens
  misc_RNA (1)...(19): siRNA sense strand
agaccuauguuccagaaga

SEQ ID NO: 349243 - RNA, 19 nt, Homo sapiens
  misc_RNA (1)...(19): siRNA sense strand
ggagagcucacagacuuaa

SEQ ID NO: 349244 - RNA, 19 nt, Homo sapiens
  misc_RNA (1)...(19): siRNA sense strand
guucaaaacugacauuuag

SEQ ID NO: 349245 - RNA, 19 nt, Homo sapiens
  misc_RNA (1)...(19): siRNA sense strand
gcucccagcugaccagaca

SEQ ID NO: 349246 - RNA, 19 nt, Homo sapiens
  misc_RNA (1)...(19): siRNA sense strand
ccacugaggacccguguga

SEQ ID NO: 349247 - RNA, 19 nt, Homo sapiens
  misc_RNA (1)...(19): siRNA sense strand
aagacaaccaucacacuua

SEQ ID NO: 349248 - RNA, 19 nt, Homo sapiens
  misc_RNA (1)...(19): siRNA sense strand
gaucagcgacugccacauc

SEQ ID NO: 349249 - RNA, 19 nt, Homo sapiens
  misc_RNA (1)...(19): siRNA sense strand
cauggaauuuaacuccuaa

SEQ ID NO: 349250 - RNA, 19 nt, Homo sapiens
  misc_RNA (1)...(19): siRNA sense strand
aaagaagccagcaccgaua

SEQ ID NO: 349251 - RNA, 19 nt, Homo sapiens
  misc_RNA (1)...(19): siRNA sense strand
gcuccuaugaugagagaua

SEQ ID NO: 349252 - RNA, 19 nt, Homo sapiens
  misc_RNA (1)...(19): siRNA sense strand
gauaggagaauuccagagu

SEQ ID NO: 349253 - RNA, 19 nt, Homo sapiens
  misc_RNA (1)...(19): siRNA sense strand
agccugacauggaauuuaa

SEQ ID NO: 349254 - RNA, 19 nt, Homo sapiens
  misc_RNA (1)...(19): siRNA sense strand
cgugaggccugcacagcua

SEQ ID NO: 349255 - RNA, 19 nt, Homo sapiens
  misc_RNA (1)...(19): siRNA sense strand
gaccagccuucccaacaug

SEQ ID NO: 349256 - RNA, 19 nt, Homo sapiens
  misc_RNA (1)...(19): siRNA sense strand
cuaaggagagcucugauug

SEQ ID NO: 349257 - RNA, 19 nt, Homo sapiens
  misc_RNA (1)...(19): siRNA sense strand
acauugaggcugucuuuaa

SEQ ID NO: 349258 - RNA, 19 nt, Homo sapiens
  misc_RNA (1)...(19): siRNA sense strand
agaacuacauugggauaaa

SEQ ID NO: 349259 - RNA, 19 nt, Homo sapiens
  misc_RNA (1)...(19): siRNA sense strand
cuaggaagcagcugauuau

SEQ ID NO: 349260 - RNA, 19 nt, Homo sapiens
  misc_RNA (1)...(19): siRNA sense strand
gggacaugcuauauuagug

SEQ ID NO: 349261 - RNA, 19 nt, Homo sapiens
  misc_RNA (1)...(19): siRNA sense strand
agagagagcuagacagacu

SEQ ID NO: 349262 - RNA, 19 nt, Homo sapiens
  misc_RNA (1)...(19): siRNA sense strand
gaucuauauuucuggugaa

SEQ ID NO: 349263 - RNA, 19 nt, Homo sapiens
  misc_RNA (1)...(19): siRNA sense strand
gcagccagguggagguuag

SEQ ID NO: 349264 - RNA, 19 nt, Homo sapiens
  misc_RNA (1)...(19): siRNA sense strand
aaugguggcuccuggaaug

SEQ ID NO: 349265 - RNA, 19 nt, Homo sapiens
  misc_RNA (1)...(19): siRNA sense strand
ugccgaagcuacuggacua

SEQ ID NO: 349266 - RNA, 19 nt, Homo sapiens
  misc_RNA (1)...(19): siRNA sense strand
gcaguaccaucuacaucuc

SEQ ID NO: 349267 - RNA, 19 nt, Homo sapiens
  misc_RNA (1)...(19): siRNA sense strand
ccauuaccaucucuaagga

SEQ ID NO: 349268 - RNA, 19 nt, Homo sapiens
  misc_RNA (1)...(19): siRNA sense strand
ggucaucggcgacgaagug

SEQ ID NO: 349269 - RNA, 19 nt, Homo sapiens
  misc_RNA (1)...(19): siRNA sense strand
uaaaugugaagaaggcuuu

SEQ ID NO: 349270 - RNA, 19 nt, Homo sapiens
  misc_RNA (1)...(19): siRNA sense strand
uugcugaguucgaagauga

SEQ ID NO: 349271 - RNA, 19 nt, Homo sapiens
  misc_RNA (1)...(19): siRNA sense strand
uuugggaccugcuuuguga

SEQ ID NO: 349272 - RNA, 19 nt, Homo sapiens
  misc_RNA (1)...(19): siRNA sense strand
caucggaauucagccauga

SEQ ID NO: 349273 - RNA, 19 nt, Homo sapiens
  misc_RNA (1)...(19): siRNA sense strand
ggccugcccucaucaucaa

SEQ ID NO: 349274 - RNA, 19 nt, Homo sapiens
  misc_RNA (1)...(19): siRNA sense strand
aaauguggguuucaguguu

SEQ ID NO: 349275 - RNA, 19 nt, Homo sapiens
  misc_RNA (1)...(19): siRNA sense strand
auaggagaauuccagagua

SEQ ID NO: 349276 - RNA, 19 nt, Homo sapiens
  misc_RNA (1)...(19): siRNA sense strand
caaagaaaggaccagagaa

SEQ ID NO: 349277 - RNA, 19 nt, Homo sapiens
  misc_RNA (1)...(19): siRNA sense strand
cauugaggcugucuuuaag

SEQ ID NO: 349278 - RNA, 19 nt, Homo sapiens
  misc_RNA (1)...(19): siRNA sense strand
uggaaguccuccuuguauu

SEQ ID NO: 349279 - RNA, 19 nt, Homo sapiens
  misc_RNA (1)...(19): siRNA sense strand
gaccaccuccuacacuauu

SEQ ID NO: 349280 - RNA, 19 nt, Homo sapiens
  misc_RNA (1)...(19): siRNA sense strand
cccaagauaucucgcacuu

SEQ ID NO: 349281 - RNA, 19 nt, Homo sapiens
  misc_RNA (1)...(19): siRNA sense strand
gauuuguccucagagcuaa

SEQ ID NO: 349282 - RNA, 19 nt, Homo sapiens
  misc_RNA (1)...(19): siRNA sense strand
gagagagagaugguguuua

SEQ ID NO: 349283 - RNA, 19 nt, Homo sapiens
  misc_RNA (1)...(19): siRNA sense strand
ucgagagccuugucagguu

SEQ ID NO: 349284 - RNA, 19 nt, Homo sapiens
  misc_RNA (1)...(19): siRNA sense strand
ggaagaagcuugcugaguu

SEQ ID NO: 349285 - RNA, 19 nt, Homo sapiens
  misc_RNA (1)...(19): siRNA sense strand
agaaagagcugaacaagaa

SEQ ID NO: 349286 - RNA, 19 nt, Homo sapiens
  misc_RNA (1)...(19): siRNA sense strand
ggaagcagcugauuauuag

SEQ ID NO: 349287 - RNA, 19 nt, Homo sapiens
  misc_RNA (1)...(19): siRNA sense strand
gaagauuacuacaccgaua

SEQ ID NO: 349288 - RNA, 19 nt, Homo sapiens
  misc_RNA (1)...(19): siRNA sense strand
ggaaugaccugccaguaca

SEQ ID NO: 349289 - RNA, 19 nt, Homo sapiens
  misc_RNA (1)...(19): siRNA sense strand
gaagugagcgcaagcuuga

SEQ ID NO: 349290 - RNA, 19 nt, Homo sapiens
  misc_RNA (1)...(19): siRNA sense strand
gaagauucaugcaggaaga

SEQ ID NO: 349291 - RNA, 19 nt, Homo sapiens
  misc_RNA (1)...(19): siRNA sense strand
gaagaagcuugcugaguuc

SEQ ID NO: 349292 - RNA, 19 nt, Homo sapiens
  misc_RNA (1)...(19): siRNA sense strand
ugaaauugguccaguuuau

SEQ ID NO: 349293 - RNA, 19 nt, Homo sapiens
  misc_RNA (1)...(19): siRNA sense strand
cccgggacaugcuauauua

SEQ ID NO: 349294 - RNA, 19 nt, Homo sapiens
  misc_RNA (1)...(19): siRNA sense strand
gcuaggaagcagcugauua

SEQ ID NO: 349295 - RNA, 19 nt, Homo sapiens
  misc_RNA (1)...(19): siRNA sense strand
ggaugaguuugaaauguug

SEQ ID NO: 349296 - RNA, 19 nt, Homo sapiens
  misc_RNA (1)...(19): siRNA sense strand
gaagcuugcugaguucgaa

SEQ ID NO: 349297 - RNA, 19 nt, Homo sapiens
  misc_RNA (1)...(19): siRNA sense strand
ccaguacauuguccaguuu

SEQ ID NO: 349298 - RNA, 19 nt, Homo sapiens
  misc_RNA (1)...(19): siRNA sense strand
ggaauugggcagcugauug

SEQ ID NO: 349299 - RNA, 19 nt, Homo sapiens
  misc_RNA (1)...(19): siRNA sense strand
gccaguacauuguccaguu

SEQ ID NO: 349300 - RNA, 19 nt, Homo sapiens
  misc_RNA (1)...(19): siRNA sense strand
ugaguucgaagaugaguua

SEQ ID NO: 349301 - RNA, 19 nt, Homo sapiens
  misc_RNA (1)...(19): siRNA sense strand
gaaauugguccaguuuaug

SEQ ID NO: 349302 - RNA, 19 nt, Homo sapiens
  misc_RNA (1)...(19): siRNA sense strand
gaagaaagagcugaacaag

SEQ ID NO: 349303 - RNA, 19 nt, Homo sapiens
  misc_RNA (1)...(19): siRNA sense strand
aggaagcagcugauuauua

SEQ ID NO: 349304 - RNA, 19 nt, Homo sapiens
  misc_RNA (1)...(19): siRNA sense strand
uggaugaguuugaaauguu

SEQ ID NO: 349305 - RNA, 19 nt, Homo sapiens
  misc_RNA (1)...(19): siRNA sense strand
ggaaguccuccuuguauuc

SEQ ID NO: 349306 - RNA, 19 nt, Homo sapiens
  misc_RNA (1)...(19): siRNA sense strand
gcccagcacuucauacgau

SEQ ID NO: 349307 - RNA, 19 nt, Homo sapiens
  misc_RNA (1)...(19): siRNA sense strand
ugaagagugucuccagaug

SEQ ID NO: 349308 - RNA, 19 nt, Homo sapiens
  misc_RNA (1)...(19): siRNA sense strand
ccaaagaaaggaccagaga

SEQ ID NO: 349309 - RNA, 19 nt, Homo sapiens
  misc_RNA (1)...(19): siRNA sense strand
cuggagagcucacagacuu

SEQ ID NO: 349310 - RNA, 19 nt, Homo sapiens
  misc_RNA (1)...(19): siRNA sense strand
ggagagcucacagacuuaa

SEQ ID NO: 349311 - RNA, 19 nt, Homo sapiens
  misc_RNA (1)...(19): siRNA sense strand
guucaaaacugacauuuag

SEQ ID NO: 349312 - RNA, 19 nt, Homo sapiens
  misc_RNA (1)...(19): siRNA sense strand
cauggaauuuaacuccuaa

SEQ ID NO: 349313 - RNA, 19 nt, Homo sapiens
  misc_RNA (1)...(19): siRNA sense strand
aaagaagccagcaccgaua

SEQ ID NO: 349314 - RNA, 19 nt, Homo sapiens
  misc_RNA (1)...(19): siRNA sense strand
gauaggagaauuccagagu

SEQ ID NO: 349315 - RNA, 19 nt, Homo sapiens
  misc_RNA (1)...(19): siRNA sense strand
agccugacauggaauuuaa

SEQ ID NO: 349316 - RNA, 19 nt, Homo sapiens
  misc_RNA (1)...(19): siRNA sense strand
cuaggaagcagcugauuau

SEQ ID NO: 349317 - RNA, 19 nt, Homo sapiens
  misc_RNA (1)...(19): siRNA sense strand
gggacaugcuauauuagug

SEQ ID NO: 349318 - RNA, 19 nt, Homo sapiens
  misc_RNA (1)...(19): siRNA sense strand
agagagagcuagacagacu

SEQ ID NO: 349319 - RNA, 19 nt, Homo sapiens
  misc_RNA (1)...(19): siRNA sense strand
gaucuauauuucuggugaa

SEQ ID NO: 349320 - RNA, 19 nt, Homo sapiens
  misc_RNA (1)...(19): siRNA sense strand
ggucaucggcgacgaagug

SEQ ID NO: 349321 - RNA, 19 nt, Homo sapiens
  misc_RNA (1)...(19): siRNA sense strand
aaugguggcuccuggaaug

SEQ ID NO: 349322 - RNA, 19 nt, Homo sapiens
  misc_RNA (1)...(19): siRNA sense strand
uugcugaguucgaagauga

SEQ ID NO: 349323 - RNA, 19 nt, Homo sapiens
  misc_RNA (1)...(19): siRNA sense strand
aaauguggguuucaguguu

SEQ ID NO: 349324 - RNA, 19 nt, Homo sapiens
  misc_RNA (1)...(19): siRNA sense strand
auaggagaauuccagagua

SEQ ID NO: 349325 - RNA, 19 nt, Homo sapiens
  misc_RNA (1)...(19): siRNA sense strand
caaagaaaggaccagagaa

SEQ ID NO: 349326 - RNA, 19 nt, Homo sapiens
  misc_RNA (1)...(19): siRNA sense strand
uggaaguccuccuuguauu

SEQ ID NO: 349327 - RNA, 19 nt, Homo sapiens
  misc_RNA (1)...(19): siRNA sense strand
cccaagauaucucgcacuu

SEQ ID NO: 349328 - RNA, 19 nt, Homo sapiens
  misc_RNA (1)...(19): siRNA sense strand
gcagcugauuauuagaaau

SEQ ID NO: 349329 - RNA, 19 nt, Homo sapiens
  misc_RNA (1)...(19): siRNA sense strand
uugggcagcugauugcuuu

SEQ ID NO: 349330 - RNA, 19 nt, Homo sapiens
  misc_RNA (1)...(19): siRNA sense strand
ggaaugguggcuccuggaa

SEQ ID NO: 349331 - RNA, 19 nt, Homo sapiens
  misc_RNA (1)...(19): siRNA sense strand
gaaccucucaagaaagcaa

SEQ ID NO: 349332 - RNA, 19 nt, Homo sapiens
  misc_RNA (1)...(19): siRNA sense strand
acauggaauuuaacuccua

SEQ ID NO: 349333 - RNA, 19 nt, Homo sapiens
  misc_RNA (1)...(19): siRNA sense strand
cuacggaaacaucauuuga

SEQ ID NO: 349334 - RNA, 19 nt, Homo sapiens
  misc_RNA (1)...(19): siRNA sense strand
ucgagagccuugucagguu

SEQ ID NO: 349335 - RNA, 19 nt, Homo sapiens
  misc_RNA (1)...(19): siRNA sense strand
aaauugguccaguuuauga

SEQ ID NO: 349336 - RNA, 19 nt, Homo sapiens
  misc_RNA (1)...(19): siRNA sense strand
acagagagagcuagacaga

SEQ ID NO: 349337 - RNA, 19 nt, Homo sapiens
  misc_RNA (1)...(19): siRNA sense strand
ccagucagcccacacacuu

SEQ ID NO: 349338 - RNA, 19 nt, Homo sapiens
  misc_RNA (1)...(19): siRNA sense strand
ccacagagagagcuagaca

SEQ ID NO: 349339 - RNA, 19 nt, Homo sapiens
  misc_RNA (1)...(19): siRNA sense strand
aauguggguuucaguguug

SEQ ID NO: 349340 - RNA, 19 nt, Homo sapiens
  misc_RNA (1)...(19): siRNA sense strand
uaauugcgcugcagaacac

SEQ ID NO: 349341 - RNA, 19 nt, Homo sapiens
  misc_RNA (1)...(19): siRNA sense strand
uaugaaauugguccaguuu

SEQ ID NO: 349342 - RNA, 19 nt, Homo sapiens
  misc_RNA (1)...(19): siRNA sense strand
cagcaccgauaggagaauu

SEQ ID NO: 349343 - RNA, 19 nt, Homo sapiens
  misc_RNA (1)...(19): siRNA sense strand
gaagccagcaccgauagga

SEQ ID NO: 349344 - RNA, 19 nt, Homo sapiens
  misc_RNA (1)...(19): siRNA sense strand
cagcugauuauuagaaaug

SEQ ID NO: 349345 - RNA, 19 nt, Homo sapiens
  misc_RNA (1)...(19): siRNA sense strand
gcagcugauugcuuuggau

SEQ ID NO: 349346 - RNA, 19 nt, Homo sapiens
  misc_RNA (1)...(19): siRNA sense strand
ucgcugcgcacccaagaua

SEQ ID NO: 349347 - RNA, 19 nt, Homo sapiens
  misc_RNA (1)...(19): siRNA sense strand
guacucagccgaggucauc

SEQ ID NO: 349348 - RNA, 19 nt, Homo sapiens
  misc_RNA (1)...(19): siRNA sense strand
cagguugccuccagugaag

SEQ ID NO: 349349 - RNA, 19 nt, Homo sapiens
  misc_RNA (1)...(19): siRNA sense strand
gcugauugcuuuggaucug

SEQ ID NO: 349350 - RNA, 19 nt, Homo sapiens
  misc_RNA (1)...(19): siRNA sense strand
gaauugggcagcugauugc

SEQ ID NO: 349351 - RNA, 19 nt, Homo sapiens
  misc_RNA (1)...(19): siRNA sense strand
aauccugccuucgguguuu

SEQ ID NO: 349352 - RNA, 19 nt, Homo sapiens
  misc_RNA (1)...(19): siRNA sense strand
gaacaaccuccuuuuggaa

SEQ ID NO: 349353 - RNA, 19 nt, Homo sapiens
  misc_RNA (1)...(19): siRNA sense strand
guaauugcgcugcagaaca

SEQ ID NO: 349354 - RNA, 19 nt, Homo sapiens
  misc_RNA (1)...(19): siRNA sense strand
uaggagaauuccagaguac

SEQ ID NO: 349355 - RNA, 19 nt, Homo sapiens
  misc_RNA (1)...(19): siRNA sense strand
gcgaguugcuacggaaaca

SEQ ID NO: 349356 - RNA, 19 nt, Homo sapiens
  misc_RNA (1)...(19): siRNA sense strand
agaagaaagagcugaacaa

SEQ ID NO: 349357 - RNA, 19 nt, Homo sapiens
  misc_RNA (1)...(19): siRNA sense strand
uuuaugagaugguaauugc

SEQ ID NO: 349358 - RNA, 19 nt, Homo sapiens
  misc_RNA (1)...(19): siRNA sense strand
cuagcuaagccaccaauug

SEQ ID NO: 349359 - RNA, 19 nt, Homo sapiens
  misc_RNA (1)...(19): siRNA sense strand
cagccugacauggaauuua

SEQ ID NO: 349360 - RNA, 19 nt, Homo sapiens
  misc_RNA (1)...(19): siRNA sense strand
guggacagccugacaugga

SEQ ID NO: 349361 - RNA, 19 nt, Homo sapiens
  misc_RNA (1)...(19): siRNA sense strand
uggacagccugacauggaa

SEQ ID NO: 349362 - RNA, 19 nt, Homo sapiens
  misc_RNA (1)...(19): siRNA sense strand
uaacagcccagcacuucau

SEQ ID NO: 349363 - RNA, 19 nt, Homo sapiens
  misc_RNA (1)...(19): siRNA sense strand
uuaugaaauugguccaguu

SEQ ID NO: 349364 - RNA, 19 nt, Homo sapiens
  misc_RNA (1)...(19): siRNA sense strand
uagcuaagccaccaauugg

SEQ ID NO: 349365 - RNA, 19 nt, Homo sapiens
  misc_RNA (1)...(19): siRNA sense strand
gagaauuccagaguacaga

SEQ ID NO: 349366 - RNA, 19 nt, Homo sapiens
  misc_RNA (1)...(19): siRNA sense strand
guguauagacagcgaguug

SEQ ID NO: 349367 - RNA, 19 nt, Homo sapiens
  misc_RNA (1)...(19): siRNA sense strand
aagcagcugauuauuagaa

SEQ ID NO: 349368 - RNA, 19 nt, Homo sapiens
  misc_RNA (1)...(19): siRNA sense strand
ugugguuacugccucauug

SEQ ID NO: 349369 - RNA, 19 nt, Homo sapiens
  misc_RNA (1)...(19): siRNA sense strand
ucacagauuaugaaauugg

SEQ ID NO: 349370 - RNA, 19 nt, Homo sapiens
  misc_RNA (1)...(19): siRNA sense strand
uaacuccuaaggccaaaga

SEQ ID NO: 349371 - RNA, 19 nt, Homo sapiens
  misc_RNA (1)...(19): siRNA sense strand
aagaaagagcugaacaaga

SEQ ID NO: 349372 - RNA, 19 nt, Homo sapiens
  misc_RNA (1)...(19): siRNA sense strand
aaagaaaggaccagagaac

SEQ ID NO: 349373 - RNA, 19 nt, Homo sapiens
  misc_RNA (1)...(19): siRNA sense strand
cagauucgggagcucuaua

SEQ ID NO: 349374 - RNA, 19 nt, Homo sapiens
  misc_RNA (1)...(19): siRNA sense strand
ccuggaaguccuccuugua

SEQ ID NO: 349375 - RNA, 19 nt, Homo sapiens
  misc_RNA (1)...(19): siRNA sense strand
aagagugucuccagauggu

SEQ ID NO: 349376 - RNA, 19 nt, Homo sapiens
  misc_RNA (1)...(19): siRNA sense strand
ugaacaaccuccuuuugga

SEQ ID NO: 349377 - RNA, 19 nt, Homo sapiens
  misc_RNA (1)...(19): siRNA sense strand
gcuggccaccacuaaguuu

SEQ ID NO: 349378 - RNA, 19 nt, Homo sapiens
  misc_RNA (1)...(19): siRNA sense strand
gcggcuggaugaguuugaa

SEQ ID NO: 349379 - RNA, 19 nt, Homo sapiens
  misc_RNA (1)...(19): siRNA sense strand
gaaagagcugaacaagaag

SEQ ID NO: 349380 - RNA, 19 nt, Homo sapiens
  misc_RNA (1)...(19): siRNA sense strand
acucugaggccuuccacua

SEQ ID NO: 349381 - RNA, 19 nt, Homo sapiens
  misc_RNA (1)...(19): siRNA sense strand
gaaugguggcuccuggaau

SEQ ID NO: 349382 - RNA, 19 nt, Homo sapiens
  misc_RNA (1)...(19): siRNA sense strand
gugcugauacuccaguguu

SEQ ID NO: 349383 - RNA, 19 nt, Homo sapiens
  misc_RNA (1)...(19): siRNA sense strand
gaagcguuccguccagaag

SEQ ID NO: 349384 - RNA, 19 nt, Homo sapiens
  misc_RNA (1)...(19): siRNA sense strand
ggaagaagcuugcugaguu

SEQ ID NO: 349385 - RNA, 19 nt, Homo sapiens
  misc_RNA (1)...(19): siRNA sense strand
agaaagagcugaacaagaa

SEQ ID NO: 349386 - RNA, 19 nt, Homo sapiens
  misc_RNA (1)...(19): siRNA sense strand
ggaagcagcugauuauuag

SEQ ID NO: 349387 - RNA, 19 nt, Homo sapiens
  misc_RNA (1)...(19): siRNA sense strand
gaagauuacuacaccgaua

SEQ ID NO: 349388 - RNA, 19 nt, Homo sapiens
  misc_RNA (1)...(19): siRNA sense strand
gcaagucacccaucagaua

SEQ ID NO: 349389 - RNA, 19 nt, Homo sapiens
  misc_RNA (1)...(19): siRNA sense strand
gcaauaggguggcacagaa

SEQ ID NO: 349390 - RNA, 19 nt, Homo sapiens
  misc_RNA (1)...(19): siRNA sense strand
cuacagagaucccacacua

SEQ ID NO: 349391 - RNA, 19 nt, Homo sapiens
  misc_RNA (1)...(19): siRNA sense strand
gaagaaggcuuuuaagaug

SEQ ID NO: 349392 - RNA, 19 nt, Homo sapiens
  misc_RNA (1)...(19): siRNA sense strand
gagcuugugugcccugaua

SEQ ID NO: 349393 - RNA, 19 nt, Homo sapiens
  misc_RNA (1)...(19): siRNA sense strand
ggagcuaccuuccugugua

SEQ ID NO: 349394 - RNA, 19 nt, Homo sapiens
  misc_RNA (1)...(19): siRNA sense strand
ggaaugaccugccaguaca

SEQ ID NO: 349395 - RNA, 19 nt, Homo sapiens
  misc_RNA (1)...(19): siRNA sense strand
gaagugagcgcaagcuuga

SEQ ID NO: 349396 - RNA, 19 nt, Homo sapiens
  misc_RNA (1)...(19): siRNA sense strand
gaagauucaugcaggaaga

SEQ ID NO: 349397 - RNA, 19 nt, Homo sapiens
  misc_RNA (1)...(19): siRNA sense strand
gaagaagcuugcugaguuc

SEQ ID NO: 349398 - RNA, 19 nt, Homo sapiens
  misc_RNA (1)...(19): siRNA sense strand
ccacacuacuuccggcuua

SEQ ID NO: 349399 - RNA, 19 nt, Homo sapiens
  misc_RNA (1)...(19): siRNA sense strand
gaacuacauugggauaaau

SEQ ID NO: 349400 - RNA, 19 nt, Homo sapiens
  misc_RNA (1)...(19): siRNA sense strand
ugaaauugguccaguuuau

SEQ ID NO: 349401 - RNA, 19 nt, Homo sapiens
  misc_RNA (1)...(19): siRNA sense strand
ggccaaggcuccuaugaug

SEQ ID NO: 349402 - RNA, 19 nt, Homo sapiens
  misc_RNA (1)...(19): siRNA sense strand
gagaugguguuuacucaga

SEQ ID NO: 349403 - RNA, 19 nt, Homo sapiens
  misc_RNA (1)...(19): siRNA sense strand
ggaaaggccugaggaugug

SEQ ID NO: 349404 - RNA, 19 nt, Homo sapiens
  misc_RNA (1)...(19): siRNA sense strand
ggagaccuauguuccagaa

SEQ ID NO: 349405 - RNA, 19 nt, Homo sapiens
  misc_RNA (1)...(19): siRNA sense strand
cccgggacaugcuauauua

SEQ ID NO: 349406 - RNA, 19 nt, Homo sapiens
  misc_RNA (1)...(19): siRNA sense strand
gagagaugguguuuacuca

SEQ ID NO: 349407 - RNA, 19 nt, Homo sapiens
  misc_RNA (1)...(19): siRNA sense strand
ggugaaaggcucaguagaa

SEQ ID NO: 349408 - RNA, 19 nt, Homo sapiens
  misc_RNA (1)...(19): siRNA sense strand
gcuaggaagcagcugauua

SEQ ID NO: 349409 - RNA, 19 nt, Homo sapiens
  misc_RNA (1)...(19): siRNA sense strand
ggaugaguuugaaauguug

SEQ ID NO: 349410 - RNA, 19 nt, Homo sapiens
  misc_RNA (1)...(19): siRNA sense strand
gaagacaaccaucacacuu

SEQ ID NO: 349411 - RNA, 19 nt, Homo sapiens
  misc_RNA (1)...(19): siRNA sense strand
gaagcuugcugaguucgaa

SEQ ID NO: 349412 - RNA, 19 nt, Homo sapiens
  misc_RNA (1)...(19): siRNA sense strand
cacagaagcucaucucagu

SEQ ID NO: 349413 - RNA, 19 nt, Homo sapiens
  misc_RNA (1)...(19): siRNA sense strand
gagagcagcuggauuuuau

SEQ ID NO: 349414 - RNA, 19 nt, Homo sapiens
  misc_RNA (1)...(19): siRNA sense strand
ggagaacuacauugggaua

SEQ ID NO: 349415 - RNA, 19 nt, Homo sapiens
  misc_RNA (1)...(19): siRNA sense strand
ccaguacauuguccaguuu

SEQ ID NO: 349416 - RNA, 19 nt, Homo sapiens
  misc_RNA (1)...(19): siRNA sense strand
gagcuaccuuccuguguau

SEQ ID NO: 349417 - RNA, 19 nt, Homo sapiens
  misc_RNA (1)...(19): siRNA sense strand
ggaauugggcagcugauug

SEQ ID NO: 349418 - RNA, 19 nt, Homo sapiens
  misc_RNA (1)...(19): siRNA sense strand
agagagagaugguguuuac

SEQ ID NO: 349419 - RNA, 19 nt, Homo sapiens
  misc_RNA (1)...(19): siRNA sense strand
gccaguacauuguccaguu

SEQ ID NO: 349420 - RNA, 19 nt, Homo sapiens
  misc_RNA (1)...(19): siRNA sense strand
gaccaacacuacagagauc

SEQ ID NO: 349421 - RNA, 19 nt, Homo sapiens
  misc_RNA (1)...(19): siRNA sense strand
caaaacagccugagcaaaa

SEQ ID NO: 349422 - RNA, 19 nt, Homo sapiens
  misc_RNA (1)...(19): siRNA sense strand
agacaaccaucacacuuau

SEQ ID NO: 349423 - RNA, 19 nt, Homo sapiens
  misc_RNA (1)...(19): siRNA sense strand
ugaguucgaagaugaguua

SEQ ID NO: 349424 - RNA, 19 nt, Homo sapiens
  misc_RNA (1)...(19): siRNA sense strand
gaaauugguccaguuuaug

SEQ ID NO: 349425 - RNA, 19 nt, Homo sapiens
  misc_RNA (1)...(19): siRNA sense strand
gaacccuucgccugaauaa

SEQ ID NO: 349426 - RNA, 19 nt, Homo sapiens
  misc_RNA (1)...(19): siRNA sense strand
ggacugcaaguggccauua

SEQ ID NO: 349427 - RNA, 19 nt, Homo sapiens
  misc_RNA (1)...(19): siRNA sense strand
gaagaaagagcugaacaag

SEQ ID NO: 349428 - RNA, 19 nt, Homo sapiens
  misc_RNA (1)...(19): siRNA sense strand
gcccugagauccugcacaa

SEQ ID NO: 349429 - RNA, 19 nt, Homo sapiens
  misc_RNA (1)...(19): siRNA sense strand
aggaagcagcugauuauua

SEQ ID NO: 349430 - RNA, 19 nt, Homo sapiens
  misc_RNA (1)...(19): siRNA sense strand
uggaugaguuugaaauguu

SEQ ID NO: 349431 - RNA, 19 nt, Homo sapiens
  misc_RNA (1)...(19): siRNA sense strand
cgucucagcccuucaguuu

SEQ ID NO: 349432 - RNA, 19 nt, Homo sapiens
  misc_RNA (1)...(19): siRNA sense strand
gcccagcacuucauacgau

SEQ ID NO: 349433 - RNA, 19 nt, Homo sapiens
  misc_RNA (1)...(19): siRNA sense strand
ggaaguccuccuuguauuc

SEQ ID NO: 349434 - RNA, 19 nt, Homo sapiens
  misc_RNA (1)...(19): siRNA sense strand
ugaagagugucuccagaug

SEQ ID NO: 349435 - RNA, 19 nt, Homo sapiens
  misc_RNA (1)...(19): siRNA sense strand
ccaaagaaaggaccagaga

SEQ ID NO: 349436 - RNA, 19 nt, Homo sapiens
  misc_RNA (1)...(19): siRNA sense strand
aggaagagcugacccaucu

SEQ ID NO: 349437 - RNA, 19 nt, Homo sapiens
  misc_RNA (1)...(19): siRNA sense strand
cuggagagcucacagacuu

SEQ ID NO: 349438 - RNA, 19 nt, Homo sapiens
  misc_RNA (1)...(19): siRNA sense strand
gccagaagcaggaguguga

SEQ ID NO: 349439 - RNA, 19 nt, Homo sapiens
  misc_RNA (1)...(19): siRNA sense strand
agaccuauguuccagaaga

SEQ ID NO: 349440 - RNA, 19 nt, Homo sapiens
  misc_RNA (1)...(19): siRNA sense strand
ggagagcucacagacuuaa

SEQ ID NO: 349441 - RNA, 19 nt, Homo sapiens
  misc_RNA (1)...(19): siRNA sense strand
guucaaaacugacauuuag

SEQ ID NO: 349442 - RNA, 19 nt, Homo sapiens
  misc_RNA (1)...(19): siRNA sense strand
gcucccagcugaccagaca

SEQ ID NO: 349443 - RNA, 19 nt, Homo sapiens
  misc_RNA (1)...(19): siRNA sense strand
ccacugaggacccguguga

SEQ ID NO: 349444 - RNA, 19 nt, Homo sapiens
  misc_RNA (1)...(19): siRNA sense strand
aagacaaccaucacacuua

SEQ ID NO: 349445 - RNA, 19 nt, Homo sapiens
  misc_RNA (1)...(19): siRNA sense strand
gaucagcgacugccacauc

SEQ ID NO: 349446 - RNA, 19 nt, Homo sapiens
  misc_RNA (1)...(19): siRNA sense strand
cauggaauuuaacuccuaa

SEQ ID NO: 349447 - RNA, 19 nt, Homo sapiens
  misc_RNA (1)...(19): siRNA sense strand
aaagaagccagcaccgaua

SEQ ID NO: 349448 - RNA, 19 nt, Homo sapiens
  misc_RNA (1)...(19): siRNA sense strand
gcuccuaugaugagagaua

SEQ ID NO: 349449 - RNA, 19 nt, Homo sapiens
  misc_RNA (1)...(19): siRNA sense strand
gauaggagaauuccagagu

SEQ ID NO: 349450 - RNA, 19 nt, Homo sapiens
  misc_RNA (1)...(19): siRNA sense strand
agccugacauggaauuuaa

SEQ ID NO: 349451 - RNA, 19 nt, Homo sapiens
  misc_RNA (1)...(19): siRNA sense strand
cgugaggccugcacagcua

SEQ ID NO: 349452 - RNA, 19 nt, Homo sapiens
  misc_RNA (1)...(19): siRNA sense strand
gaccagccuucccaacaug

SEQ ID NO: 349453 - RNA, 19 nt, Homo sapiens
  misc_RNA (1)...(19): siRNA sense strand
cuaaggagagcucugauug

SEQ ID NO: 349454 - RNA, 19 nt, Homo sapiens
  misc_RNA (1)...(19): siRNA sense strand
acauugaggcugucuuuaa

SEQ ID NO: 349455 - RNA, 19 nt, Homo sapiens
  misc_RNA (1)...(19): siRNA sense strand
agaacuacauugggauaaa

SEQ ID NO: 349456 - RNA, 19 nt, Homo sapiens
  misc_RNA (1)...(19): siRNA sense strand
cuaggaagcagcugauuau

SEQ ID NO: 349457 - RNA, 19 nt, Homo sapiens
  misc_RNA (1)...(19): siRNA sense strand
gggacaugcuauauuagug

SEQ ID NO: 349458 - RNA, 19 nt, Homo sapiens
  misc_RNA (1)...(19): siRNA sense strand
agagagagcuagacagacu

SEQ ID NO: 349459 - RNA, 19 nt, Homo sapiens
  misc_RNA (1)...(19): siRNA sense strand
gaucuauauuucuggugaa

SEQ ID NO: 349460 - RNA, 19 nt, Homo sapiens
  misc_RNA (1)...(19): siRNA sense strand
gcagccagguggagguuag

SEQ ID NO: 349461 - RNA, 19 nt, Homo sapiens
  misc_RNA (1)...(19): siRNA sense strand
aaugguggcuccuggaaug

SEQ ID NO: 349462 - RNA, 19 nt, Homo sapiens
  misc_RNA (1)...(19): siRNA sense strand
ugccgaagcuacuggacua

SEQ ID NO: 349463 - RNA, 19 nt, Homo sapiens
  misc_RNA (1)...(19): siRNA sense strand
gcaguaccaucuacaucuc

SEQ ID NO: 349464 - RNA, 19 nt, Homo sapiens
  misc_RNA (1)...(19): siRNA sense strand
ggucaucggcgacgaagug

SEQ ID NO: 349465 - RNA, 19 nt, Homo sapiens
  misc_RNA (1)...(19): siRNA sense strand
ccauuaccaucucuaagga

SEQ ID NO: 349466 - RNA, 19 nt, Homo sapiens
  misc_RNA (1)...(19): siRNA sense strand
uaaaugugaagaaggcuuu

SEQ ID NO: 349467 - RNA, 19 nt, Homo sapiens
  misc_RNA (1)...(19): siRNA sense strand
uugcugaguucgaagauga

SEQ ID NO: 349468 - RNA, 19 nt, Homo sapiens
  misc_RNA (1)...(19): siRNA sense strand
uuugggaccugcuuuguga

SEQ ID NO: 349469 - RNA, 19 nt, Homo sapiens
  misc_RNA (1)...(19): siRNA sense strand
caucggaauucagccauga

SEQ ID NO: 349470 - RNA, 19 nt, Homo sapiens
  misc_RNA (1)...(19): siRNA sense strand
ggccugcccucaucaucaa

SEQ ID NO: 349471 - RNA, 19 nt, Homo sapiens
  misc_RNA (1)...(19): siRNA sense strand
aaauguggguuucaguguu

SEQ ID NO: 349472 - RNA, 19 nt, Homo sapiens
  misc_RNA (1)...(19): siRNA sense strand
auaggagaauuccagagua

SEQ ID NO: 349473 - RNA, 19 nt, Homo sapiens
  misc_RNA (1)...(19): siRNA sense strand
caaagaaaggaccagagaa

SEQ ID NO: 349474 - RNA, 19 nt, Homo sapiens
  misc_RNA (1)...(19): siRNA sense strand
cauugaggcugucuuuaag

SEQ ID NO: 349475 - RNA, 19 nt, Homo sapiens
  misc_RNA (1)...(19): siRNA sense strand
uggaaguccuccuuguauu

SEQ ID NO: 349476 - RNA, 19 nt, Homo sapiens
  misc_RNA (1)...(19): siRNA sense strand
gaccaccuccuacacuauu

SEQ ID NO: 349477 - RNA, 19 nt, Homo sapiens
  misc_RNA (1)...(19): siRNA sense strand
uugggcagcugauugcuuu

SEQ ID NO: 349478 - RNA, 19 nt, Homo sapiens
  misc_RNA (1)...(19): siRNA sense strand
gagagagagaugguguuua

SEQ ID NO: 349479 - RNA, 19 nt, Homo sapiens
  misc_RNA (1)...(19): siRNA sense strand
cccaagauaucucgcacuu

SEQ ID NO: 349480 - RNA, 19 nt, Homo sapiens
  misc_RNA (1)...(19): siRNA sense strand
uuuaagauguggaacaaca

SEQ ID NO: 349481 - RNA, 19 nt, Homo sapiens
  misc_RNA (1)...(19): siRNA sense strand
gugaaaggcucaguagaac

SEQ ID NO: 349482 - RNA, 19 nt, Homo sapiens
  misc_RNA (1)...(19): siRNA sense strand
gcagcugauuauuagaaau

SEQ ID NO: 349483 - RNA, 19 nt, Homo sapiens
  misc_RNA (1)...(19): siRNA sense strand
ucgagagccuugucagguu

SEQ ID NO: 349484 - RNA, 19 nt, Homo sapiens
  misc_RNA (1)...(19): siRNA sense strand
ggaagaagcuugcugaguu

SEQ ID NO: 349485 - RNA, 19 nt, Homo sapiens
  misc_RNA (1)...(19): siRNA sense strand
agaaagagcugaacaagaa

SEQ ID NO: 349486 - RNA, 19 nt, Homo sapiens
  misc_RNA (1)...(19): siRNA sense strand
gaagauuacuacaccgaua

SEQ ID NO: 349487 - RNA, 19 nt, Homo sapiens
  misc_RNA (1)...(19): siRNA sense strand
ggaaugaccugccaguaca

SEQ ID NO: 349488 - RNA, 19 nt, Homo sapiens
  misc_RNA (1)...(19): siRNA sense strand
gaagugagcgcaagcuuga

SEQ ID NO: 349489 - RNA, 19 nt, Homo sapiens
  misc_RNA (1)...(19): siRNA sense strand
gaagauucaugcaggaaga

SEQ ID NO: 349490 - RNA, 19 nt, Homo sapiens
  misc_RNA (1)...(19): siRNA sense strand
gaagaagcuugcugaguuc

SEQ ID NO: 349491 - RNA, 19 nt, Homo sapiens
  misc_RNA (1)...(19): siRNA sense strand
ugaaauugguccaguuuau

SEQ ID NO: 349492 - RNA, 19 nt, Homo sapiens
  misc_RNA (1)...(19): siRNA sense strand
cccgggacaugcuauauua

SEQ ID NO: 349493 - RNA, 19 nt, Homo sapiens
  misc_RNA (1)...(19): siRNA sense strand
ggaugaguuugaaauguug

SEQ ID NO: 349494 - RNA, 19 nt, Homo sapiens
  misc_RNA (1)...(19): siRNA sense strand
gaagcuugcugaguucgaa

SEQ ID NO: 349495 - RNA, 19 nt, Homo sapiens
  misc_RNA (1)...(19): siRNA sense strand
ccaguacauuguccaguuu

SEQ ID NO: 349496 - RNA, 19 nt, Homo sapiens
  misc_RNA (1)...(19): siRNA sense strand
gccaguacauuguccaguu

SEQ ID NO: 349497 - RNA, 19 nt, Homo sapiens
  misc_RNA (1)...(19): siRNA sense strand
ugaguucgaagaugaguua

SEQ ID NO: 349498 - RNA, 19 nt, Homo sapiens
  misc_RNA (1)...(19): siRNA sense strand
gaaauugguccaguuuaug

SEQ ID NO: 349499 - RNA, 19 nt, Homo sapiens
  misc_RNA (1)...(19): siRNA sense strand
gaagaaagagcugaacaag

SEQ ID NO: 349500 - RNA, 19 nt, Homo sapiens
  misc_RNA (1)...(19): siRNA sense strand
ggaaguccuccuuguauuc

SEQ ID NO: 349501 - RNA, 19 nt, Homo sapiens
  misc_RNA (1)...(19): siRNA sense strand
ugaagagugucuccagaug

SEQ ID NO: 349502 - RNA, 19 nt, Homo sapiens
  misc_RNA (1)...(19): siRNA sense strand
uggaugaguuugaaauguu

SEQ ID NO: 349503 - RNA, 19 nt, Homo sapiens
  misc_RNA (1)...(19): siRNA sense strand
ccaaagaaaggaccagaga

SEQ ID NO: 349504 - RNA, 19 nt, Homo sapiens
  misc_RNA (1)...(19): siRNA sense strand
guucaaaacugacauuuag

SEQ ID NO: 349505 - RNA, 19 nt, Homo sapiens
  misc_RNA (1)...(19): siRNA sense strand
cauggaauuuaacuccuaa

SEQ ID NO: 349506 - RNA, 19 nt, Homo sapiens
  misc_RNA (1)...(19): siRNA sense strand
aaagaagccagcaccgaua

SEQ ID NO: 349507 - RNA, 19 nt, Homo sapiens
  misc_RNA (1)...(19): siRNA sense strand
gauaggagaauuccagagu

SEQ ID NO: 349508 - RNA, 19 nt, Homo sapiens
  misc_RNA (1)...(19): siRNA sense strand
agccugacauggaauuuaa

SEQ ID NO: 349509 - RNA, 19 nt, Homo sapiens
  misc_RNA (1)...(19): siRNA sense strand
gggacaugcuauauuagug

SEQ ID NO: 349510 - RNA, 19 nt, Homo sapiens
  misc_RNA (1)...(19): siRNA sense strand
agagagagcuagacagacu

SEQ ID NO: 349511 - RNA, 19 nt, Homo sapiens
  misc_RNA (1)...(19): siRNA sense strand
ggucaucggcgacgaagug

SEQ ID NO: 349512 - RNA, 19 nt, Homo sapiens
  misc_RNA (1)...(19): siRNA sense strand
aaugguggcuccuggaaug

SEQ ID NO: 349513 - RNA, 19 nt, Homo sapiens
  misc_RNA (1)...(19): siRNA sense strand
uugcugaguucgaagauga

SEQ ID NO: 349514 - RNA, 19 nt, Homo sapiens
  misc_RNA (1)...(19): siRNA sense strand
aaauguggguuucaguguu

SEQ ID NO: 349515 - RNA, 19 nt, Homo sapiens
  misc_RNA (1)...(19): siRNA sense strand
auaggagaauuccagagua

SEQ ID NO: 349516 - RNA, 19 nt, Homo sapiens
  misc_RNA (1)...(19): siRNA sense strand
caaagaaaggaccagagaa

SEQ ID NO: 349517 - RNA, 19 nt, Homo sapiens
  misc_RNA (1)...(19): siRNA sense strand
uggaaguccuccuuguauu

SEQ ID NO: 349518 - RNA, 19 nt, Homo sapiens
  misc_RNA (1)...(19): siRNA sense strand
ucgagagccuugucagguu

SEQ ID NO: 349519 - RNA, 19 nt, Homo sapiens
  misc_RNA (1)...(19): siRNA sense strand
ggaaugguggcuccuggaa

SEQ ID NO: 349520 - RNA, 19 nt, Homo sapiens
  misc_RNA (1)...(19): siRNA sense strand
gaaccucucaagaaagcaa

SEQ ID NO: 349521 - RNA, 19 nt, Homo sapiens
  misc_RNA (1)...(19): siRNA sense strand
acauggaauuuaacuccua

SEQ ID NO: 349522 - RNA, 19 nt, Homo sapiens
  misc_RNA (1)...(19): siRNA sense strand
cuacggaaacaucauuuga

SEQ ID NO: 349523 - RNA, 19 nt, Homo sapiens
  misc_RNA (1)...(19): siRNA sense strand
cccaagauaucucgcacuu

SEQ ID NO: 349524 - RNA, 19 nt, Homo sapiens
  misc_RNA (1)...(19): siRNA sense strand
aaauugguccaguuuauga

SEQ ID NO: 349525 - RNA, 19 nt, Homo sapiens
  misc_RNA (1)...(19): siRNA sense strand
acagagagagcuagacaga

SEQ ID NO: 349526 - RNA, 19 nt, Homo sapiens
  misc_RNA (1)...(19): siRNA sense strand
ccagucagcccacacacuu

SEQ ID NO: 349527 - RNA, 19 nt, Homo sapiens
  misc_RNA (1)...(19): siRNA sense strand
ccacagagagagcuagaca

SEQ ID NO: 349528 - RNA, 19 nt, Homo sapiens
  misc_RNA (1)...(19): siRNA sense strand
aauguggguuucaguguug

SEQ ID NO: 349529 - RNA, 19 nt, Homo sapiens
  misc_RNA (1)...(19): siRNA sense strand
uaauugcgcugcagaacac

SEQ ID NO: 349530 - RNA, 19 nt, Homo sapiens
  misc_RNA (1)...(19): siRNA sense strand
uaugaaauugguccaguuu

SEQ ID NO: 349531 - RNA, 19 nt, Homo sapiens
  misc_RNA (1)...(19): siRNA sense strand
cagcaccgauaggagaauu

SEQ ID NO: 349532 - RNA, 19 nt, Homo sapiens
  misc_RNA (1)...(19): siRNA sense strand
guacucagccgaggucauc

SEQ ID NO: 349533 - RNA, 19 nt, Homo sapiens
  misc_RNA (1)...(19): siRNA sense strand
gaagccagcaccgauagga

SEQ ID NO: 349534 - RNA, 19 nt, Homo sapiens
  misc_RNA (1)...(19): siRNA sense strand
ucgcugcgcacccaagaua

SEQ ID NO: 349535 - RNA, 19 nt, Homo sapiens
  misc_RNA (1)...(19): siRNA sense strand
cagguugccuccagugaag

SEQ ID NO: 349536 - RNA, 19 nt, Homo sapiens
  misc_RNA (1)...(19): siRNA sense strand
aauccugccuucgguguuu

SEQ ID NO: 349537 - RNA, 19 nt, Homo sapiens
  misc_RNA (1)...(19): siRNA sense strand
gaacaaccuccuuuuggaa

SEQ ID NO: 349538 - RNA, 19 nt, Homo sapiens
  misc_RNA (1)...(19): siRNA sense strand
guaauugcgcugcagaaca

SEQ ID NO: 349539 - RNA, 19 nt, Homo sapiens
  misc_RNA (1)...(19): siRNA sense strand
uaggagaauuccagaguac

SEQ ID NO: 349540 - RNA, 19 nt, Homo sapiens
  misc_RNA (1)...(19): siRNA sense strand
gcgaguugcuacggaaaca

SEQ ID NO: 349541 - RNA, 19 nt, Homo sapiens
  misc_RNA (1)...(19): siRNA sense strand
agaagaaagagcugaacaa

SEQ ID NO: 349542 - RNA, 19 nt, Homo sapiens
  misc_RNA (1)...(19): siRNA sense strand
uuuaugagaugguaauugc

SEQ ID NO: 349543 - RNA, 19 nt, Homo sapiens
  misc_RNA (1)...(19): siRNA sense strand
cuagcuaagccaccaauug

SEQ ID NO: 349544 - RNA, 19 nt, Homo sapiens
  misc_RNA (1)...(19): siRNA sense strand
cagccugacauggaauuua

SEQ ID NO: 349545 - RNA, 19 nt, Homo sapiens
  misc_RNA (1)...(19): siRNA sense strand
guggacagccugacaugga

SEQ ID NO: 349546 - RNA, 19 nt, Homo sapiens
  misc_RNA (1)...(19): siRNA sense strand
uggacagccugacauggaa

SEQ ID NO: 349547 - RNA, 19 nt, Homo sapiens
  misc_RNA (1)...(19): siRNA sense strand
uuaugaaauugguccaguu

SEQ ID NO: 349548 - RNA, 19 nt, Homo sapiens
  misc_RNA (1)...(19): siRNA sense strand
uagcuaagccaccaauugg

SEQ ID NO: 349549 - RNA, 19 nt, Homo sapiens
  misc_RNA (1)...(19): siRNA sense strand
gagaauuccagaguacaga

SEQ ID NO: 349550 - RNA, 19 nt, Homo sapiens
  misc_RNA (1)...(19): siRNA sense strand
guguauagacagcgaguug

SEQ ID NO: 349551 - RNA, 19 nt, Homo sapiens
  misc_RNA (1)...(19): siRNA sense strand
ugugguuacugccucauug

SEQ ID NO: 349552 - RNA, 19 nt, Homo sapiens
  misc_RNA (1)...(19): siRNA sense strand
ucacagauuaugaaauugg

SEQ ID NO: 349553 - RNA, 19 nt, Homo sapiens
  misc_RNA (1)...(19): siRNA sense strand
uaacuccuaaggccaaaga

SEQ ID NO: 349554 - RNA, 19 nt, Homo sapiens
  misc_RNA (1)...(19): siRNA sense strand
aagaaagagcugaacaaga

SEQ ID NO: 349555 - RNA, 19 nt, Homo sapiens
  misc_RNA (1)...(19): siRNA sense strand
ccuggaaguccuccuugua

SEQ ID NO: 349556 - RNA, 19 nt, Homo sapiens
  misc_RNA (1)...(19): siRNA sense strand
cagauucgggagcucuaua

SEQ ID NO: 349557 - RNA, 19 nt, Homo sapiens
  misc_RNA (1)...(19): siRNA sense strand
aaagaaaggaccagagaac

SEQ ID NO: 349558 - RNA, 19 nt, Homo sapiens
  misc_RNA (1)...(19): siRNA sense strand
aagagugucuccagauggu

SEQ ID NO: 349559 - RNA, 19 nt, Homo sapiens
  misc_RNA (1)...(19): siRNA sense strand
ugaacaaccuccuuuugga

SEQ ID NO: 349560 - RNA, 19 nt, Homo sapiens
  misc_RNA (1)...(19): siRNA sense strand
gcuggccaccacuaaguuu

SEQ ID NO: 349561 - RNA, 19 nt, Homo sapiens
  misc_RNA (1)...(19): siRNA sense strand
gcggcuggaugaguuugaa

SEQ ID NO: 349562 - RNA, 19 nt, Homo sapiens
  misc_RNA (1)...(19): siRNA sense strand
gaaagagcugaacaagaag

SEQ ID NO: 349563 - RNA, 19 nt, Homo sapiens
  misc_RNA (1)...(19): siRNA sense strand
gaaugguggcuccuggaau

SEQ ID NO: 349564 - RNA, 19 nt, Homo sapiens
  misc_RNA (1)...(19): siRNA sense strand
gugcugauacuccaguguu

SEQ ID NO: 349565 - RNA, 19 nt, Homo sapiens
  misc_RNA (1)...(19): siRNA sense strand
acucugaggccuuccacua

SEQ ID NO: 349566 - RNA, 19 nt, Homo sapiens
  misc_RNA (1)...(19): siRNA sense strand
gaagcguuccguccagaag

SEQ ID NO: 349567 - RNA, 19 nt, Homo sapiens
  misc_RNA (1)...(19): siRNA sense strand
gcuacggaaacaucauuug

SEQ ID NO: 349568 - RNA, 19 nt, Homo sapiens
  misc_RNA (1)...(19): siRNA sense strand
cauugcaaccgucggcuuu

SEQ ID NO: 349569 - RNA, 19 nt, Homo sapiens
  misc_RNA (1)...(19): siRNA sense strand
uucgggagcucuauaagca

SEQ ID NO: 349570 - RNA, 19 nt, Homo sapiens
  misc_RNA (1)...(19): siRNA sense strand
cuccaguguuucuagcuaa

SEQ ID NO: 349571 - RNA, 19 nt, Homo sapiens
  misc_RNA (1)...(19): siRNA sense strand
gauacuccaguguuucuag

SEQ ID NO: 349572 - RNA, 19 nt, Homo sapiens
  misc_RNA (1)...(19): siRNA sense strand
ggagaauuccagaguacag

SEQ ID NO: 349573 - RNA, 19 nt, Homo sapiens
  misc_RNA (1)...(19): siRNA sense strand
ucugaggccuuccacuaca

SEQ ID NO: 349574 - RNA, 19 nt, Homo sapiens
  misc_RNA (1)...(19): siRNA sense strand
gcuggaugaguuugaaaug

SEQ ID NO: 349575 - RNA, 19 nt, Homo sapiens
  misc_RNA (1)...(19): siRNA sense strand
gugaagagugucuccagau

SEQ ID NO: 349576 - RNA, 19 nt, Homo sapiens
  misc_RNA (1)...(19): siRNA sense strand
ccaaaacgcggaggucuuu

SEQ ID NO: 349577 - RNA, 19 nt, Homo sapiens
  misc_RNA (1)...(19): siRNA sense strand
cuggaaguccuccuuguau

SEQ ID NO: 349578 - RNA, 19 nt, Homo sapiens
  misc_RNA (1)...(19): siRNA sense strand
acaagcuggccaccacuaa

SEQ ID NO: 349579 - RNA, 19 nt, Homo sapiens
  misc_RNA (1)...(19): siRNA sense strand
uaagccaccaauuggguuu

SEQ ID NO: 349580 - RNA, 19 nt, Homo sapiens
  misc_RNA (1)...(19): siRNA sense strand
acuccaguguuucuagcua

SEQ ID NO: 349581 - RNA, 19 nt, Homo sapiens
  misc_RNA (1)...(19): siRNA sense strand
gauauggaggcaagucucu

SEQ ID NO: 349582 - RNA, 19 nt, Homo sapiens
  misc_RNA (1)...(19): siRNA sense strand
cagaagaaagagcugaaca

SEQ ID NO: 349583 - RNA, 19 nt, Homo sapiens
  misc_RNA (1)...(19): siRNA sense strand
cuggaugaguuugaaaugu

SEQ ID NO: 349584 - RNA, 19 nt, Homo sapiens
  misc_RNA (1)...(19): siRNA sense strand
ggaagaagcuugcugaguu

SEQ ID NO: 349585 - RNA, 19 nt, Homo sapiens
  misc_RNA (1)...(19): siRNA sense strand
agaaagagcugaacaagaa

SEQ ID NO: 349586 - RNA, 19 nt, Homo sapiens
  misc_RNA (1)...(19): siRNA sense strand
ggaagcagcugauuauuag

SEQ ID NO: 349587 - RNA, 19 nt, Homo sapiens
  misc_RNA (1)...(19): siRNA sense strand
gaagauuacuacaccgaua

SEQ ID NO: 349588 - RNA, 19 nt, Homo sapiens
  misc_RNA (1)...(19): siRNA sense strand
ggaaugaccugccaguaca

SEQ ID NO: 349589 - RNA, 19 nt, Homo sapiens
  misc_RNA (1)...(19): siRNA sense strand
gaagugagcgcaagcuuga

SEQ ID NO: 349590 - RNA, 19 nt, Homo sapiens
  misc_RNA (1)...(19): siRNA sense strand
gaagauucaugcaggaaga

SEQ ID NO: 349591 - RNA, 19 nt, Homo sapiens
  misc_RNA (1)...(19): siRNA sense strand
gaagaagcuugcugaguuc

SEQ ID NO: 349592 - RNA, 19 nt, Homo sapiens
  misc_RNA (1)...(19): siRNA sense strand
ugaaauugguccaguuuau

SEQ ID NO: 349593 - RNA, 19 nt, Homo sapiens
  misc_RNA (1)...(19): siRNA sense strand
cccgggacaugcuauauua

SEQ ID NO: 349594 - RNA, 19 nt, Homo sapiens
  misc_RNA (1)...(19): siRNA sense strand
gcuaggaagcagcugauua

SEQ ID NO: 349595 - RNA, 19 nt, Homo sapiens
  misc_RNA (1)...(19): siRNA sense strand
ggaugaguuugaaauguug

SEQ ID NO: 349596 - RNA, 19 nt, Homo sapiens
  misc_RNA (1)...(19): siRNA sense strand
gaagcuugcugaguucgaa

SEQ ID NO: 349597 - RNA, 19 nt, Homo sapiens
  misc_RNA (1)...(19): siRNA sense strand
ccaguacauuguccaguuu

SEQ ID NO: 349598 - RNA, 19 nt, Homo sapiens
  misc_RNA (1)...(19): siRNA sense strand
ggaauugggcagcugauug

SEQ ID NO: 349599 - RNA, 19 nt, Homo sapiens
  misc_RNA (1)...(19): siRNA sense strand
gccaguacauuguccaguu

SEQ ID NO: 349600 - RNA, 19 nt, Homo sapiens
  misc_RNA (1)...(19): siRNA sense strand
ugaguucgaagaugaguua

SEQ ID NO: 349601 - RNA, 19 nt, Homo sapiens
  misc_RNA (1)...(19): siRNA sense strand
gaaauugguccaguuuaug

SEQ ID NO: 349602 - RNA, 19 nt, Homo sapiens
  misc_RNA (1)...(19): siRNA sense strand
gaagaaagagcugaacaag

SEQ ID NO: 349603 - RNA, 19 nt, Homo sapiens
  misc_RNA (1)...(19): siRNA sense strand
aggaagcagcugauuauua

SEQ ID NO: 349604 - RNA, 19 nt, Homo sapiens
  misc_RNA (1)...(19): siRNA sense strand
uggaugaguuugaaauguu

SEQ ID NO: 349605 - RNA, 19 nt, Homo sapiens
  misc_RNA (1)...(19): siRNA sense strand
ggaaguccuccuuguauuc

SEQ ID NO: 349606 - RNA, 19 nt, Homo sapiens
  misc_RNA (1)...(19): siRNA sense strand
gcccagcacuucauacgau

SEQ ID NO: 349607 - RNA, 19 nt, Homo sapiens
  misc_RNA (1)...(19): siRNA sense strand
ugaagagugucuccagaug

SEQ ID NO: 349608 - RNA, 19 nt, Homo sapiens
  misc_RNA (1)...(19): siRNA sense strand
ccaaagaaaggaccagaga

SEQ ID NO: 349609 - RNA, 19 nt, Homo sapiens
  misc_RNA (1)...(19): siRNA sense strand
cuggagagcucacagacuu

SEQ ID NO: 349610 - RNA, 19 nt, Homo sapiens
  misc_RNA (1)...(19): siRNA sense strand
ggagagcucacagacuuaa

SEQ ID NO: 349611 - RNA, 19 nt, Homo sapiens
  misc_RNA (1)...(19): siRNA sense strand
guucaaaacugacauuuag

SEQ ID NO: 349612 - RNA, 19 nt, Homo sapiens
  misc_RNA (1)...(19): siRNA sense strand
cauggaauuuaacuccuaa

SEQ ID NO: 349613 - RNA, 19 nt, Homo sapiens
  misc_RNA (1)...(19): siRNA sense strand
aaagaagccagcaccgaua

SEQ ID NO: 349614 - RNA, 19 nt, Homo sapiens
  misc_RNA (1)...(19): siRNA sense strand
gauaggagaauuccagagu

SEQ ID NO: 349615 - RNA, 19 nt, Homo sapiens
  misc_RNA (1)...(19): siRNA sense strand
agccugacauggaauuuaa

SEQ ID NO: 349616 - RNA, 19 nt, Homo sapiens
  misc_RNA (1)...(19): siRNA sense strand
cuaggaagcagcugauuau

SEQ ID NO: 349617 - RNA, 19 nt, Homo sapiens
  misc_RNA (1)...(19): siRNA sense strand
gggacaugcuauauuagug

SEQ ID NO: 349618 - RNA, 19 nt, Homo sapiens
  misc_RNA (1)...(19): siRNA sense strand
agagagagcuagacagacu

SEQ ID NO: 349619 - RNA, 19 nt, Homo sapiens
  misc_RNA (1)...(19): siRNA sense strand
gaucuauauuucuggugaa

SEQ ID NO: 349620 - RNA, 19 nt, Homo sapiens
  misc_RNA (1)...(19): siRNA sense strand
ggucaucggcgacgaagug

SEQ ID NO: 349621 - RNA, 19 nt, Homo sapiens
  misc_RNA (1)...(19): siRNA sense strand
aaugguggcuccuggaaug

SEQ ID NO: 349622 - RNA, 19 nt, Homo sapiens
  misc_RNA (1)...(19): siRNA sense strand
uugcugaguucgaagauga

SEQ ID NO: 349623 - RNA, 19 nt, Homo sapiens
  misc_RNA (1)...(19): siRNA sense strand
aaauguggguuucaguguu

SEQ ID NO: 349624 - RNA, 19 nt, Homo sapiens
  misc_RNA (1)...(19): siRNA sense strand
auaggagaauuccagagua

SEQ ID NO: 349625 - RNA, 19 nt, Homo sapiens
  misc_RNA (1)...(19): siRNA sense strand
caaagaaaggaccagagaa

SEQ ID NO: 349626 - RNA, 19 nt, Homo sapiens
  misc_RNA (1)...(19): siRNA sense strand
uggaaguccuccuuguauu

SEQ ID NO: 349627 - RNA, 19 nt, Homo sapiens
  misc_RNA (1)...(19): siRNA sense strand
cccaagauaucucgcacuu

SEQ ID NO: 349628 - RNA, 19 nt, Homo sapiens
  misc_RNA (1)...(19): siRNA sense strand
gcagcugauuauuagaaau

SEQ ID NO: 349629 - RNA, 19 nt, Homo sapiens
  misc_RNA (1)...(19): siRNA sense strand
uugggcagcugauugcuuu

SEQ ID NO: 349630 - RNA, 19 nt, Homo sapiens
  misc_RNA (1)...(19): siRNA sense strand
ggaaugguggcuccuggaa

SEQ ID NO: 349631 - RNA, 19 nt, Homo sapiens
  misc_RNA (1)...(19): siRNA sense strand
gaaccucucaagaaagcaa

SEQ ID NO: 349632 - RNA, 19 nt, Homo sapiens
  misc_RNA (1)...(19): siRNA sense strand
acauggaauuuaacuccua

SEQ ID NO: 349633 - RNA, 19 nt, Homo sapiens
  misc_RNA (1)...(19): siRNA sense strand
cuacggaaacaucauuuga

SEQ ID NO: 349634 - RNA, 19 nt, Homo sapiens
  misc_RNA (1)...(19): siRNA sense strand
ucgagagccuugucagguu

SEQ ID NO: 349635 - RNA, 19 nt, Homo sapiens
  misc_RNA (1)...(19): siRNA sense strand
aaauugguccaguuuauga

SEQ ID NO: 349636 - RNA, 19 nt, Homo sapiens
  misc_RNA (1)...(19): siRNA sense strand
acagagagagcuagacaga

SEQ ID NO: 349637 - RNA, 19 nt, Homo sapiens
  misc_RNA (1)...(19): siRNA sense strand
ccagucagcccacacacuu

SEQ ID NO: 349638 - RNA, 19 nt, Homo sapiens
  misc_RNA (1)...(19): siRNA sense strand
ccacagagagagcuagaca

SEQ ID NO: 349639 - RNA, 19 nt, Homo sapiens
  misc_RNA (1)...(19): siRNA sense strand
aauguggguuucaguguug

SEQ ID NO: 349640 - RNA, 19 nt, Homo sapiens
  misc_RNA (1)...(19): siRNA sense strand
uaauugcgcugcagaacac

SEQ ID NO: 349641 - RNA, 19 nt, Homo sapiens
  misc_RNA (1)...(19): siRNA sense strand
uaugaaauugguccaguuu

SEQ ID NO: 349642 - RNA, 19 nt, Homo sapiens
  misc_RNA (1)...(19): siRNA sense strand
cagcaccgauaggagaauu

SEQ ID NO: 349643 - RNA, 19 nt, Homo sapiens
  misc_RNA (1)...(19): siRNA sense strand
gaagccagcaccgauagga

SEQ ID NO: 349644 - RNA, 19 nt, Homo sapiens
  misc_RNA (1)...(19): siRNA sense strand
cagcugauuauuagaaaug

SEQ ID NO: 349645 - RNA, 19 nt, Homo sapiens
  misc_RNA (1)...(19): siRNA sense strand
gcagcugauugcuuuggau

SEQ ID NO: 349646 - RNA, 19 nt, Homo sapiens
  misc_RNA (1)...(19): siRNA sense strand
ucgcugcgcacccaagaua

SEQ ID NO: 349647 - RNA, 19 nt, Homo sapiens
  misc_RNA (1)...(19): siRNA sense strand
guacucagccgaggucauc

SEQ ID NO: 349648 - RNA, 19 nt, Homo sapiens
  misc_RNA (1)...(19): siRNA sense strand
cagguugccuccagugaag

SEQ ID NO: 349649 - RNA, 19 nt, Homo sapiens
  misc_RNA (1)...(19): siRNA sense strand
gcugauugcuuuggaucug

SEQ ID NO: 349650 - RNA, 19 nt, Homo sapiens
  misc_RNA (1)...(19): siRNA sense strand
gaauugggcagcugauugc

SEQ ID NO: 349651 - RNA, 19 nt, Homo sapiens
  misc_RNA (1)...(19): siRNA sense strand
aauccugccuucgguguuu

SEQ ID NO: 349652 - RNA, 19 nt, Homo sapiens
  misc_RNA (1)...(19): siRNA sense strand
gaacaaccuccuuuuggaa

SEQ ID NO: 349653 - RNA, 19 nt, Homo sapiens
  misc_RNA (1)...(19): siRNA sense strand
guaauugcgcugcagaaca

SEQ ID NO: 349654 - RNA, 19 nt, Homo sapiens
  misc_RNA (1)...(19): siRNA sense strand
uaggagaauuccagaguac

SEQ ID NO: 349655 - RNA, 19 nt, Homo sapiens
  misc_RNA (1)...(19): siRNA sense strand
gcgaguugcuacggaaaca

SEQ ID NO: 349656 - RNA, 19 nt, Homo sapiens
  misc_RNA (1)...(19): siRNA sense strand
agaagaaagagcugaacaa

SEQ ID NO: 349657 - RNA, 19 nt, Homo sapiens
  misc_RNA (1)...(19): siRNA sense strand
uuuaugagaugguaauugc

SEQ ID NO: 349658 - RNA, 19 nt, Homo sapiens
  misc_RNA (1)...(19): siRNA sense strand
cuagcuaagccaccaauug

SEQ ID NO: 349659 - RNA, 19 nt, Homo sapiens
  misc_RNA (1)...(19): siRNA sense strand
cagccugacauggaauuua

SEQ ID NO: 349660 - RNA, 19 nt, Homo sapiens
  misc_RNA (1)...(19): siRNA sense strand
guggacagccugacaugga

SEQ ID NO: 349661 - RNA, 19 nt, Homo sapiens
  misc_RNA (1)...(19): siRNA sense strand
uggacagccugacauggaa

SEQ ID NO: 349662 - RNA, 19 nt, Homo sapiens
  misc_RNA (1)...(19): siRNA sense strand
uaacagcccagcacuucau

SEQ ID NO: 349663 - RNA, 19 nt, Homo sapiens
  misc_RNA (1)...(19): siRNA sense strand
uuaugaaauugguccaguu

SEQ ID NO: 349664 - RNA, 19 nt, Homo sapiens
  misc_RNA (1)...(19): siRNA sense strand
uagcuaagccaccaauugg

SEQ ID NO: 349665 - RNA, 19 nt, Homo sapiens
  misc_RNA (1)...(19): siRNA sense strand
gagaauuccagaguacaga

SEQ ID NO: 349666 - RNA, 19 nt, Homo sapiens
  misc_RNA (1)...(19): siRNA sense strand
guguauagacagcgaguug

SEQ ID NO: 349667 - RNA, 19 nt, Homo sapiens
  misc_RNA (1)...(19): siRNA sense strand
aagcagcugauuauuagaa

SEQ ID NO: 349668 - RNA, 19 nt, Homo sapiens
  misc_RNA (1)...(19): siRNA sense strand
ugugguuacugccucauug

SEQ ID NO: 349669 - RNA, 19 nt, Homo sapiens
  misc_RNA (1)...(19): siRNA sense strand
ucacagauuaugaaauugg

SEQ ID NO: 349670 - RNA, 19 nt, Homo sapiens
  misc_RNA (1)...(19): siRNA sense strand
uaacuccuaaggccaaaga

SEQ ID NO: 349671 - RNA, 19 nt, Homo sapiens
  misc_RNA (1)...(19): siRNA sense strand
aagaaagagcugaacaaga

SEQ ID NO: 349672 - RNA, 19 nt, Homo sapiens
  misc_RNA (1)...(19): siRNA sense strand
aaagaaaggaccagagaac

SEQ ID NO: 349673 - RNA, 19 nt, Homo sapiens
  misc_RNA (1)...(19): siRNA sense strand
cagauucgggagcucuaua

SEQ ID NO: 349674 - RNA, 19 nt, Homo sapiens
  misc_RNA (1)...(19): siRNA sense strand
ccuggaaguccuccuugua

SEQ ID NO: 349675 - RNA, 19 nt, Homo sapiens
  misc_RNA (1)...(19): siRNA sense strand
aagagugucuccagauggu

SEQ ID NO: 349676 - RNA, 19 nt, Homo sapiens
  misc_RNA (1)...(19): siRNA sense strand
ugaacaaccuccuuuugga

SEQ ID NO: 349677 - RNA, 19 nt, Homo sapiens
  misc_RNA (1)...(19): siRNA sense strand
gcuggccaccacuaaguuu

SEQ ID NO: 349678 - RNA, 19 nt, Homo sapiens
  misc_RNA (1)...(19): siRNA sense strand
gcggcuggaugaguuugaa

SEQ ID NO: 349679 - RNA, 19 nt, Homo sapiens
  misc_RNA (1)...(19): siRNA sense strand
gaaagagcugaacaagaag

SEQ ID NO: 349680 - RNA, 19 nt, Homo sapiens
  misc_RNA (1)...(19): siRNA sense strand
acucugaggccuuccacua

SEQ ID NO: 349681 - RNA, 19 nt, Homo sapiens
  misc_RNA (1)...(19): siRNA sense strand
gaaugguggcuccuggaau

SEQ ID NO: 349682 - RNA, 19 nt, Homo sapiens
  misc_RNA (1)...(19): siRNA sense strand
gugcugauacuccaguguu

SEQ ID NO: 349683 - RNA, 19 nt, Homo sapiens
  misc_RNA (1)...(19): siRNA sense strand
gaagcguuccguccagaag

SEQ ID NO: 349684 - RNA, 19 nt, Homo sapiens
  misc_RNA (1)...(19): siRNA sense strand
ggaagaagcuugcugaguu

SEQ ID NO: 349685 - RNA, 19 nt, Homo sapiens
  misc_RNA (1)...(19): siRNA sense strand
agaaagagcugaacaagaa

SEQ ID NO: 349686 - RNA, 19 nt, Homo sapiens
  misc_RNA (1)...(19): siRNA sense strand
ggaagcagcugauuauuag

SEQ ID NO: 349687 - RNA, 19 nt, Homo sapiens
  misc_RNA (1)...(19): siRNA sense strand
gaagauuacuacaccgaua

SEQ ID NO: 349688 - RNA, 19 nt, Homo sapiens
  misc_RNA (1)...(19): siRNA sense strand
gcaagucacccaucagaua

SEQ ID NO: 349689 - RNA, 19 nt, Homo sapiens
  misc_RNA (1)...(19): siRNA sense strand
gcaauaggguggcacagaa

SEQ ID NO: 349690 - RNA, 19 nt, Homo sapiens
  misc_RNA (1)...(19): siRNA sense strand
cuacagagaucccacacua

SEQ ID NO: 349691 - RNA, 19 nt, Homo sapiens
  misc_RNA (1)...(19): siRNA sense strand
gcacaaagacacagacuug

SEQ ID NO: 349692 - RNA, 19 nt, Homo sapiens
  misc_RNA (1)...(19): siRNA sense strand
gaagaaggcuuuuaagaug

SEQ ID NO: 349693 - RNA, 19 nt, Homo sapiens
  misc_RNA (1)...(19): siRNA sense strand
gagcuugugugcccugaua

SEQ ID NO: 349694 - RNA, 19 nt, Homo sapiens
  misc_RNA (1)...(19): siRNA sense strand
ggagcuaccuuccugugua

SEQ ID NO: 349695 - RNA, 19 nt, Homo sapiens
  misc_RNA (1)...(19): siRNA sense strand
ggaaugaccugccaguaca

SEQ ID NO: 349696 - RNA, 19 nt, Homo sapiens
  misc_RNA (1)...(19): siRNA sense strand
gaagugagcgcaagcuuga

SEQ ID NO: 349697 - RNA, 19 nt, Homo sapiens
  misc_RNA (1)...(19): siRNA sense strand
gaagauucaugcaggaaga

SEQ ID NO: 349698 - RNA, 19 nt, Homo sapiens
  misc_RNA (1)...(19): siRNA sense strand
gaagaagcuugcugaguuc

SEQ ID NO: 349699 - RNA, 19 nt, Homo sapiens
  misc_RNA (1)...(19): siRNA sense strand
ccacacuacuuccggcuua

SEQ ID NO: 349700 - RNA, 19 nt, Homo sapiens
  misc_RNA (1)...(19): siRNA sense strand
gaacuacauugggauaaau

SEQ ID NO: 349701 - RNA, 19 nt, Homo sapiens
  misc_RNA (1)...(19): siRNA sense strand
ugaaauugguccaguuuau

SEQ ID NO: 349702 - RNA, 19 nt, Homo sapiens
  misc_RNA (1)...(19): siRNA sense strand
ggccaaggcuccuaugaug

SEQ ID NO: 349703 - RNA, 19 nt, Homo sapiens
  misc_RNA (1)...(19): siRNA sense strand
gagaugguguuuacucaga

SEQ ID NO: 349704 - RNA, 19 nt, Homo sapiens
  misc_RNA (1)...(19): siRNA sense strand
ggaaaggccugaggaugug

SEQ ID NO: 349705 - RNA, 19 nt, Homo sapiens
  misc_RNA (1)...(19): siRNA sense strand
ggagaccuauguuccagaa

SEQ ID NO: 349706 - RNA, 19 nt, Homo sapiens
  misc_RNA (1)...(19): siRNA sense strand
aaacauugcccagggauua

SEQ ID NO: 349707 - RNA, 19 nt, Homo sapiens
  misc_RNA (1)...(19): siRNA sense strand
cccgggacaugcuauauua

SEQ ID NO: 349708 - RNA, 19 nt, Homo sapiens
  misc_RNA (1)...(19): siRNA sense strand
gagagaugguguuuacuca

SEQ ID NO: 349709 - RNA, 19 nt, Homo sapiens
  misc_RNA (1)...(19): siRNA sense strand
ggugaaaggcucaguagaa

SEQ ID NO: 349710 - RNA, 19 nt, Homo sapiens
  misc_RNA (1)...(19): siRNA sense strand
gcuaggaagcagcugauua

SEQ ID NO: 349711 - RNA, 19 nt, Homo sapiens
  misc_RNA (1)...(19): siRNA sense strand
ggaugaguuugaaauguug

SEQ ID NO: 349712 - RNA, 19 nt, Homo sapiens
  misc_RNA (1)...(19): siRNA sense strand
gaagacaaccaucacacuu

SEQ ID NO: 349713 - RNA, 19 nt, Homo sapiens
  misc_RNA (1)...(19): siRNA sense strand
gaagcuugcugaguucgaa

SEQ ID NO: 349714 - RNA, 19 nt, Homo sapiens
  misc_RNA (1)...(19): siRNA sense strand
cacagaagcucaucucagu

SEQ ID NO: 349715 - RNA, 19 nt, Homo sapiens
  misc_RNA (1)...(19): siRNA sense strand
gagagcagcuggauuuuau

SEQ ID NO: 349716 - RNA, 19 nt, Homo sapiens
  misc_RNA (1)...(19): siRNA sense strand
ggagaacuacauugggaua

SEQ ID NO: 349717 - RNA, 19 nt, Homo sapiens
  misc_RNA (1)...(19): siRNA sense strand
ccaguacauuguccaguuu

SEQ ID NO: 349718 - RNA, 19 nt, Homo sapiens
  misc_RNA (1)...(19): siRNA sense strand
gagcuaccuuccuguguau

SEQ ID NO: 349719 - RNA, 19 nt, Homo sapiens
  misc_RNA (1)...(19): siRNA sense strand
ggaauugggcagcugauug

SEQ ID NO: 349720 - RNA, 19 nt, Homo sapiens
  misc_RNA (1)...(19): siRNA sense strand
agagagagaugguguuuac

SEQ ID NO: 349721 - RNA, 19 nt, Homo sapiens
  misc_RNA (1)...(19): siRNA sense strand
gccaguacauuguccaguu

SEQ ID NO: 349722 - RNA, 19 nt, Homo sapiens
  misc_RNA (1)...(19): siRNA sense strand
gaccaacacuacagagauc

SEQ ID NO: 349723 - RNA, 19 nt, Homo sapiens
  misc_RNA (1)...(19): siRNA sense strand
caaaacagccugagcaaaa

SEQ ID NO: 349724 - RNA, 19 nt, Homo sapiens
  misc_RNA (1)...(19): siRNA sense strand
agacaaccaucacacuuau

SEQ ID NO: 349725 - RNA, 19 nt, Homo sapiens
  misc_RNA (1)...(19): siRNA sense strand
ugaguucgaagaugaguua

SEQ ID NO: 349726 - RNA, 19 nt, Homo sapiens
  misc_RNA (1)...(19): siRNA sense strand
ccuaggcccucaugauuug

SEQ ID NO: 349727 - RNA, 19 nt, Homo sapiens
  misc_RNA (1)...(19): siRNA sense strand
gaaauugguccaguuuaug

SEQ ID NO: 349728 - RNA, 19 nt, Homo sapiens
  misc_RNA (1)...(19): siRNA sense strand
gaacccuucgccugaauaa

SEQ ID NO: 349729 - RNA, 19 nt, Homo sapiens
  misc_RNA (1)...(19): siRNA sense strand
ggacugcaaguggccauua

SEQ ID NO: 349730 - RNA, 19 nt, Homo sapiens
  misc_RNA (1)...(19): siRNA sense strand
gaagaaagagcugaacaag

SEQ ID NO: 349731 - RNA, 19 nt, Homo sapiens
  misc_RNA (1)...(19): siRNA sense strand
gcccugagauccugcacaa

SEQ ID NO: 349732 - RNA, 19 nt, Homo sapiens
  misc_RNA (1)...(19): siRNA sense strand
aggaagcagcugauuauua

SEQ ID NO: 349733 - RNA, 19 nt, Homo sapiens
  misc_RNA (1)...(19): siRNA sense strand
uggaugaguuugaaauguu

SEQ ID NO: 349734 - RNA, 19 nt, Homo sapiens
  misc_RNA (1)...(19): siRNA sense strand
ggaaguccuccuuguauuc

SEQ ID NO: 349735 - RNA, 19 nt, Homo sapiens
  misc_RNA (1)...(19): siRNA sense strand
cgucucagcccuucaguuu

SEQ ID NO: 349736 - RNA, 19 nt, Homo sapiens
  misc_RNA (1)...(19): siRNA sense strand
gcccagcacuucauacgau

SEQ ID NO: 349737 - RNA, 19 nt, Homo sapiens
  misc_RNA (1)...(19): siRNA sense strand
ugaagagugucuccagaug

SEQ ID NO: 349738 - RNA, 19 nt, Homo sapiens
  misc_RNA (1)...(19): siRNA sense strand
ccaaagaaaggaccagaga

SEQ ID NO: 349739 - RNA, 19 nt, Homo sapiens
  misc_RNA (1)...(19): siRNA sense strand
aggaagagcugacccaucu

SEQ ID NO: 349740 - RNA, 19 nt, Homo sapiens
  misc_RNA (1)...(19): siRNA sense strand
cuggagagcucacagacuu

SEQ ID NO: 349741 - RNA, 19 nt, Homo sapiens
  misc_RNA (1)...(19): siRNA sense strand
gccagaagcaggaguguga

SEQ ID NO: 349742 - RNA, 19 nt, Homo sapiens
  misc_RNA (1)...(19): siRNA sense strand
agaccuauguuccagaaga

SEQ ID NO: 349743 - RNA, 19 nt, Homo sapiens
  misc_RNA (1)...(19): siRNA sense strand
ggagagcucacagacuuaa

SEQ ID NO: 349744 - RNA, 19 nt, Homo sapiens
  misc_RNA (1)...(19): siRNA sense strand
guucaaaacugacauuuag

SEQ ID NO: 349745 - RNA, 19 nt, Homo sapiens
  misc_RNA (1)...(19): siRNA sense strand
gcucccagcugaccagaca

SEQ ID NO: 349746 - RNA, 19 nt, Homo sapiens
  misc_RNA (1)...(19): siRNA sense strand
ccacugaggacccguguga

SEQ ID NO: 349747 - RNA, 19 nt, Homo sapiens
  misc_RNA (1)...(19): siRNA sense strand
aagacaaccaucacacuua

SEQ ID NO: 349748 - RNA, 19 nt, Homo sapiens
  misc_RNA (1)...(19): siRNA sense strand
gaucagcgacugccacauc

SEQ ID NO: 349749 - RNA, 19 nt, Homo sapiens
  misc_RNA (1)...(19): siRNA sense strand
cauggaauuuaacuccuaa

SEQ ID NO: 349750 - RNA, 19 nt, Homo sapiens
  misc_RNA (1)...(19): siRNA sense strand
aaagaagccagcaccgaua

SEQ ID NO: 349751 - RNA, 19 nt, Homo sapiens
  misc_RNA (1)...(19): siRNA sense strand
gcuccuaugaugagagaua

SEQ ID NO: 349752 - RNA, 19 nt, Homo sapiens
  misc_RNA (1)...(19): siRNA sense strand
gauaggagaauuccagagu

SEQ ID NO: 349753 - RNA, 19 nt, Homo sapiens
  misc_RNA (1)...(19): siRNA sense strand
agccugacauggaauuuaa

SEQ ID NO: 349754 - RNA, 19 nt, Homo sapiens
  misc_RNA (1)...(19): siRNA sense strand
cgugaggccugcacagcua

SEQ ID NO: 349755 - RNA, 19 nt, Homo sapiens
  misc_RNA (1)...(19): siRNA sense strand
gaccagccuucccaacaug

SEQ ID NO: 349756 - RNA, 19 nt, Homo sapiens
  misc_RNA (1)...(19): siRNA sense strand
cuaaggagagcucugauug

SEQ ID NO: 349757 - RNA, 19 nt, Homo sapiens
  misc_RNA (1)...(19): siRNA sense strand
acauugaggcugucuuuaa

SEQ ID NO: 349758 - RNA, 19 nt, Homo sapiens
  misc_RNA (1)...(19): siRNA sense strand
agaacuacauugggauaaa

SEQ ID NO: 349759 - RNA, 19 nt, Homo sapiens
  misc_RNA (1)...(19): siRNA sense strand
cuaggaagcagcugauuau

SEQ ID NO: 349760 - RNA, 19 nt, Homo sapiens
  misc_RNA (1)...(19): siRNA sense strand
gggacaugcuauauuagug

SEQ ID NO: 349761 - RNA, 19 nt, Homo sapiens
  misc_RNA (1)...(19): siRNA sense strand
agagagagcuagacagacu

SEQ ID NO: 349762 - RNA, 19 nt, Homo sapiens
  misc_RNA (1)...(19): siRNA sense strand
gaucuauauuucuggugaa

SEQ ID NO: 349763 - RNA, 19 nt, Homo sapiens
  misc_RNA (1)...(19): siRNA sense strand
gcagccagguggagguuag

SEQ ID NO: 349764 - RNA, 19 nt, Homo sapiens
  misc_RNA (1)...(19): siRNA sense strand
aaugguggcuccuggaaug

SEQ ID NO: 349765 - RNA, 19 nt, Homo sapiens
  misc_RNA (1)...(19): siRNA sense strand
ugccgaagcuacuggacua

SEQ ID NO: 349766 - RNA, 19 nt, Homo sapiens
  misc_RNA (1)...(19): siRNA sense strand
gcaguaccaucuacaucuc

SEQ ID NO: 349767 - RNA, 19 nt, Homo sapiens
  misc_RNA (1)...(19): siRNA sense strand
ccauuaccaucucuaagga

SEQ ID NO: 349768 - RNA, 19 nt, Homo sapiens
  misc_RNA (1)...(19): siRNA sense strand
ggucaucggcgacgaagug

SEQ ID NO: 349769 - RNA, 19 nt, Homo sapiens
  misc_RNA (1)...(19): siRNA sense strand
uaaaugugaagaaggcuuu

SEQ ID NO: 349770 - RNA, 19 nt, Homo sapiens
  misc_RNA (1)...(19): siRNA sense strand
uugcugaguucgaagauga

SEQ ID NO: 349771 - RNA, 19 nt, Homo sapiens
  misc_RNA (1)...(19): siRNA sense strand
uuugggaccugcuuuguga

SEQ ID NO: 349772 - RNA, 19 nt, Homo sapiens
  misc_RNA (1)...(19): siRNA sense strand
caucggaauucagccauga

SEQ ID NO: 349773 - RNA, 19 nt, Homo sapiens
  misc_RNA (1)...(19): siRNA sense strand
ggccugcccucaucaucaa

SEQ ID NO: 349774 - RNA, 19 nt, Homo sapiens
  misc_RNA (1)...(19): siRNA sense strand
aaauguggguuucaguguu

SEQ ID NO: 349775 - RNA, 19 nt, Homo sapiens
  misc_RNA (1)...(19): siRNA sense strand
auaggagaauuccagagua

SEQ ID NO: 349776 - RNA, 19 nt, Homo sapiens
  misc_RNA (1)...(19): siRNA sense strand
caaagaaaggaccagagaa

SEQ ID NO: 349777 - RNA, 19 nt, Homo sapiens
  misc_RNA (1)...(19): siRNA sense strand
cauugaggcugucuuuaag

SEQ ID NO: 349778 - RNA, 19 nt, Homo sapiens
  misc_RNA (1)...(19): siRNA sense strand
uggaaguccuccuuguauu

SEQ ID NO: 349779 - RNA, 19 nt, Homo sapiens
  misc_RNA (1)...(19): siRNA sense strand
gaccaccuccuacacuauu

SEQ ID NO: 349780 - RNA, 19 nt, Homo sapiens
  misc_RNA (1)...(19): siRNA sense strand
cccaagauaucucgcacuu

SEQ ID NO: 349781 - RNA, 19 nt, Homo sapiens
  misc_RNA (1)...(19): siRNA sense strand
gauuuguccucagagcuaa

SEQ ID NO: 349782 - RNA, 19 nt, Homo sapiens
  misc_RNA (1)...(19): siRNA sense strand
gagagagagaugguguuua

SEQ ID NO: 349783 - RNA, 19 nt, Homo sapiens
  misc_RNA (1)...(19): siRNA sense strand
ucgagagccuugucagguu

SEQ ID NO: 349784 - RNA, 19 nt, Homo sapiens
  misc_RNA (1)...(19): siRNA sense strand
ggaagaagcuugcugaguu

SEQ ID NO: 349785 - RNA, 19 nt, Homo sapiens
  misc_RNA (1)...(19): siRNA sense strand
agaaagagcugaacaagaa

SEQ ID NO: 349786 - RNA, 19 nt, Homo sapiens
  misc_RNA (1)...(19): siRNA sense strand
ggaagcagcugauuauuag

SEQ ID NO: 349787 - RNA, 19 nt, Homo sapiens
  misc_RNA (1)...(19): siRNA sense strand
gaagauuacuacaccgaua

SEQ ID NO: 349788 - RNA, 19 nt, Homo sapiens
  misc_RNA (1)...(19): siRNA sense strand
ggaaugaccugccaguaca

SEQ ID NO: 349789 - RNA, 19 nt, Homo sapiens
  misc_RNA (1)...(19): siRNA sense strand
gaagugagcgcaagcuuga

SEQ ID NO: 349790 - RNA, 19 nt, Homo sapiens
  misc_RNA (1)...(19): siRNA sense strand
gaagauucaugcaggaaga

SEQ ID NO: 349791 - RNA, 19 nt, Homo sapiens
  misc_RNA (1)...(19): siRNA sense strand
gaagaagcuugcugaguuc

SEQ ID NO: 349792 - RNA, 19 nt, Homo sapiens
  misc_RNA (1)...(19): siRNA sense strand
ugaaauugguccaguuuau

SEQ ID NO: 349793 - RNA, 19 nt, Homo sapiens
  misc_RNA (1)...(19): siRNA sense strand
cccgggacaugcuauauua

SEQ ID NO: 349794 - RNA, 19 nt, Homo sapiens
  misc_RNA (1)...(19): siRNA sense strand
gcuaggaagcagcugauua

SEQ ID NO: 349795 - RNA, 19 nt, Homo sapiens
  misc_RNA (1)...(19): siRNA sense strand
ggaugaguuugaaauguug

SEQ ID NO: 349796 - RNA, 19 nt, Homo sapiens
  misc_RNA (1)...(19): siRNA sense strand
gaagcuugcugaguucgaa

SEQ ID NO: 349797 - RNA, 19 nt, Homo sapiens
  misc_RNA (1)...(19): siRNA sense strand
ccaguacauuguccaguuu

SEQ ID NO: 349798 - RNA, 19 nt, Homo sapiens
  misc_RNA (1)...(19): siRNA sense strand
ggaauugggcagcugauug

SEQ ID NO: 349799 - RNA, 19 nt, Homo sapiens
  misc_RNA (1)...(19): siRNA sense strand
gccaguacauuguccaguu

SEQ ID NO: 349800 - RNA, 19 nt, Homo sapiens
  misc_RNA (1)...(19): siRNA sense strand
ugaguucgaagaugaguua

SEQ ID NO: 349801 - RNA, 19 nt, Homo sapiens
  misc_RNA (1)...(19): siRNA sense strand
gaaauugguccaguuuaug

SEQ ID NO: 349802 - RNA, 19 nt, Homo sapiens
  misc_RNA (1)...(19): siRNA sense strand
gaagaaagagcugaacaag

SEQ ID NO: 349803 - RNA, 19 nt, Homo sapiens
  misc_RNA (1)...(19): siRNA sense strand
aggaagcagcugauuauua

SEQ ID NO: 349804 - RNA, 19 nt, Homo sapiens
  misc_RNA (1)...(19): siRNA sense strand
uggaugaguuugaaauguu

SEQ ID NO: 349805 - RNA, 19 nt, Homo sapiens
  misc_RNA (1)...(19): siRNA sense strand
ggaaguccuccuuguauuc

SEQ ID NO: 349806 - RNA, 19 nt, Homo sapiens
  misc_RNA (1)...(19): siRNA sense strand
gcccagcacuucauacgau

SEQ ID NO: 349807 - RNA, 19 nt, Homo sapiens
  misc_RNA (1)...(19): siRNA sense strand
ugaagagugucuccagaug

SEQ ID NO: 349808 - RNA, 19 nt, Homo sapiens
  misc_RNA (1)...(19): siRNA sense strand
ccaaagaaaggaccagaga

SEQ ID NO: 349809 - RNA, 19 nt, Homo sapiens
  misc_RNA (1)...(19): siRNA sense strand
cuggagagcucacagacuu

SEQ ID NO: 349810 - RNA, 19 nt, Homo sapiens
  misc_RNA (1)...(19): siRNA sense strand
ggagagcucacagacuuaa

SEQ ID NO: 349811 - RNA, 19 nt, Homo sapiens
  misc_RNA (1)...(19): siRNA sense strand
guucaaaacugacauuuag

SEQ ID NO: 349812 - RNA, 19 nt, Homo sapiens
  misc_RNA (1)...(19): siRNA sense strand
cauggaauuuaacuccuaa

SEQ ID NO: 349813 - RNA, 19 nt, Homo sapiens
  misc_RNA (1)...(19): siRNA sense strand
aaagaagccagcaccgaua

SEQ ID NO: 349814 - RNA, 19 nt, Homo sapiens
  misc_RNA (1)...(19): siRNA sense strand
gauaggagaauuccagagu

SEQ ID NO: 349815 - RNA, 19 nt, Homo sapiens
  misc_RNA (1)...(19): siRNA sense strand
agccugacauggaauuuaa

SEQ ID NO: 349816 - RNA, 19 nt, Homo sapiens
  misc_RNA (1)...(19): siRNA sense strand
cuaggaagcagcugauuau

SEQ ID NO: 349817 - RNA, 19 nt, Homo sapiens
  misc_RNA (1)...(19): siRNA sense strand
gggacaugcuauauuagug

SEQ ID NO: 349818 - RNA, 19 nt, Homo sapiens
  misc_RNA (1)...(19): siRNA sense strand
agagagagcuagacagacu

SEQ ID NO: 349819 - RNA, 19 nt, Homo sapiens
  misc_RNA (1)...(19): siRNA sense strand
gaucuauauuucuggugaa

SEQ ID NO: 349820 - RNA, 19 nt, Homo sapiens
  misc_RNA (1)...(19): siRNA sense strand
ggucaucggcgacgaagug

SEQ ID NO: 349821 - RNA, 19 nt, Homo sapiens
  misc_RNA (1)...(19): siRNA sense strand
aaugguggcuccuggaaug

SEQ ID NO: 349822 - RNA, 19 nt, Homo sapiens
  misc_RNA (1)...(19): siRNA sense strand
uugcugaguucgaagauga

SEQ ID NO: 349823 - RNA, 19 nt, Homo sapiens
  misc_RNA (1)...(19): siRNA sense strand
aaauguggguuucaguguu

SEQ ID NO: 349824 - RNA, 19 nt, Homo sapiens
  misc_RNA (1)...(19): siRNA sense strand
auaggagaauuccagagua

SEQ ID NO: 349825 - RNA, 19 nt, Homo sapiens
  misc_RNA (1)...(19): siRNA sense strand
caaagaaaggaccagagaa

SEQ ID NO: 349826 - RNA, 19 nt, Homo sapiens
  misc_RNA (1)...(19): siRNA sense strand
uggaaguccuccuuguauu

SEQ ID NO: 349827 - RNA, 19 nt, Homo sapiens
  misc_RNA (1)...(19): siRNA sense strand
cccaagauaucucgcacuu

SEQ ID NO: 349828 - RNA, 19 nt, Homo sapiens
  misc_RNA (1)...(19): siRNA sense strand
gcagcugauuauuagaaau

SEQ ID NO: 349829 - RNA, 19 nt, Homo sapiens
  misc_RNA (1)...(19): siRNA sense strand
uugggcagcugauugcuuu

SEQ ID NO: 349830 - RNA, 19 nt, Homo sapiens
  misc_RNA (1)...(19): siRNA sense strand
ggaaugguggcuccuggaa

SEQ ID NO: 349831 - RNA, 19 nt, Homo sapiens
  misc_RNA (1)...(19): siRNA sense strand
gaaccucucaagaaagcaa

SEQ ID NO: 349832 - RNA, 19 nt, Homo sapiens
  misc_RNA (1)...(19): siRNA sense strand
acauggaauuuaacuccua

SEQ ID NO: 349833 - RNA, 19 nt, Homo sapiens
  misc_RNA (1)...(19): siRNA sense strand
cuacggaaacaucauuuga

SEQ ID NO: 349834 - RNA, 19 nt, Homo sapiens
  misc_RNA (1)...(19): siRNA sense strand
ucgagagccuugucagguu

SEQ ID NO: 349835 - RNA, 19 nt, Homo sapiens
  misc_RNA (1)...(19): siRNA sense strand
aaauugguccaguuuauga

SEQ ID NO: 349836 - RNA, 19 nt, Homo sapiens
  misc_RNA (1)...(19): siRNA sense strand
acagagagagcuagacaga

SEQ ID NO: 349837 - RNA, 19 nt, Homo sapiens
  misc_RNA (1)...(19): siRNA sense strand
ccagucagcccacacacuu

SEQ ID NO: 349838 - RNA, 19 nt, Homo sapiens
  misc_RNA (1)...(19): siRNA sense strand
ccacagagagagcuagaca

SEQ ID NO: 349839 - RNA, 19 nt, Homo sapiens
  misc_RNA (1)...(19): siRNA sense strand
aauguggguuucaguguug

SEQ ID NO: 349840 - RNA, 19 nt, Homo sapiens
  misc_RNA (1)...(19): siRNA sense strand
uaauugcgcugcagaacac

SEQ ID NO: 349841 - RNA, 19 nt, Homo sapiens
  misc_RNA (1)...(19): siRNA sense strand
uaugaaauugguccaguuu

SEQ ID NO: 349842 - RNA, 19 nt, Homo sapiens
  misc_RNA (1)...(19): siRNA sense strand
cagcaccgauaggagaauu

SEQ ID NO: 349843 - RNA, 19 nt, Homo sapiens
  misc_RNA (1)...(19): siRNA sense strand
gaagccagcaccgauagga

SEQ ID NO: 349844 - RNA, 19 nt, Homo sapiens
  misc_RNA (1)...(19): siRNA sense strand
cagcugauuauuagaaaug

SEQ ID NO: 349845 - RNA, 19 nt, Homo sapiens
  misc_RNA (1)...(19): siRNA sense strand
gcagcugauugcuuuggau

SEQ ID NO: 349846 - RNA, 19 nt, Homo sapiens
  misc_RNA (1)...(19): siRNA sense strand
ucgcugcgcacccaagaua

SEQ ID NO: 349847 - RNA, 19 nt, Homo sapiens
  misc_RNA (1)...(19): siRNA sense strand
guacucagccgaggucauc

SEQ ID NO: 349848 - RNA, 19 nt, Homo sapiens
  misc_RNA (1)...(19): siRNA sense strand
cagguugccuccagugaag

SEQ ID NO: 349849 - RNA, 19 nt, Homo sapiens
  misc_RNA (1)...(19): siRNA sense strand
gcugauugcuuuggaucug

SEQ ID NO: 349850 - RNA, 19 nt, Homo sapiens
  misc_RNA (1)...(19): siRNA sense strand
gaauugggcagcugauugc

SEQ ID NO: 349851 - RNA, 19 nt, Homo sapiens
  misc_RNA (1)...(19): siRNA sense strand
aauccugccuucgguguuu

SEQ ID NO: 349852 - RNA, 19 nt, Homo sapiens
  misc_RNA (1)...(19): siRNA sense strand
gaacaaccuccuuuuggaa

SEQ ID NO: 349853 - RNA, 19 nt, Homo sapiens
  misc_RNA (1)...(19): siRNA sense strand
guaauugcgcugcagaaca

SEQ ID NO: 349854 - RNA, 19 nt, Homo sapiens
  misc_RNA (1)...(19): siRNA sense strand
uaggagaauuccagaguac

SEQ ID NO: 349855 - RNA, 19 nt, Homo sapiens
  misc_RNA (1)...(19): siRNA sense strand
gcgaguugcuacggaaaca

SEQ ID NO: 349856 - RNA, 19 nt, Homo sapiens
  misc_RNA (1)...(19): siRNA sense strand
agaagaaagagcugaacaa

SEQ ID NO: 349857 - RNA, 19 nt, Homo sapiens
  misc_RNA (1)...(19): siRNA sense strand
uuuaugagaugguaauugc

SEQ ID NO: 349858 - RNA, 19 nt, Homo sapiens
  misc_RNA (1)...(19): siRNA sense strand
cuagcuaagccaccaauug

SEQ ID NO: 349859 - RNA, 19 nt, Homo sapiens
  misc_RNA (1)...(19): siRNA sense strand
cagccugacauggaauuua

SEQ ID NO: 349860 - RNA, 19 nt, Homo sapiens
  misc_RNA (1)...(19): siRNA sense strand
guggacagccugacaugga

SEQ ID NO: 349861 - RNA, 19 nt, Homo sapiens
  misc_RNA (1)...(19): siRNA sense strand
uggacagccugacauggaa

SEQ ID NO: 349862 - RNA, 19 nt, Homo sapiens
  misc_RNA (1)...(19): siRNA sense strand
uaacagcccagcacuucau

SEQ ID NO: 349863 - RNA, 19 nt, Homo sapiens
  misc_RNA (1)...(19): siRNA sense strand
uuaugaaauugguccaguu

SEQ ID NO: 349864 - RNA, 19 nt, Homo sapiens
  misc_RNA (1)...(19): siRNA sense strand
uagcuaagccaccaauugg

SEQ ID NO: 349865 - RNA, 19 nt, Homo sapiens
  misc_RNA (1)...(19): siRNA sense strand
gagaauuccagaguacaga

SEQ ID NO: 349866 - RNA, 19 nt, Homo sapiens
  misc_RNA (1)...(19): siRNA sense strand
guguauagacagcgaguug

SEQ ID NO: 349867 - RNA, 19 nt, Homo sapiens
  misc_RNA (1)...(19): siRNA sense strand
aagcagcugauuauuagaa

SEQ ID NO: 349868 - RNA, 19 nt, Homo sapiens
  misc_RNA (1)...(19): siRNA sense strand
ugugguuacugccucauug

SEQ ID NO: 349869 - RNA, 19 nt, Homo sapiens
  misc_RNA (1)...(19): siRNA sense strand
ucacagauuaugaaauugg

SEQ ID NO: 349870 - RNA, 19 nt, Homo sapiens
  misc_RNA (1)...(19): siRNA sense strand
uaacuccuaaggccaaaga

SEQ ID NO: 349871 - RNA, 19 nt, Homo sapiens
  misc_RNA (1)...(19): siRNA sense strand
aagaaagagcugaacaaga

SEQ ID NO: 349872 - RNA, 19 nt, Homo sapiens
  misc_RNA (1)...(19): siRNA sense strand
aaagaaaggaccagagaac

SEQ ID NO: 349873 - RNA, 19 nt, Homo sapiens
  misc_RNA (1)...(19): siRNA sense strand
cagauucgggagcucuaua

SEQ ID NO: 349874 - RNA, 19 nt, Homo sapiens
  misc_RNA (1)...(19): siRNA sense strand
ccuggaaguccuccuugua

SEQ ID NO: 349875 - RNA, 19 nt, Homo sapiens
  misc_RNA (1)...(19): siRNA sense strand
aagagugucuccagauggu

SEQ ID NO: 349876 - RNA, 19 nt, Homo sapiens
  misc_RNA (1)...(19): siRNA sense strand
ugaacaaccuccuuuugga

SEQ ID NO: 349877 - RNA, 19 nt, Homo sapiens
  misc_RNA (1)...(19): siRNA sense strand
gcuggccaccacuaaguuu

SEQ ID NO: 349878 - RNA, 19 nt, Homo sapiens
  misc_RNA (1)...(19): siRNA sense strand
gcggcuggaugaguuugaa

SEQ ID NO: 349879 - RNA, 19 nt, Homo sapiens
  misc_RNA (1)...(19): siRNA sense strand
gaaagagcugaacaagaag

SEQ ID NO: 349880 - RNA, 19 nt, Homo sapiens
  misc_RNA (1)...(19): siRNA sense strand
acucugaggccuuccacua

SEQ ID NO: 349881 - RNA, 19 nt, Homo sapiens
  misc_RNA (1)...(19): siRNA sense strand
gaaugguggcuccuggaau

SEQ ID NO: 349882 - RNA, 19 nt, Homo sapiens
  misc_RNA (1)...(19): siRNA sense strand
gugcugauacuccaguguu

SEQ ID NO: 349883 - RNA, 19 nt, Homo sapiens
  misc_RNA (1)...(19): siRNA sense strand
gaagcguuccguccagaag

SEQ ID NO: 349884 - RNA, 19 nt, Homo sapiens
  misc_RNA (1)...(19): siRNA sense strand
ggaagaagcuugcugaguu

SEQ ID NO: 349885 - RNA, 19 nt, Homo sapiens
  misc_RNA (1)...(19): siRNA sense strand
agaaagagcugaacaagaa

SEQ ID NO: 349886 - RNA, 19 nt, Homo sapiens
  misc_RNA (1)...(19): siRNA sense strand
ggaagcagcugauuauuag

SEQ ID NO: 349887 - RNA, 19 nt, Homo sapiens
  misc_RNA (1)...(19): siRNA sense strand
gaagauuacuacaccgaua

SEQ ID NO: 349888 - RNA, 19 nt, Homo sapiens
  misc_RNA (1)...(19): siRNA sense strand
gcaagucacccaucagaua

SEQ ID NO: 349889 - RNA, 19 nt, Homo sapiens
  misc_RNA (1)...(19): siRNA sense strand
gcaauaggguggcacagaa

SEQ ID NO: 349890 - RNA, 19 nt, Homo sapiens
  misc_RNA (1)...(19): siRNA sense strand
cuacagagaucccacacua

SEQ ID NO: 349891 - RNA, 19 nt, Homo sapiens
  misc_RNA (1)...(19): siRNA sense strand
gaagaaggcuuuuaagaug

SEQ ID NO: 349892 - RNA, 19 nt, Homo sapiens
  misc_RNA (1)...(19): siRNA sense strand
gagcuugugugcccugaua

SEQ ID NO: 349893 - RNA, 19 nt, Homo sapiens
  misc_RNA (1)...(19): siRNA sense strand
ggagcuaccuuccugugua

SEQ ID NO: 349894 - RNA, 19 nt, Homo sapiens
  misc_RNA (1)...(19): siRNA sense strand
ggaaugaccugccaguaca

SEQ ID NO: 349895 - RNA, 19 nt, Homo sapiens
  misc_RNA (1)...(19): siRNA sense strand
gaagugagcgcaagcuuga

SEQ ID NO: 349896 - RNA, 19 nt, Homo sapiens
  misc_RNA (1)...(19): siRNA sense strand
gaagauucaugcaggaaga

SEQ ID NO: 349897 - RNA, 19 nt, Homo sapiens
  misc_RNA (1)...(19): siRNA sense strand
gaagaagcuugcugaguuc

SEQ ID NO: 349898 - RNA, 19 nt, Homo sapiens
  misc_RNA (1)...(19): siRNA sense strand
ccacacuacuuccggcuua

SEQ ID NO: 349899 - RNA, 19 nt, Homo sapiens
  misc_RNA (1)...(19): siRNA sense strand
gaacuacauugggauaaau

SEQ ID NO: 349900 - RNA, 19 nt, Homo sapiens
  misc_RNA (1)...(19): siRNA sense strand
ugaaauugguccaguuuau

SEQ ID NO: 349901 - RNA, 19 nt, Homo sapiens
  misc_RNA (1)...(19): siRNA sense strand
ggccaaggcuccuaugaug

SEQ ID NO: 349902 - RNA, 19 nt, Homo sapiens
  misc_RNA (1)...(19): siRNA sense strand
gagaugguguuuacucaga

SEQ ID NO: 349903 - RNA, 19 nt, Homo sapiens
  misc_RNA (1)...(19): siRNA sense strand
ggaaaggccugaggaugug

SEQ ID NO: 349904 - RNA, 19 nt, Homo sapiens
  misc_RNA (1)...(19): siRNA sense strand
ggagaccuauguuccagaa

SEQ ID NO: 349905 - RNA, 19 nt, Homo sapiens
  misc_RNA (1)...(19): siRNA sense strand
cccgggacaugcuauauua

SEQ ID NO: 349906 - RNA, 19 nt, Homo sapiens
  misc_RNA (1)...(19): siRNA sense strand
gagagaugguguuuacuca

SEQ ID NO: 349907 - RNA, 19 nt, Homo sapiens
  misc_RNA (1)...(19): siRNA sense strand
ggugaaaggcucaguagaa

SEQ ID NO: 349908 - RNA, 19 nt, Homo sapiens
  misc_RNA (1)...(19): siRNA sense strand
gcuaggaagcagcugauua

SEQ ID NO: 349909 - RNA, 19 nt, Homo sapiens
  misc_RNA (1)...(19): siRNA sense strand
ggaugaguuugaaauguug

SEQ ID NO: 349910 - RNA, 19 nt, Homo sapiens
  misc_RNA (1)...(19): siRNA sense strand
gaagacaaccaucacacuu

SEQ ID NO: 349911 - RNA, 19 nt, Homo sapiens
  misc_RNA (1)...(19): siRNA sense strand
gaagcuugcugaguucgaa

SEQ ID NO: 349912 - RNA, 19 nt, Homo sapiens
  misc_RNA (1)...(19): siRNA sense strand
cacagaagcucaucucagu

SEQ ID NO: 349913 - RNA, 19 nt, Homo sapiens
  misc_RNA (1)...(19): siRNA sense strand
gagagcagcuggauuuuau

SEQ ID NO: 349914 - RNA, 19 nt, Homo sapiens
  misc_RNA (1)...(19): siRNA sense strand
ggagaacuacauugggaua

SEQ ID NO: 349915 - RNA, 19 nt, Homo sapiens
  misc_RNA (1)...(19): siRNA sense strand
ccaguacauuguccaguuu

SEQ ID NO: 349916 - RNA, 19 nt, Homo sapiens
  misc_RNA (1)...(19): siRNA sense strand
gagcuaccuuccuguguau

SEQ ID NO: 349917 - RNA, 19 nt, Homo sapiens
  misc_RNA (1)...(19): siRNA sense strand
ggaauugggcagcugauug

SEQ ID NO: 349918 - RNA, 19 nt, Homo sapiens
  misc_RNA (1)...(19): siRNA sense strand
agagagagaugguguuuac

SEQ ID NO: 349919 - RNA, 19 nt, Homo sapiens
  misc_RNA (1)...(19): siRNA sense strand
gccaguacauuguccaguu

SEQ ID NO: 349920 - RNA, 19 nt, Homo sapiens
  misc_RNA (1)...(19): siRNA sense strand
gaccaacacuacagagauc

SEQ ID NO: 349921 - RNA, 19 nt, Homo sapiens
  misc_RNA (1)...(19): siRNA sense strand
caaaacagccugagcaaaa

SEQ ID NO: 349922 - RNA, 19 nt, Homo sapiens
  misc_RNA (1)...(19): siRNA sense strand
agacaaccaucacacuuau

SEQ ID NO: 349923 - RNA, 19 nt, Homo sapiens
  misc_RNA (1)...(19): siRNA sense strand
ugaguucgaagaugaguua

SEQ ID NO: 349924 - RNA, 19 nt, Homo sapiens
  misc_RNA (1)...(19): siRNA sense strand
gaaauugguccaguuuaug

SEQ ID NO: 349925 - RNA, 19 nt, Homo sapiens
  misc_RNA (1)...(19): siRNA sense strand
gaacccuucgccugaauaa

SEQ ID NO: 349926 - RNA, 19 nt, Homo sapiens
  misc_RNA (1)...(19): siRNA sense strand
ggacugcaaguggccauua

SEQ ID NO: 349927 - RNA, 19 nt, Homo sapiens
  misc_RNA (1)...(19): siRNA sense strand
gaagaaagagcugaacaag

SEQ ID NO: 349928 - RNA, 19 nt, Homo sapiens
  misc_RNA (1)...(19): siRNA sense strand
gcccugagauccugcacaa

SEQ ID NO: 349929 - RNA, 19 nt, Homo sapiens
  misc_RNA (1)...(19): siRNA sense strand
aggaagcagcugauuauua

SEQ ID NO: 349930 - RNA, 19 nt, Homo sapiens
  misc_RNA (1)...(19): siRNA sense strand
uggaugaguuugaaauguu

SEQ ID NO: 349931 - RNA, 19 nt, Homo sapiens
  misc_RNA (1)...(19): siRNA sense strand
cgucucagcccuucaguuu

SEQ ID NO: 349932 - RNA, 19 nt, Homo sapiens
  misc_RNA (1)...(19): siRNA sense strand
gcccagcacuucauacgau

SEQ ID NO: 349933 - RNA, 19 nt, Homo sapiens
  misc_RNA (1)...(19): siRNA sense strand
ggaaguccuccuuguauuc

SEQ ID NO: 349934 - RNA, 19 nt, Homo sapiens
  misc_RNA (1)...(19): siRNA sense strand
ugaagagugucuccagaug

SEQ ID NO: 349935 - RNA, 19 nt, Homo sapiens
  misc_RNA (1)...(19): siRNA sense strand
ccaaagaaaggaccagaga

SEQ ID NO: 349936 - RNA, 19 nt, Homo sapiens
  misc_RNA (1)...(19): siRNA sense strand
aggaagagcugacccaucu

SEQ ID NO: 349937 - RNA, 19 nt, Homo sapiens
  misc_RNA (1)...(19): siRNA sense strand
cuggagagcucacagacuu

SEQ ID NO: 349938 - RNA, 19 nt, Homo sapiens
  misc_RNA (1)...(19): siRNA sense strand
gccagaagcaggaguguga

SEQ ID NO: 349939 - RNA, 19 nt, Homo sapiens
  misc_RNA (1)...(19): siRNA sense strand
agaccuauguuccagaaga

SEQ ID NO: 349940 - RNA, 19 nt, Homo sapiens
  misc_RNA (1)...(19): siRNA sense strand
ggagagcucacagacuuaa

SEQ ID NO: 349941 - RNA, 19 nt, Homo sapiens
  misc_RNA (1)...(19): siRNA sense strand
guucaaaacugacauuuag

SEQ ID NO: 349942 - RNA, 19 nt, Homo sapiens
  misc_RNA (1)...(19): siRNA sense strand
gcucccagcugaccagaca

SEQ ID NO: 349943 - RNA, 19 nt, Homo sapiens
  misc_RNA (1)...(19): siRNA sense strand
ccacugaggacccguguga

SEQ ID NO: 349944 - RNA, 19 nt, Homo sapiens
  misc_RNA (1)...(19): siRNA sense strand
aagacaaccaucacacuua

SEQ ID NO: 349945 - RNA, 19 nt, Homo sapiens
  misc_RNA (1)...(19): siRNA sense strand
gaucagcgacugccacauc

SEQ ID NO: 349946 - RNA, 19 nt, Homo sapiens
  misc_RNA (1)...(19): siRNA sense strand
cauggaauuuaacuccuaa

SEQ ID NO: 349947 - RNA, 19 nt, Homo sapiens
  misc_RNA (1)...(19): siRNA sense strand
aaagaagccagcaccgaua

SEQ ID NO: 349948 - RNA, 19 nt, Homo sapiens
  misc_RNA (1)...(19): siRNA sense strand
gcuccuaugaugagagaua

SEQ ID NO: 349949 - RNA, 19 nt, Homo sapiens
  misc_RNA (1)...(19): siRNA sense strand
gauaggagaauuccagagu

SEQ ID NO: 349950 - RNA, 19 nt, Homo sapiens
  misc_RNA (1)...(19): siRNA sense strand
agccugacauggaauuuaa

SEQ ID NO: 349951 - RNA, 19 nt, Homo sapiens
  misc_RNA (1)...(19): siRNA sense strand
cgugaggccugcacagcua

SEQ ID NO: 349952 - RNA, 19 nt, Homo sapiens
  misc_RNA (1)...(19): siRNA sense strand
gaccagccuucccaacaug

SEQ ID NO: 349953 - RNA, 19 nt, Homo sapiens
  misc_RNA (1)...(19): siRNA sense strand
cuaaggagagcucugauug

SEQ ID NO: 349954 - RNA, 19 nt, Homo sapiens
  misc_RNA (1)...(19): siRNA sense strand
acauugaggcugucuuuaa

SEQ ID NO: 349955 - RNA, 19 nt, Homo sapiens
  misc_RNA (1)...(19): siRNA sense strand
agaacuacauugggauaaa

SEQ ID NO: 349956 - RNA, 19 nt, Homo sapiens
  misc_RNA (1)...(19): siRNA sense strand
cuaggaagcagcugauuau

SEQ ID NO: 349957 - RNA, 19 nt, Homo sapiens
  misc_RNA (1)...(19): siRNA sense strand
gggacaugcuauauuagug

SEQ ID NO: 349958 - RNA, 19 nt, Homo sapiens
  misc_RNA (1)...(19): siRNA sense strand
agagagagcuagacagacu

SEQ ID NO: 349959 - RNA, 19 nt, Homo sapiens
  misc_RNA (1)...(19): siRNA sense strand
gaucuauauuucuggugaa

SEQ ID NO: 349960 - RNA, 19 nt, Homo sapiens
  misc_RNA (1)...(19): siRNA sense strand
gcagccagguggagguuag

SEQ ID NO: 349961 - RNA, 19 nt, Homo sapiens
  misc_RNA (1)...(19): siRNA sense strand
aaugguggcuccuggaaug

SEQ ID NO: 349962 - RNA, 19 nt, Homo sapiens
  misc_RNA (1)...(19): siRNA sense strand
ugccgaagcuacuggacua

SEQ ID NO: 349963 - RNA, 19 nt, Homo sapiens
  misc_RNA (1)...(19): siRNA sense strand
gcaguaccaucuacaucuc

SEQ ID NO: 349964 - RNA, 19 nt, Homo sapiens
  misc_RNA (1)...(19): siRNA sense strand
ggucaucggcgacgaagug

SEQ ID NO: 349965 - RNA, 19 nt, Homo sapiens
  misc_RNA (1)...(19): siRNA sense strand
ccauuaccaucucuaagga

SEQ ID NO: 349966 - RNA, 19 nt, Homo sapiens
  misc_RNA (1)...(19): siRNA sense strand
uaaaugugaagaaggcuuu

SEQ ID NO: 349967 - RNA, 19 nt, Homo sapiens
  misc_RNA (1)...(19): siRNA sense strand
uugcugaguucgaagauga

SEQ ID NO: 349968 - RNA, 19 nt, Homo sapiens
  misc_RNA (1)...(19): siRNA sense strand
uuugggaccugcuuuguga

SEQ ID NO: 349969 - RNA, 19 nt, Homo sapiens
  misc_RNA (1)...(19): siRNA sense strand
caucggaauucagccauga

SEQ ID NO: 349970 - RNA, 19 nt, Homo sapiens
  misc_RNA (1)...(19): siRNA sense strand
ggccugcccucaucaucaa

SEQ ID NO: 349971 - RNA, 19 nt, Homo sapiens
  misc_RNA (1)...(19): siRNA sense strand
aaauguggguuucaguguu

SEQ ID NO: 349972 - RNA, 19 nt, Homo sapiens
  misc_RNA (1)...(19): siRNA sense strand
auaggagaauuccagagua

SEQ ID NO: 349973 - RNA, 19 nt, Homo sapiens
  misc_RNA (1)...(19): siRNA sense strand
caaagaaaggaccagagaa

SEQ ID NO: 349974 - RNA, 19 nt, Homo sapiens
  misc_RNA (1)...(19): siRNA sense strand
cauugaggcugucuuuaag

SEQ ID NO: 349975 - RNA, 19 nt, Homo sapiens
  misc_RNA (1)...(19): siRNA sense strand
uggaaguccuccuuguauu

SEQ ID NO: 349976 - RNA, 19 nt, Homo sapiens
  misc_RNA (1)...(19): siRNA sense strand
gaccaccuccuacacuauu

SEQ ID NO: 349977 - RNA, 19 nt, Homo sapiens
  misc_RNA (1)...(19): siRNA sense strand
uugggcagcugauugcuuu

SEQ ID NO: 349978 - RNA, 19 nt, Homo sapiens
  misc_RNA (1)...(19): siRNA sense strand
gagagagagaugguguuua

SEQ ID NO: 349979 - RNA, 19 nt, Homo sapiens
  misc_RNA (1)...(19): siRNA sense strand
cccaagauaucucgcacuu

SEQ ID NO: 349980 - RNA, 19 nt, Homo sapiens
  misc_RNA (1)...(19): siRNA sense strand
uuuaagauguggaacaaca

SEQ ID NO: 349981 - RNA, 19 nt, Homo sapiens
  misc_RNA (1)...(19): siRNA sense strand
gugaaaggcucaguagaac

SEQ ID NO: 349982 - RNA, 19 nt, Homo sapiens
  misc_RNA (1)...(19): siRNA sense strand
gcagcugauuauuagaaau

SEQ ID NO: 349983 - RNA, 19 nt, Homo sapiens
  misc_RNA (1)...(19): siRNA sense strand
ucgagagccuugucagguu

SEQ ID NO: 349984 - RNA, 19 nt, Homo sapiens
  misc_RNA (1)...(19): siRNA sense strand
ggaagaagcuugcugaguu

SEQ ID NO: 349985 - RNA, 19 nt, Homo sapiens
  misc_RNA (1)...(19): siRNA sense strand
agaaagagcugaacaagaa

SEQ ID NO: 349986 - RNA, 19 nt, Homo sapiens
  misc_RNA (1)...(19): siRNA sense strand
gaagauuacuacaccgaua

SEQ ID NO: 349987 - RNA, 19 nt, Homo sapiens
  misc_RNA (1)...(19): siRNA sense strand
ggaaugaccugccaguaca

SEQ ID NO: 349988 - RNA, 19 nt, Homo sapiens
  misc_RNA (1)...(19): siRNA sense strand
gaagugagcgcaagcuuga

SEQ ID NO: 349989 - RNA, 19 nt, Homo sapiens
  misc_RNA (1)...(19): siRNA sense strand
gaagauucaugcaggaaga

SEQ ID NO: 349990 - RNA, 19 nt, Homo sapiens
  misc_RNA (1)...(19): siRNA sense strand
gaagaagcuugcugaguuc

SEQ ID NO: 349991 - RNA, 19 nt, Homo sapiens
  misc_RNA (1)...(19): siRNA sense strand
ugaaauugguccaguuuau

SEQ ID NO: 349992 - RNA, 19 nt, Homo sapiens
  misc_RNA (1)...(19): siRNA sense strand
cccgggacaugcuauauua

SEQ ID NO: 349993 - RNA, 19 nt, Homo sapiens
  misc_RNA (1)...(19): siRNA sense strand
ggaugaguuugaaauguug

SEQ ID NO: 349994 - RNA, 19 nt, Homo sapiens
  misc_RNA (1)...(19): siRNA sense strand
gaagcuugcugaguucgaa

SEQ ID NO: 349995 - RNA, 19 nt, Homo sapiens
  misc_RNA (1)...(19): siRNA sense strand
ccaguacauuguccaguuu

SEQ ID NO: 349996 - RNA, 19 nt, Homo sapiens
  misc_RNA (1)...(19): siRNA sense strand
gccaguacauuguccaguu

SEQ ID NO: 349997 - RNA, 19 nt, Homo sapiens
  misc_RNA (1)...(19): siRNA sense strand
ugaguucgaagaugaguua

SEQ ID NO: 349998 - RNA, 19 nt, Homo sapiens
  misc_RNA (1)...(19): siRNA sense strand
gaaauugguccaguuuaug

SEQ ID NO: 349999 - RNA, 19 nt, Homo sapiens
  misc_RNA (1)...(19): siRNA sense strand
gaagaaagagcugaacaag

SEQ ID NO: 350000 - RNA, 19 nt, Homo sapiens
  misc_RNA (1)...(19): siRNA sense strand
ggaaguccuccuuguauuc

SEQ ID NO: 350001 - RNA, 19 nt, Homo sapiens
  misc_RNA (1)...(19): siRNA sense strand
ugaagagugucuccagaug

SEQ ID NO: 350002 - RNA, 19 nt, Homo sapiens
  misc_RNA (1)...(19): siRNA sense strand
uggaugaguuugaaauguu

SEQ ID NO: 350003 - RNA, 19 nt, Homo sapiens
  misc_RNA (1)...(19): siRNA sense strand
ccaaagaaaggaccagaga

SEQ ID NO: 350004 - RNA, 19 nt, Homo sapiens
  misc_RNA (1)...(19): siRNA sense strand
guucaaaacugacauuuag

SEQ ID NO: 350005 - RNA, 19 nt, Homo sapiens
  misc_RNA (1)...(19): siRNA sense strand
cauggaauuuaacuccuaa

SEQ ID NO: 350006 - RNA, 19 nt, Homo sapiens
  misc_RNA (1)...(19): siRNA sense strand
aaagaagccagcaccgaua

SEQ ID NO: 350007 - RNA, 19 nt, Homo sapiens
  misc_RNA (1)...(19): siRNA sense strand
gauaggagaauuccagagu

SEQ ID NO: 350008 - RNA, 19 nt, Homo sapiens
  misc_RNA (1)...(19): siRNA sense strand
agccugacauggaauuuaa

SEQ ID NO: 350009 - RNA, 19 nt, Homo sapiens
  misc_RNA (1)...(19): siRNA sense strand
gggacaugcuauauuagug

SEQ ID NO: 350010 - RNA, 19 nt, Homo sapiens
  misc_RNA (1)...(19): siRNA sense strand
agagagagcuagacagacu

SEQ ID NO: 350011 - RNA, 19 nt, Homo sapiens
  misc_RNA (1)...(19): siRNA sense strand
ggucaucggcgacgaagug

SEQ ID NO: 350012 - RNA, 19 nt, Homo sapiens
  misc_RNA (1)...(19): siRNA sense strand
aaugguggcuccuggaaug

SEQ ID NO: 350013 - RNA, 19 nt, Homo sapiens
  misc_RNA (1)...(19): siRNA sense strand
uugcugaguucgaagauga

SEQ ID NO: 350014 - RNA, 19 nt, Homo sapiens
  misc_RNA (1)...(19): siRNA sense strand
aaauguggguuucaguguu

SEQ ID NO: 350015 - RNA, 19 nt, Homo sapiens
  misc_RNA (1)...(19): siRNA sense strand
auaggagaauuccagagua

SEQ ID NO: 350016 - RNA, 19 nt, Homo sapiens
  misc_RNA (1)...(19): siRNA sense strand
caaagaaaggaccagagaa

SEQ ID NO: 350017 - RNA, 19 nt, Homo sapiens
  misc_RNA (1)...(19): siRNA sense strand
uggaaguccuccuuguauu

SEQ ID NO: 350018 - RNA, 19 nt, Homo sapiens
  misc_RNA (1)...(19): siRNA sense strand
ucgagagccuugucagguu

SEQ ID NO: 350019 - RNA, 19 nt, Homo sapiens
  misc_RNA (1)...(19): siRNA sense strand
ggaaugguggcuccuggaa

SEQ ID NO: 350020 - RNA, 19 nt, Homo sapiens
  misc_RNA (1)...(19): siRNA sense strand
gaaccucucaagaaagcaa

SEQ ID NO: 350021 - RNA, 19 nt, Homo sapiens
  misc_RNA (1)...(19): siRNA sense strand
acauggaauuuaacuccua

SEQ ID NO: 350022 - RNA, 19 nt, Homo sapiens
  misc_RNA (1)...(19): siRNA sense strand
cuacggaaacaucauuuga

SEQ ID NO: 350023 - RNA, 19 nt, Homo sapiens
  misc_RNA (1)...(19): siRNA sense strand
cccaagauaucucgcacuu

SEQ ID NO: 350024 - RNA, 19 nt, Homo sapiens
  misc_RNA (1)...(19): siRNA sense strand
aaauugguccaguuuauga

SEQ ID NO: 350025 - RNA, 19 nt, Homo sapiens
  misc_RNA (1)...(19): siRNA sense strand
acagagagagcuagacaga

SEQ ID NO: 350026 - RNA, 19 nt, Homo sapiens
  misc_RNA (1)...(19): siRNA sense strand
ccagucagcccacacacuu

SEQ ID NO: 350027 - RNA, 19 nt, Homo sapiens
  misc_RNA (1)...(19): siRNA sense strand
ccacagagagagcuagaca

SEQ ID NO: 350028 - RNA, 19 nt, Homo sapiens
  misc_RNA (1)...(19): siRNA sense strand
aauguggguuucaguguug

SEQ ID NO: 350029 - RNA, 19 nt, Homo sapiens
  misc_RNA (1)...(19): siRNA sense strand
uaauugcgcugcagaacac

SEQ ID NO: 350030 - RNA, 19 nt, Homo sapiens
  misc_RNA (1)...(19): siRNA sense strand
uaugaaauugguccaguuu

SEQ ID NO: 350031 - RNA, 19 nt, Homo sapiens
  misc_RNA (1)...(19): siRNA sense strand
cagcaccgauaggagaauu

SEQ ID NO: 350032 - RNA, 19 nt, Homo sapiens
  misc_RNA (1)...(19): siRNA sense strand
guacucagccgaggucauc

SEQ ID NO: 350033 - RNA, 19 nt, Homo sapiens
  misc_RNA (1)...(19): siRNA sense strand
gaagccagcaccgauagga

SEQ ID NO: 350034 - RNA, 19 nt, Homo sapiens
  misc_RNA (1)...(19): siRNA sense strand
ucgcugcgcacccaagaua

SEQ ID NO: 350035 - RNA, 19 nt, Homo sapiens
  misc_RNA (1)...(19): siRNA sense strand
cagguugccuccagugaag

SEQ ID NO: 350036 - RNA, 19 nt, Homo sapiens
  misc_RNA (1)...(19): siRNA sense strand
aauccugccuucgguguuu

SEQ ID NO: 350037 - RNA, 19 nt, Homo sapiens
  misc_RNA (1)...(19): siRNA sense strand
gaacaaccuccuuuuggaa

SEQ ID NO: 350038 - RNA, 19 nt, Homo sapiens
  misc_RNA (1)...(19): siRNA sense strand
guaauugcgcugcagaaca

SEQ ID NO: 350039 - RNA, 19 nt, Homo sapiens
  misc_RNA (1)...(19): siRNA sense strand
uaggagaauuccagaguac

SEQ ID NO: 350040 - RNA, 19 nt, Homo sapiens
  misc_RNA (1)...(19): siRNA sense strand
gcgaguugcuacggaaaca

SEQ ID NO: 350041 - RNA, 19 nt, Homo sapiens
  misc_RNA (1)...(19): siRNA sense strand
agaagaaagagcugaacaa

SEQ ID NO: 350042 - RNA, 19 nt, Homo sapiens
  misc_RNA (1)...(19): siRNA sense strand
uuuaugagaugguaauugc

SEQ ID NO: 350043 - RNA, 19 nt, Homo sapiens
  misc_RNA (1)...(19): siRNA sense strand
cuagcuaagccaccaauug

SEQ ID NO: 350044 - RNA, 19 nt, Homo sapiens
  misc_RNA (1)...(19): siRNA sense strand
cagccugacauggaauuua

SEQ ID NO: 350045 - RNA, 19 nt, Homo sapiens
  misc_RNA (1)...(19): siRNA sense strand
guggacagccugacaugga

SEQ ID NO: 350046 - RNA, 19 nt, Homo sapiens
  misc_RNA (1)...(19): siRNA sense strand
uggacagccugacauggaa

SEQ ID NO: 350047 - RNA, 19 nt, Homo sapiens
  misc_RNA (1)...(19): siRNA sense strand
uuaugaaauugguccaguu

SEQ ID NO: 350048 - RNA, 19 nt, Homo sapiens
  misc_RNA (1)...(19): siRNA sense strand
uagcuaagccaccaauugg

SEQ ID NO: 350049 - RNA, 19 nt, Homo sapiens
  misc_RNA (1)...(19): siRNA sense strand
gagaauuccagaguacaga

SEQ ID NO: 350050 - RNA, 19 nt, Homo sapiens
  misc_RNA (1)...(19): siRNA sense strand
guguauagacagcgaguug

SEQ ID NO: 350051 - RNA, 19 nt, Homo sapiens
  misc_RNA (1)...(19): siRNA sense strand
ugugguuacugccucauug

SEQ ID NO: 350052 - RNA, 19 nt, Homo sapiens
  misc_RNA (1)...(19): siRNA sense strand
ucacagauuaugaaauugg

SEQ ID NO: 350053 - RNA, 19 nt, Homo sapiens
  misc_RNA (1)...(19): siRNA sense strand
uaacuccuaaggccaaaga

SEQ ID NO: 350054 - RNA, 19 nt, Homo sapiens
  misc_RNA (1)...(19): siRNA sense strand
aagaaagagcugaacaaga

SEQ ID NO: 350055 - RNA, 19 nt, Homo sapiens
  misc_RNA (1)...(19): siRNA sense strand
ccuggaaguccuccuugua

SEQ ID NO: 350056 - RNA, 19 nt, Homo sapiens
  misc_RNA (1)...(19): siRNA sense strand
cagauucgggagcucuaua

SEQ ID NO: 350057 - RNA, 19 nt, Homo sapiens
  misc_RNA (1)...(19): siRNA sense strand
aaagaaaggaccagagaac

SEQ ID NO: 350058 - RNA, 19 nt, Homo sapiens
  misc_RNA (1)...(19): siRNA sense strand
aagagugucuccagauggu

SEQ ID NO: 350059 - RNA, 19 nt, Homo sapiens
  misc_RNA (1)...(19): siRNA sense strand
ugaacaaccuccuuuugga

SEQ ID NO: 350060 - RNA, 19 nt, Homo sapiens
  misc_RNA (1)...(19): siRNA sense strand
gcuggccaccacuaaguuu

SEQ ID NO: 350061 - RNA, 19 nt, Homo sapiens
  misc_RNA (1)...(19): siRNA sense strand
gcggcuggaugaguuugaa

SEQ ID NO: 350062 - RNA, 19 nt, Homo sapiens
  misc_RNA (1)...(19): siRNA sense strand
gaaagagcugaacaagaag

SEQ ID NO: 350063 - RNA, 19 nt, Homo sapiens
  misc_RNA (1)...(19): siRNA sense strand
gaaugguggcuccuggaau

SEQ ID NO: 350064 - RNA, 19 nt, Homo sapiens
  misc_RNA (1)...(19): siRNA sense strand
gugcugauacuccaguguu

SEQ ID NO: 350065 - RNA, 19 nt, Homo sapiens
  misc_RNA (1)...(19): siRNA sense strand
acucugaggccuuccacua

SEQ ID NO: 350066 - RNA, 19 nt, Homo sapiens
  misc_RNA (1)...(19): siRNA sense strand
gaagcguuccguccagaag

SEQ ID NO: 350067 - RNA, 19 nt, Homo sapiens
  misc_RNA (1)...(19): siRNA sense strand
gcuacggaaacaucauuug

SEQ ID NO: 350068 - RNA, 19 nt, Homo sapiens
  misc_RNA (1)...(19): siRNA sense strand
cauugcaaccgucggcuuu

SEQ ID NO: 350069 - RNA, 19 nt, Homo sapiens
  misc_RNA (1)...(19): siRNA sense strand
uucgggagcucuauaagca

SEQ ID NO: 350070 - RNA, 19 nt, Homo sapiens
  misc_RNA (1)...(19): siRNA sense strand
cuccaguguuucuagcuaa

SEQ ID NO: 350071 - RNA, 19 nt, Homo sapiens
  misc_RNA (1)...(19): siRNA sense strand
gauacuccaguguuucuag

SEQ ID NO: 350072 - RNA, 19 nt, Homo sapiens
  misc_RNA (1)...(19): siRNA sense strand
ggagaauuccagaguacag

SEQ ID NO: 350073 - RNA, 19 nt, Homo sapiens
  misc_RNA (1)...(19): siRNA sense strand
ucugaggccuuccacuaca

SEQ ID NO: 350074 - RNA, 19 nt, Homo sapiens
  misc_RNA (1)...(19): siRNA sense strand
gcuggaugaguuugaaaug

SEQ ID NO: 350075 - RNA, 19 nt, Homo sapiens
  misc_RNA (1)...(19): siRNA sense strand
gugaagagugucuccagau

SEQ ID NO: 350076 - RNA, 19 nt, Homo sapiens
  misc_RNA (1)...(19): siRNA sense strand
ccaaaacgcggaggucuuu

SEQ ID NO: 350077 - RNA, 19 nt, Homo sapiens
  misc_RNA (1)...(19): siRNA sense strand
cuggaaguccuccuuguau

SEQ ID NO: 350078 - RNA, 19 nt, Homo sapiens
  misc_RNA (1)...(19): siRNA sense strand
acaagcuggccaccacuaa

SEQ ID NO: 350079 - RNA, 19 nt, Homo sapiens
  misc_RNA (1)...(19): siRNA sense strand
uaagccaccaauuggguuu

SEQ ID NO: 350080 - RNA, 19 nt, Homo sapiens
  misc_RNA (1)...(19): siRNA sense strand
acuccaguguuucuagcua

SEQ ID NO: 350081 - RNA, 19 nt, Homo sapiens
  misc_RNA (1)...(19): siRNA sense strand
gauauggaggcaagucucu

SEQ ID NO: 350082 - RNA, 19 nt, Homo sapiens
  misc_RNA (1)...(19): siRNA sense strand
cagaagaaagagcugaaca

SEQ ID NO: 350083 - RNA, 19 nt, Homo sapiens
  misc_RNA (1)...(19): siRNA sense strand
cuggaugaguuugaaaugu

SEQ ID NO: 350084 - RNA, 19 nt, Homo sapiens
  misc_RNA (1)...(19): siRNA sense strand
ggaagaagcuugcugaguu

SEQ ID NO: 350085 - RNA, 19 nt, Homo sapiens
  misc_RNA (1)...(19): siRNA sense strand
agaaagagcugaacaagaa

SEQ ID NO: 350086 - RNA, 19 nt, Homo sapiens
  misc_RNA (1)...(19): siRNA sense strand
ggaagcagcugauuauuag

SEQ ID NO: 350087 - RNA, 19 nt, Homo sapiens
  misc_RNA (1)...(19): siRNA sense strand
gaagauuacuacaccgaua

SEQ ID NO: 350088 - RNA, 19 nt, Homo sapiens
  misc_RNA (1)...(19): siRNA sense strand
ggaaugaccugccaguaca

SEQ ID NO: 350089 - RNA, 19 nt, Homo sapiens
  misc_RNA (1)...(19): siRNA sense strand
gaagugagcgcaagcuuga

SEQ ID NO: 350090 - RNA, 19 nt, Homo sapiens
  misc_RNA (1)...(19): siRNA sense strand
gaagauucaugcaggaaga

SEQ ID NO: 350091 - RNA, 19 nt, Homo sapiens
  misc_RNA (1)...(19): siRNA sense strand
gaagaagcuugcugaguuc

SEQ ID NO: 350092 - RNA, 19 nt, Homo sapiens
  misc_RNA (1)...(19): siRNA sense strand
ugaaauugguccaguuuau

SEQ ID NO: 350093 - RNA, 19 nt, Homo sapiens
  misc_RNA (1)...(19): siRNA sense strand
cccgggacaugcuauauua

SEQ ID NO: 350094 - RNA, 19 nt, Homo sapiens
  misc_RNA (1)...(19): siRNA sense strand
gcuaggaagcagcugauua

SEQ ID NO: 350095 - RNA, 19 nt, Homo sapiens
  misc_RNA (1)...(19): siRNA sense strand
ggaugaguuugaaauguug

SEQ ID NO: 350096 - RNA, 19 nt, Homo sapiens
  misc_RNA (1)...(19): siRNA sense strand
gaagcuugcugaguucgaa

SEQ ID NO: 350097 - RNA, 19 nt, Homo sapiens
  misc_RNA (1)...(19): siRNA sense strand
ccaguacauuguccaguuu

SEQ ID NO: 350098 - RNA, 19 nt, Homo sapiens
  misc_RNA (1)...(19): siRNA sense strand
ggaauugggcagcugauug

SEQ ID NO: 350099 - RNA, 19 nt, Homo sapiens
  misc_RNA (1)...(19): siRNA sense strand
gccaguacauuguccaguu

SEQ ID NO: 350100 - RNA, 19 nt, Homo sapiens
  misc_RNA (1)...(19): siRNA sense strand
ugaguucgaagaugaguua

SEQ ID NO: 350101 - RNA, 19 nt, Homo sapiens
  misc_RNA (1)...(19): siRNA sense strand
gaaauugguccaguuuaug

SEQ ID NO: 350102 - RNA, 19 nt, Homo sapiens
  misc_RNA (1)...(19): siRNA sense strand
gaagaaagagcugaacaag

SEQ ID NO: 350103 - RNA, 19 nt, Homo sapiens
  misc_RNA (1)...(19): siRNA sense strand
aggaagcagcugauuauua

SEQ ID NO: 350104 - RNA, 19 nt, Homo sapiens
  misc_RNA (1)...(19): siRNA sense strand
uggaugaguuugaaauguu

SEQ ID NO: 350105 - RNA, 19 nt, Homo sapiens
  misc_RNA (1)...(19): siRNA sense strand
ggaaguccuccuuguauuc

SEQ ID NO: 350106 - RNA, 19 nt, Homo sapiens
  misc_RNA (1)...(19): siRNA sense strand
gcccagcacuucauacgau

SEQ ID NO: 350107 - RNA, 19 nt, Homo sapiens
  misc_RNA (1)...(19): siRNA sense strand
ugaagagugucuccagaug

SEQ ID NO: 350108 - RNA, 19 nt, Homo sapiens
  misc_RNA (1)...(19): siRNA sense strand
ccaaagaaaggaccagaga

SEQ ID NO: 350109 - RNA, 19 nt, Homo sapiens
  misc_RNA (1)...(19): siRNA sense strand
cuggagagcucacagacuu

SEQ ID NO: 350110 - RNA, 19 nt, Homo sapiens
  misc_RNA (1)...(19): siRNA sense strand
ggagagcucacagacuuaa

SEQ ID NO: 350111 - RNA, 19 nt, Homo sapiens
  misc_RNA (1)...(19): siRNA sense strand
guucaaaacugacauuuag

SEQ ID NO: 350112 - RNA, 19 nt, Homo sapiens
  misc_RNA (1)...(19): siRNA sense strand
cauggaauuuaacuccuaa

SEQ ID NO: 350113 - RNA, 19 nt, Homo sapiens
  misc_RNA (1)...(19): siRNA sense strand
aaagaagccagcaccgaua

SEQ ID NO: 350114 - RNA, 19 nt, Homo sapiens
  misc_RNA (1)...(19): siRNA sense strand
gauaggagaauuccagagu

SEQ ID NO: 350115 - RNA, 19 nt, Homo sapiens
  misc_RNA (1)...(19): siRNA sense strand
agccugacauggaauuuaa

SEQ ID NO: 350116 - RNA, 19 nt, Homo sapiens
  misc_RNA (1)...(19): siRNA sense strand
cuaggaagcagcugauuau

SEQ ID NO: 350117 - RNA, 19 nt, Homo sapiens
  misc_RNA (1)...(19): siRNA sense strand
gggacaugcuauauuagug

SEQ ID NO: 350118 - RNA, 19 nt, Homo sapiens
  misc_RNA (1)...(19): siRNA sense strand
agagagagcuagacagacu

SEQ ID NO: 350119 - RNA, 19 nt, Homo sapiens
  misc_RNA (1)...(19): siRNA sense strand
gaucuauauuucuggugaa

SEQ ID NO: 350120 - RNA, 19 nt, Homo sapiens
  misc_RNA (1)...(19): siRNA sense strand
ggucaucggcgacgaagug

SEQ ID NO: 350121 - RNA, 19 nt, Homo sapiens
  misc_RNA (1)...(19): siRNA sense strand
aaugguggcuccuggaaug

SEQ ID NO: 350122 - RNA, 19 nt, Homo sapiens
  misc_RNA (1)...(19): siRNA sense strand
uugcugaguucgaagauga

SEQ ID NO: 350123 - RNA, 19 nt, Homo sapiens
  misc_RNA (1)...(19): siRNA sense strand
aaauguggguuucaguguu

SEQ ID NO: 350124 - RNA, 19 nt, Homo sapiens
  misc_RNA (1)...(19): siRNA sense strand
auaggagaauuccagagua

SEQ ID NO: 350125 - RNA, 19 nt, Homo sapiens
  misc_RNA (1)...(19): siRNA sense strand
caaagaaaggaccagagaa

SEQ ID NO: 350126 - RNA, 19 nt, Homo sapiens
  misc_RNA (1)...(19): siRNA sense strand
uggaaguccuccuuguauu

SEQ ID NO: 350127 - RNA, 19 nt, Homo sapiens
  misc_RNA (1)...(19): siRNA sense strand
cccaagauaucucgcacuu

SEQ ID NO: 350128 - RNA, 19 nt, Homo sapiens
  misc_RNA (1)...(19): siRNA sense strand
gcagcugauuauuagaaau

SEQ ID NO: 350129 - RNA, 19 nt, Homo sapiens
  misc_RNA (1)...(19): siRNA sense strand
uugggcagcugauugcuuu

SEQ ID NO: 350130 - RNA, 19 nt, Homo sapiens
  misc_RNA (1)...(19): siRNA sense strand
ggaaugguggcuccuggaa

SEQ ID NO: 350131 - RNA, 19 nt, Homo sapiens
  misc_RNA (1)...(19): siRNA sense strand
gaaccucucaagaaagcaa

SEQ ID NO: 350132 - RNA, 19 nt, Homo sapiens
  misc_RNA (1)...(19): siRNA sense strand
acauggaauuuaacuccua

SEQ ID NO: 350133 - RNA, 19 nt, Homo sapiens
  misc_RNA (1)...(19): siRNA sense strand
cuacggaaacaucauuuga

SEQ ID NO: 350134 - RNA, 19 nt, Homo sapiens
  misc_RNA (1)...(19): siRNA sense strand
ucgagagccuugucagguu

SEQ ID NO: 350135 - RNA, 19 nt, Homo sapiens
  misc_RNA (1)...(19): siRNA sense strand
aaauugguccaguuuauga

SEQ ID NO: 350136 - RNA, 19 nt, Homo sapiens
  misc_RNA (1)...(19): siRNA sense strand
acagagagagcuagacaga

SEQ ID NO: 350137 - RNA, 19 nt, Homo sapiens
  misc_RNA (1)...(19): siRNA sense strand
ccagucagcccacacacuu

SEQ ID NO: 350138 - RNA, 19 nt, Homo sapiens
  misc_RNA (1)...(19): siRNA sense strand
ccacagagagagcuagaca

SEQ ID NO: 350139 - RNA, 19 nt, Homo sapiens
  misc_RNA (1)...(19): siRNA sense strand
aauguggguuucaguguug

SEQ ID NO: 350140 - RNA, 19 nt, Homo sapiens
  misc_RNA (1)...(19): siRNA sense strand
uaauugcgcugcagaacac

SEQ ID NO: 350141 - RNA, 19 nt, Homo sapiens
  misc_RNA (1)...(19): siRNA sense strand
uaugaaauugguccaguuu

SEQ ID NO: 350142 - RNA, 19 nt, Homo sapiens
  misc_RNA (1)...(19): siRNA sense strand
cagcaccgauaggagaauu

SEQ ID NO: 350143 - RNA, 19 nt, Homo sapiens
  misc_RNA (1)...(19): siRNA sense strand
gaagccagcaccgauagga

SEQ ID NO: 350144 - RNA, 19 nt, Homo sapiens
  misc_RNA (1)...(19): siRNA sense strand
cagcugauuauuagaaaug

SEQ ID NO: 350145 - RNA, 19 nt, Homo sapiens
  misc_RNA (1)...(19): siRNA sense strand
gcagcugauugcuuuggau

SEQ ID NO: 350146 - RNA, 19 nt, Homo sapiens
  misc_RNA (1)...(19): siRNA sense strand
ucgcugcgcacccaagaua

SEQ ID NO: 350147 - RNA, 19 nt, Homo sapiens
  misc_RNA (1)...(19): siRNA sense strand
guacucagccgaggucauc

SEQ ID NO: 350148 - RNA, 19 nt, Homo sapiens
  misc_RNA (1)...(19): siRNA sense strand
cagguugccuccagugaag

SEQ ID NO: 350149 - RNA, 19 nt, Homo sapiens
  misc_RNA (1)...(19): siRNA sense strand
gcugauugcuuuggaucug

SEQ ID NO: 350150 - RNA, 19 nt, Homo sapiens
  misc_RNA (1)...(19): siRNA sense strand
gaauugggcagcugauugc

SEQ ID NO: 350151 - RNA, 19 nt, Homo sapiens
  misc_RNA (1)...(19): siRNA sense strand
aauccugccuucgguguuu

SEQ ID NO: 350152 - RNA, 19 nt, Homo sapiens
  misc_RNA (1)...(19): siRNA sense strand
gaacaaccuccuuuuggaa

SEQ ID NO: 350153 - RNA, 19 nt, Homo sapiens
  misc_RNA (1)...(19): siRNA sense strand
guaauugcgcugcagaaca

SEQ ID NO: 350154 - RNA, 19 nt, Homo sapiens
  misc_RNA (1)...(19): siRNA sense strand
uaggagaauuccagaguac

SEQ ID NO: 350155 - RNA, 19 nt, Homo sapiens
  misc_RNA (1)...(19): siRNA sense strand
gcgaguugcuacggaaaca

SEQ ID NO: 350156 - RNA, 19 nt, Homo sapiens
  misc_RNA (1)...(19): siRNA sense strand
agaagaaagagcugaacaa

SEQ ID NO: 350157 - RNA, 19 nt, Homo sapiens
  misc_RNA (1)...(19): siRNA sense strand
uuuaugagaugguaauugc

SEQ ID NO: 350158 - RNA, 19 nt, Homo sapiens
  misc_RNA (1)...(19): siRNA sense strand
cuagcuaagccaccaauug

SEQ ID NO: 350159 - RNA, 19 nt, Homo sapiens
  misc_RNA (1)...(19): siRNA sense strand
cagccugacauggaauuua

SEQ ID NO: 350160 - RNA, 19 nt, Homo sapiens
  misc_RNA (1)...(19): siRNA sense strand
guggacagccugacaugga

SEQ ID NO: 350161 - RNA, 19 nt, Homo sapiens
  misc_RNA (1)...(19): siRNA sense strand
uggacagccugacauggaa

SEQ ID NO: 350162 - RNA, 19 nt, Homo sapiens
  misc_RNA (1)...(19): siRNA sense strand
uaacagcccagcacuucau

SEQ ID NO: 350163 - RNA, 19 nt, Homo sapiens
  misc_RNA (1)...(19): siRNA sense strand
uuaugaaauugguccaguu

SEQ ID NO: 350164 - RNA, 19 nt, Homo sapiens
  misc_RNA (1)...(19): siRNA sense strand
uagcuaagccaccaauugg

SEQ ID NO: 350165 - RNA, 19 nt, Homo sapiens
  misc_RNA (1)...(19): siRNA sense strand
gagaauuccagaguacaga

SEQ ID NO: 350166 - RNA, 19 nt, Homo sapiens
  misc_RNA (1)...(19): siRNA sense strand
guguauagacagcgaguug

SEQ ID NO: 350167 - RNA, 19 nt, Homo sapiens
  misc_RNA (1)...(19): siRNA sense strand
aagcagcugauuauuagaa

SEQ ID NO: 350168 - RNA, 19 nt, Homo sapiens
  misc_RNA (1)...(19): siRNA sense strand
ugugguuacugccucauug

SEQ ID NO: 350169 - RNA, 19 nt, Homo sapiens
  misc_RNA (1)...(19): siRNA sense strand
ucacagauuaugaaauugg

SEQ ID NO: 350170 - RNA, 19 nt, Homo sapiens
  misc_RNA (1)...(19): siRNA sense strand
uaacuccuaaggccaaaga

SEQ ID NO: 350171 - RNA, 19 nt, Homo sapiens
  misc_RNA (1)...(19): siRNA sense strand
aagaaagagcugaacaaga

SEQ ID NO: 350172 - RNA, 19 nt, Homo sapiens
  misc_RNA (1)...(19): siRNA sense strand
aaagaaaggaccagagaac

SEQ ID NO: 350173 - RNA, 19 nt, Homo sapiens
  misc_RNA (1)...(19): siRNA sense strand
cagauucgggagcucuaua

SEQ ID NO: 350174 - RNA, 19 nt, Homo sapiens
  misc_RNA (1)...(19): siRNA sense strand
ccuggaaguccuccuugua

SEQ ID NO: 350175 - RNA, 19 nt, Homo sapiens
  misc_RNA (1)...(19): siRNA sense strand
aagagugucuccagauggu

SEQ ID NO: 350176 - RNA, 19 nt, Homo sapiens
  misc_RNA (1)...(19): siRNA sense strand
ugaacaaccuccuuuugga

SEQ ID NO: 350177 - RNA, 19 nt, Homo sapiens
  misc_RNA (1)...(19): siRNA sense strand
gcuggccaccacuaaguuu

SEQ ID NO: 350178 - RNA, 19 nt, Homo sapiens
  misc_RNA (1)...(19): siRNA sense strand
gcggcuggaugaguuugaa

SEQ ID NO: 350179 - RNA, 19 nt, Homo sapiens
  misc_RNA (1)...(19): siRNA sense strand
gaaagagcugaacaagaag

SEQ ID NO: 350180 - RNA, 19 nt, Homo sapiens
  misc_RNA (1)...(19): siRNA sense strand
acucugaggccuuccacua

SEQ ID NO: 350181 - RNA, 19 nt, Homo sapiens
  misc_RNA (1)...(19): siRNA sense strand
gaaugguggcuccuggaau

SEQ ID NO: 350182 - RNA, 19 nt, Homo sapiens
  misc_RNA (1)...(19): siRNA sense strand
gugcugauacuccaguguu

SEQ ID NO: 350183 - RNA, 19 nt, Homo sapiens
  misc_RNA (1)...(19): siRNA sense strand
gaagcguuccguccagaag

SEQ ID NO: 350184 - RNA, 19 nt, Homo sapiens
  misc_RNA (1)...(19): siRNA sense strand
ggaagaagcuugcugaguu

SEQ ID NO: 350185 - RNA, 19 nt, Homo sapiens
  misc_RNA (1)...(19): siRNA sense strand
agaaagagcugaacaagaa

SEQ ID NO: 350186 - RNA, 19 nt, Homo sapiens
  misc_RNA (1)...(19): siRNA sense strand
ggaagcagcugauuauuag

SEQ ID NO: 350187 - RNA, 19 nt, Homo sapiens
  misc_RNA (1)...(19): siRNA sense strand
gaagauuacuacaccgaua

SEQ ID NO: 350188 - RNA, 19 nt, Homo sapiens
  misc_RNA (1)...(19): siRNA sense strand
gcaagucacccaucagaua

SEQ ID NO: 350189 - RNA, 19 nt, Homo sapiens
  misc_RNA (1)...(19): siRNA sense strand
gcaauaggguggcacagaa

SEQ ID NO: 350190 - RNA, 19 nt, Homo sapiens
  misc_RNA (1)...(19): siRNA sense strand
cuacagagaucccacacua

SEQ ID NO: 350191 - RNA, 19 nt, Homo sapiens
  misc_RNA (1)...(19): siRNA sense strand
gcacaaagacacagacuug

SEQ ID NO: 350192 - RNA, 19 nt, Homo sapiens
  misc_RNA (1)...(19): siRNA sense strand
gaagaaggcuuuuaagaug

SEQ ID NO: 350193 - RNA, 19 nt, Homo sapiens
  misc_RNA (1)...(19): siRNA sense strand
gagcuugugugcccugaua

SEQ ID NO: 350194 - RNA, 19 nt, Homo sapiens
  misc_RNA (1)...(19): siRNA sense strand
ggagcuaccuuccugugua

SEQ ID NO: 350195 - RNA, 19 nt, Homo sapiens
  misc_RNA (1)...(19): siRNA sense strand
ggaaugaccugccaguaca

SEQ ID NO: 350196 - RNA, 19 nt, Homo sapiens
  misc_RNA (1)...(19): siRNA sense strand
gaagugagcgcaagcuuga

SEQ ID NO: 350197 - RNA, 19 nt, Homo sapiens
  misc_RNA (1)...(19): siRNA sense strand
gaagauucaugcaggaaga

SEQ ID NO: 350198 - RNA, 19 nt, Homo sapiens
  misc_RNA (1)...(19): siRNA sense strand
gaagaagcuugcugaguuc

SEQ ID NO: 350199 - RNA, 19 nt, Homo sapiens
  misc_RNA (1)...(19): siRNA sense strand
ccacacuacuuccggcuua

SEQ ID NO: 350200 - RNA, 19 nt, Homo sapiens
  misc_RNA (1)...(19): siRNA sense strand
gaacuacauugggauaaau

SEQ ID NO: 350201 - RNA, 19 nt, Homo sapiens
  misc_RNA (1)...(19): siRNA sense strand
ugaaauugguccaguuuau

SEQ ID NO: 350202 - RNA, 19 nt, Homo sapiens
  misc_RNA (1)...(19): siRNA sense strand
ggccaaggcuccuaugaug

SEQ ID NO: 350203 - RNA, 19 nt, Homo sapiens
  misc_RNA (1)...(19): siRNA sense strand
gagaugguguuuacucaga

SEQ ID NO: 350204 - RNA, 19 nt, Homo sapiens
  misc_RNA (1)...(19): siRNA sense strand
ggaaaggccugaggaugug

SEQ ID NO: 350205 - RNA, 19 nt, Homo sapiens
  misc_RNA (1)...(19): siRNA sense strand
ggagaccuauguuccagaa

SEQ ID NO: 350206 - RNA, 19 nt, Homo sapiens
  misc_RNA (1)...(19): siRNA sense strand
aaacauugcccagggauua

SEQ ID NO: 350207 - RNA, 19 nt, Homo sapiens
  misc_RNA (1)...(19): siRNA sense strand
cccgggacaugcuauauua

SEQ ID NO: 350208 - RNA, 19 nt, Homo sapiens
  misc_RNA (1)...(19): siRNA sense strand
gagagaugguguuuacuca

SEQ ID NO: 350209 - RNA, 19 nt, Homo sapiens
  misc_RNA (1)...(19): siRNA sense strand
ggugaaaggcucaguagaa

SEQ ID NO: 350210 - RNA, 19 nt, Homo sapiens
  misc_RNA (1)...(19): siRNA sense strand
gcuaggaagcagcugauua

SEQ ID NO: 350211 - RNA, 19 nt, Homo sapiens
  misc_RNA (1)...(19): siRNA sense strand
ggaugaguuugaaauguug

SEQ ID NO: 350212 - RNA, 19 nt, Homo sapiens
  misc_RNA (1)...(19): siRNA sense strand
gaagacaaccaucacacuu

SEQ ID NO: 350213 - RNA, 19 nt, Homo sapiens
  misc_RNA (1)...(19): siRNA sense strand
gaagcuugcugaguucgaa

SEQ ID NO: 350214 - RNA, 19 nt, Homo sapiens
  misc_RNA (1)...(19): siRNA sense strand
cacagaagcucaucucagu

SEQ ID NO: 350215 - RNA, 19 nt, Homo sapiens
  misc_RNA (1)...(19): siRNA sense strand
gagagcagcuggauuuuau

SEQ ID NO: 350216 - RNA, 19 nt, Homo sapiens
  misc_RNA (1)...(19): siRNA sense strand
ggagaacuacauugggaua

SEQ ID NO: 350217 - RNA, 19 nt, Homo sapiens
  misc_RNA (1)...(19): siRNA sense strand
ccaguacauuguccaguuu

SEQ ID NO: 350218 - RNA, 19 nt, Homo sapiens
  misc_RNA (1)...(19): siRNA sense strand
gagcuaccuuccuguguau

SEQ ID NO: 350219 - RNA, 19 nt, Homo sapiens
  misc_RNA (1)...(19): siRNA sense strand
ggaauugggcagcugauug

SEQ ID NO: 350220 - RNA, 19 nt, Homo sapiens
  misc_RNA (1)...(19): siRNA sense strand
agagagagaugguguuuac

SEQ ID NO: 350221 - RNA, 19 nt, Homo sapiens
  misc_RNA (1)...(19): siRNA sense strand
gccaguacauuguccaguu

SEQ ID NO: 350222 - RNA, 19 nt, Homo sapiens
  misc_RNA (1)...(19): siRNA sense strand
gaccaacacuacagagauc

SEQ ID NO: 350223 - RNA, 19 nt, Homo sapiens
  misc_RNA (1)...(19): siRNA sense strand
caaaacagccugagcaaaa

SEQ ID NO: 350224 - RNA, 19 nt, Homo sapiens
  misc_RNA (1)...(19): siRNA sense strand
agacaaccaucacacuuau

SEQ ID NO: 350225 - RNA, 19 nt, Homo sapiens
  misc_RNA (1)...(19): siRNA sense strand
ugaguucgaagaugaguua

SEQ ID NO: 350226 - RNA, 19 nt, Homo sapiens
  misc_RNA (1)...(19): siRNA sense strand
ccuaggcccucaugauuug

SEQ ID NO: 350227 - RNA, 19 nt, Homo sapiens
  misc_RNA (1)...(19): siRNA sense strand
gaaauugguccaguuuaug

SEQ ID NO: 350228 - RNA, 19 nt, Homo sapiens
  misc_RNA (1)...(19): siRNA sense strand
gaacccuucgccugaauaa

SEQ ID NO: 350229 - RNA, 19 nt, Homo sapiens
  misc_RNA (1)...(19): siRNA sense strand
ggacugcaaguggccauua

SEQ ID NO: 350230 - RNA, 19 nt, Homo sapiens
  misc_RNA (1)...(19): siRNA sense strand
gaagaaagagcugaacaag

SEQ ID NO: 350231 - RNA, 19 nt, Homo sapiens
  misc_RNA (1)...(19): siRNA sense strand
gcccugagauccugcacaa

SEQ ID NO: 350232 - RNA, 19 nt, Homo sapiens
  misc_RNA (1)...(19): siRNA sense strand
aggaagcagcugauuauua

SEQ ID NO: 350233 - RNA, 19 nt, Homo sapiens
  misc_RNA (1)...(19): siRNA sense strand
uggaugaguuugaaauguu

SEQ ID NO: 350234 - RNA, 19 nt, Homo sapiens
  misc_RNA (1)...(19): siRNA sense strand
ggaaguccuccuuguauuc

SEQ ID NO: 350235 - RNA, 19 nt, Homo sapiens
  misc_RNA (1)...(19): siRNA sense strand
cgucucagcccuucaguuu

SEQ ID NO: 350236 - RNA, 19 nt, Homo sapiens
  misc_RNA (1)...(19): siRNA sense strand
gcccagcacuucauacgau

SEQ ID NO: 350237 - RNA, 19 nt, Homo sapiens
  misc_RNA (1)...(19): siRNA sense strand
ugaagagugucuccagaug

SEQ ID NO: 350238 - RNA, 19 nt, Homo sapiens
  misc_RNA (1)...(19): siRNA sense strand
ccaaagaaaggaccagaga

SEQ ID NO: 350239 - RNA, 19 nt, Homo sapiens
  misc_RNA (1)...(19): siRNA sense strand
aggaagagcugacccaucu

SEQ ID NO: 350240 - RNA, 19 nt, Homo sapiens
  misc_RNA (1)...(19): siRNA sense strand
cuggagagcucacagacuu

SEQ ID NO: 350241 - RNA, 19 nt, Homo sapiens
  misc_RNA (1)...(19): siRNA sense strand
gccagaagcaggaguguga

SEQ ID NO: 350242 - RNA, 19 nt, Homo sapiens
  misc_RNA (1)...(19): siRNA sense strand
agaccuauguuccagaaga

SEQ ID NO: 350243 - RNA, 19 nt, Homo sapiens
  misc_RNA (1)...(19): siRNA sense strand
ggagagcucacagacuuaa

SEQ ID NO: 350244 - RNA, 19 nt, Homo sapiens
  misc_RNA (1)...(19): siRNA sense strand
guucaaaacugacauuuag

SEQ ID NO: 350245 - RNA, 19 nt, Homo sapiens
  misc_RNA (1)...(19): siRNA sense strand
gcucccagcugaccagaca

SEQ ID NO: 350246 - RNA, 19 nt, Homo sapiens
  misc_RNA (1)...(19): siRNA sense strand
ccacugaggacccguguga

SEQ ID NO: 350247 - RNA, 19 nt, Homo sapiens
  misc_RNA (1)...(19): siRNA sense strand
aagacaaccaucacacuua

SEQ ID NO: 350248 - RNA, 19 nt, Homo sapiens
  misc_RNA (1)...(19): siRNA sense strand
gaucagcgacugccacauc

SEQ ID NO: 350249 - RNA, 19 nt, Homo sapiens
  misc_RNA (1)...(19): siRNA sense strand
cauggaauuuaacuccuaa

SEQ ID NO: 350250 - RNA, 19 nt, Homo sapiens
  misc_RNA (1)...(19): siRNA sense strand
aaagaagccagcaccgaua

SEQ ID NO: 350251 - RNA, 19 nt, Homo sapiens
  misc_RNA (1)...(19): siRNA sense strand
gcuccuaugaugagagaua

SEQ ID NO: 350252 - RNA, 19 nt, Homo sapiens
  misc_RNA (1)...(19): siRNA sense strand
gauaggagaauuccagagu

SEQ ID NO: 350253 - RNA, 19 nt, Homo sapiens
  misc_RNA (1)...(19): siRNA sense strand
agccugacauggaauuuaa

SEQ ID NO: 350254 - RNA, 19 nt, Homo sapiens
  misc_RNA (1)...(19): siRNA sense strand
cgugaggccugcacagcua

SEQ ID NO: 350255 - RNA, 19 nt, Homo sapiens
  misc_RNA (1)...(19): siRNA sense strand
gaccagccuucccaacaug

SEQ ID NO: 350256 - RNA, 19 nt, Homo sapiens
  misc_RNA (1)...(19): siRNA sense strand
cuaaggagagcucugauug

SEQ ID NO: 350257 - RNA, 19 nt, Homo sapiens
  misc_RNA (1)...(19): siRNA sense strand
acauugaggcugucuuuaa

SEQ ID NO: 350258 - RNA, 19 nt, Homo sapiens
  misc_RNA (1)...(19): siRNA sense strand
agaacuacauugggauaaa

SEQ ID NO: 350259 - RNA, 19 nt, Homo sapiens
  misc_RNA (1)...(19): siRNA sense strand
cuaggaagcagcugauuau

SEQ ID NO: 350260 - RNA, 19 nt, Homo sapiens
  misc_RNA (1)...(19): siRNA sense strand
gggacaugcuauauuagug

SEQ ID NO: 350261 - RNA, 19 nt, Homo sapiens
  misc_RNA (1)...(19): siRNA sense strand
agagagagcuagacagacu

SEQ ID NO: 350262 - RNA, 19 nt, Homo sapiens
  misc_RNA (1)...(19): siRNA sense strand
gaucuauauuucuggugaa

SEQ ID NO: 350263 - RNA, 19 nt, Homo sapiens
  misc_RNA (1)...(19): siRNA sense strand
gcagccagguggagguuag

SEQ ID NO: 350264 - RNA, 19 nt, Homo sapiens
  misc_RNA (1)...(19): siRNA sense strand
aaugguggcuccuggaaug

SEQ ID NO: 350265 - RNA, 19 nt, Homo sapiens
  misc_RNA (1)...(19): siRNA sense strand
ugccgaagcuacuggacua

SEQ ID NO: 350266 - RNA, 19 nt, Homo sapiens
  misc_RNA (1)...(19): siRNA sense strand
gcaguaccaucuacaucuc

SEQ ID NO: 350267 - RNA, 19 nt, Homo sapiens
  misc_RNA (1)...(19): siRNA sense strand
ccauuaccaucucuaagga

SEQ ID NO: 350268 - RNA, 19 nt, Homo sapiens
  misc_RNA (1)...(19): siRNA sense strand
ggucaucggcgacgaagug

SEQ ID NO: 350269 - RNA, 19 nt, Homo sapiens
  misc_RNA (1)...(19): siRNA sense strand
uaaaugugaagaaggcuuu

SEQ ID NO: 350270 - RNA, 19 nt, Homo sapiens
  misc_RNA (1)...(19): siRNA sense strand
uugcugaguucgaagauga

SEQ ID NO: 350271 - RNA, 19 nt, Homo sapiens
  misc_RNA (1)...(19): siRNA sense strand
uuugggaccugcuuuguga

SEQ ID NO: 350272 - RNA, 19 nt, Homo sapiens
  misc_RNA (1)...(19): siRNA sense strand
caucggaauucagccauga

SEQ ID NO: 350273 - RNA, 19 nt, Homo sapiens
  misc_RNA (1)...(19): siRNA sense strand
ggccugcccucaucaucaa

SEQ ID NO: 350274 - RNA, 19 nt, Homo sapiens
  misc_RNA (1)...(19): siRNA sense strand
aaauguggguuucaguguu

SEQ ID NO: 350275 - RNA, 19 nt, Homo sapiens
  misc_RNA (1)...(19): siRNA sense strand
auaggagaauuccagagua

SEQ ID NO: 350276 - RNA, 19 nt, Homo sapiens
  misc_RNA (1)...(19): siRNA sense strand
caaagaaaggaccagagaa

SEQ ID NO: 350277 - RNA, 19 nt, Homo sapiens
  misc_RNA (1)...(19): siRNA sense strand
cauugaggcugucuuuaag

SEQ ID NO: 350278 - RNA, 19 nt, Homo sapiens
  misc_RNA (1)...(19): siRNA sense strand
uggaaguccuccuuguauu

SEQ ID NO: 350279 - RNA, 19 nt, Homo sapiens
  misc_RNA (1)...(19): siRNA sense strand
gaccaccuccuacacuauu

SEQ ID NO: 350280 - RNA, 19 nt, Homo sapiens
  misc_RNA (1)...(19): siRNA sense strand
cccaagauaucucgcacuu

SEQ ID NO: 350281 - RNA, 19 nt, Homo sapiens
  misc_RNA (1)...(19): siRNA sense strand
gauuuguccucagagcuaa

SEQ ID NO: 350282 - RNA, 19 nt, Homo sapiens
  misc_RNA (1)...(19): siRNA sense strand
gagagagagaugguguuua

SEQ ID NO: 350283 - RNA, 19 nt, Homo sapiens
  misc_RNA (1)...(19): siRNA sense strand
ucgagagccuugucagguu

SEQ ID NO: 350284 - RNA, 19 nt, Homo sapiens
  misc_RNA (1)...(19): siRNA sense strand
ggaagaagcuugcugaguu

SEQ ID NO: 350285 - RNA, 19 nt, Homo sapiens
  misc_RNA (1)...(19): siRNA sense strand
agaaagagcugaacaagaa

SEQ ID NO: 350286 - RNA, 19 nt, Homo sapiens
  misc_RNA (1)...(19): siRNA sense strand
ggaagcagcugauuauuag

SEQ ID NO: 350287 - RNA, 19 nt, Homo sapiens
  misc_RNA (1)...(19): siRNA sense strand
gaagauuacuacaccgaua

SEQ ID NO: 350288 - RNA, 19 nt, Homo sapiens
  misc_RNA (1)...(19): siRNA sense strand
ggaaugaccugccaguaca

SEQ ID NO: 350289 - RNA, 19 nt, Homo sapiens
  misc_RNA (1)...(19): siRNA sense strand
gaagugagcgcaagcuuga

SEQ ID NO: 350290 - RNA, 19 nt, Homo sapiens
  misc_RNA (1)...(19): siRNA sense strand
gaagauucaugcaggaaga

SEQ ID NO: 350291 - RNA, 19 nt, Homo sapiens
  misc_RNA (1)...(19): siRNA sense strand
gaagaagcuugcugaguuc

SEQ ID NO: 350292 - RNA, 19 nt, Homo sapiens
  misc_RNA (1)...(19): siRNA sense strand
ugaaauugguccaguuuau

SEQ ID NO: 350293 - RNA, 19 nt, Homo sapiens
  misc_RNA (1)...(19): siRNA sense strand
cccgggacaugcuauauua

SEQ ID NO: 350294 - RNA, 19 nt, Homo sapiens
  misc_RNA (1)...(19): siRNA sense strand
gcuaggaagcagcugauua

SEQ ID NO: 350295 - RNA, 19 nt, Homo sapiens
  misc_RNA (1)...(19): siRNA sense strand
ggaugaguuugaaauguug

SEQ ID NO: 350296 - RNA, 19 nt, Homo sapiens
  misc_RNA (1)...(19): siRNA sense strand
gaagcuugcugaguucgaa

SEQ ID NO: 350297 - RNA, 19 nt, Homo sapiens
  misc_RNA (1)...(19): siRNA sense strand
ccaguacauuguccaguuu

SEQ ID NO: 350298 - RNA, 19 nt, Homo sapiens
  misc_RNA (1)...(19): siRNA sense strand
ggaauugggcagcugauug

SEQ ID NO: 350299 - RNA, 19 nt, Homo sapiens
  misc_RNA (1)...(19): siRNA sense strand
gccaguacauuguccaguu

SEQ ID NO: 350300 - RNA, 19 nt, Homo sapiens
  misc_RNA (1)...(19): siRNA sense strand
ugaguucgaagaugaguua

SEQ ID NO: 350301 - RNA, 19 nt, Homo sapiens
  misc_RNA (1)...(19): siRNA sense strand
gaaauugguccaguuuaug

SEQ ID NO: 350302 - RNA, 19 nt, Homo sapiens
  misc_RNA (1)...(19): siRNA sense strand
gaagaaagagcugaacaag

SEQ ID NO: 350303 - RNA, 19 nt, Homo sapiens
  misc_RNA (1)...(19): siRNA sense strand
aggaagcagcugauuauua

SEQ ID NO: 350304 - RNA, 19 nt, Homo sapiens
  misc_RNA (1)...(19): siRNA sense strand
uggaugaguuugaaauguu

SEQ ID NO: 350305 - RNA, 19 nt, Homo sapiens
  misc_RNA (1)...(19): siRNA sense strand
ggaaguccuccuuguauuc

SEQ ID NO: 350306 - RNA, 19 nt, Homo sapiens
  misc_RNA (1)...(19): siRNA sense strand
gcccagcacuucauacgau

SEQ ID NO: 350307 - RNA, 19 nt, Homo sapiens
  misc_RNA (1)...(19): siRNA sense strand
ugaagagugucuccagaug

SEQ ID NO: 350308 - RNA, 19 nt, Homo sapiens
  misc_RNA (1)...(19): siRNA sense strand
ccaaagaaaggaccagaga

SEQ ID NO: 350309 - RNA, 19 nt, Homo sapiens
  misc_RNA (1)...(19): siRNA sense strand
cuggagagcucacagacuu

SEQ ID NO: 350310 - RNA, 19 nt, Homo sapiens
  misc_RNA (1)...(19): siRNA sense strand
ggagagcucacagacuuaa

SEQ ID NO: 350311 - RNA, 19 nt, Homo sapiens
  misc_RNA (1)...(19): siRNA sense strand
guucaaaacugacauuuag

SEQ ID NO: 350312 - RNA, 19 nt, Homo sapiens
  misc_RNA (1)...(19): siRNA sense strand
cauggaauuuaacuccuaa

SEQ ID NO: 350313 - RNA, 19 nt, Homo sapiens
  misc_RNA (1)...(19): siRNA sense strand
aaagaagccagcaccgaua

SEQ ID NO: 350314 - RNA, 19 nt, Homo sapiens
  misc_RNA (1)...(19): siRNA sense strand
gauaggagaauuccagagu

SEQ ID NO: 350315 - RNA, 19 nt, Homo sapiens
  misc_RNA (1)...(19): siRNA sense strand
agccugacauggaauuuaa

SEQ ID NO: 350316 - RNA, 19 nt, Homo sapiens
  misc_RNA (1)...(19): siRNA sense strand
cuaggaagcagcugauuau

SEQ ID NO: 350317 - RNA, 19 nt, Homo sapiens
  misc_RNA (1)...(19): siRNA sense strand
gggacaugcuauauuagug

SEQ ID NO: 350318 - RNA, 19 nt, Homo sapiens
  misc_RNA (1)...(19): siRNA sense strand
agagagagcuagacagacu

SEQ ID NO: 350319 - RNA, 19 nt, Homo sapiens
  misc_RNA (1)...(19): siRNA sense strand
gaucuauauuucuggugaa

SEQ ID NO: 350320 - RNA, 19 nt, Homo sapiens
  misc_RNA (1)...(19): siRNA sense strand
ggucaucggcgacgaagug

SEQ ID NO: 350321 - RNA, 19 nt, Homo sapiens
  misc_RNA (1)...(19): siRNA sense strand
aaugguggcuccuggaaug

SEQ ID NO: 350322 - RNA, 19 nt, Homo sapiens
  misc_RNA (1)...(19): siRNA sense strand
uugcugaguucgaagauga

SEQ ID NO: 350323 - RNA, 19 nt, Homo sapiens
  misc_RNA (1)...(19): siRNA sense strand
aaauguggguuucaguguu

SEQ ID NO: 350324 - RNA, 19 nt, Homo sapiens
  misc_RNA (1)...(19): siRNA sense strand
auaggagaauuccagagua

SEQ ID NO: 350325 - RNA, 19 nt, Homo sapiens
  misc_RNA (1)...(19): siRNA sense strand
caaagaaaggaccagagaa

SEQ ID NO: 350326 - RNA, 19 nt, Homo sapiens
  misc_RNA (1)...(19): siRNA sense strand
uggaaguccuccuuguauu

SEQ ID NO: 350327 - RNA, 19 nt, Homo sapiens
  misc_RNA (1)...(19): siRNA sense strand
cccaagauaucucgcacuu

SEQ ID NO: 350328 - RNA, 19 nt, Homo sapiens
  misc_RNA (1)...(19): siRNA sense strand
gcagcugauuauuagaaau

SEQ ID NO: 350329 - RNA, 19 nt, Homo sapiens
  misc_RNA (1)...(19): siRNA sense strand
uugggcagcugauugcuuu

SEQ ID NO: 350330 - RNA, 19 nt, Homo sapiens
  misc_RNA (1)...(19): siRNA sense strand
ggaaugguggcuccuggaa

SEQ ID NO: 350331 - RNA, 19 nt, Homo sapiens
  misc_RNA (1)...(19): siRNA sense strand
gaaccucucaagaaagcaa

SEQ ID NO: 350332 - RNA, 19 nt, Homo sapiens
  misc_RNA (1)...(19): siRNA sense strand
acauggaauuuaacuccua

SEQ ID NO: 350333 - RNA, 19 nt, Homo sapiens
  misc_RNA (1)...(19): siRNA sense strand
cuacggaaacaucauuuga

SEQ ID NO: 350334 - RNA, 19 nt, Homo sapiens
  misc_RNA (1)...(19): siRNA sense strand
ucgagagccuugucagguu

SEQ ID NO: 350335 - RNA, 19 nt, Homo sapiens
  misc_RNA (1)...(19): siRNA sense strand
aaauugguccaguuuauga

SEQ ID NO: 350336 - RNA, 19 nt, Homo sapiens
  misc_RNA (1)...(19): siRNA sense strand
acagagagagcuagacaga

SEQ ID NO: 350337 - RNA, 19 nt, Homo sapiens
  misc_RNA (1)...(19): siRNA sense strand
ccagucagcccacacacuu

SEQ ID NO: 350338 - RNA, 19 nt, Homo sapiens
  misc_RNA (1)...(19): siRNA sense strand
ccacagagagagcuagaca

SEQ ID NO: 350339 - RNA, 19 nt, Homo sapiens
  misc_RNA (1)...(19): siRNA sense strand
aauguggguuucaguguug

SEQ ID NO: 350340 - RNA, 19 nt, Homo sapiens
  misc_RNA (1)...(19): siRNA sense strand
uaauugcgcugcagaacac

SEQ ID NO: 350341 - RNA, 19 nt, Homo sapiens
  misc_RNA (1)...(19): siRNA sense strand
uaugaaauugguccaguuu

SEQ ID NO: 350342 - RNA, 19 nt, Homo sapiens
  misc_RNA (1)...(19): siRNA sense strand
cagcaccgauaggagaauu

SEQ ID NO: 350343 - RNA, 19 nt, Homo sapiens
  misc_RNA (1)...(19): siRNA sense strand
gaagccagcaccgauagga

SEQ ID NO: 350344 - RNA, 19 nt, Homo sapiens
  misc_RNA (1)...(19): siRNA sense strand
cagcugauuauuagaaaug

SEQ ID NO: 350345 - RNA, 19 nt, Homo sapiens
  misc_RNA (1)...(19): siRNA sense strand
gcagcugauugcuuuggau

SEQ ID NO: 350346 - RNA, 19 nt, Homo sapiens
  misc_RNA (1)...(19): siRNA sense strand
ucgcugcgcacccaagaua

SEQ ID NO: 350347 - RNA, 19 nt, Homo sapiens
  misc_RNA (1)...(19): siRNA sense strand
guacucagccgaggucauc

SEQ ID NO: 350348 - RNA, 19 nt, Homo sapiens
  misc_RNA (1)...(19): siRNA sense strand
cagguugccuccagugaag

SEQ ID NO: 350349 - RNA, 19 nt, Homo sapiens
  misc_RNA (1)...(19): siRNA sense strand
gcugauugcuuuggaucug

SEQ ID NO: 350350 - RNA, 19 nt, Homo sapiens
  misc_RNA (1)...(19): siRNA sense strand
gaauugggcagcugauugc

SEQ ID NO: 350351 - RNA, 19 nt, Homo sapiens
  misc_RNA (1)...(19): siRNA sense strand
aauccugccuucgguguuu

SEQ ID NO: 350352 - RNA, 19 nt, Homo sapiens
  misc_RNA (1)...(19): siRNA sense strand
gaacaaccuccuuuuggaa

SEQ ID NO: 350353 - RNA, 19 nt, Homo sapiens
  misc_RNA (1)...(19): siRNA sense strand
guaauugcgcugcagaaca

SEQ ID NO: 350354 - RNA, 19 nt, Homo sapiens
  misc_RNA (1)...(19): siRNA sense strand
uaggagaauuccagaguac

SEQ ID NO: 350355 - RNA, 19 nt, Homo sapiens
  misc_RNA (1)...(19): siRNA sense strand
gcgaguugcuacggaaaca

SEQ ID NO: 350356 - RNA, 19 nt, Homo sapiens
  misc_RNA (1)...(19): siRNA sense strand
agaagaaagagcugaacaa

SEQ ID NO: 350357 - RNA, 19 nt, Homo sapiens
  misc_RNA (1)...(19): siRNA sense strand
uuuaugagaugguaauugc

SEQ ID NO: 350358 - RNA, 19 nt, Homo sapiens
  misc_RNA (1)...(19): siRNA sense strand
cuagcuaagccaccaauug

SEQ ID NO: 350359 - RNA, 19 nt, Homo sapiens
  misc_RNA (1)...(19): siRNA sense strand
cagccugacauggaauuua

SEQ ID NO: 350360 - RNA, 19 nt, Homo sapiens
  misc_RNA (1)...(19): siRNA sense strand
guggacagccugacaugga

SEQ ID NO: 350361 - RNA, 19 nt, Homo sapiens
  misc_RNA (1)...(19): siRNA sense strand
uggacagccugacauggaa

SEQ ID NO: 350362 - RNA, 19 nt, Homo sapiens
  misc_RNA (1)...(19): siRNA sense strand
uaacagcccagcacuucau

SEQ ID NO: 350363 - RNA, 19 nt, Homo sapiens
  misc_RNA (1)...(19): siRNA sense strand
uuaugaaauugguccaguu

SEQ ID NO: 350364 - RNA, 19 nt, Homo sapiens
  misc_RNA (1)...(19): siRNA sense strand
uagcuaagccaccaauugg

SEQ ID NO: 350365 - RNA, 19 nt, Homo sapiens
  misc_RNA (1)...(19): siRNA sense strand
gagaauuccagaguacaga

SEQ ID NO: 350366 - RNA, 19 nt, Homo sapiens
  misc_RNA (1)...(19): siRNA sense strand
guguauagacagcgaguug

SEQ ID NO: 350367 - RNA, 19 nt, Homo sapiens
  misc_RNA (1)...(19): siRNA sense strand
aagcagcugauuauuagaa

SEQ ID NO: 350368 - RNA, 19 nt, Homo sapiens
  misc_RNA (1)...(19): siRNA sense strand
ugugguuacugccucauug

SEQ ID NO: 350369 - RNA, 19 nt, Homo sapiens
  misc_RNA (1)...(19): siRNA sense strand
ucacagauuaugaaauugg

SEQ ID NO: 350370 - RNA, 19 nt, Homo sapiens
  misc_RNA (1)...(19): siRNA sense strand
uaacuccuaaggccaaaga

SEQ ID NO: 350371 - RNA, 19 nt, Homo sapiens
  misc_RNA (1)...(19): siRNA sense strand
aagaaagagcugaacaaga

SEQ ID NO: 350372 - RNA, 19 nt, Homo sapiens
  misc_RNA (1)...(19): siRNA sense strand
aaagaaaggaccagagaac

SEQ ID NO: 350373 - RNA, 19 nt, Homo sapiens
  misc_RNA (1)...(19): siRNA sense strand
cagauucgggagcucuaua

SEQ ID NO: 350374 - RNA, 19 nt, Homo sapiens
  misc_RNA (1)...(19): siRNA sense strand
ccuggaaguccuccuugua

SEQ ID NO: 350375 - RNA, 19 nt, Homo sapiens
  misc_RNA (1)...(19): siRNA sense strand
aagagugucuccagauggu

SEQ ID NO: 350376 - RNA, 19 nt, Homo sapiens
  misc_RNA (1)...(19): siRNA sense strand
ugaacaaccuccuuuugga

SEQ ID NO: 350377 - RNA, 19 nt, Homo sapiens
  misc_RNA (1)...(19): siRNA sense strand
gcuggccaccacuaaguuu

SEQ ID NO: 350378 - RNA, 19 nt, Homo sapiens
  misc_RNA (1)...(19): siRNA sense strand
gcggcuggaugaguuugaa

SEQ ID NO: 350379 - RNA, 19 nt, Homo sapiens
  misc_RNA (1)...(19): siRNA sense strand
gaaagagcugaacaagaag

SEQ ID NO: 350380 - RNA, 19 nt, Homo sapiens
  misc_RNA (1)...(19): siRNA sense strand
acucugaggccuuccacua

SEQ ID NO: 350381 - RNA, 19 nt, Homo sapiens
  misc_RNA (1)...(19): siRNA sense strand
gaaugguggcuccuggaau

SEQ ID NO: 350382 - RNA, 19 nt, Homo sapiens
  misc_RNA (1)...(19): siRNA sense strand
gugcugauacuccaguguu

SEQ ID NO: 350383 - RNA, 19 nt, Homo sapiens
  misc_RNA (1)...(19): siRNA sense strand
gaagcguuccguccagaag

SEQ ID NO: 350384 - RNA, 19 nt, Homo sapiens
  misc_RNA (1)...(19): siRNA sense strand
gaacaccaauauuacaguu

SEQ ID NO: 350385 - RNA, 19 nt, Homo sapiens
  misc_RNA (1)...(19): siRNA sense strand
gaauaccgcuggcccuuug

SEQ ID NO: 350386 - RNA, 19 nt, Homo sapiens
  misc_RNA (1)...(19): siRNA sense strand
acucaaaccuuucaacaaa

SEQ ID NO: 350387 - RNA, 19 nt, Homo sapiens
  misc_RNA (1)...(19): siRNA sense strand
gaacaaaccaagaaaugau

SEQ ID NO: 350388 - RNA, 19 nt, Homo sapiens
  misc_RNA (1)...(19): siRNA sense strand
auacgugacuguagaauug

SEQ ID NO: 350389 - RNA, 19 nt, Homo sapiens
  misc_RNA (1)...(19): siRNA sense strand
caucauacgugacuguaga

SEQ ID NO: 350390 - RNA, 19 nt, Homo sapiens
  misc_RNA (1)...(19): siRNA sense strand
ccaagaugauugucccaaa

SEQ ID NO: 350391 - RNA, 19 nt, Homo sapiens
  misc_RNA (1)...(19): siRNA sense strand
uauacuggguuuccuguuu

SEQ ID NO: 350392 - RNA, 19 nt, Homo sapiens
  misc_RNA (1)...(19): siRNA sense strand
gcuauaauccaucgaaaug

SEQ ID NO: 350393 - RNA, 19 nt, Homo sapiens
  misc_RNA (1)...(19): siRNA sense strand
ugucaugauuccuacuuua

SEQ ID NO: 350394 - RNA, 19 nt, Homo sapiens
  misc_RNA (1)...(19): siRNA sense strand
gaagaacaaaccaagaaau

SEQ ID NO: 350395 - RNA, 19 nt, Homo sapiens
  misc_RNA (1)...(19): siRNA sense strand
aaagucaccugcaucauca

SEQ ID NO: 350396 - RNA, 19 nt, Homo sapiens
  misc_RNA (1)...(19): siRNA sense strand
ggugauagucauuuacuuu

SEQ ID NO: 350397 - RNA, 19 nt, Homo sapiens
  misc_RNA (1)...(19): siRNA sense strand
uggaaggcauaauuacaua

SEQ ID NO: 350398 - RNA, 19 nt, Homo sapiens
  misc_RNA (1)...(19): siRNA sense strand
gcuaguguguuucuacuca

SEQ ID NO: 350399 - RNA, 19 nt, Homo sapiens
  misc_RNA (1)...(19): siRNA sense strand
ccuguacgcuaguguguuu

SEQ ID NO: 350400 - RNA, 19 nt, Homo sapiens
  misc_RNA (1)...(19): siRNA sense strand
ucacgugucucagcauuga

SEQ ID NO: 350401 - RNA, 19 nt, Homo sapiens
  misc_RNA (1)...(19): siRNA sense strand
acaccaauauuacaguuug

SEQ ID NO: 350402 - RNA, 19 nt, Homo sapiens
  misc_RNA (1)...(19): siRNA sense strand
cuaaagaaggcuuaugaaa

SEQ ID NO: 350403 - RNA, 19 nt, Homo sapiens
  misc_RNA (1)...(19): siRNA sense strand
cagaagaacaaaccaagaa

SEQ ID NO: 350404 - RNA, 19 nt, Homo sapiens
  misc_RNA (1)...(19): siRNA sense strand
ucucaacucuucuacugaa

SEQ ID NO: 350405 - RNA, 19 nt, Homo sapiens
  misc_RNA (1)...(19): siRNA sense strand
caaagucaccugcaucauc

SEQ ID NO: 350406 - RNA, 19 nt, Homo sapiens
  misc_RNA (1)...(19): siRNA sense strand
uuacugacuuugccacuau

SEQ ID NO: 350407 - RNA, 19 nt, Homo sapiens
  misc_RNA (1)...(19): siRNA sense strand
ucaccugcaucaucauuug

SEQ ID NO: 350408 - RNA, 19 nt, Homo sapiens
  misc_RNA (1)...(19): siRNA sense strand
caagaugauugucccaaag

SEQ ID NO: 350409 - RNA, 19 nt, Homo sapiens
  misc_RNA (1)...(19): siRNA sense strand
cuacacagcuauggaauac

SEQ ID NO: 350410 - RNA, 19 nt, Homo sapiens
  misc_RNA (1)...(19): siRNA sense strand
auaugaagcugaagacugu

SEQ ID NO: 350411 - RNA, 19 nt, Homo sapiens
  misc_RNA (1)...(19): siRNA sense strand
gaaacagcuugguggugau

SEQ ID NO: 350412 - RNA, 19 nt, Homo sapiens
  misc_RNA (1)...(19): siRNA sense strand
aagcuggaaggcauaauua

SEQ ID NO: 350413 - RNA, 19 nt, Homo sapiens
  misc_RNA (1)...(19): siRNA sense strand
cagcuauaauccaucgaaa

SEQ ID NO: 350414 - RNA, 19 nt, Homo sapiens
  misc_RNA (1)...(19): siRNA sense strand
caugauuccuacuuuauac

SEQ ID NO: 350415 - RNA, 19 nt, Homo sapiens
  misc_RNA (1)...(19): siRNA sense strand
gaucgauaccuggcuauug

SEQ ID NO: 350416 - RNA, 19 nt, Homo sapiens
  misc_RNA (1)...(19): siRNA sense strand
ggaauaccgcuggcccuuu

SEQ ID NO: 350417 - RNA, 19 nt, Homo sapiens
  misc_RNA (1)...(19): siRNA sense strand
guaagcucauccaccaaga

SEQ ID NO: 350418 - RNA, 19 nt, Homo sapiens
  misc_RNA (1)...(19): siRNA sense strand
caguuugugcuuuccauua

SEQ ID NO: 350419 - RNA, 19 nt, Homo sapiens
  misc_RNA (1)...(19): siRNA sense strand
gcuggcccuuuggcaauua

SEQ ID NO: 350420 - RNA, 19 nt, Homo sapiens
  misc_RNA (1)...(19): siRNA sense strand
acuaugggcugucuacaca

SEQ ID NO: 350421 - RNA, 19 nt, Homo sapiens
  misc_RNA (1)...(19): siRNA sense strand
aaaucccacucaaaccuuu

SEQ ID NO: 350422 - RNA, 19 nt, Homo sapiens
  misc_RNA (1)...(19): siRNA sense strand
gcaauugugcuuuucuuuu

SEQ ID NO: 350423 - RNA, 19 nt, Homo sapiens
  misc_RNA (1)...(19): siRNA sense strand
aagaacaaaccaagaaaug

SEQ ID NO: 350424 - RNA, 19 nt, Homo sapiens
  misc_RNA (1)...(19): siRNA sense strand
ggaaggcauaauuacauau

SEQ ID NO: 350425 - RNA, 19 nt, Homo sapiens
  misc_RNA (1)...(19): siRNA sense strand
cuacugaagaugguauuaa

SEQ ID NO: 350426 - RNA, 19 nt, Homo sapiens
  misc_RNA (1)...(19): siRNA sense strand
gugggaauauuuggaaaca

SEQ ID NO: 350427 - RNA, 19 nt, Homo sapiens
  misc_RNA (1)...(19): siRNA sense strand
agaacaaaccaagaaauga

SEQ ID NO: 350428 - RNA, 19 nt, Homo sapiens
  misc_RNA (1)...(19): siRNA sense strand
gaaauucagaagaacaaac

SEQ ID NO: 350429 - RNA, 19 nt, Homo sapiens
  misc_RNA (1)...(19): siRNA sense strand
gacuguagaauugcagaua

SEQ ID NO: 350430 - RNA, 19 nt, Homo sapiens
  misc_RNA (1)...(19): siRNA sense strand
uggguuuccuguuuccuuu

SEQ ID NO: 350431 - RNA, 19 nt, Homo sapiens
  misc_RNA (1)...(19): siRNA sense strand
ccacucaaaccuuucaaca

SEQ ID NO: 350432 - RNA, 19 nt, Homo sapiens
  misc_RNA (1)...(19): siRNA sense strand
cuguagaauugcagauauu

SEQ ID NO: 350433 - RNA, 19 nt, Homo sapiens
  misc_RNA (1)...(19): siRNA sense strand
caccaaauauucacuuuuc

SEQ ID NO: 350434 - RNA, 19 nt, Homo sapiens
  misc_RNA (1)...(19): siRNA sense strand
aaagcuggaaggcauaauu

SEQ ID NO: 350435 - RNA, 19 nt, Homo sapiens
  misc_RNA (1)...(19): siRNA sense strand
ugagaacaccaauauuaca

SEQ ID NO: 350436 - RNA, 19 nt, Homo sapiens
  misc_RNA (1)...(19): siRNA sense strand
cagauaauguaagcucauc

SEQ ID NO: 350437 - RNA, 19 nt, Homo sapiens
  misc_RNA (1)...(19): siRNA sense strand
caaaucccacucaaaccuu

SEQ ID NO: 350438 - RNA, 19 nt, Homo sapiens
  misc_RNA (1)...(19): siRNA sense strand
agaagaacaaaccaagaaa

SEQ ID NO: 350439 - RNA, 19 nt, Homo sapiens
  misc_RNA (1)...(19): siRNA sense strand
uauuacaguuugugcuuuc

SEQ ID NO: 350440 - RNA, 19 nt, Homo sapiens
  misc_RNA (1)...(19): siRNA sense strand
gagaacaccaauauuacag

SEQ ID NO: 350441 - RNA, 19 nt, Homo sapiens
  misc_RNA (1)...(19): siRNA sense strand
guacgcuaguguguuucua

SEQ ID NO: 350442 - RNA, 19 nt, Homo sapiens
  misc_RNA (1)...(19): siRNA sense strand
gccaaagucaccugcauca

SEQ ID NO: 350443 - RNA, 19 nt, Homo sapiens
  misc_RNA (1)...(19): siRNA sense strand
ugguggugauagucauuua

SEQ ID NO: 350444 - RNA, 19 nt, Homo sapiens
  misc_RNA (1)...(19): siRNA sense strand
uagaauugcagauauugug

SEQ ID NO: 350445 - RNA, 19 nt, Homo sapiens
  misc_RNA (1)...(19): siRNA sense strand
acuguagaauugcagauau

SEQ ID NO: 350446 - RNA, 19 nt, Homo sapiens
  misc_RNA (1)...(19): siRNA sense strand
gauucaacuaggcaucaua

SEQ ID NO: 350447 - RNA, 19 nt, Homo sapiens
  misc_RNA (1)...(19): siRNA sense strand
gcuggaaggcauaauuaca

SEQ ID NO: 350448 - RNA, 19 nt, Homo sapiens
  misc_RNA (1)...(19): siRNA sense strand
aaacagcuugguggugaua

SEQ ID NO: 350449 - RNA, 19 nt, Homo sapiens
  misc_RNA (1)...(19): siRNA sense strand
auacuggguuuccuguuuc

SEQ ID NO: 350450 - RNA, 19 nt, Homo sapiens
  misc_RNA (1)...(19): siRNA sense strand
ccaaagcuggaaggcauaa

SEQ ID NO: 350451 - RNA, 19 nt, Homo sapiens
  misc_RNA (1)...(19): siRNA sense strand
cccaccaaauauucacuuu

SEQ ID NO: 350452 - RNA, 19 nt, Homo sapiens
  misc_RNA (1)...(19): siRNA sense strand
ucagaagaacaaaccaaga

SEQ ID NO: 350453 - RNA, 19 nt, Homo sapiens
  misc_RNA (1)...(19): siRNA sense strand
cauuaugagucccaaaauu

SEQ ID NO: 350454 - RNA, 19 nt, Homo sapiens
  misc_RNA (1)...(19): siRNA sense strand
aguuugugcuuuccauuau

SEQ ID NO: 350455 - RNA, 19 nt, Homo sapiens
  misc_RNA (1)...(19): siRNA sense strand
cauacgugacuguagaauu

SEQ ID NO: 350456 - RNA, 19 nt, Homo sapiens
  misc_RNA (1)...(19): siRNA sense strand
ucacuuuucuggauguauu

SEQ ID NO: 350457 - RNA, 19 nt, Homo sapiens
  misc_RNA (1)...(19): siRNA sense strand
cccuaaagaaggcuuauga

SEQ ID NO: 350458 - RNA, 19 nt, Homo sapiens
  misc_RNA (1)...(19): siRNA sense strand
uuugugcuuuccauuauga

SEQ ID NO: 350459 - RNA, 19 nt, Homo sapiens
  misc_RNA (1)...(19): siRNA sense strand
ucuacacagcuauggaaua

SEQ ID NO: 350460 - RNA, 19 nt, Homo sapiens
  misc_RNA (1)...(19): siRNA sense strand
gauaauguaagcucaucca

SEQ ID NO: 350461 - RNA, 19 nt, Homo sapiens
  misc_RNA (1)...(19): siRNA sense strand
ccuaaagaaggcuuaugaa

SEQ ID NO: 350462 - RNA, 19 nt, Homo sapiens
  misc_RNA (1)...(19): siRNA sense strand
ccaguuugccagcuauaau

SEQ ID NO: 350463 - RNA, 19 nt, Homo sapiens
  misc_RNA (1)...(19): siRNA sense strand
gucaugauuccuacuuuau

SEQ ID NO: 350464 - RNA, 19 nt, Homo sapiens
  misc_RNA (1)...(19): siRNA sense strand
auucucaacucuucuacug

SEQ ID NO: 350465 - RNA, 19 nt, Homo sapiens
  misc_RNA (1)...(19): siRNA sense strand
guagaauugcagauauugu

SEQ ID NO: 350466 - RNA, 19 nt, Homo sapiens
  misc_RNA (1)...(19): siRNA sense strand
ccagcuauaauccaucgaa

SEQ ID NO: 350467 - RNA, 19 nt, Homo sapiens
  misc_RNA (1)...(19): siRNA sense strand
aucgauaccuggcuauugu

SEQ ID NO: 350468 - RNA, 19 nt, Homo sapiens
  misc_RNA (1)...(19): siRNA sense strand
acucacgugucucagcauu

SEQ ID NO: 350469 - RNA, 19 nt, Homo sapiens
  misc_RNA (1)...(19): siRNA sense strand
aagaaggcuuaugaaauuc

SEQ ID NO: 350470 - RNA, 19 nt, Homo sapiens
  misc_RNA (1)...(19): siRNA sense strand
ucucagcauugaucgauac

SEQ ID NO: 350471 - RNA, 19 nt, Homo sapiens
  misc_RNA (1)...(19): siRNA sense strand
uagccaaagucaccugcau

SEQ ID NO: 350472 - RNA, 19 nt, Homo sapiens
  misc_RNA (1)...(19): siRNA sense strand
gaauauuuggaaacagcuu

SEQ ID NO: 350473 - RNA, 19 nt, Homo sapiens
  misc_RNA (1)...(19): siRNA sense strand
uuuggaaggcccuaaagaa

SEQ ID NO: 350474 - RNA, 19 nt, Homo sapiens
  misc_RNA (1)...(19): siRNA sense strand
gggcugggccugaccaaaa

SEQ ID NO: 350475 - RNA, 19 nt, Homo sapiens
  misc_RNA (1)...(19): siRNA sense strand
gauuccuacuuuauacagu

SEQ ID NO: 350476 - RNA, 19 nt, Homo sapiens
  misc_RNA (1)...(19): siRNA sense strand
uaagcucauccaccaagaa

SEQ ID NO: 350477 - RNA, 19 nt, Homo sapiens
  misc_RNA (1)...(19): siRNA sense strand
ccaaaucccacucaaaccu

SEQ ID NO: 350478 - RNA, 19 nt, Homo sapiens
  misc_RNA (1)...(19): siRNA sense strand
uuuaacaauugccugaauc

SEQ ID NO: 350479 - RNA, 19 nt, Homo sapiens
  misc_RNA (1)...(19): siRNA sense strand
acaaaccaagaaaugauga

SEQ ID NO: 350480 - RNA, 19 nt, Homo sapiens
  misc_RNA (1)...(19): siRNA sense strand
ucugaucauucuuacaagu

SEQ ID NO: 350481 - RNA, 19 nt, Homo sapiens
  misc_RNA (1)...(19): siRNA sense strand
gcgucaguuucaaccugua

SEQ ID NO: 350482 - RNA, 19 nt, Homo sapiens
  misc_RNA (1)...(19): siRNA sense strand
guuugugcuuuccauuaug

SEQ ID NO: 350483 - RNA, 19 nt, Homo sapiens
  misc_RNA (1)...(19): siRNA sense strand
gaacaccaauauuacaguu

SEQ ID NO: 350484 - RNA, 19 nt, Homo sapiens
  misc_RNA (1)...(19): siRNA sense strand
gaauaccgcuggcccuuug

SEQ ID NO: 350485 - RNA, 19 nt, Homo sapiens
  misc_RNA (1)...(19): siRNA sense strand
acucaaaccuuucaacaaa

SEQ ID NO: 350486 - RNA, 19 nt, Homo sapiens
  misc_RNA (1)...(19): siRNA sense strand
gaacaaaccaagaaaugau

SEQ ID NO: 350487 - RNA, 19 nt, Homo sapiens
  misc_RNA (1)...(19): siRNA sense strand
auacgugacuguagaauug

SEQ ID NO: 350488 - RNA, 19 nt, Homo sapiens
  misc_RNA (1)...(19): siRNA sense strand
caucauacgugacuguaga

SEQ ID NO: 350489 - RNA, 19 nt, Homo sapiens
  misc_RNA (1)...(19): siRNA sense strand
ccaagaugauugucccaaa

SEQ ID NO: 350490 - RNA, 19 nt, Homo sapiens
  misc_RNA (1)...(19): siRNA sense strand
uauacuggguuuccuguuu

SEQ ID NO: 350491 - RNA, 19 nt, Homo sapiens
  misc_RNA (1)...(19): siRNA sense strand
gcuauaauccaucgaaaug

SEQ ID NO: 350492 - RNA, 19 nt, Homo sapiens
  misc_RNA (1)...(19): siRNA sense strand
ugucaugauuccuacuuua

SEQ ID NO: 350493 - RNA, 19 nt, Homo sapiens
  misc_RNA (1)...(19): siRNA sense strand
gaagaacaaaccaagaaau

SEQ ID NO: 350494 - RNA, 19 nt, Homo sapiens
  misc_RNA (1)...(19): siRNA sense strand
aaagucaccugcaucauca

SEQ ID NO: 350495 - RNA, 19 nt, Homo sapiens
  misc_RNA (1)...(19): siRNA sense strand
ggugauagucauuuacuuu

SEQ ID NO: 350496 - RNA, 19 nt, Homo sapiens
  misc_RNA (1)...(19): siRNA sense strand
uggaaggcauaauuacaua

SEQ ID NO: 350497 - RNA, 19 nt, Homo sapiens
  misc_RNA (1)...(19): siRNA sense strand
gcuaguguguuucuacuca

SEQ ID NO: 350498 - RNA, 19 nt, Homo sapiens
  misc_RNA (1)...(19): siRNA sense strand
ccuguacgcuaguguguuu

SEQ ID NO: 350499 - RNA, 19 nt, Homo sapiens
  misc_RNA (1)...(19): siRNA sense strand
ucacgugucucagcauuga

SEQ ID NO: 350500 - RNA, 19 nt, Homo sapiens
  misc_RNA (1)...(19): siRNA sense strand
acaccaauauuacaguuug

SEQ ID NO: 350501 - RNA, 19 nt, Homo sapiens
  misc_RNA (1)...(19): siRNA sense strand
cuaaagaaggcuuaugaaa

SEQ ID NO: 350502 - RNA, 19 nt, Homo sapiens
  misc_RNA (1)...(19): siRNA sense strand
cagaagaacaaaccaagaa

SEQ ID NO: 350503 - RNA, 19 nt, Homo sapiens
  misc_RNA (1)...(19): siRNA sense strand
ucucaacucuucuacugaa

SEQ ID NO: 350504 - RNA, 19 nt, Homo sapiens
  misc_RNA (1)...(19): siRNA sense strand
caaagucaccugcaucauc

SEQ ID NO: 350505 - RNA, 19 nt, Homo sapiens
  misc_RNA (1)...(19): siRNA sense strand
uuacugacuuugccacuau

SEQ ID NO: 350506 - RNA, 19 nt, Homo sapiens
  misc_RNA (1)...(19): siRNA sense strand
ucaccugcaucaucauuug

SEQ ID NO: 350507 - RNA, 19 nt, Homo sapiens
  misc_RNA (1)...(19): siRNA sense strand
caagaugauugucccaaag

SEQ ID NO: 350508 - RNA, 19 nt, Homo sapiens
  misc_RNA (1)...(19): siRNA sense strand
cuacacagcuauggaauac

SEQ ID NO: 350509 - RNA, 19 nt, Homo sapiens
  misc_RNA (1)...(19): siRNA sense strand
auaugaagcugaagacugu

SEQ ID NO: 350510 - RNA, 19 nt, Homo sapiens
  misc_RNA (1)...(19): siRNA sense strand
gaaacagcuugguggugau

SEQ ID NO: 350511 - RNA, 19 nt, Homo sapiens
  misc_RNA (1)...(19): siRNA sense strand
aagcuggaaggcauaauua

SEQ ID NO: 350512 - RNA, 19 nt, Homo sapiens
  misc_RNA (1)...(19): siRNA sense strand
cagcuauaauccaucgaaa

SEQ ID NO: 350513 - RNA, 19 nt, Homo sapiens
  misc_RNA (1)...(19): siRNA sense strand
caugauuccuacuuuauac

SEQ ID NO: 350514 - RNA, 19 nt, Homo sapiens
  misc_RNA (1)...(19): siRNA sense strand
gaucgauaccuggcuauug

SEQ ID NO: 350515 - RNA, 19 nt, Homo sapiens
  misc_RNA (1)...(19): siRNA sense strand
ggaauaccgcuggcccuuu

SEQ ID NO: 350516 - RNA, 19 nt, Homo sapiens
  misc_RNA (1)...(19): siRNA sense strand
guaagcucauccaccaaga

SEQ ID NO: 350517 - RNA, 19 nt, Homo sapiens
  misc_RNA (1)...(19): siRNA sense strand
caguuugugcuuuccauua

SEQ ID NO: 350518 - RNA, 19 nt, Homo sapiens
  misc_RNA (1)...(19): siRNA sense strand
gcuggcccuuuggcaauua

SEQ ID NO: 350519 - RNA, 19 nt, Homo sapiens
  misc_RNA (1)...(19): siRNA sense strand
acuaugggcugucuacaca

SEQ ID NO: 350520 - RNA, 19 nt, Homo sapiens
  misc_RNA (1)...(19): siRNA sense strand
aaaucccacucaaaccuuu

SEQ ID NO: 350521 - RNA, 19 nt, Homo sapiens
  misc_RNA (1)...(19): siRNA sense strand
gcaauugugcuuuucuuuu

SEQ ID NO: 350522 - RNA, 19 nt, Homo sapiens
  misc_RNA (1)...(19): siRNA sense strand
aagaacaaaccaagaaaug

SEQ ID NO: 350523 - RNA, 19 nt, Homo sapiens
  misc_RNA (1)...(19): siRNA sense strand
ggaaggcauaauuacauau

SEQ ID NO: 350524 - RNA, 19 nt, Homo sapiens
  misc_RNA (1)...(19): siRNA sense strand
cuacugaagaugguauuaa

SEQ ID NO: 350525 - RNA, 19 nt, Homo sapiens
  misc_RNA (1)...(19): siRNA sense strand
gugggaauauuuggaaaca

SEQ ID NO: 350526 - RNA, 19 nt, Homo sapiens
  misc_RNA (1)...(19): siRNA sense strand
agaacaaaccaagaaauga

SEQ ID NO: 350527 - RNA, 19 nt, Homo sapiens
  misc_RNA (1)...(19): siRNA sense strand
gaaauucagaagaacaaac

SEQ ID NO: 350528 - RNA, 19 nt, Homo sapiens
  misc_RNA (1)...(19): siRNA sense strand
gacuguagaauugcagaua

SEQ ID NO: 350529 - RNA, 19 nt, Homo sapiens
  misc_RNA (1)...(19): siRNA sense strand
uggguuuccuguuuccuuu

SEQ ID NO: 350530 - RNA, 19 nt, Homo sapiens
  misc_RNA (1)...(19): siRNA sense strand
ccacucaaaccuuucaaca

SEQ ID NO: 350531 - RNA, 19 nt, Homo sapiens
  misc_RNA (1)...(19): siRNA sense strand
cuguagaauugcagauauu

SEQ ID NO: 350532 - RNA, 19 nt, Homo sapiens
  misc_RNA (1)...(19): siRNA sense strand
caccaaauauucacuuuuc

SEQ ID NO: 350533 - RNA, 19 nt, Homo sapiens
  misc_RNA (1)...(19): siRNA sense strand
aaagcuggaaggcauaauu

SEQ ID NO: 350534 - RNA, 19 nt, Homo sapiens
  misc_RNA (1)...(19): siRNA sense strand
ugagaacaccaauauuaca

SEQ ID NO: 350535 - RNA, 19 nt, Homo sapiens
  misc_RNA (1)...(19): siRNA sense strand
cagauaauguaagcucauc

SEQ ID NO: 350536 - RNA, 19 nt, Homo sapiens
  misc_RNA (1)...(19): siRNA sense strand
caaaucccacucaaaccuu

SEQ ID NO: 350537 - RNA, 19 nt, Homo sapiens
  misc_RNA (1)...(19): siRNA sense strand
agaagaacaaaccaagaaa

SEQ ID NO: 350538 - RNA, 19 nt, Homo sapiens
  misc_RNA (1)...(19): siRNA sense strand
uauuacaguuugugcuuuc

SEQ ID NO: 350539 - RNA, 19 nt, Homo sapiens
  misc_RNA (1)...(19): siRNA sense strand
gagaacaccaauauuacag

SEQ ID NO: 350540 - RNA, 19 nt, Homo sapiens
  misc_RNA (1)...(19): siRNA sense strand
guacgcuaguguguuucua

SEQ ID NO: 350541 - RNA, 19 nt, Homo sapiens
  misc_RNA (1)...(19): siRNA sense strand
gccaaagucaccugcauca

SEQ ID NO: 350542 - RNA, 19 nt, Homo sapiens
  misc_RNA (1)...(19): siRNA sense strand
ugguggugauagucauuua

SEQ ID NO: 350543 - RNA, 19 nt, Homo sapiens
  misc_RNA (1)...(19): siRNA sense strand
uagaauugcagauauugug

SEQ ID NO: 350544 - RNA, 19 nt, Homo sapiens
  misc_RNA (1)...(19): siRNA sense strand
acuguagaauugcagauau

SEQ ID NO: 350545 - RNA, 19 nt, Homo sapiens
  misc_RNA (1)...(19): siRNA sense strand
gauucaacuaggcaucaua

SEQ ID NO: 350546 - RNA, 19 nt, Homo sapiens
  misc_RNA (1)...(19): siRNA sense strand
gcuggaaggcauaauuaca

SEQ ID NO: 350547 - RNA, 19 nt, Homo sapiens
  misc_RNA (1)...(19): siRNA sense strand
aaacagcuugguggugaua

SEQ ID NO: 350548 - RNA, 19 nt, Homo sapiens
  misc_RNA (1)...(19): siRNA sense strand
auacuggguuuccuguuuc

SEQ ID NO: 350549 - RNA, 19 nt, Homo sapiens
  misc_RNA (1)...(19): siRNA sense strand
ccaaagcuggaaggcauaa

SEQ ID NO: 350550 - RNA, 19 nt, Homo sapiens
  misc_RNA (1)...(19): siRNA sense strand
cccaccaaauauucacuuu

SEQ ID NO: 350551 - RNA, 19 nt, Homo sapiens
  misc_RNA (1)...(19): siRNA sense strand
ucagaagaacaaaccaaga

SEQ ID NO: 350552 - RNA, 19 nt, Homo sapiens
  misc_RNA (1)...(19): siRNA sense strand
cauuaugagucccaaaauu

SEQ ID NO: 350553 - RNA, 19 nt, Homo sapiens
  misc_RNA (1)...(19): siRNA sense strand
aguuugugcuuuccauuau

SEQ ID NO: 350554 - RNA, 19 nt, Homo sapiens
  misc_RNA (1)...(19): siRNA sense strand
cauacgugacuguagaauu

SEQ ID NO: 350555 - RNA, 19 nt, Homo sapiens
  misc_RNA (1)...(19): siRNA sense strand
ucacuuuucuggauguauu

SEQ ID NO: 350556 - RNA, 19 nt, Homo sapiens
  misc_RNA (1)...(19): siRNA sense strand
cccuaaagaaggcuuauga

SEQ ID NO: 350557 - RNA, 19 nt, Homo sapiens
  misc_RNA (1)...(19): siRNA sense strand
uuugugcuuuccauuauga

SEQ ID NO: 350558 - RNA, 19 nt, Homo sapiens
  misc_RNA (1)...(19): siRNA sense strand
ucuacacagcuauggaaua

SEQ ID NO: 350559 - RNA, 19 nt, Homo sapiens
  misc_RNA (1)...(19): siRNA sense strand
gauaauguaagcucaucca

SEQ ID NO: 350560 - RNA, 19 nt, Homo sapiens
  misc_RNA (1)...(19): siRNA sense strand
ccuaaagaaggcuuaugaa

SEQ ID NO: 350561 - RNA, 19 nt, Homo sapiens
  misc_RNA (1)...(19): siRNA sense strand
ccaguuugccagcuauaau

SEQ ID NO: 350562 - RNA, 19 nt, Homo sapiens
  misc_RNA (1)...(19): siRNA sense strand
gucaugauuccuacuuuau

SEQ ID NO: 350563 - RNA, 19 nt, Homo sapiens
  misc_RNA (1)...(19): siRNA sense strand
auucucaacucuucuacug

SEQ ID NO: 350564 - RNA, 19 nt, Homo sapiens
  misc_RNA (1)...(19): siRNA sense strand
guagaauugcagauauugu

SEQ ID NO: 350565 - RNA, 19 nt, Homo sapiens
  misc_RNA (1)...(19): siRNA sense strand
ccagcuauaauccaucgaa

SEQ ID NO: 350566 - RNA, 19 nt, Homo sapiens
  misc_RNA (1)...(19): siRNA sense strand
aucgauaccuggcuauugu

SEQ ID NO: 350567 - RNA, 19 nt, Homo sapiens
  misc_RNA (1)...(19): siRNA sense strand
acucacgugucucagcauu

SEQ ID NO: 350568 - RNA, 19 nt, Homo sapiens
  misc_RNA (1)...(19): siRNA sense strand
aagaaggcuuaugaaauuc

SEQ ID NO: 350569 - RNA, 19 nt, Homo sapiens
  misc_RNA (1)...(19): siRNA sense strand
ucucagcauugaucgauac

SEQ ID NO: 350570 - RNA, 19 nt, Homo sapiens
  misc_RNA (1)...(19): siRNA sense strand
uagccaaagucaccugcau

SEQ ID NO: 350571 - RNA, 19 nt, Homo sapiens
  misc_RNA (1)...(19): siRNA sense strand
gaauauuuggaaacagcuu

SEQ ID NO: 350572 - RNA, 19 nt, Homo sapiens
  misc_RNA (1)...(19): siRNA sense strand
uuuggaaggcccuaaagaa

SEQ ID NO: 350573 - RNA, 19 nt, Homo sapiens
  misc_RNA (1)...(19): siRNA sense strand
gggcugggccugaccaaaa

SEQ ID NO: 350574 - RNA, 19 nt, Homo sapiens
  misc_RNA (1)...(19): siRNA sense strand
gauuccuacuuuauacagu

SEQ ID NO: 350575 - RNA, 19 nt, Homo sapiens
  misc_RNA (1)...(19): siRNA sense strand
uaagcucauccaccaagaa

SEQ ID NO: 350576 - RNA, 19 nt, Homo sapiens
  misc_RNA (1)...(19): siRNA sense strand
ccaaaucccacucaaaccu

SEQ ID NO: 350577 - RNA, 19 nt, Homo sapiens
  misc_RNA (1)...(19): siRNA sense strand
uuuaacaauugccugaauc

SEQ ID NO: 350578 - RNA, 19 nt, Homo sapiens
  misc_RNA (1)...(19): siRNA sense strand
acaaaccaagaaaugauga

SEQ ID NO: 350579 - RNA, 19 nt, Homo sapiens
  misc_RNA (1)...(19): siRNA sense strand
ucugaucauucuuacaagu

SEQ ID NO: 350580 - RNA, 19 nt, Homo sapiens
  misc_RNA (1)...(19): siRNA sense strand
gcgucaguuucaaccugua

SEQ ID NO: 350581 - RNA, 19 nt, Homo sapiens
  misc_RNA (1)...(19): siRNA sense strand
guuugugcuuuccauuaug

SEQ ID NO: 350582 - RNA, 19 nt, Homo sapiens
  misc_RNA (1)...(19): siRNA sense strand
gaacaccaauauuacaguu

SEQ ID NO: 350583 - RNA, 19 nt, Homo sapiens
  misc_RNA (1)...(19): siRNA sense strand
gaauaccgcuggcccuuug

SEQ ID NO: 350584 - RNA, 19 nt, Homo sapiens
  misc_RNA (1)...(19): siRNA sense strand
acucaaaccuuucaacaaa

SEQ ID NO: 350585 - RNA, 19 nt, Homo sapiens
  misc_RNA (1)...(19): siRNA sense strand
gaacaaaccaagaaaugau

SEQ ID NO: 350586 - RNA, 19 nt, Homo sapiens
  misc_RNA (1)...(19): siRNA sense strand
auacgugacuguagaauug

SEQ ID NO: 350587 - RNA, 19 nt, Homo sapiens
  misc_RNA (1)...(19): siRNA sense strand
caucauacgugacuguaga

SEQ ID NO: 350588 - RNA, 19 nt, Homo sapiens
  misc_RNA (1)...(19): siRNA sense strand
ccaagaugauugucccaaa

SEQ ID NO: 350589 - RNA, 19 nt, Homo sapiens
  misc_RNA (1)...(19): siRNA sense strand
uauacuggguuuccuguuu

SEQ ID NO: 350590 - RNA, 19 nt, Homo sapiens
  misc_RNA (1)...(19): siRNA sense strand
gcuauaauccaucgaaaug

SEQ ID NO: 350591 - RNA, 19 nt, Homo sapiens
  misc_RNA (1)...(19): siRNA sense strand
ugucaugauuccuacuuua

SEQ ID NO: 350592 - RNA, 19 nt, Homo sapiens
  misc_RNA (1)...(19): siRNA sense strand
gaagaacaaaccaagaaau

SEQ ID NO: 350593 - RNA, 19 nt, Homo sapiens
  misc_RNA (1)...(19): siRNA sense strand
aaagucaccugcaucauca

SEQ ID NO: 350594 - RNA, 19 nt, Homo sapiens
  misc_RNA (1)...(19): siRNA sense strand
ggugauagucauuuacuuu

SEQ ID NO: 350595 - RNA, 19 nt, Homo sapiens
  misc_RNA (1)...(19): siRNA sense strand
uggaaggcauaauuacaua

SEQ ID NO: 350596 - RNA, 19 nt, Homo sapiens
  misc_RNA (1)...(19): siRNA sense strand
gcuaguguguuucuacuca

SEQ ID NO: 350597 - RNA, 19 nt, Homo sapiens
  misc_RNA (1)...(19): siRNA sense strand
ccuguacgcuaguguguuu

SEQ ID NO: 350598 - RNA, 19 nt, Homo sapiens
  misc_RNA (1)...(19): siRNA sense strand
ucacgugucucagcauuga

SEQ ID NO: 350599 - RNA, 19 nt, Homo sapiens
  misc_RNA (1)...(19): siRNA sense strand
acaccaauauuacaguuug

SEQ ID NO: 350600 - RNA, 19 nt, Homo sapiens
  misc_RNA (1)...(19): siRNA sense strand
cuaaagaaggcuuaugaaa

SEQ ID NO: 350601 - RNA, 19 nt, Homo sapiens
  misc_RNA (1)...(19): siRNA sense strand
cagaagaacaaaccaagaa

SEQ ID NO: 350602 - RNA, 19 nt, Homo sapiens
  misc_RNA (1)...(19): siRNA sense strand
ucucaacucuucuacugaa

SEQ ID NO: 350603 - RNA, 19 nt, Homo sapiens
  misc_RNA (1)...(19): siRNA sense strand
caaagucaccugcaucauc

SEQ ID NO: 350604 - RNA, 19 nt, Homo sapiens
  misc_RNA (1)...(19): siRNA sense strand
uuacugacuuugccacuau

SEQ ID NO: 350605 - RNA, 19 nt, Homo sapiens
  misc_RNA (1)...(19): siRNA sense strand
ucaccugcaucaucauuug

SEQ ID NO: 350606 - RNA, 19 nt, Homo sapiens
  misc_RNA (1)...(19): siRNA sense strand
caagaugauugucccaaag

SEQ ID NO: 350607 - RNA, 19 nt, Homo sapiens
  misc_RNA (1)...(19): siRNA sense strand
cuacacagcuauggaauac

SEQ ID NO: 350608 - RNA, 19 nt, Homo sapiens
  misc_RNA (1)...(19): siRNA sense strand
auaugaagcugaagacugu

SEQ ID NO: 350609 - RNA, 19 nt, Homo sapiens
  misc_RNA (1)...(19): siRNA sense strand
gaaacagcuugguggugau

SEQ ID NO: 350610 - RNA, 19 nt, Homo sapiens
  misc_RNA (1)...(19): siRNA sense strand
aagcuggaaggcauaauua

SEQ ID NO: 350611 - RNA, 19 nt, Homo sapiens
  misc_RNA (1)...(19): siRNA sense strand
cagcuauaauccaucgaaa

SEQ ID NO: 350612 - RNA, 19 nt, Homo sapiens
  misc_RNA (1)...(19): siRNA sense strand
caugauuccuacuuuauac

SEQ ID NO: 350613 - RNA, 19 nt, Homo sapiens
  misc_RNA (1)...(19): siRNA sense strand
gaucgauaccuggcuauug

SEQ ID NO: 350614 - RNA, 19 nt, Homo sapiens
  misc_RNA (1)...(19): siRNA sense strand
ggaauaccgcuggcccuuu

SEQ ID NO: 350615 - RNA, 19 nt, Homo sapiens
  misc_RNA (1)...(19): siRNA sense strand
guaagcucauccaccaaga

SEQ ID NO: 350616 - RNA, 19 nt, Homo sapiens
  misc_RNA (1)...(19): siRNA sense strand
caguuugugcuuuccauua

SEQ ID NO: 350617 - RNA, 19 nt, Homo sapiens
  misc_RNA (1)...(19): siRNA sense strand
gcuggcccuuuggcaauua

SEQ ID NO: 350618 - RNA, 19 nt, Homo sapiens
  misc_RNA (1)...(19): siRNA sense strand
acuaugggcugucuacaca

SEQ ID NO: 350619 - RNA, 19 nt, Homo sapiens
  misc_RNA (1)...(19): siRNA sense strand
aaaucccacucaaaccuuu

SEQ ID NO: 350620 - RNA, 19 nt, Homo sapiens
  misc_RNA (1)...(19): siRNA sense strand
gcaauugugcuuuucuuuu

SEQ ID NO: 350621 - RNA, 19 nt, Homo sapiens
  misc_RNA (1)...(19): siRNA sense strand
aagaacaaaccaagaaaug

SEQ ID NO: 350622 - RNA, 19 nt, Homo sapiens
  misc_RNA (1)...(19): siRNA sense strand
ggaaggcauaauuacauau

SEQ ID NO: 350623 - RNA, 19 nt, Homo sapiens
  misc_RNA (1)...(19): siRNA sense strand
cuacugaagaugguauuaa

SEQ ID NO: 350624 - RNA, 19 nt, Homo sapiens
  misc_RNA (1)...(19): siRNA sense strand
gugggaauauuuggaaaca

SEQ ID NO: 350625 - RNA, 19 nt, Homo sapiens
  misc_RNA (1)...(19): siRNA sense strand
agaacaaaccaagaaauga

SEQ ID NO: 350626 - RNA, 19 nt, Homo sapiens
  misc_RNA (1)...(19): siRNA sense strand
gaaauucagaagaacaaac

SEQ ID NO: 350627 - RNA, 19 nt, Homo sapiens
  misc_RNA (1)...(19): siRNA sense strand
gacuguagaauugcagaua

SEQ ID NO: 350628 - RNA, 19 nt, Homo sapiens
  misc_RNA (1)...(19): siRNA sense strand
uggguuuccuguuuccuuu

SEQ ID NO: 350629 - RNA, 19 nt, Homo sapiens
  misc_RNA (1)...(19): siRNA sense strand
ccacucaaaccuuucaaca

SEQ ID NO: 350630 - RNA, 19 nt, Homo sapiens
  misc_RNA (1)...(19): siRNA sense strand
cuguagaauugcagauauu

SEQ ID NO: 350631 - RNA, 19 nt, Homo sapiens
  misc_RNA (1)...(19): siRNA sense strand
caccaaauauucacuuuuc

SEQ ID NO: 350632 - RNA, 19 nt, Homo sapiens
  misc_RNA (1)...(19): siRNA sense strand
aaagcuggaaggcauaauu

SEQ ID NO: 350633 - RNA, 19 nt, Homo sapiens
  misc_RNA (1)...(19): siRNA sense strand
ugagaacaccaauauuaca

SEQ ID NO: 350634 - RNA, 19 nt, Homo sapiens
  misc_RNA (1)...(19): siRNA sense strand
cagauaauguaagcucauc

SEQ ID NO: 350635 - RNA, 19 nt, Homo sapiens
  misc_RNA (1)...(19): siRNA sense strand
caaaucccacucaaaccuu

SEQ ID NO: 350636 - RNA, 19 nt, Homo sapiens
  misc_RNA (1)...(19): siRNA sense strand
agaagaacaaaccaagaaa

SEQ ID NO: 350637 - RNA, 19 nt, Homo sapiens
  misc_RNA (1)...(19): siRNA sense strand
uauuacaguuugugcuuuc

SEQ ID NO: 350638 - RNA, 19 nt, Homo sapiens
  misc_RNA (1)...(19): siRNA sense strand
gagaacaccaauauuacag

SEQ ID NO: 350639 - RNA, 19 nt, Homo sapiens
  misc_RNA (1)...(19): siRNA sense strand
guacgcuaguguguuucua

SEQ ID NO: 350640 - RNA, 19 nt, Homo sapiens
  misc_RNA (1)...(19): siRNA sense strand
gccaaagucaccugcauca

SEQ ID NO: 350641 - RNA, 19 nt, Homo sapiens
  misc_RNA (1)...(19): siRNA sense strand
ugguggugauagucauuua

SEQ ID NO: 350642 - RNA, 19 nt, Homo sapiens
  misc_RNA (1)...(19): siRNA sense strand
uagaauugcagauauugug

SEQ ID NO: 350643 - RNA, 19 nt, Homo sapiens
  misc_RNA (1)...(19): siRNA sense strand
acuguagaauugcagauau

SEQ ID NO: 350644 - RNA, 19 nt, Homo sapiens
  misc_RNA (1)...(19): siRNA sense strand
gauucaacuaggcaucaua

SEQ ID NO: 350645 - RNA, 19 nt, Homo sapiens
  misc_RNA (1)...(19): siRNA sense strand
gcuggaaggcauaauuaca

SEQ ID NO: 350646 - RNA, 19 nt, Homo sapiens
  misc_RNA (1)...(19): siRNA sense strand
aaacagcuugguggugaua

SEQ ID NO: 350647 - RNA, 19 nt, Homo sapiens
  misc_RNA (1)...(19): siRNA sense strand
auacuggguuuccuguuuc

SEQ ID NO: 350648 - RNA, 19 nt, Homo sapiens
  misc_RNA (1)...(19): siRNA sense strand
ccaaagcuggaaggcauaa

SEQ ID NO: 350649 - RNA, 19 nt, Homo sapiens
  misc_RNA (1)...(19): siRNA sense strand
cccaccaaauauucacuuu

SEQ ID NO: 350650 - RNA, 19 nt, Homo sapiens
  misc_RNA (1)...(19): siRNA sense strand
ucagaagaacaaaccaaga

SEQ ID NO: 350651 - RNA, 19 nt, Homo sapiens
  misc_RNA (1)...(19): siRNA sense strand
cauuaugagucccaaaauu

SEQ ID NO: 350652 - RNA, 19 nt, Homo sapiens
  misc_RNA (1)...(19): siRNA sense strand
aguuugugcuuuccauuau

SEQ ID NO: 350653 - RNA, 19 nt, Homo sapiens
  misc_RNA (1)...(19): siRNA sense strand
cauacgugacuguagaauu

SEQ ID NO: 350654 - RNA, 19 nt, Homo sapiens
  misc_RNA (1)...(19): siRNA sense strand
ucacuuuucuggauguauu

SEQ ID NO: 350655 - RNA, 19 nt, Homo sapiens
  misc_RNA (1)...(19): siRNA sense strand
cccuaaagaaggcuuauga

SEQ ID NO: 350656 - RNA, 19 nt, Homo sapiens
  misc_RNA (1)...(19): siRNA sense strand
uuugugcuuuccauuauga

SEQ ID NO: 350657 - RNA, 19 nt, Homo sapiens
  misc_RNA (1)...(19): siRNA sense strand
ucuacacagcuauggaaua

SEQ ID NO: 350658 - RNA, 19 nt, Homo sapiens
  misc_RNA (1)...(19): siRNA sense strand
gauaauguaagcucaucca

SEQ ID NO: 350659 - RNA, 19 nt, Homo sapiens
  misc_RNA (1)...(19): siRNA sense strand
ccuaaagaaggcuuaugaa

SEQ ID NO: 350660 - RNA, 19 nt, Homo sapiens
  misc_RNA (1)...(19): siRNA sense strand
ccaguuugccagcuauaau

SEQ ID NO: 350661 - RNA, 19 nt, Homo sapiens
  misc_RNA (1)...(19): siRNA sense strand
gucaugauuccuacuuuau

SEQ ID NO: 350662 - RNA, 19 nt, Homo sapiens
  misc_RNA (1)...(19): siRNA sense strand
auucucaacucuucuacug

SEQ ID NO: 350663 - RNA, 19 nt, Homo sapiens
  misc_RNA (1)...(19): siRNA sense strand
guagaauugcagauauugu

SEQ ID NO: 350664 - RNA, 19 nt, Homo sapiens
  misc_RNA (1)...(19): siRNA sense strand
ccagcuauaauccaucgaa

SEQ ID NO: 350665 - RNA, 19 nt, Homo sapiens
  misc_RNA (1)...(19): siRNA sense strand
aucgauaccuggcuauugu

SEQ ID NO: 350666 - RNA, 19 nt, Homo sapiens
  misc_RNA (1)...(19): siRNA sense strand
acucacgugucucagcauu

SEQ ID NO: 350667 - RNA, 19 nt, Homo sapiens
  misc_RNA (1)...(19): siRNA sense strand
aagaaggcuuaugaaauuc

SEQ ID NO: 350668 - RNA, 19 nt, Homo sapiens
  misc_RNA (1)...(19): siRNA sense strand
ucucagcauugaucgauac

SEQ ID NO: 350669 - RNA, 19 nt, Homo sapiens
  misc_RNA (1)...(19): siRNA sense strand
uagccaaagucaccugcau

SEQ ID NO: 350670 - RNA, 19 nt, Homo sapiens
  misc_RNA (1)...(19): siRNA sense strand
gaauauuuggaaacagcuu

SEQ ID NO: 350671 - RNA, 19 nt, Homo sapiens
  misc_RNA (1)...(19): siRNA sense strand
uuuggaaggcccuaaagaa

SEQ ID NO: 350672 - RNA, 19 nt, Homo sapiens
  misc_RNA (1)...(19): siRNA sense strand
gggcugggccugaccaaaa

SEQ ID NO: 350673 - RNA, 19 nt, Homo sapiens
  misc_RNA (1)...(19): siRNA sense strand
gauuccuacuuuauacagu

SEQ ID NO: 350674 - RNA, 19 nt, Homo sapiens
  misc_RNA (1)...(19): siRNA sense strand
uaagcucauccaccaagaa

SEQ ID NO: 350675 - RNA, 19 nt, Homo sapiens
  misc_RNA (1)...(19): siRNA sense strand
ccaaaucccacucaaaccu

SEQ ID NO: 350676 - RNA, 19 nt, Homo sapiens
  misc_RNA (1)...(19): siRNA sense strand
uuuaacaauugccugaauc

SEQ ID NO: 350677 - RNA, 19 nt, Homo sapiens
  misc_RNA (1)...(19): siRNA sense strand
acaaaccaagaaaugauga

SEQ ID NO: 350678 - RNA, 19 nt, Homo sapiens
  misc_RNA (1)...(19): siRNA sense strand
ucugaucauucuuacaagu

SEQ ID NO: 350679 - RNA, 19 nt, Homo sapiens
  misc_RNA (1)...(19): siRNA sense strand
gcgucaguuucaaccugua

SEQ ID NO: 350680 - RNA, 19 nt, Homo sapiens
  misc_RNA (1)...(19): siRNA sense strand
guuugugcuuuccauuaug

SEQ ID NO: 350681 - RNA, 19 nt, Homo sapiens
  misc_RNA (1)...(19): siRNA sense strand
gaacaccaauauuacaguu

SEQ ID NO: 350682 - RNA, 19 nt, Homo sapiens
  misc_RNA (1)...(19): siRNA sense strand
gaauaccgcuggcccuuug

SEQ ID NO: 350683 - RNA, 19 nt, Homo sapiens
  misc_RNA (1)...(19): siRNA sense strand
acucaaaccuuucaacaaa

SEQ ID NO: 350684 - RNA, 19 nt, Homo sapiens
  misc_RNA (1)...(19): siRNA sense strand
gaacaaaccaagaaaugau

SEQ ID NO: 350685 - RNA, 19 nt, Homo sapiens
  misc_RNA (1)...(19): siRNA sense strand
auacgugacuguagaauug

SEQ ID NO: 350686 - RNA, 19 nt, Homo sapiens
  misc_RNA (1)...(19): siRNA sense strand
caucauacgugacuguaga

SEQ ID NO: 350687 - RNA, 19 nt, Homo sapiens
  misc_RNA (1)...(19): siRNA sense strand
ccaagaugauugucccaaa

SEQ ID NO: 350688 - RNA, 19 nt, Homo sapiens
  misc_RNA (1)...(19): siRNA sense strand
uauacuggguuuccuguuu

SEQ ID NO: 350689 - RNA, 19 nt, Homo sapiens
  misc_RNA (1)...(19): siRNA sense strand
gcuauaauccaucgaaaug

SEQ ID NO: 350690 - RNA, 19 nt, Homo sapiens
  misc_RNA (1)...(19): siRNA sense strand
ugucaugauuccuacuuua

SEQ ID NO: 350691 - RNA, 19 nt, Homo sapiens
  misc_RNA (1)...(19): siRNA sense strand
gaagaacaaaccaagaaau

SEQ ID NO: 350692 - RNA, 19 nt, Homo sapiens
  misc_RNA (1)...(19): siRNA sense strand
aaagucaccugcaucauca

SEQ ID NO: 350693 - RNA, 19 nt, Homo sapiens
  misc_RNA (1)...(19): siRNA sense strand
ggugauagucauuuacuuu

SEQ ID NO: 350694 - RNA, 19 nt, Homo sapiens
  misc_RNA (1)...(19): siRNA sense strand
uggaaggcauaauuacaua

SEQ ID NO: 350695 - RNA, 19 nt, Homo sapiens
  misc_RNA (1)...(19): siRNA sense strand
gcuaguguguuucuacuca

SEQ ID NO: 350696 - RNA, 19 nt, Homo sapiens
  misc_RNA (1)...(19): siRNA sense strand
ccuguacgcuaguguguuu

SEQ ID NO: 350697 - RNA, 19 nt, Homo sapiens
  misc_RNA (1)...(19): siRNA sense strand
ucacgugucucagcauuga

SEQ ID NO: 350698 - RNA, 19 nt, Homo sapiens
  misc_RNA (1)...(19): siRNA sense strand
acaccaauauuacaguuug

SEQ ID NO: 350699 - RNA, 19 nt, Homo sapiens
  misc_RNA (1)...(19): siRNA sense strand
cuaaagaaggcuuaugaaa

SEQ ID NO: 350700 - RNA, 19 nt, Homo sapiens
  misc_RNA (1)...(19): siRNA sense strand
cagaagaacaaaccaagaa

SEQ ID NO: 350701 - RNA, 19 nt, Homo sapiens
  misc_RNA (1)...(19): siRNA sense strand
ucucaacucuucuacugaa

SEQ ID NO: 350702 - RNA, 19 nt, Homo sapiens
  misc_RNA (1)...(19): siRNA sense strand
caaagucaccugcaucauc

SEQ ID NO: 350703 - RNA, 19 nt, Homo sapiens
  misc_RNA (1)...(19): siRNA sense strand
uuacugacuuugccacuau

SEQ ID NO: 350704 - RNA, 19 nt, Homo sapiens
  misc_RNA (1)...(19): siRNA sense strand
ucaccugcaucaucauuug

SEQ ID NO: 350705 - RNA, 19 nt, Homo sapiens
  misc_RNA (1)...(19): siRNA sense strand
caagaugauugucccaaag

SEQ ID NO: 350706 - RNA, 19 nt, Homo sapiens
  misc_RNA (1)...(19): siRNA sense strand
cuacacagcuauggaauac

SEQ ID NO: 350707 - RNA, 19 nt, Homo sapiens
  misc_RNA (1)...(19): siRNA sense strand
auaugaagcugaagacugu

SEQ ID NO: 350708 - RNA, 19 nt, Homo sapiens
  misc_RNA (1)...(19): siRNA sense strand
gaaacagcuugguggugau

SEQ ID NO: 350709 - RNA, 19 nt, Homo sapiens
  misc_RNA (1)...(19): siRNA sense strand
aagcuggaaggcauaauua

SEQ ID NO: 350710 - RNA, 19 nt, Homo sapiens
  misc_RNA (1)...(19): siRNA sense strand
cagcuauaauccaucgaaa

SEQ ID NO: 350711 - RNA, 19 nt, Homo sapiens
  misc_RNA (1)...(19): siRNA sense strand
caugauuccuacuuuauac

SEQ ID NO: 350712 - RNA, 19 nt, Homo sapiens
  misc_RNA (1)...(19): siRNA sense strand
gaucgauaccuggcuauug

SEQ ID NO: 350713 - RNA, 19 nt, Homo sapiens
  misc_RNA (1)...(19): siRNA sense strand
ggaauaccgcuggcccuuu

SEQ ID NO: 350714 - RNA, 19 nt, Homo sapiens
  misc_RNA (1)...(19): siRNA sense strand
guaagcucauccaccaaga

SEQ ID NO: 350715 - RNA, 19 nt, Homo sapiens
  misc_RNA (1)...(19): siRNA sense strand
caguuugugcuuuccauua

SEQ ID NO: 350716 - RNA, 19 nt, Homo sapiens
  misc_RNA (1)...(19): siRNA sense strand
gcuggcccuuuggcaauua

SEQ ID NO: 350717 - RNA, 19 nt, Homo sapiens
  misc_RNA (1)...(19): siRNA sense strand
acuaugggcugucuacaca

SEQ ID NO: 350718 - RNA, 19 nt, Homo sapiens
  misc_RNA (1)...(19): siRNA sense strand
aaaucccacucaaaccuuu

SEQ ID NO: 350719 - RNA, 19 nt, Homo sapiens
  misc_RNA (1)...(19): siRNA sense strand
gcaauugugcuuuucuuuu

SEQ ID NO: 350720 - RNA, 19 nt, Homo sapiens
  misc_RNA (1)...(19): siRNA sense strand
aagaacaaaccaagaaaug

SEQ ID NO: 350721 - RNA, 19 nt, Homo sapiens
  misc_RNA (1)...(19): siRNA sense strand
ggaaggcauaauuacauau

SEQ ID NO: 350722 - RNA, 19 nt, Homo sapiens
  misc_RNA (1)...(19): siRNA sense strand
cuacugaagaugguauuaa

SEQ ID NO: 350723 - RNA, 19 nt, Homo sapiens
  misc_RNA (1)...(19): siRNA sense strand
gugggaauauuuggaaaca

SEQ ID NO: 350724 - RNA, 19 nt, Homo sapiens
  misc_RNA (1)...(19): siRNA sense strand
agaacaaaccaagaaauga

SEQ ID NO: 350725 - RNA, 19 nt, Homo sapiens
  misc_RNA (1)...(19): siRNA sense strand
gaaauucagaagaacaaac

SEQ ID NO: 350726 - RNA, 19 nt, Homo sapiens
  misc_RNA (1)...(19): siRNA sense strand
gacuguagaauugcagaua

SEQ ID NO: 350727 - RNA, 19 nt, Homo sapiens
  misc_RNA (1)...(19): siRNA sense strand
uggguuuccuguuuccuuu

SEQ ID NO: 350728 - RNA, 19 nt, Homo sapiens
  misc_RNA (1)...(19): siRNA sense strand
ccacucaaaccuuucaaca

SEQ ID NO: 350729 - RNA, 19 nt, Homo sapiens
  misc_RNA (1)...(19): siRNA sense strand
cuguagaauugcagauauu

SEQ ID NO: 350730 - RNA, 19 nt, Homo sapiens
  misc_RNA (1)...(19): siRNA sense strand
caccaaauauucacuuuuc

SEQ ID NO: 350731 - RNA, 19 nt, Homo sapiens
  misc_RNA (1)...(19): siRNA sense strand
aaagcuggaaggcauaauu

SEQ ID NO: 350732 - RNA, 19 nt, Homo sapiens
  misc_RNA (1)...(19): siRNA sense strand
ugagaacaccaauauuaca

SEQ ID NO: 350733 - RNA, 19 nt, Homo sapiens
  misc_RNA (1)...(19): siRNA sense strand
cagauaauguaagcucauc

SEQ ID NO: 350734 - RNA, 19 nt, Homo sapiens
  misc_RNA (1)...(19): siRNA sense strand
caaaucccacucaaaccuu

SEQ ID NO: 350735 - RNA, 19 nt, Homo sapiens
  misc_RNA (1)...(19): siRNA sense strand
agaagaacaaaccaagaaa

SEQ ID NO: 350736 - RNA, 19 nt, Homo sapiens
  misc_RNA (1)...(19): siRNA sense strand
uauuacaguuugugcuuuc

SEQ ID NO: 350737 - RNA, 19 nt, Homo sapiens
  misc_RNA (1)...(19): siRNA sense strand
gagaacaccaauauuacag

SEQ ID NO: 350738 - RNA, 19 nt, Homo sapiens
  misc_RNA (1)...(19): siRNA sense strand
guacgcuaguguguuucua

SEQ ID NO: 350739 - RNA, 19 nt, Homo sapiens
  misc_RNA (1)...(19): siRNA sense strand
gccaaagucaccugcauca

SEQ ID NO: 350740 - RNA, 19 nt, Homo sapiens
  misc_RNA (1)...(19): siRNA sense strand
ugguggugauagucauuua

SEQ ID NO: 350741 - RNA, 19 nt, Homo sapiens
  misc_RNA (1)...(19): siRNA sense strand
uagaauugcagauauugug

SEQ ID NO: 350742 - RNA, 19 nt, Homo sapiens
  misc_RNA (1)...(19): siRNA sense strand
acuguagaauugcagauau

SEQ ID NO: 350743 - RNA, 19 nt, Homo sapiens
  misc_RNA (1)...(19): siRNA sense strand
gauucaacuaggcaucaua

SEQ ID NO: 350744 - RNA, 19 nt, Homo sapiens
  misc_RNA (1)...(19): siRNA sense strand
gcuggaaggcauaauuaca

SEQ ID NO: 350745 - RNA, 19 nt, Homo sapiens
  misc_RNA (1)...(19): siRNA sense strand
aaacagcuugguggugaua

SEQ ID NO: 350746 - RNA, 19 nt, Homo sapiens
  misc_RNA (1)...(19): siRNA sense strand
auacuggguuuccuguuuc

SEQ ID NO: 350747 - RNA, 19 nt, Homo sapiens
  misc_RNA (1)...(19): siRNA sense strand
ccaaagcuggaaggcauaa

SEQ ID NO: 350748 - RNA, 19 nt, Homo sapiens
  misc_RNA (1)...(19): siRNA sense strand
cccaccaaauauucacuuu

SEQ ID NO: 350749 - RNA, 19 nt, Homo sapiens
  misc_RNA (1)...(19): siRNA sense strand
ucagaagaacaaaccaaga

SEQ ID NO: 350750 - RNA, 19 nt, Homo sapiens
  misc_RNA (1)...(19): siRNA sense strand
cauuaugagucccaaaauu

SEQ ID NO: 350751 - RNA, 19 nt, Homo sapiens
  misc_RNA (1)...(19): siRNA sense strand
aguuugugcuuuccauuau

SEQ ID NO: 350752 - RNA, 19 nt, Homo sapiens
  misc_RNA (1)...(19): siRNA sense strand
cauacgugacuguagaauu

SEQ ID NO: 350753 - RNA, 19 nt, Homo sapiens
  misc_RNA (1)...(19): siRNA sense strand
ucacuuuucuggauguauu

SEQ ID NO: 350754 - RNA, 19 nt, Homo sapiens
  misc_RNA (1)...(19): siRNA sense strand
cccuaaagaaggcuuauga

SEQ ID NO: 350755 - RNA, 19 nt, Homo sapiens
  misc_RNA (1)...(19): siRNA sense strand
uuugugcuuuccauuauga

SEQ ID NO: 350756 - RNA, 19 nt, Homo sapiens
  misc_RNA (1)...(19): siRNA sense strand
ucuacacagcuauggaaua

SEQ ID NO: 350757 - RNA, 19 nt, Homo sapiens
  misc_RNA (1)...(19): siRNA sense strand
gauaauguaagcucaucca

SEQ ID NO: 350758 - RNA, 19 nt, Homo sapiens
  misc_RNA (1)...(19): siRNA sense strand
ccuaaagaaggcuuaugaa

SEQ ID NO: 350759 - RNA, 19 nt, Homo sapiens
  misc_RNA (1)...(19): siRNA sense strand
ccaguuugccagcuauaau

SEQ ID NO: 350760 - RNA, 19 nt, Homo sapiens
  misc_RNA (1)...(19): siRNA sense strand
gucaugauuccuacuuuau

SEQ ID NO: 350761 - RNA, 19 nt, Homo sapiens
  misc_RNA (1)...(19): siRNA sense strand
auucucaacucuucuacug

SEQ ID NO: 350762 - RNA, 19 nt, Homo sapiens
  misc_RNA (1)...(19): siRNA sense strand
guagaauugcagauauugu

SEQ ID NO: 350763 - RNA, 19 nt, Homo sapiens
  misc_RNA (1)...(19): siRNA sense strand
ccagcuauaauccaucgaa

SEQ ID NO: 350764 - RNA, 19 nt, Homo sapiens
  misc_RNA (1)...(19): siRNA sense strand
aucgauaccuggcuauugu

SEQ ID NO: 350765 - RNA, 19 nt, Homo sapiens
  misc_RNA (1)...(19): siRNA sense strand
acucacgugucucagcauu

SEQ ID NO: 350766 - RNA, 19 nt, Homo sapiens
  misc_RNA (1)...(19): siRNA sense strand
aagaaggcuuaugaaauuc

SEQ ID NO: 350767 - RNA, 19 nt, Homo sapiens
  misc_RNA (1)...(19): siRNA sense strand
ucucagcauugaucgauac

SEQ ID NO: 350768 - RNA, 19 nt, Homo sapiens
  misc_RNA (1)...(19): siRNA sense strand
uagccaaagucaccugcau

SEQ ID NO: 350769 - RNA, 19 nt, Homo sapiens
  misc_RNA (1)...(19): siRNA sense strand
gaauauuuggaaacagcuu

SEQ ID NO: 350770 - RNA, 19 nt, Homo sapiens
  misc_RNA (1)...(19): siRNA sense strand
uuuggaaggcccuaaagaa

SEQ ID NO: 350771 - RNA, 19 nt, Homo sapiens
  misc_RNA (1)...(19): siRNA sense strand
gggcugggccugaccaaaa

SEQ ID NO: 350772 - RNA, 19 nt, Homo sapiens
  misc_RNA (1)...(19): siRNA sense strand
gauuccuacuuuauacagu

SEQ ID NO: 350773 - RNA, 19 nt, Homo sapiens
  misc_RNA (1)...(19): siRNA sense strand
uaagcucauccaccaagaa

SEQ ID NO: 350774 - RNA, 19 nt, Homo sapiens
  misc_RNA (1)...(19): siRNA sense strand
ccaaaucccacucaaaccu

SEQ ID NO: 350775 - RNA, 19 nt, Homo sapiens
  misc_RNA (1)...(19): siRNA sense strand
uuuaacaauugccugaauc

SEQ ID NO: 350776 - RNA, 19 nt, Homo sapiens
  misc_RNA (1)...(19): siRNA sense strand
acaaaccaagaaaugauga

SEQ ID NO: 350777 - RNA, 19 nt, Homo sapiens
  misc_RNA (1)...(19): siRNA sense strand
ucugaucauucuuacaagu

SEQ ID NO: 350778 - RNA, 19 nt, Homo sapiens
  misc_RNA (1)...(19): siRNA sense strand
gcgucaguuucaaccugua

SEQ ID NO: 350779 - RNA, 19 nt, Homo sapiens
  misc_RNA (1)...(19): siRNA sense strand
guuugugcuuuccauuaug

SEQ ID NO: 350780 - RNA, 19 nt, Homo sapiens
  misc_RNA (1)...(19): siRNA sense strand
gaacaccaauauuacaguu

SEQ ID NO: 350781 - RNA, 19 nt, Homo sapiens
  misc_RNA (1)...(19): siRNA sense strand
gaauaccgcuggcccuuug

SEQ ID NO: 350782 - RNA, 19 nt, Homo sapiens
  misc_RNA (1)...(19): siRNA sense strand
acucaaaccuuucaacaaa

SEQ ID NO: 350783 - RNA, 19 nt, Homo sapiens
  misc_RNA (1)...(19): siRNA sense strand
gaacaaaccaagaaaugau

SEQ ID NO: 350784 - RNA, 19 nt, Homo sapiens
  misc_RNA (1)...(19): siRNA sense strand
auacgugacuguagaauug

SEQ ID NO: 350785 - RNA, 19 nt, Homo sapiens
  misc_RNA (1)...(19): siRNA sense strand
caucauacgugacuguaga

SEQ ID NO: 350786 - RNA, 19 nt, Homo sapiens
  misc_RNA (1)...(19): siRNA sense strand
ccaagaugauugucccaaa

SEQ ID NO: 350787 - RNA, 19 nt, Homo sapiens
  misc_RNA (1)...(19): siRNA sense strand
uauacuggguuuccuguuu

SEQ ID NO: 350788 - RNA, 19 nt, Homo sapiens
  misc_RNA (1)...(19): siRNA sense strand
gcuauaauccaucgaaaug

SEQ ID NO: 350789 - RNA, 19 nt, Homo sapiens
  misc_RNA (1)...(19): siRNA sense strand
ugucaugauuccuacuuua

SEQ ID NO: 350790 - RNA, 19 nt, Homo sapiens
  misc_RNA (1)...(19): siRNA sense strand
gaagaacaaaccaagaaau

SEQ ID NO: 350791 - RNA, 19 nt, Homo sapiens
  misc_RNA (1)...(19): siRNA sense strand
aaagucaccugcaucauca

SEQ ID NO: 350792 - RNA, 19 nt, Homo sapiens
  misc_RNA (1)...(19): siRNA sense strand
ggugauagucauuuacuuu

SEQ ID NO: 350793 - RNA, 19 nt, Homo sapiens
  misc_RNA (1)...(19): siRNA sense strand
uggaaggcauaauuacaua

SEQ ID NO: 350794 - RNA, 19 nt, Homo sapiens
  misc_RNA (1)...(19): siRNA sense strand
gcuaguguguuucuacuca

SEQ ID NO: 350795 - RNA, 19 nt, Homo sapiens
  misc_RNA (1)...(19): siRNA sense strand
ccuguacgcuaguguguuu

SEQ ID NO: 350796 - RNA, 19 nt, Homo sapiens
  misc_RNA (1)...(19): siRNA sense strand
ucacgugucucagcauuga

SEQ ID NO: 350797 - RNA, 19 nt, Homo sapiens
  misc_RNA (1)...(19): siRNA sense strand
acaccaauauuacaguuug

SEQ ID NO: 350798 - RNA, 19 nt, Homo sapiens
  misc_RNA (1)...(19): siRNA sense strand
cuaaagaaggcuuaugaaa

SEQ ID NO: 350799 - RNA, 19 nt, Homo sapiens
  misc_RNA (1)...(19): siRNA sense strand
cagaagaacaaaccaagaa

SEQ ID NO: 350800 - RNA, 19 nt, Homo sapiens
  misc_RNA (1)...(19): siRNA sense strand
ucucaacucuucuacugaa

SEQ ID NO: 350801 - RNA, 19 nt, Homo sapiens
  misc_RNA (1)...(19): siRNA sense strand
caaagucaccugcaucauc

SEQ ID NO: 350802 - RNA, 19 nt, Homo sapiens
  misc_RNA (1)...(19): siRNA sense strand
uuacugacuuugccacuau

SEQ ID NO: 350803 - RNA, 19 nt, Homo sapiens
  misc_RNA (1)...(19): siRNA sense strand
ucaccugcaucaucauuug

SEQ ID NO: 350804 - RNA, 19 nt, Homo sapiens
  misc_RNA (1)...(19): siRNA sense strand
caagaugauugucccaaag

SEQ ID NO: 350805 - RNA, 19 nt, Homo sapiens
  misc_RNA (1)...(19): siRNA sense strand
cuacacagcuauggaauac

SEQ ID NO: 350806 - RNA, 19 nt, Homo sapiens
  misc_RNA (1)...(19): siRNA sense strand
auaugaagcugaagacugu

SEQ ID NO: 350807 - RNA, 19 nt, Homo sapiens
  misc_RNA (1)...(19): siRNA sense strand
gaaacagcuugguggugau

SEQ ID NO: 350808 - RNA, 19 nt, Homo sapiens
  misc_RNA (1)...(19): siRNA sense strand
aagcuggaaggcauaauua

SEQ ID NO: 350809 - RNA, 19 nt, Homo sapiens
  misc_RNA (1)...(19): siRNA sense strand
cagcuauaauccaucgaaa

SEQ ID NO: 350810 - RNA, 19 nt, Homo sapiens
  misc_RNA (1)...(19): siRNA sense strand
caugauuccuacuuuauac

SEQ ID NO: 350811 - RNA, 19 nt, Homo sapiens
  misc_RNA (1)...(19): siRNA sense strand
gaucgauaccuggcuauug

SEQ ID NO: 350812 - RNA, 19 nt, Homo sapiens
  misc_RNA (1)...(19): siRNA sense strand
ggaauaccgcuggcccuuu

SEQ ID NO: 350813 - RNA, 19 nt, Homo sapiens
  misc_RNA (1)...(19): siRNA sense strand
guaagcucauccaccaaga

SEQ ID NO: 350814 - RNA, 19 nt, Homo sapiens
  misc_RNA (1)...(19): siRNA sense strand
caguuugugcuuuccauua

SEQ ID NO: 350815 - RNA, 19 nt, Homo sapiens
  misc_RNA (1)...(19): siRNA sense strand
gcuggcccuuuggcaauua

SEQ ID NO: 350816 - RNA, 19 nt, Homo sapiens
  misc_RNA (1)...(19): siRNA sense strand
acuaugggcugucuacaca

SEQ ID NO: 350817 - RNA, 19 nt, Homo sapiens
  misc_RNA (1)...(19): siRNA sense strand
aaaucccacucaaaccuuu

SEQ ID NO: 350818 - RNA, 19 nt, Homo sapiens
  misc_RNA (1)...(19): siRNA sense strand
gcaauugugcuuuucuuuu

SEQ ID NO: 350819 - RNA, 19 nt, Homo sapiens
  misc_RNA (1)...(19): siRNA sense strand
aagaacaaaccaagaaaug

SEQ ID NO: 350820 - RNA, 19 nt, Homo sapiens
  misc_RNA (1)...(19): siRNA sense strand
ggaaggcauaauuacauau

SEQ ID NO: 350821 - RNA, 19 nt, Homo sapiens
  misc_RNA (1)...(19): siRNA sense strand
cuacugaagaugguauuaa

SEQ ID NO: 350822 - RNA, 19 nt, Homo sapiens
  misc_RNA (1)...(19): siRNA sense strand
gugggaauauuuggaaaca

SEQ ID NO: 350823 - RNA, 19 nt, Homo sapiens
  misc_RNA (1)...(19): siRNA sense strand
agaacaaaccaagaaauga

SEQ ID NO: 350824 - RNA, 19 nt, Homo sapiens
  misc_RNA (1)...(19): siRNA sense strand
gaaauucagaagaacaaac

SEQ ID NO: 350825 - RNA, 19 nt, Homo sapiens
  misc_RNA (1)...(19): siRNA sense strand
gacuguagaauugcagaua

SEQ ID NO: 350826 - RNA, 19 nt, Homo sapiens
  misc_RNA (1)...(19): siRNA sense strand
uggguuuccuguuuccuuu

SEQ ID NO: 350827 - RNA, 19 nt, Homo sapiens
  misc_RNA (1)...(19): siRNA sense strand
ccacucaaaccuuucaaca

SEQ ID NO: 350828 - RNA, 19 nt, Homo sapiens
  misc_RNA (1)...(19): siRNA sense strand
cuguagaauugcagauauu

SEQ ID NO: 350829 - RNA, 19 nt, Homo sapiens
  misc_RNA (1)...(19): siRNA sense strand
caccaaauauucacuuuuc

SEQ ID NO: 350830 - RNA, 19 nt, Homo sapiens
  misc_RNA (1)...(19): siRNA sense strand
aaagcuggaaggcauaauu

SEQ ID NO: 350831 - RNA, 19 nt, Homo sapiens
  misc_RNA (1)...(19): siRNA sense strand
ugagaacaccaauauuaca

SEQ ID NO: 350832 - RNA, 19 nt, Homo sapiens
  misc_RNA (1)...(19): siRNA sense strand
cagauaauguaagcucauc

SEQ ID NO: 350833 - RNA, 19 nt, Homo sapiens
  misc_RNA (1)...(19): siRNA sense strand
caaaucccacucaaaccuu

SEQ ID NO: 350834 - RNA, 19 nt, Homo sapiens
  misc_RNA (1)...(19): siRNA sense strand
agaagaacaaaccaagaaa

SEQ ID NO: 350835 - RNA, 19 nt, Homo sapiens
  misc_RNA (1)...(19): siRNA sense strand
uauuacaguuugugcuuuc

SEQ ID NO: 350836 - RNA, 19 nt, Homo sapiens
  misc_RNA (1)...(19): siRNA sense strand
gagaacaccaauauuacag

SEQ ID NO: 350837 - RNA, 19 nt, Homo sapiens
  misc_RNA (1)...(19): siRNA sense strand
guacgcuaguguguuucua

SEQ ID NO: 350838 - RNA, 19 nt, Homo sapiens
  misc_RNA (1)...(19): siRNA sense strand
gccaaagucaccugcauca

SEQ ID NO: 350839 - RNA, 19 nt, Homo sapiens
  misc_RNA (1)...(19): siRNA sense strand
ugguggugauagucauuua

SEQ ID NO: 350840 - RNA, 19 nt, Homo sapiens
  misc_RNA (1)...(19): siRNA sense strand
uagaauugcagauauugug

SEQ ID NO: 350841 - RNA, 19 nt, Homo sapiens
  misc_RNA (1)...(19): siRNA sense strand
acuguagaauugcagauau

SEQ ID NO: 350842 - RNA, 19 nt, Homo sapiens
  misc_RNA (1)...(19): siRNA sense strand
gauucaacuaggcaucaua

SEQ ID NO: 350843 - RNA, 19 nt, Homo sapiens
  misc_RNA (1)...(19): siRNA sense strand
gcuggaaggcauaauuaca

SEQ ID NO: 350844 - RNA, 19 nt, Homo sapiens
  misc_RNA (1)...(19): siRNA sense strand
aaacagcuugguggugaua

SEQ ID NO: 350845 - RNA, 19 nt, Homo sapiens
  misc_RNA (1)...(19): siRNA sense strand
auacuggguuuccuguuuc

SEQ ID NO: 350846 - RNA, 19 nt, Homo sapiens
  misc_RNA (1)...(19): siRNA sense strand
ccaaagcuggaaggcauaa

SEQ ID NO: 350847 - RNA, 19 nt, Homo sapiens
  misc_RNA (1)...(19): siRNA sense strand
cccaccaaauauucacuuu

SEQ ID NO: 350848 - RNA, 19 nt, Homo sapiens
  misc_RNA (1)...(19): siRNA sense strand
ucagaagaacaaaccaaga

SEQ ID NO: 350849 - RNA, 19 nt, Homo sapiens
  misc_RNA (1)...(19): siRNA sense strand
cauuaugagucccaaaauu

SEQ ID NO: 350850 - RNA, 19 nt, Homo sapiens
  misc_RNA (1)...(19): siRNA sense strand
aguuugugcuuuccauuau

SEQ ID NO: 350851 - RNA, 19 nt, Homo sapiens
  misc_RNA (1)...(19): siRNA sense strand
cauacgugacuguagaauu

SEQ ID NO: 350852 - RNA, 19 nt, Homo sapiens
  misc_RNA (1)...(19): siRNA sense strand
ucacuuuucuggauguauu

SEQ ID NO: 350853 - RNA, 19 nt, Homo sapiens
  misc_RNA (1)...(19): siRNA sense strand
cccuaaagaaggcuuauga

SEQ ID NO: 350854 - RNA, 19 nt, Homo sapiens
  misc_RNA (1)...(19): siRNA sense strand
uuugugcuuuccauuauga

SEQ ID NO: 350855 - RNA, 19 nt, Homo sapiens
  misc_RNA (1)...(19): siRNA sense strand
ucuacacagcuauggaaua

SEQ ID NO: 350856 - RNA, 19 nt, Homo sapiens
  misc_RNA (1)...(19): siRNA sense strand
gauaauguaagcucaucca

SEQ ID NO: 350857 - RNA, 19 nt, Homo sapiens
  misc_RNA (1)...(19): siRNA sense strand
ccuaaagaaggcuuaugaa

SEQ ID NO: 350858 - RNA, 19 nt, Homo sapiens
  misc_RNA (1)...(19): siRNA sense strand
ccaguuugccagcuauaau

SEQ ID NO: 350859 - RNA, 19 nt, Homo sapiens
  misc_RNA (1)...(19): siRNA sense strand
gucaugauuccuacuuuau

SEQ ID NO: 350860 - RNA, 19 nt, Homo sapiens
  misc_RNA (1)...(19): siRNA sense strand
auucucaacucuucuacug

SEQ ID NO: 350861 - RNA, 19 nt, Homo sapiens
  misc_RNA (1)...(19): siRNA sense strand
guagaauugcagauauugu

SEQ ID NO: 350862 - RNA, 19 nt, Homo sapiens
  misc_RNA (1)...(19): siRNA sense strand
ccagcuauaauccaucgaa

SEQ ID NO: 350863 - RNA, 19 nt, Homo sapiens
  misc_RNA (1)...(19): siRNA sense strand
aucgauaccuggcuauugu

SEQ ID NO: 350864 - RNA, 19 nt, Homo sapiens
  misc_RNA (1)...(19): siRNA sense strand
acucacgugucucagcauu

SEQ ID NO: 350865 - RNA, 19 nt, Homo sapiens
  misc_RNA (1)...(19): siRNA sense strand
aagaaggcuuaugaaauuc

SEQ ID NO: 350866 - RNA, 19 nt, Homo sapiens
  misc_RNA (1)...(19): siRNA sense strand
ucucagcauugaucgauac

SEQ ID NO: 350867 - RNA, 19 nt, Homo sapiens
  misc_RNA (1)...(19): siRNA sense strand
uagccaaagucaccugcau

SEQ ID NO: 350868 - RNA, 19 nt, Homo sapiens
  misc_RNA (1)...(19): siRNA sense strand
gaauauuuggaaacagcuu

SEQ ID NO: 350869 - RNA, 19 nt, Homo sapiens
  misc_RNA (1)...(19): siRNA sense strand
uuuggaaggcccuaaagaa

SEQ ID NO: 350870 - RNA, 19 nt, Homo sapiens
  misc_RNA (1)...(19): siRNA sense strand
gggcugggccugaccaaaa

SEQ ID NO: 350871 - RNA, 19 nt, Homo sapiens
  misc_RNA (1)...(19): siRNA sense strand
gauuccuacuuuauacagu

SEQ ID NO: 350872 - RNA, 19 nt, Homo sapiens
  misc_RNA (1)...(19): siRNA sense strand
uaagcucauccaccaagaa

SEQ ID NO: 350873 - RNA, 19 nt, Homo sapiens
  misc_RNA (1)...(19): siRNA sense strand
ccaaaucccacucaaaccu

SEQ ID NO: 350874 - RNA, 19 nt, Homo sapiens
  misc_RNA (1)...(19): siRNA sense strand
uuuaacaauugccugaauc

SEQ ID NO: 350875 - RNA, 19 nt, Homo sapiens
  misc_RNA (1)...(19): siRNA sense strand
acaaaccaagaaaugauga

SEQ ID NO: 350876 - RNA, 19 nt, Homo sapiens
  misc_RNA (1)...(19): siRNA sense strand
ucugaucauucuuacaagu

SEQ ID NO: 350877 - RNA, 19 nt, Homo sapiens
  misc_RNA (1)...(19): siRNA sense strand
gcgucaguuucaaccugua

SEQ ID NO: 350878 - RNA, 19 nt, Homo sapiens
  misc_RNA (1)...(19): siRNA sense strand
guuugugcuuuccauuaug

SEQ ID NO: 350879 - RNA, 19 nt, Homo sapiens
  misc_RNA (1)...(19): siRNA sense strand
gaacacauggaguauauua

SEQ ID NO: 350880 - RNA, 19 nt, Homo sapiens
  misc_RNA (1)...(19): siRNA sense strand
gaagauauguccccauuua

SEQ ID NO: 350881 - RNA, 19 nt, Homo sapiens
  misc_RNA (1)...(19): siRNA sense strand
gauaagaacacauggagua

SEQ ID NO: 350882 - RNA, 19 nt, Homo sapiens
  misc_RNA (1)...(19): siRNA sense strand
gagaagagaugccuguugu

SEQ ID NO: 350883 - RNA, 19 nt, Homo sapiens
  misc_RNA (1)...(19): siRNA sense strand
gaaugugaauguucugaaa

SEQ ID NO: 350884 - RNA, 19 nt, Homo sapiens
  misc_RNA (1)...(19): siRNA sense strand
gaaaauaucuguggcauug

SEQ ID NO: 350885 - RNA, 19 nt, Homo sapiens
  misc_RNA (1)...(19): siRNA sense strand
gaccugaucuccaccauga

SEQ ID NO: 350886 - RNA, 19 nt, Homo sapiens
  misc_RNA (1)...(19): siRNA sense strand
caacagauuuggccauuca

SEQ ID NO: 350887 - RNA, 19 nt, Homo sapiens
  misc_RNA (1)...(19): siRNA sense strand
guacaaagauaguuucucu

SEQ ID NO: 350888 - RNA, 19 nt, Homo sapiens
  misc_RNA (1)...(19): siRNA sense strand
uaagcaaugugcaggaaua

SEQ ID NO: 350889 - RNA, 19 nt, Homo sapiens
  misc_RNA (1)...(19): siRNA sense strand
gaagagaugccuguuguuu

SEQ ID NO: 350890 - RNA, 19 nt, Homo sapiens
  misc_RNA (1)...(19): siRNA sense strand
ccacucagauuauaacaug

SEQ ID NO: 350891 - RNA, 19 nt, Homo sapiens
  misc_RNA (1)...(19): siRNA sense strand
aaaccaacauuaaggagua

SEQ ID NO: 350892 - RNA, 19 nt, Homo sapiens
  misc_RNA (1)...(19): siRNA sense strand
gcaggaauaugauuuggau

SEQ ID NO: 350893 - RNA, 19 nt, Homo sapiens
  misc_RNA (1)...(19): siRNA sense strand
uaacaugguucuagcguau

SEQ ID NO: 350894 - RNA, 19 nt, Homo sapiens
  misc_RNA (1)...(19): siRNA sense strand
gcaaugugcaggaauauga

SEQ ID NO: 350895 - RNA, 19 nt, Homo sapiens
  misc_RNA (1)...(19): siRNA sense strand
ggacagccaaauagaauaa

SEQ ID NO: 350896 - RNA, 19 nt, Homo sapiens
  misc_RNA (1)...(19): siRNA sense strand
ccacuaaaccguucuguga

SEQ ID NO: 350897 - RNA, 19 nt, Homo sapiens
  misc_RNA (1)...(19): siRNA sense strand
gcgauacuguugaauguga

SEQ ID NO: 350898 - RNA, 19 nt, Homo sapiens
  misc_RNA (1)...(19): siRNA sense strand
ccaggaagaugaucgcuau

SEQ ID NO: 350899 - RNA, 19 nt, Homo sapiens
  misc_RNA (1)...(19): siRNA sense strand
gacuaucaguucaccuuua

SEQ ID NO: 350900 - RNA, 19 nt, Homo sapiens
  misc_RNA (1)...(19): siRNA sense strand
gaugaucucuaccgauaug

SEQ ID NO: 350901 - RNA, 19 nt, Homo sapiens
  misc_RNA (1)...(19): siRNA sense strand
gaaaaucgauaccaaggaa

SEQ ID NO: 350902 - RNA, 19 nt, Homo sapiens
  misc_RNA (1)...(19): siRNA sense strand
gaaggacagccaaauagaa

SEQ ID NO: 350903 - RNA, 19 nt, Homo sapiens
  misc_RNA (1)...(19): siRNA sense strand
gcacagccaacaccaauga

SEQ ID NO: 350904 - RNA, 19 nt, Homo sapiens
  misc_RNA (1)...(19): siRNA sense strand
gaggauauauguucaacca

SEQ ID NO: 350905 - RNA, 19 nt, Homo sapiens
  misc_RNA (1)...(19): siRNA sense strand
caaggagaauuaugacaau

SEQ ID NO: 350906 - RNA, 19 nt, Homo sapiens
  misc_RNA (1)...(19): siRNA sense strand
ggaagaugaucgcuauuac

SEQ ID NO: 350907 - RNA, 19 nt, Homo sapiens
  misc_RNA (1)...(19): siRNA sense strand
aagaacacauggaguauau

SEQ ID NO: 350908 - RNA, 19 nt, Homo sapiens
  misc_RNA (1)...(19): siRNA sense strand
ccaaaugcuucucuucaga

SEQ ID NO: 350909 - RNA, 19 nt, Homo sapiens
  misc_RNA (1)...(19): siRNA sense strand
gaggaaacacacacaauga

SEQ ID NO: 350910 - RNA, 19 nt, Homo sapiens
  misc_RNA (1)...(19): siRNA sense strand
agacuucguuucaaucauu

SEQ ID NO: 350911 - RNA, 19 nt, Homo sapiens
  misc_RNA (1)...(19): siRNA sense strand
caaugugguuguuagauau

SEQ ID NO: 350912 - RNA, 19 nt, Homo sapiens
  misc_RNA (1)...(19): siRNA sense strand
gaguguaagaucaguaaua

SEQ ID NO: 350913 - RNA, 19 nt, Homo sapiens
  misc_RNA (1)...(19): siRNA sense strand
aaacagggauuuggacaug

SEQ ID NO: 350914 - RNA, 19 nt, Homo sapiens
  misc_RNA (1)...(19): siRNA sense strand
agaagaagguagaauuugu

SEQ ID NO: 350915 - RNA, 19 nt, Homo sapiens
  misc_RNA (1)...(19): siRNA sense strand
cagauggaccuggaaauua

SEQ ID NO: 350916 - RNA, 19 nt, Homo sapiens
  misc_RNA (1)...(19): siRNA sense strand
ucauaaagcuguggucaau

SEQ ID NO: 350917 - RNA, 19 nt, Homo sapiens
  misc_RNA (1)...(19): siRNA sense strand
cguaugaccuugcuucuag

SEQ ID NO: 350918 - RNA, 19 nt, Homo sapiens
  misc_RNA (1)...(19): siRNA sense strand
ggaaaugucagccaugcaa

SEQ ID NO: 350919 - RNA, 19 nt, Homo sapiens
  misc_RNA (1)...(19): siRNA sense strand
gcuaaauuguucuguagga

SEQ ID NO: 350920 - RNA, 19 nt, Homo sapiens
  misc_RNA (1)...(19): siRNA sense strand
gcuggcaacugaugaacaa

SEQ ID NO: 350921 - RNA, 19 nt, Homo sapiens
  misc_RNA (1)...(19): siRNA sense strand
ccuaugacauugccuguga

SEQ ID NO: 350922 - RNA, 19 nt, Homo sapiens
  misc_RNA (1)...(19): siRNA sense strand
ggaggaaacacacacaaug

SEQ ID NO: 350923 - RNA, 19 nt, Homo sapiens
  misc_RNA (1)...(19): siRNA sense strand
guaguugggaccauuuaua

SEQ ID NO: 350924 - RNA, 19 nt, Homo sapiens
  misc_RNA (1)...(19): siRNA sense strand
agagaugccuguuguuuca

SEQ ID NO: 350925 - RNA, 19 nt, Homo sapiens
  misc_RNA (1)...(19): siRNA sense strand
gcagauacaacuggucuuu

SEQ ID NO: 350926 - RNA, 19 nt, Homo sapiens
  misc_RNA (1)...(19): siRNA sense strand
gcauuugguuggaaacuca

SEQ ID NO: 350927 - RNA, 19 nt, Homo sapiens
  misc_RNA (1)...(19): siRNA sense strand
gcacacauuguuacacuga

SEQ ID NO: 350928 - RNA, 19 nt, Homo sapiens
  misc_RNA (1)...(19): siRNA sense strand
gccaguguauggaauggua

SEQ ID NO: 350929 - RNA, 19 nt, Homo sapiens
  misc_RNA (1)...(19): siRNA sense strand
gaauaaugcagucaucuca

SEQ ID NO: 350930 - RNA, 19 nt, Homo sapiens
  misc_RNA (1)...(19): siRNA sense strand
ccagaagaagguagaauuu

SEQ ID NO: 350931 - RNA, 19 nt, Homo sapiens
  misc_RNA (1)...(19): siRNA sense strand
gaccagggcccuauacguu

SEQ ID NO: 350932 - RNA, 19 nt, Homo sapiens
  misc_RNA (1)...(19): siRNA sense strand
agauggaccuggaaauuau

SEQ ID NO: 350933 - RNA, 19 nt, Homo sapiens
  misc_RNA (1)...(19): siRNA sense strand
gcuaguugcugcauuuagu

SEQ ID NO: 350934 - RNA, 19 nt, Homo sapiens
  misc_RNA (1)...(19): siRNA sense strand
gaugcuggauucuguggaa

SEQ ID NO: 350935 - RNA, 19 nt, Homo sapiens
  misc_RNA (1)...(19): siRNA sense strand
gaaugugaccaaugaguug

SEQ ID NO: 350936 - RNA, 19 nt, Homo sapiens
  misc_RNA (1)...(19): siRNA sense strand
caauucaagugaugucaga

SEQ ID NO: 350937 - RNA, 19 nt, Homo sapiens
  misc_RNA (1)...(19): siRNA sense strand
gagaguguaagaucaguaa

SEQ ID NO: 350938 - RNA, 19 nt, Homo sapiens
  misc_RNA (1)...(19): siRNA sense strand
cgaggcaucugcaauucaa

SEQ ID NO: 350939 - RNA, 19 nt, Homo sapiens
  misc_RNA (1)...(19): siRNA sense strand
gagcaucugugagaagugu

SEQ ID NO: 350940 - RNA, 19 nt, Homo sapiens
  misc_RNA (1)...(19): siRNA sense strand
ggaauaugauuuggauaag

SEQ ID NO: 350941 - RNA, 19 nt, Homo sapiens
  misc_RNA (1)...(19): siRNA sense strand
ggaaugugaccaaugaguu

SEQ ID NO: 350942 - RNA, 19 nt, Homo sapiens
  misc_RNA (1)...(19): siRNA sense strand
ugagagagauggcaaugag

SEQ ID NO: 350943 - RNA, 19 nt, Homo sapiens
  misc_RNA (1)...(19): siRNA sense strand
ggacuccaaugccuaugug

SEQ ID NO: 350944 - RNA, 19 nt, Homo sapiens
  misc_RNA (1)...(19): siRNA sense strand
ucacugcccucucuaugga

SEQ ID NO: 350945 - RNA, 19 nt, Homo sapiens
  misc_RNA (1)...(19): siRNA sense strand
cagcgauacuguugaaugu

SEQ ID NO: 350946 - RNA, 19 nt, Homo sapiens
  misc_RNA (1)...(19): siRNA sense strand
gugaugcugcuuauaauuu

SEQ ID NO: 350947 - RNA, 19 nt, Homo sapiens
  misc_RNA (1)...(19): siRNA sense strand
uuagugaugcugcuuauaa

SEQ ID NO: 350948 - RNA, 19 nt, Homo sapiens
  misc_RNA (1)...(19): siRNA sense strand
ccaagaauuucaaccucaa

SEQ ID NO: 350949 - RNA, 19 nt, Homo sapiens
  misc_RNA (1)...(19): siRNA sense strand
cagaggaacauguuauuau

SEQ ID NO: 350950 - RNA, 19 nt, Homo sapiens
  misc_RNA (1)...(19): siRNA sense strand
cuacugccaaggagaauua

SEQ ID NO: 350951 - RNA, 19 nt, Homo sapiens
  misc_RNA (1)...(19): siRNA sense strand
gggaccauuuauauguuua

SEQ ID NO: 350952 - RNA, 19 nt, Homo sapiens
  misc_RNA (1)...(19): siRNA sense strand
ggagcaguaugcagugguu

SEQ ID NO: 350953 - RNA, 19 nt, Homo sapiens
  misc_RNA (1)...(19): siRNA sense strand
uagcagcgauacuguugaa

SEQ ID NO: 350954 - RNA, 19 nt, Homo sapiens
  misc_RNA (1)...(19): siRNA sense strand
gguagaauuuguccuuaag

SEQ ID NO: 350955 - RNA, 19 nt, Homo sapiens
  misc_RNA (1)...(19): siRNA sense strand
gguccuggauguucaguuc

SEQ ID NO: 350956 - RNA, 19 nt, Homo sapiens
  misc_RNA (1)...(19): siRNA sense strand
ggaaaggugaagcauguga

SEQ ID NO: 350957 - RNA, 19 nt, Homo sapiens
  misc_RNA (1)...(19): siRNA sense strand
gucauucuuuggcauuaua

SEQ ID NO: 350958 - RNA, 19 nt, Homo sapiens
  misc_RNA (1)...(19): siRNA sense strand
gaagaugaucgcuauuaca

SEQ ID NO: 350959 - RNA, 19 nt, Homo sapiens
  misc_RNA (1)...(19): siRNA sense strand
caguucaccuuuagucuau

SEQ ID NO: 350960 - RNA, 19 nt, Homo sapiens
  misc_RNA (1)...(19): siRNA sense strand
gcacugcgagaccugcaua

SEQ ID NO: 350961 - RNA, 19 nt, Homo sapiens
  misc_RNA (1)...(19): siRNA sense strand
agauacaacuggucuuuca

SEQ ID NO: 350962 - RNA, 19 nt, Homo sapiens
  misc_RNA (1)...(19): siRNA sense strand
gaaccacagcugcucagaa

SEQ ID NO: 350963 - RNA, 19 nt, Homo sapiens
  misc_RNA (1)...(19): siRNA sense strand
ggcaacugaugaacaagaa

SEQ ID NO: 350964 - RNA, 19 nt, Homo sapiens
  misc_RNA (1)...(19): siRNA sense strand
cgaggagaguguaagauca

SEQ ID NO: 350965 - RNA, 19 nt, Homo sapiens
  misc_RNA (1)...(19): siRNA sense strand
ggagaagagaugccuguug

SEQ ID NO: 350966 - RNA, 19 nt, Homo sapiens
  misc_RNA (1)...(19): siRNA sense strand
caacuggucuuucauucac

SEQ ID NO: 350967 - RNA, 19 nt, Homo sapiens
  misc_RNA (1)...(19): siRNA sense strand
ccaaggagaauuaugacaa

SEQ ID NO: 350968 - RNA, 19 nt, Homo sapiens
  misc_RNA (1)...(19): siRNA sense strand
ggcauuggcuggcauuugg

SEQ ID NO: 350969 - RNA, 19 nt, Homo sapiens
  misc_RNA (1)...(19): siRNA sense strand
cacaaugacacaucuauga

SEQ ID NO: 350970 - RNA, 19 nt, Homo sapiens
  misc_RNA (1)...(19): siRNA sense strand
gaaggccagaucuccauuu

SEQ ID NO: 350971 - RNA, 19 nt, Homo sapiens
  misc_RNA (1)...(19): siRNA sense strand
ucaaugccuccaagaauuu

SEQ ID NO: 350972 - RNA, 19 nt, Homo sapiens
  misc_RNA (1)...(19): siRNA sense strand
cugcauaucuggcuucuac

SEQ ID NO: 350973 - RNA, 19 nt, Homo sapiens
  misc_RNA (1)...(19): siRNA sense strand
guacuacuguaacaagaag

SEQ ID NO: 350974 - RNA, 19 nt, Homo sapiens
  misc_RNA (1)...(19): siRNA sense strand
gaaccacaaugcccuuuug

SEQ ID NO: 350975 - RNA, 19 nt, Homo sapiens
  misc_RNA (1)...(19): siRNA sense strand
ucagaggaacauguuauua

SEQ ID NO: 350976 - RNA, 19 nt, Homo sapiens
  misc_RNA (1)...(19): siRNA sense strand
ccaaggaaacccucucaga

SEQ ID NO: 350977 - RNA, 19 nt, Homo sapiens
  misc_RNA (1)...(19): siRNA sense strand
cacaguaaaugcaucaauc

SEQ ID NO: 350978 - RNA, 19 nt, Homo sapiens
  misc_RNA (1)...(19): siRNA sense strand
uuaagcagcugcgaauaau

SEQ ID NO: 350979 - RNA, 19 nt, Homo sapiens
  misc_RNA (1)...(19): siRNA sense strand
gaacacauggaguauauua

SEQ ID NO: 350980 - RNA, 19 nt, Homo sapiens
  misc_RNA (1)...(19): siRNA sense strand
gaagauauguccccauuua

SEQ ID NO: 350981 - RNA, 19 nt, Homo sapiens
  misc_RNA (1)...(19): siRNA sense strand
gauaagaacacauggagua

SEQ ID NO: 350982 - RNA, 19 nt, Homo sapiens
  misc_RNA (1)...(19): siRNA sense strand
gagaagagaugccuguugu

SEQ ID NO: 350983 - RNA, 19 nt, Homo sapiens
  misc_RNA (1)...(19): siRNA sense strand
gaaugugaauguucugaaa

SEQ ID NO: 350984 - RNA, 19 nt, Homo sapiens
  misc_RNA (1)...(19): siRNA sense strand
gaaaauaucuguggcauug

SEQ ID NO: 350985 - RNA, 19 nt, Homo sapiens
  misc_RNA (1)...(19): siRNA sense strand
gaccugaucuccaccauga

SEQ ID NO: 350986 - RNA, 19 nt, Homo sapiens
  misc_RNA (1)...(19): siRNA sense strand
caacagauuuggccauuca

SEQ ID NO: 350987 - RNA, 19 nt, Homo sapiens
  misc_RNA (1)...(19): siRNA sense strand
guacaaagauaguuucucu

SEQ ID NO: 350988 - RNA, 19 nt, Homo sapiens
  misc_RNA (1)...(19): siRNA sense strand
uaagcaaugugcaggaaua

SEQ ID NO: 350989 - RNA, 19 nt, Homo sapiens
  misc_RNA (1)...(19): siRNA sense strand
gaagagaugccuguuguuu

SEQ ID NO: 350990 - RNA, 19 nt, Homo sapiens
  misc_RNA (1)...(19): siRNA sense strand
ccacucagauuauaacaug

SEQ ID NO: 350991 - RNA, 19 nt, Homo sapiens
  misc_RNA (1)...(19): siRNA sense strand
aaaccaacauuaaggagua

SEQ ID NO: 350992 - RNA, 19 nt, Homo sapiens
  misc_RNA (1)...(19): siRNA sense strand
gcaggaauaugauuuggau

SEQ ID NO: 350993 - RNA, 19 nt, Homo sapiens
  misc_RNA (1)...(19): siRNA sense strand
uaacaugguucuagcguau

SEQ ID NO: 350994 - RNA, 19 nt, Homo sapiens
  misc_RNA (1)...(19): siRNA sense strand
gcaaugugcaggaauauga

SEQ ID NO: 350995 - RNA, 19 nt, Homo sapiens
  misc_RNA (1)...(19): siRNA sense strand
ggacagccaaauagaauaa

SEQ ID NO: 350996 - RNA, 19 nt, Homo sapiens
  misc_RNA (1)...(19): siRNA sense strand
ccacuaaaccguucuguga

SEQ ID NO: 350997 - RNA, 19 nt, Homo sapiens
  misc_RNA (1)...(19): siRNA sense strand
gcgauacuguugaauguga

SEQ ID NO: 350998 - RNA, 19 nt, Homo sapiens
  misc_RNA (1)...(19): siRNA sense strand
ccaggaagaugaucgcuau

SEQ ID NO: 350999 - RNA, 19 nt, Homo sapiens
  misc_RNA (1)...(19): siRNA sense strand
gacuaucaguucaccuuua

SEQ ID NO: 351000 - RNA, 19 nt, Homo sapiens
  misc_RNA (1)...(19): siRNA sense strand
gaugaucucuaccgauaug

SEQ ID NO: 351001 - RNA, 19 nt, Homo sapiens
  misc_RNA (1)...(19): siRNA sense strand
gaaaaucgauaccaaggaa

SEQ ID NO: 351002 - RNA, 19 nt, Homo sapiens
  misc_RNA (1)...(19): siRNA sense strand
gaaggacagccaaauagaa

SEQ ID NO: 351003 - RNA, 19 nt, Homo sapiens
  misc_RNA (1)...(19): siRNA sense strand
gcacagccaacaccaauga

SEQ ID NO: 351004 - RNA, 19 nt, Homo sapiens
  misc_RNA (1)...(19): siRNA sense strand
gaggauauauguucaacca

SEQ ID NO: 351005 - RNA, 19 nt, Homo sapiens
  misc_RNA (1)...(19): siRNA sense strand
caaggagaauuaugacaau

SEQ ID NO: 351006 - RNA, 19 nt, Homo sapiens
  misc_RNA (1)...(19): siRNA sense strand
ggaagaugaucgcuauuac

SEQ ID NO: 351007 - RNA, 19 nt, Homo sapiens
  misc_RNA (1)...(19): siRNA sense strand
aagaacacauggaguauau

SEQ ID NO: 351008 - RNA, 19 nt, Homo sapiens
  misc_RNA (1)...(19): siRNA sense strand
ccaaaugcuucucuucaga

SEQ ID NO: 351009 - RNA, 19 nt, Homo sapiens
  misc_RNA (1)...(19): siRNA sense strand
gaggaaacacacacaauga

SEQ ID NO: 351010 - RNA, 19 nt, Homo sapiens
  misc_RNA (1)...(19): siRNA sense strand
agacuucguuucaaucauu

SEQ ID NO: 351011 - RNA, 19 nt, Homo sapiens
  misc_RNA (1)...(19): siRNA sense strand
caaugugguuguuagauau

SEQ ID NO: 351012 - RNA, 19 nt, Homo sapiens
  misc_RNA (1)...(19): siRNA sense strand
gaguguaagaucaguaaua

SEQ ID NO: 351013 - RNA, 19 nt, Homo sapiens
  misc_RNA (1)...(19): siRNA sense strand
aaacagggauuuggacaug

SEQ ID NO: 351014 - RNA, 19 nt, Homo sapiens
  misc_RNA (1)...(19): siRNA sense strand
agaagaagguagaauuugu

SEQ ID NO: 351015 - RNA, 19 nt, Homo sapiens
  misc_RNA (1)...(19): siRNA sense strand
cagauggaccuggaaauua

SEQ ID NO: 351016 - RNA, 19 nt, Homo sapiens
  misc_RNA (1)...(19): siRNA sense strand
ucauaaagcuguggucaau

SEQ ID NO: 351017 - RNA, 19 nt, Homo sapiens
  misc_RNA (1)...(19): siRNA sense strand
cguaugaccuugcuucuag

SEQ ID NO: 351018 - RNA, 19 nt, Homo sapiens
  misc_RNA (1)...(19): siRNA sense strand
ggaaaugucagccaugcaa

SEQ ID NO: 351019 - RNA, 19 nt, Homo sapiens
  misc_RNA (1)...(19): siRNA sense strand
gcuaaauuguucuguagga

SEQ ID NO: 351020 - RNA, 19 nt, Homo sapiens
  misc_RNA (1)...(19): siRNA sense strand
gcuggcaacugaugaacaa

SEQ ID NO: 351021 - RNA, 19 nt, Homo sapiens
  misc_RNA (1)...(19): siRNA sense strand
ccuaugacauugccuguga

SEQ ID NO: 351022 - RNA, 19 nt, Homo sapiens
  misc_RNA (1)...(19): siRNA sense strand
ggaggaaacacacacaaug

SEQ ID NO: 351023 - RNA, 19 nt, Homo sapiens
  misc_RNA (1)...(19): siRNA sense strand
guaguugggaccauuuaua

SEQ ID NO: 351024 - RNA, 19 nt, Homo sapiens
  misc_RNA (1)...(19): siRNA sense strand
agagaugccuguuguuuca

SEQ ID NO: 351025 - RNA, 19 nt, Homo sapiens
  misc_RNA (1)...(19): siRNA sense strand
gcagauacaacuggucuuu

SEQ ID NO: 351026 - RNA, 19 nt, Homo sapiens
  misc_RNA (1)...(19): siRNA sense strand
gcauuugguuggaaacuca

SEQ ID NO: 351027 - RNA, 19 nt, Homo sapiens
  misc_RNA (1)...(19): siRNA sense strand
gcacacauuguuacacuga

SEQ ID NO: 351028 - RNA, 19 nt, Homo sapiens
  misc_RNA (1)...(19): siRNA sense strand
gccaguguauggaauggua

SEQ ID NO: 351029 - RNA, 19 nt, Homo sapiens
  misc_RNA (1)...(19): siRNA sense strand
gaauaaugcagucaucuca

SEQ ID NO: 351030 - RNA, 19 nt, Homo sapiens
  misc_RNA (1)...(19): siRNA sense strand
ccagaagaagguagaauuu

SEQ ID NO: 351031 - RNA, 19 nt, Homo sapiens
  misc_RNA (1)...(19): siRNA sense strand
gaccagggcccuauacguu

SEQ ID NO: 351032 - RNA, 19 nt, Homo sapiens
  misc_RNA (1)...(19): siRNA sense strand
agauggaccuggaaauuau

SEQ ID NO: 351033 - RNA, 19 nt, Homo sapiens
  misc_RNA (1)...(19): siRNA sense strand
gcuaguugcugcauuuagu

SEQ ID NO: 351034 - RNA, 19 nt, Homo sapiens
  misc_RNA (1)...(19): siRNA sense strand
gaugcuggauucuguggaa

SEQ ID NO: 351035 - RNA, 19 nt, Homo sapiens
  misc_RNA (1)...(19): siRNA sense strand
gaaugugaccaaugaguug

SEQ ID NO: 351036 - RNA, 19 nt, Homo sapiens
  misc_RNA (1)...(19): siRNA sense strand
caauucaagugaugucaga

SEQ ID NO: 351037 - RNA, 19 nt, Homo sapiens
  misc_RNA (1)...(19): siRNA sense strand
gagaguguaagaucaguaa

SEQ ID NO: 351038 - RNA, 19 nt, Homo sapiens
  misc_RNA (1)...(19): siRNA sense strand
cgaggcaucugcaauucaa

SEQ ID NO: 351039 - RNA, 19 nt, Homo sapiens
  misc_RNA (1)...(19): siRNA sense strand
gagcaucugugagaagugu

SEQ ID NO: 351040 - RNA, 19 nt, Homo sapiens
  misc_RNA (1)...(19): siRNA sense strand
ggaauaugauuuggauaag

SEQ ID NO: 351041 - RNA, 19 nt, Homo sapiens
  misc_RNA (1)...(19): siRNA sense strand
ggaaugugaccaaugaguu

SEQ ID NO: 351042 - RNA, 19 nt, Homo sapiens
  misc_RNA (1)...(19): siRNA sense strand
ugagagagauggcaaugag

SEQ ID NO: 351043 - RNA, 19 nt, Homo sapiens
  misc_RNA (1)...(19): siRNA sense strand
ggacuccaaugccuaugug

SEQ ID NO: 351044 - RNA, 19 nt, Homo sapiens
  misc_RNA (1)...(19): siRNA sense strand
ucacugcccucucuaugga

SEQ ID NO: 351045 - RNA, 19 nt, Homo sapiens
  misc_RNA (1)...(19): siRNA sense strand
cagcgauacuguugaaugu

SEQ ID NO: 351046 - RNA, 19 nt, Homo sapiens
  misc_RNA (1)...(19): siRNA sense strand
gugaugcugcuuauaauuu

SEQ ID NO: 351047 - RNA, 19 nt, Homo sapiens
  misc_RNA (1)...(19): siRNA sense strand
uuagugaugcugcuuauaa

SEQ ID NO: 351048 - RNA, 19 nt, Homo sapiens
  misc_RNA (1)...(19): siRNA sense strand
ccaagaauuucaaccucaa

SEQ ID NO: 351049 - RNA, 19 nt, Homo sapiens
  misc_RNA (1)...(19): siRNA sense strand
cagaggaacauguuauuau

SEQ ID NO: 351050 - RNA, 19 nt, Homo sapiens
  misc_RNA (1)...(19): siRNA sense strand
cuacugccaaggagaauua

SEQ ID NO: 351051 - RNA, 19 nt, Homo sapiens
  misc_RNA (1)...(19): siRNA sense strand
gggaccauuuauauguuua

SEQ ID NO: 351052 - RNA, 19 nt, Homo sapiens
  misc_RNA (1)...(19): siRNA sense strand
ggagcaguaugcagugguu

SEQ ID NO: 351053 - RNA, 19 nt, Homo sapiens
  misc_RNA (1)...(19): siRNA sense strand
uagcagcgauacuguugaa

SEQ ID NO: 351054 - RNA, 19 nt, Homo sapiens
  misc_RNA (1)...(19): siRNA sense strand
gguagaauuuguccuuaag

SEQ ID NO: 351055 - RNA, 19 nt, Homo sapiens
  misc_RNA (1)...(19): siRNA sense strand
gguccuggauguucaguuc

SEQ ID NO: 351056 - RNA, 19 nt, Homo sapiens
  misc_RNA (1)...(19): siRNA sense strand
ggaaaggugaagcauguga

SEQ ID NO: 351057 - RNA, 19 nt, Homo sapiens
  misc_RNA (1)...(19): siRNA sense strand
gucauucuuuggcauuaua

SEQ ID NO: 351058 - RNA, 19 nt, Homo sapiens
  misc_RNA (1)...(19): siRNA sense strand
gaagaugaucgcuauuaca

SEQ ID NO: 351059 - RNA, 19 nt, Homo sapiens
  misc_RNA (1)...(19): siRNA sense strand
caguucaccuuuagucuau

SEQ ID NO: 351060 - RNA, 19 nt, Homo sapiens
  misc_RNA (1)...(19): siRNA sense strand
gcacugcgagaccugcaua

SEQ ID NO: 351061 - RNA, 19 nt, Homo sapiens
  misc_RNA (1)...(19): siRNA sense strand
agauacaacuggucuuuca

SEQ ID NO: 351062 - RNA, 19 nt, Homo sapiens
  misc_RNA (1)...(19): siRNA sense strand
gaaccacagcugcucagaa

SEQ ID NO: 351063 - RNA, 19 nt, Homo sapiens
  misc_RNA (1)...(19): siRNA sense strand
ggcaacugaugaacaagaa

SEQ ID NO: 351064 - RNA, 19 nt, Homo sapiens
  misc_RNA (1)...(19): siRNA sense strand
cgaggagaguguaagauca

SEQ ID NO: 351065 - RNA, 19 nt, Homo sapiens
  misc_RNA (1)...(19): siRNA sense strand
ggagaagagaugccuguug

SEQ ID NO: 351066 - RNA, 19 nt, Homo sapiens
  misc_RNA (1)...(19): siRNA sense strand
caacuggucuuucauucac

SEQ ID NO: 351067 - RNA, 19 nt, Homo sapiens
  misc_RNA (1)...(19): siRNA sense strand
ccaaggagaauuaugacaa

SEQ ID NO: 351068 - RNA, 19 nt, Homo sapiens
  misc_RNA (1)...(19): siRNA sense strand
ggcauuggcuggcauuugg

SEQ ID NO: 351069 - RNA, 19 nt, Homo sapiens
  misc_RNA (1)...(19): siRNA sense strand
cacaaugacacaucuauga

SEQ ID NO: 351070 - RNA, 19 nt, Homo sapiens
  misc_RNA (1)...(19): siRNA sense strand
gaaggccagaucuccauuu

SEQ ID NO: 351071 - RNA, 19 nt, Homo sapiens
  misc_RNA (1)...(19): siRNA sense strand
ucaaugccuccaagaauuu

SEQ ID NO: 351072 - RNA, 19 nt, Homo sapiens
  misc_RNA (1)...(19): siRNA sense strand
cugcauaucuggcuucuac

SEQ ID NO: 351073 - RNA, 19 nt, Homo sapiens
  misc_RNA (1)...(19): siRNA sense strand
guacuacuguaacaagaag

SEQ ID NO: 351074 - RNA, 19 nt, Homo sapiens
  misc_RNA (1)...(19): siRNA sense strand
gaaccacaaugcccuuuug

SEQ ID NO: 351075 - RNA, 19 nt, Homo sapiens
  misc_RNA (1)...(19): siRNA sense strand
ucagaggaacauguuauua

SEQ ID NO: 351076 - RNA, 19 nt, Homo sapiens
  misc_RNA (1)...(19): siRNA sense strand
ccaaggaaacccucucaga

SEQ ID NO: 351077 - RNA, 19 nt, Homo sapiens
  misc_RNA (1)...(19): siRNA sense strand
cacaguaaaugcaucaauc

SEQ ID NO: 351078 - RNA, 19 nt, Homo sapiens
  misc_RNA (1)...(19): siRNA sense strand
uuaagcagcugcgaauaau

SEQ ID NO: 351079 - RNA, 19 nt, Homo sapiens
  misc_RNA (1)...(19): siRNA sense strand
gaacacauggaguauauua

SEQ ID NO: 351080 - RNA, 19 nt, Homo sapiens
  misc_RNA (1)...(19): siRNA sense strand
gaagauauguccccauuua

SEQ ID NO: 351081 - RNA, 19 nt, Homo sapiens
  misc_RNA (1)...(19): siRNA sense strand
gauaagaacacauggagua

SEQ ID NO: 351082 - RNA, 19 nt, Homo sapiens
  misc_RNA (1)...(19): siRNA sense strand
gagaagagaugccuguugu

SEQ ID NO: 351083 - RNA, 19 nt, Homo sapiens
  misc_RNA (1)...(19): siRNA sense strand
gaaugugaauguucugaaa

SEQ ID NO: 351084 - RNA, 19 nt, Homo sapiens
  misc_RNA (1)...(19): siRNA sense strand
gaaaauaucuguggcauug

SEQ ID NO: 351085 - RNA, 19 nt, Homo sapiens
  misc_RNA (1)...(19): siRNA sense strand
gaccugaucuccaccauga

SEQ ID NO: 351086 - RNA, 19 nt, Homo sapiens
  misc_RNA (1)...(19): siRNA sense strand
caacagauuuggccauuca

SEQ ID NO: 351087 - RNA, 19 nt, Homo sapiens
  misc_RNA (1)...(19): siRNA sense strand
guacaaagauaguuucucu

SEQ ID NO: 351088 - RNA, 19 nt, Homo sapiens
  misc_RNA (1)...(19): siRNA sense strand
uaagcaaugugcaggaaua

SEQ ID NO: 351089 - RNA, 19 nt, Homo sapiens
  misc_RNA (1)...(19): siRNA sense strand
gaagagaugccuguuguuu

SEQ ID NO: 351090 - RNA, 19 nt, Homo sapiens
  misc_RNA (1)...(19): siRNA sense strand
ccacucagauuauaacaug

SEQ ID NO: 351091 - RNA, 19 nt, Homo sapiens
  misc_RNA (1)...(19): siRNA sense strand
aaaccaacauuaaggagua

SEQ ID NO: 351092 - RNA, 19 nt, Homo sapiens
  misc_RNA (1)...(19): siRNA sense strand
gcaggaauaugauuuggau

SEQ ID NO: 351093 - RNA, 19 nt, Homo sapiens
  misc_RNA (1)...(19): siRNA sense strand
uaacaugguucuagcguau

SEQ ID NO: 351094 - RNA, 19 nt, Homo sapiens
  misc_RNA (1)...(19): siRNA sense strand
gcaaugugcaggaauauga

SEQ ID NO: 351095 - RNA, 19 nt, Homo sapiens
  misc_RNA (1)...(19): siRNA sense strand
ggacagccaaauagaauaa

SEQ ID NO: 351096 - RNA, 19 nt, Homo sapiens
  misc_RNA (1)...(19): siRNA sense strand
ccacuaaaccguucuguga

SEQ ID NO: 351097 - RNA, 19 nt, Homo sapiens
  misc_RNA (1)...(19): siRNA sense strand
gcgauacuguugaauguga

SEQ ID NO: 351098 - RNA, 19 nt, Homo sapiens
  misc_RNA (1)...(19): siRNA sense strand
ccaggaagaugaucgcuau

SEQ ID NO: 351099 - RNA, 19 nt, Homo sapiens
  misc_RNA (1)...(19): siRNA sense strand
gacuaucaguucaccuuua

SEQ ID NO: 351100 - RNA, 19 nt, Homo sapiens
  misc_RNA (1)...(19): siRNA sense strand
gaugaucucuaccgauaug

SEQ ID NO: 351101 - RNA, 19 nt, Homo sapiens
  misc_RNA (1)...(19): siRNA sense strand
gaaaaucgauaccaaggaa

SEQ ID NO: 351102 - RNA, 19 nt, Homo sapiens
  misc_RNA (1)...(19): siRNA sense strand
gaaggacagccaaauagaa

SEQ ID NO: 351103 - RNA, 19 nt, Homo sapiens
  misc_RNA (1)...(19): siRNA sense strand
gcacagccaacaccaauga

SEQ ID NO: 351104 - RNA, 19 nt, Homo sapiens
  misc_RNA (1)...(19): siRNA sense strand
gaggauauauguucaacca

SEQ ID NO: 351105 - RNA, 19 nt, Homo sapiens
  misc_RNA (1)...(19): siRNA sense strand
caaggagaauuaugacaau

SEQ ID NO: 351106 - RNA, 19 nt, Homo sapiens
  misc_RNA (1)...(19): siRNA sense strand
ggaagaugaucgcuauuac

SEQ ID NO: 351107 - RNA, 19 nt, Homo sapiens
  misc_RNA (1)...(19): siRNA sense strand
aagaacacauggaguauau

SEQ ID NO: 351108 - RNA, 19 nt, Homo sapiens
  misc_RNA (1)...(19): siRNA sense strand
ccaaaugcuucucuucaga

SEQ ID NO: 351109 - RNA, 19 nt, Homo sapiens
  misc_RNA (1)...(19): siRNA sense strand
gaggaaacacacacaauga

SEQ ID NO: 351110 - RNA, 19 nt, Homo sapiens
  misc_RNA (1)...(19): siRNA sense strand
agacuucguuucaaucauu

SEQ ID NO: 351111 - RNA, 19 nt, Homo sapiens
  misc_RNA (1)...(19): siRNA sense strand
caaugugguuguuagauau

SEQ ID NO: 351112 - RNA, 19 nt, Homo sapiens
  misc_RNA (1)...(19): siRNA sense strand
gaguguaagaucaguaaua

SEQ ID NO: 351113 - RNA, 19 nt, Homo sapiens
  misc_RNA (1)...(19): siRNA sense strand
aaacagggauuuggacaug

SEQ ID NO: 351114 - RNA, 19 nt, Homo sapiens
  misc_RNA (1)...(19): siRNA sense strand
agaagaagguagaauuugu

SEQ ID NO: 351115 - RNA, 19 nt, Homo sapiens
  misc_RNA (1)...(19): siRNA sense strand
cagauggaccuggaaauua

SEQ ID NO: 351116 - RNA, 19 nt, Homo sapiens
  misc_RNA (1)...(19): siRNA sense strand
ucauaaagcuguggucaau

SEQ ID NO: 351117 - RNA, 19 nt, Homo sapiens
  misc_RNA (1)...(19): siRNA sense strand
cguaugaccuugcuucuag

SEQ ID NO: 351118 - RNA, 19 nt, Homo sapiens
  misc_RNA (1)...(19): siRNA sense strand
ggaaaugucagccaugcaa

SEQ ID NO: 351119 - RNA, 19 nt, Homo sapiens
  misc_RNA (1)...(19): siRNA sense strand
gcuaaauuguucuguagga

SEQ ID NO: 351120 - RNA, 19 nt, Homo sapiens
  misc_RNA (1)...(19): siRNA sense strand
gcuggcaacugaugaacaa

SEQ ID NO: 351121 - RNA, 19 nt, Homo sapiens
  misc_RNA (1)...(19): siRNA sense strand
ccuaugacauugccuguga

SEQ ID NO: 351122 - RNA, 19 nt, Homo sapiens
  misc_RNA (1)...(19): siRNA sense strand
ggaggaaacacacacaaug

SEQ ID NO: 351123 - RNA, 19 nt, Homo sapiens
  misc_RNA (1)...(19): siRNA sense strand
guaguugggaccauuuaua

SEQ ID NO: 351124 - RNA, 19 nt, Homo sapiens
  misc_RNA (1)...(19): siRNA sense strand
agagaugccuguuguuuca

SEQ ID NO: 351125 - RNA, 19 nt, Homo sapiens
  misc_RNA (1)...(19): siRNA sense strand
gcagauacaacuggucuuu

SEQ ID NO: 351126 - RNA, 19 nt, Homo sapiens
  misc_RNA (1)...(19): siRNA sense strand
gcauuugguuggaaacuca

SEQ ID NO: 351127 - RNA, 19 nt, Homo sapiens
  misc_RNA (1)...(19): siRNA sense strand
gcacacauuguuacacuga

SEQ ID NO: 351128 - RNA, 19 nt, Homo sapiens
  misc_RNA (1)...(19): siRNA sense strand
gccaguguauggaauggua

SEQ ID NO: 351129 - RNA, 19 nt, Homo sapiens
  misc_RNA (1)...(19): siRNA sense strand
gaauaaugcagucaucuca

SEQ ID NO: 351130 - RNA, 19 nt, Homo sapiens
  misc_RNA (1)...(19): siRNA sense strand
ccagaagaagguagaauuu

SEQ ID NO: 351131 - RNA, 19 nt, Homo sapiens
  misc_RNA (1)...(19): siRNA sense strand
gaccagggcccuauacguu

SEQ ID NO: 351132 - RNA, 19 nt, Homo sapiens
  misc_RNA (1)...(19): siRNA sense strand
agauggaccuggaaauuau

SEQ ID NO: 351133 - RNA, 19 nt, Homo sapiens
  misc_RNA (1)...(19): siRNA sense strand
gcuaguugcugcauuuagu

SEQ ID NO: 351134 - RNA, 19 nt, Homo sapiens
  misc_RNA (1)...(19): siRNA sense strand
gaugcuggauucuguggaa

SEQ ID NO: 351135 - RNA, 19 nt, Homo sapiens
  misc_RNA (1)...(19): siRNA sense strand
gaaugugaccaaugaguug

SEQ ID NO: 351136 - RNA, 19 nt, Homo sapiens
  misc_RNA (1)...(19): siRNA sense strand
caauucaagugaugucaga

SEQ ID NO: 351137 - RNA, 19 nt, Homo sapiens
  misc_RNA (1)...(19): siRNA sense strand
gagaguguaagaucaguaa

SEQ ID NO: 351138 - RNA, 19 nt, Homo sapiens
  misc_RNA (1)...(19): siRNA sense strand
cgaggcaucugcaauucaa

SEQ ID NO: 351139 - RNA, 19 nt, Homo sapiens
  misc_RNA (1)...(19): siRNA sense strand
gagcaucugugagaagugu

SEQ ID NO: 351140 - RNA, 19 nt, Homo sapiens
  misc_RNA (1)...(19): siRNA sense strand
ggaauaugauuuggauaag

SEQ ID NO: 351141 - RNA, 19 nt, Homo sapiens
  misc_RNA (1)...(19): siRNA sense strand
ggaaugugaccaaugaguu

SEQ ID NO: 351142 - RNA, 19 nt, Homo sapiens
  misc_RNA (1)...(19): siRNA sense strand
ugagagagauggcaaugag

SEQ ID NO: 351143 - RNA, 19 nt, Homo sapiens
  misc_RNA (1)...(19): siRNA sense strand
ggacuccaaugccuaugug

SEQ ID NO: 351144 - RNA, 19 nt, Homo sapiens
  misc_RNA (1)...(19): siRNA sense strand
ucacugcccucucuaugga

SEQ ID NO: 351145 - RNA, 19 nt, Homo sapiens
  misc_RNA (1)...(19): siRNA sense strand
cagcgauacuguugaaugu

SEQ ID NO: 351146 - RNA, 19 nt, Homo sapiens
  misc_RNA (1)...(19): siRNA sense strand
gugaugcugcuuauaauuu

SEQ ID NO: 351147 - RNA, 19 nt, Homo sapiens
  misc_RNA (1)...(19): siRNA sense strand
uuagugaugcugcuuauaa

SEQ ID NO: 351148 - RNA, 19 nt, Homo sapiens
  misc_RNA (1)...(19): siRNA sense strand
ccaagaauuucaaccucaa

SEQ ID NO: 351149 - RNA, 19 nt, Homo sapiens
  misc_RNA (1)...(19): siRNA sense strand
cagaggaacauguuauuau

SEQ ID NO: 351150 - RNA, 19 nt, Homo sapiens
  misc_RNA (1)...(19): siRNA sense strand
cuacugccaaggagaauua

SEQ ID NO: 351151 - RNA, 19 nt, Homo sapiens
  misc_RNA (1)...(19): siRNA sense strand
gggaccauuuauauguuua

SEQ ID NO: 351152 - RNA, 19 nt, Homo sapiens
  misc_RNA (1)...(19): siRNA sense strand
ggagcaguaugcagugguu

SEQ ID NO: 351153 - RNA, 19 nt, Homo sapiens
  misc_RNA (1)...(19): siRNA sense strand
uagcagcgauacuguugaa

SEQ ID NO: 351154 - RNA, 19 nt, Homo sapiens
  misc_RNA (1)...(19): siRNA sense strand
gguagaauuuguccuuaag

SEQ ID NO: 351155 - RNA, 19 nt, Homo sapiens
  misc_RNA (1)...(19): siRNA sense strand
gguccuggauguucaguuc

SEQ ID NO: 351156 - RNA, 19 nt, Homo sapiens
  misc_RNA (1)...(19): siRNA sense strand
ggaaaggugaagcauguga

SEQ ID NO: 351157 - RNA, 19 nt, Homo sapiens
  misc_RNA (1)...(19): siRNA sense strand
gucauucuuuggcauuaua

SEQ ID NO: 351158 - RNA, 19 nt, Homo sapiens
  misc_RNA (1)...(19): siRNA sense strand
gaagaugaucgcuauuaca

SEQ ID NO: 351159 - RNA, 19 nt, Homo sapiens
  misc_RNA (1)...(19): siRNA sense strand
caguucaccuuuagucuau

SEQ ID NO: 351160 - RNA, 19 nt, Homo sapiens
  misc_RNA (1)...(19): siRNA sense strand
gcacugcgagaccugcaua

SEQ ID NO: 351161 - RNA, 19 nt, Homo sapiens
  misc_RNA (1)...(19): siRNA sense strand
agauacaacuggucuuuca

SEQ ID NO: 351162 - RNA, 19 nt, Homo sapiens
  misc_RNA (1)...(19): siRNA sense strand
gaaccacagcugcucagaa

SEQ ID NO: 351163 - RNA, 19 nt, Homo sapiens
  misc_RNA (1)...(19): siRNA sense strand
ggcaacugaugaacaagaa

SEQ ID NO: 351164 - RNA, 19 nt, Homo sapiens
  misc_RNA (1)...(19): siRNA sense strand
cgaggagaguguaagauca

SEQ ID NO: 351165 - RNA, 19 nt, Homo sapiens
  misc_RNA (1)...(19): siRNA sense strand
ggagaagagaugccuguug

SEQ ID NO: 351166 - RNA, 19 nt, Homo sapiens
  misc_RNA (1)...(19): siRNA sense strand
caacuggucuuucauucac

SEQ ID NO: 351167 - RNA, 19 nt, Homo sapiens
  misc_RNA (1)...(19): siRNA sense strand
ccaaggagaauuaugacaa

SEQ ID NO: 351168 - RNA, 19 nt, Homo sapiens
  misc_RNA (1)...(19): siRNA sense strand
ggcauuggcuggcauuugg

SEQ ID NO: 351169 - RNA, 19 nt, Homo sapiens
  misc_RNA (1)...(19): siRNA sense strand
cacaaugacacaucuauga

SEQ ID NO: 351170 - RNA, 19 nt, Homo sapiens
  misc_RNA (1)...(19): siRNA sense strand
gaaggccagaucuccauuu

SEQ ID NO: 351171 - RNA, 19 nt, Homo sapiens
  misc_RNA (1)...(19): siRNA sense strand
ucaaugccuccaagaauuu

SEQ ID NO: 351172 - RNA, 19 nt, Homo sapiens
  misc_RNA (1)...(19): siRNA sense strand
cugcauaucuggcuucuac

SEQ ID NO: 351173 - RNA, 19 nt, Homo sapiens
  misc_RNA (1)...(19): siRNA sense strand
guacuacuguaacaagaag

SEQ ID NO: 351174 - RNA, 19 nt, Homo sapiens
  misc_RNA (1)...(19): siRNA sense strand
gaaccacaaugcccuuuug

SEQ ID NO: 351175 - RNA, 19 nt, Homo sapiens
  misc_RNA (1)...(19): siRNA sense strand
ucagaggaacauguuauua

SEQ ID NO: 351176 - RNA, 19 nt, Homo sapiens
  misc_RNA (1)...(19): siRNA sense strand
ccaaggaaacccucucaga

SEQ ID NO: 351177 - RNA, 19 nt, Homo sapiens
  misc_RNA (1)...(19): siRNA sense strand
cacaguaaaugcaucaauc

SEQ ID NO: 351178 - RNA, 19 nt, Homo sapiens
  misc_RNA (1)...(19): siRNA sense strand
uuaagcagcugcgaauaau

SEQ ID NO: 351179 - RNA, 19 nt, Homo sapiens
  misc_RNA (1)...(19): siRNA sense strand
caacacagauggcucauuu

SEQ ID NO: 351180 - RNA, 19 nt, Homo sapiens
  misc_RNA (1)...(19): siRNA sense strand
gaccuucgcugucaucuga

SEQ ID NO: 351181 - RNA, 19 nt, Homo sapiens
  misc_RNA (1)...(19): siRNA sense strand
ggacaaaggagagaaagaa

SEQ ID NO: 351182 - RNA, 19 nt, Homo sapiens
  misc_RNA (1)...(19): siRNA sense strand
ggacacgccuuacucuaac

SEQ ID NO: 351183 - RNA, 19 nt, Homo sapiens
  misc_RNA (1)...(19): siRNA sense strand
gagcgaagagggaggagaa

SEQ ID NO: 351184 - RNA, 19 nt, Homo sapiens
  misc_RNA (1)...(19): siRNA sense strand
acagauggcucauuucacu

SEQ ID NO: 351185 - RNA, 19 nt, Homo sapiens
  misc_RNA (1)...(19): siRNA sense strand
agaaugcggcagacaguua

SEQ ID NO: 351186 - RNA, 19 nt, Homo sapiens
  misc_RNA (1)...(19): siRNA sense strand
gauuccggcugcuggauga

SEQ ID NO: 351187 - RNA, 19 nt, Homo sapiens
  misc_RNA (1)...(19): siRNA sense strand
caccaggacugcuuugaag

SEQ ID NO: 351188 - RNA, 19 nt, Homo sapiens
  misc_RNA (1)...(19): siRNA sense strand
gggaggagaagaaggagaa

SEQ ID NO: 351189 - RNA, 19 nt, Homo sapiens
  misc_RNA (1)...(19): siRNA sense strand
ggaggacaaaggagagaaa

SEQ ID NO: 351190 - RNA, 19 nt, Homo sapiens
  misc_RNA (1)...(19): siRNA sense strand
cgaagagggaggagaagaa

SEQ ID NO: 351191 - RNA, 19 nt, Homo sapiens
  misc_RNA (1)...(19): siRNA sense strand
gcuacacccaccacaagua

SEQ ID NO: 351192 - RNA, 19 nt, Homo sapiens
  misc_RNA (1)...(19): siRNA sense strand
acaaggagcuccggaacuc

SEQ ID NO: 351193 - RNA, 19 nt, Homo sapiens
  misc_RNA (1)...(19): siRNA sense strand
gcagggccauggagaacca

SEQ ID NO: 351194 - RNA, 19 nt, Homo sapiens
  misc_RNA (1)...(19): siRNA sense strand
gaugagcaaguucuggauu

SEQ ID NO: 351195 - RNA, 19 nt, Homo sapiens
  misc_RNA (1)...(19): siRNA sense strand
gaggacacgccuuacucua

SEQ ID NO: 351196 - RNA, 19 nt, Homo sapiens
  misc_RNA (1)...(19): siRNA sense strand
ggcugcaacuucaacaaug

SEQ ID NO: 351197 - RNA, 19 nt, Homo sapiens
  misc_RNA (1)...(19): siRNA sense strand
acacagauggcucauuuca

SEQ ID NO: 351198 - RNA, 19 nt, Homo sapiens
  misc_RNA (1)...(19): siRNA sense strand
gaagagggaggagaagaag

SEQ ID NO: 351199 - RNA, 19 nt, Homo sapiens
  misc_RNA (1)...(19): siRNA sense strand
cggcgaggaugagcaaguu

SEQ ID NO: 351200 - RNA, 19 nt, Homo sapiens
  misc_RNA (1)...(19): siRNA sense strand
ccaccaggacugcuuugaa

SEQ ID NO: 351201 - RNA, 19 nt, Homo sapiens
  misc_RNA (1)...(19): siRNA sense strand
gcugcaacuucaacaaugg

SEQ ID NO: 351202 - RNA, 19 nt, Homo sapiens
  misc_RNA (1)...(19): siRNA sense strand
gucauuauuuccugugcaa

SEQ ID NO: 351203 - RNA, 19 nt, Homo sapiens
  misc_RNA (1)...(19): siRNA sense strand
gcaacagccagucccacaa

SEQ ID NO: 351204 - RNA, 19 nt, Homo sapiens
  misc_RNA (1)...(19): siRNA sense strand
gacaaggacgagacucaga

SEQ ID NO: 351205 - RNA, 19 nt, Homo sapiens
  misc_RNA (1)...(19): siRNA sense strand
guguggacguggaugaaug

SEQ ID NO: 351206 - RNA, 19 nt, Homo sapiens
  misc_RNA (1)...(19): siRNA sense strand
aggacacgccuuacucuaa

SEQ ID NO: 351207 - RNA, 19 nt, Homo sapiens
  misc_RNA (1)...(19): siRNA sense strand
ugcgacagcuugugcuuca

SEQ ID NO: 351208 - RNA, 19 nt, Homo sapiens
  misc_RNA (1)...(19): siRNA sense strand
ggaggacacgccuuacucu

SEQ ID NO: 351209 - RNA, 19 nt, Homo sapiens
  misc_RNA (1)...(19): siRNA sense strand
aaguagaccuucgcuguca

SEQ ID NO: 351210 - RNA, 19 nt, Homo sapiens
  misc_RNA (1)...(19): siRNA sense strand
caacagccagucccacaag

SEQ ID NO: 351211 - RNA, 19 nt, Homo sapiens
  misc_RNA (1)...(19): siRNA sense strand
caaccuggccacugugaag

SEQ ID NO: 351212 - RNA, 19 nt, Homo sapiens
  misc_RNA (1)...(19): siRNA sense strand
gcacguccagcgaguacug

SEQ ID NO: 351213 - RNA, 19 nt, Homo sapiens
  misc_RNA (1)...(19): siRNA sense strand
gagaagaagccccagaaug

SEQ ID NO: 351214 - RNA, 19 nt, Homo sapiens
  misc_RNA (1)...(19): siRNA sense strand
cuuggaggcugugcccuuu

SEQ ID NO: 351215 - RNA, 19 nt, Homo sapiens
  misc_RNA (1)...(19): siRNA sense strand
aggagaagaaggagaagaa

SEQ ID NO: 351216 - RNA, 19 nt, Homo sapiens
  misc_RNA (1)...(19): siRNA sense strand
ggaacucgugcaucuccaa

SEQ ID NO: 351217 - RNA, 19 nt, Homo sapiens
  misc_RNA (1)...(19): siRNA sense strand
aaugcuggguuggcuauga

SEQ ID NO: 351218 - RNA, 19 nt, Homo sapiens
  misc_RNA (1)...(19): siRNA sense strand
agagggaggagaagaagga

SEQ ID NO: 351219 - RNA, 19 nt, Homo sapiens
  misc_RNA (1)...(19): siRNA sense strand
augagcaaguucuggauug

SEQ ID NO: 351220 - RNA, 19 nt, Homo sapiens
  misc_RNA (1)...(19): siRNA sense strand
gcgaagagggaggagaaga

SEQ ID NO: 351221 - RNA, 19 nt, Homo sapiens
  misc_RNA (1)...(19): siRNA sense strand
gacaaaggagagaaagaag

SEQ ID NO: 351222 - RNA, 19 nt, Homo sapiens
  misc_RNA (1)...(19): siRNA sense strand
gcccaggagugugucaaca

SEQ ID NO: 351223 - RNA, 19 nt, Homo sapiens
  misc_RNA (1)...(19): siRNA sense strand
gaaugcggcagacaguuac

SEQ ID NO: 351224 - RNA, 19 nt, Homo sapiens
  misc_RNA (1)...(19): siRNA sense strand
cgaaugcuggguuggcuau

SEQ ID NO: 351225 - RNA, 19 nt, Homo sapiens
  misc_RNA (1)...(19): siRNA sense strand
gugcaaguucagcuucaaa

SEQ ID NO: 351226 - RNA, 19 nt, Homo sapiens
  misc_RNA (1)...(19): siRNA sense strand
gcaaguucagcuucaaagg

SEQ ID NO: 351227 - RNA, 19 nt, Homo sapiens
  misc_RNA (1)...(19): siRNA sense strand
gggaggacacgccuuacuc

SEQ ID NO: 351228 - RNA, 19 nt, Homo sapiens
  misc_RNA (1)...(19): siRNA sense strand
ccagaaugcggcagacagu

SEQ ID NO: 351229 - RNA, 19 nt, Homo sapiens
  misc_RNA (1)...(19): siRNA sense strand
gacagcuugugcuucaaca

SEQ ID NO: 351230 - RNA, 19 nt, Homo sapiens
  misc_RNA (1)...(19): siRNA sense strand
gggcuucgugugcaaguuc

SEQ ID NO: 351231 - RNA, 19 nt, Homo sapiens
  misc_RNA (1)...(19): siRNA sense strand
gagcagggccauggagaac

SEQ ID NO: 351232 - RNA, 19 nt, Homo sapiens
  misc_RNA (1)...(19): siRNA sense strand
ggagaagaaggagaagaag

SEQ ID NO: 351233 - RNA, 19 nt, Homo sapiens
  misc_RNA (1)...(19): siRNA sense strand
gaggagaagaaggagaaga

SEQ ID NO: 351234 - RNA, 19 nt, Homo sapiens
  misc_RNA (1)...(19): siRNA sense strand
gaaccacugcaaccagaac

SEQ ID NO: 351235 - RNA, 19 nt, Homo sapiens
  misc_RNA (1)...(19): siRNA sense strand
cuccggaacucgugcaucu

SEQ ID NO: 351236 - RNA, 19 nt, Homo sapiens
  misc_RNA (1)...(19): siRNA sense strand
ggaagggacuguucugaua

SEQ ID NO: 351237 - RNA, 19 nt, Homo sapiens
  misc_RNA (1)...(19): siRNA sense strand
acaaagcggucaaauauua

SEQ ID NO: 351238 - RNA, 19 nt, Homo sapiens
  misc_RNA (1)...(19): siRNA sense strand
ggacaaagcggucaaauau

SEQ ID NO: 351239 - RNA, 19 nt, Homo sapiens
  misc_RNA (1)...(19): siRNA sense strand
gcacagaguuccagacuga

SEQ ID NO: 351240 - RNA, 19 nt, Homo sapiens
  misc_RNA (1)...(19): siRNA sense strand
caacaucgaugaaugcuuu

SEQ ID NO: 351241 - RNA, 19 nt, Homo sapiens
  misc_RNA (1)...(19): siRNA sense strand
ccagagaacucaccaauau

SEQ ID NO: 351242 - RNA, 19 nt, Homo sapiens
  misc_RNA (1)...(19): siRNA sense strand
caucagcaaugucuaaaua

SEQ ID NO: 351243 - RNA, 19 nt, Homo sapiens
  misc_RNA (1)...(19): siRNA sense strand
uaacauagcccucagguuu

SEQ ID NO: 351244 - RNA, 19 nt, Homo sapiens
  misc_RNA (1)...(19): siRNA sense strand
gcaagagacugaacuuaau

SEQ ID NO: 351245 - RNA, 19 nt, Homo sapiens
  misc_RNA (1)...(19): siRNA sense strand
gagccugaauuucuuaaua

SEQ ID NO: 351246 - RNA, 19 nt, Homo sapiens
  misc_RNA (1)...(19): siRNA sense strand
gcauuuaucucucuuacuu

SEQ ID NO: 351247 - RNA, 19 nt, Homo sapiens
  misc_RNA (1)...(19): siRNA sense strand
agacaaaucucacuugcua

SEQ ID NO: 351248 - RNA, 19 nt, Homo sapiens
  misc_RNA (1)...(19): siRNA sense strand
gaacuugccugggaauuau

SEQ ID NO: 351249 - RNA, 19 nt, Homo sapiens
  misc_RNA (1)...(19): siRNA sense strand
gaagugacccuuuccauga

SEQ ID NO: 351250 - RNA, 19 nt, Homo sapiens
  misc_RNA (1)...(19): siRNA sense strand
gaacaugcaucccucacuu

SEQ ID NO: 351251 - RNA, 19 nt, Homo sapiens
  misc_RNA (1)...(19): siRNA sense strand
caaccacacuuucauuuga

SEQ ID NO: 351252 - RNA, 19 nt, Homo sapiens
  misc_RNA (1)...(19): siRNA sense strand
uccaaacucucccaaauua

SEQ ID NO: 351253 - RNA, 19 nt, Homo sapiens
  misc_RNA (1)...(19): siRNA sense strand
gaacaagggaugcaaaugu

SEQ ID NO: 351254 - RNA, 19 nt, Homo sapiens
  misc_RNA (1)...(19): siRNA sense strand
gggcucaguuuguaacaua

SEQ ID NO: 351255 - RNA, 19 nt, Homo sapiens
  misc_RNA (1)...(19): siRNA sense strand
ggaaauguccacuugauau

SEQ ID NO: 351256 - RNA, 19 nt, Homo sapiens
  misc_RNA (1)...(19): siRNA sense strand
cauucaagauuccagauua

SEQ ID NO: 351257 - RNA, 19 nt, Homo sapiens
  misc_RNA (1)...(19): siRNA sense strand
caauucaggucaauaauca

SEQ ID NO: 351258 - RNA, 19 nt, Homo sapiens
  misc_RNA (1)...(19): siRNA sense strand
caaagacugugacaacaug

SEQ ID NO: 351259 - RNA, 19 nt, Homo sapiens
  misc_RNA (1)...(19): siRNA sense strand
cuacaugccucaaugaaau

SEQ ID NO: 351260 - RNA, 19 nt, Homo sapiens
  misc_RNA (1)...(19): siRNA sense strand
gcuggaagauucugugaga

SEQ ID NO: 351261 - RNA, 19 nt, Homo sapiens
  misc_RNA (1)...(19): siRNA sense strand
gaagagcaauuucucaaaa

SEQ ID NO: 351262 - RNA, 19 nt, Homo sapiens
  misc_RNA (1)...(19): siRNA sense strand
gaagaagacgucaaugaau

SEQ ID NO: 351263 - RNA, 19 nt, Homo sapiens
  misc_RNA (1)...(19): siRNA sense strand
gggacaaucugugaaacua

SEQ ID NO: 351264 - RNA, 19 nt, Homo sapiens
  misc_RNA (1)...(19): siRNA sense strand
ggacaaagacugugacaac

SEQ ID NO: 351265 - RNA, 19 nt, Homo sapiens
  misc_RNA (1)...(19): siRNA sense strand
ggaaugagaagacaaaucu

SEQ ID NO: 351266 - RNA, 19 nt, Homo sapiens
  misc_RNA (1)...(19): siRNA sense strand
ggaggaaacugugaagaca

SEQ ID NO: 351267 - RNA, 19 nt, Homo sapiens
  misc_RNA (1)...(19): siRNA sense strand
ccacaauuauucuggugua

SEQ ID NO: 351268 - RNA, 19 nt, Homo sapiens
  misc_RNA (1)...(19): siRNA sense strand
ccaggugccucucaaauuc

SEQ ID NO: 351269 - RNA, 19 nt, Homo sapiens
  misc_RNA (1)...(19): siRNA sense strand
ggaauuauacuugccauug

SEQ ID NO: 351270 - RNA, 19 nt, Homo sapiens
  misc_RNA (1)...(19): siRNA sense strand
cugcaagggugucuaagua

SEQ ID NO: 351271 - RNA, 19 nt, Homo sapiens
  misc_RNA (1)...(19): siRNA sense strand
uauccaagauguaagacua

SEQ ID NO: 351272 - RNA, 19 nt, Homo sapiens
  misc_RNA (1)...(19): siRNA sense strand
gagaaaggauuggugugaa

SEQ ID NO: 351273 - RNA, 19 nt, Homo sapiens
  misc_RNA (1)...(19): siRNA sense strand
ggacugccuucuucuuuca

SEQ ID NO: 351274 - RNA, 19 nt, Homo sapiens
  misc_RNA (1)...(19): siRNA sense strand
gugaacaggaagauuauua

SEQ ID NO: 351275 - RNA, 19 nt, Homo sapiens
  misc_RNA (1)...(19): siRNA sense strand
gaaagccaaccuugucaaa

SEQ ID NO: 351276 - RNA, 19 nt, Homo sapiens
  misc_RNA (1)...(19): siRNA sense strand
ggacaguguugacaauuac

SEQ ID NO: 351277 - RNA, 19 nt, Homo sapiens
  misc_RNA (1)...(19): siRNA sense strand
gcacaugugagccuggaua

SEQ ID NO: 351278 - RNA, 19 nt, Homo sapiens
  misc_RNA (1)...(19): siRNA sense strand
gaugagagcuauggagaca

SEQ ID NO: 351279 - RNA, 19 nt, Homo sapiens
  misc_RNA (1)...(19): siRNA sense strand
cgaagaagacgucaaugaa

SEQ ID NO: 351280 - RNA, 19 nt, Homo sapiens
  misc_RNA (1)...(19): siRNA sense strand
gauaaccuuucuagaacuu

SEQ ID NO: 351281 - RNA, 19 nt, Homo sapiens
  misc_RNA (1)...(19): siRNA sense strand
ggaggcaacugcacagagu

SEQ ID NO: 351282 - RNA, 19 nt, Homo sapiens
  misc_RNA (1)...(19): siRNA sense strand
uaugucaucuuuacucuug

SEQ ID NO: 351283 - RNA, 19 nt, Homo sapiens
  misc_RNA (1)...(19): siRNA sense strand
caucugcccugcuggauau

SEQ ID NO: 351284 - RNA, 19 nt, Homo sapiens
  misc_RNA (1)...(19): siRNA sense strand
gggaaacacugugaacuca

SEQ ID NO: 351285 - RNA, 19 nt, Homo sapiens
  misc_RNA (1)...(19): siRNA sense strand
caaaggugcuucuguucau

SEQ ID NO: 351286 - RNA, 19 nt, Homo sapiens
  misc_RNA (1)...(19): siRNA sense strand
gaaaucgcaaccacacuuu

SEQ ID NO: 351287 - RNA, 19 nt, Homo sapiens
  misc_RNA (1)...(19): siRNA sense strand
aagaagacgucaaugaaug

SEQ ID NO: 351288 - RNA, 19 nt, Homo sapiens
  misc_RNA (1)...(19): siRNA sense strand
gcgaagaagacgucaauga

SEQ ID NO: 351289 - RNA, 19 nt, Homo sapiens
  misc_RNA (1)...(19): siRNA sense strand
ucacuggacugccuucuuc

SEQ ID NO: 351290 - RNA, 19 nt, Homo sapiens
  misc_RNA (1)...(19): siRNA sense strand
ggaagauucugugagauag

SEQ ID NO: 351291 - RNA, 19 nt, Homo sapiens
  misc_RNA (1)...(19): siRNA sense strand
gaacugugaaguggauaua

SEQ ID NO: 351292 - RNA, 19 nt, Homo sapiens
  misc_RNA (1)...(19): siRNA sense strand
ggaagagcaauuucucaaa

SEQ ID NO: 351293 - RNA, 19 nt, Homo sapiens
  misc_RNA (1)...(19): siRNA sense strand
gcaagggugucuaaguaca

SEQ ID NO: 351294 - RNA, 19 nt, Homo sapiens
  misc_RNA (1)...(19): siRNA sense strand
aacaagggaugcaaaugua

SEQ ID NO: 351295 - RNA, 19 nt, Homo sapiens
  misc_RNA (1)...(19): siRNA sense strand
ggauuugaauguauugcaa

SEQ ID NO: 351296 - RNA, 19 nt, Homo sapiens
  misc_RNA (1)...(19): siRNA sense strand
agaaaggauuggugugaaa

SEQ ID NO: 351297 - RNA, 19 nt, Homo sapiens
  misc_RNA (1)...(19): siRNA sense strand
ggacuuacucaacaaauuc

SEQ ID NO: 351298 - RNA, 19 nt, Homo sapiens
  misc_RNA (1)...(19): siRNA sense strand
gaaacacugugaacucaac

SEQ ID NO: 351299 - RNA, 19 nt, Homo sapiens
  misc_RNA (1)...(19): siRNA sense strand
ugagauagaucacgaugag

SEQ ID NO: 351300 - RNA, 19 nt, Homo sapiens
  misc_RNA (1)...(19): siRNA sense strand
agacacagccaauaauuug

SEQ ID NO: 351301 - RNA, 19 nt, Homo sapiens
  misc_RNA (1)...(19): siRNA sense strand
gaaaacagcacuuaucaau

SEQ ID NO: 351302 - RNA, 19 nt, Homo sapiens
  misc_RNA (1)...(19): siRNA sense strand
caggaugacuccacugguu

SEQ ID NO: 351303 - RNA, 19 nt, Homo sapiens
  misc_RNA (1)...(19): siRNA sense strand
ccaacugucugagagagua

SEQ ID NO: 351304 - RNA, 19 nt, Homo sapiens
  misc_RNA (1)...(19): siRNA sense strand
gcugugacccuuaccuuaa

SEQ ID NO: 351305 - RNA, 19 nt, Homo sapiens
  misc_RNA (1)...(19): siRNA sense strand
uaacuaccuucucaucuuc

SEQ ID NO: 351306 - RNA, 19 nt, Homo sapiens
  misc_RNA (1)...(19): siRNA sense strand
guucagacacagccaauaa

SEQ ID NO: 351307 - RNA, 19 nt, Homo sapiens
  misc_RNA (1)...(19): siRNA sense strand
ggagaaaugcaucgcgaaa

SEQ ID NO: 351308 - RNA, 19 nt, Homo sapiens
  misc_RNA (1)...(19): siRNA sense strand
caaaggcuguauccaagau

SEQ ID NO: 351309 - RNA, 19 nt, Homo sapiens
  misc_RNA (1)...(19): siRNA sense strand
ggacuguucugauauucuc

SEQ ID NO: 351310 - RNA, 19 nt, Homo sapiens
  misc_RNA (1)...(19): siRNA sense strand
gaaagccugugaggagguu

SEQ ID NO: 351311 - RNA, 19 nt, Homo sapiens
  misc_RNA (1)...(19): siRNA sense strand
ggauuuauuucugcuucua

SEQ ID NO: 351312 - RNA, 19 nt, Homo sapiens
  misc_RNA (1)...(19): siRNA sense strand
ucacaauaaugcuacaugu

SEQ ID NO: 351313 - RNA, 19 nt, Homo sapiens
  misc_RNA (1)...(19): siRNA sense strand
gacaaagacugugacaaca

SEQ ID NO: 351314 - RNA, 19 nt, Homo sapiens
  misc_RNA (1)...(19): siRNA sense strand
ggagccaccugcauuaguc

SEQ ID NO: 351315 - RNA, 19 nt, Homo sapiens
  misc_RNA (1)...(19): siRNA sense strand
cagaagcaaugggaauauu

SEQ ID NO: 351316 - RNA, 19 nt, Homo sapiens
  misc_RNA (1)...(19): siRNA sense strand
gggaugacuucuccuguuc

SEQ ID NO: 351317 - RNA, 19 nt, Homo sapiens
  misc_RNA (1)...(19): siRNA sense strand
gaaagcuccuacuccacuu

SEQ ID NO: 351318 - RNA, 19 nt, Homo sapiens
  misc_RNA (1)...(19): siRNA sense strand
gcugcuaaguggcuacauu

SEQ ID NO: 351319 - RNA, 19 nt, Homo sapiens
  misc_RNA (1)...(19): siRNA sense strand
gcaaccacacuuucauuug

SEQ ID NO: 351320 - RNA, 19 nt, Homo sapiens
  misc_RNA (1)...(19): siRNA sense strand
gaagggacuguucugauau

SEQ ID NO: 351321 - RNA, 19 nt, Homo sapiens
  misc_RNA (1)...(19): siRNA sense strand
cucaaugaaugcaauagua

SEQ ID NO: 351322 - RNA, 19 nt, Homo sapiens
  misc_RNA (1)...(19): siRNA sense strand
aggacaguguugacaauua

SEQ ID NO: 351323 - RNA, 19 nt, Homo sapiens
  misc_RNA (1)...(19): siRNA sense strand
acaauaaugcuacauguga

SEQ ID NO: 351324 - RNA, 19 nt, Homo sapiens
  misc_RNA (1)...(19): siRNA sense strand
gcaagaacgaggcuacaug

SEQ ID NO: 351325 - RNA, 19 nt, Homo sapiens
  misc_RNA (1)...(19): siRNA sense strand
gaacucaacaucgaugaau

SEQ ID NO: 351326 - RNA, 19 nt, Homo sapiens
  misc_RNA (1)...(19): siRNA sense strand
caaaaucucuaccaauuca

SEQ ID NO: 351327 - RNA, 19 nt, Homo sapiens
  misc_RNA (1)...(19): siRNA sense strand
uaauaaaccucaggaagag

SEQ ID NO: 351328 - RNA, 19 nt, Homo sapiens
  misc_RNA (1)...(19): siRNA sense strand
uuaauaaaccucaggaaga

SEQ ID NO: 351329 - RNA, 19 nt, Homo sapiens
  misc_RNA (1)...(19): siRNA sense strand
uuaacuaccuucucaucuu

SEQ ID NO: 351330 - RNA, 19 nt, Homo sapiens
  misc_RNA (1)...(19): siRNA sense strand
uguaaacugugaauuggaa

SEQ ID NO: 351331 - RNA, 19 nt, Homo sapiens
  misc_RNA (1)...(19): siRNA sense strand
ggaaguggacaacgaaaca

SEQ ID NO: 351332 - RNA, 19 nt, Homo sapiens
  misc_RNA (1)...(19): siRNA sense strand
gaauuauacuugccauugc

SEQ ID NO: 351333 - RNA, 19 nt, Homo sapiens
  misc_RNA (1)...(19): siRNA sense strand
ggagcuguccucagagaaa

SEQ ID NO: 351334 - RNA, 19 nt, Homo sapiens
  misc_RNA (1)...(19): siRNA sense strand
guguggagcuguccucaga

SEQ ID NO: 351335 - RNA, 19 nt, Homo sapiens
  misc_RNA (1)...(19): siRNA sense strand
acugugaacucaacacuga

SEQ ID NO: 351336 - RNA, 19 nt, Homo sapiens
  misc_RNA (1)...(19): siRNA sense strand
uggagaaccucaucaagua

SEQ ID NO: 351337 - RNA, 19 nt, Homo sapiens
  misc_RNA (1)...(19): siRNA sense strand
caauagccguccucaugua

SEQ ID NO: 351338 - RNA, 19 nt, Homo sapiens
  misc_RNA (1)...(19): siRNA sense strand
gagcaaugcccgguuauuu

SEQ ID NO: 351339 - RNA, 19 nt, Homo sapiens
  misc_RNA (1)...(19): siRNA sense strand
gaacugguguguggugaug

SEQ ID NO: 351340 - RNA, 19 nt, Homo sapiens
  misc_RNA (1)...(19): siRNA sense strand
uggcugagcucaugcaguu

SEQ ID NO: 351341 - RNA, 19 nt, Homo sapiens
  misc_RNA (1)...(19): siRNA sense strand
gccaauagccguccucaug

SEQ ID NO: 351342 - RNA, 19 nt, Homo sapiens
  misc_RNA (1)...(19): siRNA sense strand
gacaguggcuucagcaacu

SEQ ID NO: 351343 - RNA, 19 nt, Homo sapiens
  misc_RNA (1)...(19): siRNA sense strand
gagcgucccucugcgaaug

SEQ ID NO: 351344 - RNA, 19 nt, Homo sapiens
  misc_RNA (1)...(19): siRNA sense strand
ccaggugguuucucuguuc

SEQ ID NO: 351345 - RNA, 19 nt, Homo sapiens
  misc_RNA (1)...(19): siRNA sense strand
ucauguacguccacgacua

SEQ ID NO: 351346 - RNA, 19 nt, Homo sapiens
  misc_RNA (1)...(19): siRNA sense strand
ucaaggacauggacuacuc

SEQ ID NO: 351347 - RNA, 19 nt, Homo sapiens
  misc_RNA (1)...(19): siRNA sense strand
gcuacgagcucaacuuucc

SEQ ID NO: 351348 - RNA, 19 nt, Homo sapiens
  misc_RNA (1)...(19): siRNA sense strand
ggacuacucacgcaucauc

SEQ ID NO: 351349 - RNA, 19 nt, Homo sapiens
  misc_RNA (1)...(19): siRNA sense strand
cuugagcaaugcccgguua

SEQ ID NO: 351350 - RNA, 19 nt, Homo sapiens
  misc_RNA (1)...(19): siRNA sense strand
gcaaugcccgguuauuucu

SEQ ID NO: 351351 - RNA, 19 nt, Homo sapiens
  misc_RNA (1)...(19): siRNA sense strand
acuacgugcucaacuauga

SEQ ID NO: 351352 - RNA, 19 nt, Homo sapiens
  misc_RNA (1)...(19): siRNA sense strand
ggagaaccucaucaaguau

SEQ ID NO: 351353 - RNA, 19 nt, Homo sapiens
  misc_RNA (1)...(19): siRNA sense strand
gagaaccucaucaaguaug

SEQ ID NO: 351354 - RNA, 19 nt, Homo sapiens
  misc_RNA (1)...(19): siRNA sense strand
acuacuacgugcucaacua

SEQ ID NO: 351355 - RNA, 19 nt, Homo sapiens
  misc_RNA (1)...(19): siRNA sense strand
caucaucggacagccaaua

SEQ ID NO: 351356 - RNA, 19 nt, Homo sapiens
  misc_RNA (1)...(19): siRNA sense strand
caucagacacuucuacaag

SEQ ID NO: 351357 - RNA, 19 nt, Homo sapiens
  misc_RNA (1)...(19): siRNA sense strand
ccugcaggauucuuuauuc

SEQ ID NO: 351358 - RNA, 19 nt, Homo sapiens
  misc_RNA (1)...(19): siRNA sense strand
gugcuacgagcucaacuuu

SEQ ID NO: 351359 - RNA, 19 nt, Homo sapiens
  misc_RNA (1)...(19): siRNA sense strand
ucaucuggcucaucuucuu

SEQ ID NO: 351360 - RNA, 19 nt, Homo sapiens
  misc_RNA (1)...(19): siRNA sense strand
gccaucgccugcaggauuc

SEQ ID NO: 351361 - RNA, 19 nt, Homo sapiens
  misc_RNA (1)...(19): siRNA sense strand
uggccaccauucuguguuu

SEQ ID NO: 351362 - RNA, 19 nt, Homo sapiens
  misc_RNA (1)...(19): siRNA sense strand
ccaauagccguccucaugu

SEQ ID NO: 351363 - RNA, 19 nt, Homo sapiens
  misc_RNA (1)...(19): siRNA sense strand
ccgagucugucaccuacuu

SEQ ID NO: 351364 - RNA, 19 nt, Homo sapiens
  misc_RNA (1)...(19): siRNA sense strand
gcugagcucaugcaguuug

SEQ ID NO: 351365 - RNA, 19 nt, Homo sapiens
  misc_RNA (1)...(19): siRNA sense strand
caccucaucuggcucaucu

SEQ ID NO: 351366 - RNA, 19 nt, Homo sapiens
  misc_RNA (1)...(19): siRNA sense strand
cuaccgcgaucucuacuac

SEQ ID NO: 351367 - RNA, 19 nt, Homo sapiens
  misc_RNA (1)...(19): siRNA sense strand
cugcaggauucuuuauuca

SEQ ID NO: 351368 - RNA, 19 nt, Homo sapiens
  misc_RNA (1)...(19): siRNA sense strand
gcaucagacacuucuacaa

SEQ ID NO: 351369 - RNA, 19 nt, Homo sapiens
  misc_RNA (1)...(19): siRNA sense strand
guacguccacgacuacuac

SEQ ID NO: 351370 - RNA, 19 nt, Homo sapiens
  misc_RNA (1)...(19): siRNA sense strand
uccucaagcucuucuccua

SEQ ID NO: 351371 - RNA, 19 nt, Homo sapiens
  misc_RNA (1)...(19): siRNA sense strand
ugaccuaccgcgaucucua

SEQ ID NO: 351372 - RNA, 19 nt, Homo sapiens
  misc_RNA (1)...(19): siRNA sense strand
guggugaugcugaucuuga

SEQ ID NO: 351373 - RNA, 19 nt, Homo sapiens
  misc_RNA (1)...(19): siRNA sense strand
caaccuggccaccauucug

SEQ ID NO: 351374 - RNA, 19 nt, Homo sapiens
  misc_RNA (1)...(19): siRNA sense strand
gagcuacccggacaaucug

SEQ ID NO: 351375 - RNA, 19 nt, Homo sapiens
  misc_RNA (1)...(19): siRNA sense strand
ugagcuacccggacaaucu

SEQ ID NO: 351376 - RNA, 19 nt, Homo sapiens
  misc_RNA (1)...(19): siRNA sense strand
cuacuacgugcucaacuau

SEQ ID NO: 351377 - RNA, 19 nt, Homo sapiens
  misc_RNA (1)...(19): siRNA sense strand
ugccaucgccugcaggauu

SEQ ID NO: 351378 - RNA, 19 nt, Homo sapiens
  misc_RNA (1)...(19): siRNA sense strand
ccauccaggugguuucucu

SEQ ID NO: 351379 - RNA, 19 nt, Homo sapiens
  misc_RNA (1)...(19): siRNA sense strand
gguguguggugaugcugau

SEQ ID NO: 351380 - RNA, 19 nt, Homo sapiens
  misc_RNA (1)...(19): siRNA sense strand
acaguggcuucagcaacua

SEQ ID NO: 351381 - RNA, 19 nt, Homo sapiens
  misc_RNA (1)...(19): siRNA sense strand
ugguuucucuguuccugaa

SEQ ID NO: 351382 - RNA, 19 nt, Homo sapiens
  misc_RNA (1)...(19): siRNA sense strand
uggcugcauuccagguuga

SEQ ID NO: 351383 - RNA, 19 nt, Homo sapiens
  misc_RNA (1)...(19): siRNA sense strand
uaacaaaggugaugaugaa

SEQ ID NO: 351384 - RNA, 19 nt, Homo sapiens
  misc_RNA (1)...(19): siRNA sense strand
gcagaaagauguaugagau

SEQ ID NO: 351385 - RNA, 19 nt, Homo sapiens
  misc_RNA (1)...(19): siRNA sense strand
gcagagauuucuugacgua

SEQ ID NO: 351386 - RNA, 19 nt, Homo sapiens
  misc_RNA (1)...(19): siRNA sense strand
caacaaccuuucaaacuuu

SEQ ID NO: 351387 - RNA, 19 nt, Homo sapiens
  misc_RNA (1)...(19): siRNA sense strand
gaaagugacccaaauaaga

SEQ ID NO: 351388 - RNA, 19 nt, Homo sapiens
  misc_RNA (1)...(19): siRNA sense strand
gaacaguugucuaguauag

SEQ ID NO: 351389 - RNA, 19 nt, Homo sapiens
  misc_RNA (1)...(19): siRNA sense strand
gaggaacaguugucuagua

SEQ ID NO: 351390 - RNA, 19 nt, Homo sapiens
  misc_RNA (1)...(19): siRNA sense strand
acacagagcuggacaagug

SEQ ID NO: 351391 - RNA, 19 nt, Homo sapiens
  misc_RNA (1)...(19): siRNA sense strand
caaauaagacuaccuguga

SEQ ID NO: 351392 - RNA, 19 nt, Homo sapiens
  misc_RNA (1)...(19): siRNA sense strand
gcacgaagacgaccacaaa

SEQ ID NO: 351393 - RNA, 19 nt, Homo sapiens
  misc_RNA (1)...(19): siRNA sense strand
gaaagauucucugccauug

SEQ ID NO: 351394 - RNA, 19 nt, Homo sapiens
  misc_RNA (1)...(19): siRNA sense strand
ucaaacaucuugcaucaau

SEQ ID NO: 351395 - RNA, 19 nt, Homo sapiens
  misc_RNA (1)...(19): siRNA sense strand
gcccauagaucucagcaaa

SEQ ID NO: 351396 - RNA, 19 nt, Homo sapiens
  misc_RNA (1)...(19): siRNA sense strand
aaacagacaucaucuccaa

SEQ ID NO: 351397 - RNA, 19 nt, Homo sapiens
  misc_RNA (1)...(19): siRNA sense strand
gaacgaaacagcccugaug

SEQ ID NO: 351398 - RNA, 19 nt, Homo sapiens
  misc_RNA (1)...(19): siRNA sense strand
ggaauugucucuaaacacu

SEQ ID NO: 351399 - RNA, 19 nt, Homo sapiens
  misc_RNA (1)...(19): siRNA sense strand
aaacauacaugguccacaa

SEQ ID NO: 351400 - RNA, 19 nt, Homo sapiens
  misc_RNA (1)...(19): siRNA sense strand
cuucagagaucuuagcuaa

SEQ ID NO: 351401 - RNA, 19 nt, Homo sapiens
  misc_RNA (1)...(19): siRNA sense strand
ucaacaaccuuucaaacuu

SEQ ID NO: 351402 - RNA, 19 nt, Homo sapiens
  misc_RNA (1)...(19): siRNA sense strand
ggaagauggacuugaauaa

SEQ ID NO: 351403 - RNA, 19 nt, Homo sapiens
  misc_RNA (1)...(19): siRNA sense strand
gugcugcgcugaagaaaga

SEQ ID NO: 351404 - RNA, 19 nt, Homo sapiens
  misc_RNA (1)...(19): siRNA sense strand
caaaggugaugaugaagga

SEQ ID NO: 351405 - RNA, 19 nt, Homo sapiens
  misc_RNA (1)...(19): siRNA sense strand
gcuugaaggucuuuaguga

SEQ ID NO: 351406 - RNA, 19 nt, Homo sapiens
  misc_RNA (1)...(19): siRNA sense strand
ggaagaagaauguccauca

SEQ ID NO: 351407 - RNA, 19 nt, Homo sapiens
  misc_RNA (1)...(19): siRNA sense strand
caagcugccuuccgaugua

SEQ ID NO: 351408 - RNA, 19 nt, Homo sapiens
  misc_RNA (1)...(19): siRNA sense strand
ucagaugacucucacagaa

SEQ ID NO: 351409 - RNA, 19 nt, Homo sapiens
  misc_RNA (1)...(19): siRNA sense strand
caggagagcuggagguguu

SEQ ID NO: 351410 - RNA, 19 nt, Homo sapiens
  misc_RNA (1)...(19): siRNA sense strand
caagaucaguuucaauaag

SEQ ID NO: 351411 - RNA, 19 nt, Homo sapiens
  misc_RNA (1)...(19): siRNA sense strand
gaaaaugaaucuccuaaag

SEQ ID NO: 351412 - RNA, 19 nt, Homo sapiens
  misc_RNA (1)...(19): siRNA sense strand
aaacuucucugacgaucaa

SEQ ID NO: 351413 - RNA, 19 nt, Homo sapiens
  misc_RNA (1)...(19): siRNA sense strand
gcaagaucaguuucaauaa

SEQ ID NO: 351414 - RNA, 19 nt, Homo sapiens
  misc_RNA (1)...(19): siRNA sense strand
cagagaaagugacauggaa

SEQ ID NO: 351415 - RNA, 19 nt, Homo sapiens
  misc_RNA (1)...(19): siRNA sense strand
ggacacacagucagagaaa

SEQ ID NO: 351416 - RNA, 19 nt, Homo sapiens
  misc_RNA (1)...(19): siRNA sense strand
gaugucagcuacgaaagaa

SEQ ID NO: 351417 - RNA, 19 nt, Homo sapiens
  misc_RNA (1)...(19): siRNA sense strand
acaaaggccuccacugguu

SEQ ID NO: 351418 - RNA, 19 nt, Homo sapiens
  misc_RNA (1)...(19): siRNA sense strand
gaagauggacuugaauaau

SEQ ID NO: 351419 - RNA, 19 nt, Homo sapiens
  misc_RNA (1)...(19): siRNA sense strand
gaagaagaauguccaucag

SEQ ID NO: 351420 - RNA, 19 nt, Homo sapiens
  misc_RNA (1)...(19): siRNA sense strand
gaccagcuuucuccauauu

SEQ ID NO: 351421 - RNA, 19 nt, Homo sapiens
  misc_RNA (1)...(19): siRNA sense strand
gaggucugcuuccaacaaa

SEQ ID NO: 351422 - RNA, 19 nt, Homo sapiens
  misc_RNA (1)...(19): siRNA sense strand
caacccagcugcucauucu

SEQ ID NO: 351423 - RNA, 19 nt, Homo sapiens
  misc_RNA (1)...(19): siRNA sense strand
gcuugaagaugccauugaa

SEQ ID NO: 351424 - RNA, 19 nt, Homo sapiens
  misc_RNA (1)...(19): siRNA sense strand
cagcuuugguguacaacua

SEQ ID NO: 351425 - RNA, 19 nt, Homo sapiens
  misc_RNA (1)...(19): siRNA sense strand
cagcagaacaugucaaaug

SEQ ID NO: 351426 - RNA, 19 nt, Homo sapiens
  misc_RNA (1)...(19): siRNA sense strand
gagaacauuucccagaauc

SEQ ID NO: 351427 - RNA, 19 nt, Homo sapiens
  misc_RNA (1)...(19): siRNA sense strand
ccgaccagcuuucuccaua

SEQ ID NO: 351428 - RNA, 19 nt, Homo sapiens
  misc_RNA (1)...(19): siRNA sense strand
gggaaagugacccaaauaa

SEQ ID NO: 351429 - RNA, 19 nt, Homo sapiens
  misc_RNA (1)...(19): siRNA sense strand
ccaaaaggcugcuggacua

SEQ ID NO: 351430 - RNA, 19 nt, Homo sapiens
  misc_RNA (1)...(19): siRNA sense strand
gggaagauggacuugaaua

SEQ ID NO: 351431 - RNA, 19 nt, Homo sapiens
  misc_RNA (1)...(19): siRNA sense strand
gauacagccuacaacaaau

SEQ ID NO: 351432 - RNA, 19 nt, Homo sapiens
  misc_RNA (1)...(19): siRNA sense strand
ggagacagcagaaucagau

SEQ ID NO: 351433 - RNA, 19 nt, Homo sapiens
  misc_RNA (1)...(19): siRNA sense strand
gaaugucucaccaggaauu

SEQ ID NO: 351434 - RNA, 19 nt, Homo sapiens
  misc_RNA (1)...(19): siRNA sense strand
uagcuacccucccgucauu

SEQ ID NO: 351435 - RNA, 19 nt, Homo sapiens
  misc_RNA (1)...(19): siRNA sense strand
ggucagcuuugguguacaa

SEQ ID NO: 351436 - RNA, 19 nt, Homo sapiens
  misc_RNA (1)...(19): siRNA sense strand
ugugaagcuugcaacauua

SEQ ID NO: 351437 - RNA, 19 nt, Homo sapiens
  misc_RNA (1)...(19): siRNA sense strand
caguaacaaugaugacaaa

SEQ ID NO: 351438 - RNA, 19 nt, Homo sapiens
  misc_RNA (1)...(19): siRNA sense strand
caucuugcaucaauucuuc

SEQ ID NO: 351439 - RNA, 19 nt, Homo sapiens
  misc_RNA (1)...(19): siRNA sense strand
ggaaucugcaggcccauuu

SEQ ID NO: 351440 - RNA, 19 nt, Homo sapiens
  misc_RNA (1)...(19): siRNA sense strand
gaagaugccauugaagaug

SEQ ID NO: 351441 - RNA, 19 nt, Homo sapiens
  misc_RNA (1)...(19): siRNA sense strand
gaauguccaucagaggaaa

SEQ ID NO: 351442 - RNA, 19 nt, Homo sapiens
  misc_RNA (1)...(19): siRNA sense strand
gcggcaaacuucccagaga

SEQ ID NO: 351443 - RNA, 19 nt, Homo sapiens
  misc_RNA (1)...(19): siRNA sense strand
gauguaaucacugccauuu

SEQ ID NO: 351444 - RNA, 19 nt, Homo sapiens
  misc_RNA (1)...(19): siRNA sense strand
gcaccugaauucacacagu

SEQ ID NO: 351445 - RNA, 19 nt, Homo sapiens
  misc_RNA (1)...(19): siRNA sense strand
ccaagugguugcuggaugu

SEQ ID NO: 351446 - RNA, 19 nt, Homo sapiens
  misc_RNA (1)...(19): siRNA sense strand
aagagaacauuucccagaa

SEQ ID NO: 351447 - RNA, 19 nt, Homo sapiens
  misc_RNA (1)...(19): siRNA sense strand
cuaaacacuuggaaacuuc

SEQ ID NO: 351448 - RNA, 19 nt, Homo sapiens
  misc_RNA (1)...(19): siRNA sense strand
cuucaaacaucuugcauca

SEQ ID NO: 351449 - RNA, 19 nt, Homo sapiens
  misc_RNA (1)...(19): siRNA sense strand
gauggcagcagauggcuaa

SEQ ID NO: 351450 - RNA, 19 nt, Homo sapiens
  misc_RNA (1)...(19): siRNA sense strand
gaagacagugcccaucaga

SEQ ID NO: 351451 - RNA, 19 nt, Homo sapiens
  misc_RNA (1)...(19): siRNA sense strand
cuacgaaggccaucucuga

SEQ ID NO: 351452 - RNA, 19 nt, Homo sapiens
  misc_RNA (1)...(19): siRNA sense strand
ggaagggccaugacaagga

SEQ ID NO: 351453 - RNA, 19 nt, Homo sapiens
  misc_RNA (1)...(19): siRNA sense strand
aagauucucugccauuguu

SEQ ID NO: 351454 - RNA, 19 nt, Homo sapiens
  misc_RNA (1)...(19): siRNA sense strand
cuacgaaagaagcauaaua

SEQ ID NO: 351455 - RNA, 19 nt, Homo sapiens
  misc_RNA (1)...(19): siRNA sense strand
ggaaagugacccaaauaag

SEQ ID NO: 351456 - RNA, 19 nt, Homo sapiens
  misc_RNA (1)...(19): siRNA sense strand
caaacaucuugcaucaauu

SEQ ID NO: 351457 - RNA, 19 nt, Homo sapiens
  misc_RNA (1)...(19): siRNA sense strand
gaggaaugguaauagugaa

SEQ ID NO: 351458 - RNA, 19 nt, Homo sapiens
  misc_RNA (1)...(19): siRNA sense strand
ccuuuacccuggagcaaua

SEQ ID NO: 351459 - RNA, 19 nt, Homo sapiens
  misc_RNA (1)...(19): siRNA sense strand
gcaaaguguuuccgaaucc

SEQ ID NO: 351460 - RNA, 19 nt, Homo sapiens
  misc_RNA (1)...(19): siRNA sense strand
ugcaagaucaguuucaaua

SEQ ID NO: 351461 - RNA, 19 nt, Homo sapiens
  misc_RNA (1)...(19): siRNA sense strand
ccacgacccuccacugaag

SEQ ID NO: 351462 - RNA, 19 nt, Homo sapiens
  misc_RNA (1)...(19): siRNA sense strand
cugugaagcuugcaacauu

SEQ ID NO: 351463 - RNA, 19 nt, Homo sapiens
  misc_RNA (1)...(19): siRNA sense strand
guaacaaaggugaugauga

SEQ ID NO: 351464 - RNA, 19 nt, Homo sapiens
  misc_RNA (1)...(19): siRNA sense strand
gaagaaaacagacauuugu

SEQ ID NO: 351465 - RNA, 19 nt, Homo sapiens
  misc_RNA (1)...(19): siRNA sense strand
cgaaacagcccugauguca

SEQ ID NO: 351466 - RNA, 19 nt, Homo sapiens
  misc_RNA (1)...(19): siRNA sense strand
ccagaaagcgaacgaaaca

SEQ ID NO: 351467 - RNA, 19 nt, Homo sapiens
  misc_RNA (1)...(19): siRNA sense strand
gaaaaccuguugaugugaa

SEQ ID NO: 351468 - RNA, 19 nt, Homo sapiens
  misc_RNA (1)...(19): siRNA sense strand
aagaugccauugaagauga

SEQ ID NO: 351469 - RNA, 19 nt, Homo sapiens
  misc_RNA (1)...(19): siRNA sense strand
agauacagccuacaacaaa

SEQ ID NO: 351470 - RNA, 19 nt, Homo sapiens
  misc_RNA (1)...(19): siRNA sense strand
agacagugcccaucagauu

SEQ ID NO: 351471 - RNA, 19 nt, Homo sapiens
  misc_RNA (1)...(19): siRNA sense strand
aaaggcugcuggacuauca

SEQ ID NO: 351472 - RNA, 19 nt, Homo sapiens
  misc_RNA (1)...(19): siRNA sense strand
ugacguagccaaccucaau

SEQ ID NO: 351473 - RNA, 19 nt, Homo sapiens
  misc_RNA (1)...(19): siRNA sense strand
cauugaagaugaggaagaa

SEQ ID NO: 351474 - RNA, 19 nt, Homo sapiens
  misc_RNA (1)...(19): siRNA sense strand
gaauccacuucuucaaaca

SEQ ID NO: 351475 - RNA, 19 nt, Homo sapiens
  misc_RNA (1)...(19): siRNA sense strand
gacagugcccaucagauuu

SEQ ID NO: 351476 - RNA, 19 nt, Homo sapiens
  misc_RNA (1)...(19): siRNA sense strand
ccaguucagccuaauauug

SEQ ID NO: 351477 - RNA, 19 nt, Homo sapiens
  misc_RNA (1)...(19): siRNA sense strand
agcagaacaugucaaauga

SEQ ID NO: 351478 - RNA, 19 nt, Homo sapiens
  misc_RNA (1)...(19): siRNA sense strand
gcaaagcagaaaugcagaa

SEQ ID NO: 351479 - RNA, 19 nt, Homo sapiens
  misc_RNA (1)...(19): siRNA sense strand
ccagcuuucuccauauuau

SEQ ID NO: 351480 - RNA, 19 nt, Homo sapiens
  misc_RNA (1)...(19): siRNA sense strand
aaauaagacuaccugugaa

SEQ ID NO: 351481 - RNA, 19 nt, Homo sapiens
  misc_RNA (1)...(19): siRNA sense strand
gcuacccucccgucauuua

SEQ ID NO: 351482 - RNA, 19 nt, Homo sapiens
  misc_RNA (1)...(19): siRNA sense strand
uagcuaagaugucugaacu

SEQ ID NO: 351483 - RNA, 19 nt, Homo sapiens
  misc_RNA (1)...(19): siRNA sense strand
cgggaaaccucaucaagga

SEQ ID NO: 351484 - RNA, 19 nt, Homo sapiens
  misc_RNA (1)...(19): siRNA sense strand
gagggaggaggaagaggaa

SEQ ID NO: 351485 - RNA, 19 nt, Homo sapiens
  misc_RNA (1)...(19): siRNA sense strand
gggaaaccucaucaaggaa

SEQ ID NO: 351486 - RNA, 19 nt, Homo sapiens
  misc_RNA (1)...(19): siRNA sense strand
ggaaagaaaugacugaaau

SEQ ID NO: 351487 - RNA, 19 nt, Homo sapiens
  misc_RNA (1)...(19): siRNA sense strand
ugacugaaaucgagaaaua

SEQ ID NO: 351488 - RNA, 19 nt, Homo sapiens
  misc_RNA (1)...(19): siRNA sense strand
gaagaacgguguuaguuau

SEQ ID NO: 351489 - RNA, 19 nt, Homo sapiens
  misc_RNA (1)...(19): siRNA sense strand
gcugagaacuucauuauuc

SEQ ID NO: 351490 - RNA, 19 nt, Homo sapiens
  misc_RNA (1)...(19): siRNA sense strand
ggaagaacgguguuaguua

SEQ ID NO: 351491 - RNA, 19 nt, Homo sapiens
  misc_RNA (1)...(19): siRNA sense strand
caacugggcucuccggaaa

SEQ ID NO: 351492 - RNA, 19 nt, Homo sapiens
  misc_RNA (1)...(19): siRNA sense strand
caaaugggauauacagaaa

SEQ ID NO: 351493 - RNA, 19 nt, Homo sapiens
  misc_RNA (1)...(19): siRNA sense strand
gcaggagguugcuuucuuu

SEQ ID NO: 351494 - RNA, 19 nt, Homo sapiens
  misc_RNA (1)...(19): siRNA sense strand
gaacguauuggaaauguaa

SEQ ID NO: 351495 - RNA, 19 nt, Homo sapiens
  misc_RNA (1)...(19): siRNA sense strand
cgagaaauaugccagcaaa

SEQ ID NO: 351496 - RNA, 19 nt, Homo sapiens
  misc_RNA (1)...(19): siRNA sense strand
caucgucuguccaccauua

SEQ ID NO: 351497 - RNA, 19 nt, Homo sapiens
  misc_RNA (1)...(19): siRNA sense strand
gcccagaggugcccauauu

SEQ ID NO: 351498 - RNA, 19 nt, Homo sapiens
  misc_RNA (1)...(19): siRNA sense strand
ucaagaagcucuagaucga

SEQ ID NO: 351499 - RNA, 19 nt, Homo sapiens
  misc_RNA (1)...(19): siRNA sense strand
caaaguggaccauguaaug

SEQ ID NO: 351500 - RNA, 19 nt, Homo sapiens
  misc_RNA (1)...(19): siRNA sense strand
gaaauaugccagcaaagug

SEQ ID NO: 351501 - RNA, 19 nt, Homo sapiens
  misc_RNA (1)...(19): siRNA sense strand
gcacaggagaauugauuaa

SEQ ID NO: 351502 - RNA, 19 nt, Homo sapiens
  misc_RNA (1)...(19): siRNA sense strand
gaacucucuuccuuccuaa

SEQ ID NO: 351503 - RNA, 19 nt, Homo sapiens
  misc_RNA (1)...(19): siRNA sense strand
ugaauaggcugagaacuuc

SEQ ID NO: 351504 - RNA, 19 nt, Homo sapiens
  misc_RNA (1)...(19): siRNA sense strand
ugaacucucuuccuuccua

SEQ ID NO: 351505 - RNA, 19 nt, Homo sapiens
  misc_RNA (1)...(19): siRNA sense strand
ggucugagcucuuucuacu

SEQ ID NO: 351506 - RNA, 19 nt, Homo sapiens
  misc_RNA (1)...(19): siRNA sense strand
ggucagcgcauugugaaua

SEQ ID NO: 351507 - RNA, 19 nt, Homo sapiens
  misc_RNA (1)...(19): siRNA sense strand
ggaacguauuggaaaugua

SEQ ID NO: 351508 - RNA, 19 nt, Homo sapiens
  misc_RNA (1)...(19): siRNA sense strand
gaaaaugaguaccuuguuc

SEQ ID NO: 351509 - RNA, 19 nt, Homo sapiens
  misc_RNA (1)...(19): siRNA sense strand
gugaauaggcugagaacuu

SEQ ID NO: 351510 - RNA, 19 nt, Homo sapiens
  misc_RNA (1)...(19): siRNA sense strand
ccaaaugggauauacagaa

SEQ ID NO: 351511 - RNA, 19 nt, Homo sapiens
  misc_RNA (1)...(19): siRNA sense strand
gcuaaagaaucccaaaauu

SEQ ID NO: 351512 - RNA, 19 nt, Homo sapiens
  misc_RNA (1)...(19): siRNA sense strand
ccagggugcuuuggaguuu

SEQ ID NO: 351513 - RNA, 19 nt, Homo sapiens
  misc_RNA (1)...(19): siRNA sense strand
ggcaggagguugcuuucuu

SEQ ID NO: 351514 - RNA, 19 nt, Homo sapiens
  misc_RNA (1)...(19): siRNA sense strand
gaaagaaaugacugaaauc

SEQ ID NO: 351515 - RNA, 19 nt, Homo sapiens
  misc_RNA (1)...(19): siRNA sense strand
guaaugcaguuagcaagga

SEQ ID NO: 351516 - RNA, 19 nt, Homo sapiens
  misc_RNA (1)...(19): siRNA sense strand
gaacgugcauuuugccuau

SEQ ID NO: 351517 - RNA, 19 nt, Homo sapiens
  misc_RNA (1)...(19): siRNA sense strand
uaauaugguugcuguucuu

SEQ ID NO: 351518 - RNA, 19 nt, Homo sapiens
  misc_RNA (1)...(19): siRNA sense strand
ggagguugcuuucuuugac

SEQ ID NO: 351519 - RNA, 19 nt, Homo sapiens
  misc_RNA (1)...(19): siRNA sense strand
gaugacccuuccucuguga

SEQ ID NO: 351520 - RNA, 19 nt, Homo sapiens
  misc_RNA (1)...(19): siRNA sense strand
gauuucagccuuuccauuc

SEQ ID NO: 351521 - RNA, 19 nt, Homo sapiens
  misc_RNA (1)...(19): siRNA sense strand
cagcaaaguggaccaugua

SEQ ID NO: 351522 - RNA, 19 nt, Homo sapiens
  misc_RNA (1)...(19): siRNA sense strand
caccuaaucuggccaccuu

SEQ ID NO: 351523 - RNA, 19 nt, Homo sapiens
  misc_RNA (1)...(19): siRNA sense strand
gggaaagaaaugacugaaa

SEQ ID NO: 351524 - RNA, 19 nt, Homo sapiens
  misc_RNA (1)...(19): siRNA sense strand
gcaaaucaacagugcuuuc

SEQ ID NO: 351525 - RNA, 19 nt, Homo sapiens
  misc_RNA (1)...(19): siRNA sense strand
ugaggaacguauuggaaau

SEQ ID NO: 351526 - RNA, 19 nt, Homo sapiens
  misc_RNA (1)...(19): siRNA sense strand
gaacgguguuaguuauugc

SEQ ID NO: 351527 - RNA, 19 nt, Homo sapiens
  misc_RNA (1)...(19): siRNA sense strand
gggcagaaacagcggauug

SEQ ID NO: 351528 - RNA, 19 nt, Homo sapiens
  misc_RNA (1)...(19): siRNA sense strand
ccagcaaaguggaccaugu

SEQ ID NO: 351529 - RNA, 19 nt, Homo sapiens
  misc_RNA (1)...(19): siRNA sense strand
acucggagcugaugaaagg

SEQ ID NO: 351530 - RNA, 19 nt, Homo sapiens
  misc_RNA (1)...(19): siRNA sense strand
gaccgugggugaacucucu

SEQ ID NO: 351531 - RNA, 19 nt, Homo sapiens
  misc_RNA (1)...(19): siRNA sense strand
cucacgauguccaguguua

SEQ ID NO: 351532 - RNA, 19 nt, Homo sapiens
  misc_RNA (1)...(19): siRNA sense strand
uacggaaacugaccaaagu

SEQ ID NO: 351533 - RNA, 19 nt, Homo sapiens
  misc_RNA (1)...(19): siRNA sense strand
gcaaaguggaccauguaau

SEQ ID NO: 351534 - RNA, 19 nt, Homo sapiens
  misc_RNA (1)...(19): siRNA sense strand
gcccauauuucaggauuuc

SEQ ID NO: 351535 - RNA, 19 nt, Homo sapiens
  misc_RNA (1)...(19): siRNA sense strand
gagguugcuuucuuugaca

SEQ ID NO: 351536 - RNA, 19 nt, Homo sapiens
  misc_RNA (1)...(19): siRNA sense strand
aaauucuucuccuagauga

SEQ ID NO: 351537 - RNA, 19 nt, Homo sapiens
  misc_RNA (1)...(19): siRNA sense strand
cgauaucuacggaaacuga

SEQ ID NO: 351538 - RNA, 19 nt, Homo sapiens
  misc_RNA (1)...(19): siRNA sense strand
agaacgguguuaguuauug

SEQ ID NO: 351539 - RNA, 19 nt, Homo sapiens
  misc_RNA (1)...(19): siRNA sense strand
ccaagugguucuggcaaau

SEQ ID NO: 351540 - RNA, 19 nt, Homo sapiens
  misc_RNA (1)...(19): siRNA sense strand
ucucuuccuuccuaaugua

SEQ ID NO: 351541 - RNA, 19 nt, Homo sapiens
  misc_RNA (1)...(19): siRNA sense strand
ugggugaacucucuuccuu

SEQ ID NO: 351542 - RNA, 19 nt, Homo sapiens
  misc_RNA (1)...(19): siRNA sense strand
cugagaacauugcuuaugg

SEQ ID NO: 351543 - RNA, 19 nt, Homo sapiens
  misc_RNA (1)...(19): siRNA sense strand
caaaucaacagugcuuuca

SEQ ID NO: 351544 - RNA, 19 nt, Homo sapiens
  misc_RNA (1)...(19): siRNA sense strand
ggauuucagccuuuccauu

SEQ ID NO: 351545 - RNA, 19 nt, Homo sapiens
  misc_RNA (1)...(19): siRNA sense strand
ucauuauucuccuccauuc

SEQ ID NO: 351546 - RNA, 19 nt, Homo sapiens
  misc_RNA (1)...(19): siRNA sense strand
uggcugagauccaaaauug

SEQ ID NO: 351547 - RNA, 19 nt, Homo sapiens
  misc_RNA (1)...(19): siRNA sense strand
caaaggagggcugcugaug

SEQ ID NO: 351548 - RNA, 19 nt, Homo sapiens
  misc_RNA (1)...(19): siRNA sense strand
uaaugcaguuagcaaggaa

SEQ ID NO: 351549 - RNA, 19 nt, Homo sapiens
  misc_RNA (1)...(19): siRNA sense strand
caaagucacucaggauucc

SEQ ID NO: 351550 - RNA, 19 nt, Homo sapiens
  misc_RNA (1)...(19): siRNA sense strand
aaacaugaagagcugcuuu

SEQ ID NO: 351551 - RNA, 19 nt, Homo sapiens
  misc_RNA (1)...(19): siRNA sense strand
ggauggaagaacgguguua

SEQ ID NO: 351552 - RNA, 19 nt, Homo sapiens
  misc_RNA (1)...(19): siRNA sense strand
cccgugcucugcuaaagaa

SEQ ID NO: 351553 - RNA, 19 nt, Homo sapiens
  misc_RNA (1)...(19): siRNA sense strand
ccaaugcaguggccuucau

SEQ ID NO: 351554 - RNA, 19 nt, Homo sapiens
  misc_RNA (1)...(19): siRNA sense strand
uugcugagaacauugcuua

SEQ ID NO: 351555 - RNA, 19 nt, Homo sapiens
  misc_RNA (1)...(19): siRNA sense strand
gugcccauauuucaggauu

SEQ ID NO: 351556 - RNA, 19 nt, Homo sapiens
  misc_RNA (1)...(19): siRNA sense strand
gcugaggaacguauuggaa

SEQ ID NO: 351557 - RNA, 19 nt, Homo sapiens
  misc_RNA (1)...(19): siRNA sense strand
ggaaaccugaucgugcuuu

SEQ ID NO: 351558 - RNA, 19 nt, Homo sapiens
  misc_RNA (1)...(19): siRNA sense strand
ccucucaggugggcagaaa

SEQ ID NO: 351559 - RNA, 19 nt, Homo sapiens
  misc_RNA (1)...(19): siRNA sense strand
gcugagaacauugcuuaug

SEQ ID NO: 351560 - RNA, 19 nt, Homo sapiens
  misc_RNA (1)...(19): siRNA sense strand
ccaaagucacucaggauuc

SEQ ID NO: 351561 - RNA, 19 nt, Homo sapiens
  misc_RNA (1)...(19): siRNA sense strand
gcuaauaugguugcuguuc

SEQ ID NO: 351562 - RNA, 19 nt, Homo sapiens
  misc_RNA (1)...(19): siRNA sense strand
ccaaaauucuucuccuaga

SEQ ID NO: 351563 - RNA, 19 nt, Homo sapiens
  misc_RNA (1)...(19): siRNA sense strand
aaacagcggauugcgauug

SEQ ID NO: 351564 - RNA, 19 nt, Homo sapiens
  misc_RNA (1)...(19): siRNA sense strand
ccagagaguggcugaagug

SEQ ID NO: 351565 - RNA, 19 nt, Homo sapiens
  misc_RNA (1)...(19): siRNA sense strand
cagaggugcccauauuuca

SEQ ID NO: 351566 - RNA, 19 nt, Homo sapiens
  misc_RNA (1)...(19): siRNA sense strand
ccagaggugcccauauuuc

SEQ ID NO: 351567 - RNA, 19 nt, Homo sapiens
  misc_RNA (1)...(19): siRNA sense strand
ucuguaggcaucaguauga

SEQ ID NO: 351568 - RNA, 19 nt, Homo sapiens
  misc_RNA (1)...(19): siRNA sense strand
gaagcucuagaucgacuga

SEQ ID NO: 351569 - RNA, 19 nt, Homo sapiens
  misc_RNA (1)...(19): siRNA sense strand
gaaacagcggauugcgauu

SEQ ID NO: 351570 - RNA, 19 nt, Homo sapiens
  misc_RNA (1)...(19): siRNA sense strand
uuucaggauuucagccuuu

SEQ ID NO: 351571 - RNA, 19 nt, Homo sapiens
  misc_RNA (1)...(19): siRNA sense strand
cagggugcuuuggaguuua

SEQ ID NO: 351572 - RNA, 19 nt, Homo sapiens
  misc_RNA (1)...(19): siRNA sense strand
ggcacaagccacucagcua

SEQ ID NO: 351573 - RNA, 19 nt, Homo sapiens
  misc_RNA (1)...(19): siRNA sense strand
aaucuggccaccuuuguuu

SEQ ID NO: 351574 - RNA, 19 nt, Homo sapiens
  misc_RNA (1)...(19): siRNA sense strand
gauuaaccgccucucauca

SEQ ID NO: 351575 - RNA, 19 nt, Homo sapiens
  misc_RNA (1)...(19): siRNA sense strand
gauugcccgugcucugcua

SEQ ID NO: 351576 - RNA, 19 nt, Homo sapiens
  misc_RNA (1)...(19): siRNA sense strand
gaacccauuuuguuuucuu

SEQ ID NO: 351577 - RNA, 19 nt, Homo sapiens
  misc_RNA (1)...(19): siRNA sense strand
cccaagugguucuggcaaa

SEQ ID NO: 351578 - RNA, 19 nt, Homo sapiens
  misc_RNA (1)...(19): siRNA sense strand
gcaguuagcaaggaaagag

SEQ ID NO: 351579 - RNA, 19 nt, Homo sapiens
  misc_RNA (1)...(19): siRNA sense strand
cguggugccuccaguguca

SEQ ID NO: 351580 - RNA, 19 nt, Homo sapiens
  misc_RNA (1)...(19): siRNA sense strand
gaccaaagucacucaggau

SEQ ID NO: 351581 - RNA, 19 nt, Homo sapiens
  misc_RNA (1)...(19): siRNA sense strand
aaaggguguucuccucuca

SEQ ID NO: 351582 - RNA, 19 nt, Homo sapiens
  misc_RNA (1)...(19): siRNA sense strand
cccaaggguucaacacugu

SEQ ID NO: 351583 - RNA, 19 nt, Homo sapiens
  misc_RNA (1)...(19): siRNA sense strand
caacccugcuucuggaacu

SEQ ID NO: 351584 - RNA, 19 nt, Homo sapiens
  misc_RNA (1)...(19): siRNA sense strand
uuggaggucugagcucuuu

SEQ ID NO: 351585 - RNA, 19 nt, Homo sapiens
  misc_RNA (1)...(19): siRNA sense strand
agaaauaugccagcaaagu

SEQ ID NO: 351586 - RNA, 19 nt, Homo sapiens
  misc_RNA (1)...(19): siRNA sense strand
gcagucagauuuacuauuu

SEQ ID NO: 351587 - RNA, 19 nt, Homo sapiens
  misc_RNA (1)...(19): siRNA sense strand
ggagacauccucaaugaua

SEQ ID NO: 351588 - RNA, 19 nt, Homo sapiens
  misc_RNA (1)...(19): siRNA sense strand
gaaggaguuuccaaaggua

SEQ ID NO: 351589 - RNA, 19 nt, Homo sapiens
  misc_RNA (1)...(19): siRNA sense strand
aaaggaguguggaaacuua

SEQ ID NO: 351590 - RNA, 19 nt, Homo sapiens
  misc_RNA (1)...(19): siRNA sense strand
cuucggaguucaagaauua

SEQ ID NO: 351591 - RNA, 19 nt, Homo sapiens
  misc_RNA (1)...(19): siRNA sense strand
gagcagccuuuggauguua

SEQ ID NO: 351592 - RNA, 19 nt, Homo sapiens
  misc_RNA (1)...(19): siRNA sense strand
gaacggagacauccucaau

SEQ ID NO: 351593 - RNA, 19 nt, Homo sapiens
  misc_RNA (1)...(19): siRNA sense strand
ucagaaacccaccggauua

SEQ ID NO: 351594 - RNA, 19 nt, Homo sapiens
  misc_RNA (1)...(19): siRNA sense strand
ggaucaggcugcccaagaa

SEQ ID NO: 351595 - RNA, 19 nt, Homo sapiens
  misc_RNA (1)...(19): siRNA sense strand
gcagugcggugcaggcaaa

SEQ ID NO: 351596 - RNA, 19 nt, Homo sapiens
  misc_RNA (1)...(19): siRNA sense strand
gcuaugcuaugaacacuau

SEQ ID NO: 351597 - RNA, 19 nt, Homo sapiens
  misc_RNA (1)...(19): siRNA sense strand
ggaagcuccuggaaaugaa

SEQ ID NO: 351598 - RNA, 19 nt, Homo sapiens
  misc_RNA (1)...(19): siRNA sense strand
gaaugugucugcuuuacca

SEQ ID NO: 351599 - RNA, 19 nt, Homo sapiens
  misc_RNA (1)...(19): siRNA sense strand
ugacagacguuuauagaac

SEQ ID NO: 351600 - RNA, 19 nt, Homo sapiens
  misc_RNA (1)...(19): siRNA sense strand
gaaacccaccggauuauca

SEQ ID NO: 351601 - RNA, 19 nt, Homo sapiens
  misc_RNA (1)...(19): siRNA sense strand
caaagugacagacguuuau

SEQ ID NO: 351602 - RNA, 19 nt, Homo sapiens
  misc_RNA (1)...(19): siRNA sense strand
ugcagaagcuggauaccua

SEQ ID NO: 351603 - RNA, 19 nt, Homo sapiens
  misc_RNA (1)...(19): siRNA sense strand
gaacuggagccaagugugu

SEQ ID NO: 351604 - RNA, 19 nt, Homo sapiens
  misc_RNA (1)...(19): siRNA sense strand
ccuggaagcuccuggaaau

SEQ ID NO: 351605 - RNA, 19 nt, Homo sapiens
  misc_RNA (1)...(19): siRNA sense strand
ccaaagugacagacguuua

SEQ ID NO: 351606 - RNA, 19 nt, Homo sapiens
  misc_RNA (1)...(19): siRNA sense strand
caggcaagaucccaaauca

SEQ ID NO: 351607 - RNA, 19 nt, Homo sapiens
  misc_RNA (1)...(19): siRNA sense strand
ccacagggaacaacaaaga

SEQ ID NO: 351608 - RNA, 19 nt, Homo sapiens
  misc_RNA (1)...(19): siRNA sense strand
gagacauccucaaugauag

SEQ ID NO: 351609 - RNA, 19 nt, Homo sapiens
  misc_RNA (1)...(19): siRNA sense strand
gcagagagcacugauugga

SEQ ID NO: 351610 - RNA, 19 nt, Homo sapiens
  misc_RNA (1)...(19): siRNA sense strand
uguccugucuucagaaauu

SEQ ID NO: 351611 - RNA, 19 nt, Homo sapiens
  misc_RNA (1)...(19): siRNA sense strand
acggagacauccucaauga

SEQ ID NO: 351612 - RNA, 19 nt, Homo sapiens
  misc_RNA (1)...(19): siRNA sense strand
caaaguggaacucuucaga

SEQ ID NO: 351613 - RNA, 19 nt, Homo sapiens
  misc_RNA (1)...(19): siRNA sense strand
gcaagugacaaaggaaauu

SEQ ID NO: 351614 - RNA, 19 nt, Homo sapiens
  misc_RNA (1)...(19): siRNA sense strand
gauaagccggugcaaguga

SEQ ID NO: 351615 - RNA, 19 nt, Homo sapiens
  misc_RNA (1)...(19): siRNA sense strand
agaaggaguuuccaaaggu

SEQ ID NO: 351616 - RNA, 19 nt, Homo sapiens
  misc_RNA (1)...(19): siRNA sense strand
cagaaggaguuuccaaagg

SEQ ID NO: 351617 - RNA, 19 nt, Homo sapiens
  misc_RNA (1)...(19): siRNA sense strand
gcucagcuaugcuaugaac

SEQ ID NO: 351618 - RNA, 19 nt, Homo sapiens
  misc_RNA (1)...(19): siRNA sense strand
gcuguccugucuucagaaa

SEQ ID NO: 351619 - RNA, 19 nt, Homo sapiens
  misc_RNA (1)...(19): siRNA sense strand
cagcucaccaucagaguuu

SEQ ID NO: 351620 - RNA, 19 nt, Homo sapiens
  misc_RNA (1)...(19): siRNA sense strand
gcagaaaaguggcccaauc

SEQ ID NO: 351621 - RNA, 19 nt, Homo sapiens
  misc_RNA (1)...(19): siRNA sense strand
uagccaugcugaggucaua

SEQ ID NO: 351622 - RNA, 19 nt, Homo sapiens
  misc_RNA (1)...(19): siRNA sense strand
aaccaugaguggacauuau

SEQ ID NO: 351623 - RNA, 19 nt, Homo sapiens
  misc_RNA (1)...(19): siRNA sense strand
ccaaaucagcaaaguggaa

SEQ ID NO: 351624 - RNA, 19 nt, Homo sapiens
  misc_RNA (1)...(19): siRNA sense strand
ccugucagcuguggucauu

SEQ ID NO: 351625 - RNA, 19 nt, Homo sapiens
  misc_RNA (1)...(19): siRNA sense strand
uggcagcgguggugaagau

SEQ ID NO: 351626 - RNA, 19 nt, Homo sapiens
  misc_RNA (1)...(19): siRNA sense strand
guggaacucuucagaucau

SEQ ID NO: 351627 - RNA, 19 nt, Homo sapiens
  misc_RNA (1)...(19): siRNA sense strand
gacagacguuuauagaacu

SEQ ID NO: 351628 - RNA, 19 nt, Homo sapiens
  misc_RNA (1)...(19): siRNA sense strand
ccaaaaggcuucggaguuc

SEQ ID NO: 351629 - RNA, 19 nt, Homo sapiens
  misc_RNA (1)...(19): siRNA sense strand
cagcaaaguggaacucuuc

SEQ ID NO: 351630 - RNA, 19 nt, Homo sapiens
  misc_RNA (1)...(19): siRNA sense strand
gacagaacacgcuccaugu

SEQ ID NO: 351631 - RNA, 19 nt, Homo sapiens
  misc_RNA (1)...(19): siRNA sense strand
gaucccaaaucagcaaagu

SEQ ID NO: 351632 - RNA, 19 nt, Homo sapiens
  misc_RNA (1)...(19): siRNA sense strand
gccagaaggaguuuccaaa

SEQ ID NO: 351633 - RNA, 19 nt, Homo sapiens
  misc_RNA (1)...(19): siRNA sense strand
gggaucaggcugcccaaga

SEQ ID NO: 351634 - RNA, 19 nt, Homo sapiens
  misc_RNA (1)...(19): siRNA sense strand
gaagcuccuggaaaugaaa

SEQ ID NO: 351635 - RNA, 19 nt, Homo sapiens
  misc_RNA (1)...(19): siRNA sense strand
ucaguagaagccaguagua

SEQ ID NO: 351636 - RNA, 19 nt, Homo sapiens
  misc_RNA (1)...(19): siRNA sense strand
gaauugcaagggacaagug

SEQ ID NO: 351637 - RNA, 19 nt, Homo sapiens
  misc_RNA (1)...(19): siRNA sense strand
caagaucccaaaucagcaa

SEQ ID NO: 351638 - RNA, 19 nt, Homo sapiens
  misc_RNA (1)...(19): siRNA sense strand
uagcccaggucgacuuguu

SEQ ID NO: 351639 - RNA, 19 nt, Homo sapiens
  misc_RNA (1)...(19): siRNA sense strand
gcuucggaguucaagaauu

SEQ ID NO: 351640 - RNA, 19 nt, Homo sapiens
  misc_RNA (1)...(19): siRNA sense strand
gaaaaguggcccaaucuca

SEQ ID NO: 351641 - RNA, 19 nt, Homo sapiens
  misc_RNA (1)...(19): siRNA sense strand
caagugacaaaggaaauug

SEQ ID NO: 351642 - RNA, 19 nt, Homo sapiens
  misc_RNA (1)...(19): siRNA sense strand
uugcucagcuaugcuauga

SEQ ID NO: 351643 - RNA, 19 nt, Homo sapiens
  misc_RNA (1)...(19): siRNA sense strand
aaagccgggugcugcguuu

SEQ ID NO: 351644 - RNA, 19 nt, Homo sapiens
  misc_RNA (1)...(19): siRNA sense strand
ucauuccgaugcuugaguu

SEQ ID NO: 351645 - RNA, 19 nt, Homo sapiens
  misc_RNA (1)...(19): siRNA sense strand
gaggaagaacggagacauc

SEQ ID NO: 351646 - RNA, 19 nt, Homo sapiens
  misc_RNA (1)...(19): siRNA sense strand
aaguggaacucuucagauc

SEQ ID NO: 351647 - RNA, 19 nt, Homo sapiens
  misc_RNA (1)...(19): siRNA sense strand
gcagcucaccaucagaguu

SEQ ID NO: 351648 - RNA, 19 nt, Homo sapiens
  misc_RNA (1)...(19): siRNA sense strand
uaugaacacuaugggauca

SEQ ID NO: 351649 - RNA, 19 nt, Homo sapiens
  misc_RNA (1)...(19): siRNA sense strand
cagcgguggugaagauaca

SEQ ID NO: 351650 - RNA, 19 nt, Homo sapiens
  misc_RNA (1)...(19): siRNA sense strand
acagggaacaacaaagaaa

SEQ ID NO: 351651 - RNA, 19 nt, Homo sapiens
  misc_RNA (1)...(19): siRNA sense strand
uggaagcuccuggaaauga

SEQ ID NO: 351652 - RNA, 19 nt, Homo sapiens
  misc_RNA (1)...(19): siRNA sense strand
caguagaagccaguaguaa

SEQ ID NO: 351653 - RNA, 19 nt, Homo sapiens
  misc_RNA (1)...(19): siRNA sense strand
ucagcaaaguggaacucuu

SEQ ID NO: 351654 - RNA, 19 nt, Homo sapiens
  misc_RNA (1)...(19): siRNA sense strand
ccaggaagccaugcagaga

SEQ ID NO: 351655 - RNA, 19 nt, Homo sapiens
  misc_RNA (1)...(19): siRNA sense strand
gacaagauggcccgaugga

SEQ ID NO: 351656 - RNA, 19 nt, Homo sapiens
  misc_RNA (1)...(19): siRNA sense strand
gugacagacguuuauagaa

SEQ ID NO: 351657 - RNA, 19 nt, Homo sapiens
  misc_RNA (1)...(19): siRNA sense strand
gauuaucaccaguucaagu

SEQ ID NO: 351658 - RNA, 19 nt, Homo sapiens
  misc_RNA (1)...(19): siRNA sense strand
gggcacuguugaugcacuu

SEQ ID NO: 351659 - RNA, 19 nt, Homo sapiens
  misc_RNA (1)...(19): siRNA sense strand
ccagaaggaguuuccaaag

SEQ ID NO: 351660 - RNA, 19 nt, Homo sapiens
  misc_RNA (1)...(19): siRNA sense strand
aauacugcagucagauuua

SEQ ID NO: 351661 - RNA, 19 nt, Homo sapiens
  misc_RNA (1)...(19): siRNA sense strand
auuggaaggugucagaaug

SEQ ID NO: 351662 - RNA, 19 nt, Homo sapiens
  misc_RNA (1)...(19): siRNA sense strand
cagagagcacugauuggaa

SEQ ID NO: 351663 - RNA, 19 nt, Homo sapiens
  misc_RNA (1)...(19): siRNA sense strand
uuccgaugcuugaguuuga

SEQ ID NO: 351664 - RNA, 19 nt, Homo sapiens
  misc_RNA (1)...(19): siRNA sense strand
aaaccaugaguggacauua

SEQ ID NO: 351665 - RNA, 19 nt, Homo sapiens
  misc_RNA (1)...(19): siRNA sense strand
cggauuaucaccaguucaa

SEQ ID NO: 351666 - RNA, 19 nt, Homo sapiens
  misc_RNA (1)...(19): siRNA sense strand
ugagcagccuuuggauguu

SEQ ID NO: 351667 - RNA, 19 nt, Homo sapiens
  misc_RNA (1)...(19): siRNA sense strand
ggaaggugucagaaugugu

SEQ ID NO: 351668 - RNA, 19 nt, Homo sapiens
  misc_RNA (1)...(19): siRNA sense strand
aaagugacagacguuuaua

SEQ ID NO: 351669 - RNA, 19 nt, Homo sapiens
  misc_RNA (1)...(19): siRNA sense strand
ugucagcuguggucauugg

SEQ ID NO: 351670 - RNA, 19 nt, Homo sapiens
  misc_RNA (1)...(19): siRNA sense strand
ggaacucuucagaucauuc

SEQ ID NO: 351671 - RNA, 19 nt, Homo sapiens
  misc_RNA (1)...(19): siRNA sense strand
gugcaagugacaaaggaaa

SEQ ID NO: 351672 - RNA, 19 nt, Homo sapiens
  misc_RNA (1)...(19): siRNA sense strand
cugauaagccggugcaagu

SEQ ID NO: 351673 - RNA, 19 nt, Homo sapiens
  misc_RNA (1)...(19): siRNA sense strand
cagaaacccaccggauuau

SEQ ID NO: 351674 - RNA, 19 nt, Homo sapiens
  misc_RNA (1)...(19): siRNA sense strand
gauagcccaggucgacuug

SEQ ID NO: 351675 - RNA, 19 nt, Homo sapiens
  misc_RNA (1)...(19): siRNA sense strand
guggaccgcggaugagauu

SEQ ID NO: 351676 - RNA, 19 nt, Homo sapiens
  misc_RNA (1)...(19): siRNA sense strand
gauuggaaggugucagaau

SEQ ID NO: 351677 - RNA, 19 nt, Homo sapiens
  misc_RNA (1)...(19): siRNA sense strand
gaggucauagccagaagga

SEQ ID NO: 351678 - RNA, 19 nt, Homo sapiens
  misc_RNA (1)...(19): siRNA sense strand
ucagaucauuccagaagcu

SEQ ID NO: 351679 - RNA, 19 nt, Homo sapiens
  misc_RNA (1)...(19): siRNA sense strand
cagucagauuuacuauuug

SEQ ID NO: 351680 - RNA, 19 nt, Homo sapiens
  misc_RNA (1)...(19): siRNA sense strand
ggaaaugaaagaaaaugug

SEQ ID NO: 351681 - RNA, 19 nt, Homo sapiens
  misc_RNA (1)...(19): siRNA sense strand
ugaugcacuugcuggaaga

SEQ ID NO: 351682 - RNA, 19 nt, Homo sapiens
  misc_RNA (1)...(19): siRNA sense strand
guguguaccuggagaagcu

SEQ ID NO: 351683 - RNA, 19 nt, Homo sapiens
  misc_RNA (1)...(19): siRNA sense strand
cugagcagccuuuggaugu

SEQ ID NO: 351684 - RNA, 19 nt, Homo sapiens
  misc_RNA (1)...(19): siRNA sense strand
caacaaagaaaacaauugg

SEQ ID NO: 351685 - RNA, 19 nt, Homo sapiens
  misc_RNA (1)...(19): siRNA sense strand
augcagagagcacugauug

SEQ ID NO: 351686 - RNA, 19 nt, Homo sapiens
  misc_RNA (1)...(19): siRNA sense strand
caacggagguguacaaauu

SEQ ID NO: 351687 - RNA, 19 nt, Homo sapiens
  misc_RNA (1)...(19): siRNA sense strand
gcaaauauccugacauugu

SEQ ID NO: 351688 - RNA, 19 nt, Homo sapiens
  misc_RNA (1)...(19): siRNA sense strand
caaauacucugcgaucuca

SEQ ID NO: 351689 - RNA, 19 nt, Homo sapiens
  misc_RNA (1)...(19): siRNA sense strand
cauaggaugugcagccuuu

SEQ ID NO: 351690 - RNA, 19 nt, Homo sapiens
  misc_RNA (1)...(19): siRNA sense strand
gcacgacccuaacggugaa

SEQ ID NO: 351691 - RNA, 19 nt, Homo sapiens
  misc_RNA (1)...(19): siRNA sense strand
gaaguucugguuacccaua

SEQ ID NO: 351692 - RNA, 19 nt, Homo sapiens
  misc_RNA (1)...(19): siRNA sense strand
gaugcauacuuauuuguug

SEQ ID NO: 351693 - RNA, 19 nt, Homo sapiens
  misc_RNA (1)...(19): siRNA sense strand
ucaaugguucugccaauua

SEQ ID NO: 351694 - RNA, 19 nt, Homo sapiens
  misc_RNA (1)...(19): siRNA sense strand
gaagucaggccucugguau

SEQ ID NO: 351695 - RNA, 19 nt, Homo sapiens
  misc_RNA (1)...(19): siRNA sense strand
caacaacagugucucuuuu

SEQ ID NO: 351696 - RNA, 19 nt, Homo sapiens
  misc_RNA (1)...(19): siRNA sense strand
caaugguucugccaauuau

SEQ ID NO: 351697 - RNA, 19 nt, Homo sapiens
  misc_RNA (1)...(19): siRNA sense strand
ccauuaagagucugaaauu

SEQ ID NO: 351698 - RNA, 19 nt, Homo sapiens
  misc_RNA (1)...(19): siRNA sense strand
acaggaggauauuugcaua

SEQ ID NO: 351699 - RNA, 19 nt, Homo sapiens
  misc_RNA (1)...(19): siRNA sense strand
agucaggccucugguauuu

SEQ ID NO: 351700 - RNA, 19 nt, Homo sapiens
  misc_RNA (1)...(19): siRNA sense strand
augcaaauauccugacauu

SEQ ID NO: 351701 - RNA, 19 nt, Homo sapiens
  misc_RNA (1)...(19): siRNA sense strand
ccaacaacagugucucuuu

SEQ ID NO: 351702 - RNA, 19 nt, Homo sapiens
  misc_RNA (1)...(19): siRNA sense strand
uuaagagucugaaauucug

SEQ ID NO: 351703 - RNA, 19 nt, Homo sapiens
  misc_RNA (1)...(19): siRNA sense strand
auucugccauucucaguua

SEQ ID NO: 351704 - RNA, 19 nt, Homo sapiens
  misc_RNA (1)...(19): siRNA sense strand
ggaugcauacuuauuuguu

SEQ ID NO: 351705 - RNA, 19 nt, Homo sapiens
  misc_RNA (1)...(19): siRNA sense strand
agucugaaauucugccauu

SEQ ID NO: 351706 - RNA, 19 nt, Homo sapiens
  misc_RNA (1)...(19): siRNA sense strand
gcaaauacucugcgaucuc

SEQ ID NO: 351707 - RNA, 19 nt, Homo sapiens
  misc_RNA (1)...(19): siRNA sense strand
cagcugaaguucugguuac

SEQ ID NO: 351708 - RNA, 19 nt, Homo sapiens
  misc_RNA (1)...(19): siRNA sense strand
ucacaacggagguguacaa

SEQ ID NO: 351709 - RNA, 19 nt, Homo sapiens
  misc_RNA (1)...(19): siRNA sense strand
cuauacaacuuggaccauu

SEQ ID NO: 351710 - RNA, 19 nt, Homo sapiens
  misc_RNA (1)...(19): siRNA sense strand
cauuaagagucugaaauuc

SEQ ID NO: 351711 - RNA, 19 nt, Homo sapiens
  misc_RNA (1)...(19): siRNA sense strand
uauacaacuuggaccauuc

SEQ ID NO: 351712 - RNA, 19 nt, Homo sapiens
  misc_RNA (1)...(19): siRNA sense strand
aaucaaugguucugccaau

SEQ ID NO: 351713 - RNA, 19 nt, Homo sapiens
  misc_RNA (1)...(19): siRNA sense strand
auucucaugccaacuauua

SEQ ID NO: 351714 - RNA, 19 nt, Homo sapiens
  misc_RNA (1)...(19): siRNA sense strand
caacuuggaccauucucau

SEQ ID NO: 351715 - RNA, 19 nt, Homo sapiens
  misc_RNA (1)...(19): siRNA sense strand
ugggaugcauacuuauuug

SEQ ID NO: 351716 - RNA, 19 nt, Homo sapiens
  misc_RNA (1)...(19): siRNA sense strand
uaacggugaauacauguuc

SEQ ID NO: 351717 - RNA, 19 nt, Homo sapiens
  misc_RNA (1)...(19): siRNA sense strand
ggaugugcagccuuuguug

SEQ ID NO: 351718 - RNA, 19 nt, Homo sapiens
  misc_RNA (1)...(19): siRNA sense strand
ccagugugcacgacccuaa

SEQ ID NO: 351719 - RNA, 19 nt, Homo sapiens
  misc_RNA (1)...(19): siRNA sense strand
uaacaggagaaaucaaugg

SEQ ID NO: 351720 - RNA, 19 nt, Homo sapiens
  misc_RNA (1)...(19): siRNA sense strand
aaaaggaaguggaaacaca

SEQ ID NO: 351721 - RNA, 19 nt, Homo sapiens
  misc_RNA (1)...(19): siRNA sense strand
ucaggccucugguauuucu

SEQ ID NO: 351722 - RNA, 19 nt, Homo sapiens
  misc_RNA (1)...(19): siRNA sense strand
ucaguuauccaacaacagu

SEQ ID NO: 351723 - RNA, 19 nt, Homo sapiens
  misc_RNA (1)...(19): siRNA sense strand
guugccagcugaaguucug

SEQ ID NO: 351724 - RNA, 19 nt, Homo sapiens
  misc_RNA (1)...(19): siRNA sense strand
cccuaacggugaauacaug

SEQ ID NO: 351725 - RNA, 19 nt, Homo sapiens
  misc_RNA (1)...(19): siRNA sense strand
aaaugcaguugcugaaagg

SEQ ID NO: 351726 - RNA, 19 nt, Homo sapiens
  misc_RNA (1)...(19): siRNA sense strand
caugagagcagugaacaca

SEQ ID NO: 351727 - RNA, 19 nt, Homo sapiens
  misc_RNA (1)...(19): siRNA sense strand
ugccaauuaugagauguuu

SEQ ID NO: 351728 - RNA, 19 nt, Homo sapiens
  misc_RNA (1)...(19): siRNA sense strand
ucucaguuauccaacaaca

SEQ ID NO: 351729 - RNA, 19 nt, Homo sapiens
  misc_RNA (1)...(19): siRNA sense strand
gguauuucuuucucuucug

SEQ ID NO: 351730 - RNA, 19 nt, Homo sapiens
  misc_RNA (1)...(19): siRNA sense strand
gugcagccuuuguuguagu

SEQ ID NO: 351731 - RNA, 19 nt, Homo sapiens
  misc_RNA (1)...(19): siRNA sense strand
gaugugcagccuuuguugu

SEQ ID NO: 351732 - RNA, 19 nt, Homo sapiens
  misc_RNA (1)...(19): siRNA sense strand
uauuacuucugcaaccuau

SEQ ID NO: 351733 - RNA, 19 nt, Homo sapiens
  misc_RNA (1)...(19): siRNA sense strand
ggcaaauacucugcgaucu

SEQ ID NO: 351734 - RNA, 19 nt, Homo sapiens
  misc_RNA (1)...(19): siRNA sense strand
gccauucucaguuauccaa

SEQ ID NO: 351735 - RNA, 19 nt, Homo sapiens
  misc_RNA (1)...(19): siRNA sense strand
gcgaucucacuaagacaaa

SEQ ID NO: 351736 - RNA, 19 nt, Homo sapiens
  misc_RNA (1)...(19): siRNA sense strand
ccauucucaugccaacuau

SEQ ID NO: 351737 - RNA, 19 nt, Homo sapiens
  misc_RNA (1)...(19): siRNA sense strand
cucuucugcuugcgcauua

SEQ ID NO: 351738 - RNA, 19 nt, Homo sapiens
  misc_RNA (1)...(19): siRNA sense strand
ccucugguauuucuuucuc

SEQ ID NO: 351739 - RNA, 19 nt, Homo sapiens
  misc_RNA (1)...(19): siRNA sense strand
uugggaugcauacuuauuu

SEQ ID NO: 351740 - RNA, 19 nt, Homo sapiens
  misc_RNA (1)...(19): siRNA sense strand
cuucugcaaccuaucaauu

SEQ ID NO: 351741 - RNA, 19 nt, Homo sapiens
  misc_RNA (1)...(19): siRNA sense strand
uuacuucugcaaccuauca

SEQ ID NO: 351742 - RNA, 19 nt, Homo sapiens
  misc_RNA (1)...(19): siRNA sense strand
gcaaauaccugaugaagag

SEQ ID NO: 351743 - RNA, 19 nt, Homo sapiens
  misc_RNA (1)...(19): siRNA sense strand
gaaagaagauccacaguac

SEQ ID NO: 351744 - RNA, 19 nt, Homo sapiens
  misc_RNA (1)...(19): siRNA sense strand
ucacggagauccuuucuaa

SEQ ID NO: 351745 - RNA, 19 nt, Homo sapiens
  misc_RNA (1)...(19): siRNA sense strand
gcacagcuauugacucuau

SEQ ID NO: 351746 - RNA, 19 nt, Homo sapiens
  misc_RNA (1)...(19): siRNA sense strand
gaaagaagcaaauugauca

SEQ ID NO: 351747 - RNA, 19 nt, Homo sapiens
  misc_RNA (1)...(19): siRNA sense strand
gaccuuaccuccacuaaau

SEQ ID NO: 351748 - RNA, 19 nt, Homo sapiens
  misc_RNA (1)...(19): siRNA sense strand
aauaggaaauggagucuua

SEQ ID NO: 351749 - RNA, 19 nt, Homo sapiens
  misc_RNA (1)...(19): siRNA sense strand
gaagagggcauuguuauug

SEQ ID NO: 351750 - RNA, 19 nt, Homo sapiens
  misc_RNA (1)...(19): siRNA sense strand
ccacaggaaacaacaauua

SEQ ID NO: 351751 - RNA, 19 nt, Homo sapiens
  misc_RNA (1)...(19): siRNA sense strand
aaacacagcuacacaagau

SEQ ID NO: 351752 - RNA, 19 nt, Homo sapiens
  misc_RNA (1)...(19): siRNA sense strand
gaagcaaauugaucagaga

SEQ ID NO: 351753 - RNA, 19 nt, Homo sapiens
  misc_RNA (1)...(19): siRNA sense strand
gcccgaagauccaguagaa

SEQ ID NO: 351754 - RNA, 19 nt, Homo sapiens
  misc_RNA (1)...(19): siRNA sense strand
gaucagagacauuauggaa

SEQ ID NO: 351755 - RNA, 19 nt, Homo sapiens
  misc_RNA (1)...(19): siRNA sense strand
gaugaccaguuaaauguau

SEQ ID NO: 351756 - RNA, 19 nt, Homo sapiens
  misc_RNA (1)...(19): siRNA sense strand
gacaacaaguuauuuccaa

SEQ ID NO: 351757 - RNA, 19 nt, Homo sapiens
  misc_RNA (1)...(19): siRNA sense strand
ucagggugaugaccaguua

SEQ ID NO: 351758 - RNA, 19 nt, Homo sapiens
  misc_RNA (1)...(19): siRNA sense strand
gaaacaacaauuacagaga

SEQ ID NO: 351759 - RNA, 19 nt, Homo sapiens
  misc_RNA (1)...(19): siRNA sense strand
gugaggaacuggcaucaga

SEQ ID NO: 351760 - RNA, 19 nt, Homo sapiens
  misc_RNA (1)...(19): siRNA sense strand
aggaugagguguucuauga

SEQ ID NO: 351761 - RNA, 19 nt, Homo sapiens
  misc_RNA (1)...(19): siRNA sense strand
gaugaagagggcauuguua

SEQ ID NO: 351762 - RNA, 19 nt, Homo sapiens
  misc_RNA (1)...(19): siRNA sense strand
gagguuucauggaagauuu

SEQ ID NO: 351763 - RNA, 19 nt, Homo sapiens
  misc_RNA (1)...(19): siRNA sense strand
gugaaaagcugguggaaaa

SEQ ID NO: 351764 - RNA, 19 nt, Homo sapiens
  misc_RNA (1)...(19): siRNA sense strand
uacaggaucugauuaugaa

SEQ ID NO: 351765 - RNA, 19 nt, Homo sapiens
  misc_RNA (1)...(19): siRNA sense strand
ccgaagauccaguagaaua

SEQ ID NO: 351766 - RNA, 19 nt, Homo sapiens
  misc_RNA (1)...(19): siRNA sense strand
cagaguugauugaggagua

SEQ ID NO: 351767 - RNA, 19 nt, Homo sapiens
  misc_RNA (1)...(19): siRNA sense strand
aaucagagacucaaagaaa

SEQ ID NO: 351768 - RNA, 19 nt, Homo sapiens
  misc_RNA (1)...(19): siRNA sense strand
gagacucaaagaaagauua

SEQ ID NO: 351769 - RNA, 19 nt, Homo sapiens
  misc_RNA (1)...(19): siRNA sense strand
gaugagguguucuaugaca

SEQ ID NO: 351770 - RNA, 19 nt, Homo sapiens
  misc_RNA (1)...(19): siRNA sense strand
uaugggagguuucauggaa

SEQ ID NO: 351771 - RNA, 19 nt, Homo sapiens
  misc_RNA (1)...(19): siRNA sense strand
gaaauguaaugccugaaaa

SEQ ID NO: 351772 - RNA, 19 nt, Homo sapiens
  misc_RNA (1)...(19): siRNA sense strand
aaaggagacuaaugaacuu

SEQ ID NO: 351773 - RNA, 19 nt, Homo sapiens
  misc_RNA (1)...(19): siRNA sense strand
gaagauuugagaaagugua

SEQ ID NO: 351774 - RNA, 19 nt, Homo sapiens
  misc_RNA (1)...(19): siRNA sense strand
caaaggagacuaaugaacu

SEQ ID NO: 351775 - RNA, 19 nt, Homo sapiens
  misc_RNA (1)...(19): siRNA sense strand
gcaaauugaucagagacau

SEQ ID NO: 351776 - RNA, 19 nt, Homo sapiens
  misc_RNA (1)...(19): siRNA sense strand
gauacaggaucugauuaug

SEQ ID NO: 351777 - RNA, 19 nt, Homo sapiens
  misc_RNA (1)...(19): siRNA sense strand
gugggagaauuauuaagaa

SEQ ID NO: 351778 - RNA, 19 nt, Homo sapiens
  misc_RNA (1)...(19): siRNA sense strand
cuucaacucugcacagcua

SEQ ID NO: 351779 - RNA, 19 nt, Homo sapiens
  misc_RNA (1)...(19): siRNA sense strand
gcauuguuauugauggauu

SEQ ID NO: 351780 - RNA, 19 nt, Homo sapiens
  misc_RNA (1)...(19): siRNA sense strand
agaaagaagauccacagua

SEQ ID NO: 351781 - RNA, 19 nt, Homo sapiens
  misc_RNA (1)...(19): siRNA sense strand
gaaaauugcagaacgauau

SEQ ID NO: 351782 - RNA, 19 nt, Homo sapiens
  misc_RNA (1)...(19): siRNA sense strand
ggaggacagucacggagau

SEQ ID NO: 351783 - RNA, 19 nt, Homo sapiens
  misc_RNA (1)...(19): siRNA sense strand
gauuggagacccacaguug

SEQ ID NO: 351784 - RNA, 19 nt, Homo sapiens
  misc_RNA (1)...(19): siRNA sense strand
ggaacuggcaucagaaucu

SEQ ID NO: 351785 - RNA, 19 nt, Homo sapiens
  misc_RNA (1)...(19): siRNA sense strand
ggaaauggagucuuauugc

SEQ ID NO: 351786 - RNA, 19 nt, Homo sapiens
  misc_RNA (1)...(19): siRNA sense strand
cacaguaccagcagcaaua

SEQ ID NO: 351787 - RNA, 19 nt, Homo sapiens
  misc_RNA (1)...(19): siRNA sense strand
aagagggcauuguuauuga

SEQ ID NO: 351788 - RNA, 19 nt, Homo sapiens
  misc_RNA (1)...(19): siRNA sense strand
caaagaaagauuacugaag

SEQ ID NO: 351789 - RNA, 19 nt, Homo sapiens
  misc_RNA (1)...(19): siRNA sense strand
gaccagacgacaauguaaa

SEQ ID NO: 351790 - RNA, 19 nt, Homo sapiens
  misc_RNA (1)...(19): siRNA sense strand
gugaugaccaguuaaaugu

SEQ ID NO: 351791 - RNA, 19 nt, Homo sapiens
  misc_RNA (1)...(19): siRNA sense strand
ggugaugaccaguuaaaug

SEQ ID NO: 351792 - RNA, 19 nt, Homo sapiens
  misc_RNA (1)...(19): siRNA sense strand
acacagcuacacaagauaa

SEQ ID NO: 351793 - RNA, 19 nt, Homo sapiens
  misc_RNA (1)...(19): siRNA sense strand
caaauugaucagagacauu

SEQ ID NO: 351794 - RNA, 19 nt, Homo sapiens
  misc_RNA (1)...(19): siRNA sense strand
gauaauuacaacuggagaa

SEQ ID NO: 351795 - RNA, 19 nt, Homo sapiens
  misc_RNA (1)...(19): siRNA sense strand
ugaaagaagcaaauugauc

SEQ ID NO: 351796 - RNA, 19 nt, Homo sapiens
  misc_RNA (1)...(19): siRNA sense strand
ugaagagggcauuguuauu

SEQ ID NO: 351797 - RNA, 19 nt, Homo sapiens
  misc_RNA (1)...(19): siRNA sense strand
agaaauguaaugccugaaa

SEQ ID NO: 351798 - RNA, 19 nt, Homo sapiens
  misc_RNA (1)...(19): siRNA sense strand
cauggaagauuugagaaag

SEQ ID NO: 351799 - RNA, 19 nt, Homo sapiens
  misc_RNA (1)...(19): siRNA sense strand
ucugaaagaagcaaauuga

SEQ ID NO: 351800 - RNA, 19 nt, Homo sapiens
  misc_RNA (1)...(19): siRNA sense strand
gaacuggguggcugugaca

SEQ ID NO: 351801 - RNA, 19 nt, Homo sapiens
  misc_RNA (1)...(19): siRNA sense strand
cugcuccauugguuaaaua

SEQ ID NO: 351802 - RNA, 19 nt, Homo sapiens
  misc_RNA (1)...(19): siRNA sense strand
acggagauccuuucuaaga

SEQ ID NO: 351803 - RNA, 19 nt, Homo sapiens
  misc_RNA (1)...(19): siRNA sense strand
gaaagugacacggaucucu

SEQ ID NO: 351804 - RNA, 19 nt, Homo sapiens
  misc_RNA (1)...(19): siRNA sense strand
gggcauuguuauugaugga

SEQ ID NO: 351805 - RNA, 19 nt, Homo sapiens
  misc_RNA (1)...(19): siRNA sense strand
gaagaccuuaccuccacua

SEQ ID NO: 351806 - RNA, 19 nt, Homo sapiens
  misc_RNA (1)...(19): siRNA sense strand
uaccagaccucgaccaaaa

SEQ ID NO: 351807 - RNA, 19 nt, Homo sapiens
  misc_RNA (1)...(19): siRNA sense strand
gacaaggugaaaugggaua

SEQ ID NO: 351808 - RNA, 19 nt, Homo sapiens
  misc_RNA (1)...(19): siRNA sense strand
auacaggaucugauuauga

SEQ ID NO: 351809 - RNA, 19 nt, Homo sapiens
  misc_RNA (1)...(19): siRNA sense strand
ugaugcaaauaccugauga

SEQ ID NO: 351810 - RNA, 19 nt, Homo sapiens
  misc_RNA (1)...(19): siRNA sense strand
ucagagacucaaagaaaga

SEQ ID NO: 351811 - RNA, 19 nt, Homo sapiens
  misc_RNA (1)...(19): siRNA sense strand
gcgaugaggaugagguguu

SEQ ID NO: 351812 - RNA, 19 nt, Homo sapiens
  misc_RNA (1)...(19): siRNA sense strand
cgaccagacgacaauguaa

SEQ ID NO: 351813 - RNA, 19 nt, Homo sapiens
  misc_RNA (1)...(19): siRNA sense strand
gcugugacaaggugaaaug

SEQ ID NO: 351814 - RNA, 19 nt, Homo sapiens
  misc_RNA (1)...(19): siRNA sense strand
cugcacagcuauugacucu

SEQ ID NO: 351815 - RNA, 19 nt, Homo sapiens
  misc_RNA (1)...(19): siRNA sense strand
caacucugcacagcuauug

SEQ ID NO: 351816 - RNA, 19 nt, Homo sapiens
  misc_RNA (1)...(19): siRNA sense strand
gacaucagcauggcaguug

SEQ ID NO: 351817 - RNA, 19 nt, Homo sapiens
  misc_RNA (1)...(19): siRNA sense strand
gccaagauaauuacaacug

SEQ ID NO: 351818 - RNA, 19 nt, Homo sapiens
  misc_RNA (1)...(19): siRNA sense strand
uggaagauuugagaaagug

SEQ ID NO: 351819 - RNA, 19 nt, Homo sapiens
  misc_RNA (1)...(19): siRNA sense strand
acccaaaggagacuaauga

SEQ ID NO: 351820 - RNA, 19 nt, Homo sapiens
  misc_RNA (1)...(19): siRNA sense strand
cagcuacacaagauaaaug

SEQ ID NO: 351821 - RNA, 19 nt, Homo sapiens
  misc_RNA (1)...(19): siRNA sense strand
ccaaccgccuucuccaaag

SEQ ID NO: 351822 - RNA, 19 nt, Homo sapiens
  misc_RNA (1)...(19): siRNA sense strand
ugauacaggaucugauuau

SEQ ID NO: 351823 - RNA, 19 nt, Homo sapiens
  misc_RNA (1)...(19): siRNA sense strand
gaccuugauccuucgauga

SEQ ID NO: 351824 - RNA, 19 nt, Homo sapiens
  misc_RNA (1)...(19): siRNA sense strand
gcagaacgauauggauucc

SEQ ID NO: 351825 - RNA, 19 nt, Homo sapiens
  misc_RNA (1)...(19): siRNA sense strand
gcuauugacucuauuuucu

SEQ ID NO: 351826 - RNA, 19 nt, Homo sapiens
  misc_RNA (1)...(19): siRNA sense strand
gauaaaugcagagggaaca

SEQ ID NO: 351827 - RNA, 19 nt, Homo sapiens
  misc_RNA (1)...(19): siRNA sense strand
gaggaacuggcaucagaau

SEQ ID NO: 351828 - RNA, 19 nt, Homo sapiens
  misc_RNA (1)...(19): siRNA sense strand
gguccuggcucuggcaaag

SEQ ID NO: 351829 - RNA, 19 nt, Homo sapiens
  misc_RNA (1)...(19): siRNA sense strand
ggacacuggagagaucauu

SEQ ID NO: 351830 - RNA, 19 nt, Homo sapiens
  misc_RNA (1)...(19): siRNA sense strand
gagguguucuaugacauca

SEQ ID NO: 351831 - RNA, 19 nt, Homo sapiens
  misc_RNA (1)...(19): siRNA sense strand
cgaugaggaugagguguuc

SEQ ID NO: 351832 - RNA, 19 nt, Homo sapiens
  misc_RNA (1)...(19): siRNA sense strand
cuccauugguuaaauacuu

SEQ ID NO: 351833 - RNA, 19 nt, Homo sapiens
  misc_RNA (1)...(19): siRNA sense strand
cuaaucagagacucaaaga

SEQ ID NO: 351834 - RNA, 19 nt, Homo sapiens
  misc_RNA (1)...(19): siRNA sense strand
ugugggagaauuauuaaga

SEQ ID NO: 351835 - RNA, 19 nt, Homo sapiens
  misc_RNA (1)...(19): siRNA sense strand
ggagguuucauggaagauu

SEQ ID NO: 351836 - RNA, 19 nt, Homo sapiens
  misc_RNA (1)...(19): siRNA sense strand
ucauggaagauuugagaaa

SEQ ID NO: 351837 - RNA, 19 nt, Homo sapiens
  misc_RNA (1)...(19): siRNA sense strand
gaaguggaaaggguacuca

SEQ ID NO: 351838 - RNA, 19 nt, Homo sapiens
  misc_RNA (1)...(19): siRNA sense strand
gaccaaccgccuucuccaa

SEQ ID NO: 351839 - RNA, 19 nt, Homo sapiens
  misc_RNA (1)...(19): siRNA sense strand
gaaucugaaagaagcaaau

SEQ ID NO: 351840 - RNA, 19 nt, Homo sapiens
  misc_RNA (1)...(19): siRNA sense strand
ggaaaaggggcucaucaug

SEQ ID NO: 351841 - RNA, 19 nt, Homo sapiens
  misc_RNA (1)...(19): siRNA sense strand
acucaaacuuuccauaucg

SEQ ID NO: 351842 - RNA, 19 nt, Homo sapiens
  misc_RNA (1)...(19): siRNA sense strand
gcaaauaccugaugaagag

SEQ ID NO: 351843 - RNA, 19 nt, Homo sapiens
  misc_RNA (1)...(19): siRNA sense strand
gaaagaagauccacaguac

SEQ ID NO: 351844 - RNA, 19 nt, Homo sapiens
  misc_RNA (1)...(19): siRNA sense strand
ucacggagauccuuucuaa

SEQ ID NO: 351845 - RNA, 19 nt, Homo sapiens
  misc_RNA (1)...(19): siRNA sense strand
gcacagcuauugacucuau

SEQ ID NO: 351846 - RNA, 19 nt, Homo sapiens
  misc_RNA (1)...(19): siRNA sense strand
gaaagaagcaaauugauca

SEQ ID NO: 351847 - RNA, 19 nt, Homo sapiens
  misc_RNA (1)...(19): siRNA sense strand
gaccuuaccuccacuaaau

SEQ ID NO: 351848 - RNA, 19 nt, Homo sapiens
  misc_RNA (1)...(19): siRNA sense strand
aauaggaaauggagucuua

SEQ ID NO: 351849 - RNA, 19 nt, Homo sapiens
  misc_RNA (1)...(19): siRNA sense strand
gaagagggcauuguuauug

SEQ ID NO: 351850 - RNA, 19 nt, Homo sapiens
  misc_RNA (1)...(19): siRNA sense strand
ccacaggaaacaacaauua

SEQ ID NO: 351851 - RNA, 19 nt, Homo sapiens
  misc_RNA (1)...(19): siRNA sense strand
aaacacagcuacacaagau

SEQ ID NO: 351852 - RNA, 19 nt, Homo sapiens
  misc_RNA (1)...(19): siRNA sense strand
gaagcaaauugaucagaga

SEQ ID NO: 351853 - RNA, 19 nt, Homo sapiens
  misc_RNA (1)...(19): siRNA sense strand
gcccgaagauccaguagaa

SEQ ID NO: 351854 - RNA, 19 nt, Homo sapiens
  misc_RNA (1)...(19): siRNA sense strand
gaucagagacauuauggaa

SEQ ID NO: 351855 - RNA, 19 nt, Homo sapiens
  misc_RNA (1)...(19): siRNA sense strand
ggacugauguguucuaagc

SEQ ID NO: 351856 - RNA, 19 nt, Homo sapiens
  misc_RNA (1)...(19): siRNA sense strand
ugaauggacugauguguuc

SEQ ID NO: 351857 - RNA, 19 nt, Homo sapiens
  misc_RNA (1)...(19): siRNA sense strand
gaugaccaguuaaauguau

SEQ ID NO: 351858 - RNA, 19 nt, Homo sapiens
  misc_RNA (1)...(19): siRNA sense strand
gacaacaaguuauuuccaa

SEQ ID NO: 351859 - RNA, 19 nt, Homo sapiens
  misc_RNA (1)...(19): siRNA sense strand
ucagggugaugaccaguua

SEQ ID NO: 351860 - RNA, 19 nt, Homo sapiens
  misc_RNA (1)...(19): siRNA sense strand
gaaacaacaauuacagaga

SEQ ID NO: 351861 - RNA, 19 nt, Homo sapiens
  misc_RNA (1)...(19): siRNA sense strand
gugaggaacuggcaucaga

SEQ ID NO: 351862 - RNA, 19 nt, Homo sapiens
  misc_RNA (1)...(19): siRNA sense strand
aggaugagguguucuauga

SEQ ID NO: 351863 - RNA, 19 nt, Homo sapiens
  misc_RNA (1)...(19): siRNA sense strand
gaugaagagggcauuguua

SEQ ID NO: 351864 - RNA, 19 nt, Homo sapiens
  misc_RNA (1)...(19): siRNA sense strand
gagguuucauggaagauuu

SEQ ID NO: 351865 - RNA, 19 nt, Homo sapiens
  misc_RNA (1)...(19): siRNA sense strand
gugaaaagcugguggaaaa

SEQ ID NO: 351866 - RNA, 19 nt, Homo sapiens
  misc_RNA (1)...(19): siRNA sense strand
uacaggaucugauuaugaa

SEQ ID NO: 351867 - RNA, 19 nt, Homo sapiens
  misc_RNA (1)...(19): siRNA sense strand
ccgaagauccaguagaaua

SEQ ID NO: 351868 - RNA, 19 nt, Homo sapiens
  misc_RNA (1)...(19): siRNA sense strand
cagaguugauugaggagua

SEQ ID NO: 351869 - RNA, 19 nt, Homo sapiens
  misc_RNA (1)...(19): siRNA sense strand
aaucagagacucaaagaaa

SEQ ID NO: 351870 - RNA, 19 nt, Homo sapiens
  misc_RNA (1)...(19): siRNA sense strand
gagacucaaagaaagauua

SEQ ID NO: 351871 - RNA, 19 nt, Homo sapiens
  misc_RNA (1)...(19): siRNA sense strand
gaugagguguucuaugaca

SEQ ID NO: 351872 - RNA, 19 nt, Homo sapiens
  misc_RNA (1)...(19): siRNA sense strand
uaugggagguuucauggaa

SEQ ID NO: 351873 - RNA, 19 nt, Homo sapiens
  misc_RNA (1)...(19): siRNA sense strand
gaaauguaaugccugaaaa

SEQ ID NO: 351874 - RNA, 19 nt, Homo sapiens
  misc_RNA (1)...(19): siRNA sense strand
aaaggagacuaaugaacuu

SEQ ID NO: 351875 - RNA, 19 nt, Homo sapiens
  misc_RNA (1)...(19): siRNA sense strand
gaagauuugagaaagugua

SEQ ID NO: 351876 - RNA, 19 nt, Homo sapiens
  misc_RNA (1)...(19): siRNA sense strand
caaaggagacuaaugaacu

SEQ ID NO: 351877 - RNA, 19 nt, Homo sapiens
  misc_RNA (1)...(19): siRNA sense strand
gcaaauugaucagagacau

SEQ ID NO: 351878 - RNA, 19 nt, Homo sapiens
  misc_RNA (1)...(19): siRNA sense strand
gauacaggaucugauuaug

SEQ ID NO: 351879 - RNA, 19 nt, Homo sapiens
  misc_RNA (1)...(19): siRNA sense strand
gugggagaauuauuaagaa

SEQ ID NO: 351880 - RNA, 19 nt, Homo sapiens
  misc_RNA (1)...(19): siRNA sense strand
cuucaacucugcacagcua

SEQ ID NO: 351881 - RNA, 19 nt, Homo sapiens
  misc_RNA (1)...(19): siRNA sense strand
gcauuguuauugauggauu

SEQ ID NO: 351882 - RNA, 19 nt, Homo sapiens
  misc_RNA (1)...(19): siRNA sense strand
agaaagaagauccacagua

SEQ ID NO: 351883 - RNA, 19 nt, Homo sapiens
  misc_RNA (1)...(19): siRNA sense strand
gaaaauugcagaacgauau

SEQ ID NO: 351884 - RNA, 19 nt, Homo sapiens
  misc_RNA (1)...(19): siRNA sense strand
ggaggacagucacggagau

SEQ ID NO: 351885 - RNA, 19 nt, Homo sapiens
  misc_RNA (1)...(19): siRNA sense strand
gauuggagacccacaguug

SEQ ID NO: 351886 - RNA, 19 nt, Homo sapiens
  misc_RNA (1)...(19): siRNA sense strand
ggaacuggcaucagaaucu

SEQ ID NO: 351887 - RNA, 19 nt, Homo sapiens
  misc_RNA (1)...(19): siRNA sense strand
ggaaauggagucuuauugc

SEQ ID NO: 351888 - RNA, 19 nt, Homo sapiens
  misc_RNA (1)...(19): siRNA sense strand
cacaguaccagcagcaaua

SEQ ID NO: 351889 - RNA, 19 nt, Homo sapiens
  misc_RNA (1)...(19): siRNA sense strand
aagagggcauuguuauuga

SEQ ID NO: 351890 - RNA, 19 nt, Homo sapiens
  misc_RNA (1)...(19): siRNA sense strand
caaagaaagauuacugaag

SEQ ID NO: 351891 - RNA, 19 nt, Homo sapiens
  misc_RNA (1)...(19): siRNA sense strand
gaccagacgacaauguaaa

SEQ ID NO: 351892 - RNA, 19 nt, Homo sapiens
  misc_RNA (1)...(19): siRNA sense strand
gugaugaccaguuaaaugu

SEQ ID NO: 351893 - RNA, 19 nt, Homo sapiens
  misc_RNA (1)...(19): siRNA sense strand
ggugaugaccaguuaaaug

SEQ ID NO: 351894 - RNA, 19 nt, Homo sapiens
  misc_RNA (1)...(19): siRNA sense strand
acacagcuacacaagauaa

SEQ ID NO: 351895 - RNA, 19 nt, Homo sapiens
  misc_RNA (1)...(19): siRNA sense strand
caaauugaucagagacauu

SEQ ID NO: 351896 - RNA, 19 nt, Homo sapiens
  misc_RNA (1)...(19): siRNA sense strand
gauaauuacaacuggagaa

SEQ ID NO: 351897 - RNA, 19 nt, Homo sapiens
  misc_RNA (1)...(19): siRNA sense strand
ugaaagaagcaaauugauc

SEQ ID NO: 351898 - RNA, 19 nt, Homo sapiens
  misc_RNA (1)...(19): siRNA sense strand
ugaagagggcauuguuauu

SEQ ID NO: 351899 - RNA, 19 nt, Homo sapiens
  misc_RNA (1)...(19): siRNA sense strand
agaaauguaaugccugaaa

SEQ ID NO: 351900 - RNA, 19 nt, Homo sapiens
  misc_RNA (1)...(19): siRNA sense strand
cauggaagauuugagaaag

SEQ ID NO: 351901 - RNA, 19 nt, Homo sapiens
  misc_RNA (1)...(19): siRNA sense strand
gaacuggguggcugugaca

SEQ ID NO: 351902 - RNA, 19 nt, Homo sapiens
  misc_RNA (1)...(19): siRNA sense strand
ucugaaagaagcaaauuga

SEQ ID NO: 351903 - RNA, 19 nt, Homo sapiens
  misc_RNA (1)...(19): siRNA sense strand
acggagauccuuucuaaga

SEQ ID NO: 351904 - RNA, 19 nt, Homo sapiens
  misc_RNA (1)...(19): siRNA sense strand
cugcuccauugguuaaaua

SEQ ID NO: 351905 - RNA, 19 nt, Homo sapiens
  misc_RNA (1)...(19): siRNA sense strand
gaaagugacacggaucucu

SEQ ID NO: 351906 - RNA, 19 nt, Homo sapiens
  misc_RNA (1)...(19): siRNA sense strand
gaagaccuuaccuccacua

SEQ ID NO: 351907 - RNA, 19 nt, Homo sapiens
  misc_RNA (1)...(19): siRNA sense strand
gggcauuguuauugaugga

SEQ ID NO: 351908 - RNA, 19 nt, Homo sapiens
  misc_RNA (1)...(19): siRNA sense strand
uaccagaccucgaccaaaa

SEQ ID NO: 351909 - RNA, 19 nt, Homo sapiens
  misc_RNA (1)...(19): siRNA sense strand
gacaaggugaaaugggaua

SEQ ID NO: 351910 - RNA, 19 nt, Homo sapiens
  misc_RNA (1)...(19): siRNA sense strand
auacaggaucugauuauga

SEQ ID NO: 351911 - RNA, 19 nt, Homo sapiens
  misc_RNA (1)...(19): siRNA sense strand
ugaugcaaauaccugauga

SEQ ID NO: 351912 - RNA, 19 nt, Homo sapiens
  misc_RNA (1)...(19): siRNA sense strand
ucagagacucaaagaaaga

SEQ ID NO: 351913 - RNA, 19 nt, Homo sapiens
  misc_RNA (1)...(19): siRNA sense strand
gcgaugaggaugagguguu

SEQ ID NO: 351914 - RNA, 19 nt, Homo sapiens
  misc_RNA (1)...(19): siRNA sense strand
cgaccagacgacaauguaa

SEQ ID NO: 351915 - RNA, 19 nt, Homo sapiens
  misc_RNA (1)...(19): siRNA sense strand
gacaucagcauggcaguug

SEQ ID NO: 351916 - RNA, 19 nt, Homo sapiens
  misc_RNA (1)...(19): siRNA sense strand
cugcacagcuauugacucu

SEQ ID NO: 351917 - RNA, 19 nt, Homo sapiens
  misc_RNA (1)...(19): siRNA sense strand
caacucugcacagcuauug

SEQ ID NO: 351918 - RNA, 19 nt, Homo sapiens
  misc_RNA (1)...(19): siRNA sense strand
gcugugacaaggugaaaug

SEQ ID NO: 351919 - RNA, 19 nt, Homo sapiens
  misc_RNA (1)...(19): siRNA sense strand
gccaagauaauuacaacug

SEQ ID NO: 351920 - RNA, 19 nt, Homo sapiens
  misc_RNA (1)...(19): siRNA sense strand
uggaagauuugagaaagug

SEQ ID NO: 351921 - RNA, 19 nt, Homo sapiens
  misc_RNA (1)...(19): siRNA sense strand
acccaaaggagacuaauga

SEQ ID NO: 351922 - RNA, 19 nt, Homo sapiens
  misc_RNA (1)...(19): siRNA sense strand
cagcuacacaagauaaaug

SEQ ID NO: 351923 - RNA, 19 nt, Homo sapiens
  misc_RNA (1)...(19): siRNA sense strand
ccaaccgccuucuccaaag

SEQ ID NO: 351924 - RNA, 19 nt, Homo sapiens
  misc_RNA (1)...(19): siRNA sense strand
ugauacaggaucugauuau

SEQ ID NO: 351925 - RNA, 19 nt, Homo sapiens
  misc_RNA (1)...(19): siRNA sense strand
gaccuugauccuucgauga

SEQ ID NO: 351926 - RNA, 19 nt, Homo sapiens
  misc_RNA (1)...(19): siRNA sense strand
gcagaacgauauggauucc

SEQ ID NO: 351927 - RNA, 19 nt, Homo sapiens
  misc_RNA (1)...(19): siRNA sense strand
gcuauugacucuauuuucu

SEQ ID NO: 351928 - RNA, 19 nt, Homo sapiens
  misc_RNA (1)...(19): siRNA sense strand
gauaaaugcagagggaaca

SEQ ID NO: 351929 - RNA, 19 nt, Homo sapiens
  misc_RNA (1)...(19): siRNA sense strand
gaggaacuggcaucagaau

SEQ ID NO: 351930 - RNA, 19 nt, Homo sapiens
  misc_RNA (1)...(19): siRNA sense strand
gguccuggcucuggcaaag

SEQ ID NO: 351931 - RNA, 19 nt, Homo sapiens
  misc_RNA (1)...(19): siRNA sense strand
ggacacuggagagaucauu

SEQ ID NO: 351932 - RNA, 19 nt, Homo sapiens
  misc_RNA (1)...(19): siRNA sense strand
gagguguucuaugacauca

SEQ ID NO: 351933 - RNA, 19 nt, Homo sapiens
  misc_RNA (1)...(19): siRNA sense strand
cgaugaggaugagguguuc

SEQ ID NO: 351934 - RNA, 19 nt, Homo sapiens
  misc_RNA (1)...(19): siRNA sense strand
cuccauugguuaaauacuu

SEQ ID NO: 351935 - RNA, 19 nt, Homo sapiens
  misc_RNA (1)...(19): siRNA sense strand
cuaaucagagacucaaaga

SEQ ID NO: 351936 - RNA, 19 nt, Homo sapiens
  misc_RNA (1)...(19): siRNA sense strand
ugugggagaauuauuaaga

SEQ ID NO: 351937 - RNA, 19 nt, Homo sapiens
  misc_RNA (1)...(19): siRNA sense strand
ggagguuucauggaagauu

SEQ ID NO: 351938 - RNA, 19 nt, Homo sapiens
  misc_RNA (1)...(19): siRNA sense strand
ucauggaagauuugagaaa

SEQ ID NO: 351939 - RNA, 19 nt, Homo sapiens
  misc_RNA (1)...(19): siRNA sense strand
gaaucugaaagaagcaaau

SEQ ID NO: 351940 - RNA, 19 nt, Homo sapiens
  misc_RNA (1)...(19): siRNA sense strand
acucaaacuuuccauaucg

SEQ ID NO: 351941 - RNA, 19 nt, Homo sapiens
  misc_RNA (1)...(19): siRNA sense strand
gaccaaccgccuucuccaa

SEQ ID NO: 351942 - RNA, 19 nt, Homo sapiens
  misc_RNA (1)...(19): siRNA sense strand
caacacaccugaccucaaa

SEQ ID NO: 351943 - RNA, 19 nt, Homo sapiens
  misc_RNA (1)...(19): siRNA sense strand
gaguggaucuguacaauaa

SEQ ID NO: 351944 - RNA, 19 nt, Homo sapiens
  misc_RNA (1)...(19): siRNA sense strand
ggaaacugcugcacgagua

SEQ ID NO: 351945 - RNA, 19 nt, Homo sapiens
  misc_RNA (1)...(19): siRNA sense strand
gacagaaucgcauuuauua

SEQ ID NO: 351946 - RNA, 19 nt, Homo sapiens
  misc_RNA (1)...(19): siRNA sense strand
ggaaauggacagugauaua

SEQ ID NO: 351947 - RNA, 19 nt, Homo sapiens
  misc_RNA (1)...(19): siRNA sense strand
gaucugagucuacaaauuu

SEQ ID NO: 351948 - RNA, 19 nt, Homo sapiens
  misc_RNA (1)...(19): siRNA sense strand
gcagggaaauggacaguga

SEQ ID NO: 351949 - RNA, 19 nt, Homo sapiens
  misc_RNA (1)...(19): siRNA sense strand
gaacaaagucgguugauag

SEQ ID NO: 351950 - RNA, 19 nt, Homo sapiens
  misc_RNA (1)...(19): siRNA sense strand
ccacagcuauuuccaacua

SEQ ID NO: 351951 - RNA, 19 nt, Homo sapiens
  misc_RNA (1)...(19): siRNA sense strand
gaagacagacgauauuguu

SEQ ID NO: 351952 - RNA, 19 nt, Homo sapiens
  misc_RNA (1)...(19): siRNA sense strand
gagagaaucagaagcauaa

SEQ ID NO: 351953 - RNA, 19 nt, Homo sapiens
  misc_RNA (1)...(19): siRNA sense strand
agaaagagaucugaaagaa

SEQ ID NO: 351954 - RNA, 19 nt, Homo sapiens
  misc_RNA (1)...(19): siRNA sense strand
caacagaaagaacucaaua

SEQ ID NO: 351955 - RNA, 19 nt, Homo sapiens
  misc_RNA (1)...(19): siRNA sense strand
gaagaugccacagcuauuu

SEQ ID NO: 351956 - RNA, 19 nt, Homo sapiens
  misc_RNA (1)...(19): siRNA sense strand
gcucagauaaguuucuuua

SEQ ID NO: 351957 - RNA, 19 nt, Homo sapiens
  misc_RNA (1)...(19): siRNA sense strand
caauggaggugaaaucaga

SEQ ID NO: 351958 - RNA, 19 nt, Homo sapiens
  misc_RNA (1)...(19): siRNA sense strand
gaaagaagagagaaucaga

SEQ ID NO: 351959 - RNA, 19 nt, Homo sapiens
  misc_RNA (1)...(19): siRNA sense strand
gaaagagaucugaaagaaa

SEQ ID NO: 351960 - RNA, 19 nt, Homo sapiens
  misc_RNA (1)...(19): siRNA sense strand
ccaauacaguuugacauaa

SEQ ID NO: 351961 - RNA, 19 nt, Homo sapiens
  misc_RNA (1)...(19): siRNA sense strand
gaagagagaaucagaagca

SEQ ID NO: 351962 - RNA, 19 nt, Homo sapiens
  misc_RNA (1)...(19): siRNA sense strand
ggacauagacaacuguuca

SEQ ID NO: 351963 - RNA, 19 nt, Homo sapiens
  misc_RNA (1)...(19): siRNA sense strand
gaucaccucuuucgaugga

SEQ ID NO: 351964 - RNA, 19 nt, Homo sapiens
  misc_RNA (1)...(19): siRNA sense strand
guacacauccagaaagaaa

SEQ ID NO: 351965 - RNA, 19 nt, Homo sapiens
  misc_RNA (1)...(19): siRNA sense strand
aaaguaaucugucaucagu

SEQ ID NO: 351966 - RNA, 19 nt, Homo sapiens
  misc_RNA (1)...(19): siRNA sense strand
gacaaggucuuuacuaggu

SEQ ID NO: 351967 - RNA, 19 nt, Homo sapiens
  misc_RNA (1)...(19): siRNA sense strand
ggaucugagucuacaaauu

SEQ ID NO: 351968 - RNA, 19 nt, Homo sapiens
  misc_RNA (1)...(19): siRNA sense strand
guacaugcaagcucagaua

SEQ ID NO: 351969 - RNA, 19 nt, Homo sapiens
  misc_RNA (1)...(19): siRNA sense strand
gaucguagggcaucagaaa

SEQ ID NO: 351970 - RNA, 19 nt, Homo sapiens
  misc_RNA (1)...(19): siRNA sense strand
ccaccaaauuuccuguuaa

SEQ ID NO: 351971 - RNA, 19 nt, Homo sapiens
  misc_RNA (1)...(19): siRNA sense strand
caaauuuccuguuaaucga

SEQ ID NO: 351972 - RNA, 19 nt, Homo sapiens
  misc_RNA (1)...(19): siRNA sense strand
guuaugagcucuacauugc

SEQ ID NO: 351973 - RNA, 19 nt, Homo sapiens
  misc_RNA (1)...(19): siRNA sense strand
gauaugugauucuguugga

SEQ ID NO: 351974 - RNA, 19 nt, Homo sapiens
  misc_RNA (1)...(19): siRNA sense strand
gacaauagaggauuuggaa

SEQ ID NO: 351975 - RNA, 19 nt, Homo sapiens
  misc_RNA (1)...(19): siRNA sense strand
agaccaugaugcauuauuu

SEQ ID NO: 351976 - RNA, 19 nt, Homo sapiens
  misc_RNA (1)...(19): siRNA sense strand
ugaauuaagugcagcaaca

SEQ ID NO: 351977 - RNA, 19 nt, Homo sapiens
  misc_RNA (1)...(19): siRNA sense strand
uaacaucuuucguaugaca

SEQ ID NO: 351978 - RNA, 19 nt, Homo sapiens
  misc_RNA (1)...(19): siRNA sense strand
ggccauccauaacaucuuu

SEQ ID NO: 351979 - RNA, 19 nt, Homo sapiens
  misc_RNA (1)...(19): siRNA sense strand
gaaacuaugcgccaaaucu

SEQ ID NO: 351980 - RNA, 19 nt, Homo sapiens
  misc_RNA (1)...(19): siRNA sense strand
gaaauggacagugauauag

SEQ ID NO: 351981 - RNA, 19 nt, Homo sapiens
  misc_RNA (1)...(19): siRNA sense strand
ggugaaguaugaaguaaca

SEQ ID NO: 351982 - RNA, 19 nt, Homo sapiens
  misc_RNA (1)...(19): siRNA sense strand
gggaggugaugaugaaguu

SEQ ID NO: 351983 - RNA, 19 nt, Homo sapiens
  misc_RNA (1)...(19): siRNA sense strand
cauaauuucuccugugugu

SEQ ID NO: 351984 - RNA, 19 nt, Homo sapiens
  misc_RNA (1)...(19): siRNA sense strand
ccagugaucccuuauaugu

SEQ ID NO: 351985 - RNA, 19 nt, Homo sapiens
  misc_RNA (1)...(19): siRNA sense strand
gacauaauuucuccugugu

SEQ ID NO: 351986 - RNA, 19 nt, Homo sapiens
  misc_RNA (1)...(19): siRNA sense strand
gaagaacaaagucgguuga

SEQ ID NO: 351987 - RNA, 19 nt, Homo sapiens
  misc_RNA (1)...(19): siRNA sense strand
aauagaggauuuggaagua

SEQ ID NO: 351988 - RNA, 19 nt, Homo sapiens
  misc_RNA (1)...(19): siRNA sense strand
ggagaaggaggaaagaaga

SEQ ID NO: 351989 - RNA, 19 nt, Homo sapiens
  misc_RNA (1)...(19): siRNA sense strand
uccauuaccuuguguaguu

SEQ ID NO: 351990 - RNA, 19 nt, Homo sapiens
  misc_RNA (1)...(19): siRNA sense strand
caugaagaguggaucugua

SEQ ID NO: 351991 - RNA, 19 nt, Homo sapiens
  misc_RNA (1)...(19): siRNA sense strand
gauagcugcuuccaguaga

SEQ ID NO: 351992 - RNA, 19 nt, Homo sapiens
  misc_RNA (1)...(19): siRNA sense strand
ugacagaaucgcauuuauu

SEQ ID NO: 351993 - RNA, 19 nt, Homo sapiens
  misc_RNA (1)...(19): siRNA sense strand
caaggugaaguaugaagua

SEQ ID NO: 351994 - RNA, 19 nt, Homo sapiens
  misc_RNA (1)...(19): siRNA sense strand
agaacaaagucgguugaua

SEQ ID NO: 351995 - RNA, 19 nt, Homo sapiens
  misc_RNA (1)...(19): siRNA sense strand
aaacaacaccagaccauga

SEQ ID NO: 351996 - RNA, 19 nt, Homo sapiens
  misc_RNA (1)...(19): siRNA sense strand
gaagaguggaucuguacaa

SEQ ID NO: 351997 - RNA, 19 nt, Homo sapiens
  misc_RNA (1)...(19): siRNA sense strand
gaaguaugaaguaacagaa

SEQ ID NO: 351998 - RNA, 19 nt, Homo sapiens
  misc_RNA (1)...(19): siRNA sense strand
ucaucagucugcuauauau

SEQ ID NO: 351999 - RNA, 19 nt, Homo sapiens
  misc_RNA (1)...(19): siRNA sense strand
gauccacagacacaaguua

SEQ ID NO: 352000 - RNA, 19 nt, Homo sapiens
  misc_RNA (1)...(19): siRNA sense strand
gaaucgcauuuauuaguca

SEQ ID NO: 352001 - RNA, 19 nt, Homo sapiens
  misc_RNA (1)...(19): siRNA sense strand
cacgcaggguggaaauuua

SEQ ID NO: 352002 - RNA, 19 nt, Homo sapiens
  misc_RNA (1)...(19): siRNA sense strand
gcacagaaugaauuaagug

SEQ ID NO: 352003 - RNA, 19 nt, Homo sapiens
  misc_RNA (1)...(19): siRNA sense strand
caccaaauuuccuguuaau

SEQ ID NO: 352004 - RNA, 19 nt, Homo sapiens
  misc_RNA (1)...(19): siRNA sense strand
augcugcgauuaauagaua

SEQ ID NO: 352005 - RNA, 19 nt, Homo sapiens
  misc_RNA (1)...(19): siRNA sense strand
ggaaguauuucagauugca

SEQ ID NO: 352006 - RNA, 19 nt, Homo sapiens
  misc_RNA (1)...(19): siRNA sense strand
aaggaaguauuucagauug

SEQ ID NO: 352007 - RNA, 19 nt, Homo sapiens
  misc_RNA (1)...(19): siRNA sense strand
gaaguuaugagcucuacau

SEQ ID NO: 352008 - RNA, 19 nt, Homo sapiens
  misc_RNA (1)...(19): siRNA sense strand
gaaaagauaugugauucug

SEQ ID NO: 352009 - RNA, 19 nt, Homo sapiens
  misc_RNA (1)...(19): siRNA sense strand
augaacaacuggaagaauu

SEQ ID NO: 352010 - RNA, 19 nt, Homo sapiens
  misc_RNA (1)...(19): siRNA sense strand
gcucuacauugcaacaguu

SEQ ID NO: 352011 - RNA, 19 nt, Homo sapiens
  misc_RNA (1)...(19): siRNA sense strand
gaaacugaagauucuauuc

SEQ ID NO: 352012 - RNA, 19 nt, Homo sapiens
  misc_RNA (1)...(19): siRNA sense strand
gaaacugcugcacgaguaa

SEQ ID NO: 352013 - RNA, 19 nt, Homo sapiens
  misc_RNA (1)...(19): siRNA sense strand
gaggacagcccgcagacaa

SEQ ID NO: 352014 - RNA, 19 nt, Homo sapiens
  misc_RNA (1)...(19): siRNA sense strand
uaagauggguucugaaaau

SEQ ID NO: 352015 - RNA, 19 nt, Homo sapiens
  misc_RNA (1)...(19): siRNA sense strand
gaagaagaugccacagcua

SEQ ID NO: 352016 - RNA, 19 nt, Homo sapiens
  misc_RNA (1)...(19): siRNA sense strand
gccaugauguuccccauua

SEQ ID NO: 352017 - RNA, 19 nt, Homo sapiens
  misc_RNA (1)...(19): siRNA sense strand
gaucaugaugcugcgauua

SEQ ID NO: 352018 - RNA, 19 nt, Homo sapiens
  misc_RNA (1)...(19): siRNA sense strand
ggaggcaggcguacaaauc

SEQ ID NO: 352019 - RNA, 19 nt, Homo sapiens
  misc_RNA (1)...(19): siRNA sense strand
caacagacaauagaggauu

SEQ ID NO: 352020 - RNA, 19 nt, Homo sapiens
  misc_RNA (1)...(19): siRNA sense strand
acagcuauuuccaacuaua

SEQ ID NO: 352021 - RNA, 19 nt, Homo sapiens
  misc_RNA (1)...(19): siRNA sense strand
gauuuaugaugcacagaau

SEQ ID NO: 352022 - RNA, 19 nt, Homo sapiens
  misc_RNA (1)...(19): siRNA sense strand
guuaauugauccacagaca

SEQ ID NO: 352023 - RNA, 19 nt, Homo sapiens
  misc_RNA (1)...(19): siRNA sense strand
auccagauguuguuuauga

SEQ ID NO: 352024 - RNA, 19 nt, Homo sapiens
  misc_RNA (1)...(19): siRNA sense strand
uaauuucuccuguguguga

SEQ ID NO: 352025 - RNA, 19 nt, Homo sapiens
  misc_RNA (1)...(19): siRNA sense strand
cccaccaaauuuccuguua

SEQ ID NO: 352026 - RNA, 19 nt, Homo sapiens
  misc_RNA (1)...(19): siRNA sense strand
ccaguuguaucaagcuaug

SEQ ID NO: 352027 - RNA, 19 nt, Homo sapiens
  misc_RNA (1)...(19): siRNA sense strand
gcaguagccagucagaaga

SEQ ID NO: 352028 - RNA, 19 nt, Homo sapiens
  misc_RNA (1)...(19): siRNA sense strand
ucagucugcuauauauuug

SEQ ID NO: 352029 - RNA, 19 nt, Homo sapiens
  misc_RNA (1)...(19): siRNA sense strand
cagaaucgcauuuauuagu

SEQ ID NO: 352030 - RNA, 19 nt, Homo sapiens
  misc_RNA (1)...(19): siRNA sense strand
augacaaggugaaguauga

SEQ ID NO: 352031 - RNA, 19 nt, Homo sapiens
  misc_RNA (1)...(19): siRNA sense strand
gaaaguaaucugucaucag

SEQ ID NO: 352032 - RNA, 19 nt, Homo sapiens
  misc_RNA (1)...(19): siRNA sense strand
cagcaguucaggauccuua

SEQ ID NO: 352033 - RNA, 19 nt, Homo sapiens
  misc_RNA (1)...(19): siRNA sense strand
aaacaggcuuggugucauc

SEQ ID NO: 352034 - RNA, 19 nt, Homo sapiens
  misc_RNA (1)...(19): siRNA sense strand
caagcuaugcaucggauuu

SEQ ID NO: 352035 - RNA, 19 nt, Homo sapiens
  misc_RNA (1)...(19): siRNA sense strand
caccugaccucaaaacuuu

SEQ ID NO: 352036 - RNA, 19 nt, Homo sapiens
  misc_RNA (1)...(19): siRNA sense strand
caugcaagcucagauaagu

SEQ ID NO: 352037 - RNA, 19 nt, Homo sapiens
  misc_RNA (1)...(19): siRNA sense strand
guguacacauccagaaaga

SEQ ID NO: 352038 - RNA, 19 nt, Homo sapiens
  misc_RNA (1)...(19): siRNA sense strand
uggagaaucuggaggaagu

SEQ ID NO: 352039 - RNA, 19 nt, Homo sapiens
  misc_RNA (1)...(19): siRNA sense strand
cccaauacaguuugacaua

SEQ ID NO: 352040 - RNA, 19 nt, Homo sapiens
  misc_RNA (1)...(19): siRNA sense strand
ggauuuaugaugcacagaa

SEQ ID NO: 352041 - RNA, 19 nt, Homo sapiens
  misc_RNA (1)...(19): siRNA sense strand
accagaccaugaugcauua

SEQ ID NO: 352042 - RNA, 19 nt, Homo sapiens
  misc_RNA (1)...(19): siRNA sense strand
guacauacaucuccuacaa

SEQ ID NO: 352043 - RNA, 19 nt, Homo sapiens
  misc_RNA (1)...(19): siRNA sense strand
gcagaaaucucccaguuuu

SEQ ID NO: 352044 - RNA, 19 nt, Homo sapiens
  misc_RNA (1)...(19): siRNA sense strand
ggacuugaauggaugaugu

SEQ ID NO: 352045 - RNA, 19 nt, Homo sapiens
  misc_RNA (1)...(19): siRNA sense strand
acauacaucuccuacaaua

SEQ ID NO: 352046 - RNA, 19 nt, Homo sapiens
  misc_RNA (1)...(19): siRNA sense strand
gaaguaauguagaagagau

SEQ ID NO: 352047 - RNA, 19 nt, Homo sapiens
  misc_RNA (1)...(19): siRNA sense strand
uggaugaugucacgacuua

SEQ ID NO: 352048 - RNA, 19 nt, Homo sapiens
  misc_RNA (1)...(19): siRNA sense strand
gagaggauuucuguaacua

SEQ ID NO: 352049 - RNA, 19 nt, Homo sapiens
  misc_RNA (1)...(19): siRNA sense strand
uaauacacguuuccuaaug

SEQ ID NO: 352050 - RNA, 19 nt, Homo sapiens
  misc_RNA (1)...(19): siRNA sense strand
aaagcuggauugcugauuu

SEQ ID NO: 352051 - RNA, 19 nt, Homo sapiens
  misc_RNA (1)...(19): siRNA sense strand
gaggauuucuguaacuaga

SEQ ID NO: 352052 - RNA, 19 nt, Homo sapiens
  misc_RNA (1)...(19): siRNA sense strand
uagcagaaaucucccaguu

SEQ ID NO: 352053 - RNA, 19 nt, Homo sapiens
  misc_RNA (1)...(19): siRNA sense strand
acacagaguuuguaauagu

SEQ ID NO: 352054 - RNA, 19 nt, Homo sapiens
  misc_RNA (1)...(19): siRNA sense strand
ugaaugaaguuguacauac

SEQ ID NO: 352055 - RNA, 19 nt, Homo sapiens
  misc_RNA (1)...(19): siRNA sense strand
ggaaaacuaccauucuuua

SEQ ID NO: 352056 - RNA, 19 nt, Homo sapiens
  misc_RNA (1)...(19): siRNA sense strand
gagcacaaaguuaucauug

SEQ ID NO: 352057 - RNA, 19 nt, Homo sapiens
  misc_RNA (1)...(19): siRNA sense strand
agagagaggauuucuguaa

SEQ ID NO: 352058 - RNA, 19 nt, Homo sapiens
  misc_RNA (1)...(19): siRNA sense strand
guagaagagauagugauua

SEQ ID NO: 352059 - RNA, 19 nt, Homo sapiens
  misc_RNA (1)...(19): siRNA sense strand
ggauuucuguaacuagaga

SEQ ID NO: 352060 - RNA, 19 nt, Homo sapiens
  misc_RNA (1)...(19): siRNA sense strand
cuaccauucuuuaccaauu

SEQ ID NO: 352061 - RNA, 19 nt, Homo sapiens
  misc_RNA (1)...(19): siRNA sense strand
gagagaggauuucuguaac

SEQ ID NO: 352062 - RNA, 19 nt, Homo sapiens
  misc_RNA (1)...(19): siRNA sense strand
ggaacacuuacuauacuaa

SEQ ID NO: 352063 - RNA, 19 nt, Homo sapiens
  misc_RNA (1)...(19): siRNA sense strand
aaagaucaccaguggcaua

SEQ ID NO: 352064 - RNA, 19 nt, Homo sapiens
  misc_RNA (1)...(19): siRNA sense strand
aaacuaccauucuuuacca

SEQ ID NO: 352065 - RNA, 19 nt, Homo sapiens
  misc_RNA (1)...(19): siRNA sense strand
gauguuaaagaaugcauga

SEQ ID NO: 352066 - RNA, 19 nt, Homo sapiens
  misc_RNA (1)...(19): siRNA sense strand
cacagaguuuguaauaguu

SEQ ID NO: 352067 - RNA, 19 nt, Homo sapiens
  misc_RNA (1)...(19): siRNA sense strand
ugucacgacuuaagauuag

SEQ ID NO: 352068 - RNA, 19 nt, Homo sapiens
  misc_RNA (1)...(19): siRNA sense strand
gcaugacuguagcagaaau

SEQ ID NO: 352069 - RNA, 19 nt, Homo sapiens
  misc_RNA (1)...(19): siRNA sense strand
uggaacacuuacuauacua

SEQ ID NO: 352070 - RNA, 19 nt, Homo sapiens
  misc_RNA (1)...(19): siRNA sense strand
ggaaguaauguagaagaga

SEQ ID NO: 352071 - RNA, 19 nt, Homo sapiens
  misc_RNA (1)...(19): siRNA sense strand
ggagcacaaaguuaucauu

SEQ ID NO: 352072 - RNA, 19 nt, Homo sapiens
  misc_RNA (1)...(19): siRNA sense strand
gaugucacgacuuaagauu

SEQ ID NO: 352073 - RNA, 19 nt, Homo sapiens
  misc_RNA (1)...(19): siRNA sense strand
gaucaccaguggcauaucc

SEQ ID NO: 352074 - RNA, 19 nt, Homo sapiens
  misc_RNA (1)...(19): siRNA sense strand
augcaugacuguagcagaa

SEQ ID NO: 352075 - RNA, 19 nt, Homo sapiens
  misc_RNA (1)...(19): siRNA sense strand
uaaagaaugcaugacugua

SEQ ID NO: 352076 - RNA, 19 nt, Homo sapiens
  misc_RNA (1)...(19): siRNA sense strand
gaugaugucacgacuuaag

SEQ ID NO: 352077 - RNA, 19 nt, Homo sapiens
  misc_RNA (1)...(19): siRNA sense strand
aauacacguuuccuaaugu

SEQ ID NO: 352078 - RNA, 19 nt, Homo sapiens
  misc_RNA (1)...(19): siRNA sense strand
gcuggauaaugcagggaaa

SEQ ID NO: 352079 - RNA, 19 nt, Homo sapiens
  misc_RNA (1)...(19): siRNA sense strand
aaagaaugcaugacuguag

SEQ ID NO: 352080 - RNA, 19 nt, Homo sapiens
  misc_RNA (1)...(19): siRNA sense strand
caggcaugcugugcucuaa

SEQ ID NO: 352081 - RNA, 19 nt, Homo sapiens
  misc_RNA (1)...(19): siRNA sense strand
gaacacuuacuauacuaac

SEQ ID NO: 352082 - RNA, 19 nt, Homo sapiens
  misc_RNA (1)...(19): siRNA sense strand
acagacagagagaggauuu

SEQ ID NO: 352083 - RNA, 19 nt, Homo sapiens
  misc_RNA (1)...(19): siRNA sense strand
guacagacagagagaggau

SEQ ID NO: 352084 - RNA, 19 nt, Homo sapiens
  misc_RNA (1)...(19): siRNA sense strand
caauaggaaguaauguaga

SEQ ID NO: 352085 - RNA, 19 nt, Homo sapiens
  misc_RNA (1)...(19): siRNA sense strand
acaauaggaaguaauguag

SEQ ID NO: 352086 - RNA, 19 nt, Homo sapiens
  misc_RNA (1)...(19): siRNA sense strand
uguagaagagauagugauu

SEQ ID NO: 352087 - RNA, 19 nt, Homo sapiens
  misc_RNA (1)...(19): siRNA sense strand
gcgcaugaggaccuaagaa

SEQ ID NO: 352088 - RNA, 19 nt, Homo sapiens
  misc_RNA (1)...(19): siRNA sense strand
gauaaugcagggaaaacua

SEQ ID NO: 352089 - RNA, 19 nt, Homo sapiens
  misc_RNA (1)...(19): siRNA sense strand
agagaggauuucuguaacu

SEQ ID NO: 352090 - RNA, 19 nt, Homo sapiens
  misc_RNA (1)...(19): siRNA sense strand
ggcaugcugugcucuaacu

SEQ ID NO: 352091 - RNA, 19 nt, Homo sapiens
  misc_RNA (1)...(19): siRNA sense strand
cgcaugaggaccuaagaaa

SEQ ID NO: 352092 - RNA, 19 nt, Homo sapiens
  misc_RNA (1)...(19): siRNA sense strand
uuaaagaaugcaugacugu

SEQ ID NO: 352093 - RNA, 19 nt, Homo sapiens
  misc_RNA (1)...(19): siRNA sense strand
uuccuaaugugggauauug

SEQ ID NO: 352094 - RNA, 19 nt, Homo sapiens
  misc_RNA (1)...(19): siRNA sense strand
uaauguagaagagauagug

SEQ ID NO: 352095 - RNA, 19 nt, Homo sapiens
  misc_RNA (1)...(19): siRNA sense strand
gacaguacagacagagaga

SEQ ID NO: 352096 - RNA, 19 nt, Homo sapiens
  misc_RNA (1)...(19): siRNA sense strand
cuggaacacuuacuauacu

SEQ ID NO: 352097 - RNA, 19 nt, Homo sapiens
  misc_RNA (1)...(19): siRNA sense strand
gggauugugccaaggacuu

SEQ ID NO: 352098 - RNA, 19 nt, Homo sapiens
  misc_RNA (1)...(19): siRNA sense strand
cagaguuuguaauaguugu

SEQ ID NO: 352099 - RNA, 19 nt, Homo sapiens
  misc_RNA (1)...(19): siRNA sense strand
gggaaaacuaccauucuuu

SEQ ID NO: 352100 - RNA, 19 nt, Homo sapiens
  misc_RNA (1)...(19): siRNA sense strand
gcaugaggaccuaagaaaa

SEQ ID NO: 352101 - RNA, 19 nt, Homo sapiens
  misc_RNA (1)...(19): siRNA sense strand
uaggaaguaauguagaaga

SEQ ID NO: 352102 - RNA, 19 nt, Homo sapiens
  misc_RNA (1)...(19): siRNA sense strand
ccuggaacacuuacuauac

SEQ ID NO: 352103 - RNA, 19 nt, Homo sapiens
  misc_RNA (1)...(19): siRNA sense strand
ccaggcaugcugugcucua

SEQ ID NO: 352104 - RNA, 19 nt, Homo sapiens
  misc_RNA (1)...(19): siRNA sense strand
acaagauguuaaagaaugc

SEQ ID NO: 352105 - RNA, 19 nt, Homo sapiens
  misc_RNA (1)...(19): siRNA sense strand
auacacguuuccuaaugug

SEQ ID NO: 352106 - RNA, 19 nt, Homo sapiens
  misc_RNA (1)...(19): siRNA sense strand
guacauacaucuccuacaa

SEQ ID NO: 352107 - RNA, 19 nt, Homo sapiens
  misc_RNA (1)...(19): siRNA sense strand
gcagaaaucucccaguuuu

SEQ ID NO: 352108 - RNA, 19 nt, Homo sapiens
  misc_RNA (1)...(19): siRNA sense strand
ggacuugaauggaugaugu

SEQ ID NO: 352109 - RNA, 19 nt, Homo sapiens
  misc_RNA (1)...(19): siRNA sense strand
acauacaucuccuacaaua

SEQ ID NO: 352110 - RNA, 19 nt, Homo sapiens
  misc_RNA (1)...(19): siRNA sense strand
gaaguaauguagaagagau

SEQ ID NO: 352111 - RNA, 19 nt, Homo sapiens
  misc_RNA (1)...(19): siRNA sense strand
uggaugaugucacgacuua

SEQ ID NO: 352112 - RNA, 19 nt, Homo sapiens
  misc_RNA (1)...(19): siRNA sense strand
gagaggauuucuguaacua

SEQ ID NO: 352113 - RNA, 19 nt, Homo sapiens
  misc_RNA (1)...(19): siRNA sense strand
uaauacacguuuccuaaug

SEQ ID NO: 352114 - RNA, 19 nt, Homo sapiens
  misc_RNA (1)...(19): siRNA sense strand
aaagcuggauugcugauuu

SEQ ID NO: 352115 - RNA, 19 nt, Homo sapiens
  misc_RNA (1)...(19): siRNA sense strand
gaggauuucuguaacuaga

SEQ ID NO: 352116 - RNA, 19 nt, Homo sapiens
  misc_RNA (1)...(19): siRNA sense strand
uagcagaaaucucccaguu

SEQ ID NO: 352117 - RNA, 19 nt, Homo sapiens
  misc_RNA (1)...(19): siRNA sense strand
acacagaguuuguaauagu

SEQ ID NO: 352118 - RNA, 19 nt, Homo sapiens
  misc_RNA (1)...(19): siRNA sense strand
ugaaugaaguuguacauac

SEQ ID NO: 352119 - RNA, 19 nt, Homo sapiens
  misc_RNA (1)...(19): siRNA sense strand
ggaaaacuaccauucuuua

SEQ ID NO: 352120 - RNA, 19 nt, Homo sapiens
  misc_RNA (1)...(19): siRNA sense strand
gagcacaaaguuaucauug

SEQ ID NO: 352121 - RNA, 19 nt, Homo sapiens
  misc_RNA (1)...(19): siRNA sense strand
agagagaggauuucuguaa

SEQ ID NO: 352122 - RNA, 19 nt, Homo sapiens
  misc_RNA (1)...(19): siRNA sense strand
guagaagagauagugauua

SEQ ID NO: 352123 - RNA, 19 nt, Homo sapiens
  misc_RNA (1)...(19): siRNA sense strand
ggauuucuguaacuagaga

SEQ ID NO: 352124 - RNA, 19 nt, Homo sapiens
  misc_RNA (1)...(19): siRNA sense strand
cuaccauucuuuaccaauu

SEQ ID NO: 352125 - RNA, 19 nt, Homo sapiens
  misc_RNA (1)...(19): siRNA sense strand
gagagaggauuucuguaac

SEQ ID NO: 352126 - RNA, 19 nt, Homo sapiens
  misc_RNA (1)...(19): siRNA sense strand
ggaacacuuacuauacuaa

SEQ ID NO: 352127 - RNA, 19 nt, Homo sapiens
  misc_RNA (1)...(19): siRNA sense strand
aaagaucaccaguggcaua

SEQ ID NO: 352128 - RNA, 19 nt, Homo sapiens
  misc_RNA (1)...(19): siRNA sense strand
aaacuaccauucuuuacca

SEQ ID NO: 352129 - RNA, 19 nt, Homo sapiens
  misc_RNA (1)...(19): siRNA sense strand
gauguuaaagaaugcauga

SEQ ID NO: 352130 - RNA, 19 nt, Homo sapiens
  misc_RNA (1)...(19): siRNA sense strand
cacagaguuuguaauaguu

SEQ ID NO: 352131 - RNA, 19 nt, Homo sapiens
  misc_RNA (1)...(19): siRNA sense strand
ugucacgacuuaagauuag

SEQ ID NO: 352132 - RNA, 19 nt, Homo sapiens
  misc_RNA (1)...(19): siRNA sense strand
gcaugacuguagcagaaau

SEQ ID NO: 352133 - RNA, 19 nt, Homo sapiens
  misc_RNA (1)...(19): siRNA sense strand
uggaacacuuacuauacua

SEQ ID NO: 352134 - RNA, 19 nt, Homo sapiens
  misc_RNA (1)...(19): siRNA sense strand
ggaaguaauguagaagaga

SEQ ID NO: 352135 - RNA, 19 nt, Homo sapiens
  misc_RNA (1)...(19): siRNA sense strand
ggagcacaaaguuaucauu

SEQ ID NO: 352136 - RNA, 19 nt, Homo sapiens
  misc_RNA (1)...(19): siRNA sense strand
gaugucacgacuuaagauu

SEQ ID NO: 352137 - RNA, 19 nt, Homo sapiens
  misc_RNA (1)...(19): siRNA sense strand
gaucaccaguggcauaucc

SEQ ID NO: 352138 - RNA, 19 nt, Homo sapiens
  misc_RNA (1)...(19): siRNA sense strand
augcaugacuguagcagaa

SEQ ID NO: 352139 - RNA, 19 nt, Homo sapiens
  misc_RNA (1)...(19): siRNA sense strand
uaaagaaugcaugacugua

SEQ ID NO: 352140 - RNA, 19 nt, Homo sapiens
  misc_RNA (1)...(19): siRNA sense strand
gaugaugucacgacuuaag

SEQ ID NO: 352141 - RNA, 19 nt, Homo sapiens
  misc_RNA (1)...(19): siRNA sense strand
aauacacguuuccuaaugu

SEQ ID NO: 352142 - RNA, 19 nt, Homo sapiens
  misc_RNA (1)...(19): siRNA sense strand
gcuggauaaugcagggaaa

SEQ ID NO: 352143 - RNA, 19 nt, Homo sapiens
  misc_RNA (1)...(19): siRNA sense strand
aaagaaugcaugacuguag

SEQ ID NO: 352144 - RNA, 19 nt, Homo sapiens
  misc_RNA (1)...(19): siRNA sense strand
caggcaugcugugcucuaa

SEQ ID NO: 352145 - RNA, 19 nt, Homo sapiens
  misc_RNA (1)...(19): siRNA sense strand
gaacacuuacuauacuaac

SEQ ID NO: 352146 - RNA, 19 nt, Homo sapiens
  misc_RNA (1)...(19): siRNA sense strand
acagacagagagaggauuu

SEQ ID NO: 352147 - RNA, 19 nt, Homo sapiens
  misc_RNA (1)...(19): siRNA sense strand
guacagacagagagaggau

SEQ ID NO: 352148 - RNA, 19 nt, Homo sapiens
  misc_RNA (1)...(19): siRNA sense strand
caauaggaaguaauguaga

SEQ ID NO: 352149 - RNA, 19 nt, Homo sapiens
  misc_RNA (1)...(19): siRNA sense strand
acaauaggaaguaauguag

SEQ ID NO: 352150 - RNA, 19 nt, Homo sapiens
  misc_RNA (1)...(19): siRNA sense strand
uguagaagagauagugauu

SEQ ID NO: 352151 - RNA, 19 nt, Homo sapiens
  misc_RNA (1)...(19): siRNA sense strand
gcgcaugaggaccuaagaa

SEQ ID NO: 352152 - RNA, 19 nt, Homo sapiens
  misc_RNA (1)...(19): siRNA sense strand
gauaaugcagggaaaacua

SEQ ID NO: 352153 - RNA, 19 nt, Homo sapiens
  misc_RNA (1)...(19): siRNA sense strand
agagaggauuucuguaacu

SEQ ID NO: 352154 - RNA, 19 nt, Homo sapiens
  misc_RNA (1)...(19): siRNA sense strand
ggcaugcugugcucuaacu

SEQ ID NO: 352155 - RNA, 19 nt, Homo sapiens
  misc_RNA (1)...(19): siRNA sense strand
cgcaugaggaccuaagaaa

SEQ ID NO: 352156 - RNA, 19 nt, Homo sapiens
  misc_RNA (1)...(19): siRNA sense strand
uuaaagaaugcaugacugu

SEQ ID NO: 352157 - RNA, 19 nt, Homo sapiens
  misc_RNA (1)...(19): siRNA sense strand
uuccuaaugugggauauug

SEQ ID NO: 352158 - RNA, 19 nt, Homo sapiens
  misc_RNA (1)...(19): siRNA sense strand
uaauguagaagagauagug

SEQ ID NO: 352159 - RNA, 19 nt, Homo sapiens
  misc_RNA (1)...(19): siRNA sense strand
gacaguacagacagagaga

SEQ ID NO: 352160 - RNA, 19 nt, Homo sapiens
  misc_RNA (1)...(19): siRNA sense strand
cuggaacacuuacuauacu

SEQ ID NO: 352161 - RNA, 19 nt, Homo sapiens
  misc_RNA (1)...(19): siRNA sense strand
gggauugugccaaggacuu

SEQ ID NO: 352162 - RNA, 19 nt, Homo sapiens
  misc_RNA (1)...(19): siRNA sense strand
cagaguuuguaauaguugu

SEQ ID NO: 352163 - RNA, 19 nt, Homo sapiens
  misc_RNA (1)...(19): siRNA sense strand
gggaaaacuaccauucuuu

SEQ ID NO: 352164 - RNA, 19 nt, Homo sapiens
  misc_RNA (1)...(19): siRNA sense strand
gcaugaggaccuaagaaaa

SEQ ID NO: 352165 - RNA, 19 nt, Homo sapiens
  misc_RNA (1)...(19): siRNA sense strand
uaggaaguaauguagaaga

SEQ ID NO: 352166 - RNA, 19 nt, Homo sapiens
  misc_RNA (1)...(19): siRNA sense strand
ccuggaacacuuacuauac

SEQ ID NO: 352167 - RNA, 19 nt, Homo sapiens
  misc_RNA (1)...(19): siRNA sense strand
ccaggcaugcugugcucua

SEQ ID NO: 352168 - RNA, 19 nt, Homo sapiens
  misc_RNA (1)...(19): siRNA sense strand
acaagauguuaaagaaugc

SEQ ID NO: 352169 - RNA, 19 nt, Homo sapiens
  misc_RNA (1)...(19): siRNA sense strand
auacacguuuccuaaugug

SEQ ID NO: 352170 - RNA, 19 nt, Homo sapiens
  misc_RNA (1)...(19): siRNA sense strand
gaacuccuccaccaucaua

SEQ ID NO: 352171 - RNA, 19 nt, Homo sapiens
  misc_RNA (1)...(19): siRNA sense strand
caucauagcuuuugcugua

SEQ ID NO: 352172 - RNA, 19 nt, Homo sapiens
  misc_RNA (1)...(19): siRNA sense strand
gagagcaaguacuucauga

SEQ ID NO: 352173 - RNA, 19 nt, Homo sapiens
  misc_RNA (1)...(19): siRNA sense strand
ucaaggagacugagaaaug

SEQ ID NO: 352174 - RNA, 19 nt, Homo sapiens
  misc_RNA (1)...(19): siRNA sense strand
gaacagcaagcaacgcuau

SEQ ID NO: 352175 - RNA, 19 nt, Homo sapiens
  misc_RNA (1)...(19): siRNA sense strand
ccaacuaccuggacaagca

SEQ ID NO: 352176 - RNA, 19 nt, Homo sapiens
  misc_RNA (1)...(19): siRNA sense strand
gagcuguucccuucucuaa

SEQ ID NO: 352177 - RNA, 19 nt, Homo sapiens
  misc_RNA (1)...(19): siRNA sense strand
ggucuuggguggugccuau

SEQ ID NO: 352178 - RNA, 19 nt, Homo sapiens
  misc_RNA (1)...(19): siRNA sense strand
cugcaggccuugauagauu

SEQ ID NO: 352179 - RNA, 19 nt, Homo sapiens
  misc_RNA (1)...(19): siRNA sense strand
gaaccaccauuggaccuau

SEQ ID NO: 352180 - RNA, 19 nt, Homo sapiens
  misc_RNA (1)...(19): siRNA sense strand
caaggagacugagaaaugg

SEQ ID NO: 352181 - RNA, 19 nt, Homo sapiens
  misc_RNA (1)...(19): siRNA sense strand
gagaaccaccggccuuuau

SEQ ID NO: 352182 - RNA, 19 nt, Homo sapiens
  misc_RNA (1)...(19): siRNA sense strand
ggagaaccaccggccuuua

SEQ ID NO: 352183 - RNA, 19 nt, Homo sapiens
  misc_RNA (1)...(19): siRNA sense strand
gaaauaucaacgagaacuu

SEQ ID NO: 352184 - RNA, 19 nt, Homo sapiens
  misc_RNA (1)...(19): siRNA sense strand
ccaaggacauaguggagau

SEQ ID NO: 352185 - RNA, 19 nt, Homo sapiens
  misc_RNA (1)...(19): siRNA sense strand
ggacaagcaugaggagaac

SEQ ID NO: 352186 - RNA, 19 nt, Homo sapiens
  misc_RNA (1)...(19): siRNA sense strand
gaaccaccggccuuuauuc

SEQ ID NO: 352187 - RNA, 19 nt, Homo sapiens
  misc_RNA (1)...(19): siRNA sense strand
gcaacgcuaugcuucaaac

SEQ ID NO: 352188 - RNA, 19 nt, Homo sapiens
  misc_RNA (1)...(19): siRNA sense strand
ggaccuaucuuggcuucuc

SEQ ID NO: 352189 - RNA, 19 nt, Homo sapiens
  misc_RNA (1)...(19): siRNA sense strand
caacuggccaugcacucua

SEQ ID NO: 352190 - RNA, 19 nt, Homo sapiens
  misc_RNA (1)...(19): siRNA sense strand
ccauccaucugcagcgaaa

SEQ ID NO: 352191 - RNA, 19 nt, Homo sapiens
  misc_RNA (1)...(19): siRNA sense strand
ugaucaaggugaacagcaa

SEQ ID NO: 352192 - RNA, 19 nt, Homo sapiens
  misc_RNA (1)...(19): siRNA sense strand
gaucuggagcaccugguuu

SEQ ID NO: 352193 - RNA, 19 nt, Homo sapiens
  misc_RNA (1)...(19): siRNA sense strand
gagacugagaaauggaaua

SEQ ID NO: 352194 - RNA, 19 nt, Homo sapiens
  misc_RNA (1)...(19): siRNA sense strand
ccuccaccaucauagcuuu

SEQ ID NO: 352195 - RNA, 19 nt, Homo sapiens
  misc_RNA (1)...(19): siRNA sense strand
caucugcagcgaaauauca

SEQ ID NO: 352196 - RNA, 19 nt, Homo sapiens
  misc_RNA (1)...(19): siRNA sense strand
cccaaguccuucaugauca

SEQ ID NO: 352197 - RNA, 19 nt, Homo sapiens
  misc_RNA (1)...(19): siRNA sense strand
uccgagagguggccaacaa

SEQ ID NO: 352198 - RNA, 19 nt, Homo sapiens
  misc_RNA (1)...(19): siRNA sense strand
auacccaaguccuucauga

SEQ ID NO: 352199 - RNA, 19 nt, Homo sapiens
  misc_RNA (1)...(19): siRNA sense strand
agcgaaauaucaacgagaa

SEQ ID NO: 352200 - RNA, 19 nt, Homo sapiens
  misc_RNA (1)...(19): siRNA sense strand
gagagguggccaacaaagu

SEQ ID NO: 352201 - RNA, 19 nt, Homo sapiens
  misc_RNA (1)...(19): siRNA sense strand
gcgcauggucacacucuau

SEQ ID NO: 352202 - RNA, 19 nt, Homo sapiens
  misc_RNA (1)...(19): siRNA sense strand
gagccagggccucucaaug

SEQ ID NO: 352203 - RNA, 19 nt, Homo sapiens
  misc_RNA (1)...(19): siRNA sense strand
gcuggacgcgucauuguca

SEQ ID NO: 352204 - RNA, 19 nt, Homo sapiens
  misc_RNA (1)...(19): siRNA sense strand
ggaaccaccauuggaccua

SEQ ID NO: 352205 - RNA, 19 nt, Homo sapiens
  misc_RNA (1)...(19): siRNA sense strand
gaucucaugguccggaaug

SEQ ID NO: 352206 - RNA, 19 nt, Homo sapiens
  misc_RNA (1)...(19): siRNA sense strand
gaggaagccauacccaagu

SEQ ID NO: 352207 - RNA, 19 nt, Homo sapiens
  misc_RNA (1)...(19): siRNA sense strand
cacacucuaugacaacgaa

SEQ ID NO: 352208 - RNA, 19 nt, Homo sapiens
  misc_RNA (1)...(19): siRNA sense strand
cgagagcaaguacuucaug

SEQ ID NO: 352209 - RNA, 19 nt, Homo sapiens
  misc_RNA (1)...(19): siRNA sense strand
agacugagaaauggaauau

SEQ ID NO: 352210 - RNA, 19 nt, Homo sapiens
  misc_RNA (1)...(19): siRNA sense strand
ggcugcgggugcuggauuu

SEQ ID NO: 352211 - RNA, 19 nt, Homo sapiens
  misc_RNA (1)...(19): siRNA sense strand
uggaugagcggcaccauuc

SEQ ID NO: 352212 - RNA, 19 nt, Homo sapiens
  misc_RNA (1)...(19): siRNA sense strand
gcaccauucgguccucaug

SEQ ID NO: 352213 - RNA, 19 nt, Homo sapiens
  misc_RNA (1)...(19): siRNA sense strand
gggcuucuuugagcuguuc

SEQ ID NO: 352214 - RNA, 19 nt, Homo sapiens
  misc_RNA (1)...(19): siRNA sense strand
gcauggucacacucuauga

SEQ ID NO: 352215 - RNA, 19 nt, Homo sapiens
  misc_RNA (1)...(19): siRNA sense strand
uggacaagcaugaggagaa

SEQ ID NO: 352216 - RNA, 19 nt, Homo sapiens
  misc_RNA (1)...(19): siRNA sense strand
ccucuucaagggcuucuuu

SEQ ID NO: 352217 - RNA, 19 nt, Homo sapiens
  misc_RNA (1)...(19): siRNA sense strand
cuucaaacgcggugucaga

SEQ ID NO: 352218 - RNA, 19 nt, Homo sapiens
  misc_RNA (1)...(19): siRNA sense strand
ccaggugggcuuccagcaa

SEQ ID NO: 352219 - RNA, 19 nt, Homo sapiens
  misc_RNA (1)...(19): siRNA sense strand
ccaaguccuucaugaucag

SEQ ID NO: 352220 - RNA, 19 nt, Homo sapiens
  misc_RNA (1)...(19): siRNA sense strand
agaaccaccggccuuuauu

SEQ ID NO: 352221 - RNA, 19 nt, Homo sapiens
  misc_RNA (1)...(19): siRNA sense strand
gagguggccaacaaaguca

SEQ ID NO: 352222 - RNA, 19 nt, Homo sapiens
  misc_RNA (1)...(19): siRNA sense strand
auauuaagcccgagagcaa

SEQ ID NO: 352223 - RNA, 19 nt, Homo sapiens
  misc_RNA (1)...(19): siRNA sense strand
cccgacagccuucgaggaa

SEQ ID NO: 352224 - RNA, 19 nt, Homo sapiens
  misc_RNA (1)...(19): siRNA sense strand
caaggugaacagcaagcaa

SEQ ID NO: 352225 - RNA, 19 nt, Homo sapiens
  misc_RNA (1)...(19): siRNA sense strand
gagaaauggaauauuaagc

SEQ ID NO: 352226 - RNA, 19 nt, Homo sapiens
  misc_RNA (1)...(19): siRNA sense strand
caccauuggaccuaucuug

SEQ ID NO: 352227 - RNA, 19 nt, Homo sapiens
  misc_RNA (1)...(19): siRNA sense strand
cgaaauaucaacgagaacu

SEQ ID NO: 352228 - RNA, 19 nt, Homo sapiens
  misc_RNA (1)...(19): siRNA sense strand
gagccaaggugcugcauga

SEQ ID NO: 352229 - RNA, 19 nt, Homo sapiens
  misc_RNA (1)...(19): siRNA sense strand
gcaggaauuuggugcauug

SEQ ID NO: 352230 - RNA, 19 nt, Homo sapiens
  misc_RNA (1)...(19): siRNA sense strand
ggaauuuggugcauugaug

SEQ ID NO: 352231 - RNA, 19 nt, Homo sapiens
  misc_RNA (1)...(19): siRNA sense strand
gaucauggaugcucuggau

SEQ ID NO: 352232 - RNA, 19 nt, Homo sapiens
  misc_RNA (1)...(19): siRNA sense strand
gaagagauacuccauguac

SEQ ID NO: 352233 - RNA, 19 nt, Homo sapiens
  misc_RNA (1)...(19): siRNA sense strand
caacaaaggcaacgggauu

SEQ ID NO: 352234 - RNA, 19 nt, Homo sapiens
  misc_RNA (1)...(19): siRNA sense strand
ccagaagaauuucaacaau

SEQ ID NO: 352235 - RNA, 19 nt, Homo sapiens
  misc_RNA (1)...(19): siRNA sense strand
gagaaggaccgcaucaaga

SEQ ID NO: 352236 - RNA, 19 nt, Homo sapiens
  misc_RNA (1)...(19): siRNA sense strand
gaagccacccguuaccuuu

SEQ ID NO: 352237 - RNA, 19 nt, Homo sapiens
  misc_RNA (1)...(19): siRNA sense strand
cagaagaauuucaacaauc

SEQ ID NO: 352238 - RNA, 19 nt, Homo sapiens
  misc_RNA (1)...(19): siRNA sense strand
cagcgacucuguguuguuu

SEQ ID NO: 352239 - RNA, 19 nt, Homo sapiens
  misc_RNA (1)...(19): siRNA sense strand
gccaagaagccacccguua

SEQ ID NO: 352240 - RNA, 19 nt, Homo sapiens
  misc_RNA (1)...(19): siRNA sense strand
gagcugcgcaaguccauuu

SEQ ID NO: 352241 - RNA, 19 nt, Homo sapiens
  misc_RNA (1)...(19): siRNA sense strand
gaccugagccguaacuuca

SEQ ID NO: 352242 - RNA, 19 nt, Homo sapiens
  misc_RNA (1)...(19): siRNA sense strand
ccaaggagaccacccagaa

SEQ ID NO: 352243 - RNA, 19 nt, Homo sapiens
  misc_RNA (1)...(19): siRNA sense strand
gggagcagcugcauagcau

SEQ ID NO: 352244 - RNA, 19 nt, Homo sapiens
  misc_RNA (1)...(19): siRNA sense strand
caucagcgacucuguguug

SEQ ID NO: 352245 - RNA, 19 nt, Homo sapiens
  misc_RNA (1)...(19): siRNA sense strand
gaauuuggugcauugauga

SEQ ID NO: 352246 - RNA, 19 nt, Homo sapiens
  misc_RNA (1)...(19): siRNA sense strand
gaccaucgcuaugugaaca

SEQ ID NO: 352247 - RNA, 19 nt, Homo sapiens
  misc_RNA (1)...(19): siRNA sense strand
gugaacaacuacacgaaca

SEQ ID NO: 352248 - RNA, 19 nt, Homo sapiens
  misc_RNA (1)...(19): siRNA sense strand
cagcauggacucuauggaa

SEQ ID NO: 352249 - RNA, 19 nt, Homo sapiens
  misc_RNA (1)...(19): siRNA sense strand
cggacaccaugaagagaua

SEQ ID NO: 352250 - RNA, 19 nt, Homo sapiens
  misc_RNA (1)...(19): siRNA sense strand
guaacuucauugagaggaa

SEQ ID NO: 352251 - RNA, 19 nt, Homo sapiens
  misc_RNA (1)...(19): siRNA sense strand
gcaggaugcuguggaccaa

SEQ ID NO: 352252 - RNA, 19 nt, Homo sapiens
  misc_RNA (1)...(19): siRNA sense strand
ggagaaggaccgcaucaag

SEQ ID NO: 352253 - RNA, 19 nt, Homo sapiens
  misc_RNA (1)...(19): siRNA sense strand
ggacgaccugcucaaugua

SEQ ID NO: 352254 - RNA, 19 nt, Homo sapiens
  misc_RNA (1)...(19): siRNA sense strand
agccguaacuucauugaga

SEQ ID NO: 352255 - RNA, 19 nt, Homo sapiens
  misc_RNA (1)...(19): siRNA sense strand
caaucucuauggcaccaaa

SEQ ID NO: 352256 - RNA, 19 nt, Homo sapiens
  misc_RNA (1)...(19): siRNA sense strand
caggagcacaagaaucaua

SEQ ID NO: 352257 - RNA, 19 nt, Homo sapiens
  misc_RNA (1)...(19): siRNA sense strand
gagaccacccagaagaauu

SEQ ID NO: 352258 - RNA, 19 nt, Homo sapiens
  misc_RNA (1)...(19): siRNA sense strand
gcaccggacaccaugaaga

SEQ ID NO: 352259 - RNA, 19 nt, Homo sapiens
  misc_RNA (1)...(19): siRNA sense strand
agaccacccagaagaauuu

SEQ ID NO: 352260 - RNA, 19 nt, Homo sapiens
  misc_RNA (1)...(19): siRNA sense strand
gacagucacuaggcaacuu

SEQ ID NO: 352261 - RNA, 19 nt, Homo sapiens
  misc_RNA (1)...(19): siRNA sense strand
gaguacuccuccagcauuc

SEQ ID NO: 352262 - RNA, 19 nt, Homo sapiens
  misc_RNA (1)...(19): siRNA sense strand
agaaguggcagaaggagaa

SEQ ID NO: 352263 - RNA, 19 nt, Homo sapiens
  misc_RNA (1)...(19): siRNA sense strand
ggaccugagccguaacuuc

SEQ ID NO: 352264 - RNA, 19 nt, Homo sapiens
  misc_RNA (1)...(19): siRNA sense strand
aggacgaccugcucaaugu

SEQ ID NO: 352265 - RNA, 19 nt, Homo sapiens
  misc_RNA (1)...(19): siRNA sense strand
gagcagcugcauagcauca

SEQ ID NO: 352266 - RNA, 19 nt, Homo sapiens
  misc_RNA (1)...(19): siRNA sense strand
ccaagaagccacccguuac

SEQ ID NO: 352267 - RNA, 19 nt, Homo sapiens
  misc_RNA (1)...(19): siRNA sense strand
gccauucuacgucaacaaa

SEQ ID NO: 352268 - RNA, 19 nt, Homo sapiens
  misc_RNA (1)...(19): siRNA sense strand
augaagagauacuccaugu

SEQ ID NO: 352269 - RNA, 19 nt, Homo sapiens
  misc_RNA (1)...(19): siRNA sense strand
ccugagccguaacuucauu

SEQ ID NO: 352270 - RNA, 19 nt, Homo sapiens
  misc_RNA (1)...(19): siRNA sense strand
ucaagagcuucaccaccaa

SEQ ID NO: 352271 - RNA, 19 nt, Homo sapiens
  misc_RNA (1)...(19): siRNA sense strand
gaaggagacggagcuguca

SEQ ID NO: 352272 - RNA, 19 nt, Homo sapiens
  misc_RNA (1)...(19): siRNA sense strand
ggagaccacccagaagaau

SEQ ID NO: 352273 - RNA, 19 nt, Homo sapiens
  misc_RNA (1)...(19): siRNA sense strand
aagugaaggugaucaugga

SEQ ID NO: 352274 - RNA, 19 nt, Homo sapiens
  misc_RNA (1)...(19): siRNA sense strand
aggcggaccugagccguaa

SEQ ID NO: 352275 - RNA, 19 nt, Homo sapiens
  misc_RNA (1)...(19): siRNA sense strand
caagaucauugagauugag

SEQ ID NO: 352276 - RNA, 19 nt, Homo sapiens
  misc_RNA (1)...(19): siRNA sense strand
gcgacucuguguuguuucu

SEQ ID NO: 352277 - RNA, 19 nt, Homo sapiens
  misc_RNA (1)...(19): siRNA sense strand
caacgggucgagcccagaa

SEQ ID NO: 352278 - RNA, 19 nt, Homo sapiens
  misc_RNA (1)...(19): siRNA sense strand
agaggaaccacauggagaa

SEQ ID NO: 352279 - RNA, 19 nt, Homo sapiens
  misc_RNA (1)...(19): siRNA sense strand
ggagugcaccggacaccau

SEQ ID NO: 352280 - RNA, 19 nt, Homo sapiens
  misc_RNA (1)...(19): siRNA sense strand
uccaggagcacaagaauca

SEQ ID NO: 352281 - RNA, 19 nt, Homo sapiens
  misc_RNA (1)...(19): siRNA sense strand
ugaagagauacuccaugua

SEQ ID NO: 352282 - RNA, 19 nt, Homo sapiens
  misc_RNA (1)...(19): siRNA sense strand
ucugcgagcugcaucucaa

SEQ ID NO: 352283 - RNA, 19 nt, Homo sapiens
  misc_RNA (1)...(19): siRNA sense strand
ggcgacccaucauccaguu

SEQ ID NO: 352284 - RNA, 19 nt, Homo sapiens
  misc_RNA (1)...(19): siRNA sense strand
gagcacaagaaucauagca

SEQ ID NO: 352285 - RNA, 19 nt, Homo sapiens
  misc_RNA (1)...(19): siRNA sense strand
cgacccaucauccaguuug

SEQ ID NO: 352286 - RNA, 19 nt, Homo sapiens
  misc_RNA (1)...(19): siRNA sense strand
gaucauugagauugaggau

SEQ ID NO: 352287 - RNA, 19 nt, Homo sapiens
  misc_RNA (1)...(19): siRNA sense strand
cccagaagaauuucaacaa

SEQ ID NO: 352288 - RNA, 19 nt, Homo sapiens
  misc_RNA (1)...(19): siRNA sense strand
gacccaucauccaguuugu

SEQ ID NO: 352289 - RNA, 19 nt, Homo sapiens
  misc_RNA (1)...(19): siRNA sense strand
gacgaccugcucaauguau

SEQ ID NO: 352290 - RNA, 19 nt, Homo sapiens
  misc_RNA (1)...(19): siRNA sense strand
caaggacgaccugcucaau

SEQ ID NO: 352291 - RNA, 19 nt, Homo sapiens
  misc_RNA (1)...(19): siRNA sense strand
cccguuaccuuugccgaaa

SEQ ID NO: 352292 - RNA, 19 nt, Homo sapiens
  misc_RNA (1)...(19): siRNA sense strand
agaaggaccgcaucaagag

SEQ ID NO: 352293 - RNA, 19 nt, Homo sapiens
  misc_RNA (1)...(19): siRNA sense strand
aaggagaccacccagaaga

SEQ ID NO: 352294 - RNA, 19 nt, Homo sapiens
  misc_RNA (1)...(19): siRNA sense strand
uguuguuucugcaggaauu

SEQ ID NO: 352295 - RNA, 19 nt, Homo sapiens
  misc_RNA (1)...(19): siRNA sense strand
gagcuucaccaccaaugag

SEQ ID NO: 352296 - RNA, 19 nt, Homo sapiens
  misc_RNA (1)...(19): siRNA sense strand
ucuauggcaccaaagguaa

SEQ ID NO: 352297 - RNA, 19 nt, Homo sapiens
  misc_RNA (1)...(19): siRNA sense strand
ccacccagaagaauuucaa

SEQ ID NO: 352298 - RNA, 19 nt, Homo sapiens
  misc_RNA (1)...(19): siRNA sense strand
guggcagccuggagaaugg

SEQ ID NO: 352299 - RNA, 19 nt, Homo sapiens
  misc_RNA (1)...(19): siRNA sense strand
gcgccacguugagaagaug

SEQ ID NO: 352300 - RNA, 19 nt, Homo sapiens
  misc_RNA (1)...(19): siRNA sense strand
ucugcuaccuuugcauguu

SEQ ID NO: 352301 - RNA, 19 nt, Homo sapiens
  misc_RNA (1)...(19): siRNA sense strand
gcuccuccuucucccugaa

SEQ ID NO: 352302 - RNA, 19 nt, Homo sapiens
  misc_RNA (1)...(19): siRNA sense strand
caaggagaccacccagaag

SEQ ID NO: 352303 - RNA, 19 nt, Homo sapiens
  misc_RNA (1)...(19): siRNA sense strand
gcaugcgccacguugagaa

SEQ ID NO: 352304 - RNA, 19 nt, Homo sapiens
  misc_RNA (1)...(19): siRNA sense strand
cauucuacgucaacaaagg

SEQ ID NO: 352305 - RNA, 19 nt, Homo sapiens
  misc_RNA (1)...(19): siRNA sense strand
ccgcaagugucccgugcau

SEQ ID NO: 352306 - RNA, 19 nt, Homo sapiens
  misc_RNA (1)...(19): siRNA sense strand
gcaccaaagguaacuacac

SEQ ID NO: 352307 - RNA, 19 nt, Homo sapiens
  misc_RNA (1)...(19): siRNA sense strand
gagcccauccgggacuuug

SEQ ID NO: 352308 - RNA, 19 nt, Homo sapiens
  misc_RNA (1)...(19): siRNA sense strand
acaacuacacgaacagcuu

SEQ ID NO: 352309 - RNA, 19 nt, Homo sapiens
  misc_RNA (1)...(19): siRNA sense strand
ggugaccaucgcuauguga

SEQ ID NO: 352310 - RNA, 19 nt, Homo sapiens
  misc_RNA (1)...(19): siRNA sense strand
gagccaaggugcugcauga

SEQ ID NO: 352311 - RNA, 19 nt, Homo sapiens
  misc_RNA (1)...(19): siRNA sense strand
gcaggaauuuggugcauug

SEQ ID NO: 352312 - RNA, 19 nt, Homo sapiens
  misc_RNA (1)...(19): siRNA sense strand
ggaauuuggugcauugaug

SEQ ID NO: 352313 - RNA, 19 nt, Homo sapiens
  misc_RNA (1)...(19): siRNA sense strand
gaucauggaugcucuggau

SEQ ID NO: 352314 - RNA, 19 nt, Homo sapiens
  misc_RNA (1)...(19): siRNA sense strand
gaagagauacuccauguac

SEQ ID NO: 352315 - RNA, 19 nt, Homo sapiens
  misc_RNA (1)...(19): siRNA sense strand
ccagaagaauuucaacaau

SEQ ID NO: 352316 - RNA, 19 nt, Homo sapiens
  misc_RNA (1)...(19): siRNA sense strand
gagaaggaccgcaucaaga

SEQ ID NO: 352317 - RNA, 19 nt, Homo sapiens
  misc_RNA (1)...(19): siRNA sense strand
gaagccacccguuaccuuu

SEQ ID NO: 352318 - RNA, 19 nt, Homo sapiens
  misc_RNA (1)...(19): siRNA sense strand
cagaagaauuucaacaauc

SEQ ID NO: 352319 - RNA, 19 nt, Homo sapiens
  misc_RNA (1)...(19): siRNA sense strand
cagcgacucuguguuguuu

SEQ ID NO: 352320 - RNA, 19 nt, Homo sapiens
  misc_RNA (1)...(19): siRNA sense strand
gccaagaagccacccguua

SEQ ID NO: 352321 - RNA, 19 nt, Homo sapiens
  misc_RNA (1)...(19): siRNA sense strand
gagcugcgcaaguccauuu

SEQ ID NO: 352322 - RNA, 19 nt, Homo sapiens
  misc_RNA (1)...(19): siRNA sense strand
gaccugagccguaacuuca

SEQ ID NO: 352323 - RNA, 19 nt, Homo sapiens
  misc_RNA (1)...(19): siRNA sense strand
ccaaggagaccacccagaa

SEQ ID NO: 352324 - RNA, 19 nt, Homo sapiens
  misc_RNA (1)...(19): siRNA sense strand
gggagcagcugcauagcau

SEQ ID NO: 352325 - RNA, 19 nt, Homo sapiens
  misc_RNA (1)...(19): siRNA sense strand
caucagcgacucuguguug

SEQ ID NO: 352326 - RNA, 19 nt, Homo sapiens
  misc_RNA (1)...(19): siRNA sense strand
gaauuuggugcauugauga

SEQ ID NO: 352327 - RNA, 19 nt, Homo sapiens
  misc_RNA (1)...(19): siRNA sense strand
gaccaucgcuaugugaaca

SEQ ID NO: 352328 - RNA, 19 nt, Homo sapiens
  misc_RNA (1)...(19): siRNA sense strand
gugaacaacuacacgaaca

SEQ ID NO: 352329 - RNA, 19 nt, Homo sapiens
  misc_RNA (1)...(19): siRNA sense strand
cagcauggacucuauggaa

SEQ ID NO: 352330 - RNA, 19 nt, Homo sapiens
  misc_RNA (1)...(19): siRNA sense strand
cggacaccaugaagagaua

SEQ ID NO: 352331 - RNA, 19 nt, Homo sapiens
  misc_RNA (1)...(19): siRNA sense strand
guaacuucauugagaggaa

SEQ ID NO: 352332 - RNA, 19 nt, Homo sapiens
  misc_RNA (1)...(19): siRNA sense strand
gcaggaugcuguggaccaa

SEQ ID NO: 352333 - RNA, 19 nt, Homo sapiens
  misc_RNA (1)...(19): siRNA sense strand
ggagaaggaccgcaucaag

SEQ ID NO: 352334 - RNA, 19 nt, Homo sapiens
  misc_RNA (1)...(19): siRNA sense strand
ggacgaccugcucaaugua

SEQ ID NO: 352335 - RNA, 19 nt, Homo sapiens
  misc_RNA (1)...(19): siRNA sense strand
agccguaacuucauugaga

SEQ ID NO: 352336 - RNA, 19 nt, Homo sapiens
  misc_RNA (1)...(19): siRNA sense strand
caaucucuauggcaccaaa

SEQ ID NO: 352337 - RNA, 19 nt, Homo sapiens
  misc_RNA (1)...(19): siRNA sense strand
caggagcacaagaaucaua

SEQ ID NO: 352338 - RNA, 19 nt, Homo sapiens
  misc_RNA (1)...(19): siRNA sense strand
gagaccacccagaagaauu

SEQ ID NO: 352339 - RNA, 19 nt, Homo sapiens
  misc_RNA (1)...(19): siRNA sense strand
gcaccggacaccaugaaga

SEQ ID NO: 352340 - RNA, 19 nt, Homo sapiens
  misc_RNA (1)...(19): siRNA sense strand
agaccacccagaagaauuu

SEQ ID NO: 352341 - RNA, 19 nt, Homo sapiens
  misc_RNA (1)...(19): siRNA sense strand
gacagucacuaggcaacuu

SEQ ID NO: 352342 - RNA, 19 nt, Homo sapiens
  misc_RNA (1)...(19): siRNA sense strand
gaguacuccuccagcauuc

SEQ ID NO: 352343 - RNA, 19 nt, Homo sapiens
  misc_RNA (1)...(19): siRNA sense strand
agaaguggcagaaggagaa

SEQ ID NO: 352344 - RNA, 19 nt, Homo sapiens
  misc_RNA (1)...(19): siRNA sense strand
ggaccugagccguaacuuc

SEQ ID NO: 352345 - RNA, 19 nt, Homo sapiens
  misc_RNA (1)...(19): siRNA sense strand
aggacgaccugcucaaugu

SEQ ID NO: 352346 - RNA, 19 nt, Homo sapiens
  misc_RNA (1)...(19): siRNA sense strand
gagcagcugcauagcauca

SEQ ID NO: 352347 - RNA, 19 nt, Homo sapiens
  misc_RNA (1)...(19): siRNA sense strand
gaaggagacggagcuguca

SEQ ID NO: 352348 - RNA, 19 nt, Homo sapiens
  misc_RNA (1)...(19): siRNA sense strand
ccaagaagccacccguuac

SEQ ID NO: 352349 - RNA, 19 nt, Homo sapiens
  misc_RNA (1)...(19): siRNA sense strand
augaagagauacuccaugu

SEQ ID NO: 352350 - RNA, 19 nt, Homo sapiens
  misc_RNA (1)...(19): siRNA sense strand
ccugagccguaacuucauu

SEQ ID NO: 352351 - RNA, 19 nt, Homo sapiens
  misc_RNA (1)...(19): siRNA sense strand
ucaagagcuucaccaccaa

SEQ ID NO: 352352 - RNA, 19 nt, Homo sapiens
  misc_RNA (1)...(19): siRNA sense strand
ggagaccacccagaagaau

SEQ ID NO: 352353 - RNA, 19 nt, Homo sapiens
  misc_RNA (1)...(19): siRNA sense strand
aagugaaggugaucaugga

SEQ ID NO: 352354 - RNA, 19 nt, Homo sapiens
  misc_RNA (1)...(19): siRNA sense strand
aggcggaccugagccguaa

SEQ ID NO: 352355 - RNA, 19 nt, Homo sapiens
  misc_RNA (1)...(19): siRNA sense strand
caagaucauugagauugag

SEQ ID NO: 352356 - RNA, 19 nt, Homo sapiens
  misc_RNA (1)...(19): siRNA sense strand
gcgacucuguguuguuucu

SEQ ID NO: 352357 - RNA, 19 nt, Homo sapiens
  misc_RNA (1)...(19): siRNA sense strand
caacgggucgagcccagaa

SEQ ID NO: 352358 - RNA, 19 nt, Homo sapiens
  misc_RNA (1)...(19): siRNA sense strand
agaggaaccacauggagaa

SEQ ID NO: 352359 - RNA, 19 nt, Homo sapiens
  misc_RNA (1)...(19): siRNA sense strand
ggagugcaccggacaccau

SEQ ID NO: 352360 - RNA, 19 nt, Homo sapiens
  misc_RNA (1)...(19): siRNA sense strand
uccaggagcacaagaauca

SEQ ID NO: 352361 - RNA, 19 nt, Homo sapiens
  misc_RNA (1)...(19): siRNA sense strand
ugaagagauacuccaugua

SEQ ID NO: 352362 - RNA, 19 nt, Homo sapiens
  misc_RNA (1)...(19): siRNA sense strand
ucugcgagcugcaucucaa

SEQ ID NO: 352363 - RNA, 19 nt, Homo sapiens
  misc_RNA (1)...(19): siRNA sense strand
ggcgacccaucauccaguu

SEQ ID NO: 352364 - RNA, 19 nt, Homo sapiens
  misc_RNA (1)...(19): siRNA sense strand
gagcacaagaaucauagca

SEQ ID NO: 352365 - RNA, 19 nt, Homo sapiens
  misc_RNA (1)...(19): siRNA sense strand
cgacccaucauccaguuug

SEQ ID NO: 352366 - RNA, 19 nt, Homo sapiens
  misc_RNA (1)...(19): siRNA sense strand
gaucauugagauugaggau

SEQ ID NO: 352367 - RNA, 19 nt, Homo sapiens
  misc_RNA (1)...(19): siRNA sense strand
cccagaagaauuucaacaa

SEQ ID NO: 352368 - RNA, 19 nt, Homo sapiens
  misc_RNA (1)...(19): siRNA sense strand
cccguuaccuuugccgaaa

SEQ ID NO: 352369 - RNA, 19 nt, Homo sapiens
  misc_RNA (1)...(19): siRNA sense strand
gacccaucauccaguuugu

SEQ ID NO: 352370 - RNA, 19 nt, Homo sapiens
  misc_RNA (1)...(19): siRNA sense strand
gacgaccugcucaauguau

SEQ ID NO: 352371 - RNA, 19 nt, Homo sapiens
  misc_RNA (1)...(19): siRNA sense strand
caaggacgaccugcucaau

SEQ ID NO: 352372 - RNA, 19 nt, Homo sapiens
  misc_RNA (1)...(19): siRNA sense strand
agaaggaccgcaucaagag

SEQ ID NO: 352373 - RNA, 19 nt, Homo sapiens
  misc_RNA (1)...(19): siRNA sense strand
aaggagaccacccagaaga

SEQ ID NO: 352374 - RNA, 19 nt, Homo sapiens
  misc_RNA (1)...(19): siRNA sense strand
uguuguuucugcaggaauu

SEQ ID NO: 352375 - RNA, 19 nt, Homo sapiens
  misc_RNA (1)...(19): siRNA sense strand
gagcuucaccaccaaugag

SEQ ID NO: 352376 - RNA, 19 nt, Homo sapiens
  misc_RNA (1)...(19): siRNA sense strand
ucuauggcaccaaagguaa

SEQ ID NO: 352377 - RNA, 19 nt, Homo sapiens
  misc_RNA (1)...(19): siRNA sense strand
ccacccagaagaauuucaa

SEQ ID NO: 352378 - RNA, 19 nt, Homo sapiens
  misc_RNA (1)...(19): siRNA sense strand
guggcagccuggagaaugg

SEQ ID NO: 352379 - RNA, 19 nt, Homo sapiens
  misc_RNA (1)...(19): siRNA sense strand
gcgccacguugagaagaug

SEQ ID NO: 352380 - RNA, 19 nt, Homo sapiens
  misc_RNA (1)...(19): siRNA sense strand
ucugcuaccuuugcauguu

SEQ ID NO: 352381 - RNA, 19 nt, Homo sapiens
  misc_RNA (1)...(19): siRNA sense strand
gcuccuccuucucccugaa

SEQ ID NO: 352382 - RNA, 19 nt, Homo sapiens
  misc_RNA (1)...(19): siRNA sense strand
caaggagaccacccagaag

SEQ ID NO: 352383 - RNA, 19 nt, Homo sapiens
  misc_RNA (1)...(19): siRNA sense strand
gcaugcgccacguugagaa

SEQ ID NO: 352384 - RNA, 19 nt, Homo sapiens
  misc_RNA (1)...(19): siRNA sense strand
gagcccauccgggacuuug

SEQ ID NO: 352385 - RNA, 19 nt, Homo sapiens
  misc_RNA (1)...(19): siRNA sense strand
gcaccaaagguaacuacac

SEQ ID NO: 352386 - RNA, 19 nt, Homo sapiens
  misc_RNA (1)...(19): siRNA sense strand
acaacuacacgaacagcuu

SEQ ID NO: 352387 - RNA, 19 nt, Homo sapiens
  misc_RNA (1)...(19): siRNA sense strand
ggugaccaucgcuauguga

SEQ ID NO: 352388 - RNA, 19 nt, Homo sapiens
  misc_RNA (1)...(19): siRNA sense strand
ccgcaagugucccgugcau

SEQ ID NO: 352389 - RNA, 19 nt, Homo sapiens
  misc_RNA (1)...(19): siRNA sense strand
gaacugcuguggucacuuu

SEQ ID NO: 352390 - RNA, 19 nt, Homo sapiens
  misc_RNA (1)...(19): siRNA sense strand
agaaggagauucacagaga

SEQ ID NO: 352391 - RNA, 19 nt, Homo sapiens
  misc_RNA (1)...(19): siRNA sense strand
gccaacagcccuaacauuu

SEQ ID NO: 352392 - RNA, 19 nt, Homo sapiens
  misc_RNA (1)...(19): siRNA sense strand
ggaagcgaaugaggaguuu

SEQ ID NO: 352393 - RNA, 19 nt, Homo sapiens
  misc_RNA (1)...(19): siRNA sense strand
gcacaugaagcgacaaaga

SEQ ID NO: 352394 - RNA, 19 nt, Homo sapiens
  misc_RNA (1)...(19): siRNA sense strand
gcaagcaagcacuauauga

SEQ ID NO: 352395 - RNA, 19 nt, Homo sapiens
  misc_RNA (1)...(19): siRNA sense strand
caacagcccuaacauuugc

SEQ ID NO: 352396 - RNA, 19 nt, Homo sapiens
  misc_RNA (1)...(19): siRNA sense strand
caacauagucaauuugcuu

SEQ ID NO: 352397 - RNA, 19 nt, Homo sapiens
  misc_RNA (1)...(19): siRNA sense strand
caagcaagcacuauaugaa

SEQ ID NO: 352398 - RNA, 19 nt, Homo sapiens
  misc_RNA (1)...(19): siRNA sense strand
ccaaccaugugacaccuuu

SEQ ID NO: 352399 - RNA, 19 nt, Homo sapiens
  misc_RNA (1)...(19): siRNA sense strand
ccacuccucugcugcuauu

SEQ ID NO: 352400 - RNA, 19 nt, Homo sapiens
  misc_RNA (1)...(19): siRNA sense strand
gaugugguacaaccucuua

SEQ ID NO: 352401 - RNA, 19 nt, Homo sapiens
  misc_RNA (1)...(19): siRNA sense strand
agcaagcacuauaugaaua

SEQ ID NO: 352402 - RNA, 19 nt, Homo sapiens
  misc_RNA (1)...(19): siRNA sense strand
ugacaaagcagagcacaug

SEQ ID NO: 352403 - RNA, 19 nt, Homo sapiens
  misc_RNA (1)...(19): siRNA sense strand
uguguagacuugacuauca

SEQ ID NO: 352404 - RNA, 19 nt, Homo sapiens
  misc_RNA (1)...(19): siRNA sense strand
ccaacagcccuaacauuug

SEQ ID NO: 352405 - RNA, 19 nt, Homo sapiens
  misc_RNA (1)...(19): siRNA sense strand
gaccaugugugcggugcua

SEQ ID NO: 352406 - RNA, 19 nt, Homo sapiens
  misc_RNA (1)...(19): siRNA sense strand
agacuugacuaucacuaau

SEQ ID NO: 352407 - RNA, 19 nt, Homo sapiens
  misc_RNA (1)...(19): siRNA sense strand
gcgcaagcaagcacuauau

SEQ ID NO: 352408 - RNA, 19 nt, Homo sapiens
  misc_RNA (1)...(19): siRNA sense strand
agagagaccuggccaagac

SEQ ID NO: 352409 - RNA, 19 nt, Homo sapiens
  misc_RNA (1)...(19): siRNA sense strand
gacuaucacuaaucugcuu

SEQ ID NO: 352410 - RNA, 19 nt, Homo sapiens
  misc_RNA (1)...(19): siRNA sense strand
gaccacaacauagucaauu

SEQ ID NO: 352411 - RNA, 19 nt, Homo sapiens
  misc_RNA (1)...(19): siRNA sense strand
caagaaggagauucacaga

SEQ ID NO: 352412 - RNA, 19 nt, Homo sapiens
  misc_RNA (1)...(19): siRNA sense strand
uaacauuugccaagucuuc

SEQ ID NO: 352413 - RNA, 19 nt, Homo sapiens
  misc_RNA (1)...(19): siRNA sense strand
uauccaagaugugguacaa

SEQ ID NO: 352414 - RNA, 19 nt, Homo sapiens
  misc_RNA (1)...(19): siRNA sense strand
cucaagagauucugugcuu

SEQ ID NO: 352415 - RNA, 19 nt, Homo sapiens
  misc_RNA (1)...(19): siRNA sense strand
ccacaacauagucaauuug

SEQ ID NO: 352416 - RNA, 19 nt, Homo sapiens
  misc_RNA (1)...(19): siRNA sense strand
gggaagcgaaugaggaguu

SEQ ID NO: 352417 - RNA, 19 nt, Homo sapiens
  misc_RNA (1)...(19): siRNA sense strand
gagcacaugaagcgacaaa

SEQ ID NO: 352418 - RNA, 19 nt, Homo sapiens
  misc_RNA (1)...(19): siRNA sense strand
ccucuuacccugcaaguuc

SEQ ID NO: 352419 - RNA, 19 nt, Homo sapiens
  misc_RNA (1)...(19): siRNA sense strand
gacuggcuguguagacuug

SEQ ID NO: 352420 - RNA, 19 nt, Homo sapiens
  misc_RNA (1)...(19): siRNA sense strand
caaagcagagcacaugaag

SEQ ID NO: 352421 - RNA, 19 nt, Homo sapiens
  misc_RNA (1)...(19): siRNA sense strand
gcaagcacuauaugaauac

SEQ ID NO: 352422 - RNA, 19 nt, Homo sapiens
  misc_RNA (1)...(19): siRNA sense strand
ucaggguccucauuuccaa

SEQ ID NO: 352423 - RNA, 19 nt, Homo sapiens
  misc_RNA (1)...(19): siRNA sense strand
accacaacauagucaauuu

SEQ ID NO: 352424 - RNA, 19 nt, Homo sapiens
  misc_RNA (1)...(19): siRNA sense strand
ugacaccuuucgaccacaa

SEQ ID NO: 352425 - RNA, 19 nt, Homo sapiens
  misc_RNA (1)...(19): siRNA sense strand
cagcguccuucgcagauuc

SEQ ID NO: 352426 - RNA, 19 nt, Homo sapiens
  misc_RNA (1)...(19): siRNA sense strand
gacaaagcagagcacauga

SEQ ID NO: 352427 - RNA, 19 nt, Homo sapiens
  misc_RNA (1)...(19): siRNA sense strand
uagacuugacuaucacuaa

SEQ ID NO: 352428 - RNA, 19 nt, Homo sapiens
  misc_RNA (1)...(19): siRNA sense strand
gcugguggccaaggaauug

SEQ ID NO: 352429 - RNA, 19 nt, Homo sapiens
  misc_RNA (1)...(19): siRNA sense strand
gcccuaacauuugccaagu

SEQ ID NO: 352430 - RNA, 19 nt, Homo sapiens
  misc_RNA (1)...(19): siRNA sense strand
agucagcccagucuucuuu

SEQ ID NO: 352431 - RNA, 19 nt, Homo sapiens
  misc_RNA (1)...(19): siRNA sense strand
gaggaagaggccaccaaug

SEQ ID NO: 352432 - RNA, 19 nt, Homo sapiens
  misc_RNA (1)...(19): siRNA sense strand
ccuaacauuugccaagucu

SEQ ID NO: 352433 - RNA, 19 nt, Homo sapiens
  misc_RNA (1)...(19): siRNA sense strand
aagcaagcacuauaugaau

SEQ ID NO: 352434 - RNA, 19 nt, Homo sapiens
  misc_RNA (1)...(19): siRNA sense strand
cuauaugaauacgcaagaa

SEQ ID NO: 352435 - RNA, 19 nt, Homo sapiens
  misc_RNA (1)...(19): siRNA sense strand
gcucacuccagcugacaaa

SEQ ID NO: 352436 - RNA, 19 nt, Homo sapiens
  misc_RNA (1)...(19): siRNA sense strand
acaaagcagagcacaugaa

SEQ ID NO: 352437 - RNA, 19 nt, Homo sapiens
  misc_RNA (1)...(19): siRNA sense strand
gggaguugguggagucacu

SEQ ID NO: 352438 - RNA, 19 nt, Homo sapiens
  misc_RNA (1)...(19): siRNA sense strand
ucagagagucaaggaaguu

SEQ ID NO: 352439 - RNA, 19 nt, Homo sapiens
  misc_RNA (1)...(19): siRNA sense strand
aggaagaggccaccaaugg

SEQ ID NO: 352440 - RNA, 19 nt, Homo sapiens
  misc_RNA (1)...(19): siRNA sense strand
gaauacgcaagaaggagau

SEQ ID NO: 352441 - RNA, 19 nt, Homo sapiens
  misc_RNA (1)...(19): siRNA sense strand
ggagcgcaagcaagcacua

SEQ ID NO: 352442 - RNA, 19 nt, Homo sapiens
  misc_RNA (1)...(19): siRNA sense strand
cagagagucaaggaaguuu

SEQ ID NO: 352443 - RNA, 19 nt, Homo sapiens
  misc_RNA (1)...(19): siRNA sense strand
ccacagccucugccuccaa

SEQ ID NO: 352444 - RNA, 19 nt, Homo sapiens
  misc_RNA (1)...(19): siRNA sense strand
ugaggaagaggccaccaau

SEQ ID NO: 352445 - RNA, 19 nt, Homo sapiens
  misc_RNA (1)...(19): siRNA sense strand
guagacuugacuaucacua

SEQ ID NO: 352446 - RNA, 19 nt, Homo sapiens
  misc_RNA (1)...(19): siRNA sense strand
caugugccauuggguguca

SEQ ID NO: 352447 - RNA, 19 nt, Homo sapiens
  misc_RNA (1)...(19): siRNA sense strand
gaacugcuguggucacuuu

SEQ ID NO: 352448 - RNA, 19 nt, Homo sapiens
  misc_RNA (1)...(19): siRNA sense strand
agaaggagauucacagaga

SEQ ID NO: 352449 - RNA, 19 nt, Homo sapiens
  misc_RNA (1)...(19): siRNA sense strand
gccaacagcccuaacauuu

SEQ ID NO: 352450 - RNA, 19 nt, Homo sapiens
  misc_RNA (1)...(19): siRNA sense strand
ggaagcgaaugaggaguuu

SEQ ID NO: 352451 - RNA, 19 nt, Homo sapiens
  misc_RNA (1)...(19): siRNA sense strand
gcacaugaagcgacaaaga

SEQ ID NO: 352452 - RNA, 19 nt, Homo sapiens
  misc_RNA (1)...(19): siRNA sense strand
gcaagcaagcacuauauga

SEQ ID NO: 352453 - RNA, 19 nt, Homo sapiens
  misc_RNA (1)...(19): siRNA sense strand
caacagcccuaacauuugc

SEQ ID NO: 352454 - RNA, 19 nt, Homo sapiens
  misc_RNA (1)...(19): siRNA sense strand
caacauagucaauuugcuu

SEQ ID NO: 352455 - RNA, 19 nt, Homo sapiens
  misc_RNA (1)...(19): siRNA sense strand
caagcaagcacuauaugaa

SEQ ID NO: 352456 - RNA, 19 nt, Homo sapiens
  misc_RNA (1)...(19): siRNA sense strand
ccaaccaugugacaccuuu

SEQ ID NO: 352457 - RNA, 19 nt, Homo sapiens
  misc_RNA (1)...(19): siRNA sense strand
ccacuccucugcugcuauu

SEQ ID NO: 352458 - RNA, 19 nt, Homo sapiens
  misc_RNA (1)...(19): siRNA sense strand
gaugugguacaaccucuua

SEQ ID NO: 352459 - RNA, 19 nt, Homo sapiens
  misc_RNA (1)...(19): siRNA sense strand
agcaagcacuauaugaaua

SEQ ID NO: 352460 - RNA, 19 nt, Homo sapiens
  misc_RNA (1)...(19): siRNA sense strand
ugacaaagcagagcacaug

SEQ ID NO: 352461 - RNA, 19 nt, Homo sapiens
  misc_RNA (1)...(19): siRNA sense strand
uguguagacuugacuauca

SEQ ID NO: 352462 - RNA, 19 nt, Homo sapiens
  misc_RNA (1)...(19): siRNA sense strand
ccaacagcccuaacauuug

SEQ ID NO: 352463 - RNA, 19 nt, Homo sapiens
  misc_RNA (1)...(19): siRNA sense strand
gaccaugugugcggugcua

SEQ ID NO: 352464 - RNA, 19 nt, Homo sapiens
  misc_RNA (1)...(19): siRNA sense strand
agacuugacuaucacuaau

SEQ ID NO: 352465 - RNA, 19 nt, Homo sapiens
  misc_RNA (1)...(19): siRNA sense strand
gcgcaagcaagcacuauau

SEQ ID NO: 352466 - RNA, 19 nt, Homo sapiens
  misc_RNA (1)...(19): siRNA sense strand
agagagaccuggccaagac

SEQ ID NO: 352467 - RNA, 19 nt, Homo sapiens
  misc_RNA (1)...(19): siRNA sense strand
gacuaucacuaaucugcuu

SEQ ID NO: 352468 - RNA, 19 nt, Homo sapiens
  misc_RNA (1)...(19): siRNA sense strand
gaccacaacauagucaauu

SEQ ID NO: 352469 - RNA, 19 nt, Homo sapiens
  misc_RNA (1)...(19): siRNA sense strand
caagaaggagauucacaga

SEQ ID NO: 352470 - RNA, 19 nt, Homo sapiens
  misc_RNA (1)...(19): siRNA sense strand
uaacauuugccaagucuuc

SEQ ID NO: 352471 - RNA, 19 nt, Homo sapiens
  misc_RNA (1)...(19): siRNA sense strand
uauccaagaugugguacaa

SEQ ID NO: 352472 - RNA, 19 nt, Homo sapiens
  misc_RNA (1)...(19): siRNA sense strand
cucaagagauucugugcuu

SEQ ID NO: 352473 - RNA, 19 nt, Homo sapiens
  misc_RNA (1)...(19): siRNA sense strand
ccacaacauagucaauuug

SEQ ID NO: 352474 - RNA, 19 nt, Homo sapiens
  misc_RNA (1)...(19): siRNA sense strand
gggaagcgaaugaggaguu

SEQ ID NO: 352475 - RNA, 19 nt, Homo sapiens
  misc_RNA (1)...(19): siRNA sense strand
gagcacaugaagcgacaaa

SEQ ID NO: 352476 - RNA, 19 nt, Homo sapiens
  misc_RNA (1)...(19): siRNA sense strand
ccucuuacccugcaaguuc

SEQ ID NO: 352477 - RNA, 19 nt, Homo sapiens
  misc_RNA (1)...(19): siRNA sense strand
gacuggcuguguagacuug

SEQ ID NO: 352478 - RNA, 19 nt, Homo sapiens
  misc_RNA (1)...(19): siRNA sense strand
caaagcagagcacaugaag

SEQ ID NO: 352479 - RNA, 19 nt, Homo sapiens
  misc_RNA (1)...(19): siRNA sense strand
gcaagcacuauaugaauac

SEQ ID NO: 352480 - RNA, 19 nt, Homo sapiens
  misc_RNA (1)...(19): siRNA sense strand
ucaggguccucauuuccaa

SEQ ID NO: 352481 - RNA, 19 nt, Homo sapiens
  misc_RNA (1)...(19): siRNA sense strand
accacaacauagucaauuu

SEQ ID NO: 352482 - RNA, 19 nt, Homo sapiens
  misc_RNA (1)...(19): siRNA sense strand
ugacaccuuucgaccacaa

SEQ ID NO: 352483 - RNA, 19 nt, Homo sapiens
  misc_RNA (1)...(19): siRNA sense strand
cagcguccuucgcagauuc

SEQ ID NO: 352484 - RNA, 19 nt, Homo sapiens
  misc_RNA (1)...(19): siRNA sense strand
gacaaagcagagcacauga

SEQ ID NO: 352485 - RNA, 19 nt, Homo sapiens
  misc_RNA (1)...(19): siRNA sense strand
uagacuugacuaucacuaa

SEQ ID NO: 352486 - RNA, 19 nt, Homo sapiens
  misc_RNA (1)...(19): siRNA sense strand
gcugguggccaaggaauug

SEQ ID NO: 352487 - RNA, 19 nt, Homo sapiens
  misc_RNA (1)...(19): siRNA sense strand
gcccuaacauuugccaagu

SEQ ID NO: 352488 - RNA, 19 nt, Homo sapiens
  misc_RNA (1)...(19): siRNA sense strand
agucagcccagucuucuuu

SEQ ID NO: 352489 - RNA, 19 nt, Homo sapiens
  misc_RNA (1)...(19): siRNA sense strand
gaggaagaggccaccaaug

SEQ ID NO: 352490 - RNA, 19 nt, Homo sapiens
  misc_RNA (1)...(19): siRNA sense strand
ccuaacauuugccaagucu

SEQ ID NO: 352491 - RNA, 19 nt, Homo sapiens
  misc_RNA (1)...(19): siRNA sense strand
aagcaagcacuauaugaau

SEQ ID NO: 352492 - RNA, 19 nt, Homo sapiens
  misc_RNA (1)...(19): siRNA sense strand
cuauaugaauacgcaagaa

SEQ ID NO: 352493 - RNA, 19 nt, Homo sapiens
  misc_RNA (1)...(19): siRNA sense strand
gcucacuccagcugacaaa

SEQ ID NO: 352494 - RNA, 19 nt, Homo sapiens
  misc_RNA (1)...(19): siRNA sense strand
acaaagcagagcacaugaa

SEQ ID NO: 352495 - RNA, 19 nt, Homo sapiens
  misc_RNA (1)...(19): siRNA sense strand
gggaguugguggagucacu

SEQ ID NO: 352496 - RNA, 19 nt, Homo sapiens
  misc_RNA (1)...(19): siRNA sense strand
ucagagagucaaggaaguu

SEQ ID NO: 352497 - RNA, 19 nt, Homo sapiens
  misc_RNA (1)...(19): siRNA sense strand
aggaagaggccaccaaugg

SEQ ID NO: 352498 - RNA, 19 nt, Homo sapiens
  misc_RNA (1)...(19): siRNA sense strand
gaauacgcaagaaggagau

SEQ ID NO: 352499 - RNA, 19 nt, Homo sapiens
  misc_RNA (1)...(19): siRNA sense strand
ggagcgcaagcaagcacua

SEQ ID NO: 352500 - RNA, 19 nt, Homo sapiens
  misc_RNA (1)...(19): siRNA sense strand
cagagagucaaggaaguuu

SEQ ID NO: 352501 - RNA, 19 nt, Homo sapiens
  misc_RNA (1)...(19): siRNA sense strand
ccacagccucugccuccaa

SEQ ID NO: 352502 - RNA, 19 nt, Homo sapiens
  misc_RNA (1)...(19): siRNA sense strand
ugaggaagaggccaccaau

SEQ ID NO: 352503 - RNA, 19 nt, Homo sapiens
  misc_RNA (1)...(19): siRNA sense strand
guagacuugacuaucacua

SEQ ID NO: 352504 - RNA, 19 nt, Homo sapiens
  misc_RNA (1)...(19): siRNA sense strand
caugugccauuggguguca

SEQ ID NO: 352505 - RNA, 19 nt, Homo sapiens
  misc_RNA (1)...(19): siRNA sense strand
gaacugcuguggucacuuu

SEQ ID NO: 352506 - RNA, 19 nt, Homo sapiens
  misc_RNA (1)...(19): siRNA sense strand
ggaagcgaaugaggaguuu

SEQ ID NO: 352507 - RNA, 19 nt, Homo sapiens
  misc_RNA (1)...(19): siRNA sense strand
gcacaugaagcgacaaaga

SEQ ID NO: 352508 - RNA, 19 nt, Homo sapiens
  misc_RNA (1)...(19): siRNA sense strand
caacauagucaauuugcuu

SEQ ID NO: 352509 - RNA, 19 nt, Homo sapiens
  misc_RNA (1)...(19): siRNA sense strand
ccaaccaugugacaccuuu

SEQ ID NO: 352510 - RNA, 19 nt, Homo sapiens
  misc_RNA (1)...(19): siRNA sense strand
ccacuccucugcugcuauu

SEQ ID NO: 352511 - RNA, 19 nt, Homo sapiens
  misc_RNA (1)...(19): siRNA sense strand
gaugugguacaaccucuua

SEQ ID NO: 352512 - RNA, 19 nt, Homo sapiens
  misc_RNA (1)...(19): siRNA sense strand
ugacaaagcagagcacaug

SEQ ID NO: 352513 - RNA, 19 nt, Homo sapiens
  misc_RNA (1)...(19): siRNA sense strand
uguguagacuugacuauca

SEQ ID NO: 352514 - RNA, 19 nt, Homo sapiens
  misc_RNA (1)...(19): siRNA sense strand
gaccaugugugcggugcua

SEQ ID NO: 352515 - RNA, 19 nt, Homo sapiens
  misc_RNA (1)...(19): siRNA sense strand
agacuugacuaucacuaau

SEQ ID NO: 352516 - RNA, 19 nt, Homo sapiens
  misc_RNA (1)...(19): siRNA sense strand
agagagaccuggccaagac

SEQ ID NO: 352517 - RNA, 19 nt, Homo sapiens
  misc_RNA (1)...(19): siRNA sense strand
gacuaucacuaaucugcuu

SEQ ID NO: 352518 - RNA, 19 nt, Homo sapiens
  misc_RNA (1)...(19): siRNA sense strand
gaccacaacauagucaauu

SEQ ID NO: 352519 - RNA, 19 nt, Homo sapiens
  misc_RNA (1)...(19): siRNA sense strand
uauccaagaugugguacaa

SEQ ID NO: 352520 - RNA, 19 nt, Homo sapiens
  misc_RNA (1)...(19): siRNA sense strand
cucaagagauucugugcuu

SEQ ID NO: 352521 - RNA, 19 nt, Homo sapiens
  misc_RNA (1)...(19): siRNA sense strand
ccacaacauagucaauuug

SEQ ID NO: 352522 - RNA, 19 nt, Homo sapiens
  misc_RNA (1)...(19): siRNA sense strand
gggaagcgaaugaggaguu

SEQ ID NO: 352523 - RNA, 19 nt, Homo sapiens
  misc_RNA (1)...(19): siRNA sense strand
gagcacaugaagcgacaaa

SEQ ID NO: 352524 - RNA, 19 nt, Homo sapiens
  misc_RNA (1)...(19): siRNA sense strand
ccucuuacccugcaaguuc

SEQ ID NO: 352525 - RNA, 19 nt, Homo sapiens
  misc_RNA (1)...(19): siRNA sense strand
gacuggcuguguagacuug

SEQ ID NO: 352526 - RNA, 19 nt, Homo sapiens
  misc_RNA (1)...(19): siRNA sense strand
caaagcagagcacaugaag

SEQ ID NO: 352527 - RNA, 19 nt, Homo sapiens
  misc_RNA (1)...(19): siRNA sense strand
ucaggguccucauuuccaa

SEQ ID NO: 352528 - RNA, 19 nt, Homo sapiens
  misc_RNA (1)...(19): siRNA sense strand
accacaacauagucaauuu

SEQ ID NO: 352529 - RNA, 19 nt, Homo sapiens
  misc_RNA (1)...(19): siRNA sense strand
ugacaccuuucgaccacaa

SEQ ID NO: 352530 - RNA, 19 nt, Homo sapiens
  misc_RNA (1)...(19): siRNA sense strand
cagcguccuucgcagauuc

SEQ ID NO: 352531 - RNA, 19 nt, Homo sapiens
  misc_RNA (1)...(19): siRNA sense strand
gacaaagcagagcacauga

SEQ ID NO: 352532 - RNA, 19 nt, Homo sapiens
  misc_RNA (1)...(19): siRNA sense strand
uagacuugacuaucacuaa

SEQ ID NO: 352533 - RNA, 19 nt, Homo sapiens
  misc_RNA (1)...(19): siRNA sense strand
gcugguggccaaggaauug

SEQ ID NO: 352534 - RNA, 19 nt, Homo sapiens
  misc_RNA (1)...(19): siRNA sense strand
agucagcccagucuucuuu

SEQ ID NO: 352535 - RNA, 19 nt, Homo sapiens
  misc_RNA (1)...(19): siRNA sense strand
gaggaagaggccaccaaug

SEQ ID NO: 352536 - RNA, 19 nt, Homo sapiens
  misc_RNA (1)...(19): siRNA sense strand
gcucacuccagcugacaaa

SEQ ID NO: 352537 - RNA, 19 nt, Homo sapiens
  misc_RNA (1)...(19): siRNA sense strand
acaaagcagagcacaugaa

SEQ ID NO: 352538 - RNA, 19 nt, Homo sapiens
  misc_RNA (1)...(19): siRNA sense strand
gggaguugguggagucacu

SEQ ID NO: 352539 - RNA, 19 nt, Homo sapiens
  misc_RNA (1)...(19): siRNA sense strand
ucagagagucaaggaaguu

SEQ ID NO: 352540 - RNA, 19 nt, Homo sapiens
  misc_RNA (1)...(19): siRNA sense strand
aggaagaggccaccaaugg

SEQ ID NO: 352541 - RNA, 19 nt, Homo sapiens
  misc_RNA (1)...(19): siRNA sense strand
cagagagucaaggaaguuu

SEQ ID NO: 352542 - RNA, 19 nt, Homo sapiens
  misc_RNA (1)...(19): siRNA sense strand
ccacagccucugccuccaa

SEQ ID NO: 352543 - RNA, 19 nt, Homo sapiens
  misc_RNA (1)...(19): siRNA sense strand
ugaggaagaggccaccaau

SEQ ID NO: 352544 - RNA, 19 nt, Homo sapiens
  misc_RNA (1)...(19): siRNA sense strand
guagacuugacuaucacua

SEQ ID NO: 352545 - RNA, 19 nt, Homo sapiens
  misc_RNA (1)...(19): siRNA sense strand
caugugccauuggguguca

SEQ ID NO: 352546 - RNA, 19 nt, Homo sapiens
  misc_RNA (1)...(19): siRNA sense strand
gaaguucccugaugguuuc

SEQ ID NO: 352547 - RNA, 19 nt, Homo sapiens
  misc_RNA (1)...(19): siRNA sense strand
gcaaggaguacaacuauga

SEQ ID NO: 352548 - RNA, 19 nt, Homo sapiens
  misc_RNA (1)...(19): siRNA sense strand
ggagggagcaugaucauug

SEQ ID NO: 352549 - RNA, 19 nt, Homo sapiens
  misc_RNA (1)...(19): siRNA sense strand
uaugggagcuguuaucaug

SEQ ID NO: 352550 - RNA, 19 nt, Homo sapiens
  misc_RNA (1)...(19): siRNA sense strand
agacgacuguuacaaguuu

SEQ ID NO: 352551 - RNA, 19 nt, Homo sapiens
  misc_RNA (1)...(19): siRNA sense strand
ggagaucaauggacaggau

SEQ ID NO: 352552 - RNA, 19 nt, Homo sapiens
  misc_RNA (1)...(19): siRNA sense strand
cgaauuggcuuugcuguca

SEQ ID NO: 352553 - RNA, 19 nt, Homo sapiens
  misc_RNA (1)...(19): siRNA sense strand
caagacgacuguuacaagu

SEQ ID NO: 352554 - RNA, 19 nt, Homo sapiens
  misc_RNA (1)...(19): siRNA sense strand
ggaagacuguggcuacaac

SEQ ID NO: 352555 - RNA, 19 nt, Homo sapiens
  misc_RNA (1)...(19): siRNA sense strand
ccagcagcaugaugacuuu

SEQ ID NO: 352556 - RNA, 19 nt, Homo sapiens
  misc_RNA (1)...(19): siRNA sense strand
gggcuucuacguugucuuu

SEQ ID NO: 352557 - RNA, 19 nt, Homo sapiens
  misc_RNA (1)...(19): siRNA sense strand
ugucagcgcuugccaugug

SEQ ID NO: 352558 - RNA, 19 nt, Homo sapiens
  misc_RNA (1)...(19): siRNA sense strand
caugaugacuuugcugaug

SEQ ID NO: 352559 - RNA, 19 nt, Homo sapiens
  misc_RNA (1)...(19): siRNA sense strand
gaguacaacuaugacaaga

SEQ ID NO: 352560 - RNA, 19 nt, Homo sapiens
  misc_RNA (1)...(19): siRNA sense strand
gcuucuacguugucuuuga

SEQ ID NO: 352561 - RNA, 19 nt, Homo sapiens
  misc_RNA (1)...(19): siRNA sense strand
gacuguggcuacaacauuc

SEQ ID NO: 352562 - RNA, 19 nt, Homo sapiens
  misc_RNA (1)...(19): siRNA sense strand
uuacaaguuugccaucuca

SEQ ID NO: 352563 - RNA, 19 nt, Homo sapiens
  misc_RNA (1)...(19): siRNA sense strand
caucugcgcccucuucaug

SEQ ID NO: 352564 - RNA, 19 nt, Homo sapiens
  misc_RNA (1)...(19): siRNA sense strand
gagggagcaugaucauugg

SEQ ID NO: 352565 - RNA, 19 nt, Homo sapiens
  misc_RNA (1)...(19): siRNA sense strand
caauggacaggaucugaaa

SEQ ID NO: 352566 - RNA, 19 nt, Homo sapiens
  misc_RNA (1)...(19): siRNA sense strand
cuacaacauuccacagaca

SEQ ID NO: 352567 - RNA, 19 nt, Homo sapiens
  misc_RNA (1)...(19): siRNA sense strand
gacaggaucugaaaaugga

SEQ ID NO: 352568 - RNA, 19 nt, Homo sapiens
  misc_RNA (1)...(19): siRNA sense strand
ggaguacaacuaugacaag

SEQ ID NO: 352569 - RNA, 19 nt, Homo sapiens
  misc_RNA (1)...(19): siRNA sense strand
gcaccaccaaccuucguuu

SEQ ID NO: 352570 - RNA, 19 nt, Homo sapiens
  misc_RNA (1)...(19): siRNA sense strand
ccaagacgacuguuacaag

SEQ ID NO: 352571 - RNA, 19 nt, Homo sapiens
  misc_RNA (1)...(19): siRNA sense strand
gagaaguucccugaugguu

SEQ ID NO: 352572 - RNA, 19 nt, Homo sapiens
  misc_RNA (1)...(19): siRNA sense strand
cugaagugcuggccucugu

SEQ ID NO: 352573 - RNA, 19 nt, Homo sapiens
  misc_RNA (1)...(19): siRNA sense strand
caagaaaguguuugaagcu

SEQ ID NO: 352574 - RNA, 19 nt, Homo sapiens
  misc_RNA (1)...(19): siRNA sense strand
agaaguucccugaugguuu

SEQ ID NO: 352575 - RNA, 19 nt, Homo sapiens
  misc_RNA (1)...(19): siRNA sense strand
guggauacaggcagcagua

SEQ ID NO: 352576 - RNA, 19 nt, Homo sapiens
  misc_RNA (1)...(19): siRNA sense strand
gggcagcuuuguggagaug

SEQ ID NO: 352577 - RNA, 19 nt, Homo sapiens
  misc_RNA (1)...(19): siRNA sense strand
acggagaaguucccugaug

SEQ ID NO: 352578 - RNA, 19 nt, Homo sapiens
  misc_RNA (1)...(19): siRNA sense strand
acacaggcagucucuggua

SEQ ID NO: 352579 - RNA, 19 nt, Homo sapiens
  misc_RNA (1)...(19): siRNA sense strand
caagagcauuguggacagu

SEQ ID NO: 352580 - RNA, 19 nt, Homo sapiens
  misc_RNA (1)...(19): siRNA sense strand
cacaggcagucucugguau

SEQ ID NO: 352581 - RNA, 19 nt, Homo sapiens
  misc_RNA (1)...(19): siRNA sense strand
agacuguggcuacaacauu

SEQ ID NO: 352582 - RNA, 19 nt, Homo sapiens
  misc_RNA (1)...(19): siRNA sense strand
gauacaggcagcaguaacu

SEQ ID NO: 352583 - RNA, 19 nt, Homo sapiens
  misc_RNA (1)...(19): siRNA sense strand
ggcgggagugguauuauga

SEQ ID NO: 352584 - RNA, 19 nt, Homo sapiens
  misc_RNA (1)...(19): siRNA sense strand
augaugacuuugcugauga

SEQ ID NO: 352585 - RNA, 19 nt, Homo sapiens
  misc_RNA (1)...(19): siRNA sense strand
ucaauggacaggaucugaa

SEQ ID NO: 352586 - RNA, 19 nt, Homo sapiens
  misc_RNA (1)...(19): siRNA sense strand
gcaugaucauuggagguau

SEQ ID NO: 352587 - RNA, 19 nt, Homo sapiens
  misc_RNA (1)...(19): siRNA sense strand
caucucacucuaccuaaug

SEQ ID NO: 352588 - RNA, 19 nt, Homo sapiens
  misc_RNA (1)...(19): siRNA sense strand
ucaucucacucuaccuaau

SEQ ID NO: 352589 - RNA, 19 nt, Homo sapiens
  misc_RNA (1)...(19): siRNA sense strand
acaggcagcaguaacuuug

SEQ ID NO: 352590 - RNA, 19 nt, Homo sapiens
  misc_RNA (1)...(19): siRNA sense strand
ggcagucucugguauacac

SEQ ID NO: 352591 - RNA, 19 nt, Homo sapiens
  misc_RNA (1)...(19): siRNA sense strand
caugaucauuggagguauc

SEQ ID NO: 352592 - RNA, 19 nt, Homo sapiens
  misc_RNA (1)...(19): siRNA sense strand
gcuacuacguggagaugac

SEQ ID NO: 352593 - RNA, 19 nt, Homo sapiens
  misc_RNA (1)...(19): siRNA sense strand
aaccaguccuuccgcauca

SEQ ID NO: 352594 - RNA, 19 nt, Homo sapiens
  misc_RNA (1)...(19): siRNA sense strand
acaggcagucucugguaua

SEQ ID NO: 352595 - RNA, 19 nt, Homo sapiens
  misc_RNA (1)...(19): siRNA sense strand
guaucgaccacucgcugua

SEQ ID NO: 352596 - RNA, 19 nt, Homo sapiens
  misc_RNA (1)...(19): siRNA sense strand
ugggagcuguuaucaugga

SEQ ID NO: 352597 - RNA, 19 nt, Homo sapiens
  misc_RNA (1)...(19): siRNA sense strand
gccagcagcaugaugacuu

SEQ ID NO: 352598 - RNA, 19 nt, Homo sapiens
  misc_RNA (1)...(19): siRNA sense strand
cauggagggcuucuacguu

SEQ ID NO: 352599 - RNA, 19 nt, Homo sapiens
  misc_RNA (1)...(19): siRNA sense strand
caacuaugacaagagcauu

SEQ ID NO: 352600 - RNA, 19 nt, Homo sapiens
  misc_RNA (1)...(19): siRNA sense strand
guuacaaguuugccaucuc

SEQ ID NO: 352601 - RNA, 19 nt, Homo sapiens
  misc_RNA (1)...(19): siRNA sense strand
aaccuucguuugcccaaga

SEQ ID NO: 352602 - RNA, 19 nt, Homo sapiens
  misc_RNA (1)...(19): siRNA sense strand
cugcaaggaguacaacuau

SEQ ID NO: 352603 - RNA, 19 nt, Homo sapiens
  misc_RNA (1)...(19): siRNA sense strand
acaucucccugcugaagug

SEQ ID NO: 352604 - RNA, 19 nt, Homo sapiens
  misc_RNA (1)...(19): siRNA sense strand
agucaucucacucuaccua

SEQ ID NO: 352605 - RNA, 19 nt, Homo sapiens
  misc_RNA (1)...(19): siRNA sense strand
ggagaaguucccugauggu

SEQ ID NO: 352606 - RNA, 19 nt, Homo sapiens
  misc_RNA (1)...(19): siRNA sense strand
gacgacuguuacaaguuug

SEQ ID NO: 352607 - RNA, 19 nt, Homo sapiens
  misc_RNA (1)...(19): siRNA sense strand
ugacaucucccugcugaag

SEQ ID NO: 352608 - RNA, 19 nt, Homo sapiens
  misc_RNA (1)...(19): siRNA sense strand
caacauuccacagacagau

SEQ ID NO: 352609 - RNA, 19 nt, Homo sapiens
  misc_RNA (1)...(19): siRNA sense strand
gaagacuguggcuacaaca

SEQ ID NO: 352610 - RNA, 19 nt, Homo sapiens
  misc_RNA (1)...(19): siRNA sense strand
cuucuacguugucuuugau

SEQ ID NO: 352611 - RNA, 19 nt, Homo sapiens
  misc_RNA (1)...(19): siRNA sense strand
aaauggacugcaaggagua

SEQ ID NO: 352612 - RNA, 19 nt, Homo sapiens
  misc_RNA (1)...(19): siRNA sense strand
gcagcuuuguggagauggu

SEQ ID NO: 352613 - RNA, 19 nt, Homo sapiens
  misc_RNA (1)...(19): siRNA sense strand
ccggaaggguguguaugug

SEQ ID NO: 352614 - RNA, 19 nt, Homo sapiens
  misc_RNA (1)...(19): siRNA sense strand
gccaugugcacgaugaguu

SEQ ID NO: 352615 - RNA, 19 nt, Homo sapiens
  misc_RNA (1)...(19): siRNA sense strand
gaaguucccugaugguuuc

SEQ ID NO: 352616 - RNA, 19 nt, Homo sapiens
  misc_RNA (1)...(19): siRNA sense strand
gcaaggaguacaacuauga

SEQ ID NO: 352617 - RNA, 19 nt, Homo sapiens
  misc_RNA (1)...(19): siRNA sense strand
ggagggagcaugaucauug

SEQ ID NO: 352618 - RNA, 19 nt, Homo sapiens
  misc_RNA (1)...(19): siRNA sense strand
uaugggagcuguuaucaug

SEQ ID NO: 352619 - RNA, 19 nt, Homo sapiens
  misc_RNA (1)...(19): siRNA sense strand
agacgacuguuacaaguuu

SEQ ID NO: 352620 - RNA, 19 nt, Homo sapiens
  misc_RNA (1)...(19): siRNA sense strand
ggagaucaauggacaggau

SEQ ID NO: 352621 - RNA, 19 nt, Homo sapiens
  misc_RNA (1)...(19): siRNA sense strand
cgaauuggcuuugcuguca

SEQ ID NO: 352622 - RNA, 19 nt, Homo sapiens
  misc_RNA (1)...(19): siRNA sense strand
caagacgacuguuacaagu

SEQ ID NO: 352623 - RNA, 19 nt, Homo sapiens
  misc_RNA (1)...(19): siRNA sense strand
ggaagacuguggcuacaac

SEQ ID NO: 352624 - RNA, 19 nt, Homo sapiens
  misc_RNA (1)...(19): siRNA sense strand
ccagcagcaugaugacuuu

SEQ ID NO: 352625 - RNA, 19 nt, Homo sapiens
  misc_RNA (1)...(19): siRNA sense strand
gggcuucuacguugucuuu

SEQ ID NO: 352626 - RNA, 19 nt, Homo sapiens
  misc_RNA (1)...(19): siRNA sense strand
ugucagcgcuugccaugug

SEQ ID NO: 352627 - RNA, 19 nt, Homo sapiens
  misc_RNA (1)...(19): siRNA sense strand
caugaugacuuugcugaug

SEQ ID NO: 352628 - RNA, 19 nt, Homo sapiens
  misc_RNA (1)...(19): siRNA sense strand
gaguacaacuaugacaaga

SEQ ID NO: 352629 - RNA, 19 nt, Homo sapiens
  misc_RNA (1)...(19): siRNA sense strand
gcuucuacguugucuuuga

SEQ ID NO: 352630 - RNA, 19 nt, Homo sapiens
  misc_RNA (1)...(19): siRNA sense strand
gacuguggcuacaacauuc

SEQ ID NO: 352631 - RNA, 19 nt, Homo sapiens
  misc_RNA (1)...(19): siRNA sense strand
uuacaaguuugccaucuca

SEQ ID NO: 352632 - RNA, 19 nt, Homo sapiens
  misc_RNA (1)...(19): siRNA sense strand
caucugcgcccucuucaug

SEQ ID NO: 352633 - RNA, 19 nt, Homo sapiens
  misc_RNA (1)...(19): siRNA sense strand
gagggagcaugaucauugg

SEQ ID NO: 352634 - RNA, 19 nt, Homo sapiens
  misc_RNA (1)...(19): siRNA sense strand
caauggacaggaucugaaa

SEQ ID NO: 352635 - RNA, 19 nt, Homo sapiens
  misc_RNA (1)...(19): siRNA sense strand
cuacaacauuccacagaca

SEQ ID NO: 352636 - RNA, 19 nt, Homo sapiens
  misc_RNA (1)...(19): siRNA sense strand
gacaggaucugaaaaugga

SEQ ID NO: 352637 - RNA, 19 nt, Homo sapiens
  misc_RNA (1)...(19): siRNA sense strand
ggaguacaacuaugacaag

SEQ ID NO: 352638 - RNA, 19 nt, Homo sapiens
  misc_RNA (1)...(19): siRNA sense strand
gcaccaccaaccuucguuu

SEQ ID NO: 352639 - RNA, 19 nt, Homo sapiens
  misc_RNA (1)...(19): siRNA sense strand
ccaagacgacuguuacaag

SEQ ID NO: 352640 - RNA, 19 nt, Homo sapiens
  misc_RNA (1)...(19): siRNA sense strand
gagaaguucccugaugguu

SEQ ID NO: 352641 - RNA, 19 nt, Homo sapiens
  misc_RNA (1)...(19): siRNA sense strand
cugaagugcuggccucugu

SEQ ID NO: 352642 - RNA, 19 nt, Homo sapiens
  misc_RNA (1)...(19): siRNA sense strand
caagaaaguguuugaagcu

SEQ ID NO: 352643 - RNA, 19 nt, Homo sapiens
  misc_RNA (1)...(19): siRNA sense strand
agaaguucccugaugguuu

SEQ ID NO: 352644 - RNA, 19 nt, Homo sapiens
  misc_RNA (1)...(19): siRNA sense strand
guggauacaggcagcagua

SEQ ID NO: 352645 - RNA, 19 nt, Homo sapiens
  misc_RNA (1)...(19): siRNA sense strand
gggcagcuuuguggagaug

SEQ ID NO: 352646 - RNA, 19 nt, Homo sapiens
  misc_RNA (1)...(19): siRNA sense strand
acggagaaguucccugaug

SEQ ID NO: 352647 - RNA, 19 nt, Homo sapiens
  misc_RNA (1)...(19): siRNA sense strand
acacaggcagucucuggua

SEQ ID NO: 352648 - RNA, 19 nt, Homo sapiens
  misc_RNA (1)...(19): siRNA sense strand
caagagcauuguggacagu

SEQ ID NO: 352649 - RNA, 19 nt, Homo sapiens
  misc_RNA (1)...(19): siRNA sense strand
cacaggcagucucugguau

SEQ ID NO: 352650 - RNA, 19 nt, Homo sapiens
  misc_RNA (1)...(19): siRNA sense strand
agacuguggcuacaacauu

SEQ ID NO: 352651 - RNA, 19 nt, Homo sapiens
  misc_RNA (1)...(19): siRNA sense strand
gauacaggcagcaguaacu

SEQ ID NO: 352652 - RNA, 19 nt, Homo sapiens
  misc_RNA (1)...(19): siRNA sense strand
ggcgggagugguauuauga

SEQ ID NO: 352653 - RNA, 19 nt, Homo sapiens
  misc_RNA (1)...(19): siRNA sense strand
augaugacuuugcugauga

SEQ ID NO: 352654 - RNA, 19 nt, Homo sapiens
  misc_RNA (1)...(19): siRNA sense strand
ucaauggacaggaucugaa

SEQ ID NO: 352655 - RNA, 19 nt, Homo sapiens
  misc_RNA (1)...(19): siRNA sense strand
gcaugaucauuggagguau

SEQ ID NO: 352656 - RNA, 19 nt, Homo sapiens
  misc_RNA (1)...(19): siRNA sense strand
caucucacucuaccuaaug

SEQ ID NO: 352657 - RNA, 19 nt, Homo sapiens
  misc_RNA (1)...(19): siRNA sense strand
ucaucucacucuaccuaau

SEQ ID NO: 352658 - RNA, 19 nt, Homo sapiens
  misc_RNA (1)...(19): siRNA sense strand
acaggcagcaguaacuuug

SEQ ID NO: 352659 - RNA, 19 nt, Homo sapiens
  misc_RNA (1)...(19): siRNA sense strand
ggcagucucugguauacac

SEQ ID NO: 352660 - RNA, 19 nt, Homo sapiens
  misc_RNA (1)...(19): siRNA sense strand
caugaucauuggagguauc

SEQ ID NO: 352661 - RNA, 19 nt, Homo sapiens
  misc_RNA (1)...(19): siRNA sense strand
gcuacuacguggagaugac

SEQ ID NO: 352662 - RNA, 19 nt, Homo sapiens
  misc_RNA (1)...(19): siRNA sense strand
aaccaguccuuccgcauca

SEQ ID NO: 352663 - RNA, 19 nt, Homo sapiens
  misc_RNA (1)...(19): siRNA sense strand
acaggcagucucugguaua

SEQ ID NO: 352664 - RNA, 19 nt, Homo sapiens
  misc_RNA (1)...(19): siRNA sense strand
guaucgaccacucgcugua

SEQ ID NO: 352665 - RNA, 19 nt, Homo sapiens
  misc_RNA (1)...(19): siRNA sense strand
ugggagcuguuaucaugga

SEQ ID NO: 352666 - RNA, 19 nt, Homo sapiens
  misc_RNA (1)...(19): siRNA sense strand
gccagcagcaugaugacuu

SEQ ID NO: 352667 - RNA, 19 nt, Homo sapiens
  misc_RNA (1)...(19): siRNA sense strand
cauggagggcuucuacguu

SEQ ID NO: 352668 - RNA, 19 nt, Homo sapiens
  misc_RNA (1)...(19): siRNA sense strand
caacuaugacaagagcauu

SEQ ID NO: 352669 - RNA, 19 nt, Homo sapiens
  misc_RNA (1)...(19): siRNA sense strand
guuacaaguuugccaucuc

SEQ ID NO: 352670 - RNA, 19 nt, Homo sapiens
  misc_RNA (1)...(19): siRNA sense strand
aaccuucguuugcccaaga

SEQ ID NO: 352671 - RNA, 19 nt, Homo sapiens
  misc_RNA (1)...(19): siRNA sense strand
cugcaaggaguacaacuau

SEQ ID NO: 352672 - RNA, 19 nt, Homo sapiens
  misc_RNA (1)...(19): siRNA sense strand
acaucucccugcugaagug

SEQ ID NO: 352673 - RNA, 19 nt, Homo sapiens
  misc_RNA (1)...(19): siRNA sense strand
agucaucucacucuaccua

SEQ ID NO: 352674 - RNA, 19 nt, Homo sapiens
  misc_RNA (1)...(19): siRNA sense strand
ggagaaguucccugauggu

SEQ ID NO: 352675 - RNA, 19 nt, Homo sapiens
  misc_RNA (1)...(19): siRNA sense strand
gacgacuguuacaaguuug

SEQ ID NO: 352676 - RNA, 19 nt, Homo sapiens
  misc_RNA (1)...(19): siRNA sense strand
ugacaucucccugcugaag

SEQ ID NO: 352677 - RNA, 19 nt, Homo sapiens
  misc_RNA (1)...(19): siRNA sense strand
caacauuccacagacagau

SEQ ID NO: 352678 - RNA, 19 nt, Homo sapiens
  misc_RNA (1)...(19): siRNA sense strand
gaagacuguggcuacaaca

SEQ ID NO: 352679 - RNA, 19 nt, Homo sapiens
  misc_RNA (1)...(19): siRNA sense strand
cuucuacguugucuuugau

SEQ ID NO: 352680 - RNA, 19 nt, Homo sapiens
  misc_RNA (1)...(19): siRNA sense strand
aaauggacugcaaggagua

SEQ ID NO: 352681 - RNA, 19 nt, Homo sapiens
  misc_RNA (1)...(19): siRNA sense strand
gcagcuuuguggagauggu

SEQ ID NO: 352682 - RNA, 19 nt, Homo sapiens
  misc_RNA (1)...(19): siRNA sense strand
ccggaaggguguguaugug

SEQ ID NO: 352683 - RNA, 19 nt, Homo sapiens
  misc_RNA (1)...(19): siRNA sense strand
gccaugugcacgaugaguu

SEQ ID NO: 352684 - RNA, 19 nt, Homo sapiens
  misc_RNA (1)...(19): siRNA sense strand
gaaguucccugaugguuuc

SEQ ID NO: 352685 - RNA, 19 nt, Homo sapiens
  misc_RNA (1)...(19): siRNA sense strand
gcaaggaguacaacuauga

SEQ ID NO: 352686 - RNA, 19 nt, Homo sapiens
  misc_RNA (1)...(19): siRNA sense strand
ggagggagcaugaucauug

SEQ ID NO: 352687 - RNA, 19 nt, Homo sapiens
  misc_RNA (1)...(19): siRNA sense strand
uaugggagcuguuaucaug

SEQ ID NO: 352688 - RNA, 19 nt, Homo sapiens
  misc_RNA (1)...(19): siRNA sense strand
agacgacuguuacaaguuu

SEQ ID NO: 352689 - RNA, 19 nt, Homo sapiens
  misc_RNA (1)...(19): siRNA sense strand
ggagaucaauggacaggau

SEQ ID NO: 352690 - RNA, 19 nt, Homo sapiens
  misc_RNA (1)...(19): siRNA sense strand
cgaauuggcuuugcuguca

SEQ ID NO: 352691 - RNA, 19 nt, Homo sapiens
  misc_RNA (1)...(19): siRNA sense strand
caagacgacuguuacaagu

SEQ ID NO: 352692 - RNA, 19 nt, Homo sapiens
  misc_RNA (1)...(19): siRNA sense strand
ggaagacuguggcuacaac

SEQ ID NO: 352693 - RNA, 19 nt, Homo sapiens
  misc_RNA (1)...(19): siRNA sense strand
ccagcagcaugaugacuuu

SEQ ID NO: 352694 - RNA, 19 nt, Homo sapiens
  misc_RNA (1)...(19): siRNA sense strand
gggcuucuacguugucuuu

SEQ ID NO: 352695 - RNA, 19 nt, Homo sapiens
  misc_RNA (1)...(19): siRNA sense strand
ugucagcgcuugccaugug

SEQ ID NO: 352696 - RNA, 19 nt, Homo sapiens
  misc_RNA (1)...(19): siRNA sense strand
caugaugacuuugcugaug

SEQ ID NO: 352697 - RNA, 19 nt, Homo sapiens
  misc_RNA (1)...(19): siRNA sense strand
gaguacaacuaugacaaga

SEQ ID NO: 352698 - RNA, 19 nt, Homo sapiens
  misc_RNA (1)...(19): siRNA sense strand
gcuucuacguugucuuuga

SEQ ID NO: 352699 - RNA, 19 nt, Homo sapiens
  misc_RNA (1)...(19): siRNA sense strand
gacuguggcuacaacauuc

SEQ ID NO: 352700 - RNA, 19 nt, Homo sapiens
  misc_RNA (1)...(19): siRNA sense strand
uuacaaguuugccaucuca

SEQ ID NO: 352701 - RNA, 19 nt, Homo sapiens
  misc_RNA (1)...(19): siRNA sense strand
caucugcgcccucuucaug

SEQ ID NO: 352702 - RNA, 19 nt, Homo sapiens
  misc_RNA (1)...(19): siRNA sense strand
gagggagcaugaucauugg

SEQ ID NO: 352703 - RNA, 19 nt, Homo sapiens
  misc_RNA (1)...(19): siRNA sense strand
caauggacaggaucugaaa

SEQ ID NO: 352704 - RNA, 19 nt, Homo sapiens
  misc_RNA (1)...(19): siRNA sense strand
cuacaacauuccacagaca

SEQ ID NO: 352705 - RNA, 19 nt, Homo sapiens
  misc_RNA (1)...(19): siRNA sense strand
gacaggaucugaaaaugga

SEQ ID NO: 352706 - RNA, 19 nt, Homo sapiens
  misc_RNA (1)...(19): siRNA sense strand
ggaguacaacuaugacaag

SEQ ID NO: 352707 - RNA, 19 nt, Homo sapiens
  misc_RNA (1)...(19): siRNA sense strand
gcaccaccaaccuucguuu

SEQ ID NO: 352708 - RNA, 19 nt, Homo sapiens
  misc_RNA (1)...(19): siRNA sense strand
ccaagacgacuguuacaag

SEQ ID NO: 352709 - RNA, 19 nt, Homo sapiens
  misc_RNA (1)...(19): siRNA sense strand
gagaaguucccugaugguu

SEQ ID NO: 352710 - RNA, 19 nt, Homo sapiens
  misc_RNA (1)...(19): siRNA sense strand
cugaagugcuggccucugu

SEQ ID NO: 352711 - RNA, 19 nt, Homo sapiens
  misc_RNA (1)...(19): siRNA sense strand
caagaaaguguuugaagcu

SEQ ID NO: 352712 - RNA, 19 nt, Homo sapiens
  misc_RNA (1)...(19): siRNA sense strand
agaaguucccugaugguuu

SEQ ID NO: 352713 - RNA, 19 nt, Homo sapiens
  misc_RNA (1)...(19): siRNA sense strand
guggauacaggcagcagua

SEQ ID NO: 352714 - RNA, 19 nt, Homo sapiens
  misc_RNA (1)...(19): siRNA sense strand
gggcagcuuuguggagaug

SEQ ID NO: 352715 - RNA, 19 nt, Homo sapiens
  misc_RNA (1)...(19): siRNA sense strand
acggagaaguucccugaug

SEQ ID NO: 352716 - RNA, 19 nt, Homo sapiens
  misc_RNA (1)...(19): siRNA sense strand
acacaggcagucucuggua

SEQ ID NO: 352717 - RNA, 19 nt, Homo sapiens
  misc_RNA (1)...(19): siRNA sense strand
caagagcauuguggacagu

SEQ ID NO: 352718 - RNA, 19 nt, Homo sapiens
  misc_RNA (1)...(19): siRNA sense strand
cacaggcagucucugguau

SEQ ID NO: 352719 - RNA, 19 nt, Homo sapiens
  misc_RNA (1)...(19): siRNA sense strand
agacuguggcuacaacauu

SEQ ID NO: 352720 - RNA, 19 nt, Homo sapiens
  misc_RNA (1)...(19): siRNA sense strand
gauacaggcagcaguaacu

SEQ ID NO: 352721 - RNA, 19 nt, Homo sapiens
  misc_RNA (1)...(19): siRNA sense strand
ggcgggagugguauuauga

SEQ ID NO: 352722 - RNA, 19 nt, Homo sapiens
  misc_RNA (1)...(19): siRNA sense strand
augaugacuuugcugauga

SEQ ID NO: 352723 - RNA, 19 nt, Homo sapiens
  misc_RNA (1)...(19): siRNA sense strand
ucaauggacaggaucugaa

SEQ ID NO: 352724 - RNA, 19 nt, Homo sapiens
  misc_RNA (1)...(19): siRNA sense strand
gcaugaucauuggagguau

SEQ ID NO: 352725 - RNA, 19 nt, Homo sapiens
  misc_RNA (1)...(19): siRNA sense strand
caucucacucuaccuaaug

SEQ ID NO: 352726 - RNA, 19 nt, Homo sapiens
  misc_RNA (1)...(19): siRNA sense strand
ucaucucacucuaccuaau

SEQ ID NO: 352727 - RNA, 19 nt, Homo sapiens
  misc_RNA (1)...(19): siRNA sense strand
acaggcagcaguaacuuug

SEQ ID NO: 352728 - RNA, 19 nt, Homo sapiens
  misc_RNA (1)...(19): siRNA sense strand
ggcagucucugguauacac

SEQ ID NO: 352729 - RNA, 19 nt, Homo sapiens
  misc_RNA (1)...(19): siRNA sense strand
caugaucauuggagguauc

SEQ ID NO: 352730 - RNA, 19 nt, Homo sapiens
  misc_RNA (1)...(19): siRNA sense strand
gcuacuacguggagaugac

SEQ ID NO: 352731 - RNA, 19 nt, Homo sapiens
  misc_RNA (1)...(19): siRNA sense strand
aaccaguccuuccgcauca

SEQ ID NO: 352732 - RNA, 19 nt, Homo sapiens
  misc_RNA (1)...(19): siRNA sense strand
acaggcagucucugguaua

SEQ ID NO: 352733 - RNA, 19 nt, Homo sapiens
  misc_RNA (1)...(19): siRNA sense strand
guaucgaccacucgcugua

SEQ ID NO: 352734 - RNA, 19 nt, Homo sapiens
  misc_RNA (1)...(19): siRNA sense strand
ugggagcuguuaucaugga

SEQ ID NO: 352735 - RNA, 19 nt, Homo sapiens
  misc_RNA (1)...(19): siRNA sense strand
gccagcagcaugaugacuu

SEQ ID NO: 352736 - RNA, 19 nt, Homo sapiens
  misc_RNA (1)...(19): siRNA sense strand
cauggagggcuucuacguu

SEQ ID NO: 352737 - RNA, 19 nt, Homo sapiens
  misc_RNA (1)...(19): siRNA sense strand
caacuaugacaagagcauu

SEQ ID NO: 352738 - RNA, 19 nt, Homo sapiens
  misc_RNA (1)...(19): siRNA sense strand
guuacaaguuugccaucuc

SEQ ID NO: 352739 - RNA, 19 nt, Homo sapiens
  misc_RNA (1)...(19): siRNA sense strand
aaccuucguuugcccaaga

SEQ ID NO: 352740 - RNA, 19 nt, Homo sapiens
  misc_RNA (1)...(19): siRNA sense strand
cugcaaggaguacaacuau

SEQ ID NO: 352741 - RNA, 19 nt, Homo sapiens
  misc_RNA (1)...(19): siRNA sense strand
acaucucccugcugaagug

SEQ ID NO: 352742 - RNA, 19 nt, Homo sapiens
  misc_RNA (1)...(19): siRNA sense strand
agucaucucacucuaccua

SEQ ID NO: 352743 - RNA, 19 nt, Homo sapiens
  misc_RNA (1)...(19): siRNA sense strand
ggagaaguucccugauggu

SEQ ID NO: 352744 - RNA, 19 nt, Homo sapiens
  misc_RNA (1)...(19): siRNA sense strand
gacgacuguuacaaguuug

SEQ ID NO: 352745 - RNA, 19 nt, Homo sapiens
  misc_RNA (1)...(19): siRNA sense strand
ugacaucucccugcugaag

SEQ ID NO: 352746 - RNA, 19 nt, Homo sapiens
  misc_RNA (1)...(19): siRNA sense strand
caacauuccacagacagau

SEQ ID NO: 352747 - RNA, 19 nt, Homo sapiens
  misc_RNA (1)...(19): siRNA sense strand
gaagacuguggcuacaaca

SEQ ID NO: 352748 - RNA, 19 nt, Homo sapiens
  misc_RNA (1)...(19): siRNA sense strand
cuucuacguugucuuugau

SEQ ID NO: 352749 - RNA, 19 nt, Homo sapiens
  misc_RNA (1)...(19): siRNA sense strand
aaauggacugcaaggagua

SEQ ID NO: 352750 - RNA, 19 nt, Homo sapiens
  misc_RNA (1)...(19): siRNA sense strand
gcagcuuuguggagauggu

SEQ ID NO: 352751 - RNA, 19 nt, Homo sapiens
  misc_RNA (1)...(19): siRNA sense strand
ccggaaggguguguaugug

SEQ ID NO: 352752 - RNA, 19 nt, Homo sapiens
  misc_RNA (1)...(19): siRNA sense strand
gccaugugcacgaugaguu

SEQ ID NO: 352753 - RNA, 19 nt, Homo sapiens
  misc_RNA (1)...(19): siRNA sense strand
gaaguucccugaugguuuc

SEQ ID NO: 352754 - RNA, 19 nt, Homo sapiens
  misc_RNA (1)...(19): siRNA sense strand
gcaaggaguacaacuauga

SEQ ID NO: 352755 - RNA, 19 nt, Homo sapiens
  misc_RNA (1)...(19): siRNA sense strand
ggagggagcaugaucauug

SEQ ID NO: 352756 - RNA, 19 nt, Homo sapiens
  misc_RNA (1)...(19): siRNA sense strand
uaugggagcuguuaucaug

SEQ ID NO: 352757 - RNA, 19 nt, Homo sapiens
  misc_RNA (1)...(19): siRNA sense strand
agacgacuguuacaaguuu

SEQ ID NO: 352758 - RNA, 19 nt, Homo sapiens
  misc_RNA (1)...(19): siRNA sense strand
ggagaucaauggacaggau

SEQ ID NO: 352759 - RNA, 19 nt, Homo sapiens
  misc_RNA (1)...(19): siRNA sense strand
cgaauuggcuuugcuguca

SEQ ID NO: 352760 - RNA, 19 nt, Homo sapiens
  misc_RNA (1)...(19): siRNA sense strand
caagacgacuguuacaagu

SEQ ID NO: 352761 - RNA, 19 nt, Homo sapiens
  misc_RNA (1)...(19): siRNA sense strand
ggaagacuguggcuacaac

SEQ ID NO: 352762 - RNA, 19 nt, Homo sapiens
  misc_RNA (1)...(19): siRNA sense strand
ccagcagcaugaugacuuu

SEQ ID NO: 352763 - RNA, 19 nt, Homo sapiens
  misc_RNA (1)...(19): siRNA sense strand
gggcuucuacguugucuuu

SEQ ID NO: 352764 - RNA, 19 nt, Homo sapiens
  misc_RNA (1)...(19): siRNA sense strand
ugucagcgcuugccaugug

SEQ ID NO: 352765 - RNA, 19 nt, Homo sapiens
  misc_RNA (1)...(19): siRNA sense strand
caugaugacuuugcugaug

SEQ ID NO: 352766 - RNA, 19 nt, Homo sapiens
  misc_RNA (1)...(19): siRNA sense strand
gaguacaacuaugacaaga

SEQ ID NO: 352767 - RNA, 19 nt, Homo sapiens
  misc_RNA (1)...(19): siRNA sense strand
gcuucuacguugucuuuga

SEQ ID NO: 352768 - RNA, 19 nt, Homo sapiens
  misc_RNA (1)...(19): siRNA sense strand
gacuguggcuacaacauuc

SEQ ID NO: 352769 - RNA, 19 nt, Homo sapiens
  misc_RNA (1)...(19): siRNA sense strand
uuacaaguuugccaucuca

SEQ ID NO: 352770 - RNA, 19 nt, Homo sapiens
  misc_RNA (1)...(19): siRNA sense strand
caucugcgcccucuucaug

SEQ ID NO: 352771 - RNA, 19 nt, Homo sapiens
  misc_RNA (1)...(19): siRNA sense strand
gagggagcaugaucauugg

SEQ ID NO: 352772 - RNA, 19 nt, Homo sapiens
  misc_RNA (1)...(19): siRNA sense strand
caauggacaggaucugaaa

SEQ ID NO: 352773 - RNA, 19 nt, Homo sapiens
  misc_RNA (1)...(19): siRNA sense strand
cuacaacauuccacagaca

SEQ ID NO: 352774 - RNA, 19 nt, Homo sapiens
  misc_RNA (1)...(19): siRNA sense strand
gacaggaucugaaaaugga

SEQ ID NO: 352775 - RNA, 19 nt, Homo sapiens
  misc_RNA (1)...(19): siRNA sense strand
ggaguacaacuaugacaag

SEQ ID NO: 352776 - RNA, 19 nt, Homo sapiens
  misc_RNA (1)...(19): siRNA sense strand
gcaccaccaaccuucguuu

SEQ ID NO: 352777 - RNA, 19 nt, Homo sapiens
  misc_RNA (1)...(19): siRNA sense strand
ccaagacgacuguuacaag

SEQ ID NO: 352778 - RNA, 19 nt, Homo sapiens
  misc_RNA (1)...(19): siRNA sense strand
gagaaguucccugaugguu

SEQ ID NO: 352779 - RNA, 19 nt, Homo sapiens
  misc_RNA (1)...(19): siRNA sense strand
cugaagugcuggccucugu

SEQ ID NO: 352780 - RNA, 19 nt, Homo sapiens
  misc_RNA (1)...(19): siRNA sense strand
caagaaaguguuugaagcu

SEQ ID NO: 352781 - RNA, 19 nt, Homo sapiens
  misc_RNA (1)...(19): siRNA sense strand
agaaguucccugaugguuu

SEQ ID NO: 352782 - RNA, 19 nt, Homo sapiens
  misc_RNA (1)...(19): siRNA sense strand
guggauacaggcagcagua

SEQ ID NO: 352783 - RNA, 19 nt, Homo sapiens
  misc_RNA (1)...(19): siRNA sense strand
gggcagcuuuguggagaug

SEQ ID NO: 352784 - RNA, 19 nt, Homo sapiens
  misc_RNA (1)...(19): siRNA sense strand
acggagaaguucccugaug

SEQ ID NO: 352785 - RNA, 19 nt, Homo sapiens
  misc_RNA (1)...(19): siRNA sense strand
acacaggcagucucuggua

SEQ ID NO: 352786 - RNA, 19 nt, Homo sapiens
  misc_RNA (1)...(19): siRNA sense strand
caagagcauuguggacagu

SEQ ID NO: 352787 - RNA, 19 nt, Homo sapiens
  misc_RNA (1)...(19): siRNA sense strand
cacaggcagucucugguau

SEQ ID NO: 352788 - RNA, 19 nt, Homo sapiens
  misc_RNA (1)...(19): siRNA sense strand
agacuguggcuacaacauu

SEQ ID NO: 352789 - RNA, 19 nt, Homo sapiens
  misc_RNA (1)...(19): siRNA sense strand
gauacaggcagcaguaacu

SEQ ID NO: 352790 - RNA, 19 nt, Homo sapiens
  misc_RNA (1)...(19): siRNA sense strand
ggcgggagugguauuauga

SEQ ID NO: 352791 - RNA, 19 nt, Homo sapiens
  misc_RNA (1)...(19): siRNA sense strand
augaugacuuugcugauga

SEQ ID NO: 352792 - RNA, 19 nt, Homo sapiens
  misc_RNA (1)...(19): siRNA sense strand
ucaauggacaggaucugaa

SEQ ID NO: 352793 - RNA, 19 nt, Homo sapiens
  misc_RNA (1)...(19): siRNA sense strand
gcaugaucauuggagguau

SEQ ID NO: 352794 - RNA, 19 nt, Homo sapiens
  misc_RNA (1)...(19): siRNA sense strand
caucucacucuaccuaaug

SEQ ID NO: 352795 - RNA, 19 nt, Homo sapiens
  misc_RNA (1)...(19): siRNA sense strand
ucaucucacucuaccuaau

SEQ ID NO: 352796 - RNA, 19 nt, Homo sapiens
  misc_RNA (1)...(19): siRNA sense strand
acaggcagcaguaacuuug

SEQ ID NO: 352797 - RNA, 19 nt, Homo sapiens
  misc_RNA (1)...(19): siRNA sense strand
ggcagucucugguauacac

SEQ ID NO: 352798 - RNA, 19 nt, Homo sapiens
  misc_RNA (1)...(19): siRNA sense strand
caugaucauuggagguauc

SEQ ID NO: 352799 - RNA, 19 nt, Homo sapiens
  misc_RNA (1)...(19): siRNA sense strand
gcuacuacguggagaugac

SEQ ID NO: 352800 - RNA, 19 nt, Homo sapiens
  misc_RNA (1)...(19): siRNA sense strand
aaccaguccuuccgcauca

SEQ ID NO: 352801 - RNA, 19 nt, Homo sapiens
  misc_RNA (1)...(19): siRNA sense strand
acaggcagucucugguaua

SEQ ID NO: 352802 - RNA, 19 nt, Homo sapiens
  misc_RNA (1)...(19): siRNA sense strand
guaucgaccacucgcugua

SEQ ID NO: 352803 - RNA, 19 nt, Homo sapiens
  misc_RNA (1)...(19): siRNA sense strand
ugggagcuguuaucaugga

SEQ ID NO: 352804 - RNA, 19 nt, Homo sapiens
  misc_RNA (1)...(19): siRNA sense strand
gccagcagcaugaugacuu

SEQ ID NO: 352805 - RNA, 19 nt, Homo sapiens
  misc_RNA (1)...(19): siRNA sense strand
cauggagggcuucuacguu

SEQ ID NO: 352806 - RNA, 19 nt, Homo sapiens
  misc_RNA (1)...(19): siRNA sense strand
caacuaugacaagagcauu

SEQ ID NO: 352807 - RNA, 19 nt, Homo sapiens
  misc_RNA (1)...(19): siRNA sense strand
guuacaaguuugccaucuc

SEQ ID NO: 352808 - RNA, 19 nt, Homo sapiens
  misc_RNA (1)...(19): siRNA sense strand
aaccuucguuugcccaaga

SEQ ID NO: 352809 - RNA, 19 nt, Homo sapiens
  misc_RNA (1)...(19): siRNA sense strand
cugcaaggaguacaacuau

SEQ ID NO: 352810 - RNA, 19 nt, Homo sapiens
  misc_RNA (1)...(19): siRNA sense strand
acaucucccugcugaagug

SEQ ID NO: 352811 - RNA, 19 nt, Homo sapiens
  misc_RNA (1)...(19): siRNA sense strand
agucaucucacucuaccua

SEQ ID NO: 352812 - RNA, 19 nt, Homo sapiens
  misc_RNA (1)...(19): siRNA sense strand
ggagaaguucccugauggu

SEQ ID NO: 352813 - RNA, 19 nt, Homo sapiens
  misc_RNA (1)...(19): siRNA sense strand
gacgacuguuacaaguuug

SEQ ID NO: 352814 - RNA, 19 nt, Homo sapiens
  misc_RNA (1)...(19): siRNA sense strand
ugacaucucccugcugaag

SEQ ID NO: 352815 - RNA, 19 nt, Homo sapiens
  misc_RNA (1)...(19): siRNA sense strand
caacauuccacagacagau

SEQ ID NO: 352816 - RNA, 19 nt, Homo sapiens
  misc_RNA (1)...(19): siRNA sense strand
gaagacuguggcuacaaca

SEQ ID NO: 352817 - RNA, 19 nt, Homo sapiens
  misc_RNA (1)...(19): siRNA sense strand
cuucuacguugucuuugau

SEQ ID NO: 352818 - RNA, 19 nt, Homo sapiens
  misc_RNA (1)...(19): siRNA sense strand
aaauggacugcaaggagua

SEQ ID NO: 352819 - RNA, 19 nt, Homo sapiens
  misc_RNA (1)...(19): siRNA sense strand
gcagcuuuguggagauggu

SEQ ID NO: 352820 - RNA, 19 nt, Homo sapiens
  misc_RNA (1)...(19): siRNA sense strand
ccggaaggguguguaugug

SEQ ID NO: 352821 - RNA, 19 nt, Homo sapiens
  misc_RNA (1)...(19): siRNA sense strand
gccaugugcacgaugaguu

SEQ ID NO: 352822 - RNA, 19 nt, Homo sapiens
  misc_RNA (1)...(19): siRNA sense strand
caggaaagguuaaagauua

SEQ ID NO: 352823 - RNA, 19 nt, Homo sapiens
  misc_RNA (1)...(19): siRNA sense strand
caacugagaugcuccagaa

SEQ ID NO: 352824 - RNA, 19 nt, Homo sapiens
  misc_RNA (1)...(19): siRNA sense strand
ggaaccaacugaagauuau

SEQ ID NO: 352825 - RNA, 19 nt, Homo sapiens
  misc_RNA (1)...(19): siRNA sense strand
ggacaaaacuacacuauug

SEQ ID NO: 352826 - RNA, 19 nt, Homo sapiens
  misc_RNA (1)...(19): siRNA sense strand
uggagaggcuucauucuua

SEQ ID NO: 352827 - RNA, 19 nt, Homo sapiens
  misc_RNA (1)...(19): siRNA sense strand
gaaggagacucgaggaaau

SEQ ID NO: 352828 - RNA, 19 nt, Homo sapiens
  misc_RNA (1)...(19): siRNA sense strand
gaaaagaacugugcgaaau

SEQ ID NO: 352829 - RNA, 19 nt, Homo sapiens
  misc_RNA (1)...(19): siRNA sense strand
ggagauagacauuccaaga

SEQ ID NO: 352830 - RNA, 19 nt, Homo sapiens
  misc_RNA (1)...(19): siRNA sense strand
gaaagaggcaacugagaug

SEQ ID NO: 352831 - RNA, 19 nt, Homo sapiens
  misc_RNA (1)...(19): siRNA sense strand
gaaacuacuccaucacuau

SEQ ID NO: 352832 - RNA, 19 nt, Homo sapiens
  misc_RNA (1)...(19): siRNA sense strand
ggaaagaggcaacugagau

SEQ ID NO: 352833 - RNA, 19 nt, Homo sapiens
  misc_RNA (1)...(19): siRNA sense strand
gagcauuacuggacagagu

SEQ ID NO: 352834 - RNA, 19 nt, Homo sapiens
  misc_RNA (1)...(19): siRNA sense strand
uaaacugcaugaaguccua

SEQ ID NO: 352835 - RNA, 19 nt, Homo sapiens
  misc_RNA (1)...(19): siRNA sense strand
gagauagacauuccaagaa

SEQ ID NO: 352836 - RNA, 19 nt, Homo sapiens
  misc_RNA (1)...(19): siRNA sense strand
gaaagaggaaguacaacug

SEQ ID NO: 352837 - RNA, 19 nt, Homo sapiens
  misc_RNA (1)...(19): siRNA sense strand
aaaggaggauugagacaga

SEQ ID NO: 352838 - RNA, 19 nt, Homo sapiens
  misc_RNA (1)...(19): siRNA sense strand
uuacugcucuaccuuugua

SEQ ID NO: 352839 - RNA, 19 nt, Homo sapiens
  misc_RNA (1)...(19): siRNA sense strand
gaaucaagcacuacaaagu

SEQ ID NO: 352840 - RNA, 19 nt, Homo sapiens
  misc_RNA (1)...(19): siRNA sense strand
gaagacagagaacacagaa

SEQ ID NO: 352841 - RNA, 19 nt, Homo sapiens
  misc_RNA (1)...(19): siRNA sense strand
gcaaguaauuaaacugcau

SEQ ID NO: 352842 - RNA, 19 nt, Homo sapiens
  misc_RNA (1)...(19): siRNA sense strand
aaacuacacuauugaacug

SEQ ID NO: 352843 - RNA, 19 nt, Homo sapiens
  misc_RNA (1)...(19): siRNA sense strand
gaaauucacccuuguuuug

SEQ ID NO: 352844 - RNA, 19 nt, Homo sapiens
  misc_RNA (1)...(19): siRNA sense strand
gaaggaaccaacugaagau

SEQ ID NO: 352845 - RNA, 19 nt, Homo sapiens
  misc_RNA (1)...(19): siRNA sense strand
gauuacugcucuaccuuug

SEQ ID NO: 352846 - RNA, 19 nt, Homo sapiens
  misc_RNA (1)...(19): siRNA sense strand
gagacucgaggaaauuuaa

SEQ ID NO: 352847 - RNA, 19 nt, Homo sapiens
  misc_RNA (1)...(19): siRNA sense strand
guaacacucccaaaccuuu

SEQ ID NO: 352848 - RNA, 19 nt, Homo sapiens
  misc_RNA (1)...(19): siRNA sense strand
gaaaagaaaaggaggauug

SEQ ID NO: 352849 - RNA, 19 nt, Homo sapiens
  misc_RNA (1)...(19): siRNA sense strand
guagaccucacaugccuua

SEQ ID NO: 352850 - RNA, 19 nt, Homo sapiens
  misc_RNA (1)...(19): siRNA sense strand
ugaaaacacuggucaagaa

SEQ ID NO: 352851 - RNA, 19 nt, Homo sapiens
  misc_RNA (1)...(19): siRNA sense strand
guaauuaaacugcaugaag

SEQ ID NO: 352852 - RNA, 19 nt, Homo sapiens
  misc_RNA (1)...(19): siRNA sense strand
ccauuuauauguucaacug

SEQ ID NO: 352853 - RNA, 19 nt, Homo sapiens
  misc_RNA (1)...(19): siRNA sense strand
agaaacuacuccaucacua

SEQ ID NO: 352854 - RNA, 19 nt, Homo sapiens
  misc_RNA (1)...(19): siRNA sense strand
aaagaacugugcgaaauuc

SEQ ID NO: 352855 - RNA, 19 nt, Homo sapiens
  misc_RNA (1)...(19): siRNA sense strand
gcgaaauucacccuuguuu

SEQ ID NO: 352856 - RNA, 19 nt, Homo sapiens
  misc_RNA (1)...(19): siRNA sense strand
gcucuaccuuuguacuuug

SEQ ID NO: 352857 - RNA, 19 nt, Homo sapiens
  misc_RNA (1)...(19): siRNA sense strand
gaggaaauuuaagaccauu

SEQ ID NO: 352858 - RNA, 19 nt, Homo sapiens
  misc_RNA (1)...(19): siRNA sense strand
ggagacucgaggaaauuua

SEQ ID NO: 352859 - RNA, 19 nt, Homo sapiens
  misc_RNA (1)...(19): siRNA sense strand
caaauuagacauaguagac

SEQ ID NO: 352860 - RNA, 19 nt, Homo sapiens
  misc_RNA (1)...(19): siRNA sense strand
uaaucaagcggucaggaua

SEQ ID NO: 352861 - RNA, 19 nt, Homo sapiens
  misc_RNA (1)...(19): siRNA sense strand
ggagaggcuucauucuuac

SEQ ID NO: 352862 - RNA, 19 nt, Homo sapiens
  misc_RNA (1)...(19): siRNA sense strand
ucaagaacccaguauggaa

SEQ ID NO: 352863 - RNA, 19 nt, Homo sapiens
  misc_RNA (1)...(19): siRNA sense strand
gcaugaaguccuagagaga

SEQ ID NO: 352864 - RNA, 19 nt, Homo sapiens
  misc_RNA (1)...(19): siRNA sense strand
ccaggaaagguuaaagauu

SEQ ID NO: 352865 - RNA, 19 nt, Homo sapiens
  misc_RNA (1)...(19): siRNA sense strand
gaacccuucuuugggaaau

SEQ ID NO: 352866 - RNA, 19 nt, Homo sapiens
  misc_RNA (1)...(19): siRNA sense strand
ugaagauuauguggaugua

SEQ ID NO: 352867 - RNA, 19 nt, Homo sapiens
  misc_RNA (1)...(19): siRNA sense strand
cugagaugcuccagaagaa

SEQ ID NO: 352868 - RNA, 19 nt, Homo sapiens
  misc_RNA (1)...(19): siRNA sense strand
gaccucacaugccuuacug

SEQ ID NO: 352869 - RNA, 19 nt, Homo sapiens
  misc_RNA (1)...(19): siRNA sense strand
aaacuacuccaucacuauu

SEQ ID NO: 352870 - RNA, 19 nt, Homo sapiens
  misc_RNA (1)...(19): siRNA sense strand
aaguacaacugaagacaga

SEQ ID NO: 352871 - RNA, 19 nt, Homo sapiens
  misc_RNA (1)...(19): siRNA sense strand
cagaguacguccguggaaa

SEQ ID NO: 352872 - RNA, 19 nt, Homo sapiens
  misc_RNA (1)...(19): siRNA sense strand
gagaaggaaccaacugaag

SEQ ID NO: 352873 - RNA, 19 nt, Homo sapiens
  misc_RNA (1)...(19): siRNA sense strand
agaaggaaccaacugaaga

SEQ ID NO: 352874 - RNA, 19 nt, Homo sapiens
  misc_RNA (1)...(19): siRNA sense strand
gaagugaaaaguugaagaa

SEQ ID NO: 352875 - RNA, 19 nt, Homo sapiens
  misc_RNA (1)...(19): siRNA sense strand
aaagaggaaguacaacuga

SEQ ID NO: 352876 - RNA, 19 nt, Homo sapiens
  misc_RNA (1)...(19): siRNA sense strand
cgaggaaauuuaagaccau

SEQ ID NO: 352877 - RNA, 19 nt, Homo sapiens
  misc_RNA (1)...(19): siRNA sense strand
gugaugagcguaggacaaa

SEQ ID NO: 352878 - RNA, 19 nt, Homo sapiens
  misc_RNA (1)...(19): siRNA sense strand
gcagaguacguccguggaa

SEQ ID NO: 352879 - RNA, 19 nt, Homo sapiens
  misc_RNA (1)...(19): siRNA sense strand
guuaaagauuacugcucua

SEQ ID NO: 352880 - RNA, 19 nt, Homo sapiens
  misc_RNA (1)...(19): siRNA sense strand
gaggaaguacaacugaaga

SEQ ID NO: 352881 - RNA, 19 nt, Homo sapiens
  misc_RNA (1)...(19): siRNA sense strand
ggucaagaacccaguaugg

SEQ ID NO: 352882 - RNA, 19 nt, Homo sapiens
  misc_RNA (1)...(19): siRNA sense strand
ugaaggagacucgaggaaa

SEQ ID NO: 352883 - RNA, 19 nt, Homo sapiens
  misc_RNA (1)...(19): siRNA sense strand
acuccuaccugggcaagua

SEQ ID NO: 352884 - RNA, 19 nt, Homo sapiens
  misc_RNA (1)...(19): siRNA sense strand
gccgaaagaggaaguacaa

SEQ ID NO: 352885 - RNA, 19 nt, Homo sapiens
  misc_RNA (1)...(19): siRNA sense strand
agacagagaacacagaaag

SEQ ID NO: 352886 - RNA, 19 nt, Homo sapiens
  misc_RNA (1)...(19): siRNA sense strand
ggaaguacaacugaagaca

SEQ ID NO: 352887 - RNA, 19 nt, Homo sapiens
  misc_RNA (1)...(19): siRNA sense strand
guugacaaauuagacauag

SEQ ID NO: 352888 - RNA, 19 nt, Homo sapiens
  misc_RNA (1)...(19): siRNA sense strand
aggaaccaacugaagauua

SEQ ID NO: 352889 - RNA, 19 nt, Homo sapiens
  misc_RNA (1)...(19): siRNA sense strand
gaaguccuagagagagaaa

SEQ ID NO: 352890 - RNA, 19 nt, Homo sapiens
  misc_RNA (1)...(19): siRNA sense strand
cuaccugggcaaguaauua

SEQ ID NO: 352891 - RNA, 19 nt, Homo sapiens
  misc_RNA (1)...(19): siRNA sense strand
guacaacugaagacagaga

SEQ ID NO: 352892 - RNA, 19 nt, Homo sapiens
  misc_RNA (1)...(19): siRNA sense strand
gugcgaaauucacccuugu

SEQ ID NO: 352893 - RNA, 19 nt, Homo sapiens
  misc_RNA (1)...(19): siRNA sense strand
aggcuucauucuuacagua

SEQ ID NO: 352894 - RNA, 19 nt, Homo sapiens
  misc_RNA (1)...(19): siRNA sense strand
aagaggaaguacaacugaa

SEQ ID NO: 352895 - RNA, 19 nt, Homo sapiens
  misc_RNA (1)...(19): siRNA sense strand
gaaagguuaaagauuacug

SEQ ID NO: 352896 - RNA, 19 nt, Homo sapiens
  misc_RNA (1)...(19): siRNA sense strand
uaccugggcaaguaauuaa

SEQ ID NO: 352897 - RNA, 19 nt, Homo sapiens
  misc_RNA (1)...(19): siRNA sense strand
aagaaucaagcacuacaaa

SEQ ID NO: 352898 - RNA, 19 nt, Homo sapiens
  misc_RNA (1)...(19): siRNA sense strand
caagaaucaagcacuacaa

SEQ ID NO: 352899 - RNA, 19 nt, Homo sapiens
  misc_RNA (1)...(19): siRNA sense strand
aaagauuacugcucuaccu

SEQ ID NO: 352900 - RNA, 19 nt, Homo sapiens
  misc_RNA (1)...(19): siRNA sense strand
uggauguacugaacccuau

SEQ ID NO: 352901 - RNA, 19 nt, Homo sapiens
  misc_RNA (1)...(19): siRNA sense strand
uuacugagcagaauucaac

SEQ ID NO: 352902 - RNA, 19 nt, Homo sapiens
  misc_RNA (1)...(19): siRNA sense strand
cuacacuauugaacuggaa

SEQ ID NO: 352903 - RNA, 19 nt, Homo sapiens
  misc_RNA (1)...(19): siRNA sense strand
cgaaagaggaaguacaacu

SEQ ID NO: 352904 - RNA, 19 nt, Homo sapiens
  misc_RNA (1)...(19): siRNA sense strand
agacauaguagaccucaca

SEQ ID NO: 352905 - RNA, 19 nt, Homo sapiens
  misc_RNA (1)...(19): siRNA sense strand
uuccaagaaucaagcacua

SEQ ID NO: 352906 - RNA, 19 nt, Homo sapiens
  misc_RNA (1)...(19): siRNA sense strand
ggaacuacucuuuucuuuu

SEQ ID NO: 352907 - RNA, 19 nt, Homo sapiens
  misc_RNA (1)...(19): siRNA sense strand
caacugaagacagagaaca

SEQ ID NO: 352908 - RNA, 19 nt, Homo sapiens
  misc_RNA (1)...(19): siRNA sense strand
ccaagaaucaagcacuaca

SEQ ID NO: 352909 - RNA, 19 nt, Homo sapiens
  misc_RNA (1)...(19): siRNA sense strand
cuuuguacuuugaagguuu

SEQ ID NO: 352910 - RNA, 19 nt, Homo sapiens
  misc_RNA (1)...(19): siRNA sense strand
gguagugacaguagaaacu

SEQ ID NO: 352911 - RNA, 19 nt, Homo sapiens
  misc_RNA (1)...(19): siRNA sense strand
aagauuauguggauguacu

SEQ ID NO: 352912 - RNA, 19 nt, Homo sapiens
  misc_RNA (1)...(19): siRNA sense strand
ugaagacagagaacacaga

SEQ ID NO: 352913 - RNA, 19 nt, Homo sapiens
  misc_RNA (1)...(19): siRNA sense strand
aagagaaggaaccaacuga

SEQ ID NO: 352914 - RNA, 19 nt, Homo sapiens
  misc_RNA (1)...(19): siRNA sense strand
acagagaacacagaaagug

SEQ ID NO: 352915 - RNA, 19 nt, Homo sapiens
  misc_RNA (1)...(19): siRNA sense strand
gaggcuucauucuuacagu

SEQ ID NO: 352916 - RNA, 19 nt, Homo sapiens
  misc_RNA (1)...(19): siRNA sense strand
gaaccaacugaagauuaug

SEQ ID NO: 352917 - RNA, 19 nt, Homo sapiens
  misc_RNA (1)...(19): siRNA sense strand
gcauuacuggacagaguug

SEQ ID NO: 352918 - RNA, 19 nt, Homo sapiens
  misc_RNA (1)...(19): siRNA sense strand
ggcaggagauagacauucc

SEQ ID NO: 352919 - RNA, 19 nt, Homo sapiens
  misc_RNA (1)...(19): siRNA sense strand
aacugaagauuauguggau

SEQ ID NO: 352920 - RNA, 19 nt, Homo sapiens
  misc_RNA (1)...(19): siRNA sense strand
uggacagaguugagaggaa

SEQ ID NO: 352921 - RNA, 19 nt, Homo sapiens
  misc_RNA (1)...(19): siRNA sense strand
gucaagaacccaguaugga

SEQ ID NO: 352922 - RNA, 19 nt, Homo sapiens
  misc_RNA (1)...(19): siRNA sense strand
gacaaugacuuccucaguu

SEQ ID NO: 352923 - RNA, 19 nt, Homo sapiens
  misc_RNA (1)...(19): siRNA sense strand
gcacaagggcuucaugaug

SEQ ID NO: 352924 - RNA, 19 nt, Homo sapiens
  misc_RNA (1)...(19): siRNA sense strand
caacucagcccagggauuu

SEQ ID NO: 352925 - RNA, 19 nt, Homo sapiens
  misc_RNA (1)...(19): siRNA sense strand
acaaugacuuccucaguug

SEQ ID NO: 352926 - RNA, 19 nt, Homo sapiens
  misc_RNA (1)...(19): siRNA sense strand
cauacuacuugcagacuga

SEQ ID NO: 352927 - RNA, 19 nt, Homo sapiens
  misc_RNA (1)...(19): siRNA sense strand
ggacaaugacuuccucagu

SEQ ID NO: 352928 - RNA, 19 nt, Homo sapiens
  misc_RNA (1)...(19): siRNA sense strand
ccaaugccacccaaacuga

SEQ ID NO: 352929 - RNA, 19 nt, Homo sapiens
  misc_RNA (1)...(19): siRNA sense strand
gccaagauccgagucaaga

SEQ ID NO: 352930 - RNA, 19 nt, Homo sapiens
  misc_RNA (1)...(19): siRNA sense strand
aggccaagguggagucuga

SEQ ID NO: 352931 - RNA, 19 nt, Homo sapiens
  misc_RNA (1)...(19): siRNA sense strand
gaagagccacaggacaaug

SEQ ID NO: 352932 - RNA, 19 nt, Homo sapiens
  misc_RNA (1)...(19): siRNA sense strand
ccacccaaacugaguguga

SEQ ID NO: 352933 - RNA, 19 nt, Homo sapiens
  misc_RNA (1)...(19): siRNA sense strand
cagcacaagggcuucauga

SEQ ID NO: 352934 - RNA, 19 nt, Homo sapiens
  misc_RNA (1)...(19): siRNA sense strand
gcagacugacaaugggaaa

SEQ ID NO: 352935 - RNA, 19 nt, Homo sapiens
  misc_RNA (1)...(19): siRNA sense strand
cguggaagccuaugugaag

SEQ ID NO: 352936 - RNA, 19 nt, Homo sapiens
  misc_RNA (1)...(19): siRNA sense strand
acaagggcuucaugaugga

SEQ ID NO: 352937 - RNA, 19 nt, Homo sapiens
  misc_RNA (1)...(19): siRNA sense strand
cacccaaacugagugugaa

SEQ ID NO: 352938 - RNA, 19 nt, Homo sapiens
  misc_RNA (1)...(19): siRNA sense strand
cugaagagccacaggacaa

SEQ ID NO: 352939 - RNA, 19 nt, Homo sapiens
  misc_RNA (1)...(19): siRNA sense strand
ccuccgagucucccuauga

SEQ ID NO: 352940 - RNA, 19 nt, Homo sapiens
  misc_RNA (1)...(19): siRNA sense strand
cagagcagcaggccuguag

SEQ ID NO: 352941 - RNA, 19 nt, Homo sapiens
  misc_RNA (1)...(19): siRNA sense strand
gccagcaccucaaguucca

SEQ ID NO: 352942 - RNA, 19 nt, Homo sapiens
  misc_RNA (1)...(19): siRNA sense strand
caccuggacauacuacuug

SEQ ID NO: 352943 - RNA, 19 nt, Homo sapiens
  misc_RNA (1)...(19): siRNA sense strand
ccaccuggacauacuacuu

SEQ ID NO: 352944 - RNA, 19 nt, Homo sapiens
  misc_RNA (1)...(19): siRNA sense strand
caagguggagucugaagag

SEQ ID NO: 352945 - RNA, 19 nt, Homo sapiens
  misc_RNA (1)...(19): siRNA sense strand
gcagagcagcaggccugua

SEQ ID NO: 352946 - RNA, 19 nt, Homo sapiens
  misc_RNA (1)...(19): siRNA sense strand
ccaagguggagucugaaga

SEQ ID NO: 352947 - RNA, 19 nt, Homo sapiens
  misc_RNA (1)...(19): siRNA sense strand
guuucagacucagcccaua

SEQ ID NO: 352948 - RNA, 19 nt, Homo sapiens
  misc_RNA (1)...(19): siRNA sense strand
agccggagcagaagagaaa

SEQ ID NO: 352949 - RNA, 19 nt, Homo sapiens
  misc_RNA (1)...(19): siRNA sense strand
ccucugcaaugaccuuguc

SEQ ID NO: 352950 - RNA, 19 nt, Homo sapiens
  misc_RNA (1)...(19): siRNA sense strand
uuuccacccucugcaauga

SEQ ID NO: 352951 - RNA, 19 nt, Homo sapiens
  misc_RNA (1)...(19): siRNA sense strand
aaaguggugguguuucaga

SEQ ID NO: 352952 - RNA, 19 nt, Homo sapiens
  misc_RNA (1)...(19): siRNA sense strand
ggaccugaccaagcuguag

SEQ ID NO: 352953 - RNA, 19 nt, Homo sapiens
  misc_RNA (1)...(19): siRNA sense strand
gcagcacaagggcuucaug

SEQ ID NO: 352954 - RNA, 19 nt, Homo sapiens
  misc_RNA (1)...(19): siRNA sense strand
aagagccacaggacaauga

SEQ ID NO: 352955 - RNA, 19 nt, Homo sapiens
  misc_RNA (1)...(19): siRNA sense strand
gaauauagcuuaugaacac

SEQ ID NO: 352956 - RNA, 19 nt, Homo sapiens
  misc_RNA (1)...(19): siRNA sense strand
uauagaaggucccagauuu

SEQ ID NO: 352957 - RNA, 19 nt, Homo sapiens
  misc_RNA (1)...(19): siRNA sense strand
gcacaacaauggccacaca

SEQ ID NO: 352958 - RNA, 19 nt, Homo sapiens
  misc_RNA (1)...(19): siRNA sense strand
ggacauuguucuccacaga

SEQ ID NO: 352959 - RNA, 19 nt, Homo sapiens
  misc_RNA (1)...(19): siRNA sense strand
caagcaggauccucguaua

SEQ ID NO: 352960 - RNA, 19 nt, Homo sapiens
  misc_RNA (1)...(19): siRNA sense strand
cuagaaagauucggaagaa

SEQ ID NO: 352961 - RNA, 19 nt, Homo sapiens
  misc_RNA (1)...(19): siRNA sense strand
ggucaacacuggacguaug

SEQ ID NO: 352962 - RNA, 19 nt, Homo sapiens
  misc_RNA (1)...(19): siRNA sense strand
caacagugaagccacauuu

SEQ ID NO: 352963 - RNA, 19 nt, Homo sapiens
  misc_RNA (1)...(19): siRNA sense strand
ggucuuugcuucuuucauc

SEQ ID NO: 352964 - RNA, 19 nt, Homo sapiens
  misc_RNA (1)...(19): siRNA sense strand
uugcagagcuccacauugu

SEQ ID NO: 352965 - RNA, 19 nt, Homo sapiens
  misc_RNA (1)...(19): siRNA sense strand
gacagacagugugacauuu

SEQ ID NO: 352966 - RNA, 19 nt, Homo sapiens
  misc_RNA (1)...(19): siRNA sense strand
ccucuaagcuucugguaca

SEQ ID NO: 352967 - RNA, 19 nt, Homo sapiens
  misc_RNA (1)...(19): siRNA sense strand
gaaggucccagauuucaau

SEQ ID NO: 352968 - RNA, 19 nt, Homo sapiens
  misc_RNA (1)...(19): siRNA sense strand
uacaauggcucgcucacaa

SEQ ID NO: 352969 - RNA, 19 nt, Homo sapiens
  misc_RNA (1)...(19): siRNA sense strand
gugccucccuucaaccuaa

SEQ ID NO: 352970 - RNA, 19 nt, Homo sapiens
  misc_RNA (1)...(19): siRNA sense strand
gcauggucuuugcuucuuu

SEQ ID NO: 352971 - RNA, 19 nt, Homo sapiens
  misc_RNA (1)...(19): siRNA sense strand
ggucagaacaccagaucaa

SEQ ID NO: 352972 - RNA, 19 nt, Homo sapiens
  misc_RNA (1)...(19): siRNA sense strand
gaagucaggcauaaagauc

SEQ ID NO: 352973 - RNA, 19 nt, Homo sapiens
  misc_RNA (1)...(19): siRNA sense strand
cagacagugugacauuuga

SEQ ID NO: 352974 - RNA, 19 nt, Homo sapiens
  misc_RNA (1)...(19): siRNA sense strand
ggucccagauuucaaugga

SEQ ID NO: 352975 - RNA, 19 nt, Homo sapiens
  misc_RNA (1)...(19): siRNA sense strand
ccaaacagcuggggcagua

SEQ ID NO: 352976 - RNA, 19 nt, Homo sapiens
  misc_RNA (1)...(19): siRNA sense strand
gagucuagguguaggaauc

SEQ ID NO: 352977 - RNA, 19 nt, Homo sapiens
  misc_RNA (1)...(19): siRNA sense strand
gggugagacuaagaauaua

SEQ ID NO: 352978 - RNA, 19 nt, Homo sapiens
  misc_RNA (1)...(19): siRNA sense strand
gaaagauucggaagaagag

SEQ ID NO: 352979 - RNA, 19 nt, Homo sapiens
  misc_RNA (1)...(19): siRNA sense strand
gcaggauccucguauacca

SEQ ID NO: 352980 - RNA, 19 nt, Homo sapiens
  misc_RNA (1)...(19): siRNA sense strand
agacagacagugugacauu

SEQ ID NO: 352981 - RNA, 19 nt, Homo sapiens
  misc_RNA (1)...(19): siRNA sense strand
ucuccuggcuguuuauuuc

SEQ ID NO: 352982 - RNA, 19 nt, Homo sapiens
  misc_RNA (1)...(19): siRNA sense strand
gaacacauucugagucacu

SEQ ID NO: 352983 - RNA, 19 nt, Homo sapiens
  misc_RNA (1)...(19): siRNA sense strand
gcccaucgauauucagaca

SEQ ID NO: 352984 - RNA, 19 nt, Homo sapiens
  misc_RNA (1)...(19): siRNA sense strand
gcuccacauuguacauuau

SEQ ID NO: 352985 - RNA, 19 nt, Homo sapiens
  misc_RNA (1)...(19): siRNA sense strand
ccaucgauauucagacaga

SEQ ID NO: 352986 - RNA, 19 nt, Homo sapiens
  misc_RNA (1)...(19): siRNA sense strand
agugugcucuggacaguuu

SEQ ID NO: 352987 - RNA, 19 nt, Homo sapiens
  misc_RNA (1)...(19): siRNA sense strand
ggugaaaugcugagucuag

SEQ ID NO: 352988 - RNA, 19 nt, Homo sapiens
  misc_RNA (1)...(19): siRNA sense strand
gcagagcuccacauuguac

SEQ ID NO: 352989 - RNA, 19 nt, Homo sapiens
  misc_RNA (1)...(19): siRNA sense strand
ggaagaagaggcuggaaaa

SEQ ID NO: 352990 - RNA, 19 nt, Homo sapiens
  misc_RNA (1)...(19): siRNA sense strand
agaaagauucggaagaaga

SEQ ID NO: 352991 - RNA, 19 nt, Homo sapiens
  misc_RNA (1)...(19): siRNA sense strand
gggcaguacuuccgcuaca

SEQ ID NO: 352992 - RNA, 19 nt, Homo sapiens
  misc_RNA (1)...(19): siRNA sense strand
gcuagaaagauucggaaga

SEQ ID NO: 352993 - RNA, 19 nt, Homo sapiens
  misc_RNA (1)...(19): siRNA sense strand
gacauuugacccugauuug

SEQ ID NO: 352994 - RNA, 19 nt, Homo sapiens
  misc_RNA (1)...(19): siRNA sense strand
ugggugagacuaagaauau

SEQ ID NO: 352995 - RNA, 19 nt, Homo sapiens
  misc_RNA (1)...(19): siRNA sense strand
uuaugacucugauuccuau

SEQ ID NO: 352996 - RNA, 19 nt, Homo sapiens
  misc_RNA (1)...(19): siRNA sense strand
cagcacaagccacgacuga

SEQ ID NO: 352997 - RNA, 19 nt, Homo sapiens
  misc_RNA (1)...(19): siRNA sense strand
gcuguuuauuucauugcua

SEQ ID NO: 352998 - RNA, 19 nt, Homo sapiens
  misc_RNA (1)...(19): siRNA sense strand
ugacauuugacccugauuu

SEQ ID NO: 352999 - RNA, 19 nt, Homo sapiens
  misc_RNA (1)...(19): siRNA sense strand
ggucuucaccucagcacaa

SEQ ID NO: 353000 - RNA, 19 nt, Homo sapiens
  misc_RNA (1)...(19): siRNA sense strand
caggugaaaugcugagucu

SEQ ID NO: 353001 - RNA, 19 nt, Homo sapiens
  misc_RNA (1)...(19): siRNA sense strand
cauuguacauuaugacucu

SEQ ID NO: 353002 - RNA, 19 nt, Homo sapiens
  misc_RNA (1)...(19): siRNA sense strand
guccugggcauccuaauug

SEQ ID NO: 353003 - RNA, 19 nt, Homo sapiens
  misc_RNA (1)...(19): siRNA sense strand
ugcaugaagucaggcauaa

SEQ ID NO: 353004 - RNA, 19 nt, Homo sapiens
  misc_RNA (1)...(19): siRNA sense strand
aacaccagaucaacaguga

SEQ ID NO: 353005 - RNA, 19 nt, Homo sapiens
  misc_RNA (1)...(19): siRNA sense strand
ggacuuccccgaaaauaug

SEQ ID NO: 353006 - RNA, 19 nt, Homo sapiens
  misc_RNA (1)...(19): siRNA sense strand
guauaccacaggugaaaug

SEQ ID NO: 353007 - RNA, 19 nt, Homo sapiens
  misc_RNA (1)...(19): siRNA sense strand
gcacuggggucagaaagga

SEQ ID NO: 353008 - RNA, 19 nt, Homo sapiens
  misc_RNA (1)...(19): siRNA sense strand
ccaagcaggauccucguau

SEQ ID NO: 353009 - RNA, 19 nt, Homo sapiens
  misc_RNA (1)...(19): siRNA sense strand
gcaguacuuccgcuacaau

SEQ ID NO: 353010 - RNA, 19 nt, Homo sapiens
  misc_RNA (1)...(19): siRNA sense strand
cuuuggaccugcacaacaa

SEQ ID NO: 353011 - RNA, 19 nt, Homo sapiens
  misc_RNA (1)...(19): siRNA sense strand
gagcuccacauuguacauu

SEQ ID NO: 353012 - RNA, 19 nt, Homo sapiens
  misc_RNA (1)...(19): siRNA sense strand
gcaugaagucaggcauaaa

SEQ ID NO: 353013 - RNA, 19 nt, Homo sapiens
  misc_RNA (1)...(19): siRNA sense strand
ccuaugacagcuugaguga

SEQ ID NO: 353014 - RNA, 19 nt, Homo sapiens
  misc_RNA (1)...(19): siRNA sense strand
gcuuaugaacacauucuga

SEQ ID NO: 353015 - RNA, 19 nt, Homo sapiens
  misc_RNA (1)...(19): siRNA sense strand
gccuucuccuggcuguuua

SEQ ID NO: 353016 - RNA, 19 nt, Homo sapiens
  misc_RNA (1)...(19): siRNA sense strand
ucaaucagcgcauggucuu

SEQ ID NO: 353017 - RNA, 19 nt, Homo sapiens
  misc_RNA (1)...(19): siRNA sense strand
caugaagucaggcauaaag

SEQ ID NO: 353018 - RNA, 19 nt, Homo sapiens
  misc_RNA (1)...(19): siRNA sense strand
cugagucacuugcaugaag

SEQ ID NO: 353019 - RNA, 19 nt, Homo sapiens
  misc_RNA (1)...(19): siRNA sense strand
augaacacauucugaguca

SEQ ID NO: 353020 - RNA, 19 nt, Homo sapiens
  misc_RNA (1)...(19): siRNA sense strand
ggcaguacuuccgcuacaa

SEQ ID NO: 353021 - RNA, 19 nt, Homo sapiens
  misc_RNA (1)...(19): siRNA sense strand
accauuggccagccucuua

SEQ ID NO: 353022 - RNA, 19 nt, Homo sapiens
  misc_RNA (1)...(19): siRNA sense strand
ucagaacaccagaucaaca

SEQ ID NO: 353023 - RNA, 19 nt, Homo sapiens
  misc_RNA (1)...(19): siRNA sense strand
cggaagaagaggcuggaaa

SEQ ID NO: 353024 - RNA, 19 nt, Homo sapiens
  misc_RNA (1)...(19): siRNA sense strand
uagaaggucccagauuuca

SEQ ID NO: 353025 - RNA, 19 nt, Homo sapiens
  misc_RNA (1)...(19): siRNA sense strand
cccagucgcccaucgauau

SEQ ID NO: 353026 - RNA, 19 nt, Homo sapiens
  misc_RNA (1)...(19): siRNA sense strand
gugggugagacuaagaaua

SEQ ID NO: 353027 - RNA, 19 nt, Homo sapiens
  misc_RNA (1)...(19): siRNA sense strand
guacauuaugacucugauu

SEQ ID NO: 353028 - RNA, 19 nt, Homo sapiens
  misc_RNA (1)...(19): siRNA sense strand
cauggucuuugcuucuuuc

SEQ ID NO: 353029 - RNA, 19 nt, Homo sapiens
  misc_RNA (1)...(19): siRNA sense strand
gagacuaagaauauagcuu

SEQ ID NO: 353030 - RNA, 19 nt, Homo sapiens
  misc_RNA (1)...(19): siRNA sense strand
ggugagacuaagaauauag

SEQ ID NO: 353031 - RNA, 19 nt, Homo sapiens
  misc_RNA (1)...(19): siRNA sense strand
acagacagugugacauuug

SEQ ID NO: 353032 - RNA, 19 nt, Homo sapiens
  misc_RNA (1)...(19): siRNA sense strand
ugaagucaggcauaaagau

SEQ ID NO: 353033 - RNA, 19 nt, Homo sapiens
  misc_RNA (1)...(19): siRNA sense strand
ucaauggaacagcuggaaa

SEQ ID NO: 353034 - RNA, 19 nt, Homo sapiens
  misc_RNA (1)...(19): siRNA sense strand
uuauagaaggucccagauu

SEQ ID NO: 353035 - RNA, 19 nt, Homo sapiens
  misc_RNA (1)...(19): siRNA sense strand
ccacacagugcaacucucu

SEQ ID NO: 353036 - RNA, 19 nt, Homo sapiens
  misc_RNA (1)...(19): siRNA sense strand
ccagucgcccaucgauauu

SEQ ID NO: 353037 - RNA, 19 nt, Homo sapiens
  misc_RNA (1)...(19): siRNA sense strand
gaaucuugguuggcugucu

SEQ ID NO: 353038 - RNA, 19 nt, Homo sapiens
  misc_RNA (1)...(19): siRNA sense strand
aaugcugagucuaggugua

SEQ ID NO: 353039 - RNA, 19 nt, Homo sapiens
  misc_RNA (1)...(19): siRNA sense strand
gcccagucgcccaucgaua

SEQ ID NO: 353040 - RNA, 19 nt, Homo sapiens
  misc_RNA (1)...(19): siRNA sense strand
ccucagugccucccuucaa

SEQ ID NO: 353041 - RNA, 19 nt, Homo sapiens
  misc_RNA (1)...(19): siRNA sense strand
gaacuaccgagcccuucag

SEQ ID NO: 353042 - RNA, 19 nt, Homo sapiens
  misc_RNA (1)...(19): siRNA sense strand
agccacgacugaggcauaa

SEQ ID NO: 353043 - RNA, 19 nt, Homo sapiens
  misc_RNA (1)...(19): siRNA sense strand
aagccacgacugaggcaua

SEQ ID NO: 353044 - RNA, 19 nt, Homo sapiens
  misc_RNA (1)...(19): siRNA sense strand
ucagacagacagugugaca

SEQ ID NO: 353045 - RNA, 19 nt, Homo sapiens
  misc_RNA (1)...(19): siRNA sense strand
cagaacaccagaucaacag

SEQ ID NO: 353046 - RNA, 19 nt, Homo sapiens
  misc_RNA (1)...(19): siRNA sense strand
uagaaagauucggaagaag

SEQ ID NO: 353047 - RNA, 19 nt, Homo sapiens
  misc_RNA (1)...(19): siRNA sense strand
ccuggcuguuuauuucauu

SEQ ID NO: 353048 - RNA, 19 nt, Homo sapiens
  misc_RNA (1)...(19): siRNA sense strand
gcgcauggucuuugcuucu

SEQ ID NO: 353049 - RNA, 19 nt, Homo sapiens
  misc_RNA (1)...(19): siRNA sense strand
gaggugggugagacuaaga

SEQ ID NO: 353050 - RNA, 19 nt, Homo sapiens
  misc_RNA (1)...(19): siRNA sense strand
uacauuaugacucugauuc

SEQ ID NO: 353051 - RNA, 19 nt, Homo sapiens
  misc_RNA (1)...(19): siRNA sense strand
ggacauaucuuggaacuuc

SEQ ID NO: 353052 - RNA, 19 nt, Homo sapiens
  misc_RNA (1)...(19): siRNA sense strand
gaaaggacauaucuuggaa

SEQ ID NO: 353053 - RNA, 19 nt, Homo sapiens
  misc_RNA (1)...(19): siRNA sense strand
gagcuaagcccaaggugua

SEQ ID NO: 353054 - RNA, 19 nt, Homo sapiens
  misc_RNA (1)...(19): siRNA sense strand
aagcagagcugguucaaga

SEQ ID NO: 353055 - RNA, 19 nt, Homo sapiens
  misc_RNA (1)...(19): siRNA sense strand
gaagaggagaaauaugaua

SEQ ID NO: 353056 - RNA, 19 nt, Homo sapiens
  misc_RNA (1)...(19): siRNA sense strand
gagaugagauugugauggu

SEQ ID NO: 353057 - RNA, 19 nt, Homo sapiens
  misc_RNA (1)...(19): siRNA sense strand
cacaaaccaucccaacaua

SEQ ID NO: 353058 - RNA, 19 nt, Homo sapiens
  misc_RNA (1)...(19): siRNA sense strand
gaggaaaggacauaucuug

SEQ ID NO: 353059 - RNA, 19 nt, Homo sapiens
  misc_RNA (1)...(19): siRNA sense strand
acagaugccuugcacguuu

SEQ ID NO: 353060 - RNA, 19 nt, Homo sapiens
  misc_RNA (1)...(19): siRNA sense strand
ggaaaggacauaucuugga

SEQ ID NO: 353061 - RNA, 19 nt, Homo sapiens
  misc_RNA (1)...(19): siRNA sense strand
cuaccgacaugaucagaaa

SEQ ID NO: 353062 - RNA, 19 nt, Homo sapiens
  misc_RNA (1)...(19): siRNA sense strand
cagaugccuugcacguuua

SEQ ID NO: 353063 - RNA, 19 nt, Homo sapiens
  misc_RNA (1)...(19): siRNA sense strand
gaagaucccgucaguugug

SEQ ID NO: 353064 - RNA, 19 nt, Homo sapiens
  misc_RNA (1)...(19): siRNA sense strand
ccaaagcacccuccggaaa

SEQ ID NO: 353065 - RNA, 19 nt, Homo sapiens
  misc_RNA (1)...(19): siRNA sense strand
uggaagaggagaaauauga

SEQ ID NO: 353066 - RNA, 19 nt, Homo sapiens
  misc_RNA (1)...(19): siRNA sense strand
ccacaaaccaucccaacau

SEQ ID NO: 353067 - RNA, 19 nt, Homo sapiens
  misc_RNA (1)...(19): siRNA sense strand
gaagaggaaaggacauauc

SEQ ID NO: 353068 - RNA, 19 nt, Homo sapiens
  misc_RNA (1)...(19): siRNA sense strand
cagcugagauucgaaagca

SEQ ID NO: 353069 - RNA, 19 nt, Homo sapiens
  misc_RNA (1)...(19): siRNA sense strand
guggauguguucacgaaga

SEQ ID NO: 353070 - RNA, 19 nt, Homo sapiens
  misc_RNA (1)...(19): siRNA sense strand
gcaauccgcggucuuugga

SEQ ID NO: 353071 - RNA, 19 nt, Homo sapiens
  misc_RNA (1)...(19): siRNA sense strand
gcccaagguguacaucaua

SEQ ID NO: 353072 - RNA, 19 nt, Homo sapiens
  misc_RNA (1)...(19): siRNA sense strand
agaccuggaugcucuggaa

SEQ ID NO: 353073 - RNA, 19 nt, Homo sapiens
  misc_RNA (1)...(19): siRNA sense strand
caaaccaucccaacauaca

SEQ ID NO: 353074 - RNA, 19 nt, Homo sapiens
  misc_RNA (1)...(19): siRNA sense strand
ucgaggcccugaacaacaa

SEQ ID NO: 353075 - RNA, 19 nt, Homo sapiens
  misc_RNA (1)...(19): siRNA sense strand
ggaagaucccgucaguugu

SEQ ID NO: 353076 - RNA, 19 nt, Homo sapiens
  misc_RNA (1)...(19): siRNA sense strand
ggaagaggagaaauaugau

SEQ ID NO: 353077 - RNA, 19 nt, Homo sapiens
  misc_RNA (1)...(19): siRNA sense strand
caucaaagacagcccacaa

SEQ ID NO: 353078 - RNA, 19 nt, Homo sapiens
  misc_RNA (1)...(19): siRNA sense strand
aaagacagcccacaaacca

SEQ ID NO: 353079 - RNA, 19 nt, Homo sapiens
  misc_RNA (1)...(19): siRNA sense strand
gaaaagcaaggaaaacgaa

SEQ ID NO: 353080 - RNA, 19 nt, Homo sapiens
  misc_RNA (1)...(19): siRNA sense strand
gaaggaaaagcaaggaaaa

SEQ ID NO: 353081 - RNA, 19 nt, Homo sapiens
  misc_RNA (1)...(19): siRNA sense strand
ggaccccggugaaacagua

SEQ ID NO: 353082 - RNA, 19 nt, Homo sapiens
  misc_RNA (1)...(19): siRNA sense strand
aaacgaacccugaaaucca

SEQ ID NO: 353083 - RNA, 19 nt, Homo sapiens
  misc_RNA (1)...(19): siRNA sense strand
gcccuaauacuguguguca

SEQ ID NO: 353084 - RNA, 19 nt, Homo sapiens
  misc_RNA (1)...(19): siRNA sense strand
caaagcacccuccggaaac

SEQ ID NO: 353085 - RNA, 19 nt, Homo sapiens
  misc_RNA (1)...(19): siRNA sense strand
gcagagcugguucaagaag

SEQ ID NO: 353086 - RNA, 19 nt, Homo sapiens
  misc_RNA (1)...(19): siRNA sense strand
aacgaacccugaaauccaa

SEQ ID NO: 353087 - RNA, 19 nt, Homo sapiens
  misc_RNA (1)...(19): siRNA sense strand
aauacugugugucaccaaa

SEQ ID NO: 353088 - RNA, 19 nt, Homo sapiens
  misc_RNA (1)...(19): siRNA sense strand
gaaaacgaacccugaaauc

SEQ ID NO: 353089 - RNA, 19 nt, Homo sapiens
  misc_RNA (1)...(19): siRNA sense strand
ggaaaacgaacccugaaau

SEQ ID NO: 353090 - RNA, 19 nt, Homo sapiens
  misc_RNA (1)...(19): siRNA sense strand
gaaacaguagguggagaug

SEQ ID NO: 353091 - RNA, 19 nt, Homo sapiens
  misc_RNA (1)...(19): siRNA sense strand
uggucaagcuggagaaucu

SEQ ID NO: 353092 - RNA, 19 nt, Homo sapiens
  misc_RNA (1)...(19): siRNA sense strand
gaucagaaaggcucaugcu

SEQ ID NO: 353093 - RNA, 19 nt, Homo sapiens
  misc_RNA (1)...(19): siRNA sense strand
agagcugguucaagaagga

SEQ ID NO: 353094 - RNA, 19 nt, Homo sapiens
  misc_RNA (1)...(19): siRNA sense strand
gaaagcaccaugaaaagag

SEQ ID NO: 353095 - RNA, 19 nt, Homo sapiens
  misc_RNA (1)...(19): siRNA sense strand
ggcagaagcagagcugguu

SEQ ID NO: 353096 - RNA, 19 nt, Homo sapiens
  misc_RNA (1)...(19): siRNA sense strand
aacaguagguggagaugag

SEQ ID NO: 353097 - RNA, 19 nt, Homo sapiens
  misc_RNA (1)...(19): siRNA sense strand
caguugugccuucguggua

SEQ ID NO: 353098 - RNA, 19 nt, Homo sapiens
  misc_RNA (1)...(19): siRNA sense strand
uggaugcucuggaacacau

SEQ ID NO: 353099 - RNA, 19 nt, Homo sapiens
  misc_RNA (1)...(19): siRNA sense strand
auacaucgccuaccgacau

SEQ ID NO: 353100 - RNA, 19 nt, Homo sapiens
  misc_RNA (1)...(19): siRNA sense strand
ugguggauguguucacgaa

SEQ ID NO: 353101 - RNA, 19 nt, Homo sapiens
  misc_RNA (1)...(19): siRNA sense strand
ucaaagacagcccacaaac

SEQ ID NO: 353102 - RNA, 19 nt, Homo sapiens
  misc_RNA (1)...(19): siRNA sense strand
gggagaagauggggagaug

SEQ ID NO: 353103 - RNA, 19 nt, Homo sapiens
  misc_RNA (1)...(19): siRNA sense strand
ugaaacaguagguggagau

SEQ ID NO: 353104 - RNA, 19 nt, Homo sapiens
  misc_RNA (1)...(19): siRNA sense strand
gagcaauccgcggucuuug

SEQ ID NO: 353105 - RNA, 19 nt, Homo sapiens
  misc_RNA (1)...(19): siRNA sense strand
acgaagaggaaaggacaua

SEQ ID NO: 353106 - RNA, 19 nt, Homo sapiens
  misc_RNA (1)...(19): siRNA sense strand
aaggacauaucuuggaacu

SEQ ID NO: 353107 - RNA, 19 nt, Homo sapiens
  misc_RNA (1)...(19): siRNA sense strand
cuuuggaagaggagaaaua

SEQ ID NO: 353108 - RNA, 19 nt, Homo sapiens
  misc_RNA (1)...(19): siRNA sense strand
gaacagagcucuaugauac

SEQ ID NO: 353109 - RNA, 19 nt, Homo sapiens
  misc_RNA (1)...(19): siRNA sense strand
gaagaaagauaaagugaug

SEQ ID NO: 353110 - RNA, 19 nt, Homo sapiens
  misc_RNA (1)...(19): siRNA sense strand
ucagagugcucaaauauua

SEQ ID NO: 353111 - RNA, 19 nt, Homo sapiens
  misc_RNA (1)...(19): siRNA sense strand
ggaaagaaguuaaaucaca

SEQ ID NO: 353112 - RNA, 19 nt, Homo sapiens
  misc_RNA (1)...(19): siRNA sense strand
gagaaacacugcacuaaug

SEQ ID NO: 353113 - RNA, 19 nt, Homo sapiens
  misc_RNA (1)...(19): siRNA sense strand
uaugaugccugaugaauua

SEQ ID NO: 353114 - RNA, 19 nt, Homo sapiens
  misc_RNA (1)...(19): siRNA sense strand
gaacagcaacuaccagaua

SEQ ID NO: 353115 - RNA, 19 nt, Homo sapiens
  misc_RNA (1)...(19): siRNA sense strand
ggaugaaaguuguauguuu

SEQ ID NO: 353116 - RNA, 19 nt, Homo sapiens
  misc_RNA (1)...(19): siRNA sense strand
aaagaucccucaucauuaa

SEQ ID NO: 353117 - RNA, 19 nt, Homo sapiens
  misc_RNA (1)...(19): siRNA sense strand
gcagacacauguaagaauu

SEQ ID NO: 353118 - RNA, 19 nt, Homo sapiens
  misc_RNA (1)...(19): siRNA sense strand
cagaagacccuguucauua

SEQ ID NO: 353119 - RNA, 19 nt, Homo sapiens
  misc_RNA (1)...(19): siRNA sense strand
gaaguuaaaucacaagaca

SEQ ID NO: 353120 - RNA, 19 nt, Homo sapiens
  misc_RNA (1)...(19): siRNA sense strand
ggaagcagcugucagugaa

SEQ ID NO: 353121 - RNA, 19 nt, Homo sapiens
  misc_RNA (1)...(19): siRNA sense strand
ccgcaaggaugaagaaaua

SEQ ID NO: 353122 - RNA, 19 nt, Homo sapiens
  misc_RNA (1)...(19): siRNA sense strand
cagaggaacugaaagagua

SEQ ID NO: 353123 - RNA, 19 nt, Homo sapiens
  misc_RNA (1)...(19): siRNA sense strand
ggacuuauaugaagagauc

SEQ ID NO: 353124 - RNA, 19 nt, Homo sapiens
  misc_RNA (1)...(19): siRNA sense strand
caagucaacucaugaagaa

SEQ ID NO: 353125 - RNA, 19 nt, Homo sapiens
  misc_RNA (1)...(19): siRNA sense strand
gaugaaaguuguauguuug

SEQ ID NO: 353126 - RNA, 19 nt, Homo sapiens
  misc_RNA (1)...(19): siRNA sense strand
gaaaaccacuacugauuua

SEQ ID NO: 353127 - RNA, 19 nt, Homo sapiens
  misc_RNA (1)...(19): siRNA sense strand
gagcaucacuuccucauuc

SEQ ID NO: 353128 - RNA, 19 nt, Homo sapiens
  misc_RNA (1)...(19): siRNA sense strand
ggaacaaguuuauuugaug

SEQ ID NO: 353129 - RNA, 19 nt, Homo sapiens
  misc_RNA (1)...(19): siRNA sense strand
caaaggaggcaacauauaa

SEQ ID NO: 353130 - RNA, 19 nt, Homo sapiens
  misc_RNA (1)...(19): siRNA sense strand
gcagaagacuaauaaggaa

SEQ ID NO: 353131 - RNA, 19 nt, Homo sapiens
  misc_RNA (1)...(19): siRNA sense strand
auaaagagcuugcaaugaa

SEQ ID NO: 353132 - RNA, 19 nt, Homo sapiens
  misc_RNA (1)...(19): siRNA sense strand
gaaacaaacucaguauauc

SEQ ID NO: 353133 - RNA, 19 nt, Homo sapiens
  misc_RNA (1)...(19): siRNA sense strand
aaaggaagcugaugaagga

SEQ ID NO: 353134 - RNA, 19 nt, Homo sapiens
  misc_RNA (1)...(19): siRNA sense strand
gcacuucacugccaaaucu

SEQ ID NO: 353135 - RNA, 19 nt, Homo sapiens
  misc_RNA (1)...(19): siRNA sense strand
ugaaguggcugaugaaugu

SEQ ID NO: 353136 - RNA, 19 nt, Homo sapiens
  misc_RNA (1)...(19): siRNA sense strand
caagaucacuggagaagau

SEQ ID NO: 353137 - RNA, 19 nt, Homo sapiens
  misc_RNA (1)...(19): siRNA sense strand
caagaaaccuacccaagau

SEQ ID NO: 353138 - RNA, 19 nt, Homo sapiens
  misc_RNA (1)...(19): siRNA sense strand
gaaguacacuguccaagca

SEQ ID NO: 353139 - RNA, 19 nt, Homo sapiens
  misc_RNA (1)...(19): siRNA sense strand
gaagagcccauuuguggua

SEQ ID NO: 353140 - RNA, 19 nt, Homo sapiens
  misc_RNA (1)...(19): siRNA sense strand
caauaaugcuuucagaaga

SEQ ID NO: 353141 - RNA, 19 nt, Homo sapiens
  misc_RNA (1)...(19): siRNA sense strand
gauaauguguguaguguag

SEQ ID NO: 353142 - RNA, 19 nt, Homo sapiens
  misc_RNA (1)...(19): siRNA sense strand
uggcauaguugaucguuua

SEQ ID NO: 353143 - RNA, 19 nt, Homo sapiens
  misc_RNA (1)...(19): siRNA sense strand
gaagagauccugacugaag

SEQ ID NO: 353144 - RNA, 19 nt, Homo sapiens
  misc_RNA (1)...(19): siRNA sense strand
cuacaagucuuucugcaaa

SEQ ID NO: 353145 - RNA, 19 nt, Homo sapiens
  misc_RNA (1)...(19): siRNA sense strand
gaaaccaagucaacguuau

SEQ ID NO: 353146 - RNA, 19 nt, Homo sapiens
  misc_RNA (1)...(19): siRNA sense strand
guaaauaccaucuagaaga

SEQ ID NO: 353147 - RNA, 19 nt, Homo sapiens
  misc_RNA (1)...(19): siRNA sense strand
gcaaaggaggcaacauaua

SEQ ID NO: 353148 - RNA, 19 nt, Homo sapiens
  misc_RNA (1)...(19): siRNA sense strand
ggagaaauuagaagugaua

SEQ ID NO: 353149 - RNA, 19 nt, Homo sapiens
  misc_RNA (1)...(19): siRNA sense strand
uaaagaucccucaucauua

SEQ ID NO: 353150 - RNA, 19 nt, Homo sapiens
  misc_RNA (1)...(19): siRNA sense strand
ugaaagcauugaagaauug

SEQ ID NO: 353151 - RNA, 19 nt, Homo sapiens
  misc_RNA (1)...(19): siRNA sense strand
uaaguaaucuucaccaaag

SEQ ID NO: 353152 - RNA, 19 nt, Homo sapiens
  misc_RNA (1)...(19): siRNA sense strand
ggaaaccuauaucgacuug

SEQ ID NO: 353153 - RNA, 19 nt, Homo sapiens
  misc_RNA (1)...(19): siRNA sense strand
gcaagguucugaucuuuua

SEQ ID NO: 353154 - RNA, 19 nt, Homo sapiens
  misc_RNA (1)...(19): siRNA sense strand
cagcaagcaucgagccuua

SEQ ID NO: 353155 - RNA, 19 nt, Homo sapiens
  misc_RNA (1)...(19): siRNA sense strand
acacagaauuucagcuuaa

SEQ ID NO: 353156 - RNA, 19 nt, Homo sapiens
  misc_RNA (1)...(19): siRNA sense strand
gaagaacagagcucuauga

SEQ ID NO: 353157 - RNA, 19 nt, Homo sapiens
  misc_RNA (1)...(19): siRNA sense strand
gaaaaguacuguguguuua

SEQ ID NO: 353158 - RNA, 19 nt, Homo sapiens
  misc_RNA (1)...(19): siRNA sense strand
gagaaguccuugauaaugg

SEQ ID NO: 353159 - RNA, 19 nt, Homo sapiens
  misc_RNA (1)...(19): siRNA sense strand
gaacugaagauaagaggaa

SEQ ID NO: 353160 - RNA, 19 nt, Homo sapiens
  misc_RNA (1)...(19): siRNA sense strand
gaagaaggagaaauuagaa

SEQ ID NO: 353161 - RNA, 19 nt, Homo sapiens
  misc_RNA (1)...(19): siRNA sense strand
gaagggagaaauuaucauu

SEQ ID NO: 353162 - RNA, 19 nt, Homo sapiens
  misc_RNA (1)...(19): siRNA sense strand
cuaaagaucccucaucauu

SEQ ID NO: 353163 - RNA, 19 nt, Homo sapiens
  misc_RNA (1)...(19): siRNA sense strand
ggaaacagacuuaacuaau

SEQ ID NO: 353164 - RNA, 19 nt, Homo sapiens
  misc_RNA (1)...(19): siRNA sense strand
caaauugcaucaaguaugg

SEQ ID NO: 353165 - RNA, 19 nt, Homo sapiens
  misc_RNA (1)...(19): siRNA sense strand
gcaacuaccagauaugaaa

SEQ ID NO: 353166 - RNA, 19 nt, Homo sapiens
  misc_RNA (1)...(19): siRNA sense strand
gaaauacagacacagaauu

SEQ ID NO: 353167 - RNA, 19 nt, Homo sapiens
  misc_RNA (1)...(19): siRNA sense strand
caaaucaggucucagaaag

SEQ ID NO: 353168 - RNA, 19 nt, Homo sapiens
  misc_RNA (1)...(19): siRNA sense strand
guaaacagaaugcacagua

SEQ ID NO: 353169 - RNA, 19 nt, Homo sapiens
  misc_RNA (1)...(19): siRNA sense strand
uaacugauauucccaaguc

SEQ ID NO: 353170 - RNA, 19 nt, Homo sapiens
  misc_RNA (1)...(19): siRNA sense strand
ugaaggagcagauaauaaa

SEQ ID NO: 353171 - RNA, 19 nt, Homo sapiens
  misc_RNA (1)...(19): siRNA sense strand
gacacagaauuucagcuua

SEQ ID NO: 353172 - RNA, 19 nt, Homo sapiens
  misc_RNA (1)...(19): siRNA sense strand
gaaaagagggccaucauuu

SEQ ID NO: 353173 - RNA, 19 nt, Homo sapiens
  misc_RNA (1)...(19): siRNA sense strand
gcacauguuacgaaugaua

SEQ ID NO: 353174 - RNA, 19 nt, Homo sapiens
  misc_RNA (1)...(19): siRNA sense strand
gaaauuagaagugauagug

SEQ ID NO: 353175 - RNA, 19 nt, Homo sapiens
  misc_RNA (1)...(19): siRNA sense strand
ggcagcagcuccuguggua

SEQ ID NO: 353176 - RNA, 19 nt, Homo sapiens
  misc_RNA (1)...(19): siRNA sense strand
gaaacagaaugaaccaaag

SEQ ID NO: 353177 - RNA, 19 nt, Homo sapiens
  misc_RNA (1)...(19): siRNA sense strand
aaggaguacuucacauuua

SEQ ID NO: 353178 - RNA, 19 nt, Homo sapiens
  misc_RNA (1)...(19): siRNA sense strand
ugaaaccacugaaagcauu

SEQ ID NO: 353179 - RNA, 19 nt, Homo sapiens
  misc_RNA (1)...(19): siRNA sense strand
uaaagagcuugcaaugaaa

SEQ ID NO: 353180 - RNA, 19 nt, Homo sapiens
  misc_RNA (1)...(19): siRNA sense strand
ggaaauaaaccgcaaggau

SEQ ID NO: 353181 - RNA, 19 nt, Homo sapiens
  misc_RNA (1)...(19): siRNA sense strand
uaaagaugcuucagauaag

SEQ ID NO: 353182 - RNA, 19 nt, Homo sapiens
  misc_RNA (1)...(19): siRNA sense strand
gcacaaaugggugaaauau

SEQ ID NO: 353183 - RNA, 19 nt, Homo sapiens
  misc_RNA (1)...(19): siRNA sense strand
gagaauugcugaaagaaaa

SEQ ID NO: 353184 - RNA, 19 nt, Homo sapiens
  misc_RNA (1)...(19): siRNA sense strand
ggaaaccaagucaacguua

SEQ ID NO: 353185 - RNA, 19 nt, Homo sapiens
  misc_RNA (1)...(19): siRNA sense strand
agaagaaucucugugauau

SEQ ID NO: 353186 - RNA, 19 nt, Homo sapiens
  misc_RNA (1)...(19): siRNA sense strand
gacuaaagaucccucauca

SEQ ID NO: 353187 - RNA, 19 nt, Homo sapiens
  misc_RNA (1)...(19): siRNA sense strand
agaagacccuguucauuau

SEQ ID NO: 353188 - RNA, 19 nt, Homo sapiens
  misc_RNA (1)...(19): siRNA sense strand
caacagagaauugcugaaa

SEQ ID NO: 353189 - RNA, 19 nt, Homo sapiens
  misc_RNA (1)...(19): siRNA sense strand
ggacaacuccaacagagaa

SEQ ID NO: 353190 - RNA, 19 nt, Homo sapiens
  misc_RNA (1)...(19): siRNA sense strand
caacaggaaugaaacaaac

SEQ ID NO: 353191 - RNA, 19 nt, Homo sapiens
  misc_RNA (1)...(19): siRNA sense strand
aaagagggccaucauuuaa

SEQ ID NO: 353192 - RNA, 19 nt, Homo sapiens
  misc_RNA (1)...(19): siRNA sense strand
ggaggcaauuuaaaucaga

SEQ ID NO: 353193 - RNA, 19 nt, Homo sapiens
  misc_RNA (1)...(19): siRNA sense strand
auacguagaucuaacgaaa

SEQ ID NO: 353194 - RNA, 19 nt, Homo sapiens
  misc_RNA (1)...(19): siRNA sense strand
uuaaaucuguggaggaauu

SEQ ID NO: 353195 - RNA, 19 nt, Homo sapiens
  misc_RNA (1)...(19): siRNA sense strand
ugaaacaucuaaaccacaa

SEQ ID NO: 353196 - RNA, 19 nt, Homo sapiens
  misc_RNA (1)...(19): siRNA sense strand
caaguuccaguguauaaua

SEQ ID NO: 353197 - RNA, 19 nt, Homo sapiens
  misc_RNA (1)...(19): siRNA sense strand
caaacucaguauaucauga

SEQ ID NO: 353198 - RNA, 19 nt, Homo sapiens
  misc_RNA (1)...(19): siRNA sense strand
gaaaaccagucucuuaaga

SEQ ID NO: 353199 - RNA, 19 nt, Homo sapiens
  misc_RNA (1)...(19): siRNA sense strand
gaaagauuccagcagcuaa

SEQ ID NO: 353200 - RNA, 19 nt, Homo sapiens
  misc_RNA (1)...(19): siRNA sense strand
gugaugaaguggcugauga

SEQ ID NO: 353201 - RNA, 19 nt, Homo sapiens
  misc_RNA (1)...(19): siRNA sense strand
ugaagugucuacuaaccua

SEQ ID NO: 353202 - RNA, 19 nt, Homo sapiens
  misc_RNA (1)...(19): siRNA sense strand
gaauccaucagaccaauaa

SEQ ID NO: 353203 - RNA, 19 nt, Homo sapiens
  misc_RNA (1)...(19): siRNA sense strand
cuauaaaggugaacgcauu

SEQ ID NO: 353204 - RNA, 19 nt, Homo sapiens
  misc_RNA (1)...(19): siRNA sense strand
ugucugaguuuccacauuu

SEQ ID NO: 353205 - RNA, 19 nt, Homo sapiens
  misc_RNA (1)...(19): siRNA sense strand
gaagaauauuucagcacuu

SEQ ID NO: 353206 - RNA, 19 nt, Homo sapiens
  misc_RNA (1)...(19): siRNA sense strand
ccaagaaaccuacccaaga

SEQ ID NO: 353207 - RNA, 19 nt, Homo sapiens
  misc_RNA (1)...(19): siRNA sense strand
cagcagcacuugccacuuc

SEQ ID NO: 353208 - RNA, 19 nt, Homo sapiens
  misc_RNA (1)...(19): siRNA sense strand
cagaagaggucuacaaaca

SEQ ID NO: 353209 - RNA, 19 nt, Homo sapiens
  misc_RNA (1)...(19): siRNA sense strand
gauuacaucugguauucua

SEQ ID NO: 353210 - RNA, 19 nt, Homo sapiens
  misc_RNA (1)...(19): siRNA sense strand
gcacucaaaugggaagaaa

SEQ ID NO: 353211 - RNA, 19 nt, Homo sapiens
  misc_RNA (1)...(19): siRNA sense strand
gaagaaaggaaaugucuca

SEQ ID NO: 353212 - RNA, 19 nt, Homo sapiens
  misc_RNA (1)...(19): siRNA sense strand
gcugugaccuccuucagaa

SEQ ID NO: 353213 - RNA, 19 nt, Homo sapiens
  misc_RNA (1)...(19): siRNA sense strand
gaagaggucuacaaacacu

SEQ ID NO: 353214 - RNA, 19 nt, Homo sapiens
  misc_RNA (1)...(19): siRNA sense strand
cuaccagccugauauauug

SEQ ID NO: 353215 - RNA, 19 nt, Homo sapiens
  misc_RNA (1)...(19): siRNA sense strand
ugacagccaugacauugaa

SEQ ID NO: 353216 - RNA, 19 nt, Homo sapiens
  misc_RNA (1)...(19): siRNA sense strand
ggaaucugauggacuuuca

SEQ ID NO: 353217 - RNA, 19 nt, Homo sapiens
  misc_RNA (1)...(19): siRNA sense strand
gguacaagcagacucuaua

SEQ ID NO: 353218 - RNA, 19 nt, Homo sapiens
  misc_RNA (1)...(19): siRNA sense strand
ugaggaaucugauggacuu

SEQ ID NO: 353219 - RNA, 19 nt, Homo sapiens
  misc_RNA (1)...(19): siRNA sense strand
caacagaagaggucuacaa

SEQ ID NO: 353220 - RNA, 19 nt, Homo sapiens
  misc_RNA (1)...(19): siRNA sense strand
gugugugacuucagcuuua

SEQ ID NO: 353221 - RNA, 19 nt, Homo sapiens
  misc_RNA (1)...(19): siRNA sense strand
caaaugggaagaaaggaaa

SEQ ID NO: 353222 - RNA, 19 nt, Homo sapiens
  misc_RNA (1)...(19): siRNA sense strand
ccaccugucucuagugugu

SEQ ID NO: 353223 - RNA, 19 nt, Homo sapiens
  misc_RNA (1)...(19): siRNA sense strand
gaggacagauugcccuagu

SEQ ID NO: 353224 - RNA, 19 nt, Homo sapiens
  misc_RNA (1)...(19): siRNA sense strand
gucaacagugccaauauua

SEQ ID NO: 353225 - RNA, 19 nt, Homo sapiens
  misc_RNA (1)...(19): siRNA sense strand
acacaacaauggaccagau

SEQ ID NO: 353226 - RNA, 19 nt, Homo sapiens
  misc_RNA (1)...(19): siRNA sense strand
caucugguauucuaaacau

SEQ ID NO: 353227 - RNA, 19 nt, Homo sapiens
  misc_RNA (1)...(19): siRNA sense strand
ggagucaggccgacaguuc

SEQ ID NO: 353228 - RNA, 19 nt, Homo sapiens
  misc_RNA (1)...(19): siRNA sense strand
agucaacagugccaauauu

SEQ ID NO: 353229 - RNA, 19 nt, Homo sapiens
  misc_RNA (1)...(19): siRNA sense strand
gaccaccugucucuagugu

SEQ ID NO: 353230 - RNA, 19 nt, Homo sapiens
  misc_RNA (1)...(19): siRNA sense strand
gguuaccuuccuucaauua

SEQ ID NO: 353231 - RNA, 19 nt, Homo sapiens
  misc_RNA (1)...(19): siRNA sense strand
ggacagauugcccuaguac

SEQ ID NO: 353232 - RNA, 19 nt, Homo sapiens
  misc_RNA (1)...(19): siRNA sense strand
gauucaagcuagucaacag

SEQ ID NO: 353233 - RNA, 19 nt, Homo sapiens
  misc_RNA (1)...(19): siRNA sense strand
uggauuacaucugguauuc

SEQ ID NO: 353234 - RNA, 19 nt, Homo sapiens
  misc_RNA (1)...(19): siRNA sense strand
gcccauugauccuaaagag

SEQ ID NO: 353235 - RNA, 19 nt, Homo sapiens
  misc_RNA (1)...(19): siRNA sense strand
agaugguugugccuuauuu

SEQ ID NO: 353236 - RNA, 19 nt, Homo sapiens
  misc_RNA (1)...(19): siRNA sense strand
ccagaugguugugccuuau

SEQ ID NO: 353237 - RNA, 19 nt, Homo sapiens
  misc_RNA (1)...(19): siRNA sense strand
ccuaccagccugauauauu

SEQ ID NO: 353238 - RNA, 19 nt, Homo sapiens
  misc_RNA (1)...(19): siRNA sense strand
guacaagcagacucuauag

SEQ ID NO: 353239 - RNA, 19 nt, Homo sapiens
  misc_RNA (1)...(19): siRNA sense strand
caacagugccaauauuagg

SEQ ID NO: 353240 - RNA, 19 nt, Homo sapiens
  misc_RNA (1)...(19): siRNA sense strand
ucaguagacuaggcuauca

SEQ ID NO: 353241 - RNA, 19 nt, Homo sapiens
  misc_RNA (1)...(19): siRNA sense strand
gagccaagauuccccuuau

SEQ ID NO: 353242 - RNA, 19 nt, Homo sapiens
  misc_RNA (1)...(19): siRNA sense strand
acaagcagacucuauagug

SEQ ID NO: 353243 - RNA, 19 nt, Homo sapiens
  misc_RNA (1)...(19): siRNA sense strand
ucaaaugggaagaaaggaa

SEQ ID NO: 353244 - RNA, 19 nt, Homo sapiens
  misc_RNA (1)...(19): siRNA sense strand
cacagacccuggagugcaa

SEQ ID NO: 353245 - RNA, 19 nt, Homo sapiens
  misc_RNA (1)...(19): siRNA sense strand
gggaagaaaggaaaugucu

SEQ ID NO: 353246 - RNA, 19 nt, Homo sapiens
  misc_RNA (1)...(19): siRNA sense strand
gaacauccucgcccaagcu

SEQ ID NO: 353247 - RNA, 19 nt, Homo sapiens
  misc_RNA (1)...(19): siRNA sense strand
cccaaacccuggucaccuu

SEQ ID NO: 353248 - RNA, 19 nt, Homo sapiens
  misc_RNA (1)...(19): siRNA sense strand
ggagcccauugauccuaaa

SEQ ID NO: 353249 - RNA, 19 nt, Homo sapiens
  misc_RNA (1)...(19): siRNA sense strand
ucaggguuaugcaauggaa

SEQ ID NO: 353250 - RNA, 19 nt, Homo sapiens
  misc_RNA (1)...(19): siRNA sense strand
gagcaucuggagcccauug

SEQ ID NO: 353251 - RNA, 19 nt, Homo sapiens
  misc_RNA (1)...(19): siRNA sense strand
gaaaugucucauccuggaa

SEQ ID NO: 353252 - RNA, 19 nt, Homo sapiens
  misc_RNA (1)...(19): siRNA sense strand
gagaaggcaaagacaacuu

SEQ ID NO: 353253 - RNA, 19 nt, Homo sapiens
  misc_RNA (1)...(19): siRNA sense strand
aaucugauggacuuucaua

SEQ ID NO: 353254 - RNA, 19 nt, Homo sapiens
  misc_RNA (1)...(19): siRNA sense strand
gauguagaacacaacaaug

SEQ ID NO: 353255 - RNA, 19 nt, Homo sapiens
  misc_RNA (1)...(19): siRNA sense strand
ucgaucugcucacugaaga

SEQ ID NO: 353256 - RNA, 19 nt, Homo sapiens
  misc_RNA (1)...(19): siRNA sense strand
ggcacacccuggauuacau

SEQ ID NO: 353257 - RNA, 19 nt, Homo sapiens
  misc_RNA (1)...(19): siRNA sense strand
cuaucaggguuaugcaaug

SEQ ID NO: 353258 - RNA, 19 nt, Homo sapiens
  misc_RNA (1)...(19): siRNA sense strand
gcucacugaagaacagauu

SEQ ID NO: 353259 - RNA, 19 nt, Homo sapiens
  misc_RNA (1)...(19): siRNA sense strand
caaugcagagccaacagaa

SEQ ID NO: 353260 - RNA, 19 nt, Homo sapiens
  misc_RNA (1)...(19): siRNA sense strand
ccaaccagguggccauugc

SEQ ID NO: 353261 - RNA, 19 nt, Homo sapiens
  misc_RNA (1)...(19): siRNA sense strand
ggccuaccagccugauaua

SEQ ID NO: 353262 - RNA, 19 nt, Homo sapiens
  misc_RNA (1)...(19): siRNA sense strand
uggagcccauugauccuaa

SEQ ID NO: 353263 - RNA, 19 nt, Homo sapiens
  misc_RNA (1)...(19): siRNA sense strand
gcaucgcuguuacccaucu

SEQ ID NO: 353264 - RNA, 19 nt, Homo sapiens
  misc_RNA (1)...(19): siRNA sense strand
cagcuuuacugaggaaucu

SEQ ID NO: 353265 - RNA, 19 nt, Homo sapiens
  misc_RNA (1)...(19): siRNA sense strand
uuaccuuccuucaauuauc

SEQ ID NO: 353266 - RNA, 19 nt, Homo sapiens
  misc_RNA (1)...(19): siRNA sense strand
aaggucagcucucgaucug

SEQ ID NO: 353267 - RNA, 19 nt, Homo sapiens
  misc_RNA (1)...(19): siRNA sense strand
aacagaagaggucuacaaa

SEQ ID NO: 353268 - RNA, 19 nt, Homo sapiens
  misc_RNA (1)...(19): siRNA sense strand
ccuaguacccacccaccua

SEQ ID NO: 353269 - RNA, 19 nt, Homo sapiens
  misc_RNA (1)...(19): siRNA sense strand
ccuccagccucaaccugaa

SEQ ID NO: 353270 - RNA, 19 nt, Homo sapiens
  misc_RNA (1)...(19): siRNA sense strand
cuggucaccuugucuagau

SEQ ID NO: 353271 - RNA, 19 nt, Homo sapiens
  misc_RNA (1)...(19): siRNA sense strand
cccagcacccagaguauuu

SEQ ID NO: 353272 - RNA, 19 nt, Homo sapiens
  misc_RNA (1)...(19): siRNA sense strand
cuagucaacagugccaaua

SEQ ID NO: 353273 - RNA, 19 nt, Homo sapiens
  misc_RNA (1)...(19): siRNA sense strand
aagaaauccuggccuacca

SEQ ID NO: 353274 - RNA, 19 nt, Homo sapiens
  misc_RNA (1)...(19): siRNA sense strand
agaggucuacaaacacuuu

SEQ ID NO: 353275 - RNA, 19 nt, Homo sapiens
  misc_RNA (1)...(19): siRNA sense strand
ccagagggauuuuguggau

SEQ ID NO: 353276 - RNA, 19 nt, Homo sapiens
  misc_RNA (1)...(19): siRNA sense strand
augcagagccaacagaaga

SEQ ID NO: 353277 - RNA, 19 nt, Homo sapiens
  misc_RNA (1)...(19): siRNA sense strand
ccacuccucaguagacuag

SEQ ID NO: 353278 - RNA, 19 nt, Homo sapiens
  misc_RNA (1)...(19): siRNA sense strand
aggacagauugcccuagua

SEQ ID NO: 353279 - RNA, 19 nt, Homo sapiens
  misc_RNA (1)...(19): siRNA sense strand
uaucaggguuaugcaaugg

SEQ ID NO: 353280 - RNA, 19 nt, Homo sapiens
  misc_RNA (1)...(19): siRNA sense strand
gcacacccuggauuacauc

SEQ ID NO: 353281 - RNA, 19 nt, Homo sapiens
  misc_RNA (1)...(19): siRNA sense strand
agaaaggaaaugucucauc

SEQ ID NO: 353282 - RNA, 19 nt, Homo sapiens
  misc_RNA (1)...(19): siRNA sense strand
ucaaugcagagccaacaga

SEQ ID NO: 353283 - RNA, 19 nt, Homo sapiens
  misc_RNA (1)...(19): siRNA sense strand
ucaacagugccaauauuag

SEQ ID NO: 353284 - RNA, 19 nt, Homo sapiens
  misc_RNA (1)...(19): siRNA sense strand
ccucccagcacccagagua

SEQ ID NO: 353285 - RNA, 19 nt, Homo sapiens
  misc_RNA (1)...(19): siRNA sense strand
agauguagaacacaacaau

SEQ ID NO: 353286 - RNA, 19 nt, Homo sapiens
  misc_RNA (1)...(19): siRNA sense strand
ggagaaggcaaagacaacu

SEQ ID NO: 353287 - RNA, 19 nt, Homo sapiens
  misc_RNA (1)...(19): siRNA sense strand
cacccaaggagccaagauu

SEQ ID NO: 353288 - RNA, 19 nt, Homo sapiens
  misc_RNA (1)...(19): siRNA sense strand
ucacugagcugccggacua

SEQ ID NO: 353289 - RNA, 19 nt, Homo sapiens
  misc_RNA (1)...(19): siRNA sense strand
acaacaagaucuccuuuaa

SEQ ID NO: 353290 - RNA, 19 nt, Homo sapiens
  misc_RNA (1)...(19): siRNA sense strand
ccaaggcucuccuccauca

SEQ ID NO: 353291 - RNA, 19 nt, Homo sapiens
  misc_RNA (1)...(19): siRNA sense strand
gaacgauauugaacagcuu

SEQ ID NO: 353292 - RNA, 19 nt, Homo sapiens
  misc_RNA (1)...(19): siRNA sense strand
ggacaaucaguauguggua

SEQ ID NO: 353293 - RNA, 19 nt, Homo sapiens
  misc_RNA (1)...(19): siRNA sense strand
cgagauaguugcccucaag

SEQ ID NO: 353294 - RNA, 19 nt, Homo sapiens
  misc_RNA (1)...(19): siRNA sense strand
caagaacgauauugaacag

SEQ ID NO: 353295 - RNA, 19 nt, Homo sapiens
  misc_RNA (1)...(19): siRNA sense strand
gcaagaacgauauugaaca

SEQ ID NO: 353296 - RNA, 19 nt, Homo sapiens
  misc_RNA (1)...(19): siRNA sense strand
ucaagaagguggcccuaag

SEQ ID NO: 353297 - RNA, 19 nt, Homo sapiens
  misc_RNA (1)...(19): siRNA sense strand
uggccuggcucgagucuuu

SEQ ID NO: 353298 - RNA, 19 nt, Homo sapiens
  misc_RNA (1)...(19): siRNA sense strand
gcuuugugcuggccuuuga

SEQ ID NO: 353299 - RNA, 19 nt, Homo sapiens
  misc_RNA (1)...(19): siRNA sense strand
gggcaagaacgauauugaa

SEQ ID NO: 353300 - RNA, 19 nt, Homo sapiens
  misc_RNA (1)...(19): siRNA sense strand
caucugagcugccgauucc

SEQ ID NO: 353301 - RNA, 19 nt, Homo sapiens
  misc_RNA (1)...(19): siRNA sense strand
aggcacaggucaagagcua

SEQ ID NO: 353302 - RNA, 19 nt, Homo sapiens
  misc_RNA (1)...(19): siRNA sense strand
uugaacagcuuugcuaugu

SEQ ID NO: 353303 - RNA, 19 nt, Homo sapiens
  misc_RNA (1)...(19): siRNA sense strand
ggaggacaaucaguaugug

SEQ ID NO: 353304 - RNA, 19 nt, Homo sapiens
  misc_RNA (1)...(19): siRNA sense strand
gauaguugcccucaagaag

SEQ ID NO: 353305 - RNA, 19 nt, Homo sapiens
  misc_RNA (1)...(19): siRNA sense strand
uuaaggcucugcaggagau

SEQ ID NO: 353306 - RNA, 19 nt, Homo sapiens
  misc_RNA (1)...(19): siRNA sense strand
caacaagaucuccuuuaag

SEQ ID NO: 353307 - RNA, 19 nt, Homo sapiens
  misc_RNA (1)...(19): siRNA sense strand
gcuaugugcuucgcaucuu

SEQ ID NO: 353308 - RNA, 19 nt, Homo sapiens
  misc_RNA (1)...(19): siRNA sense strand
gauggaggacaaucaguau

SEQ ID NO: 353309 - RNA, 19 nt, Homo sapiens
  misc_RNA (1)...(19): siRNA sense strand
gcagccgccucuacacaca

SEQ ID NO: 353310 - RNA, 19 nt, Homo sapiens
  misc_RNA (1)...(19): siRNA sense strand
gaggacggcuucccuaacc

SEQ ID NO: 353311 - RNA, 19 nt, Homo sapiens
  misc_RNA (1)...(19): siRNA sense strand
uacaacaagaucuccuuua

SEQ ID NO: 353312 - RNA, 19 nt, Homo sapiens
  misc_RNA (1)...(19): siRNA sense strand
ugcaggagauggaggacaa

SEQ ID NO: 353313 - RNA, 19 nt, Homo sapiens
  misc_RNA (1)...(19): siRNA sense strand
agauggaggacaaucagua

SEQ ID NO: 353314 - RNA, 19 nt, Homo sapiens
  misc_RNA (1)...(19): siRNA sense strand
cuacaacaagaucuccuuu

SEQ ID NO: 353315 - RNA, 19 nt, Homo sapiens
  misc_RNA (1)...(19): siRNA sense strand
gagcugauucggcccuuca

SEQ ID NO: 353316 - RNA, 19 nt, Homo sapiens
  misc_RNA (1)...(19): siRNA sense strand
caaucaguaugugguacaa

SEQ ID NO: 353317 - RNA, 19 nt, Homo sapiens
  misc_RNA (1)...(19): siRNA sense strand
caagagcuaccugcagaug

SEQ ID NO: 353318 - RNA, 19 nt, Homo sapiens
  misc_RNA (1)...(19): siRNA sense strand
gugcuggccuuugaguuca

SEQ ID NO: 353319 - RNA, 19 nt, Homo sapiens
  misc_RNA (1)...(19): siRNA sense strand
ggagauggaggacaaucag

SEQ ID NO: 353320 - RNA, 19 nt, Homo sapiens
  misc_RNA (1)...(19): siRNA sense strand
ugaacagcuuugcuaugug

SEQ ID NO: 353321 - RNA, 19 nt, Homo sapiens
  misc_RNA (1)...(19): siRNA sense strand
gagauaguugcccucaaga

SEQ ID NO: 353322 - RNA, 19 nt, Homo sapiens
  misc_RNA (1)...(19): siRNA sense strand
cuaugugcuucgcaucuug

SEQ ID NO: 353323 - RNA, 19 nt, Homo sapiens
  misc_RNA (1)...(19): siRNA sense strand
cuugaggagucgcuguuga

SEQ ID NO: 353324 - RNA, 19 nt, Homo sapiens
  misc_RNA (1)...(19): siRNA sense strand
ggugcugccugacgucucu

SEQ ID NO: 353325 - RNA, 19 nt, Homo sapiens
  misc_RNA (1)...(19): siRNA sense strand
gcgagauaguugcccucaa

SEQ ID NO: 353326 - RNA, 19 nt, Homo sapiens
  misc_RNA (1)...(19): siRNA sense strand
gcucaagauagcggacuuu

SEQ ID NO: 353327 - RNA, 19 nt, Homo sapiens
  misc_RNA (1)...(19): siRNA sense strand
uaguugcccucaagaaggu

SEQ ID NO: 353328 - RNA, 19 nt, Homo sapiens
  misc_RNA (1)...(19): siRNA sense strand
aggcucuccuccaucagua

SEQ ID NO: 353329 - RNA, 19 nt, Homo sapiens
  misc_RNA (1)...(19): siRNA sense strand
ggcaagaacgauauugaac

SEQ ID NO: 353330 - RNA, 19 nt, Homo sapiens
  misc_RNA (1)...(19): siRNA sense strand
caagaagguggcccuaagg

SEQ ID NO: 353331 - RNA, 19 nt, Homo sapiens
  misc_RNA (1)...(19): siRNA sense strand
uggaucugcugggucaauu

SEQ ID NO: 353332 - RNA, 19 nt, Homo sapiens
  misc_RNA (1)...(19): siRNA sense strand
guacaucgggaccugaaac

SEQ ID NO: 353333 - RNA, 19 nt, Homo sapiens
  misc_RNA (1)...(19): siRNA sense strand
ggaggacggcuucccuaac

SEQ ID NO: 353334 - RNA, 19 nt, Homo sapiens
  misc_RNA (1)...(19): siRNA sense strand
auauugaacagcuuugcua

SEQ ID NO: 353335 - RNA, 19 nt, Homo sapiens
  misc_RNA (1)...(19): siRNA sense strand
ucacugagcugccggacua

SEQ ID NO: 353336 - RNA, 19 nt, Homo sapiens
  misc_RNA (1)...(19): siRNA sense strand
acaacaagaucuccuuuaa

SEQ ID NO: 353337 - RNA, 19 nt, Homo sapiens
  misc_RNA (1)...(19): siRNA sense strand
ccaaggcucuccuccauca

SEQ ID NO: 353338 - RNA, 19 nt, Homo sapiens
  misc_RNA (1)...(19): siRNA sense strand
gaacgauauugaacagcuu

SEQ ID NO: 353339 - RNA, 19 nt, Homo sapiens
  misc_RNA (1)...(19): siRNA sense strand
ggacaaucaguauguggua

SEQ ID NO: 353340 - RNA, 19 nt, Homo sapiens
  misc_RNA (1)...(19): siRNA sense strand
cgagauaguugcccucaag

SEQ ID NO: 353341 - RNA, 19 nt, Homo sapiens
  misc_RNA (1)...(19): siRNA sense strand
caagaacgauauugaacag

SEQ ID NO: 353342 - RNA, 19 nt, Homo sapiens
  misc_RNA (1)...(19): siRNA sense strand
gcaagaacgauauugaaca

SEQ ID NO: 353343 - RNA, 19 nt, Homo sapiens
  misc_RNA (1)...(19): siRNA sense strand
ucaagaagguggcccuaag

SEQ ID NO: 353344 - RNA, 19 nt, Homo sapiens
  misc_RNA (1)...(19): siRNA sense strand
uggccuggcucgagucuuu

SEQ ID NO: 353345 - RNA, 19 nt, Homo sapiens
  misc_RNA (1)...(19): siRNA sense strand
gcuuugugcuggccuuuga

SEQ ID NO: 353346 - RNA, 19 nt, Homo sapiens
  misc_RNA (1)...(19): siRNA sense strand
gggcaagaacgauauugaa

SEQ ID NO: 353347 - RNA, 19 nt, Homo sapiens
  misc_RNA (1)...(19): siRNA sense strand
caucugagcugccgauucc

SEQ ID NO: 353348 - RNA, 19 nt, Homo sapiens
  misc_RNA (1)...(19): siRNA sense strand
aggcacaggucaagagcua

SEQ ID NO: 353349 - RNA, 19 nt, Homo sapiens
  misc_RNA (1)...(19): siRNA sense strand
uugaacagcuuugcuaugu

SEQ ID NO: 353350 - RNA, 19 nt, Homo sapiens
  misc_RNA (1)...(19): siRNA sense strand
ggaggacaaucaguaugug

SEQ ID NO: 353351 - RNA, 19 nt, Homo sapiens
  misc_RNA (1)...(19): siRNA sense strand
gauaguugcccucaagaag

SEQ ID NO: 353352 - RNA, 19 nt, Homo sapiens
  misc_RNA (1)...(19): siRNA sense strand
uuaaggcucugcaggagau

SEQ ID NO: 353353 - RNA, 19 nt, Homo sapiens
  misc_RNA (1)...(19): siRNA sense strand
caacaagaucuccuuuaag

SEQ ID NO: 353354 - RNA, 19 nt, Homo sapiens
  misc_RNA (1)...(19): siRNA sense strand
gcuaugugcuucgcaucuu

SEQ ID NO: 353355 - RNA, 19 nt, Homo sapiens
  misc_RNA (1)...(19): siRNA sense strand
gauggaggacaaucaguau

SEQ ID NO: 353356 - RNA, 19 nt, Homo sapiens
  misc_RNA (1)...(19): siRNA sense strand
gcagccgccucuacacaca

SEQ ID NO: 353357 - RNA, 19 nt, Homo sapiens
  misc_RNA (1)...(19): siRNA sense strand
gaggacggcuucccuaacc

SEQ ID NO: 353358 - RNA, 19 nt, Homo sapiens
  misc_RNA (1)...(19): siRNA sense strand
uacaacaagaucuccuuua

SEQ ID NO: 353359 - RNA, 19 nt, Homo sapiens
  misc_RNA (1)...(19): siRNA sense strand
ugcaggagauggaggacaa

SEQ ID NO: 353360 - RNA, 19 nt, Homo sapiens
  misc_RNA (1)...(19): siRNA sense strand
agauggaggacaaucagua

SEQ ID NO: 353361 - RNA, 19 nt, Homo sapiens
  misc_RNA (1)...(19): siRNA sense strand
cuacaacaagaucuccuuu

SEQ ID NO: 353362 - RNA, 19 nt, Homo sapiens
  misc_RNA (1)...(19): siRNA sense strand
gagcugauucggcccuuca

SEQ ID NO: 353363 - RNA, 19 nt, Homo sapiens
  misc_RNA (1)...(19): siRNA sense strand
caaucaguaugugguacaa

SEQ ID NO: 353364 - RNA, 19 nt, Homo sapiens
  misc_RNA (1)...(19): siRNA sense strand
caagagcuaccugcagaug

SEQ ID NO: 353365 - RNA, 19 nt, Homo sapiens
  misc_RNA (1)...(19): siRNA sense strand
gugcuggccuuugaguuca

SEQ ID NO: 353366 - RNA, 19 nt, Homo sapiens
  misc_RNA (1)...(19): siRNA sense strand
ggagauggaggacaaucag

SEQ ID NO: 353367 - RNA, 19 nt, Homo sapiens
  misc_RNA (1)...(19): siRNA sense strand
ugaacagcuuugcuaugug

SEQ ID NO: 353368 - RNA, 19 nt, Homo sapiens
  misc_RNA (1)...(19): siRNA sense strand
gagauaguugcccucaaga

SEQ ID NO: 353369 - RNA, 19 nt, Homo sapiens
  misc_RNA (1)...(19): siRNA sense strand
cuaugugcuucgcaucuug

SEQ ID NO: 353370 - RNA, 19 nt, Homo sapiens
  misc_RNA (1)...(19): siRNA sense strand
cuugaggagucgcuguuga

SEQ ID NO: 353371 - RNA, 19 nt, Homo sapiens
  misc_RNA (1)...(19): siRNA sense strand
ggugcugccugacgucucu

SEQ ID NO: 353372 - RNA, 19 nt, Homo sapiens
  misc_RNA (1)...(19): siRNA sense strand
gcgagauaguugcccucaa

SEQ ID NO: 353373 - RNA, 19 nt, Homo sapiens
  misc_RNA (1)...(19): siRNA sense strand
gcucaagauagcggacuuu

SEQ ID NO: 353374 - RNA, 19 nt, Homo sapiens
  misc_RNA (1)...(19): siRNA sense strand
uaguugcccucaagaaggu

SEQ ID NO: 353375 - RNA, 19 nt, Homo sapiens
  misc_RNA (1)...(19): siRNA sense strand
aggcucuccuccaucagua

SEQ ID NO: 353376 - RNA, 19 nt, Homo sapiens
  misc_RNA (1)...(19): siRNA sense strand
ggcaagaacgauauugaac

SEQ ID NO: 353377 - RNA, 19 nt, Homo sapiens
  misc_RNA (1)...(19): siRNA sense strand
caagaagguggcccuaagg

SEQ ID NO: 353378 - RNA, 19 nt, Homo sapiens
  misc_RNA (1)...(19): siRNA sense strand
uggaucugcugggucaauu

SEQ ID NO: 353379 - RNA, 19 nt, Homo sapiens
  misc_RNA (1)...(19): siRNA sense strand
guacaucgggaccugaaac

SEQ ID NO: 353380 - RNA, 19 nt, Homo sapiens
  misc_RNA (1)...(19): siRNA sense strand
ggaggacggcuucccuaac

SEQ ID NO: 353381 - RNA, 19 nt, Homo sapiens
  misc_RNA (1)...(19): siRNA sense strand
auauugaacagcuuugcua

SEQ ID NO: 353382 - RNA, 19 nt, Homo sapiens
  misc_RNA (1)...(19): siRNA sense strand
agaaauguguggccuauaa

SEQ ID NO: 353383 - RNA, 19 nt, Homo sapiens
  misc_RNA (1)...(19): siRNA sense strand
gaccaaagcugagaagaga

SEQ ID NO: 353384 - RNA, 19 nt, Homo sapiens
  misc_RNA (1)...(19): siRNA sense strand
gaaaagggcuggcaucaug

SEQ ID NO: 353385 - RNA, 19 nt, Homo sapiens
  misc_RNA (1)...(19): siRNA sense strand
cagcaacgcuucugucaug

SEQ ID NO: 353386 - RNA, 19 nt, Homo sapiens
  misc_RNA (1)...(19): siRNA sense strand
gaaagagagugguccuagu

SEQ ID NO: 353387 - RNA, 19 nt, Homo sapiens
  misc_RNA (1)...(19): siRNA sense strand
gugcagaucucaucauugg

SEQ ID NO: 353388 - RNA, 19 nt, Homo sapiens
  misc_RNA (1)...(19): siRNA sense strand
ugugaaagcugaaacugaa

SEQ ID NO: 353389 - RNA, 19 nt, Homo sapiens
  misc_RNA (1)...(19): siRNA sense strand
caaaugaccaaacgaaaga

SEQ ID NO: 353390 - RNA, 19 nt, Homo sapiens
  misc_RNA (1)...(19): siRNA sense strand
gcagaucucaucauuggaa

SEQ ID NO: 353391 - RNA, 19 nt, Homo sapiens
  misc_RNA (1)...(19): siRNA sense strand
ggcaaugucuuggucauga

SEQ ID NO: 353392 - RNA, 19 nt, Homo sapiens
  misc_RNA (1)...(19): siRNA sense strand
gcagcuacccuuccucaga

SEQ ID NO: 353393 - RNA, 19 nt, Homo sapiens
  misc_RNA (1)...(19): siRNA sense strand
gagagugguccuagucaaa

SEQ ID NO: 353394 - RNA, 19 nt, Homo sapiens
  misc_RNA (1)...(19): siRNA sense strand
gaggaaagcagcccagaca

SEQ ID NO: 353395 - RNA, 19 nt, Homo sapiens
  misc_RNA (1)...(19): siRNA sense strand
ugaggaaacuuuugugaaa

SEQ ID NO: 353396 - RNA, 19 nt, Homo sapiens
  misc_RNA (1)...(19): siRNA sense strand
gucaugaucuccuucaaag

SEQ ID NO: 353397 - RNA, 19 nt, Homo sapiens
  misc_RNA (1)...(19): siRNA sense strand
ccaaagcugagaagagaaa

SEQ ID NO: 353398 - RNA, 19 nt, Homo sapiens
  misc_RNA (1)...(19): siRNA sense strand
gaaucuaccgggaaacaga

SEQ ID NO: 353399 - RNA, 19 nt, Homo sapiens
  misc_RNA (1)...(19): siRNA sense strand
ucagaaauguguggccuau

SEQ ID NO: 353400 - RNA, 19 nt, Homo sapiens
  misc_RNA (1)...(19): siRNA sense strand
gcuauugguugugcuaugu

SEQ ID NO: 353401 - RNA, 19 nt, Homo sapiens
  misc_RNA (1)...(19): siRNA sense strand
cagcuuagccugugcagau

SEQ ID NO: 353402 - RNA, 19 nt, Homo sapiens
  misc_RNA (1)...(19): siRNA sense strand
ggucaugaucuccuucaaa

SEQ ID NO: 353403 - RNA, 19 nt, Homo sapiens
  misc_RNA (1)...(19): siRNA sense strand
ucaggaagaccuuuaagau

SEQ ID NO: 353404 - RNA, 19 nt, Homo sapiens
  misc_RNA (1)...(19): siRNA sense strand
gcaacagaaccuucaggaa

SEQ ID NO: 353405 - RNA, 19 nt, Homo sapiens
  misc_RNA (1)...(19): siRNA sense strand
caucaaaugaccaaacgaa

SEQ ID NO: 353406 - RNA, 19 nt, Homo sapiens
  misc_RNA (1)...(19): siRNA sense strand
ugucgaaucuaccgggaaa

SEQ ID NO: 353407 - RNA, 19 nt, Homo sapiens
  misc_RNA (1)...(19): siRNA sense strand
gagucuggcuugugaccuu

SEQ ID NO: 353408 - RNA, 19 nt, Homo sapiens
  misc_RNA (1)...(19): siRNA sense strand
gcaaugucuuggucaugau

SEQ ID NO: 353409 - RNA, 19 nt, Homo sapiens
  misc_RNA (1)...(19): siRNA sense strand
gcucauagggcucuguuca

SEQ ID NO: 353410 - RNA, 19 nt, Homo sapiens
  misc_RNA (1)...(19): siRNA sense strand
acuauuaccugcucagcuu

SEQ ID NO: 353411 - RNA, 19 nt, Homo sapiens
  misc_RNA (1)...(19): siRNA sense strand
agagaaagccagcucauag

SEQ ID NO: 353412 - RNA, 19 nt, Homo sapiens
  misc_RNA (1)...(19): siRNA sense strand
caggaagaccuuuaagaug

SEQ ID NO: 353413 - RNA, 19 nt, Homo sapiens
  misc_RNA (1)...(19): siRNA sense strand
caacaauggcugucacaag

SEQ ID NO: 353414 - RNA, 19 nt, Homo sapiens
  misc_RNA (1)...(19): siRNA sense strand
guaaaucaccagccuuugg

SEQ ID NO: 353415 - RNA, 19 nt, Homo sapiens
  misc_RNA (1)...(19): siRNA sense strand
gacccaagagucagaaaug

SEQ ID NO: 353416 - RNA, 19 nt, Homo sapiens
  misc_RNA (1)...(19): siRNA sense strand
ggaagaccuuuaagaugcu

SEQ ID NO: 353417 - RNA, 19 nt, Homo sapiens
  misc_RNA (1)...(19): siRNA sense strand
gagugguccuagucaaaga

SEQ ID NO: 353418 - RNA, 19 nt, Homo sapiens
  misc_RNA (1)...(19): siRNA sense strand
ggaaccaggagaccaacaa

SEQ ID NO: 353419 - RNA, 19 nt, Homo sapiens
  misc_RNA (1)...(19): siRNA sense strand
caguaaaucaccagccuuu

SEQ ID NO: 353420 - RNA, 19 nt, Homo sapiens
  misc_RNA (1)...(19): siRNA sense strand
ccaagagucagaaaugugu

SEQ ID NO: 353421 - RNA, 19 nt, Homo sapiens
  misc_RNA (1)...(19): siRNA sense strand
ucaugaaccuucuggugau

SEQ ID NO: 353422 - RNA, 19 nt, Homo sapiens
  misc_RNA (1)...(19): siRNA sense strand
gaagagaaagccagcucau

SEQ ID NO: 353423 - RNA, 19 nt, Homo sapiens
  misc_RNA (1)...(19): siRNA sense strand
gggcuggcaucaugauugg

SEQ ID NO: 353424 - RNA, 19 nt, Homo sapiens
  misc_RNA (1)...(19): siRNA sense strand
uaaaucaccagccuuugga

SEQ ID NO: 353425 - RNA, 19 nt, Homo sapiens
  misc_RNA (1)...(19): siRNA sense strand
ucacauggaccccguauaa

SEQ ID NO: 353426 - RNA, 19 nt, Homo sapiens
  misc_RNA (1)...(19): siRNA sense strand
gaaccaggagaccaacaau

SEQ ID NO: 353427 - RNA, 19 nt, Homo sapiens
  misc_RNA (1)...(19): siRNA sense strand
cagagaagcgaaccaagga

SEQ ID NO: 353428 - RNA, 19 nt, Homo sapiens
  misc_RNA (1)...(19): siRNA sense strand
ucucaucauuggaaucuuc

SEQ ID NO: 353429 - RNA, 19 nt, Homo sapiens
  misc_RNA (1)...(19): siRNA sense strand
ugaagagacugaggaaacu

SEQ ID NO: 353430 - RNA, 19 nt, Homo sapiens
  misc_RNA (1)...(19): siRNA sense strand
ggccaagcguacuccgaaa

SEQ ID NO: 353431 - RNA, 19 nt, Homo sapiens
  misc_RNA (1)...(19): siRNA sense strand
caacgcuucugucaugaac

SEQ ID NO: 353432 - RNA, 19 nt, Homo sapiens
  misc_RNA (1)...(19): siRNA sense strand
ucgggagucuggcuuguga

SEQ ID NO: 353433 - RNA, 19 nt, Homo sapiens
  misc_RNA (1)...(19): siRNA sense strand
ucaaaugaccaaacgaaag

SEQ ID NO: 353434 - RNA, 19 nt, Homo sapiens
  misc_RNA (1)...(19): siRNA sense strand
ggaaagcagcccagacacu

SEQ ID NO: 353435 - RNA, 19 nt, Homo sapiens
  misc_RNA (1)...(19): siRNA sense strand
caugaucuccuucaaaguc

SEQ ID NO: 353436 - RNA, 19 nt, Homo sapiens
  misc_RNA (1)...(19): siRNA sense strand
caacagccagcucaagaca

SEQ ID NO: 353437 - RNA, 19 nt, Homo sapiens
  misc_RNA (1)...(19): siRNA sense strand
gcaacgcuucugucaugaa

SEQ ID NO: 353438 - RNA, 19 nt, Homo sapiens
  misc_RNA (1)...(19): siRNA sense strand
gccuauaaguuccgauugg

SEQ ID NO: 353439 - RNA, 19 nt, Homo sapiens
  misc_RNA (1)...(19): siRNA sense strand
aaacagagaagcgaaccaa

SEQ ID NO: 353440 - RNA, 19 nt, Homo sapiens
  misc_RNA (1)...(19): siRNA sense strand
acagccagcucaagacagu

SEQ ID NO: 353441 - RNA, 19 nt, Homo sapiens
  misc_RNA (1)...(19): siRNA sense strand
uaacaucaugguccugguu

SEQ ID NO: 353442 - RNA, 19 nt, Homo sapiens
  misc_RNA (1)...(19): siRNA sense strand
gaaauguguggccuauaag

SEQ ID NO: 353443 - RNA, 19 nt, Homo sapiens
  misc_RNA (1)...(19): siRNA sense strand
gagaaagccagcucauagg

SEQ ID NO: 353444 - RNA, 19 nt, Homo sapiens
  misc_RNA (1)...(19): siRNA sense strand
gaagagacugaggaaacuu

SEQ ID NO: 353445 - RNA, 19 nt, Homo sapiens
  misc_RNA (1)...(19): siRNA sense strand
gcucaagacaguuaacaac

SEQ ID NO: 353446 - RNA, 19 nt, Homo sapiens
  misc_RNA (1)...(19): siRNA sense strand
guuucuaccuucugugaca

SEQ ID NO: 353447 - RNA, 19 nt, Homo sapiens
  misc_RNA (1)...(19): siRNA sense strand
aagagaaagccagcucaua

SEQ ID NO: 353448 - RNA, 19 nt, Homo sapiens
  misc_RNA (1)...(19): siRNA sense strand
gaucucaucauuggaaucu

SEQ ID NO: 353449 - RNA, 19 nt, Homo sapiens
  misc_RNA (1)...(19): siRNA sense strand
gucaacagccagcucaaga

SEQ ID NO: 353450 - RNA, 19 nt, Homo sapiens
  misc_RNA (1)...(19): siRNA sense strand
uaccuucugugacaagugu

SEQ ID NO: 353451 - RNA, 19 nt, Homo sapiens
  misc_RNA (1)...(19): siRNA sense strand
gggaagucaucaccauugc

SEQ ID NO: 353452 - RNA, 19 nt, Homo sapiens
  misc_RNA (1)...(19): siRNA sense strand
guaagccugaucaccauug

SEQ ID NO: 353453 - RNA, 19 nt, Homo sapiens
  misc_RNA (1)...(19): siRNA sense strand
uggccuggcugaucuccuu

SEQ ID NO: 353454 - RNA, 19 nt, Homo sapiens
  misc_RNA (1)...(19): siRNA sense strand
ccucuacugucgaaucuac

SEQ ID NO: 353455 - RNA, 19 nt, Homo sapiens
  misc_RNA (1)...(19): siRNA sense strand
cugugcagaucucaucauu

SEQ ID NO: 353456 - RNA, 19 nt, Homo sapiens
  misc_RNA (1)...(19): siRNA sense strand
gcuaugcccucugcaacag

SEQ ID NO: 353457 - RNA, 19 nt, Homo sapiens
  misc_RNA (1)...(19): siRNA sense strand
agagagugguccuagucaa

SEQ ID NO: 353458 - RNA, 19 nt, Homo sapiens
  misc_RNA (1)...(19): siRNA sense strand
aaagagagugguccuaguc

SEQ ID NO: 353459 - RNA, 19 nt, Homo sapiens
  misc_RNA (1)...(19): siRNA sense strand
ccaaguggucuacaagagu

SEQ ID NO: 353460 - RNA, 19 nt, Homo sapiens
  misc_RNA (1)...(19): siRNA sense strand
agauccaguuucucucuga

SEQ ID NO: 353461 - RNA, 19 nt, Homo sapiens
  misc_RNA (1)...(19): siRNA sense strand
uggaagagaaguuguacug

SEQ ID NO: 353462 - RNA, 19 nt, Homo sapiens
  misc_RNA (1)...(19): siRNA sense strand
cugcuucucugccgaugga

SEQ ID NO: 353463 - RNA, 19 nt, Homo sapiens
  misc_RNA (1)...(19): siRNA sense strand
caagagucaggguaaggaa

SEQ ID NO: 353464 - RNA, 19 nt, Homo sapiens
  misc_RNA (1)...(19): siRNA sense strand
uaagccugaucaccauugu

SEQ ID NO: 353465 - RNA, 19 nt, Homo sapiens
  misc_RNA (1)...(19): siRNA sense strand
caacgaaaggccucaaucc

SEQ ID NO: 353466 - RNA, 19 nt, Homo sapiens
  misc_RNA (1)...(19): siRNA sense strand
caaugcaaccaccgucaau

SEQ ID NO: 353467 - RNA, 19 nt, Homo sapiens
  misc_RNA (1)...(19): siRNA sense strand
cuccuggccuucaucauca

SEQ ID NO: 353468 - RNA, 19 nt, Homo sapiens
  misc_RNA (1)...(19): siRNA sense strand
gccaucaaaugaccaaacg

SEQ ID NO: 353469 - RNA, 19 nt, Homo sapiens
  misc_RNA (1)...(19): siRNA sense strand
aagagacugaggaaacuuu

SEQ ID NO: 353470 - RNA, 19 nt, Homo sapiens
  misc_RNA (1)...(19): siRNA sense strand
ucuacaagagucaggguaa

SEQ ID NO: 353471 - RNA, 19 nt, Homo sapiens
  misc_RNA (1)...(19): siRNA sense strand
ucaugaccauccucuacug

SEQ ID NO: 353472 - RNA, 19 nt, Homo sapiens
  misc_RNA (1)...(19): siRNA sense strand
ugccauugcugccuucuac

SEQ ID NO: 353473 - RNA, 19 nt, Homo sapiens
  misc_RNA (1)...(19): siRNA sense strand
ggcuauugguugugcuaug

SEQ ID NO: 353474 - RNA, 19 nt, Homo sapiens
  misc_RNA (1)...(19): siRNA sense strand
ccuuuaagaugcugcuucu

SEQ ID NO: 353475 - RNA, 19 nt, Homo sapiens
  misc_RNA (1)...(19): siRNA sense strand
gaccguuacuuuuccauca

SEQ ID NO: 353476 - RNA, 19 nt, Homo sapiens
  misc_RNA (1)...(19): siRNA sense strand
cuacaagagucaggguaag

SEQ ID NO: 353477 - RNA, 19 nt, Homo sapiens
  misc_RNA (1)...(19): siRNA sense strand
uaaguuccgauugguggua

SEQ ID NO: 353478 - RNA, 19 nt, Homo sapiens
  misc_RNA (1)...(19): siRNA sense strand
ugggaagucaucaccauug

SEQ ID NO: 353479 - RNA, 19 nt, Homo sapiens
  misc_RNA (1)...(19): siRNA sense strand
cagaucucaucauuggaau

SEQ ID NO: 353480 - RNA, 19 nt, Homo sapiens
  misc_RNA (1)...(19): siRNA sense strand
ugguugugcuaugucaaua

SEQ ID NO: 353481 - RNA, 19 nt, Homo sapiens
  misc_RNA (1)...(19): siRNA sense strand
ucaugguccugguuucuac

SEQ ID NO: 353482 - RNA, 19 nt, Homo sapiens
  misc_RNA (1)...(19): siRNA sense strand
ggaggcagcugucuuagua

SEQ ID NO: 353483 - RNA, 19 nt, Homo sapiens
  misc_RNA (1)...(19): siRNA sense strand
gggaagagcugcugaugaa

SEQ ID NO: 353484 - RNA, 19 nt, Homo sapiens
  misc_RNA (1)...(19): siRNA sense strand
ggaaagcuuugcauuuaaa

SEQ ID NO: 353485 - RNA, 19 nt, Homo sapiens
  misc_RNA (1)...(19): siRNA sense strand
gaauagagccgcguacaua

SEQ ID NO: 353486 - RNA, 19 nt, Homo sapiens
  misc_RNA (1)...(19): siRNA sense strand
aaggaaagcuuugcauuua

SEQ ID NO: 353487 - RNA, 19 nt, Homo sapiens
  misc_RNA (1)...(19): siRNA sense strand
gcucuuacaucaggaaaua

SEQ ID NO: 353488 - RNA, 19 nt, Homo sapiens
  misc_RNA (1)...(19): siRNA sense strand
gcagguaucucugguagaa

SEQ ID NO: 353489 - RNA, 19 nt, Homo sapiens
  misc_RNA (1)...(19): siRNA sense strand
caacaaaacuguauggaaa

SEQ ID NO: 353490 - RNA, 19 nt, Homo sapiens
  misc_RNA (1)...(19): siRNA sense strand
gaauggacauacagaaguu

SEQ ID NO: 353491 - RNA, 19 nt, Homo sapiens
  misc_RNA (1)...(19): siRNA sense strand
gauugggucuguuguaauu

SEQ ID NO: 353492 - RNA, 19 nt, Homo sapiens
  misc_RNA (1)...(19): siRNA sense strand
ucaaagaauugugugcuua

SEQ ID NO: 353493 - RNA, 19 nt, Homo sapiens
  misc_RNA (1)...(19): siRNA sense strand
ggauuaacacugaauagua

SEQ ID NO: 353494 - RNA, 19 nt, Homo sapiens
  misc_RNA (1)...(19): siRNA sense strand
cuacugaucugucaccaaa

SEQ ID NO: 353495 - RNA, 19 nt, Homo sapiens
  misc_RNA (1)...(19): siRNA sense strand
caaggaggcagcugucuua

SEQ ID NO: 353496 - RNA, 19 nt, Homo sapiens
  misc_RNA (1)...(19): siRNA sense strand
caucugcucuggaauuaaa

SEQ ID NO: 353497 - RNA, 19 nt, Homo sapiens
  misc_RNA (1)...(19): siRNA sense strand
gagccaaugugacugcuuu

SEQ ID NO: 353498 - RNA, 19 nt, Homo sapiens
  misc_RNA (1)...(19): siRNA sense strand
gcucgaaaguaagggauua

SEQ ID NO: 353499 - RNA, 19 nt, Homo sapiens
  misc_RNA (1)...(19): siRNA sense strand
caaggaaagcuuugcauuu

SEQ ID NO: 353500 - RNA, 19 nt, Homo sapiens
  misc_RNA (1)...(19): siRNA sense strand
ugucaauucuuuccugaua

SEQ ID NO: 353501 - RNA, 19 nt, Homo sapiens
  misc_RNA (1)...(19): siRNA sense strand
ccacauauuuauugccauu

SEQ ID NO: 353502 - RNA, 19 nt, Homo sapiens
  misc_RNA (1)...(19): siRNA sense strand
gccaagaccugaaauugau

SEQ ID NO: 353503 - RNA, 19 nt, Homo sapiens
  misc_RNA (1)...(19): siRNA sense strand
gcaaaguauugauucuguu

SEQ ID NO: 353504 - RNA, 19 nt, Homo sapiens
  misc_RNA (1)...(19): siRNA sense strand
ggacagcaccaggagauaa

SEQ ID NO: 353505 - RNA, 19 nt, Homo sapiens
  misc_RNA (1)...(19): siRNA sense strand
uaauagagaugagcaagau

SEQ ID NO: 353506 - RNA, 19 nt, Homo sapiens
  misc_RNA (1)...(19): siRNA sense strand
auacugaucucucccagaa

SEQ ID NO: 353507 - RNA, 19 nt, Homo sapiens
  misc_RNA (1)...(19): siRNA sense strand
ccaagcaguucacagaaug

SEQ ID NO: 353508 - RNA, 19 nt, Homo sapiens
  misc_RNA (1)...(19): siRNA sense strand
aguaagggauuaacacuga

SEQ ID NO: 353509 - RNA, 19 nt, Homo sapiens
  misc_RNA (1)...(19): siRNA sense strand
ggauaacacugcaaguucu

SEQ ID NO: 353510 - RNA, 19 nt, Homo sapiens
  misc_RNA (1)...(19): siRNA sense strand
agagaaaggcgaauacauu

SEQ ID NO: 353511 - RNA, 19 nt, Homo sapiens
  misc_RNA (1)...(19): siRNA sense strand
gaauaaggacguaaacagu

SEQ ID NO: 353512 - RNA, 19 nt, Homo sapiens
  misc_RNA (1)...(19): siRNA sense strand
gucaaauacuuccuucauu

SEQ ID NO: 353513 - RNA, 19 nt, Homo sapiens
  misc_RNA (1)...(19): siRNA sense strand
gugauugggucuguuguaa

SEQ ID NO: 353514 - RNA, 19 nt, Homo sapiens
  misc_RNA (1)...(19): siRNA sense strand
caagaaugauggagucuac

SEQ ID NO: 353515 - RNA, 19 nt, Homo sapiens
  misc_RNA (1)...(19): siRNA sense strand
gcaacccacauauuuauug

SEQ ID NO: 353516 - RNA, 19 nt, Homo sapiens
  misc_RNA (1)...(19): siRNA sense strand
agucauaauucuggaguua

SEQ ID NO: 353517 - RNA, 19 nt, Homo sapiens
  misc_RNA (1)...(19): siRNA sense strand
acaaggauauguaccuguu

SEQ ID NO: 353518 - RNA, 19 nt, Homo sapiens
  misc_RNA (1)...(19): siRNA sense strand
gaggccaacuccaaggaaa

SEQ ID NO: 353519 - RNA, 19 nt, Homo sapiens
  misc_RNA (1)...(19): siRNA sense strand
ccacaguucaugaggauaa

SEQ ID NO: 353520 - RNA, 19 nt, Homo sapiens
  misc_RNA (1)...(19): siRNA sense strand
caugggaggugauuagcaa

SEQ ID NO: 353521 - RNA, 19 nt, Homo sapiens
  misc_RNA (1)...(19): siRNA sense strand
gaaugaaucaagcagcaaa

SEQ ID NO: 353522 - RNA, 19 nt, Homo sapiens
  misc_RNA (1)...(19): siRNA sense strand
gagaugaaccauacaccaa

SEQ ID NO: 353523 - RNA, 19 nt, Homo sapiens
  misc_RNA (1)...(19): siRNA sense strand
ggaucccaguggaacaaua

SEQ ID NO: 353524 - RNA, 19 nt, Homo sapiens
  misc_RNA (1)...(19): siRNA sense strand
caagauaacaggaggaagu

SEQ ID NO: 353525 - RNA, 19 nt, Homo sapiens
  misc_RNA (1)...(19): siRNA sense strand
gaacaaauagaggauaugg

SEQ ID NO: 353526 - RNA, 19 nt, Homo sapiens
  misc_RNA (1)...(19): siRNA sense strand
gaggauaacacugcaaguu

SEQ ID NO: 353527 - RNA, 19 nt, Homo sapiens
  misc_RNA (1)...(19): siRNA sense strand
gcucuggaauuaaauaugc

SEQ ID NO: 353528 - RNA, 19 nt, Homo sapiens
  misc_RNA (1)...(19): siRNA sense strand
gguaaggaccgccuaaauc

SEQ ID NO: 353529 - RNA, 19 nt, Homo sapiens
  misc_RNA (1)...(19): siRNA sense strand
agaauugugugcuuaguuc

SEQ ID NO: 353530 - RNA, 19 nt, Homo sapiens
  misc_RNA (1)...(19): siRNA sense strand
gcaaacacugccaggcuaa

SEQ ID NO: 353531 - RNA, 19 nt, Homo sapiens
  misc_RNA (1)...(19): siRNA sense strand
ggaaaauccucaguacaaa

SEQ ID NO: 353532 - RNA, 19 nt, Homo sapiens
  misc_RNA (1)...(19): siRNA sense strand
ggucuguuguaauuguuaa

SEQ ID NO: 353533 - RNA, 19 nt, Homo sapiens
  misc_RNA (1)...(19): siRNA sense strand
gaucccaguggaacaauaa

SEQ ID NO: 353534 - RNA, 19 nt, Homo sapiens
  misc_RNA (1)...(19): siRNA sense strand
gaugaaagaaacacacuca

SEQ ID NO: 353535 - RNA, 19 nt, Homo sapiens
  misc_RNA (1)...(19): siRNA sense strand
guacugccacuauuguaaa

SEQ ID NO: 353536 - RNA, 19 nt, Homo sapiens
  misc_RNA (1)...(19): siRNA sense strand
gauuagcaauucugaggau

SEQ ID NO: 353537 - RNA, 19 nt, Homo sapiens
  misc_RNA (1)...(19): siRNA sense strand
caaugaagaucagccuuuc

SEQ ID NO: 353538 - RNA, 19 nt, Homo sapiens
  misc_RNA (1)...(19): siRNA sense strand
gcugaauaauaauggcuuu

SEQ ID NO: 353539 - RNA, 19 nt, Homo sapiens
  misc_RNA (1)...(19): siRNA sense strand
ggaggugcauuugugguau

SEQ ID NO: 353540 - RNA, 19 nt, Homo sapiens
  misc_RNA (1)...(19): siRNA sense strand
aggaaagcuuugcauuuaa

SEQ ID NO: 353541 - RNA, 19 nt, Homo sapiens
  misc_RNA (1)...(19): siRNA sense strand
guucaugaggauaagauua

SEQ ID NO: 353542 - RNA, 19 nt, Homo sapiens
  misc_RNA (1)...(19): siRNA sense strand
guacaugggaggugauuag

SEQ ID NO: 353543 - RNA, 19 nt, Homo sapiens
  misc_RNA (1)...(19): siRNA sense strand
guuuaucccucaagcaaau

SEQ ID NO: 353544 - RNA, 19 nt, Homo sapiens
  misc_RNA (1)...(19): siRNA sense strand
caacauugcacaaguaacu

SEQ ID NO: 353545 - RNA, 19 nt, Homo sapiens
  misc_RNA (1)...(19): siRNA sense strand
gcacuugggcauacaaucu

SEQ ID NO: 353546 - RNA, 19 nt, Homo sapiens
  misc_RNA (1)...(19): siRNA sense strand
caaaguauugauucuguug

SEQ ID NO: 353547 - RNA, 19 nt, Homo sapiens
  misc_RNA (1)...(19): siRNA sense strand
cagaaaauaucucagaaga

SEQ ID NO: 353548 - RNA, 19 nt, Homo sapiens
  misc_RNA (1)...(19): siRNA sense strand
ggagauaauuuugauguug

SEQ ID NO: 353549 - RNA, 19 nt, Homo sapiens
  misc_RNA (1)...(19): siRNA sense strand
gaaauucuacaaggauaug

SEQ ID NO: 353550 - RNA, 19 nt, Homo sapiens
  misc_RNA (1)...(19): siRNA sense strand
gaaaguaagggauuaacac

SEQ ID NO: 353551 - RNA, 19 nt, Homo sapiens
  misc_RNA (1)...(19): siRNA sense strand
cccuucagcucgaaaguaa

SEQ ID NO: 353552 - RNA, 19 nt, Homo sapiens
  misc_RNA (1)...(19): siRNA sense strand
ugaaagaaacacacucaug

SEQ ID NO: 353553 - RNA, 19 nt, Homo sapiens
  misc_RNA (1)...(19): siRNA sense strand
ugacuacagcuucuacgua

SEQ ID NO: 353554 - RNA, 19 nt, Homo sapiens
  misc_RNA (1)...(19): siRNA sense strand
agaugaagcucagaacaau

SEQ ID NO: 353555 - RNA, 19 nt, Homo sapiens
  misc_RNA (1)...(19): siRNA sense strand
ucaaaaguauccaacauug

SEQ ID NO: 353556 - RNA, 19 nt, Homo sapiens
  misc_RNA (1)...(19): siRNA sense strand
ccugagaauuggaaggaaa

SEQ ID NO: 353557 - RNA, 19 nt, Homo sapiens
  misc_RNA (1)...(19): siRNA sense strand
ggaugcaacuuccaaaaug

SEQ ID NO: 353558 - RNA, 19 nt, Homo sapiens
  misc_RNA (1)...(19): siRNA sense strand
uagaggauauggugacuac

SEQ ID NO: 353559 - RNA, 19 nt, Homo sapiens
  misc_RNA (1)...(19): siRNA sense strand
uaauauuucuacgcuggua

SEQ ID NO: 353560 - RNA, 19 nt, Homo sapiens
  misc_RNA (1)...(19): siRNA sense strand
ccaaggaaagcuuugcauu

SEQ ID NO: 353561 - RNA, 19 nt, Homo sapiens
  misc_RNA (1)...(19): siRNA sense strand
gacacguucuuucucauca

SEQ ID NO: 353562 - RNA, 19 nt, Homo sapiens
  misc_RNA (1)...(19): siRNA sense strand
gggaggugauuagcaauuc

SEQ ID NO: 353563 - RNA, 19 nt, Homo sapiens
  misc_RNA (1)...(19): siRNA sense strand
gucaauucuuuccugauaa

SEQ ID NO: 353564 - RNA, 19 nt, Homo sapiens
  misc_RNA (1)...(19): siRNA sense strand
guucuuguauugaugaagu

SEQ ID NO: 353565 - RNA, 19 nt, Homo sapiens
  misc_RNA (1)...(19): siRNA sense strand
gugcaggcgcugauucuuu

SEQ ID NO: 353566 - RNA, 19 nt, Homo sapiens
  misc_RNA (1)...(19): siRNA sense strand
gagcagcaaauucuucugu

SEQ ID NO: 353567 - RNA, 19 nt, Homo sapiens
  misc_RNA (1)...(19): siRNA sense strand
cugcaaaggugggcacuug

SEQ ID NO: 353568 - RNA, 19 nt, Homo sapiens
  misc_RNA (1)...(19): siRNA sense strand
guaagggauuaacacugaa

SEQ ID NO: 353569 - RNA, 19 nt, Homo sapiens
  misc_RNA (1)...(19): siRNA sense strand
gaugaagcaguaauagaga

SEQ ID NO: 353570 - RNA, 19 nt, Homo sapiens
  misc_RNA (1)...(19): siRNA sense strand
gaagcuccaagccuacaaa

SEQ ID NO: 353571 - RNA, 19 nt, Homo sapiens
  misc_RNA (1)...(19): siRNA sense strand
gaagcaaacccgccaagac

SEQ ID NO: 353572 - RNA, 19 nt, Homo sapiens
  misc_RNA (1)...(19): siRNA sense strand
aauggcagauauagcuuaa

SEQ ID NO: 353573 - RNA, 19 nt, Homo sapiens
  misc_RNA (1)...(19): siRNA sense strand
cagaugaagcucagaacaa

SEQ ID NO: 353574 - RNA, 19 nt, Homo sapiens
  misc_RNA (1)...(19): siRNA sense strand
uggcaggauuaccuacaua

SEQ ID NO: 353575 - RNA, 19 nt, Homo sapiens
  misc_RNA (1)...(19): siRNA sense strand
gucaaagaauugugugcuu

SEQ ID NO: 353576 - RNA, 19 nt, Homo sapiens
  misc_RNA (1)...(19): siRNA sense strand
caaauccugaugacauuga

SEQ ID NO: 353577 - RNA, 19 nt, Homo sapiens
  misc_RNA (1)...(19): siRNA sense strand
aaugcaacccacauauuua

SEQ ID NO: 353578 - RNA, 19 nt, Homo sapiens
  misc_RNA (1)...(19): siRNA sense strand
aaaauggccuaucucagua

SEQ ID NO: 353579 - RNA, 19 nt, Homo sapiens
  misc_RNA (1)...(19): siRNA sense strand
gagaugagcaagauaacag

SEQ ID NO: 353580 - RNA, 19 nt, Homo sapiens
  misc_RNA (1)...(19): siRNA sense strand
guaauagagaugagcaaga

SEQ ID NO: 353581 - RNA, 19 nt, Homo sapiens
  misc_RNA (1)...(19): siRNA sense strand
guaaggaccgccuaaaucg

SEQ ID NO: 353582 - RNA, 19 nt, Homo sapiens
  misc_RNA (1)...(19): siRNA sense strand
caagaagaaugaacccuua

SEQ ID NO: 353583 - RNA, 19 nt, Homo sapiens
  misc_RNA (1)...(19): siRNA sense strand
gaaagaggaugaugagaag

SEQ ID NO: 353584 - RNA, 19 nt, Homo sapiens
  misc_RNA (1)...(19): siRNA sense strand
ccaaagcccucuccaaaga

SEQ ID NO: 353585 - RNA, 19 nt, Homo sapiens
  misc_RNA (1)...(19): siRNA sense strand
caagacagaugccaagaau

SEQ ID NO: 353586 - RNA, 19 nt, Homo sapiens
  misc_RNA (1)...(19): siRNA sense strand
ugaaggagguggccaagaa

SEQ ID NO: 353587 - RNA, 19 nt, Homo sapiens
  misc_RNA (1)...(19): siRNA sense strand
gaaugaacccuuacaugaa

SEQ ID NO: 353588 - RNA, 19 nt, Homo sapiens
  misc_RNA (1)...(19): siRNA sense strand
gaacucccgugaccagcua

SEQ ID NO: 353589 - RNA, 19 nt, Homo sapiens
  misc_RNA (1)...(19): siRNA sense strand
ccaaagaacucacccaaaa

SEQ ID NO: 353590 - RNA, 19 nt, Homo sapiens
  misc_RNA (1)...(19): siRNA sense strand
gcaagcaaguggagaccaa

SEQ ID NO: 353591 - RNA, 19 nt, Homo sapiens
  misc_RNA (1)...(19): siRNA sense strand
ggucagggcugcaguggau

SEQ ID NO: 353592 - RNA, 19 nt, Homo sapiens
  misc_RNA (1)...(19): siRNA sense strand
uggagaaccugaagaauuc

SEQ ID NO: 353593 - RNA, 19 nt, Homo sapiens
  misc_RNA (1)...(19): siRNA sense strand
aaugaacccuuacaugaaa

SEQ ID NO: 353594 - RNA, 19 nt, Homo sapiens
  misc_RNA (1)...(19): siRNA sense strand
gaaggaagaggagaagaaa

SEQ ID NO: 353595 - RNA, 19 nt, Homo sapiens
  misc_RNA (1)...(19): siRNA sense strand
ucaagcagcucaagaaggu

SEQ ID NO: 353596 - RNA, 19 nt, Homo sapiens
  misc_RNA (1)...(19): siRNA sense strand
agaaugaacccuuacauga

SEQ ID NO: 353597 - RNA, 19 nt, Homo sapiens
  misc_RNA (1)...(19): siRNA sense strand
gggcugcaguggauaagaa

SEQ ID NO: 353598 - RNA, 19 nt, Homo sapiens
  misc_RNA (1)...(19): siRNA sense strand
gaaaccagacggagaaaca

SEQ ID NO: 353599 - RNA, 19 nt, Homo sapiens
  misc_RNA (1)...(19): siRNA sense strand
cagacugcaucacaaauga

SEQ ID NO: 353600 - RNA, 19 nt, Homo sapiens
  misc_RNA (1)...(19): siRNA sense strand
gaagaugggagacaaaguc

SEQ ID NO: 353601 - RNA, 19 nt, Homo sapiens
  misc_RNA (1)...(19): siRNA sense strand
caucacaaaugagaucuug

SEQ ID NO: 353602 - RNA, 19 nt, Homo sapiens
  misc_RNA (1)...(19): siRNA sense strand
aaaggaggaugagaaggua

SEQ ID NO: 353603 - RNA, 19 nt, Homo sapiens
  misc_RNA (1)...(19): siRNA sense strand
ccaagcugcugaaggagaa

SEQ ID NO: 353604 - RNA, 19 nt, Homo sapiens
  misc_RNA (1)...(19): siRNA sense strand
ccaagaaagaggaugauga

SEQ ID NO: 353605 - RNA, 19 nt, Homo sapiens
  misc_RNA (1)...(19): siRNA sense strand
agaaagaggaugaugagaa

SEQ ID NO: 353606 - RNA, 19 nt, Homo sapiens
  misc_RNA (1)...(19): siRNA sense strand
gaaggagguggccaagaaa

SEQ ID NO: 353607 - RNA, 19 nt, Homo sapiens
  misc_RNA (1)...(19): siRNA sense strand
gaaaagagggugagaagau

SEQ ID NO: 353608 - RNA, 19 nt, Homo sapiens
  misc_RNA (1)...(19): siRNA sense strand
gaacacagacaccagaaaa

SEQ ID NO: 353609 - RNA, 19 nt, Homo sapiens
  misc_RNA (1)...(19): siRNA sense strand
gcaaaggcaggcacaggaa

SEQ ID NO: 353610 - RNA, 19 nt, Homo sapiens
  misc_RNA (1)...(19): siRNA sense strand
aaggagaccaagaaacuua

SEQ ID NO: 353611 - RNA, 19 nt, Homo sapiens
  misc_RNA (1)...(19): siRNA sense strand
ucgccaagcugcugaagga

SEQ ID NO: 353612 - RNA, 19 nt, Homo sapiens
  misc_RNA (1)...(19): siRNA sense strand
gggaggccaugcucaacuu

SEQ ID NO: 353613 - RNA, 19 nt, Homo sapiens
  misc_RNA (1)...(19): siRNA sense strand
caacucagacugcaucaca

SEQ ID NO: 353614 - RNA, 19 nt, Homo sapiens
  misc_RNA (1)...(19): siRNA sense strand
agagggagauguccaugga

SEQ ID NO: 353615 - RNA, 19 nt, Homo sapiens
  misc_RNA (1)...(19): siRNA sense strand
gaagaaugaacccuuacau

SEQ ID NO: 353616 - RNA, 19 nt, Homo sapiens
  misc_RNA (1)...(19): siRNA sense strand
ggaagugcccaaacugcuu

SEQ ID NO: 353617 - RNA, 19 nt, Homo sapiens
  misc_RNA (1)...(19): siRNA sense strand
caagaaagaggaugaugag

SEQ ID NO: 353618 - RNA, 19 nt, Homo sapiens
  misc_RNA (1)...(19): siRNA sense strand
gagcagggacaaggauaaa

SEQ ID NO: 353619 - RNA, 19 nt, Homo sapiens
  misc_RNA (1)...(19): siRNA sense strand
ggaacacagacaccagaaa

SEQ ID NO: 353620 - RNA, 19 nt, Homo sapiens
  misc_RNA (1)...(19): siRNA sense strand
ggagauguccauggaugaa

SEQ ID NO: 353621 - RNA, 19 nt, Homo sapiens
  misc_RNA (1)...(19): siRNA sense strand
caacauggacaagcagaga

SEQ ID NO: 353622 - RNA, 19 nt, Homo sapiens
  misc_RNA (1)...(19): siRNA sense strand
gcaagacggagauggagau

SEQ ID NO: 353623 - RNA, 19 nt, Homo sapiens
  misc_RNA (1)...(19): siRNA sense strand
guucaacacugugguuaag

SEQ ID NO: 353624 - RNA, 19 nt, Homo sapiens
  misc_RNA (1)...(19): siRNA sense strand
gcagcucccagcauauuug

SEQ ID NO: 353625 - RNA, 19 nt, Homo sapiens
  misc_RNA (1)...(19): siRNA sense strand
agacagaugccaagaaugg

SEQ ID NO: 353626 - RNA, 19 nt, Homo sapiens
  misc_RNA (1)...(19): siRNA sense strand
ccaagaaggaagaggagaa

SEQ ID NO: 353627 - RNA, 19 nt, Homo sapiens
  misc_RNA (1)...(19): siRNA sense strand
uuacugaggcucuggaguu

SEQ ID NO: 353628 - RNA, 19 nt, Homo sapiens
  misc_RNA (1)...(19): siRNA sense strand
augcucaacuucugugaaa

SEQ ID NO: 353629 - RNA, 19 nt, Homo sapiens
  misc_RNA (1)...(19): siRNA sense strand
gggcaguggccaccaagaa

SEQ ID NO: 353630 - RNA, 19 nt, Homo sapiens
  misc_RNA (1)...(19): siRNA sense strand
gagcaggugggaacacaga

SEQ ID NO: 353631 - RNA, 19 nt, Homo sapiens
  misc_RNA (1)...(19): siRNA sense strand
agagaaaccagacggagaa

SEQ ID NO: 353632 - RNA, 19 nt, Homo sapiens
  misc_RNA (1)...(19): siRNA sense strand
acacugugguuaagcuguu

SEQ ID NO: 353633 - RNA, 19 nt, Homo sapiens
  misc_RNA (1)...(19): siRNA sense strand
gaagguggaagugcccaaa

SEQ ID NO: 353634 - RNA, 19 nt, Homo sapiens
  misc_RNA (1)...(19): siRNA sense strand
ccaagacagaugccaagaa

SEQ ID NO: 353635 - RNA, 19 nt, Homo sapiens
  misc_RNA (1)...(19): siRNA sense strand
gcucccagcauauuugaug

SEQ ID NO: 353636 - RNA, 19 nt, Homo sapiens
  misc_RNA (1)...(19): siRNA sense strand
agagagaggagaugaagga

SEQ ID NO: 353637 - RNA, 19 nt, Homo sapiens
  misc_RNA (1)...(19): siRNA sense strand
agaaggaagaggagaagaa

SEQ ID NO: 353638 - RNA, 19 nt, Homo sapiens
  misc_RNA (1)...(19): siRNA sense strand
uggagagagugaagaacaa

SEQ ID NO: 353639 - RNA, 19 nt, Homo sapiens
  misc_RNA (1)...(19): siRNA sense strand
agaggaagaugggagacaa

SEQ ID NO: 353640 - RNA, 19 nt, Homo sapiens
  misc_RNA (1)...(19): siRNA sense strand
cuccaaagcccucuccaaa

SEQ ID NO: 353641 - RNA, 19 nt, Homo sapiens
  misc_RNA (1)...(19): siRNA sense strand
gcuaagggcuccccaaaac

SEQ ID NO: 353642 - RNA, 19 nt, Homo sapiens
  misc_RNA (1)...(19): siRNA sense strand
ggaguucaacacugugguu

SEQ ID NO: 353643 - RNA, 19 nt, Homo sapiens
  misc_RNA (1)...(19): siRNA sense strand
gaaggaggcagggaaggau

SEQ ID NO: 353644 - RNA, 19 nt, Homo sapiens
  misc_RNA (1)...(19): siRNA sense strand
caaagcccucuccaaagaa

SEQ ID NO: 353645 - RNA, 19 nt, Homo sapiens
  misc_RNA (1)...(19): siRNA sense strand
gaguucaacacugugguua

SEQ ID NO: 353646 - RNA, 19 nt, Homo sapiens
  misc_RNA (1)...(19): siRNA sense strand
cgagaugacugaggugaac

SEQ ID NO: 353647 - RNA, 19 nt, Homo sapiens
  misc_RNA (1)...(19): siRNA sense strand
agaggaugaugagaaggua

SEQ ID NO: 353648 - RNA, 19 nt, Homo sapiens
  misc_RNA (1)...(19): siRNA sense strand
gaggaagaugggagacaaa

SEQ ID NO: 353649 - RNA, 19 nt, Homo sapiens
  misc_RNA (1)...(19): siRNA sense strand
ucauggagaaccugaagaa

SEQ ID NO: 353650 - RNA, 19 nt, Homo sapiens
  misc_RNA (1)...(19): siRNA sense strand
gcaaguggagaccaagaca

SEQ ID NO: 353651 - RNA, 19 nt, Homo sapiens
  misc_RNA (1)...(19): siRNA sense strand
gaacaaugaccccgagaug

SEQ ID NO: 353652 - RNA, 19 nt, Homo sapiens
  misc_RNA (1)...(19): siRNA sense strand
agagagugaagaacaauga

SEQ ID NO: 353653 - RNA, 19 nt, Homo sapiens
  misc_RNA (1)...(19): siRNA sense strand
gaggaacugggaacacaga

SEQ ID NO: 353654 - RNA, 19 nt, Homo sapiens
  misc_RNA (1)...(19): siRNA sense strand
aagaggaacugggaacaca

SEQ ID NO: 353655 - RNA, 19 nt, Homo sapiens
  misc_RNA (1)...(19): siRNA sense strand
gagcguaggaacacagaca

SEQ ID NO: 353656 - RNA, 19 nt, Homo sapiens
  misc_RNA (1)...(19): siRNA sense strand
gaggcaagacggagaugga

SEQ ID NO: 353657 - RNA, 19 nt, Homo sapiens
  misc_RNA (1)...(19): siRNA sense strand
ggacuccaaccacaucaca

SEQ ID NO: 353658 - RNA, 19 nt, Homo sapiens
  misc_RNA (1)...(19): siRNA sense strand
caccaagcccucugaagga

SEQ ID NO: 353659 - RNA, 19 nt, Homo sapiens
  misc_RNA (1)...(19): siRNA sense strand
gaggggugguuuaaagaaa

SEQ ID NO: 353660 - RNA, 19 nt, Homo sapiens
  misc_RNA (1)...(19): siRNA sense strand
ugccaagaauggacaggaa

SEQ ID NO: 353661 - RNA, 19 nt, Homo sapiens
  misc_RNA (1)...(19): siRNA sense strand
aaagaggggugguuuaaag

SEQ ID NO: 353662 - RNA, 19 nt, Homo sapiens
  misc_RNA (1)...(19): siRNA sense strand
gagaucuugguccgguuua

SEQ ID NO: 353663 - RNA, 19 nt, Homo sapiens
  misc_RNA (1)...(19): siRNA sense strand
ggagagagugaagaacaau

SEQ ID NO: 353664 - RNA, 19 nt, Homo sapiens
  misc_RNA (1)...(19): siRNA sense strand
gaccaaaacacccgagaaa

SEQ ID NO: 353665 - RNA, 19 nt, Homo sapiens
  misc_RNA (1)...(19): siRNA sense strand
ggugggaacacagacauga

SEQ ID NO: 353666 - RNA, 19 nt, Homo sapiens
  misc_RNA (1)...(19): siRNA sense strand
ccaaggaggagaagaucau

SEQ ID NO: 353667 - RNA, 19 nt, Homo sapiens
  misc_RNA (1)...(19): siRNA sense strand
gacaggaacacaggcuuga

SEQ ID NO: 353668 - RNA, 19 nt, Homo sapiens
  misc_RNA (1)...(19): siRNA sense strand
auggagaaccugaagaauu

SEQ ID NO: 353669 - RNA, 19 nt, Homo sapiens
  misc_RNA (1)...(19): siRNA sense strand
ccaacacgcgagccgauga

SEQ ID NO: 353670 - RNA, 19 nt, Homo sapiens
  misc_RNA (1)...(19): siRNA sense strand
gagauguccauggaugaaa

SEQ ID NO: 353671 - RNA, 19 nt, Homo sapiens
  misc_RNA (1)...(19): siRNA sense strand
cugaggcucuggaguucaa

SEQ ID NO: 353672 - RNA, 19 nt, Homo sapiens
  misc_RNA (1)...(19): siRNA sense strand
ucacaaaugagaucuuggu

SEQ ID NO: 353673 - RNA, 19 nt, Homo sapiens
  misc_RNA (1)...(19): siRNA sense strand
ucagacugcaucacaaaug

SEQ ID NO: 353674 - RNA, 19 nt, Homo sapiens
  misc_RNA (1)...(19): siRNA sense strand
gaggugaacgucaacaacu

SEQ ID NO: 353675 - RNA, 19 nt, Homo sapiens
  misc_RNA (1)...(19): siRNA sense strand
aagaaugaacccuuacaug

SEQ ID NO: 353676 - RNA, 19 nt, Homo sapiens
  misc_RNA (1)...(19): siRNA sense strand
gggagauguccauggauga

SEQ ID NO: 353677 - RNA, 19 nt, Homo sapiens
  misc_RNA (1)...(19): siRNA sense strand
ggaagaugggagacaaagu

SEQ ID NO: 353678 - RNA, 19 nt, Homo sapiens
  misc_RNA (1)...(19): siRNA sense strand
gccaagaauggacaggaaa

SEQ ID NO: 353679 - RNA, 19 nt, Homo sapiens
  misc_RNA (1)...(19): siRNA sense strand
ccucaaccaucuccaaagc

SEQ ID NO: 353680 - RNA, 19 nt, Homo sapiens
  misc_RNA (1)...(19): siRNA sense strand
ccaagggagagaagaagga

SEQ ID NO: 353681 - RNA, 19 nt, Homo sapiens
  misc_RNA (1)...(19): siRNA sense strand
ggagaccaagaaacuuaug

SEQ ID NO: 353682 - RNA, 19 nt, Homo sapiens
  misc_RNA (1)...(19): siRNA sense strand
gcagauggguugcauuuga

SEQ ID NO: 353683 - RNA, 19 nt, Homo sapiens
  misc_RNA (1)...(19): siRNA sense strand
gagcaugucugaacuggaa

SEQ ID NO: 353684 - RNA, 19 nt, Homo sapiens
  misc_RNA (1)...(19): siRNA sense strand
gcugaaaucuuggcugaua

SEQ ID NO: 353685 - RNA, 19 nt, Homo sapiens
  misc_RNA (1)...(19): siRNA sense strand
ggaaggagguugacaugau

SEQ ID NO: 353686 - RNA, 19 nt, Homo sapiens
  misc_RNA (1)...(19): siRNA sense strand
gugcaaagguuuaugagaa

SEQ ID NO: 353687 - RNA, 19 nt, Homo sapiens
  misc_RNA (1)...(19): siRNA sense strand
gcagcaaacuguauauauc

SEQ ID NO: 353688 - RNA, 19 nt, Homo sapiens
  misc_RNA (1)...(19): siRNA sense strand
gaaggagguugacaugaug

SEQ ID NO: 353689 - RNA, 19 nt, Homo sapiens
  misc_RNA (1)...(19): siRNA sense strand
ggaagaguauccagaaagu

SEQ ID NO: 353690 - RNA, 19 nt, Homo sapiens
  misc_RNA (1)...(19): siRNA sense strand
gaugaaagaagcauuagaa

SEQ ID NO: 353691 - RNA, 19 nt, Homo sapiens
  misc_RNA (1)...(19): siRNA sense strand
caacaaagggcacgucuug

SEQ ID NO: 353692 - RNA, 19 nt, Homo sapiens
  misc_RNA (1)...(19): siRNA sense strand
uaguagagaugaaagauga

SEQ ID NO: 353693 - RNA, 19 nt, Homo sapiens
  misc_RNA (1)...(19): siRNA sense strand
ugacauagcagcaaacugu

SEQ ID NO: 353694 - RNA, 19 nt, Homo sapiens
  misc_RNA (1)...(19): siRNA sense strand
ucaacgaggugcugaaauc

SEQ ID NO: 353695 - RNA, 19 nt, Homo sapiens
  misc_RNA (1)...(19): siRNA sense strand
caugaugaaagaagcauua

SEQ ID NO: 353696 - RNA, 19 nt, Homo sapiens
  misc_RNA (1)...(19): siRNA sense strand
cagauggguugcauuugaa

SEQ ID NO: 353697 - RNA, 19 nt, Homo sapiens
  misc_RNA (1)...(19): siRNA sense strand
ccagaaagugcaaagguuu

SEQ ID NO: 353698 - RNA, 19 nt, Homo sapiens
  misc_RNA (1)...(19): siRNA sense strand
cagaaagugcaaagguuua

SEQ ID NO: 353699 - RNA, 19 nt, Homo sapiens
  misc_RNA (1)...(19): siRNA sense strand
cacugugccugaugacaua

SEQ ID NO: 353700 - RNA, 19 nt, Homo sapiens
  misc_RNA (1)...(19): siRNA sense strand
gguugcauuugaagaguuu

SEQ ID NO: 353701 - RNA, 19 nt, Homo sapiens
  misc_RNA (1)...(19): siRNA sense strand
ugcaaagguuuaugagaaa

SEQ ID NO: 353702 - RNA, 19 nt, Homo sapiens
  misc_RNA (1)...(19): siRNA sense strand
aaacuucagcucaauauag

SEQ ID NO: 353703 - RNA, 19 nt, Homo sapiens
  misc_RNA (1)...(19): siRNA sense strand
gaaacugaaggaccauaug

SEQ ID NO: 353704 - RNA, 19 nt, Homo sapiens
  misc_RNA (1)...(19): siRNA sense strand
cauagcagcaaacuguaua

SEQ ID NO: 353705 - RNA, 19 nt, Homo sapiens
  misc_RNA (1)...(19): siRNA sense strand
gaugaaagaugaaaaugca

SEQ ID NO: 353706 - RNA, 19 nt, Homo sapiens
  misc_RNA (1)...(19): siRNA sense strand
gaggaaggagguugacaug

SEQ ID NO: 353707 - RNA, 19 nt, Homo sapiens
  misc_RNA (1)...(19): siRNA sense strand
gaaggaccauaugcugauc

SEQ ID NO: 353708 - RNA, 19 nt, Homo sapiens
  misc_RNA (1)...(19): siRNA sense strand
acgaggugcugaaaucuug

SEQ ID NO: 353709 - RNA, 19 nt, Homo sapiens
  misc_RNA (1)...(19): siRNA sense strand
gaaaaugcaacuuuagaug

SEQ ID NO: 353710 - RNA, 19 nt, Homo sapiens
  misc_RNA (1)...(19): siRNA sense strand
aaagugcaaagguuuauga

SEQ ID NO: 353711 - RNA, 19 nt, Homo sapiens
  misc_RNA (1)...(19): siRNA sense strand
aaucuuggcugauacuuuu

SEQ ID NO: 353712 - RNA, 19 nt, Homo sapiens
  misc_RNA (1)...(19): siRNA sense strand
uggcagauggguugcauuu

SEQ ID NO: 353713 - RNA, 19 nt, Homo sapiens
  misc_RNA (1)...(19): siRNA sense strand
ccggaagaguauccagaaa

SEQ ID NO: 353714 - RNA, 19 nt, Homo sapiens
  misc_RNA (1)...(19): siRNA sense strand
cuuaagaucaugcaacaga

SEQ ID NO: 353715 - RNA, 19 nt, Homo sapiens
  misc_RNA (1)...(19): siRNA sense strand
guagagaugaaagaugaaa

SEQ ID NO: 353716 - RNA, 19 nt, Homo sapiens
  misc_RNA (1)...(19): siRNA sense strand
uccagaaagugcaaagguu

SEQ ID NO: 353717 - RNA, 19 nt, Homo sapiens
  misc_RNA (1)...(19): siRNA sense strand
ggaggaaggagguugacau

SEQ ID NO: 353718 - RNA, 19 nt, Homo sapiens
  misc_RNA (1)...(19): siRNA sense strand
caaacucacugugccugau

SEQ ID NO: 353719 - RNA, 19 nt, Homo sapiens
  misc_RNA (1)...(19): siRNA sense strand
uuagauggcggagauguuu

SEQ ID NO: 353720 - RNA, 19 nt, Homo sapiens
  misc_RNA (1)...(19): siRNA sense strand
gaaagugcaaagguuuaug

SEQ ID NO: 353721 - RNA, 19 nt, Homo sapiens
  misc_RNA (1)...(19): siRNA sense strand
cugaugacauagcagcaaa

SEQ ID NO: 353722 - RNA, 19 nt, Homo sapiens
  misc_RNA (1)...(19): siRNA sense strand
gagaaacugaaggaccaua

SEQ ID NO: 353723 - RNA, 19 nt, Homo sapiens
  misc_RNA (1)...(19): siRNA sense strand
cagcaaacuguauauaucu

SEQ ID NO: 353724 - RNA, 19 nt, Homo sapiens
  misc_RNA (1)...(19): siRNA sense strand
gacauagcagcaaacugua

SEQ ID NO: 353725 - RNA, 19 nt, Homo sapiens
  misc_RNA (1)...(19): siRNA sense strand
uagcagcaaacuguauaua

SEQ ID NO: 353726 - RNA, 19 nt, Homo sapiens
  misc_RNA (1)...(19): siRNA sense strand
agguugacaugaugaaaga

SEQ ID NO: 353727 - RNA, 19 nt, Homo sapiens
  misc_RNA (1)...(19): siRNA sense strand
uggcggagauguuuuauuc

SEQ ID NO: 353728 - RNA, 19 nt, Homo sapiens
  misc_RNA (1)...(19): siRNA sense strand
gagguugacaugaugaaag

SEQ ID NO: 353729 - RNA, 19 nt, Homo sapiens
  misc_RNA (1)...(19): siRNA sense strand
ggguugcauuugaagaguu

SEQ ID NO: 353730 - RNA, 19 nt, Homo sapiens
  misc_RNA (1)...(19): siRNA sense strand
gaagaguauccagaaagug

SEQ ID NO: 353731 - RNA, 19 nt, Homo sapiens
  misc_RNA (1)...(19): siRNA sense strand
ugaaggaccauaugcugau

SEQ ID NO: 353732 - RNA, 19 nt, Homo sapiens
  misc_RNA (1)...(19): siRNA sense strand
uaagaucaugcaacagaug

SEQ ID NO: 353733 - RNA, 19 nt, Homo sapiens
  misc_RNA (1)...(19): siRNA sense strand
gcugcucaguuuuaauuaa

SEQ ID NO: 353734 - RNA, 19 nt, Homo sapiens
  misc_RNA (1)...(19): siRNA sense strand
ggagguugacaugaugaaa

SEQ ID NO: 353735 - RNA, 19 nt, Homo sapiens
  misc_RNA (1)...(19): siRNA sense strand
gcucaccugcugcucaguu

SEQ ID NO: 353736 - RNA, 19 nt, Homo sapiens
  misc_RNA (1)...(19): siRNA sense strand
uuaagaucaugcaacagau

SEQ ID NO: 353737 - RNA, 19 nt, Homo sapiens
  misc_RNA (1)...(19): siRNA sense strand
cccuuaagaucaugcaaca

SEQ ID NO: 353738 - RNA, 19 nt, Homo sapiens
  misc_RNA (1)...(19): siRNA sense strand
ugaccaccgcuacgacaaa

SEQ ID NO: 353739 - RNA, 19 nt, Homo sapiens
  misc_RNA (1)...(19): siRNA sense strand
aaaucuuggcugauacuuu

SEQ ID NO: 353740 - RNA, 19 nt, Homo sapiens
  misc_RNA (1)...(19): siRNA sense strand
aacuucagcucaauauagu

SEQ ID NO: 353741 - RNA, 19 nt, Homo sapiens
  misc_RNA (1)...(19): siRNA sense strand
gaccaccgcuacgacaaac

SEQ ID NO: 353742 - RNA, 19 nt, Homo sapiens
  misc_RNA (1)...(19): siRNA sense strand
gaaaucuuggcugauacuu

SEQ ID NO: 353743 - RNA, 19 nt, Homo sapiens
  misc_RNA (1)...(19): siRNA sense strand
cuaaauauccccaacaaag

SEQ ID NO: 353744 - RNA, 19 nt, Homo sapiens
  misc_RNA (1)...(19): siRNA sense strand
ucacugugccugaugacau

SEQ ID NO: 353745 - RNA, 19 nt, Homo sapiens
  misc_RNA (1)...(19): siRNA sense strand
ggaaauaucugaugaggaa

SEQ ID NO: 353746 - RNA, 19 nt, Homo sapiens
  misc_RNA (1)...(19): siRNA sense strand
ggacaaagguggcccagaa

SEQ ID NO: 353747 - RNA, 19 nt, Homo sapiens
  misc_RNA (1)...(19): siRNA sense strand
ggacuuggaugaagaaauc

SEQ ID NO: 353748 - RNA, 19 nt, Homo sapiens
  misc_RNA (1)...(19): siRNA sense strand
aaagagagauuacuucgaa

SEQ ID NO: 353749 - RNA, 19 nt, Homo sapiens
  misc_RNA (1)...(19): siRNA sense strand
ggaagggucuggagaugaa

SEQ ID NO: 353750 - RNA, 19 nt, Homo sapiens
  misc_RNA (1)...(19): siRNA sense strand
gugaggagauuucuaguga

SEQ ID NO: 353751 - RNA, 19 nt, Homo sapiens
  misc_RNA (1)...(19): siRNA sense strand
gaacuguaccgcucucuuu

SEQ ID NO: 353752 - RNA, 19 nt, Homo sapiens
  misc_RNA (1)...(19): siRNA sense strand
agacagggcuggagauaga

SEQ ID NO: 353753 - RNA, 19 nt, Homo sapiens
  misc_RNA (1)...(19): siRNA sense strand
ggaaggaucaaacuacaaa

SEQ ID NO: 353754 - RNA, 19 nt, Homo sapiens
  misc_RNA (1)...(19): siRNA sense strand
ggacaaagagagauuacuu

SEQ ID NO: 353755 - RNA, 19 nt, Homo sapiens
  misc_RNA (1)...(19): siRNA sense strand
ugacucagaucgaccauau

SEQ ID NO: 353756 - RNA, 19 nt, Homo sapiens
  misc_RNA (1)...(19): siRNA sense strand
gaacaggaguguggugauc

SEQ ID NO: 353757 - RNA, 19 nt, Homo sapiens
  misc_RNA (1)...(19): siRNA sense strand
gugaugaccuucucuagug

SEQ ID NO: 353758 - RNA, 19 nt, Homo sapiens
  misc_RNA (1)...(19): siRNA sense strand
ucagugacuuugagaaauu

SEQ ID NO: 353759 - RNA, 19 nt, Homo sapiens
  misc_RNA (1)...(19): siRNA sense strand
gaaggugauuuccuaguag

SEQ ID NO: 353760 - RNA, 19 nt, Homo sapiens
  misc_RNA (1)...(19): siRNA sense strand
ggagauuucuagugaagau

SEQ ID NO: 353761 - RNA, 19 nt, Homo sapiens
  misc_RNA (1)...(19): siRNA sense strand
gaagugaggagauuucuag

SEQ ID NO: 353762 - RNA, 19 nt, Homo sapiens
  misc_RNA (1)...(19): siRNA sense strand
gaccuucucuagugucaaa

SEQ ID NO: 353763 - RNA, 19 nt, Homo sapiens
  misc_RNA (1)...(19): siRNA sense strand
gaagacagggcuggagaua

SEQ ID NO: 353764 - RNA, 19 nt, Homo sapiens
  misc_RNA (1)...(19): siRNA sense strand
gcacuuaaagcauuguuga

SEQ ID NO: 353765 - RNA, 19 nt, Homo sapiens
  misc_RNA (1)...(19): siRNA sense strand
caaagguggcccagaauuu

SEQ ID NO: 353766 - RNA, 19 nt, Homo sapiens
  misc_RNA (1)...(19): siRNA sense strand
gaagagccgugaagaacca

SEQ ID NO: 353767 - RNA, 19 nt, Homo sapiens
  misc_RNA (1)...(19): siRNA sense strand
acaaggcacuuaaagcauu

SEQ ID NO: 353768 - RNA, 19 nt, Homo sapiens
  misc_RNA (1)...(19): siRNA sense strand
gaaccgcacacuucagaaa

SEQ ID NO: 353769 - RNA, 19 nt, Homo sapiens
  misc_RNA (1)...(19): siRNA sense strand
ggaaggcaguggcuugcaa

SEQ ID NO: 353770 - RNA, 19 nt, Homo sapiens
  misc_RNA (1)...(19): siRNA sense strand
cuucagaaauggcacgaua

SEQ ID NO: 353771 - RNA, 19 nt, Homo sapiens
  misc_RNA (1)...(19): siRNA sense strand
gacugggucuggaggaaua

SEQ ID NO: 353772 - RNA, 19 nt, Homo sapiens
  misc_RNA (1)...(19): siRNA sense strand
ggaaggaaggaucaaacua

SEQ ID NO: 353773 - RNA, 19 nt, Homo sapiens
  misc_RNA (1)...(19): siRNA sense strand
ugucaaaguuucugaggaa

SEQ ID NO: 353774 - RNA, 19 nt, Homo sapiens
  misc_RNA (1)...(19): siRNA sense strand
agaggaagcuggagaugga

SEQ ID NO: 353775 - RNA, 19 nt, Homo sapiens
  misc_RNA (1)...(19): siRNA sense strand
gaaggaaggaucaaacuac

SEQ ID NO: 353776 - RNA, 19 nt, Homo sapiens
  misc_RNA (1)...(19): siRNA sense strand
gaggagauuucuagugaag

SEQ ID NO: 353777 - RNA, 19 nt, Homo sapiens
  misc_RNA (1)...(19): siRNA sense strand
cgaagagaguggcauggaa

SEQ ID NO: 353778 - RNA, 19 nt, Homo sapiens
  misc_RNA (1)...(19): siRNA sense strand
ugaaggacuuggaugaaga

SEQ ID NO: 353779 - RNA, 19 nt, Homo sapiens
  misc_RNA (1)...(19): siRNA sense strand
gaucgaccauauucugaug

SEQ ID NO: 353780 - RNA, 19 nt, Homo sapiens
  misc_RNA (1)...(19): siRNA sense strand
caaacuggcuucuggaaaa

SEQ ID NO: 353781 - RNA, 19 nt, Homo sapiens
  misc_RNA (1)...(19): siRNA sense strand
gaccagcucuuggaaggaa

SEQ ID NO: 353782 - RNA, 19 nt, Homo sapiens
  misc_RNA (1)...(19): siRNA sense strand
gaagaagcagcaacgaaga

SEQ ID NO: 353783 - RNA, 19 nt, Homo sapiens
  misc_RNA (1)...(19): siRNA sense strand
caaaguuucugaggaagug

SEQ ID NO: 353784 - RNA, 19 nt, Homo sapiens
  misc_RNA (1)...(19): siRNA sense strand
gagaagaagcagcaacgaa

SEQ ID NO: 353785 - RNA, 19 nt, Homo sapiens
  misc_RNA (1)...(19): siRNA sense strand
gaggaagggucuggagaug

SEQ ID NO: 353786 - RNA, 19 nt, Homo sapiens
  misc_RNA (1)...(19): siRNA sense strand
ggaggaagacgaagagagu

SEQ ID NO: 353787 - RNA, 19 nt, Homo sapiens
  misc_RNA (1)...(19): siRNA sense strand
gcagugaggaggaggaaga

SEQ ID NO: 353788 - RNA, 19 nt, Homo sapiens
  misc_RNA (1)...(19): siRNA sense strand
gaaaggaagagccgugaag

SEQ ID NO: 353789 - RNA, 19 nt, Homo sapiens
  misc_RNA (1)...(19): siRNA sense strand
augaugagcugguagaaga

SEQ ID NO: 353790 - RNA, 19 nt, Homo sapiens
  misc_RNA (1)...(19): siRNA sense strand
caaggcacuuaaagcauug

SEQ ID NO: 353791 - RNA, 19 nt, Homo sapiens
  misc_RNA (1)...(19): siRNA sense strand
ugaagaugaugagcuggua

SEQ ID NO: 353792 - RNA, 19 nt, Homo sapiens
  misc_RNA (1)...(19): siRNA sense strand
gaacucauagaacggaaga

SEQ ID NO: 353793 - RNA, 19 nt, Homo sapiens
  misc_RNA (1)...(19): siRNA sense strand
gaaggacuuggaugaagaa

SEQ ID NO: 353794 - RNA, 19 nt, Homo sapiens
  misc_RNA (1)...(19): siRNA sense strand
ggaaguggagaaaggaaga

SEQ ID NO: 353795 - RNA, 19 nt, Homo sapiens
  misc_RNA (1)...(19): siRNA sense strand
ucacaaggcacuuaaagca

SEQ ID NO: 353796 - RNA, 19 nt, Homo sapiens
  misc_RNA (1)...(19): siRNA sense strand
ccagggugauugacagguu

SEQ ID NO: 353797 - RNA, 19 nt, Homo sapiens
  misc_RNA (1)...(19): siRNA sense strand
ggcaucagccucccucuug

SEQ ID NO: 353798 - RNA, 19 nt, Homo sapiens
  misc_RNA (1)...(19): siRNA sense strand
uaucagugacuuugagaaa

SEQ ID NO: 353799 - RNA, 19 nt, Homo sapiens
  misc_RNA (1)...(19): siRNA sense strand
gauggacaaagagagauua

SEQ ID NO: 353800 - RNA, 19 nt, Homo sapiens
  misc_RNA (1)...(19): siRNA sense strand
gaaauuuaccaagggaaug

SEQ ID NO: 353801 - RNA, 19 nt, Homo sapiens
  misc_RNA (1)...(19): siRNA sense strand
gcaaaaccaccucuagaaa

SEQ ID NO: 353802 - RNA, 19 nt, Homo sapiens
  misc_RNA (1)...(19): siRNA sense strand
ggaagugaggagauuucua

SEQ ID NO: 353803 - RNA, 19 nt, Homo sapiens
  misc_RNA (1)...(19): siRNA sense strand
gaugaggaaauaucugaug

SEQ ID NO: 353804 - RNA, 19 nt, Homo sapiens
  misc_RNA (1)...(19): siRNA sense strand
gaucacagggagagcaaga

SEQ ID NO: 353805 - RNA, 19 nt, Homo sapiens
  misc_RNA (1)...(19): siRNA sense strand
ggacuaucccagcuucaug

SEQ ID NO: 353806 - RNA, 19 nt, Homo sapiens
  misc_RNA (1)...(19): siRNA sense strand
gaccauacuacaaugaaug

SEQ ID NO: 353807 - RNA, 19 nt, Homo sapiens
  misc_RNA (1)...(19): siRNA sense strand
gcaccuauugaccauacua

SEQ ID NO: 353808 - RNA, 19 nt, Homo sapiens
  misc_RNA (1)...(19): siRNA sense strand
gggcuucaguguccagagu

SEQ ID NO: 353809 - RNA, 19 nt, Homo sapiens
  misc_RNA (1)...(19): siRNA sense strand
gaagaccagcuccuuggau

SEQ ID NO: 353810 - RNA, 19 nt, Homo sapiens
  misc_RNA (1)...(19): siRNA sense strand
gacaaagagagauuacuuc

SEQ ID NO: 353811 - RNA, 19 nt, Homo sapiens
  misc_RNA (1)...(19): siRNA sense strand
cuaguaguggguagcauua

SEQ ID NO: 353812 - RNA, 19 nt, Homo sapiens
  misc_RNA (1)...(19): siRNA sense strand
caaaaccaccucuagaaaa

SEQ ID NO: 353813 - RNA, 19 nt, Homo sapiens
  misc_RNA (1)...(19): siRNA sense strand
gaguaucagugacuuugag

SEQ ID NO: 353814 - RNA, 19 nt, Homo sapiens
  misc_RNA (1)...(19): siRNA sense strand
cagggugauugacagguuu

SEQ ID NO: 353815 - RNA, 19 nt, Homo sapiens
  misc_RNA (1)...(19): siRNA sense strand
guacccagacacuagauau

SEQ ID NO: 353816 - RNA, 19 nt, Homo sapiens
  misc_RNA (1)...(19): siRNA sense strand
caaagaggaagcuggagau

SEQ ID NO: 353817 - RNA, 19 nt, Homo sapiens
  misc_RNA (1)...(19): siRNA sense strand
ggcaguggcuugcaaucca

SEQ ID NO: 353818 - RNA, 19 nt, Homo sapiens
  misc_RNA (1)...(19): siRNA sense strand
guaguggguagcauuagaa

SEQ ID NO: 353819 - RNA, 19 nt, Homo sapiens
  misc_RNA (1)...(19): siRNA sense strand
gauaggaaagccagcaaag

SEQ ID NO: 353820 - RNA, 19 nt, Homo sapiens
  misc_RNA (1)...(19): siRNA sense strand
gagagauuacuucgaagga

SEQ ID NO: 353821 - RNA, 19 nt, Homo sapiens
  misc_RNA (1)...(19): siRNA sense strand
cagugacuuugagaaauuu

SEQ ID NO: 353822 - RNA, 19 nt, Homo sapiens
  misc_RNA (1)...(19): siRNA sense strand
ugaccauacuacaaugaau

SEQ ID NO: 353823 - RNA, 19 nt, Homo sapiens
  misc_RNA (1)...(19): siRNA sense strand
ccaaacuggcuucuggaaa

SEQ ID NO: 353824 - RNA, 19 nt, Homo sapiens
  misc_RNA (1)...(19): siRNA sense strand
aaggaaggaucaaacuaca

SEQ ID NO: 353825 - RNA, 19 nt, Homo sapiens
  misc_RNA (1)...(19): siRNA sense strand
ggaugaugguguggugaug

SEQ ID NO: 353826 - RNA, 19 nt, Homo sapiens
  misc_RNA (1)...(19): siRNA sense strand
gaucgucugaugaggaaau

SEQ ID NO: 353827 - RNA, 19 nt, Homo sapiens
  misc_RNA (1)...(19): siRNA sense strand
gguuucauguccuuagcaa

SEQ ID NO: 353828 - RNA, 19 nt, Homo sapiens
  misc_RNA (1)...(19): siRNA sense strand
ggaagaccagcuccuugga

SEQ ID NO: 353829 - RNA, 19 nt, Homo sapiens
  misc_RNA (1)...(19): siRNA sense strand
cuaaugcucaucugaagga

SEQ ID NO: 353830 - RNA, 19 nt, Homo sapiens
  misc_RNA (1)...(19): siRNA sense strand
ugaggagauuucuagugaa

SEQ ID NO: 353831 - RNA, 19 nt, Homo sapiens
  misc_RNA (1)...(19): siRNA sense strand
augaggaaauaucugauga

SEQ ID NO: 353832 - RNA, 19 nt, Homo sapiens
  misc_RNA (1)...(19): siRNA sense strand
gcaagcuacugaguuucau

SEQ ID NO: 353833 - RNA, 19 nt, Homo sapiens
  misc_RNA (1)...(19): siRNA sense strand
ggcuugcaauccagaaguu

SEQ ID NO: 353834 - RNA, 19 nt, Homo sapiens
  misc_RNA (1)...(19): siRNA sense strand
gaaggcaguggcuugcaau

SEQ ID NO: 353835 - RNA, 19 nt, Homo sapiens
  misc_RNA (1)...(19): siRNA sense strand
cuaucgaguucuuggcaaa

SEQ ID NO: 353836 - RNA, 19 nt, Homo sapiens
  misc_RNA (1)...(19): siRNA sense strand
gggacugggucuggaggaa

SEQ ID NO: 353837 - RNA, 19 nt, Homo sapiens
  misc_RNA (1)...(19): siRNA sense strand
gcgcuuugccgacuuuaca

SEQ ID NO: 353838 - RNA, 19 nt, Homo sapiens
  misc_RNA (1)...(19): siRNA sense strand
acaaagguggcccagaauu

SEQ ID NO: 353839 - RNA, 19 nt, Homo sapiens
  misc_RNA (1)...(19): siRNA sense strand
ucucuagugucaaaguuuc

SEQ ID NO: 353840 - RNA, 19 nt, Homo sapiens
  misc_RNA (1)...(19): siRNA sense strand
ccugggugcugcugaggaa

SEQ ID NO: 353841 - RNA, 19 nt, Homo sapiens
  misc_RNA (1)...(19): siRNA sense strand
agaaauggcacgauaagac

SEQ ID NO: 353842 - RNA, 19 nt, Homo sapiens
  misc_RNA (1)...(19): siRNA sense strand
ugaguuucauggcaccuau

SEQ ID NO: 353843 - RNA, 19 nt, Homo sapiens
  misc_RNA (1)...(19): siRNA sense strand
cagcaaaggcaggaaacuu

SEQ ID NO: 353844 - RNA, 19 nt, Homo sapiens
  misc_RNA (1)...(19): siRNA sense strand
caaagagagauuacuucga

SEQ ID NO: 353845 - RNA, 19 nt, Homo sapiens
  misc_RNA (1)...(19): siRNA sense strand
gaagagcacucgcagauuu

SEQ ID NO: 353846 - RNA, 19 nt, Homo sapiens
  misc_RNA (1)...(19): siRNA sense strand
ggaaagaaauugaugcauu

SEQ ID NO: 353847 - RNA, 19 nt, Homo sapiens
  misc_RNA (1)...(19): siRNA sense strand
gcaaguaccuucuccacua

SEQ ID NO: 353848 - RNA, 19 nt, Homo sapiens
  misc_RNA (1)...(19): siRNA sense strand
gaaagaaauugaugcauug

SEQ ID NO: 353849 - RNA, 19 nt, Homo sapiens
  misc_RNA (1)...(19): siRNA sense strand
gagcuucauuuaccucuua

SEQ ID NO: 353850 - RNA, 19 nt, Homo sapiens
  misc_RNA (1)...(19): siRNA sense strand
gguauaugcuggucacuuu

SEQ ID NO: 353851 - RNA, 19 nt, Homo sapiens
  misc_RNA (1)...(19): siRNA sense strand
aaagaagcaucaagguuua

SEQ ID NO: 353852 - RNA, 19 nt, Homo sapiens
  misc_RNA (1)...(19): siRNA sense strand
gggagcaccuaaccuaaua

SEQ ID NO: 353853 - RNA, 19 nt, Homo sapiens
  misc_RNA (1)...(19): siRNA sense strand
gaagugaauugaccaagga

SEQ ID NO: 353854 - RNA, 19 nt, Homo sapiens
  misc_RNA (1)...(19): siRNA sense strand
gaugauagaugaagcagau

SEQ ID NO: 353855 - RNA, 19 nt, Homo sapiens
  misc_RNA (1)...(19): siRNA sense strand
ccucuuagaugacuuguuu

SEQ ID NO: 353856 - RNA, 19 nt, Homo sapiens
  misc_RNA (1)...(19): siRNA sense strand
gacagucauuugaaaguua

SEQ ID NO: 353857 - RNA, 19 nt, Homo sapiens
  misc_RNA (1)...(19): siRNA sense strand
uaaagaagcaucaagguuu

SEQ ID NO: 353858 - RNA, 19 nt, Homo sapiens
  misc_RNA (1)...(19): siRNA sense strand
gaacauaccagcaucuuca

SEQ ID NO: 353859 - RNA, 19 nt, Homo sapiens
  misc_RNA (1)...(19): siRNA sense strand
gcacagccagaucuuauua

SEQ ID NO: 353860 - RNA, 19 nt, Homo sapiens
  misc_RNA (1)...(19): siRNA sense strand
ggaaaucuccucaaacaug

SEQ ID NO: 353861 - RNA, 19 nt, Homo sapiens
  misc_RNA (1)...(19): siRNA sense strand
ccaaucagaucaaccauau

SEQ ID NO: 353862 - RNA, 19 nt, Homo sapiens
  misc_RNA (1)...(19): siRNA sense strand
gaagaugggcagccagaua

SEQ ID NO: 353863 - RNA, 19 nt, Homo sapiens
  misc_RNA (1)...(19): siRNA sense strand
ggacuuaguuacaguguca

SEQ ID NO: 353864 - RNA, 19 nt, Homo sapiens
  misc_RNA (1)...(19): siRNA sense strand
gacaaugccucccuacuau

SEQ ID NO: 353865 - RNA, 19 nt, Homo sapiens
  misc_RNA (1)...(19): siRNA sense strand
uaucaaggcuggauggaaa

SEQ ID NO: 353866 - RNA, 19 nt, Homo sapiens
  misc_RNA (1)...(19): siRNA sense strand
gcacaaauaaugaaagaga

SEQ ID NO: 353867 - RNA, 19 nt, Homo sapiens
  misc_RNA (1)...(19): siRNA sense strand
caucagacauuacaccaaa

SEQ ID NO: 353868 - RNA, 19 nt, Homo sapiens
  misc_RNA (1)...(19): siRNA sense strand
caacuuucaucagacauua

SEQ ID NO: 353869 - RNA, 19 nt, Homo sapiens
  misc_RNA (1)...(19): siRNA sense strand
gaaaucuccucaaacaugu

SEQ ID NO: 353870 - RNA, 19 nt, Homo sapiens
  misc_RNA (1)...(19): siRNA sense strand
caaguugcuuugcugaaua

SEQ ID NO: 353871 - RNA, 19 nt, Homo sapiens
  misc_RNA (1)...(19): siRNA sense strand
uaagaaggguaugaugaua

SEQ ID NO: 353872 - RNA, 19 nt, Homo sapiens
  misc_RNA (1)...(19): siRNA sense strand
gaacggccaaccaaucaua

SEQ ID NO: 353873 - RNA, 19 nt, Homo sapiens
  misc_RNA (1)...(19): siRNA sense strand
gaacugugucaacuuauuu

SEQ ID NO: 353874 - RNA, 19 nt, Homo sapiens
  misc_RNA (1)...(19): siRNA sense strand
gccaagagauaaagaacaa

SEQ ID NO: 353875 - RNA, 19 nt, Homo sapiens
  misc_RNA (1)...(19): siRNA sense strand
gauaagaaggguaugauga

SEQ ID NO: 353876 - RNA, 19 nt, Homo sapiens
  misc_RNA (1)...(19): siRNA sense strand
caaguaccuucuccacuaa

SEQ ID NO: 353877 - RNA, 19 nt, Homo sapiens
  misc_RNA (1)...(19): siRNA sense strand
gaacuucuuggaugaaauu

SEQ ID NO: 353878 - RNA, 19 nt, Homo sapiens
  misc_RNA (1)...(19): siRNA sense strand
ccacgaagguugcauacau

SEQ ID NO: 353879 - RNA, 19 nt, Homo sapiens
  misc_RNA (1)...(19): siRNA sense strand
uaacuggcauagacaacua

SEQ ID NO: 353880 - RNA, 19 nt, Homo sapiens
  misc_RNA (1)...(19): siRNA sense strand
uagaacaacuggagaacuu

SEQ ID NO: 353881 - RNA, 19 nt, Homo sapiens
  misc_RNA (1)...(19): siRNA sense strand
ccuuuaagcuggauaagaa

SEQ ID NO: 353882 - RNA, 19 nt, Homo sapiens
  misc_RNA (1)...(19): siRNA sense strand
ugacaaauaugaguuggaa

SEQ ID NO: 353883 - RNA, 19 nt, Homo sapiens
  misc_RNA (1)...(19): siRNA sense strand
gcagaauccuguuguaaac

SEQ ID NO: 353884 - RNA, 19 nt, Homo sapiens
  misc_RNA (1)...(19): siRNA sense strand
gagccgaucacaugguuua

SEQ ID NO: 353885 - RNA, 19 nt, Homo sapiens
  misc_RNA (1)...(19): siRNA sense strand
caacaaaggaaagaaauug

SEQ ID NO: 353886 - RNA, 19 nt, Homo sapiens
  misc_RNA (1)...(19): siRNA sense strand
ucacaugguuuaucaaugg

SEQ ID NO: 353887 - RNA, 19 nt, Homo sapiens
  misc_RNA (1)...(19): siRNA sense strand
gcacugaacugugucaacu

SEQ ID NO: 353888 - RNA, 19 nt, Homo sapiens
  misc_RNA (1)...(19): siRNA sense strand
gcacaguguuccuauagca

SEQ ID NO: 353889 - RNA, 19 nt, Homo sapiens
  misc_RNA (1)...(19): siRNA sense strand
gaauauggacuuaguuaca

SEQ ID NO: 353890 - RNA, 19 nt, Homo sapiens
  misc_RNA (1)...(19): siRNA sense strand
guuacagugucauuucaua

SEQ ID NO: 353891 - RNA, 19 nt, Homo sapiens
  misc_RNA (1)...(19): siRNA sense strand
gaagagaacauaccagcau

SEQ ID NO: 353892 - RNA, 19 nt, Homo sapiens
  misc_RNA (1)...(19): siRNA sense strand
gaaaggacaggacgaagau

SEQ ID NO: 353893 - RNA, 19 nt, Homo sapiens
  misc_RNA (1)...(19): siRNA sense strand
ugacaggugugccuuuaga

SEQ ID NO: 353894 - RNA, 19 nt, Homo sapiens
  misc_RNA (1)...(19): siRNA sense strand
ucagaaaccacuaaugauu

SEQ ID NO: 353895 - RNA, 19 nt, Homo sapiens
  misc_RNA (1)...(19): siRNA sense strand
ugaagcagaugaauuugug

SEQ ID NO: 353896 - RNA, 19 nt, Homo sapiens
  misc_RNA (1)...(19): siRNA sense strand
gaugggagcaccuaaccua

SEQ ID NO: 353897 - RNA, 19 nt, Homo sapiens
  misc_RNA (1)...(19): siRNA sense strand
guguaugucuccacuacua

SEQ ID NO: 353898 - RNA, 19 nt, Homo sapiens
  misc_RNA (1)...(19): siRNA sense strand
aaggacagcuuuugauuua

SEQ ID NO: 353899 - RNA, 19 nt, Homo sapiens
  misc_RNA (1)...(19): siRNA sense strand
augaagaggucaauacuga

SEQ ID NO: 353900 - RNA, 19 nt, Homo sapiens
  misc_RNA (1)...(19): siRNA sense strand
agaugaagcagaugaauuu

SEQ ID NO: 353901 - RNA, 19 nt, Homo sapiens
  misc_RNA (1)...(19): siRNA sense strand
acugaacugugucaacuua

SEQ ID NO: 353902 - RNA, 19 nt, Homo sapiens
  misc_RNA (1)...(19): siRNA sense strand
gucacaaacucauauaugu

SEQ ID NO: 353903 - RNA, 19 nt, Homo sapiens
  misc_RNA (1)...(19): siRNA sense strand
ggacagcuuuugauuuauu

SEQ ID NO: 353904 - RNA, 19 nt, Homo sapiens
  misc_RNA (1)...(19): siRNA sense strand
guugacaggugugccuuua

SEQ ID NO: 353905 - RNA, 19 nt, Homo sapiens
  misc_RNA (1)...(19): siRNA sense strand
ugaacugugucaacuuauu

SEQ ID NO: 353906 - RNA, 19 nt, Homo sapiens
  misc_RNA (1)...(19): siRNA sense strand
cauuggaucuguaggcaaa

SEQ ID NO: 353907 - RNA, 19 nt, Homo sapiens
  misc_RNA (1)...(19): siRNA sense strand
uagcagacaguauggaaua

SEQ ID NO: 353908 - RNA, 19 nt, Homo sapiens
  misc_RNA (1)...(19): siRNA sense strand
ugugaugccuuacaauuau

SEQ ID NO: 353909 - RNA, 19 nt, Homo sapiens
  misc_RNA (1)...(19): siRNA sense strand
uggcauagcugucacaaac

SEQ ID NO: 353910 - RNA, 19 nt, Homo sapiens
  misc_RNA (1)...(19): siRNA sense strand
gugcaaggcaguuuacaaa

SEQ ID NO: 353911 - RNA, 19 nt, Homo sapiens
  misc_RNA (1)...(19): siRNA sense strand
ggucaauacugaacuaaaa

SEQ ID NO: 353912 - RNA, 19 nt, Homo sapiens
  misc_RNA (1)...(19): siRNA sense strand
ugugucaacuuauuuguga

SEQ ID NO: 353913 - RNA, 19 nt, Homo sapiens
  misc_RNA (1)...(19): siRNA sense strand
ucacuuuacugaagcaugu

SEQ ID NO: 353914 - RNA, 19 nt, Homo sapiens
  misc_RNA (1)...(19): siRNA sense strand
cagaccaacuuucaucaga

SEQ ID NO: 353915 - RNA, 19 nt, Homo sapiens
  misc_RNA (1)...(19): siRNA sense strand
agacaaugccucccuacua

SEQ ID NO: 353916 - RNA, 19 nt, Homo sapiens
  misc_RNA (1)...(19): siRNA sense strand
caucuucacucaacaaagg

SEQ ID NO: 353917 - RNA, 19 nt, Homo sapiens
  misc_RNA (1)...(19): siRNA sense strand
gaugggagcaaguugacua

SEQ ID NO: 353918 - RNA, 19 nt, Homo sapiens
  misc_RNA (1)...(19): siRNA sense strand
acagccagaucuuauuaaa

SEQ ID NO: 353919 - RNA, 19 nt, Homo sapiens
  misc_RNA (1)...(19): siRNA sense strand
agaaggguaugaugauaga

SEQ ID NO: 353920 - RNA, 19 nt, Homo sapiens
  misc_RNA (1)...(19): siRNA sense strand
ccaaguugcuuugcugaau

SEQ ID NO: 353921 - RNA, 19 nt, Homo sapiens
  misc_RNA (1)...(19): siRNA sense strand
guacaggagacuggaauaa

SEQ ID NO: 353922 - RNA, 19 nt, Homo sapiens
  misc_RNA (1)...(19): siRNA sense strand
gaaccaaugaccucacugu

SEQ ID NO: 353923 - RNA, 19 nt, Homo sapiens
  misc_RNA (1)...(19): siRNA sense strand
gcauagcugucacaaacuc

SEQ ID NO: 353924 - RNA, 19 nt, Homo sapiens
  misc_RNA (1)...(19): siRNA sense strand
gaagagccaaucagaucaa

SEQ ID NO: 353925 - RNA, 19 nt, Homo sapiens
  misc_RNA (1)...(19): siRNA sense strand
aggaauaccucaagcaagu

SEQ ID NO: 353926 - RNA, 19 nt, Homo sapiens
  misc_RNA (1)...(19): siRNA sense strand
uuggaucacuuaacaagaa

SEQ ID NO: 353927 - RNA, 19 nt, Homo sapiens
  misc_RNA (1)...(19): siRNA sense strand
gacgaaaucuuuuggauca

SEQ ID NO: 353928 - RNA, 19 nt, Homo sapiens
  misc_RNA (1)...(19): siRNA sense strand
gaucacaugguuuaucaau

SEQ ID NO: 353929 - RNA, 19 nt, Homo sapiens
  misc_RNA (1)...(19): siRNA sense strand
uuagaugacucugcaauca

SEQ ID NO: 353930 - RNA, 19 nt, Homo sapiens
  misc_RNA (1)...(19): siRNA sense strand
caaaggaaagaaauugaug

SEQ ID NO: 353931 - RNA, 19 nt, Homo sapiens
  misc_RNA (1)...(19): siRNA sense strand
ccgaucacaugguuuauca

SEQ ID NO: 353932 - RNA, 19 nt, Homo sapiens
  misc_RNA (1)...(19): siRNA sense strand
gagacucuuugcauuagug

SEQ ID NO: 353933 - RNA, 19 nt, Homo sapiens
  misc_RNA (1)...(19): siRNA sense strand
caagagauaaagaacaaug

SEQ ID NO: 353934 - RNA, 19 nt, Homo sapiens
  misc_RNA (1)...(19): siRNA sense strand
gaccaacuuucaucagaca

SEQ ID NO: 353935 - RNA, 19 nt, Homo sapiens
  misc_RNA (1)...(19): siRNA sense strand
uuaaaccucuuccucuuca

SEQ ID NO: 353936 - RNA, 19 nt, Homo sapiens
  misc_RNA (1)...(19): siRNA sense strand
uauuaaaccucuuccucuu

SEQ ID NO: 353937 - RNA, 19 nt, Homo sapiens
  misc_RNA (1)...(19): siRNA sense strand
cacgaagguugcauacauu

SEQ ID NO: 353938 - RNA, 19 nt, Homo sapiens
  misc_RNA (1)...(19): siRNA sense strand
uggaauauggacuuaguua

SEQ ID NO: 353939 - RNA, 19 nt, Homo sapiens
  misc_RNA (1)...(19): siRNA sense strand
gaaguggagacagucauuu

SEQ ID NO: 353940 - RNA, 19 nt, Homo sapiens
  misc_RNA (1)...(19): siRNA sense strand
cuucaccacugacucaauu

SEQ ID NO: 353941 - RNA, 19 nt, Homo sapiens
  misc_RNA (1)...(19): siRNA sense strand
ucauauaugucagaccaaa

SEQ ID NO: 353942 - RNA, 19 nt, Homo sapiens
  misc_RNA (1)...(19): siRNA sense strand
augcaacguuuaugaauga

SEQ ID NO: 353943 - RNA, 19 nt, Homo sapiens
  misc_RNA (1)...(19): siRNA sense strand
caugaggagccaagagaua

SEQ ID NO: 353944 - RNA, 19 nt, Homo sapiens
  misc_RNA (1)...(19): siRNA sense strand
gaucaaccauauuaauagc

SEQ ID NO: 353945 - RNA, 19 nt, Homo sapiens
  misc_RNA (1)...(19): siRNA sense strand
acaaugaccuuauuuccua

SEQ ID NO: 353946 - RNA, 19 nt, Homo sapiens
  misc_RNA (1)...(19): siRNA sense strand
gaagaaaauucggauguua

SEQ ID NO: 353947 - RNA, 19 nt, Homo sapiens
  misc_RNA (1)...(19): siRNA sense strand
gagugaacuugaauuauga

SEQ ID NO: 353948 - RNA, 19 nt, Homo sapiens
  misc_RNA (1)...(19): siRNA sense strand
ggaagaaugugacccuuac

SEQ ID NO: 353949 - RNA, 19 nt, Homo sapiens
  misc_RNA (1)...(19): siRNA sense strand
agagugaacuugaauuaug

SEQ ID NO: 353950 - RNA, 19 nt, Homo sapiens
  misc_RNA (1)...(19): siRNA sense strand
aaagaaggcacuugaaauu

SEQ ID NO: 353951 - RNA, 19 nt, Homo sapiens
  misc_RNA (1)...(19): siRNA sense strand
ugagaacaaugaccuuauu

SEQ ID NO: 353952 - RNA, 19 nt, Homo sapiens
  misc_RNA (1)...(19): siRNA sense strand
ggaugcacaugaagaaaug

SEQ ID NO: 353953 - RNA, 19 nt, Homo sapiens
  misc_RNA (1)...(19): siRNA sense strand
gaaggaugcacaugaagaa

SEQ ID NO: 353954 - RNA, 19 nt, Homo sapiens
  misc_RNA (1)...(19): siRNA sense strand
ggagcaggcuguggaagaa

SEQ ID NO: 353955 - RNA, 19 nt, Homo sapiens
  misc_RNA (1)...(19): siRNA sense strand
gaaggcacuugaaauuaca

SEQ ID NO: 353956 - RNA, 19 nt, Homo sapiens
  misc_RNA (1)...(19): siRNA sense strand
ccucagauaccaagagaua

SEQ ID NO: 353957 - RNA, 19 nt, Homo sapiens
  misc_RNA (1)...(19): siRNA sense strand
ucagagugaacuugaauua

SEQ ID NO: 353958 - RNA, 19 nt, Homo sapiens
  misc_RNA (1)...(19): siRNA sense strand
gcccuaguguggaugauuu

SEQ ID NO: 353959 - RNA, 19 nt, Homo sapiens
  misc_RNA (1)...(19): siRNA sense strand
gaugaaaucagcccuagug

SEQ ID NO: 353960 - RNA, 19 nt, Homo sapiens
  misc_RNA (1)...(19): siRNA sense strand
ccacgacucugaccauagu

SEQ ID NO: 353961 - RNA, 19 nt, Homo sapiens
  misc_RNA (1)...(19): siRNA sense strand
uaaagaaggcacuugaaau

SEQ ID NO: 353962 - RNA, 19 nt, Homo sapiens
  misc_RNA (1)...(19): siRNA sense strand
gagaacaaugaccuuauuu

SEQ ID NO: 353963 - RNA, 19 nt, Homo sapiens
  misc_RNA (1)...(19): siRNA sense strand
uggaucccuuuacuuauua

SEQ ID NO: 353964 - RNA, 19 nt, Homo sapiens
  misc_RNA (1)...(19): siRNA sense strand
gaccuuauuuccuacaaca

SEQ ID NO: 353965 - RNA, 19 nt, Homo sapiens
  misc_RNA (1)...(19): siRNA sense strand
ggucagaggacgaucaaga

SEQ ID NO: 353966 - RNA, 19 nt, Homo sapiens
  misc_RNA (1)...(19): siRNA sense strand
acucuggccucuugaauga

SEQ ID NO: 353967 - RNA, 19 nt, Homo sapiens
  misc_RNA (1)...(19): siRNA sense strand
gcagaugccucagauacca

SEQ ID NO: 353968 - RNA, 19 nt, Homo sapiens
  misc_RNA (1)...(19): siRNA sense strand
ugaccaagaauguggauuu

SEQ ID NO: 353969 - RNA, 19 nt, Homo sapiens
  misc_RNA (1)...(19): siRNA sense strand
agaaggcacuugaaauuac

SEQ ID NO: 353970 - RNA, 19 nt, Homo sapiens
  misc_RNA (1)...(19): siRNA sense strand
cugcgaaacuuguaucugu

SEQ ID NO: 353971 - RNA, 19 nt, Homo sapiens
  misc_RNA (1)...(19): siRNA sense strand
ugaaugauacugaggagaa

SEQ ID NO: 353972 - RNA, 19 nt, Homo sapiens
  misc_RNA (1)...(19): siRNA sense strand
aagaaggcacuugaaauua

SEQ ID NO: 353973 - RNA, 19 nt, Homo sapiens
  misc_RNA (1)...(19): siRNA sense strand
caaccacaaucaugaggau

SEQ ID NO: 353974 - RNA, 19 nt, Homo sapiens
  misc_RNA (1)...(19): siRNA sense strand
gaacaaugaccuuauuucc

SEQ ID NO: 353975 - RNA, 19 nt, Homo sapiens
  misc_RNA (1)...(19): siRNA sense strand
uuggaucccuuuacuuauu

SEQ ID NO: 353976 - RNA, 19 nt, Homo sapiens
  misc_RNA (1)...(19): siRNA sense strand
uuaaagaaggcacuugaaa

SEQ ID NO: 353977 - RNA, 19 nt, Homo sapiens
  misc_RNA (1)...(19): siRNA sense strand
ucuggccucuugaaugaua

SEQ ID NO: 353978 - RNA, 19 nt, Homo sapiens
  misc_RNA (1)...(19): siRNA sense strand
ggauguuaguggcagagaa

SEQ ID NO: 353979 - RNA, 19 nt, Homo sapiens
  misc_RNA (1)...(19): siRNA sense strand
ccagcaaucaggacuugua

SEQ ID NO: 353980 - RNA, 19 nt, Homo sapiens
  misc_RNA (1)...(19): siRNA sense strand
gaaucaaggagcucacuca

SEQ ID NO: 353981 - RNA, 19 nt, Homo sapiens
  misc_RNA (1)...(19): siRNA sense strand
aaucaggacuuguauuggu

SEQ ID NO: 353982 - RNA, 19 nt, Homo sapiens
  misc_RNA (1)...(19): siRNA sense strand
gauaccaagagauaacaaa

SEQ ID NO: 353983 - RNA, 19 nt, Homo sapiens
  misc_RNA (1)...(19): siRNA sense strand
aguuggaucccuuuacuua

SEQ ID NO: 353984 - RNA, 19 nt, Homo sapiens
  misc_RNA (1)...(19): siRNA sense strand
uggcucagcucauggaagu

SEQ ID NO: 353985 - RNA, 19 nt, Homo sapiens
  misc_RNA (1)...(19): siRNA sense strand
uccaaagccugccugaaga

SEQ ID NO: 353986 - RNA, 19 nt, Homo sapiens
  misc_RNA (1)...(19): siRNA sense strand
ccaagaauguggauuuugu

SEQ ID NO: 353987 - RNA, 19 nt, Homo sapiens
  misc_RNA (1)...(19): siRNA sense strand
caucaaggcauuuauugca

SEQ ID NO: 353988 - RNA, 19 nt, Homo sapiens
  misc_RNA (1)...(19): siRNA sense strand
gccagcagaugccucagau

SEQ ID NO: 353989 - RNA, 19 nt, Homo sapiens
  misc_RNA (1)...(19): siRNA sense strand
ggaucccuuuacuuauuaa

SEQ ID NO: 353990 - RNA, 19 nt, Homo sapiens
  misc_RNA (1)...(19): siRNA sense strand
gaggagaacaacucugaca

SEQ ID NO: 353991 - RNA, 19 nt, Homo sapiens
  misc_RNA (1)...(19): siRNA sense strand
gaauguggauuuugugaag

SEQ ID NO: 353992 - RNA, 19 nt, Homo sapiens
  misc_RNA (1)...(19): siRNA sense strand
ggagaacaacucugacaac

SEQ ID NO: 353993 - RNA, 19 nt, Homo sapiens
  misc_RNA (1)...(19): siRNA sense strand
gauguuaguggcagagaau

SEQ ID NO: 353994 - RNA, 19 nt, Homo sapiens
  misc_RNA (1)...(19): siRNA sense strand
ugaaggaugcacaugaaga

SEQ ID NO: 353995 - RNA, 19 nt, Homo sapiens
  misc_RNA (1)...(19): siRNA sense strand
aaucaauucugcgaaacuu

SEQ ID NO: 353996 - RNA, 19 nt, Homo sapiens
  misc_RNA (1)...(19): siRNA sense strand
gaucaagagcucauaaucc

SEQ ID NO: 353997 - RNA, 19 nt, Homo sapiens
  misc_RNA (1)...(19): siRNA sense strand
ggacgaucaagagcucaua

SEQ ID NO: 353998 - RNA, 19 nt, Homo sapiens
  misc_RNA (1)...(19): siRNA sense strand
uggaagaaugugacccuua

SEQ ID NO: 353999 - RNA, 19 nt, Homo sapiens
  misc_RNA (1)...(19): siRNA sense strand
cacaggaaacccagaaguu

SEQ ID NO: 354000 - RNA, 19 nt, Homo sapiens
  misc_RNA (1)...(19): siRNA sense strand
gcaugaauagaaucaagga

SEQ ID NO: 354001 - RNA, 19 nt, Homo sapiens
  misc_RNA (1)...(19): siRNA sense strand
gaccaagaauguggauuuu

SEQ ID NO: 354002 - RNA, 19 nt, Homo sapiens
  misc_RNA (1)...(19): siRNA sense strand
cagcagaugccucagauac

SEQ ID NO: 354003 - RNA, 19 nt, Homo sapiens
  misc_RNA (1)...(19): siRNA sense strand
aaucagcccuaguguggau

SEQ ID NO: 354004 - RNA, 19 nt, Homo sapiens
  misc_RNA (1)...(19): siRNA sense strand
ccaaagccugccugaagaa

SEQ ID NO: 354005 - RNA, 19 nt, Homo sapiens
  misc_RNA (1)...(19): siRNA sense strand
gccaucaaggcauuuauug

SEQ ID NO: 354006 - RNA, 19 nt, Homo sapiens
  misc_RNA (1)...(19): siRNA sense strand
gaaugauacugaggagaac

SEQ ID NO: 354007 - RNA, 19 nt, Homo sapiens
  misc_RNA (1)...(19): siRNA sense strand
aggcauuuauugcagugua

SEQ ID NO: 354008 - RNA, 19 nt, Homo sapiens
  misc_RNA (1)...(19): siRNA sense strand
gacgaucaagagcucauaa

SEQ ID NO: 354009 - RNA, 19 nt, Homo sapiens
  misc_RNA (1)...(19): siRNA sense strand
cagagaaugggaagaagga

SEQ ID NO: 354010 - RNA, 19 nt, Homo sapiens
  misc_RNA (1)...(19): siRNA sense strand
uuguggauauuucugauga

SEQ ID NO: 354011 - RNA, 19 nt, Homo sapiens
  misc_RNA (1)...(19): siRNA sense strand
caagggaagccacgacucu

SEQ ID NO: 354012 - RNA, 19 nt, Homo sapiens
  misc_RNA (1)...(19): siRNA sense strand
ugaccauagucuucucuca

SEQ ID NO: 354013 - RNA, 19 nt, Homo sapiens
  misc_RNA (1)...(19): siRNA sense strand
caccugaccgugcgaauca

SEQ ID NO: 354014 - RNA, 19 nt, Homo sapiens
  misc_RNA (1)...(19): siRNA sense strand
caaagccugccugaagaaa

SEQ ID NO: 354015 - RNA, 19 nt, Homo sapiens
  misc_RNA (1)...(19): siRNA sense strand
ccugagaacaaugaccuua

SEQ ID NO: 354016 - RNA, 19 nt, Homo sapiens
  misc_RNA (1)...(19): siRNA sense strand
guggaugauuuggcucuga

SEQ ID NO: 354017 - RNA, 19 nt, Homo sapiens
  misc_RNA (1)...(19): siRNA sense strand
cugaggagaacaacucuga

SEQ ID NO: 354018 - RNA, 19 nt, Homo sapiens
  misc_RNA (1)...(19): siRNA sense strand
guacuuuccgucacuccaa

SEQ ID NO: 354019 - RNA, 19 nt, Homo sapiens
  misc_RNA (1)...(19): siRNA sense strand
ucaauucugcgaaacuugu

SEQ ID NO: 354020 - RNA, 19 nt, Homo sapiens
  misc_RNA (1)...(19): siRNA sense strand
uauauccaccuauguguca

SEQ ID NO: 354021 - RNA, 19 nt, Homo sapiens
  misc_RNA (1)...(19): siRNA sense strand
agaaugggaagaaggauca

SEQ ID NO: 354022 - RNA, 19 nt, Homo sapiens
  misc_RNA (1)...(19): siRNA sense strand
cugagcauauauccaccua

SEQ ID NO: 354023 - RNA, 19 nt, Homo sapiens
  misc_RNA (1)...(19): siRNA sense strand
cagagugaacuugaauuau

SEQ ID NO: 354024 - RNA, 19 nt, Homo sapiens
  misc_RNA (1)...(19): siRNA sense strand
ccacaggaaacccagaagu

SEQ ID NO: 354025 - RNA, 19 nt, Homo sapiens
  misc_RNA (1)...(19): siRNA sense strand
caauucugcgaaacuugua

SEQ ID NO: 354026 - RNA, 19 nt, Homo sapiens
  misc_RNA (1)...(19): siRNA sense strand
agaacaaugaccuuauuuc

SEQ ID NO: 354027 - RNA, 19 nt, Homo sapiens
  misc_RNA (1)...(19): siRNA sense strand
acaggaaacccagaaguuc

SEQ ID NO: 354028 - RNA, 19 nt, Homo sapiens
  misc_RNA (1)...(19): siRNA sense strand
uggcagagaaugggaagaa

SEQ ID NO: 354029 - RNA, 19 nt, Homo sapiens
  misc_RNA (1)...(19): siRNA sense strand
ugaagaaaauucggauguu

SEQ ID NO: 354030 - RNA, 19 nt, Homo sapiens
  misc_RNA (1)...(19): siRNA sense strand
cccuuacucuggccucuug

SEQ ID NO: 354031 - RNA, 19 nt, Homo sapiens
  misc_RNA (1)...(19): siRNA sense strand
gggaucacccugagaaagc

SEQ ID NO: 354032 - RNA, 19 nt, Homo sapiens
  misc_RNA (1)...(19): siRNA sense strand
gauaguuggaucccuuuac

SEQ ID NO: 354033 - RNA, 19 nt, Homo sapiens
  misc_RNA (1)...(19): siRNA sense strand
cgaucaagagcucauaauc

SEQ ID NO: 354034 - RNA, 19 nt, Homo sapiens
  misc_RNA (1)...(19): siRNA sense strand
caacucugacaaccacaau

SEQ ID NO: 354035 - RNA, 19 nt, Homo sapiens
  misc_RNA (1)...(19): siRNA sense strand
ugcgaaacuuguaucuguu

SEQ ID NO: 354036 - RNA, 19 nt, Homo sapiens
  misc_RNA (1)...(19): siRNA sense strand
cagcaaucaggacuuguau

SEQ ID NO: 354037 - RNA, 19 nt, Homo sapiens
  misc_RNA (1)...(19): siRNA sense strand
ugccucagauaccaagaga

SEQ ID NO: 354038 - RNA, 19 nt, Homo sapiens
  misc_RNA (1)...(19): siRNA sense strand
cugacaaccacaaucauga

SEQ ID NO: 354039 - RNA, 19 nt, Homo sapiens
  misc_RNA (1)...(19): siRNA sense strand
ucagauaccaagagauaac

SEQ ID NO: 354040 - RNA, 19 nt, Homo sapiens
  misc_RNA (1)...(19): siRNA sense strand
acaaugaccuuauuuccua

SEQ ID NO: 354041 - RNA, 19 nt, Homo sapiens
  misc_RNA (1)...(19): siRNA sense strand
gaagaaaauucggauguua

SEQ ID NO: 354042 - RNA, 19 nt, Homo sapiens
  misc_RNA (1)...(19): siRNA sense strand
gagugaacuugaauuauga

SEQ ID NO: 354043 - RNA, 19 nt, Homo sapiens
  misc_RNA (1)...(19): siRNA sense strand
ggaagaaugugacccuuac

SEQ ID NO: 354044 - RNA, 19 nt, Homo sapiens
  misc_RNA (1)...(19): siRNA sense strand
agagugaacuugaauuaug

SEQ ID NO: 354045 - RNA, 19 nt, Homo sapiens
  misc_RNA (1)...(19): siRNA sense strand
aaagaaggcacuugaaauu

SEQ ID NO: 354046 - RNA, 19 nt, Homo sapiens
  misc_RNA (1)...(19): siRNA sense strand
ugagaacaaugaccuuauu

SEQ ID NO: 354047 - RNA, 19 nt, Homo sapiens
  misc_RNA (1)...(19): siRNA sense strand
ggaugcacaugaagaaaug

SEQ ID NO: 354048 - RNA, 19 nt, Homo sapiens
  misc_RNA (1)...(19): siRNA sense strand
gaaggaugcacaugaagaa

SEQ ID NO: 354049 - RNA, 19 nt, Homo sapiens
  misc_RNA (1)...(19): siRNA sense strand
ggagcaggcuguggaagaa

SEQ ID NO: 354050 - RNA, 19 nt, Homo sapiens
  misc_RNA (1)...(19): siRNA sense strand
gaaggcacuugaaauuaca

SEQ ID NO: 354051 - RNA, 19 nt, Homo sapiens
  misc_RNA (1)...(19): siRNA sense strand
ccucagauaccaagagaua

SEQ ID NO: 354052 - RNA, 19 nt, Homo sapiens
  misc_RNA (1)...(19): siRNA sense strand
ucagagugaacuugaauua

SEQ ID NO: 354053 - RNA, 19 nt, Homo sapiens
  misc_RNA (1)...(19): siRNA sense strand
gcccuaguguggaugauuu

SEQ ID NO: 354054 - RNA, 19 nt, Homo sapiens
  misc_RNA (1)...(19): siRNA sense strand
gaugaaaucagcccuagug

SEQ ID NO: 354055 - RNA, 19 nt, Homo sapiens
  misc_RNA (1)...(19): siRNA sense strand
uaaagaaggcacuugaaau

SEQ ID NO: 354056 - RNA, 19 nt, Homo sapiens
  misc_RNA (1)...(19): siRNA sense strand
gagaacaaugaccuuauuu

SEQ ID NO: 354057 - RNA, 19 nt, Homo sapiens
  misc_RNA (1)...(19): siRNA sense strand
uggaucccuuuacuuauua

SEQ ID NO: 354058 - RNA, 19 nt, Homo sapiens
  misc_RNA (1)...(19): siRNA sense strand
gaccuuauuuccuacaaca

SEQ ID NO: 354059 - RNA, 19 nt, Homo sapiens
  misc_RNA (1)...(19): siRNA sense strand
ggucagaggacgaucaaga

SEQ ID NO: 354060 - RNA, 19 nt, Homo sapiens
  misc_RNA (1)...(19): siRNA sense strand
acucuggccucuugaauga

SEQ ID NO: 354061 - RNA, 19 nt, Homo sapiens
  misc_RNA (1)...(19): siRNA sense strand
gcagaugccucagauacca

SEQ ID NO: 354062 - RNA, 19 nt, Homo sapiens
  misc_RNA (1)...(19): siRNA sense strand
ugaccaagaauguggauuu

SEQ ID NO: 354063 - RNA, 19 nt, Homo sapiens
  misc_RNA (1)...(19): siRNA sense strand
agaaggcacuugaaauuac

SEQ ID NO: 354064 - RNA, 19 nt, Homo sapiens
  misc_RNA (1)...(19): siRNA sense strand
cugcgaaacuuguaucugu

SEQ ID NO: 354065 - RNA, 19 nt, Homo sapiens
  misc_RNA (1)...(19): siRNA sense strand
ugaaugauacugaggagaa

SEQ ID NO: 354066 - RNA, 19 nt, Homo sapiens
  misc_RNA (1)...(19): siRNA sense strand
aagaaggcacuugaaauua

SEQ ID NO: 354067 - RNA, 19 nt, Homo sapiens
  misc_RNA (1)...(19): siRNA sense strand
caaccacaaucaugaggau

SEQ ID NO: 354068 - RNA, 19 nt, Homo sapiens
  misc_RNA (1)...(19): siRNA sense strand
gaacaaugaccuuauuucc

SEQ ID NO: 354069 - RNA, 19 nt, Homo sapiens
  misc_RNA (1)...(19): siRNA sense strand
uuggaucccuuuacuuauu

SEQ ID NO: 354070 - RNA, 19 nt, Homo sapiens
  misc_RNA (1)...(19): siRNA sense strand
uuaaagaaggcacuugaaa

SEQ ID NO: 354071 - RNA, 19 nt, Homo sapiens
  misc_RNA (1)...(19): siRNA sense strand
ucuggccucuugaaugaua

SEQ ID NO: 354072 - RNA, 19 nt, Homo sapiens
  misc_RNA (1)...(19): siRNA sense strand
ggauguuaguggcagagaa

SEQ ID NO: 354073 - RNA, 19 nt, Homo sapiens
  misc_RNA (1)...(19): siRNA sense strand
ccagcaaucaggacuugua

SEQ ID NO: 354074 - RNA, 19 nt, Homo sapiens
  misc_RNA (1)...(19): siRNA sense strand
gaaucaaggagcucacuca

SEQ ID NO: 354075 - RNA, 19 nt, Homo sapiens
  misc_RNA (1)...(19): siRNA sense strand
aaucaggacuuguauuggu

SEQ ID NO: 354076 - RNA, 19 nt, Homo sapiens
  misc_RNA (1)...(19): siRNA sense strand
gauaccaagagauaacaaa

SEQ ID NO: 354077 - RNA, 19 nt, Homo sapiens
  misc_RNA (1)...(19): siRNA sense strand
aguuggaucccuuuacuua

SEQ ID NO: 354078 - RNA, 19 nt, Homo sapiens
  misc_RNA (1)...(19): siRNA sense strand
ccaagaauguggauuuugu

SEQ ID NO: 354079 - RNA, 19 nt, Homo sapiens
  misc_RNA (1)...(19): siRNA sense strand
uccaaagccugccugaaga

SEQ ID NO: 354080 - RNA, 19 nt, Homo sapiens
  misc_RNA (1)...(19): siRNA sense strand
gaauguggauuuugugaag

SEQ ID NO: 354081 - RNA, 19 nt, Homo sapiens
  misc_RNA (1)...(19): siRNA sense strand
ggaucccuuuacuuauuaa

SEQ ID NO: 354082 - RNA, 19 nt, Homo sapiens
  misc_RNA (1)...(19): siRNA sense strand
gccagcagaugccucagau

SEQ ID NO: 354083 - RNA, 19 nt, Homo sapiens
  misc_RNA (1)...(19): siRNA sense strand
gaggagaacaacucugaca

SEQ ID NO: 354084 - RNA, 19 nt, Homo sapiens
  misc_RNA (1)...(19): siRNA sense strand
ggagaacaacucugacaac

SEQ ID NO: 354085 - RNA, 19 nt, Homo sapiens
  misc_RNA (1)...(19): siRNA sense strand
gauguuaguggcagagaau

SEQ ID NO: 354086 - RNA, 19 nt, Homo sapiens
  misc_RNA (1)...(19): siRNA sense strand
ugaaggaugcacaugaaga

SEQ ID NO: 354087 - RNA, 19 nt, Homo sapiens
  misc_RNA (1)...(19): siRNA sense strand
aaucaauucugcgaaacuu

SEQ ID NO: 354088 - RNA, 19 nt, Homo sapiens
  misc_RNA (1)...(19): siRNA sense strand
gaucaagagcucauaaucc

SEQ ID NO: 354089 - RNA, 19 nt, Homo sapiens
  misc_RNA (1)...(19): siRNA sense strand
ggacgaucaagagcucaua

SEQ ID NO: 354090 - RNA, 19 nt, Homo sapiens
  misc_RNA (1)...(19): siRNA sense strand
uggaagaaugugacccuua

SEQ ID NO: 354091 - RNA, 19 nt, Homo sapiens
  misc_RNA (1)...(19): siRNA sense strand
gaccaagaauguggauuuu

SEQ ID NO: 354092 - RNA, 19 nt, Homo sapiens
  misc_RNA (1)...(19): siRNA sense strand
gcaugaauagaaucaagga

SEQ ID NO: 354093 - RNA, 19 nt, Homo sapiens
  misc_RNA (1)...(19): siRNA sense strand
gaaugauacugaggagaac

SEQ ID NO: 354094 - RNA, 19 nt, Homo sapiens
  misc_RNA (1)...(19): siRNA sense strand
cagcagaugccucagauac

SEQ ID NO: 354095 - RNA, 19 nt, Homo sapiens
  misc_RNA (1)...(19): siRNA sense strand
aaucagcccuaguguggau

SEQ ID NO: 354096 - RNA, 19 nt, Homo sapiens
  misc_RNA (1)...(19): siRNA sense strand
ccaaagccugccugaagaa

SEQ ID NO: 354097 - RNA, 19 nt, Homo sapiens
  misc_RNA (1)...(19): siRNA sense strand
gacgaucaagagcucauaa

SEQ ID NO: 354098 - RNA, 19 nt, Homo sapiens
  misc_RNA (1)...(19): siRNA sense strand
cagagaaugggaagaagga

SEQ ID NO: 354099 - RNA, 19 nt, Homo sapiens
  misc_RNA (1)...(19): siRNA sense strand
uuguggauauuucugauga

SEQ ID NO: 354100 - RNA, 19 nt, Homo sapiens
  misc_RNA (1)...(19): siRNA sense strand
caccugaccgugcgaauca

SEQ ID NO: 354101 - RNA, 19 nt, Homo sapiens
  misc_RNA (1)...(19): siRNA sense strand
caaagccugccugaagaaa

SEQ ID NO: 354102 - RNA, 19 nt, Homo sapiens
  misc_RNA (1)...(19): siRNA sense strand
ccugagaacaaugaccuua

SEQ ID NO: 354103 - RNA, 19 nt, Homo sapiens
  misc_RNA (1)...(19): siRNA sense strand
guggaugauuuggcucuga

SEQ ID NO: 354104 - RNA, 19 nt, Homo sapiens
  misc_RNA (1)...(19): siRNA sense strand
cugaggagaacaacucuga

SEQ ID NO: 354105 - RNA, 19 nt, Homo sapiens
  misc_RNA (1)...(19): siRNA sense strand
ucaauucugcgaaacuugu

SEQ ID NO: 354106 - RNA, 19 nt, Homo sapiens
  misc_RNA (1)...(19): siRNA sense strand
uauauccaccuauguguca

SEQ ID NO: 354107 - RNA, 19 nt, Homo sapiens
  misc_RNA (1)...(19): siRNA sense strand
agaaugggaagaaggauca

SEQ ID NO: 354108 - RNA, 19 nt, Homo sapiens
  misc_RNA (1)...(19): siRNA sense strand
guacuuuccgucacuccaa

SEQ ID NO: 354109 - RNA, 19 nt, Homo sapiens
  misc_RNA (1)...(19): siRNA sense strand
cugagcauauauccaccua

SEQ ID NO: 354110 - RNA, 19 nt, Homo sapiens
  misc_RNA (1)...(19): siRNA sense strand
cagagugaacuugaauuau

SEQ ID NO: 354111 - RNA, 19 nt, Homo sapiens
  misc_RNA (1)...(19): siRNA sense strand
agaacaaugaccuuauuuc

SEQ ID NO: 354112 - RNA, 19 nt, Homo sapiens
  misc_RNA (1)...(19): siRNA sense strand
caauucugcgaaacuugua

SEQ ID NO: 354113 - RNA, 19 nt, Homo sapiens
  misc_RNA (1)...(19): siRNA sense strand
uggcagagaaugggaagaa

SEQ ID NO: 354114 - RNA, 19 nt, Homo sapiens
  misc_RNA (1)...(19): siRNA sense strand
ugaagaaaauucggauguu

SEQ ID NO: 354115 - RNA, 19 nt, Homo sapiens
  misc_RNA (1)...(19): siRNA sense strand
cccuuacucuggccucuug

SEQ ID NO: 354116 - RNA, 19 nt, Homo sapiens
  misc_RNA (1)...(19): siRNA sense strand
gauaguuggaucccuuuac

SEQ ID NO: 354117 - RNA, 19 nt, Homo sapiens
  misc_RNA (1)...(19): siRNA sense strand
cgaucaagagcucauaauc

SEQ ID NO: 354118 - RNA, 19 nt, Homo sapiens
  misc_RNA (1)...(19): siRNA sense strand
ugccucagauaccaagaga

SEQ ID NO: 354119 - RNA, 19 nt, Homo sapiens
  misc_RNA (1)...(19): siRNA sense strand
ugcgaaacuuguaucuguu

SEQ ID NO: 354120 - RNA, 19 nt, Homo sapiens
  misc_RNA (1)...(19): siRNA sense strand
cagcaaucaggacuuguau

SEQ ID NO: 354121 - RNA, 19 nt, Homo sapiens
  misc_RNA (1)...(19): siRNA sense strand
cugacaaccacaaucauga

SEQ ID NO: 354122 - RNA, 19 nt, Homo sapiens
  misc_RNA (1)...(19): siRNA sense strand
caacucugacaaccacaau

SEQ ID NO: 354123 - RNA, 19 nt, Homo sapiens
  misc_RNA (1)...(19): siRNA sense strand
ucagauaccaagagauaac

SEQ ID NO: 354124 - RNA, 19 nt, Homo sapiens
  misc_RNA (1)...(19): siRNA sense strand
ugaggaagcugacaucuau

SEQ ID NO: 354125 - RNA, 19 nt, Homo sapiens
  misc_RNA (1)...(19): siRNA sense strand
gaucuaugaugccuaugua

SEQ ID NO: 354126 - RNA, 19 nt, Homo sapiens
  misc_RNA (1)...(19): siRNA sense strand
ggagaucuaugaugccuau

SEQ ID NO: 354127 - RNA, 19 nt, Homo sapiens
  misc_RNA (1)...(19): siRNA sense strand
ucaaagaaggcacauauaa

SEQ ID NO: 354128 - RNA, 19 nt, Homo sapiens
  misc_RNA (1)...(19): siRNA sense strand
gaaagcugguucacauaga

SEQ ID NO: 354129 - RNA, 19 nt, Homo sapiens
  misc_RNA (1)...(19): siRNA sense strand
caggaaaccucgaagaaga

SEQ ID NO: 354130 - RNA, 19 nt, Homo sapiens
  misc_RNA (1)...(19): siRNA sense strand
acaaagagauugacuacau

SEQ ID NO: 354131 - RNA, 19 nt, Homo sapiens
  misc_RNA (1)...(19): siRNA sense strand
gcauuaccgcgaugaauua

SEQ ID NO: 354132 - RNA, 19 nt, Homo sapiens
  misc_RNA (1)...(19): siRNA sense strand
ggauauggcucuuaugacu

SEQ ID NO: 354133 - RNA, 19 nt, Homo sapiens
  misc_RNA (1)...(19): siRNA sense strand
agagaaagcucacuaacca

SEQ ID NO: 354134 - RNA, 19 nt, Homo sapiens
  misc_RNA (1)...(19): siRNA sense strand
ggaaggcccacauauuuga

SEQ ID NO: 354135 - RNA, 19 nt, Homo sapiens
  misc_RNA (1)...(19): siRNA sense strand
caaagagauugacuacaug

SEQ ID NO: 354136 - RNA, 19 nt, Homo sapiens
  misc_RNA (1)...(19): siRNA sense strand
ugacaucuauggagucuca

SEQ ID NO: 354137 - RNA, 19 nt, Homo sapiens
  misc_RNA (1)...(19): siRNA sense strand
agagaaagcugguucacau

SEQ ID NO: 354138 - RNA, 19 nt, Homo sapiens
  misc_RNA (1)...(19): siRNA sense strand
ugacgaugcugcugaugaa

SEQ ID NO: 354139 - RNA, 19 nt, Homo sapiens
  misc_RNA (1)...(19): siRNA sense strand
ugacauugcucaagauuuu

SEQ ID NO: 354140 - RNA, 19 nt, Homo sapiens
  misc_RNA (1)...(19): siRNA sense strand
aagaauugaugacuccuaa

SEQ ID NO: 354141 - RNA, 19 nt, Homo sapiens
  misc_RNA (1)...(19): siRNA sense strand
uagaggaacuugagaagca

SEQ ID NO: 354142 - RNA, 19 nt, Homo sapiens
  misc_RNA (1)...(19): siRNA sense strand
gcacauauaagccuauugg

SEQ ID NO: 354143 - RNA, 19 nt, Homo sapiens
  misc_RNA (1)...(19): siRNA sense strand
caacagcggcgucaugugu

SEQ ID NO: 354144 - RNA, 19 nt, Homo sapiens
  misc_RNA (1)...(19): siRNA sense strand
gagaaagcugguucacaua

SEQ ID NO: 354145 - RNA, 19 nt, Homo sapiens
  misc_RNA (1)...(19): siRNA sense strand
ugaaugggcccaauccaaa

SEQ ID NO: 354146 - RNA, 19 nt, Homo sapiens
  misc_RNA (1)...(19): siRNA sense strand
gccaauuccucgacaccua

SEQ ID NO: 354147 - RNA, 19 nt, Homo sapiens
  misc_RNA (1)...(19): siRNA sense strand
caaagacucagaugaagga

SEQ ID NO: 354148 - RNA, 19 nt, Homo sapiens
  misc_RNA (1)...(19): siRNA sense strand
cccagaacauugucaggua

SEQ ID NO: 354149 - RNA, 19 nt, Homo sapiens
  misc_RNA (1)...(19): siRNA sense strand
ucaaguggcagaaggauga

SEQ ID NO: 354150 - RNA, 19 nt, Homo sapiens
  misc_RNA (1)...(19): siRNA sense strand
gaagaauugaugacuccua

SEQ ID NO: 354151 - RNA, 19 nt, Homo sapiens
  misc_RNA (1)...(19): siRNA sense strand
caaagaaggcacauauaag

SEQ ID NO: 354152 - RNA, 19 nt, Homo sapiens
  misc_RNA (1)...(19): siRNA sense strand
guugaccgaugcggaguua

SEQ ID NO: 354153 - RNA, 19 nt, Homo sapiens
  misc_RNA (1)...(19): siRNA sense strand
aaaagugacugaagaagaa

SEQ ID NO: 354154 - RNA, 19 nt, Homo sapiens
  misc_RNA (1)...(19): siRNA sense strand
ggaagauggccaugaggaa

SEQ ID NO: 354155 - RNA, 19 nt, Homo sapiens
  misc_RNA (1)...(19): siRNA sense strand
ggaagagagaugaagauuc

SEQ ID NO: 354156 - RNA, 19 nt, Homo sapiens
  misc_RNA (1)...(19): siRNA sense strand
gggaaggcccacauauuug

SEQ ID NO: 354157 - RNA, 19 nt, Homo sapiens
  misc_RNA (1)...(19): siRNA sense strand
ggagaaggcacagaugaau

SEQ ID NO: 354158 - RNA, 19 nt, Homo sapiens
  misc_RNA (1)...(19): siRNA sense strand
gaacuugagaagcaggaaa

SEQ ID NO: 354159 - RNA, 19 nt, Homo sapiens
  misc_RNA (1)...(19): siRNA sense strand
cgaagagcccaaggaguua

SEQ ID NO: 354160 - RNA, 19 nt, Homo sapiens
  misc_RNA (1)...(19): siRNA sense strand
aaacugagccugggaguca

SEQ ID NO: 354161 - RNA, 19 nt, Homo sapiens
  misc_RNA (1)...(19): siRNA sense strand
gaaccaggaagagagauga

SEQ ID NO: 354162 - RNA, 19 nt, Homo sapiens
  misc_RNA (1)...(19): siRNA sense strand
ucaaccagaauacauauga

SEQ ID NO: 354163 - RNA, 19 nt, Homo sapiens
  misc_RNA (1)...(19): siRNA sense strand
ugacuuagccaucaacaag

SEQ ID NO: 354164 - RNA, 19 nt, Homo sapiens
  misc_RNA (1)...(19): siRNA sense strand
gaacucagccgugggugau

SEQ ID NO: 354165 - RNA, 19 nt, Homo sapiens
  misc_RNA (1)...(19): siRNA sense strand
gucccaagcugcuaagauc

SEQ ID NO: 354166 - RNA, 19 nt, Homo sapiens
  misc_RNA (1)...(19): siRNA sense strand
cucaagcucucacccaauu

SEQ ID NO: 354167 - RNA, 19 nt, Homo sapiens
  misc_RNA (1)...(19): siRNA sense strand
caaccagaauacauaugau

SEQ ID NO: 354168 - RNA, 19 nt, Homo sapiens
  misc_RNA (1)...(19): siRNA sense strand
acgaagagcccaaggaguu

SEQ ID NO: 354169 - RNA, 19 nt, Homo sapiens
  misc_RNA (1)...(19): siRNA sense strand
ucacugcccucugcuggaa

SEQ ID NO: 354170 - RNA, 19 nt, Homo sapiens
  misc_RNA (1)...(19): siRNA sense strand
cagaauacauaugaugaca

SEQ ID NO: 354171 - RNA, 19 nt, Homo sapiens
  misc_RNA (1)...(19): siRNA sense strand
gaaagcucacuaaccaguu

SEQ ID NO: 354172 - RNA, 19 nt, Homo sapiens
  misc_RNA (1)...(19): siRNA sense strand
uuaccgcgaugaauuagug

SEQ ID NO: 354173 - RNA, 19 nt, Homo sapiens
  misc_RNA (1)...(19): siRNA sense strand
gggagaaggcacagaugaa

SEQ ID NO: 354174 - RNA, 19 nt, Homo sapiens
  misc_RNA (1)...(19): siRNA sense strand
cagcuucccugaguacaug

SEQ ID NO: 354175 - RNA, 19 nt, Homo sapiens
  misc_RNA (1)...(19): siRNA sense strand
gagaaggcacagaugaaug

SEQ ID NO: 354176 - RNA, 19 nt, Homo sapiens
  misc_RNA (1)...(19): siRNA sense strand
aagcagagcaucagcauag

SEQ ID NO: 354177 - RNA, 19 nt, Homo sapiens
  misc_RNA (1)...(19): siRNA sense strand
auaaacagccucauaagca

SEQ ID NO: 354178 - RNA, 19 nt, Homo sapiens
  misc_RNA (1)...(19): siRNA sense strand
ccacaaagagauugacuac

SEQ ID NO: 354179 - RNA, 19 nt, Homo sapiens
  misc_RNA (1)...(19): siRNA sense strand
gcaacguggccauuuacaa

SEQ ID NO: 354180 - RNA, 19 nt, Homo sapiens
  misc_RNA (1)...(19): siRNA sense strand
cccauaaacagccucauaa

SEQ ID NO: 354181 - RNA, 19 nt, Homo sapiens
  misc_RNA (1)...(19): siRNA sense strand
acaccaaggucuucauguc

SEQ ID NO: 354182 - RNA, 19 nt, Homo sapiens
  misc_RNA (1)...(19): siRNA sense strand
caacguggccauuuacaac

SEQ ID NO: 354183 - RNA, 19 nt, Homo sapiens
  misc_RNA (1)...(19): siRNA sense strand
aaagcucacuaaccaguuc

SEQ ID NO: 354184 - RNA, 19 nt, Homo sapiens
  misc_RNA (1)...(19): siRNA sense strand
gcacugccuuugacuucca

SEQ ID NO: 354185 - RNA, 19 nt, Homo sapiens
  misc_RNA (1)...(19): siRNA sense strand
acggcaacguggccauuua

SEQ ID NO: 354186 - RNA, 19 nt, Homo sapiens
  misc_RNA (1)...(19): siRNA sense strand
gaugacauugcucaagauu

SEQ ID NO: 354187 - RNA, 19 nt, Homo sapiens
  misc_RNA (1)...(19): siRNA sense strand
ugaccgaugcggaguuaaa

SEQ ID NO: 354188 - RNA, 19 nt, Homo sapiens
  misc_RNA (1)...(19): siRNA sense strand
ccucacagaccuacaacaa

SEQ ID NO: 354189 - RNA, 19 nt, Homo sapiens
  misc_RNA (1)...(19): siRNA sense strand
caauccaaagccacaguua

SEQ ID NO: 354190 - RNA, 19 nt, Homo sapiens
  misc_RNA (1)...(19): siRNA sense strand
aaacaggaaaccucgaaga

SEQ ID NO: 354191 - RNA, 19 nt, Homo sapiens
  misc_RNA (1)...(19): siRNA sense strand
caagcucucacccaauuug

SEQ ID NO: 354192 - RNA, 19 nt, Homo sapiens
  misc_RNA (1)...(19): siRNA sense strand
aaagcugguucacauagau

SEQ ID NO: 354193 - RNA, 19 nt, Homo sapiens
  misc_RNA (1)...(19): siRNA sense strand
ucagguacagcuucaaaga

SEQ ID NO: 354194 - RNA, 19 nt, Homo sapiens
  misc_RNA (1)...(19): siRNA sense strand
ucgcagcagucaccacaga

SEQ ID NO: 354195 - RNA, 19 nt, Homo sapiens
  misc_RNA (1)...(19): siRNA sense strand
uaacuucuucucuguguca

SEQ ID NO: 354196 - RNA, 19 nt, Homo sapiens
  misc_RNA (1)...(19): siRNA sense strand
cagggaagauggccaugag

SEQ ID NO: 354197 - RNA, 19 nt, Homo sapiens
  misc_RNA (1)...(19): siRNA sense strand
ggucaaccagaauacauau

SEQ ID NO: 354198 - RNA, 19 nt, Homo sapiens
  misc_RNA (1)...(19): siRNA sense strand
ccauuuacaaccucaagaa

SEQ ID NO: 354199 - RNA, 19 nt, Homo sapiens
  misc_RNA (1)...(19): siRNA sense strand
aaagaaggcacauauaagc

SEQ ID NO: 354200 - RNA, 19 nt, Homo sapiens
  misc_RNA (1)...(19): siRNA sense strand
gcgccauacucuucuacug

SEQ ID NO: 354201 - RNA, 19 nt, Homo sapiens
  misc_RNA (1)...(19): siRNA sense strand
ugacuuccacaaagagauu

SEQ ID NO: 354202 - RNA, 19 nt, Homo sapiens
  misc_RNA (1)...(19): siRNA sense strand
gauauggcucuuaugacuu

SEQ ID NO: 354203 - RNA, 19 nt, Homo sapiens
  misc_RNA (1)...(19): siRNA sense strand
cgaugcugcugaugaauac

SEQ ID NO: 354204 - RNA, 19 nt, Homo sapiens
  misc_RNA (1)...(19): siRNA sense strand
ggaguuaaaggaggaguuc

SEQ ID NO: 354205 - RNA, 19 nt, Homo sapiens
  misc_RNA (1)...(19): siRNA sense strand
ccaaucagugggagaucua

SEQ ID NO: 354206 - RNA, 19 nt, Homo sapiens
  misc_RNA (1)...(19): siRNA sense strand
gaggaaccaggaagagaga

SEQ ID NO: 354207 - RNA, 19 nt, Homo sapiens
  misc_RNA (1)...(19): siRNA sense strand
augaugacauugcucaaga

SEQ ID NO: 354208 - RNA, 19 nt, Homo sapiens
  misc_RNA (1)...(19): siRNA sense strand
uugcgaaacuggacaaacu

SEQ ID NO: 354209 - RNA, 19 nt, Homo sapiens
  misc_RNA (1)...(19): siRNA sense strand
ucacccaauuugcgcaaga

SEQ ID NO: 354210 - RNA, 19 nt, Homo sapiens
  misc_RNA (1)...(19): siRNA sense strand
ccaggaagagagaugaaga

SEQ ID NO: 354211 - RNA, 19 nt, Homo sapiens
  misc_RNA (1)...(19): siRNA sense strand
auauggcucuuaugacuuc

SEQ ID NO: 354212 - RNA, 19 nt, Homo sapiens
  misc_RNA (1)...(19): siRNA sense strand
ugggauauggcucuuauga

SEQ ID NO: 354213 - RNA, 19 nt, Homo sapiens
  misc_RNA (1)...(19): siRNA sense strand
gcagugggauauggcucuu

SEQ ID NO: 354214 - RNA, 19 nt, Homo sapiens
  misc_RNA (1)...(19): siRNA sense strand
gacugaagaagaauugaug

SEQ ID NO: 354215 - RNA, 19 nt, Homo sapiens
  misc_RNA (1)...(19): siRNA sense strand
gcaagaugccaaaggaaaa

SEQ ID NO: 354216 - RNA, 19 nt, Homo sapiens
  misc_RNA (1)...(19): siRNA sense strand
gcccacauauuugacuuag

SEQ ID NO: 354217 - RNA, 19 nt, Homo sapiens
  misc_RNA (1)...(19): siRNA sense strand
gcagcagucaccacagaug

SEQ ID NO: 354218 - RNA, 19 nt, Homo sapiens
  misc_RNA (1)...(19): siRNA sense strand
ccaagcugcuaagaucaug

SEQ ID NO: 354219 - RNA, 19 nt, Homo sapiens
  misc_RNA (1)...(19): siRNA sense strand
ggagagaaagcucacuaac

SEQ ID NO: 354220 - RNA, 19 nt, Homo sapiens
  misc_RNA (1)...(19): siRNA sense strand
gaaugggcccaauccaaag

SEQ ID NO: 354221 - RNA, 19 nt, Homo sapiens
  misc_RNA (1)...(19): siRNA sense strand
ggaaccaggaagagagaug

SEQ ID NO: 354222 - RNA, 19 nt, Homo sapiens
  misc_RNA (1)...(19): siRNA sense strand
ucacccacgugcaguucaa

SEQ ID NO: 354223 - RNA, 19 nt, Homo sapiens
  misc_RNA (1)...(19): siRNA sense strand
cagguacagcuucaaagaa

SEQ ID NO: 354224 - RNA, 19 nt, Homo sapiens
  misc_RNA (1)...(19): siRNA sense strand
ggucauggcuacccacgaa

SEQ ID NO: 354225 - RNA, 19 nt, Homo sapiens
  misc_RNA (1)...(19): siRNA sense strand
ggagauguggccacuguug

SEQ ID NO: 354226 - RNA, 19 nt, Homo sapiens
  misc_RNA (1)...(19): siRNA sense strand
gcuccagucuuuggucaug

SEQ ID NO: 354227 - RNA, 19 nt, Homo sapiens
  misc_RNA (1)...(19): siRNA sense strand
gagauguggccacuguuga

SEQ ID NO: 354228 - RNA, 19 nt, Homo sapiens
  misc_RNA (1)...(19): siRNA sense strand
uaucgaacaagcugaagaa

SEQ ID NO: 354229 - RNA, 19 nt, Homo sapiens
  misc_RNA (1)...(19): siRNA sense strand
ggacacggaagccaucaag

SEQ ID NO: 354230 - RNA, 19 nt, Homo sapiens
  misc_RNA (1)...(19): siRNA sense strand
ccaccuccuucaccucguu

SEQ ID NO: 354231 - RNA, 19 nt, Homo sapiens
  misc_RNA (1)...(19): siRNA sense strand
acacggaagccaucaaguc

SEQ ID NO: 354232 - RNA, 19 nt, Homo sapiens
  misc_RNA (1)...(19): siRNA sense strand
guacauagaggauaguauu

SEQ ID NO: 354233 - RNA, 19 nt, Homo sapiens
  misc_RNA (1)...(19): siRNA sense strand
ggacacccaugaagcuaau

SEQ ID NO: 354234 - RNA, 19 nt, Homo sapiens
  misc_RNA (1)...(19): siRNA sense strand
ugaagacggugaugacugu

SEQ ID NO: 354235 - RNA, 19 nt, Homo sapiens
  misc_RNA (1)...(19): siRNA sense strand
ucuacuaccuguuggcuaa

SEQ ID NO: 354236 - RNA, 19 nt, Homo sapiens
  misc_RNA (1)...(19): siRNA sense strand
cagcaggaguuaccuuguu

SEQ ID NO: 354237 - RNA, 19 nt, Homo sapiens
  misc_RNA (1)...(19): siRNA sense strand
uaacacaggcccaguuuca

SEQ ID NO: 354238 - RNA, 19 nt, Homo sapiens
  misc_RNA (1)...(19): siRNA sense strand
gagaggcacaugucaauca

SEQ ID NO: 354239 - RNA, 19 nt, Homo sapiens
  misc_RNA (1)...(19): siRNA sense strand
aauaggagcaacacugaua

SEQ ID NO: 354240 - RNA, 19 nt, Homo sapiens
  misc_RNA (1)...(19): siRNA sense strand
acacugauacugucgauga

SEQ ID NO: 354241 - RNA, 19 nt, Homo sapiens
  misc_RNA (1)...(19): siRNA sense strand
ccaugaagcuaaugaagac

SEQ ID NO: 354242 - RNA, 19 nt, Homo sapiens
  misc_RNA (1)...(19): siRNA sense strand
ggaguuaccuuguuuucug

SEQ ID NO: 354243 - RNA, 19 nt, Homo sapiens
  misc_RNA (1)...(19): siRNA sense strand
caacacugauacugucgau

SEQ ID NO: 354244 - RNA, 19 nt, Homo sapiens
  misc_RNA (1)...(19): siRNA sense strand
ggagcaacacugauacugu

SEQ ID NO: 354245 - RNA, 19 nt, Homo sapiens
  misc_RNA (1)...(19): siRNA sense strand
caaggacgaggacauguau

SEQ ID NO: 354246 - RNA, 19 nt, Homo sapiens
  misc_RNA (1)...(19): siRNA sense strand
gucgaugacuggacaggaa

SEQ ID NO: 354247 - RNA, 19 nt, Homo sapiens
  misc_RNA (1)...(19): siRNA sense strand
acacaggcccaguuucaaa

SEQ ID NO: 354248 - RNA, 19 nt, Homo sapiens
  misc_RNA (1)...(19): siRNA sense strand
gccaguacauagaggauag

SEQ ID NO: 354249 - RNA, 19 nt, Homo sapiens
  misc_RNA (1)...(19): siRNA sense strand
ggaugcggguccauagcaa

SEQ ID NO: 354250 - RNA, 19 nt, Homo sapiens
  misc_RNA (1)...(19): siRNA sense strand
ggucaucgcggcagugauc

SEQ ID NO: 354251 - RNA, 19 nt, Homo sapiens
  misc_RNA (1)...(19): siRNA sense strand
acaaggacgaggacaugua

SEQ ID NO: 354252 - RNA, 19 nt, Homo sapiens
  misc_RNA (1)...(19): siRNA sense strand
ucgcuggaauugccuaugu

SEQ ID NO: 354253 - RNA, 19 nt, Homo sapiens
  misc_RNA (1)...(19): siRNA sense strand
gcaauaaaagcacuuccua

SEQ ID NO: 354254 - RNA, 19 nt, Homo sapiens
  misc_RNA (1)...(19): siRNA sense strand
ccucauggccuuccucauc

SEQ ID NO: 354255 - RNA, 19 nt, Homo sapiens
  misc_RNA (1)...(19): siRNA sense strand
ccauuuacagcaggaguua

SEQ ID NO: 354256 - RNA, 19 nt, Homo sapiens
  misc_RNA (1)...(19): siRNA sense strand
cugcuucccucaccaacuu

SEQ ID NO: 354257 - RNA, 19 nt, Homo sapiens
  misc_RNA (1)...(19): siRNA sense strand
gccuauguauuccugaugu

SEQ ID NO: 354258 - RNA, 19 nt, Homo sapiens
  misc_RNA (1)...(19): siRNA sense strand
agcaggaguuaccuuguuu

SEQ ID NO: 354259 - RNA, 19 nt, Homo sapiens
  misc_RNA (1)...(19): siRNA sense strand
ugacaagcacauggacuuu

SEQ ID NO: 354260 - RNA, 19 nt, Homo sapiens
  misc_RNA (1)...(19): siRNA sense strand
gaugaucugcugcuucucu

SEQ ID NO: 354261 - RNA, 19 nt, Homo sapiens
  misc_RNA (1)...(19): siRNA sense strand
gcucaacuccgucgugaac

SEQ ID NO: 354262 - RNA, 19 nt, Homo sapiens
  misc_RNA (1)...(19): siRNA sense strand
gaggacacccaugaagcua

SEQ ID NO: 354263 - RNA, 19 nt, Homo sapiens
  misc_RNA (1)...(19): siRNA sense strand
ggaggacacccaugaagcu

SEQ ID NO: 354264 - RNA, 19 nt, Homo sapiens
  misc_RNA (1)...(19): siRNA sense strand
gaggaaaaccaacgucuug

SEQ ID NO: 354265 - RNA, 19 nt, Homo sapiens
  misc_RNA (1)...(19): siRNA sense strand
caucaugguugugguguac

SEQ ID NO: 354266 - RNA, 19 nt, Homo sapiens
  misc_RNA (1)...(19): siRNA sense strand
cuaccuguuggcuaauuua

SEQ ID NO: 354267 - RNA, 19 nt, Homo sapiens
  misc_RNA (1)...(19): siRNA sense strand
caucaucuacuccuacaag

SEQ ID NO: 354268 - RNA, 19 nt, Homo sapiens
  misc_RNA (1)...(19): siRNA sense strand
auaauaggagcaacacuga

SEQ ID NO: 354269 - RNA, 19 nt, Homo sapiens
  misc_RNA (1)...(19): siRNA sense strand
gggugacacugcucauuuu

SEQ ID NO: 354270 - RNA, 19 nt, Homo sapiens
  misc_RNA (1)...(19): siRNA sense strand
caaagcuugugauuguuuu

SEQ ID NO: 354271 - RNA, 19 nt, Homo sapiens
  misc_RNA (1)...(19): siRNA sense strand
cauagaggauaguauuagc

SEQ ID NO: 354272 - RNA, 19 nt, Homo sapiens
  misc_RNA (1)...(19): siRNA sense strand
gccgauuucuucgcuggaa

SEQ ID NO: 354273 - RNA, 19 nt, Homo sapiens
  misc_RNA (1)...(19): siRNA sense strand
cuacaaggacgaggacaug

SEQ ID NO: 354274 - RNA, 19 nt, Homo sapiens
  misc_RNA (1)...(19): siRNA sense strand
gcuggaauugccuauguau

SEQ ID NO: 354275 - RNA, 19 nt, Homo sapiens
  misc_RNA (1)...(19): siRNA sense strand
ucaucaugguuguggugua

SEQ ID NO: 354276 - RNA, 19 nt, Homo sapiens
  misc_RNA (1)...(19): siRNA sense strand
gagggugacacugcucauu

SEQ ID NO: 354277 - RNA, 19 nt, Homo sapiens
  misc_RNA (1)...(19): siRNA sense strand
cucauggccuuccucauca

SEQ ID NO: 354278 - RNA, 19 nt, Homo sapiens
  misc_RNA (1)...(19): siRNA sense strand
cuaaugaagacggugauga

SEQ ID NO: 354279 - RNA, 19 nt, Homo sapiens
  misc_RNA (1)...(19): siRNA sense strand
cgucuugucuccgcauaca

SEQ ID NO: 354280 - RNA, 19 nt, Homo sapiens
  misc_RNA (1)...(19): siRNA sense strand
ggauaguauuagccaaggu

SEQ ID NO: 354281 - RNA, 19 nt, Homo sapiens
  misc_RNA (1)...(19): siRNA sense strand
cccaugaagcuaaugaaga

SEQ ID NO: 354282 - RNA, 19 nt, Homo sapiens
  misc_RNA (1)...(19): siRNA sense strand
ccuauguauuccugauguu

SEQ ID NO: 354283 - RNA, 19 nt, Homo sapiens
  misc_RNA (1)...(19): siRNA sense strand
caauaaaagcacuuccuaa

SEQ ID NO: 354284 - RNA, 19 nt, Homo sapiens
  misc_RNA (1)...(19): siRNA sense strand
gcaccaugaagaagaugau

SEQ ID NO: 354285 - RNA, 19 nt, Homo sapiens
  misc_RNA (1)...(19): siRNA sense strand
ugacuggacaggaacaaag

SEQ ID NO: 354286 - RNA, 19 nt, Homo sapiens
  misc_RNA (1)...(19): siRNA sense strand
cgcuggaauugccuaugua

SEQ ID NO: 354287 - RNA, 19 nt, Homo sapiens
  misc_RNA (1)...(19): siRNA sense strand
ugacacaggcagccaguac

SEQ ID NO: 354288 - RNA, 19 nt, Homo sapiens
  misc_RNA (1)...(19): siRNA sense strand
gacggugaugacugucuua

SEQ ID NO: 354289 - RNA, 19 nt, Homo sapiens
  misc_RNA (1)...(19): siRNA sense strand
agggugacacugcucauuu

SEQ ID NO: 354290 - RNA, 19 nt, Homo sapiens
  misc_RNA (1)...(19): siRNA sense strand
agaggcacaugucaaucau

SEQ ID NO: 354291 - RNA, 19 nt, Homo sapiens
  misc_RNA (1)...(19): siRNA sense strand
acaggcagccaguacauag

SEQ ID NO: 354292 - RNA, 19 nt, Homo sapiens
  misc_RNA (1)...(19): siRNA sense strand
ugguguaccugcggaucua

SEQ ID NO: 354293 - RNA, 19 nt, Homo sapiens
  misc_RNA (1)...(19): siRNA sense strand
ggaaggaggugguguaaug

SEQ ID NO: 354294 - RNA, 19 nt, Homo sapiens
  misc_RNA (1)...(19): siRNA sense strand
gacgaagacugguauauaa

SEQ ID NO: 354295 - RNA, 19 nt, Homo sapiens
  misc_RNA (1)...(19): siRNA sense strand
ggaaagacgagaacuauuu

SEQ ID NO: 354296 - RNA, 19 nt, Homo sapiens
  misc_RNA (1)...(19): siRNA sense strand
gaaagacgagaacuauuua

SEQ ID NO: 354297 - RNA, 19 nt, Homo sapiens
  misc_RNA (1)...(19): siRNA sense strand
caagaacccaggauuaaua

SEQ ID NO: 354298 - RNA, 19 nt, Homo sapiens
  misc_RNA (1)...(19): siRNA sense strand
ggacgaagacugguauaua

SEQ ID NO: 354299 - RNA, 19 nt, Homo sapiens
  misc_RNA (1)...(19): siRNA sense strand
gagcaccucugcagcauga

SEQ ID NO: 354300 - RNA, 19 nt, Homo sapiens
  misc_RNA (1)...(19): siRNA sense strand
gacgagaacuauuuauaug

SEQ ID NO: 354301 - RNA, 19 nt, Homo sapiens
  misc_RNA (1)...(19): siRNA sense strand
gagagggacucacuuaugg

SEQ ID NO: 354302 - RNA, 19 nt, Homo sapiens
  misc_RNA (1)...(19): siRNA sense strand
caacuaugguagcacagua

SEQ ID NO: 354303 - RNA, 19 nt, Homo sapiens
  misc_RNA (1)...(19): siRNA sense strand
gacaagaacccaggauuaa

SEQ ID NO: 354304 - RNA, 19 nt, Homo sapiens
  misc_RNA (1)...(19): siRNA sense strand
gccgagcuaugagauauua

SEQ ID NO: 354305 - RNA, 19 nt, Homo sapiens
  misc_RNA (1)...(19): siRNA sense strand
agagucaccugauaugaaa

SEQ ID NO: 354306 - RNA, 19 nt, Homo sapiens
  misc_RNA (1)...(19): siRNA sense strand
agacaagaacccaggauua

SEQ ID NO: 354307 - RNA, 19 nt, Homo sapiens
  misc_RNA (1)...(19): siRNA sense strand
gagagaaaaugaaaacuga

SEQ ID NO: 354308 - RNA, 19 nt, Homo sapiens
  misc_RNA (1)...(19): siRNA sense strand
gcuaugagauauuacuaca

SEQ ID NO: 354309 - RNA, 19 nt, Homo sapiens
  misc_RNA (1)...(19): siRNA sense strand
gcccgaggauggagagaaa

SEQ ID NO: 354310 - RNA, 19 nt, Homo sapiens
  misc_RNA (1)...(19): siRNA sense strand
aaacugagccuuccaucau

SEQ ID NO: 354311 - RNA, 19 nt, Homo sapiens
  misc_RNA (1)...(19): siRNA sense strand
ggacucacuuaugggaauu

SEQ ID NO: 354312 - RNA, 19 nt, Homo sapiens
  misc_RNA (1)...(19): siRNA sense strand
cagccgagcuaugagauau

SEQ ID NO: 354313 - RNA, 19 nt, Homo sapiens
  misc_RNA (1)...(19): siRNA sense strand
gcaugaguuugcaggaguu

SEQ ID NO: 354314 - RNA, 19 nt, Homo sapiens
  misc_RNA (1)...(19): siRNA sense strand
gaaggaggugguguaauga

SEQ ID NO: 354315 - RNA, 19 nt, Homo sapiens
  misc_RNA (1)...(19): siRNA sense strand
gggacucacuuaugggaau

SEQ ID NO: 354316 - RNA, 19 nt, Homo sapiens
  misc_RNA (1)...(19): siRNA sense strand
ugucaagacugaacaaacu

SEQ ID NO: 354317 - RNA, 19 nt, Homo sapiens
  misc_RNA (1)...(19): siRNA sense strand
cgagagggacucacuuaug

SEQ ID NO: 354318 - RNA, 19 nt, Homo sapiens
  misc_RNA (1)...(19): siRNA sense strand
gaacccaggauuaauaaaa

SEQ ID NO: 354319 - RNA, 19 nt, Homo sapiens
  misc_RNA (1)...(19): siRNA sense strand
cgagaacuauuuauaugac

SEQ ID NO: 354320 - RNA, 19 nt, Homo sapiens
  misc_RNA (1)...(19): siRNA sense strand
cagagucaccugauaugaa

SEQ ID NO: 354321 - RNA, 19 nt, Homo sapiens
  misc_RNA (1)...(19): siRNA sense strand
ccagcuggaugccaauugu

SEQ ID NO: 354322 - RNA, 19 nt, Homo sapiens
  misc_RNA (1)...(19): siRNA sense strand
cgaagacugguauauaaau

SEQ ID NO: 354323 - RNA, 19 nt, Homo sapiens
  misc_RNA (1)...(19): siRNA sense strand
gagcuaugagauauuacua

SEQ ID NO: 354324 - RNA, 19 nt, Homo sapiens
  misc_RNA (1)...(19): siRNA sense strand
gaggugguguaaugaaucu

SEQ ID NO: 354325 - RNA, 19 nt, Homo sapiens
  misc_RNA (1)...(19): siRNA sense strand
gcagagucaccugauauga

SEQ ID NO: 354326 - RNA, 19 nt, Homo sapiens
  misc_RNA (1)...(19): siRNA sense strand
acagcagcaugaccuauga

SEQ ID NO: 354327 - RNA, 19 nt, Homo sapiens
  misc_RNA (1)...(19): siRNA sense strand
gcguguggauggacgaaga

SEQ ID NO: 354328 - RNA, 19 nt, Homo sapiens
  misc_RNA (1)...(19): siRNA sense strand
ccaauuguaucccuuucca

SEQ ID NO: 354329 - RNA, 19 nt, Homo sapiens
  misc_RNA (1)...(19): siRNA sense strand
ggcaguggcucagcuaugg

SEQ ID NO: 354330 - RNA, 19 nt, Homo sapiens
  misc_RNA (1)...(19): siRNA sense strand
uccaagaguucgacaucaa

SEQ ID NO: 354331 - RNA, 19 nt, Homo sapiens
  misc_RNA (1)...(19): siRNA sense strand
aagaacaacagcagcauga

SEQ ID NO: 354332 - RNA, 19 nt, Homo sapiens
  misc_RNA (1)...(19): siRNA sense strand
gugcaguagugaccuguuc

SEQ ID NO: 354333 - RNA, 19 nt, Homo sapiens
  misc_RNA (1)...(19): siRNA sense strand
caaacugagccuuccauca

SEQ ID NO: 354334 - RNA, 19 nt, Homo sapiens
  misc_RNA (1)...(19): siRNA sense strand
ugcagcaucugaaguggaa

SEQ ID NO: 354335 - RNA, 19 nt, Homo sapiens
  misc_RNA (1)...(19): siRNA sense strand
ggauggacgaagacuggua

SEQ ID NO: 354336 - RNA, 19 nt, Homo sapiens
  misc_RNA (1)...(19): siRNA sense strand
aagaacccaggauuaauaa

SEQ ID NO: 354337 - RNA, 19 nt, Homo sapiens
  misc_RNA (1)...(19): siRNA sense strand
ggaauucauccgcgacauc

SEQ ID NO: 354338 - RNA, 19 nt, Homo sapiens
  misc_RNA (1)...(19): siRNA sense strand
uauaugacaccaacuaugg

SEQ ID NO: 354339 - RNA, 19 nt, Homo sapiens
  misc_RNA (1)...(19): siRNA sense strand
ccucaguacuggaccaagu

SEQ ID NO: 354340 - RNA, 19 nt, Homo sapiens
  misc_RNA (1)...(19): siRNA sense strand
ucacuuaugggaauucauc

SEQ ID NO: 354341 - RNA, 19 nt, Homo sapiens
  misc_RNA (1)...(19): siRNA sense strand
gauggacgaagacugguau

SEQ ID NO: 354342 - RNA, 19 nt, Homo sapiens
  misc_RNA (1)...(19): siRNA sense strand
gaaauucauccucaguacu

SEQ ID NO: 354343 - RNA, 19 nt, Homo sapiens
  misc_RNA (1)...(19): siRNA sense strand
gcucagcuaugggguaaaa

SEQ ID NO: 354344 - RNA, 19 nt, Homo sapiens
  misc_RNA (1)...(19): siRNA sense strand
gaacggccagugcaguagu

SEQ ID NO: 354345 - RNA, 19 nt, Homo sapiens
  misc_RNA (1)...(19): siRNA sense strand
gagggcgucuucagguucu

SEQ ID NO: 354346 - RNA, 19 nt, Homo sapiens
  misc_RNA (1)...(19): siRNA sense strand
ggaggugguguaaugaauc

SEQ ID NO: 354347 - RNA, 19 nt, Homo sapiens
  misc_RNA (1)...(19): siRNA sense strand
caucaugaacaccuggaaa

SEQ ID NO: 354348 - RNA, 19 nt, Homo sapiens
  misc_RNA (1)...(19): siRNA sense strand
gaacaaacugagccuucca

SEQ ID NO: 354349 - RNA, 19 nt, Homo sapiens
  misc_RNA (1)...(19): siRNA sense strand
cccgagagggacucacuua

SEQ ID NO: 354350 - RNA, 19 nt, Homo sapiens
  misc_RNA (1)...(19): siRNA sense strand
caacuugcagcaucugaag

SEQ ID NO: 354351 - RNA, 19 nt, Homo sapiens
  misc_RNA (1)...(19): siRNA sense strand
ucagguucuugaaaucaga

SEQ ID NO: 354352 - RNA, 19 nt, Homo sapiens
  misc_RNA (1)...(19): siRNA sense strand
cagacaagaacccaggauu

SEQ ID NO: 354353 - RNA, 19 nt, Homo sapiens
  misc_RNA (1)...(19): siRNA sense strand
caauguuuccaguggguuu

SEQ ID NO: 354354 - RNA, 19 nt, Homo sapiens
  misc_RNA (1)...(19): siRNA sense strand
caacagcagcaugaccuau

SEQ ID NO: 354355 - RNA, 19 nt, Homo sapiens
  misc_RNA (1)...(19): siRNA sense strand
uggaacggccagugcagua

SEQ ID NO: 354356 - RNA, 19 nt, Homo sapiens
  misc_RNA (1)...(19): siRNA sense strand
ucaagacugaacaaacuga

SEQ ID NO: 354357 - RNA, 19 nt, Homo sapiens
  misc_RNA (1)...(19): siRNA sense strand
gcgagcaccucugcagcau

SEQ ID NO: 354358 - RNA, 19 nt, Homo sapiens
  misc_RNA (1)...(19): siRNA sense strand
aaauucauccucaguacug

SEQ ID NO: 354359 - RNA, 19 nt, Homo sapiens
  misc_RNA (1)...(19): siRNA sense strand
acugagccuuccaucauga

SEQ ID NO: 354360 - RNA, 19 nt, Homo sapiens
  misc_RNA (1)...(19): siRNA sense strand
ccuggaaagacgagaacua

SEQ ID NO: 354361 - RNA, 19 nt, Homo sapiens
  misc_RNA (1)...(19): siRNA sense strand
ggagagaaaaugaaaacug

SEQ ID NO: 354362 - RNA, 19 nt, Homo sapiens
  misc_RNA (1)...(19): siRNA sense strand
acgaagacugguauauaaa

SEQ ID NO: 354363 - RNA, 19 nt, Homo sapiens
  misc_RNA (1)...(19): siRNA sense strand
acaagaacccaggauuaau

SEQ ID NO: 354364 - RNA, 19 nt, Homo sapiens
  misc_RNA (1)...(19): siRNA sense strand
aggaggugguguaaugaau

SEQ ID NO: 354365 - RNA, 19 nt, Homo sapiens
  misc_RNA (1)...(19): siRNA sense strand
cagcuggaugccaauugua

SEQ ID NO: 354366 - RNA, 19 nt, Homo sapiens
  misc_RNA (1)...(19): siRNA sense strand
gaggauggagagaaaauga

SEQ ID NO: 354367 - RNA, 19 nt, Homo sapiens
  misc_RNA (1)...(19): siRNA sense strand
ggcagcuccucuacagcaa

SEQ ID NO: 354368 - RNA, 19 nt, Homo sapiens
  misc_RNA (1)...(19): siRNA sense strand
ggacaccaaccagcuggau

SEQ ID NO: 354369 - RNA, 19 nt, Homo sapiens
  misc_RNA (1)...(19): siRNA sense strand
ggaaggaggugguguaaug

SEQ ID NO: 354370 - RNA, 19 nt, Homo sapiens
  misc_RNA (1)...(19): siRNA sense strand
gacgaagacugguauauaa

SEQ ID NO: 354371 - RNA, 19 nt, Homo sapiens
  misc_RNA (1)...(19): siRNA sense strand
ggaaagacgagaacuauuu

SEQ ID NO: 354372 - RNA, 19 nt, Homo sapiens
  misc_RNA (1)...(19): siRNA sense strand
gaaagacgagaacuauuua

SEQ ID NO: 354373 - RNA, 19 nt, Homo sapiens
  misc_RNA (1)...(19): siRNA sense strand
caagaacccaggauuaaua

SEQ ID NO: 354374 - RNA, 19 nt, Homo sapiens
  misc_RNA (1)...(19): siRNA sense strand
ggacgaagacugguauaua

SEQ ID NO: 354375 - RNA, 19 nt, Homo sapiens
  misc_RNA (1)...(19): siRNA sense strand
gagcaccucugcagcauga

SEQ ID NO: 354376 - RNA, 19 nt, Homo sapiens
  misc_RNA (1)...(19): siRNA sense strand
gacgagaacuauuuauaug

SEQ ID NO: 354377 - RNA, 19 nt, Homo sapiens
  misc_RNA (1)...(19): siRNA sense strand
gagagggacucacuuaugg

SEQ ID NO: 354378 - RNA, 19 nt, Homo sapiens
  misc_RNA (1)...(19): siRNA sense strand
caacuaugguagcacagua

SEQ ID NO: 354379 - RNA, 19 nt, Homo sapiens
  misc_RNA (1)...(19): siRNA sense strand
gacaagaacccaggauuaa

SEQ ID NO: 354380 - RNA, 19 nt, Homo sapiens
  misc_RNA (1)...(19): siRNA sense strand
gccgagcuaugagauauua

SEQ ID NO: 354381 - RNA, 19 nt, Homo sapiens
  misc_RNA (1)...(19): siRNA sense strand
agagucaccugauaugaaa

SEQ ID NO: 354382 - RNA, 19 nt, Homo sapiens
  misc_RNA (1)...(19): siRNA sense strand
agacaagaacccaggauua

SEQ ID NO: 354383 - RNA, 19 nt, Homo sapiens
  misc_RNA (1)...(19): siRNA sense strand
gagagaaaaugaaaacuga

SEQ ID NO: 354384 - RNA, 19 nt, Homo sapiens
  misc_RNA (1)...(19): siRNA sense strand
gcuaugagauauuacuaca

SEQ ID NO: 354385 - RNA, 19 nt, Homo sapiens
  misc_RNA (1)...(19): siRNA sense strand
gcccgaggauggagagaaa

SEQ ID NO: 354386 - RNA, 19 nt, Homo sapiens
  misc_RNA (1)...(19): siRNA sense strand
aaacugagccuuccaucau

SEQ ID NO: 354387 - RNA, 19 nt, Homo sapiens
  misc_RNA (1)...(19): siRNA sense strand
ggacucacuuaugggaauu

SEQ ID NO: 354388 - RNA, 19 nt, Homo sapiens
  misc_RNA (1)...(19): siRNA sense strand
cagccgagcuaugagauau

SEQ ID NO: 354389 - RNA, 19 nt, Homo sapiens
  misc_RNA (1)...(19): siRNA sense strand
gcaugaguuugcaggaguu

SEQ ID NO: 354390 - RNA, 19 nt, Homo sapiens
  misc_RNA (1)...(19): siRNA sense strand
gaaggaggugguguaauga

SEQ ID NO: 354391 - RNA, 19 nt, Homo sapiens
  misc_RNA (1)...(19): siRNA sense strand
gggacucacuuaugggaau

SEQ ID NO: 354392 - RNA, 19 nt, Homo sapiens
  misc_RNA (1)...(19): siRNA sense strand
ugucaagacugaacaaacu

SEQ ID NO: 354393 - RNA, 19 nt, Homo sapiens
  misc_RNA (1)...(19): siRNA sense strand
cgagagggacucacuuaug

SEQ ID NO: 354394 - RNA, 19 nt, Homo sapiens
  misc_RNA (1)...(19): siRNA sense strand
gaacccaggauuaauaaaa

SEQ ID NO: 354395 - RNA, 19 nt, Homo sapiens
  misc_RNA (1)...(19): siRNA sense strand
cgagaacuauuuauaugac

SEQ ID NO: 354396 - RNA, 19 nt, Homo sapiens
  misc_RNA (1)...(19): siRNA sense strand
cagagucaccugauaugaa

SEQ ID NO: 354397 - RNA, 19 nt, Homo sapiens
  misc_RNA (1)...(19): siRNA sense strand
ccagcuggaugccaauugu

SEQ ID NO: 354398 - RNA, 19 nt, Homo sapiens
  misc_RNA (1)...(19): siRNA sense strand
cgaagacugguauauaaau

SEQ ID NO: 354399 - RNA, 19 nt, Homo sapiens
  misc_RNA (1)...(19): siRNA sense strand
gagcuaugagauauuacua

SEQ ID NO: 354400 - RNA, 19 nt, Homo sapiens
  misc_RNA (1)...(19): siRNA sense strand
gaggugguguaaugaaucu

SEQ ID NO: 354401 - RNA, 19 nt, Homo sapiens
  misc_RNA (1)...(19): siRNA sense strand
gcagagucaccugauauga

SEQ ID NO: 354402 - RNA, 19 nt, Homo sapiens
  misc_RNA (1)...(19): siRNA sense strand
acagcagcaugaccuauga

SEQ ID NO: 354403 - RNA, 19 nt, Homo sapiens
  misc_RNA (1)...(19): siRNA sense strand
gcguguggauggacgaaga

SEQ ID NO: 354404 - RNA, 19 nt, Homo sapiens
  misc_RNA (1)...(19): siRNA sense strand
ccaauuguaucccuuucca

SEQ ID NO: 354405 - RNA, 19 nt, Homo sapiens
  misc_RNA (1)...(19): siRNA sense strand
ggcaguggcucagcuaugg

SEQ ID NO: 354406 - RNA, 19 nt, Homo sapiens
  misc_RNA (1)...(19): siRNA sense strand
uccaagaguucgacaucaa

SEQ ID NO: 354407 - RNA, 19 nt, Homo sapiens
  misc_RNA (1)...(19): siRNA sense strand
aagaacaacagcagcauga

SEQ ID NO: 354408 - RNA, 19 nt, Homo sapiens
  misc_RNA (1)...(19): siRNA sense strand
gugcaguagugaccuguuc

SEQ ID NO: 354409 - RNA, 19 nt, Homo sapiens
  misc_RNA (1)...(19): siRNA sense strand
caaacugagccuuccauca

SEQ ID NO: 354410 - RNA, 19 nt, Homo sapiens
  misc_RNA (1)...(19): siRNA sense strand
ugcagcaucugaaguggaa

SEQ ID NO: 354411 - RNA, 19 nt, Homo sapiens
  misc_RNA (1)...(19): siRNA sense strand
ggauggacgaagacuggua

SEQ ID NO: 354412 - RNA, 19 nt, Homo sapiens
  misc_RNA (1)...(19): siRNA sense strand
aagaacccaggauuaauaa

SEQ ID NO: 354413 - RNA, 19 nt, Homo sapiens
  misc_RNA (1)...(19): siRNA sense strand
ggaauucauccgcgacauc

SEQ ID NO: 354414 - RNA, 19 nt, Homo sapiens
  misc_RNA (1)...(19): siRNA sense strand
uauaugacaccaacuaugg

SEQ ID NO: 354415 - RNA, 19 nt, Homo sapiens
  misc_RNA (1)...(19): siRNA sense strand
ccucaguacuggaccaagu

SEQ ID NO: 354416 - RNA, 19 nt, Homo sapiens
  misc_RNA (1)...(19): siRNA sense strand
ucacuuaugggaauucauc

SEQ ID NO: 354417 - RNA, 19 nt, Homo sapiens
  misc_RNA (1)...(19): siRNA sense strand
gauggacgaagacugguau

SEQ ID NO: 354418 - RNA, 19 nt, Homo sapiens
  misc_RNA (1)...(19): siRNA sense strand
gaaauucauccucaguacu

SEQ ID NO: 354419 - RNA, 19 nt, Homo sapiens
  misc_RNA (1)...(19): siRNA sense strand
gcucagcuaugggguaaaa

SEQ ID NO: 354420 - RNA, 19 nt, Homo sapiens
  misc_RNA (1)...(19): siRNA sense strand
gaacggccagugcaguagu

SEQ ID NO: 354421 - RNA, 19 nt, Homo sapiens
  misc_RNA (1)...(19): siRNA sense strand
gagggcgucuucagguucu

SEQ ID NO: 354422 - RNA, 19 nt, Homo sapiens
  misc_RNA (1)...(19): siRNA sense strand
ggaggugguguaaugaauc

SEQ ID NO: 354423 - RNA, 19 nt, Homo sapiens
  misc_RNA (1)...(19): siRNA sense strand
caucaugaacaccuggaaa

SEQ ID NO: 354424 - RNA, 19 nt, Homo sapiens
  misc_RNA (1)...(19): siRNA sense strand
gaacaaacugagccuucca

SEQ ID NO: 354425 - RNA, 19 nt, Homo sapiens
  misc_RNA (1)...(19): siRNA sense strand
cccgagagggacucacuua

SEQ ID NO: 354426 - RNA, 19 nt, Homo sapiens
  misc_RNA (1)...(19): siRNA sense strand
caacuugcagcaucugaag

SEQ ID NO: 354427 - RNA, 19 nt, Homo sapiens
  misc_RNA (1)...(19): siRNA sense strand
ucagguucuugaaaucaga

SEQ ID NO: 354428 - RNA, 19 nt, Homo sapiens
  misc_RNA (1)...(19): siRNA sense strand
cagacaagaacccaggauu

SEQ ID NO: 354429 - RNA, 19 nt, Homo sapiens
  misc_RNA (1)...(19): siRNA sense strand
caauguuuccaguggguuu

SEQ ID NO: 354430 - RNA, 19 nt, Homo sapiens
  misc_RNA (1)...(19): siRNA sense strand
caacagcagcaugaccuau

SEQ ID NO: 354431 - RNA, 19 nt, Homo sapiens
  misc_RNA (1)...(19): siRNA sense strand
uggaacggccagugcagua

SEQ ID NO: 354432 - RNA, 19 nt, Homo sapiens
  misc_RNA (1)...(19): siRNA sense strand
ucaagacugaacaaacuga

SEQ ID NO: 354433 - RNA, 19 nt, Homo sapiens
  misc_RNA (1)...(19): siRNA sense strand
gcgagcaccucugcagcau

SEQ ID NO: 354434 - RNA, 19 nt, Homo sapiens
  misc_RNA (1)...(19): siRNA sense strand
aaauucauccucaguacug

SEQ ID NO: 354435 - RNA, 19 nt, Homo sapiens
  misc_RNA (1)...(19): siRNA sense strand
acugagccuuccaucauga

SEQ ID NO: 354436 - RNA, 19 nt, Homo sapiens
  misc_RNA (1)...(19): siRNA sense strand
ccuggaaagacgagaacua

SEQ ID NO: 354437 - RNA, 19 nt, Homo sapiens
  misc_RNA (1)...(19): siRNA sense strand
ggagagaaaaugaaaacug

SEQ ID NO: 354438 - RNA, 19 nt, Homo sapiens
  misc_RNA (1)...(19): siRNA sense strand
acgaagacugguauauaaa

SEQ ID NO: 354439 - RNA, 19 nt, Homo sapiens
  misc_RNA (1)...(19): siRNA sense strand
acaagaacccaggauuaau

SEQ ID NO: 354440 - RNA, 19 nt, Homo sapiens
  misc_RNA (1)...(19): siRNA sense strand
aggaggugguguaaugaau

SEQ ID NO: 354441 - RNA, 19 nt, Homo sapiens
  misc_RNA (1)...(19): siRNA sense strand
cagcuggaugccaauugua

SEQ ID NO: 354442 - RNA, 19 nt, Homo sapiens
  misc_RNA (1)...(19): siRNA sense strand
gaggauggagagaaaauga

SEQ ID NO: 354443 - RNA, 19 nt, Homo sapiens
  misc_RNA (1)...(19): siRNA sense strand
ggcagcuccucuacagcaa

SEQ ID NO: 354444 - RNA, 19 nt, Homo sapiens
  misc_RNA (1)...(19): siRNA sense strand
ggacaccaaccagcuggau

SEQ ID NO: 354445 - RNA, 19 nt, Homo sapiens
  misc_RNA (1)...(19): siRNA sense strand
aaucagaccucaaccauga

SEQ ID NO: 354446 - RNA, 19 nt, Homo sapiens
  misc_RNA (1)...(19): siRNA sense strand
gcacggaaguccaucugaa

SEQ ID NO: 354447 - RNA, 19 nt, Homo sapiens
  misc_RNA (1)...(19): siRNA sense strand
ggagaacaaucaaauuaca

SEQ ID NO: 354448 - RNA, 19 nt, Homo sapiens
  misc_RNA (1)...(19): siRNA sense strand
gcaggacaaagauguauua

SEQ ID NO: 354449 - RNA, 19 nt, Homo sapiens
  misc_RNA (1)...(19): siRNA sense strand
gaagagauuagcaaauuga

SEQ ID NO: 354450 - RNA, 19 nt, Homo sapiens
  misc_RNA (1)...(19): siRNA sense strand
gcacgacuguggacacgaa

SEQ ID NO: 354451 - RNA, 19 nt, Homo sapiens
  misc_RNA (1)...(19): siRNA sense strand
ggaaaaugaugcugaauau

SEQ ID NO: 354452 - RNA, 19 nt, Homo sapiens
  misc_RNA (1)...(19): siRNA sense strand
ggcaggagaucauacaaga

SEQ ID NO: 354453 - RNA, 19 nt, Homo sapiens
  misc_RNA (1)...(19): siRNA sense strand
gcacgguggcccaguauuu

SEQ ID NO: 354454 - RNA, 19 nt, Homo sapiens
  misc_RNA (1)...(19): siRNA sense strand
gaaauuaaaggucuaaagg

SEQ ID NO: 354455 - RNA, 19 nt, Homo sapiens
  misc_RNA (1)...(19): siRNA sense strand
gaaguaccgugucugcaau

SEQ ID NO: 354456 - RNA, 19 nt, Homo sapiens
  misc_RNA (1)...(19): siRNA sense strand
gcaagaagagauuagcaaa

SEQ ID NO: 354457 - RNA, 19 nt, Homo sapiens
  misc_RNA (1)...(19): siRNA sense strand
ggaagaagcccuccauugc

SEQ ID NO: 354458 - RNA, 19 nt, Homo sapiens
  misc_RNA (1)...(19): siRNA sense strand
gcaaggaucgcaucuucaa

SEQ ID NO: 354459 - RNA, 19 nt, Homo sapiens
  misc_RNA (1)...(19): siRNA sense strand
cgggagaacaaucaaauua

SEQ ID NO: 354460 - RNA, 19 nt, Homo sapiens
  misc_RNA (1)...(19): siRNA sense strand
uaaucgaguuuguuuguga

SEQ ID NO: 354461 - RNA, 19 nt, Homo sapiens
  misc_RNA (1)...(19): siRNA sense strand
ccaccgaguucgacuucua

SEQ ID NO: 354462 - RNA, 19 nt, Homo sapiens
  misc_RNA (1)...(19): siRNA sense strand
ggaaguaccgugucugcaa

SEQ ID NO: 354463 - RNA, 19 nt, Homo sapiens
  misc_RNA (1)...(19): siRNA sense strand
gggaagaagcccuccauug

SEQ ID NO: 354464 - RNA, 19 nt, Homo sapiens
  misc_RNA (1)...(19): siRNA sense strand
ggaaaucguggaacacaug

SEQ ID NO: 354465 - RNA, 19 nt, Homo sapiens
  misc_RNA (1)...(19): siRNA sense strand
ccaguaaucgaguuuguuu

SEQ ID NO: 354466 - RNA, 19 nt, Homo sapiens
  misc_RNA (1)...(19): siRNA sense strand
cgaguuuguuugugaaguu

SEQ ID NO: 354467 - RNA, 19 nt, Homo sapiens
  misc_RNA (1)...(19): siRNA sense strand
ccaaggcgguccagguuca

SEQ ID NO: 354468 - RNA, 19 nt, Homo sapiens
  misc_RNA (1)...(19): siRNA sense strand
uaccgugucugcaauguga

SEQ ID NO: 354469 - RNA, 19 nt, Homo sapiens
  misc_RNA (1)...(19): siRNA sense strand
ggaaucauggucaaagaug

SEQ ID NO: 354470 - RNA, 19 nt, Homo sapiens
  misc_RNA (1)...(19): siRNA sense strand
gaacgagcggguugggaaa

SEQ ID NO: 354471 - RNA, 19 nt, Homo sapiens
  misc_RNA (1)...(19): siRNA sense strand
ggaggucuguaacauugug

SEQ ID NO: 354472 - RNA, 19 nt, Homo sapiens
  misc_RNA (1)...(19): siRNA sense strand
gaacaugacagugcugaag

SEQ ID NO: 354473 - RNA, 19 nt, Homo sapiens
  misc_RNA (1)...(19): siRNA sense strand
ucaaagaugagaugacaga

SEQ ID NO: 354474 - RNA, 19 nt, Homo sapiens
  misc_RNA (1)...(19): siRNA sense strand
gaugcgaagugcaaguuuc

SEQ ID NO: 354475 - RNA, 19 nt, Homo sapiens
  misc_RNA (1)...(19): siRNA sense strand
agaagagauuagcaaauug

SEQ ID NO: 354476 - RNA, 19 nt, Homo sapiens
  misc_RNA (1)...(19): siRNA sense strand
gcagaaacacaccuaccuu

SEQ ID NO: 354477 - RNA, 19 nt, Homo sapiens
  misc_RNA (1)...(19): siRNA sense strand
caagcaggccuucgcacua

SEQ ID NO: 354478 - RNA, 19 nt, Homo sapiens
  misc_RNA (1)...(19): siRNA sense strand
gugcaaguuucaacacaga

SEQ ID NO: 354479 - RNA, 19 nt, Homo sapiens
  misc_RNA (1)...(19): siRNA sense strand
cuggaggucuguaacauug

SEQ ID NO: 354480 - RNA, 19 nt, Homo sapiens
  misc_RNA (1)...(19): siRNA sense strand
caggaagaaucuauacaca

SEQ ID NO: 354481 - RNA, 19 nt, Homo sapiens
  misc_RNA (1)...(19): siRNA sense strand
guuacacgaugcacuuuca

SEQ ID NO: 354482 - RNA, 19 nt, Homo sapiens
  misc_RNA (1)...(19): siRNA sense strand
gaaauggacauccccaaaa

SEQ ID NO: 354483 - RNA, 19 nt, Homo sapiens
  misc_RNA (1)...(19): siRNA sense strand
gaguuuguuugugaaguuu

SEQ ID NO: 354484 - RNA, 19 nt, Homo sapiens
  misc_RNA (1)...(19): siRNA sense strand
gugggcagaugaagaggaa

SEQ ID NO: 354485 - RNA, 19 nt, Homo sapiens
  misc_RNA (1)...(19): siRNA sense strand
caagaagagauuagcaaau

SEQ ID NO: 354486 - RNA, 19 nt, Homo sapiens
  misc_RNA (1)...(19): siRNA sense strand
uaacagggaaaucguggaa

SEQ ID NO: 354487 - RNA, 19 nt, Homo sapiens
  misc_RNA (1)...(19): siRNA sense strand
gaugagcugcagauccuaa

SEQ ID NO: 354488 - RNA, 19 nt, Homo sapiens
  misc_RNA (1)...(19): siRNA sense strand
aggcaaggaucgcaucuuc

SEQ ID NO: 354489 - RNA, 19 nt, Homo sapiens
  misc_RNA (1)...(19): siRNA sense strand
uaaccuaccagcuguguca

SEQ ID NO: 354490 - RNA, 19 nt, Homo sapiens
  misc_RNA (1)...(19): siRNA sense strand
ggacaggagcagaaacaca

SEQ ID NO: 354491 - RNA, 19 nt, Homo sapiens
  misc_RNA (1)...(19): siRNA sense strand
ggucuaaagguggagauaa

SEQ ID NO: 354492 - RNA, 19 nt, Homo sapiens
  misc_RNA (1)...(19): siRNA sense strand
ucaaggacaggcacaaguu

SEQ ID NO: 354493 - RNA, 19 nt, Homo sapiens
  misc_RNA (1)...(19): siRNA sense strand
aagcaggccuucgcacuau

SEQ ID NO: 354494 - RNA, 19 nt, Homo sapiens
  misc_RNA (1)...(19): siRNA sense strand
gcugaauauugauguguca

SEQ ID NO: 354495 - RNA, 19 nt, Homo sapiens
  misc_RNA (1)...(19): siRNA sense strand
ccagcagcccgucaucuuu

SEQ ID NO: 354496 - RNA, 19 nt, Homo sapiens
  misc_RNA (1)...(19): siRNA sense strand
cagccgugcuucugcaaau

SEQ ID NO: 354497 - RNA, 19 nt, Homo sapiens
  misc_RNA (1)...(19): siRNA sense strand
acagggaaaucguggaaca

SEQ ID NO: 354498 - RNA, 19 nt, Homo sapiens
  misc_RNA (1)...(19): siRNA sense strand
cuucaagccuccaccuaga

SEQ ID NO: 354499 - RNA, 19 nt, Homo sapiens
  misc_RNA (1)...(19): siRNA sense strand
gaucggcaagaagagauua

SEQ ID NO: 354500 - RNA, 19 nt, Homo sapiens
  misc_RNA (1)...(19): siRNA sense strand
gcgagcuccucauccaguu

SEQ ID NO: 354501 - RNA, 19 nt, Homo sapiens
  misc_RNA (1)...(19): siRNA sense strand
ccacccgcaucaucuucua

SEQ ID NO: 354502 - RNA, 19 nt, Homo sapiens
  misc_RNA (1)...(19): siRNA sense strand
uuacaaggcacagccagua

SEQ ID NO: 354503 - RNA, 19 nt, Homo sapiens
  misc_RNA (1)...(19): siRNA sense strand
ggauaaggaacaugacagu

SEQ ID NO: 354504 - RNA, 19 nt, Homo sapiens
  misc_RNA (1)...(19): siRNA sense strand
aaucguuucuccucugaug

SEQ ID NO: 354505 - RNA, 19 nt, Homo sapiens
  misc_RNA (1)...(19): siRNA sense strand
cacaugguccagcacuuua

SEQ ID NO: 354506 - RNA, 19 nt, Homo sapiens
  misc_RNA (1)...(19): siRNA sense strand
acaaucguuucuccucuga

SEQ ID NO: 354507 - RNA, 19 nt, Homo sapiens
  misc_RNA (1)...(19): siRNA sense strand
guaaucgaguuuguuugug

SEQ ID NO: 354508 - RNA, 19 nt, Homo sapiens
  misc_RNA (1)...(19): siRNA sense strand
gcaggaagaaucuauacac

SEQ ID NO: 354509 - RNA, 19 nt, Homo sapiens
  misc_RNA (1)...(19): siRNA sense strand
acacgggcaucgagaucaa

SEQ ID NO: 354510 - RNA, 19 nt, Homo sapiens
  misc_RNA (1)...(19): siRNA sense strand
ggacaggcacaaguugguu

SEQ ID NO: 354511 - RNA, 19 nt, Homo sapiens
  misc_RNA (1)...(19): siRNA sense strand
caaggacaggcacaaguug

SEQ ID NO: 354512 - RNA, 19 nt, Homo sapiens
  misc_RNA (1)...(19): siRNA sense strand
gaucggaagcccguguuug

SEQ ID NO: 354513 - RNA, 19 nt, Homo sapiens
  misc_RNA (1)...(19): siRNA sense strand
ccgcgacggugucucugaa

SEQ ID NO: 354514 - RNA, 19 nt, Homo sapiens
  misc_RNA (1)...(19): siRNA sense strand
gggaaaucguggaacacau

SEQ ID NO: 354515 - RNA, 19 nt, Homo sapiens
  misc_RNA (1)...(19): siRNA sense strand
gaugcugaauauugaugug

SEQ ID NO: 354516 - RNA, 19 nt, Homo sapiens
  misc_RNA (1)...(19): siRNA sense strand
cagaggaccacgccacaga

SEQ ID NO: 354517 - RNA, 19 nt, Homo sapiens
  misc_RNA (1)...(19): siRNA sense strand
acacaugguccagcacuuu

SEQ ID NO: 354518 - RNA, 19 nt, Homo sapiens
  misc_RNA (1)...(19): siRNA sense strand
gcaccggcaggagaucaua

SEQ ID NO: 354519 - RNA, 19 nt, Homo sapiens
  misc_RNA (1)...(19): siRNA sense strand
gccugaagaucaacgucaa

SEQ ID NO: 354520 - RNA, 19 nt, Homo sapiens
  misc_RNA (1)...(19): siRNA sense strand
gggagaacaaucaaauuac

SEQ ID NO: 354521 - RNA, 19 nt, Homo sapiens
  misc_RNA (1)...(19): siRNA sense strand
ggcaagaagagauuagcaa

SEQ ID NO: 354522 - RNA, 19 nt, Homo sapiens
  misc_RNA (1)...(19): siRNA sense strand
acaggccaauuucuucgaa

SEQ ID NO: 354523 - RNA, 19 nt, Homo sapiens
  misc_RNA (1)...(19): siRNA sense strand
caccauguacuuugcuuga

SEQ ID NO: 354524 - RNA, 19 nt, Homo sapiens
  misc_RNA (1)...(19): siRNA sense strand
auacguccgugaauuugga

SEQ ID NO: 354525 - RNA, 19 nt, Homo sapiens
  misc_RNA (1)...(19): siRNA sense strand
ccaccucccauguuuacaa

SEQ ID NO: 354526 - RNA, 19 nt, Homo sapiens
  misc_RNA (1)...(19): siRNA sense strand
gcaaguuucaacacagauc

SEQ ID NO: 354527 - RNA, 19 nt, Homo sapiens
  misc_RNA (1)...(19): siRNA sense strand
uccaaccucugccugaaga

SEQ ID NO: 354528 - RNA, 19 nt, Homo sapiens
  misc_RNA (1)...(19): siRNA sense strand
aaucgaguuuguuugugaa

SEQ ID NO: 354529 - RNA, 19 nt, Homo sapiens
  misc_RNA (1)...(19): siRNA sense strand
gucuaaagguggagauaac

SEQ ID NO: 354530 - RNA, 19 nt, Homo sapiens
  misc_RNA (1)...(19): siRNA sense strand
acaugacagugcugaagga

SEQ ID NO: 354531 - RNA, 19 nt, Homo sapiens
  misc_RNA (1)...(19): siRNA sense strand
ccaccuagacccgacuuug

SEQ ID NO: 354532 - RNA, 19 nt, Homo sapiens
  misc_RNA (1)...(19): siRNA sense strand
guccgugaauuuggaauca

SEQ ID NO: 354533 - RNA, 19 nt, Homo sapiens
  misc_RNA (1)...(19): siRNA sense strand
gaagugcccgaggagaguu

SEQ ID NO: 354534 - RNA, 19 nt, Homo sapiens
  misc_RNA (1)...(19): siRNA sense strand
ugaggccuguaucaagcua

SEQ ID NO: 354535 - RNA, 19 nt, Homo sapiens
  misc_RNA (1)...(19): siRNA sense strand
cagcagcccgucaucuuuc

SEQ ID NO: 354536 - RNA, 19 nt, Homo sapiens
  misc_RNA (1)...(19): siRNA sense strand
gaucaaggugugggccauu

SEQ ID NO: 354537 - RNA, 19 nt, Homo sapiens
  misc_RNA (1)...(19): siRNA sense strand
caaggcacagccaguaauc

SEQ ID NO: 354538 - RNA, 19 nt, Homo sapiens
  misc_RNA (1)...(19): siRNA sense strand
ggauaucaagccagagaag

SEQ ID NO: 354539 - RNA, 19 nt, Homo sapiens
  misc_RNA (1)...(19): siRNA sense strand
ucccagcgccagcauacua

SEQ ID NO: 354540 - RNA, 19 nt, Homo sapiens
  misc_RNA (1)...(19): siRNA sense strand
gcaggccuucgcacuauca

SEQ ID NO: 354541 - RNA, 19 nt, Homo sapiens
  misc_RNA (1)...(19): siRNA sense strand
gcgugcagaugaagaacgu

SEQ ID NO: 354542 - RNA, 19 nt, Homo sapiens
  misc_RNA (1)...(19): siRNA sense strand
ccgugaauuuggaaucaug

SEQ ID NO: 354543 - RNA, 19 nt, Homo sapiens
  misc_RNA (1)...(19): siRNA sense strand
uccauacguccgugaauuu

SEQ ID NO: 354544 - RNA, 19 nt, Homo sapiens
  misc_RNA (1)...(19): siRNA sense strand
aaauugaugcgaagugcaa

SEQ ID NO: 354545 - RNA, 19 nt, Homo sapiens
  misc_RNA (1)...(19): siRNA sense strand
ggacauuauucuccaagua

SEQ ID NO: 354546 - RNA, 19 nt, Homo sapiens
  misc_RNA (1)...(19): siRNA sense strand
cgaccaagcuuuauggauu

SEQ ID NO: 354547 - RNA, 19 nt, Homo sapiens
  misc_RNA (1)...(19): siRNA sense strand
agaaggaacugcagagaaa

SEQ ID NO: 354548 - RNA, 19 nt, Homo sapiens
  misc_RNA (1)...(19): siRNA sense strand
gagcugaucaaacagauua

SEQ ID NO: 354549 - RNA, 19 nt, Homo sapiens
  misc_RNA (1)...(19): siRNA sense strand
gaagagauagugaccguaa

SEQ ID NO: 354550 - RNA, 19 nt, Homo sapiens
  misc_RNA (1)...(19): siRNA sense strand
ggacagacacacuuccaua

SEQ ID NO: 354551 - RNA, 19 nt, Homo sapiens
  misc_RNA (1)...(19): siRNA sense strand
uaucgcaacuugugaauug

SEQ ID NO: 354552 - RNA, 19 nt, Homo sapiens
  misc_RNA (1)...(19): siRNA sense strand
gaccaagcuuuauggauuu

SEQ ID NO: 354553 - RNA, 19 nt, Homo sapiens
  misc_RNA (1)...(19): siRNA sense strand
gcucaugcuucacaaguuu

SEQ ID NO: 354554 - RNA, 19 nt, Homo sapiens
  misc_RNA (1)...(19): siRNA sense strand
caucagacauucacccaaa

SEQ ID NO: 354555 - RNA, 19 nt, Homo sapiens
  misc_RNA (1)...(19): siRNA sense strand
gcagagaaauccaagaaac

SEQ ID NO: 354556 - RNA, 19 nt, Homo sapiens
  misc_RNA (1)...(19): siRNA sense strand
caaaccaucuacaauaugu

SEQ ID NO: 354557 - RNA, 19 nt, Homo sapiens
  misc_RNA (1)...(19): siRNA sense strand
uaagagaacuagcccugaa

SEQ ID NO: 354558 - RNA, 19 nt, Homo sapiens
  misc_RNA (1)...(19): siRNA sense strand
gcauugauguagucaguga

SEQ ID NO: 354559 - RNA, 19 nt, Homo sapiens
  misc_RNA (1)...(19): siRNA sense strand
ccagcuacaucuuauuuga

SEQ ID NO: 354560 - RNA, 19 nt, Homo sapiens
  misc_RNA (1)...(19): siRNA sense strand
ggaaugacaugcccuagac

SEQ ID NO: 354561 - RNA, 19 nt, Homo sapiens
  misc_RNA (1)...(19): siRNA sense strand
cagacacacuuccauacua

SEQ ID NO: 354562 - RNA, 19 nt, Homo sapiens
  misc_RNA (1)...(19): siRNA sense strand
gaacauuugcgcauugaug

SEQ ID NO: 354563 - RNA, 19 nt, Homo sapiens
  misc_RNA (1)...(19): siRNA sense strand
ggagaucaguaagcaaaga

SEQ ID NO: 354564 - RNA, 19 nt, Homo sapiens
  misc_RNA (1)...(19): siRNA sense strand
gccacuugaugaagaguua

SEQ ID NO: 354565 - RNA, 19 nt, Homo sapiens
  misc_RNA (1)...(19): siRNA sense strand
gaacuaccacuuauugagu

SEQ ID NO: 354566 - RNA, 19 nt, Homo sapiens
  misc_RNA (1)...(19): siRNA sense strand
ugauccaucucucaaagua

SEQ ID NO: 354567 - RNA, 19 nt, Homo sapiens
  misc_RNA (1)...(19): siRNA sense strand
aaacugaggacuacaaaug

SEQ ID NO: 354568 - RNA, 19 nt, Homo sapiens
  misc_RNA (1)...(19): siRNA sense strand
ccaagaaacugaggacuac

SEQ ID NO: 354569 - RNA, 19 nt, Homo sapiens
  misc_RNA (1)...(19): siRNA sense strand
guacuaguggccaacaaua

SEQ ID NO: 354570 - RNA, 19 nt, Homo sapiens
  misc_RNA (1)...(19): siRNA sense strand
aaacgaggaggaagagaua

SEQ ID NO: 354571 - RNA, 19 nt, Homo sapiens
  misc_RNA (1)...(19): siRNA sense strand
uagacugguugaacuagua

SEQ ID NO: 354572 - RNA, 19 nt, Homo sapiens
  misc_RNA (1)...(19): siRNA sense strand
gaagaguuaauucgcauug

SEQ ID NO: 354573 - RNA, 19 nt, Homo sapiens
  misc_RNA (1)...(19): siRNA sense strand
ugacaguuguguucguaaa

SEQ ID NO: 354574 - RNA, 19 nt, Homo sapiens
  misc_RNA (1)...(19): siRNA sense strand
agacacacuuccauacuau

SEQ ID NO: 354575 - RNA, 19 nt, Homo sapiens
  misc_RNA (1)...(19): siRNA sense strand
cagcagguauccuuugugu

SEQ ID NO: 354576 - RNA, 19 nt, Homo sapiens
  misc_RNA (1)...(19): siRNA sense strand
gaaacgaggaggaagagau

SEQ ID NO: 354577 - RNA, 19 nt, Homo sapiens
  misc_RNA (1)...(19): siRNA sense strand
gaaugugaagucucaugua

SEQ ID NO: 354578 - RNA, 19 nt, Homo sapiens
  misc_RNA (1)...(19): siRNA sense strand
gcccugaacuaccacuuau

SEQ ID NO: 354579 - RNA, 19 nt, Homo sapiens
  misc_RNA (1)...(19): siRNA sense strand
guggagauguuuugaauuu

SEQ ID NO: 354580 - RNA, 19 nt, Homo sapiens
  misc_RNA (1)...(19): siRNA sense strand
gugauacacucaagcuguu

SEQ ID NO: 354581 - RNA, 19 nt, Homo sapiens
  misc_RNA (1)...(19): siRNA sense strand
gacaugcccuagacugguu

SEQ ID NO: 354582 - RNA, 19 nt, Homo sapiens
  misc_RNA (1)...(19): siRNA sense strand
gagcagcuguccucauguc

SEQ ID NO: 354583 - RNA, 19 nt, Homo sapiens
  misc_RNA (1)...(19): siRNA sense strand
ggagauguuuugaauuuga

SEQ ID NO: 354584 - RNA, 19 nt, Homo sapiens
  misc_RNA (1)...(19): siRNA sense strand
gcgcauugauguagucagu

SEQ ID NO: 354585 - RNA, 19 nt, Homo sapiens
  misc_RNA (1)...(19): siRNA sense strand
gaacugcagagaaauccaa

SEQ ID NO: 354586 - RNA, 19 nt, Homo sapiens
  misc_RNA (1)...(19): siRNA sense strand
gaagaaggaacugcagaga

SEQ ID NO: 354587 - RNA, 19 nt, Homo sapiens
  misc_RNA (1)...(19): siRNA sense strand
ggaaccagguauuucacau

SEQ ID NO: 354588 - RNA, 19 nt, Homo sapiens
  misc_RNA (1)...(19): siRNA sense strand
guagugccuuuguugaguu

SEQ ID NO: 354589 - RNA, 19 nt, Homo sapiens
  misc_RNA (1)...(19): siRNA sense strand
gacauuauucuccaaguau

SEQ ID NO: 354590 - RNA, 19 nt, Homo sapiens
  misc_RNA (1)...(19): siRNA sense strand
ugugaagucucauguagug

SEQ ID NO: 354591 - RNA, 19 nt, Homo sapiens
  misc_RNA (1)...(19): siRNA sense strand
gaccguaauucaucagaag

SEQ ID NO: 354592 - RNA, 19 nt, Homo sapiens
  misc_RNA (1)...(19): siRNA sense strand
ugaccgggcucaugcuuca

SEQ ID NO: 354593 - RNA, 19 nt, Homo sapiens
  misc_RNA (1)...(19): siRNA sense strand
gaaccagguauuucacaug

SEQ ID NO: 354594 - RNA, 19 nt, Homo sapiens
  misc_RNA (1)...(19): siRNA sense strand
ccacccaucuguacuuugg

SEQ ID NO: 354595 - RNA, 19 nt, Homo sapiens
  misc_RNA (1)...(19): siRNA sense strand
gagaaauccaagaaacuga

SEQ ID NO: 354596 - RNA, 19 nt, Homo sapiens
  misc_RNA (1)...(19): siRNA sense strand
auccagagcugaucaaaca

SEQ ID NO: 354597 - RNA, 19 nt, Homo sapiens
  misc_RNA (1)...(19): siRNA sense strand
cuugugaauugcucuuuaa

SEQ ID NO: 354598 - RNA, 19 nt, Homo sapiens
  misc_RNA (1)...(19): siRNA sense strand
aagaguagcugggaugcuu

SEQ ID NO: 354599 - RNA, 19 nt, Homo sapiens
  misc_RNA (1)...(19): siRNA sense strand
uuagaacauuugcgcauug

SEQ ID NO: 354600 - RNA, 19 nt, Homo sapiens
  misc_RNA (1)...(19): siRNA sense strand
caaggaaucagcugaagca

SEQ ID NO: 354601 - RNA, 19 nt, Homo sapiens
  misc_RNA (1)...(19): siRNA sense strand
gauagugaccguaauucau

SEQ ID NO: 354602 - RNA, 19 nt, Homo sapiens
  misc_RNA (1)...(19): siRNA sense strand
ucagccagcuacaucuuau

SEQ ID NO: 354603 - RNA, 19 nt, Homo sapiens
  misc_RNA (1)...(19): siRNA sense strand
ggaaugugaagucucaugu

SEQ ID NO: 354604 - RNA, 19 nt, Homo sapiens
  misc_RNA (1)...(19): siRNA sense strand
gauuacggccacuugauga

SEQ ID NO: 354605 - RNA, 19 nt, Homo sapiens
  misc_RNA (1)...(19): siRNA sense strand
ggauuacggccacuugaug

SEQ ID NO: 354606 - RNA, 19 nt, Homo sapiens
  misc_RNA (1)...(19): siRNA sense strand
ugagaauccuggacagaca

SEQ ID NO: 354607 - RNA, 19 nt, Homo sapiens
  misc_RNA (1)...(19): siRNA sense strand
cuuauugagugaugaguug

SEQ ID NO: 354608 - RNA, 19 nt, Homo sapiens
  misc_RNA (1)...(19): siRNA sense strand
ugaucagugucacggcuua

SEQ ID NO: 354609 - RNA, 19 nt, Homo sapiens
  misc_RNA (1)...(19): siRNA sense strand
ggacagcagcaaggaauca

SEQ ID NO: 354610 - RNA, 19 nt, Homo sapiens
  misc_RNA (1)...(19): siRNA sense strand
aaugugaagucucauguag

SEQ ID NO: 354611 - RNA, 19 nt, Homo sapiens
  misc_RNA (1)...(19): siRNA sense strand
gaugaguuguuacuugcau

SEQ ID NO: 354612 - RNA, 19 nt, Homo sapiens
  misc_RNA (1)...(19): siRNA sense strand
agugaugaguuguuacuug

SEQ ID NO: 354613 - RNA, 19 nt, Homo sapiens
  misc_RNA (1)...(19): siRNA sense strand
gagaacuagcccugaacua

SEQ ID NO: 354614 - RNA, 19 nt, Homo sapiens
  misc_RNA (1)...(19): siRNA sense strand
uagaacauuugcgcauuga

SEQ ID NO: 354615 - RNA, 19 nt, Homo sapiens
  misc_RNA (1)...(19): siRNA sense strand
cacuuuaucucugcacuga

SEQ ID NO: 354616 - RNA, 19 nt, Homo sapiens
  misc_RNA (1)...(19): siRNA sense strand
caugaugcccacuugguaa

SEQ ID NO: 354617 - RNA, 19 nt, Homo sapiens
  misc_RNA (1)...(19): siRNA sense strand
cauuauggaagaaguacua

SEQ ID NO: 354618 - RNA, 19 nt, Homo sapiens
  misc_RNA (1)...(19): siRNA sense strand
uacaauaugucagcuucaa

SEQ ID NO: 354619 - RNA, 19 nt, Homo sapiens
  misc_RNA (1)...(19): siRNA sense strand
guacuaauuccugaccaaa

SEQ ID NO: 354620 - RNA, 19 nt, Homo sapiens
  misc_RNA (1)...(19): siRNA sense strand
gggaaugacaugcccuaga

SEQ ID NO: 354621 - RNA, 19 nt, Homo sapiens
  misc_RNA (1)...(19): siRNA sense strand
ccugaacuaccacuuauug

SEQ ID NO: 354622 - RNA, 19 nt, Homo sapiens
  misc_RNA (1)...(19): siRNA sense strand
ggccaacaauagugauaca

SEQ ID NO: 354623 - RNA, 19 nt, Homo sapiens
  misc_RNA (1)...(19): siRNA sense strand
acacuuggacuuauuucaa

SEQ ID NO: 354624 - RNA, 19 nt, Homo sapiens
  misc_RNA (1)...(19): siRNA sense strand
aaaucccugucuucgcuua

SEQ ID NO: 354625 - RNA, 19 nt, Homo sapiens
  misc_RNA (1)...(19): siRNA sense strand
agagauagugaccguaauu

SEQ ID NO: 354626 - RNA, 19 nt, Homo sapiens
  misc_RNA (1)...(19): siRNA sense strand
ugaccguaauucaucagaa

SEQ ID NO: 354627 - RNA, 19 nt, Homo sapiens
  misc_RNA (1)...(19): siRNA sense strand
gaaacugaggacuacaaau

SEQ ID NO: 354628 - RNA, 19 nt, Homo sapiens
  misc_RNA (1)...(19): siRNA sense strand
ugaaucagccagcuacauc

SEQ ID NO: 354629 - RNA, 19 nt, Homo sapiens
  misc_RNA (1)...(19): siRNA sense strand
gaucaguaagcaaagaugu

SEQ ID NO: 354630 - RNA, 19 nt, Homo sapiens
  misc_RNA (1)...(19): siRNA sense strand
acuugugaauugcucuuua

SEQ ID NO: 354631 - RNA, 19 nt, Homo sapiens
  misc_RNA (1)...(19): siRNA sense strand
uaauucaucagaagaagga

SEQ ID NO: 354632 - RNA, 19 nt, Homo sapiens
  misc_RNA (1)...(19): siRNA sense strand
uuugucagcuauuggacua

SEQ ID NO: 354633 - RNA, 19 nt, Homo sapiens
  misc_RNA (1)...(19): siRNA sense strand
cuaguagugugugcaaaug

SEQ ID NO: 354634 - RNA, 19 nt, Homo sapiens
  misc_RNA (1)...(19): siRNA sense strand
gcccuagacugguugaacu

SEQ ID NO: 354635 - RNA, 19 nt, Homo sapiens
  misc_RNA (1)...(19): siRNA sense strand
gaggaggaagagauaguga

SEQ ID NO: 354636 - RNA, 19 nt, Homo sapiens
  misc_RNA (1)...(19): siRNA sense strand
aauauuugccucuucuuga

SEQ ID NO: 354637 - RNA, 19 nt, Homo sapiens
  misc_RNA (1)...(19): siRNA sense strand
ugucacggcuuaagagaac

SEQ ID NO: 354638 - RNA, 19 nt, Homo sapiens
  misc_RNA (1)...(19): siRNA sense strand
ggaaguguccaagcaucuu

SEQ ID NO: 354639 - RNA, 19 nt, Homo sapiens
  misc_RNA (1)...(19): siRNA sense strand
cagcuguccucaugucucu

SEQ ID NO: 354640 - RNA, 19 nt, Homo sapiens
  misc_RNA (1)...(19): siRNA sense strand
ggugugguuucccgacaug

SEQ ID NO: 354641 - RNA, 19 nt, Homo sapiens
  misc_RNA (1)...(19): siRNA sense strand
ccgccuaucucaauuaucc

SEQ ID NO: 354642 - RNA, 19 nt, Homo sapiens
  misc_RNA (1)...(19): siRNA sense strand
gaaggaacugcagagaaau

SEQ ID NO: 354643 - RNA, 19 nt, Homo sapiens
  misc_RNA (1)...(19): siRNA sense strand
uuacuugcauugucuucug

SEQ ID NO: 354644 - RNA, 19 nt, Homo sapiens
  misc_RNA (1)...(19): siRNA sense strand
auugagugaugaguuguua

SEQ ID NO: 354645 - RNA, 19 nt, Homo sapiens
  misc_RNA (1)...(19): siRNA sense strand
gaacuggcguugaauuauu

SEQ ID NO: 354646 - RNA, 19 nt, Homo sapiens
  misc_RNA (1)...(19): siRNA sense strand
gaauugauguugugaguga

SEQ ID NO: 354647 - RNA, 19 nt, Homo sapiens
  misc_RNA (1)...(19): siRNA sense strand
acacugaagucuccaaaua

SEQ ID NO: 354648 - RNA, 19 nt, Homo sapiens
  misc_RNA (1)...(19): siRNA sense strand
gcacuucuuucuauaugaa

SEQ ID NO: 354649 - RNA, 19 nt, Homo sapiens
  misc_RNA (1)...(19): siRNA sense strand
gagaacuggcguugaauua

SEQ ID NO: 354650 - RNA, 19 nt, Homo sapiens
  misc_RNA (1)...(19): siRNA sense strand
caacuguccucgacugauu

SEQ ID NO: 354651 - RNA, 19 nt, Homo sapiens
  misc_RNA (1)...(19): siRNA sense strand
gggaugcacuuauuaaaca

SEQ ID NO: 354652 - RNA, 19 nt, Homo sapiens
  misc_RNA (1)...(19): siRNA sense strand
guuaugcacuucuuucuau

SEQ ID NO: 354653 - RNA, 19 nt, Homo sapiens
  misc_RNA (1)...(19): siRNA sense strand
gauuauagccuagaugaaa

SEQ ID NO: 354654 - RNA, 19 nt, Homo sapiens
  misc_RNA (1)...(19): siRNA sense strand
uuagagaacuggcguugaa

SEQ ID NO: 354655 - RNA, 19 nt, Homo sapiens
  misc_RNA (1)...(19): siRNA sense strand
gaucuucagccucuugaua

SEQ ID NO: 354656 - RNA, 19 nt, Homo sapiens
  misc_RNA (1)...(19): siRNA sense strand
ccaaauaccugggaagagu

SEQ ID NO: 354657 - RNA, 19 nt, Homo sapiens
  misc_RNA (1)...(19): siRNA sense strand
caagcgagacucauguuaa

SEQ ID NO: 354658 - RNA, 19 nt, Homo sapiens
  misc_RNA (1)...(19): siRNA sense strand
ggacagauuaaauuucaug

SEQ ID NO: 354659 - RNA, 19 nt, Homo sapiens
  misc_RNA (1)...(19): siRNA sense strand
gcagugccuucaucagguu

SEQ ID NO: 354660 - RNA, 19 nt, Homo sapiens
  misc_RNA (1)...(19): siRNA sense strand
gaacacuguacaaaccuaa

SEQ ID NO: 354661 - RNA, 19 nt, Homo sapiens
  misc_RNA (1)...(19): siRNA sense strand
gaguagcuguccucauguu

SEQ ID NO: 354662 - RNA, 19 nt, Homo sapiens
  misc_RNA (1)...(19): siRNA sense strand
ugugaugccucucugguaa

SEQ ID NO: 354663 - RNA, 19 nt, Homo sapiens
  misc_RNA (1)...(19): siRNA sense strand
guaagacugugugagagaa

SEQ ID NO: 354664 - RNA, 19 nt, Homo sapiens
  misc_RNA (1)...(19): siRNA sense strand
agacucauguuaaccuuga

SEQ ID NO: 354665 - RNA, 19 nt, Homo sapiens
  misc_RNA (1)...(19): siRNA sense strand
cuaagacucccaaagauga

SEQ ID NO: 354666 - RNA, 19 nt, Homo sapiens
  misc_RNA (1)...(19): siRNA sense strand
gaguaugguucccugaugu

SEQ ID NO: 354667 - RNA, 19 nt, Homo sapiens
  misc_RNA (1)...(19): siRNA sense strand
gaguuaauguuguuaugca

SEQ ID NO: 354668 - RNA, 19 nt, Homo sapiens
  misc_RNA (1)...(19): siRNA sense strand
ugauggaauucuuugugua

SEQ ID NO: 354669 - RNA, 19 nt, Homo sapiens
  misc_RNA (1)...(19): siRNA sense strand
caguugggaugcacuuauu

SEQ ID NO: 354670 - RNA, 19 nt, Homo sapiens
  misc_RNA (1)...(19): siRNA sense strand
aacuggcguugaauuauua

SEQ ID NO: 354671 - RNA, 19 nt, Homo sapiens
  misc_RNA (1)...(19): siRNA sense strand
guccucauguuucaucuga

SEQ ID NO: 354672 - RNA, 19 nt, Homo sapiens
  misc_RNA (1)...(19): siRNA sense strand
ugucagcacuuacaguugu

SEQ ID NO: 354673 - RNA, 19 nt, Homo sapiens
  misc_RNA (1)...(19): siRNA sense strand
cagcaaaugugaaguuagc

SEQ ID NO: 354674 - RNA, 19 nt, Homo sapiens
  misc_RNA (1)...(19): siRNA sense strand
cuggacagauuaaauuuca

SEQ ID NO: 354675 - RNA, 19 nt, Homo sapiens
  misc_RNA (1)...(19): siRNA sense strand
ccuugaacaucuucgaauu

SEQ ID NO: 354676 - RNA, 19 nt, Homo sapiens
  misc_RNA (1)...(19): siRNA sense strand
caaauaccugggaagagua

SEQ ID NO: 354677 - RNA, 19 nt, Homo sapiens
  misc_RNA (1)...(19): siRNA sense strand
uugaacaucuucgaauuga

SEQ ID NO: 354678 - RNA, 19 nt, Homo sapiens
  misc_RNA (1)...(19): siRNA sense strand
uagcuguccucauguuuca

SEQ ID NO: 354679 - RNA, 19 nt, Homo sapiens
  misc_RNA (1)...(19): siRNA sense strand
ugaacacuguacaaaccua

SEQ ID NO: 354680 - RNA, 19 nt, Homo sapiens
  misc_RNA (1)...(19): siRNA sense strand
aaacauuccccuagaguua

SEQ ID NO: 354681 - RNA, 19 nt, Homo sapiens
  misc_RNA (1)...(19): siRNA sense strand
gauggaauucuuuguguag

SEQ ID NO: 354682 - RNA, 19 nt, Homo sapiens
  misc_RNA (1)...(19): siRNA sense strand
gcugaacacuguacaaacc

SEQ ID NO: 354683 - RNA, 19 nt, Homo sapiens
  misc_RNA (1)...(19): siRNA sense strand
ggugugugcuaaugaucuu

SEQ ID NO: 354684 - RNA, 19 nt, Homo sapiens
  misc_RNA (1)...(19): siRNA sense strand
ucaagcgagacucauguua

SEQ ID NO: 354685 - RNA, 19 nt, Homo sapiens
  misc_RNA (1)...(19): siRNA sense strand
aagaggaauucgagacguu

SEQ ID NO: 354686 - RNA, 19 nt, Homo sapiens
  misc_RNA (1)...(19): siRNA sense strand
acucuaagacucccaaaga

SEQ ID NO: 354687 - RNA, 19 nt, Homo sapiens
  misc_RNA (1)...(19): siRNA sense strand
ggcguugaauuauuacauc

SEQ ID NO: 354688 - RNA, 19 nt, Homo sapiens
  misc_RNA (1)...(19): siRNA sense strand
guugggaugcacuuauuaa

SEQ ID NO: 354689 - RNA, 19 nt, Homo sapiens
  misc_RNA (1)...(19): siRNA sense strand
guccucgacugauugaguu

SEQ ID NO: 354690 - RNA, 19 nt, Homo sapiens
  misc_RNA (1)...(19): siRNA sense strand
cucagcaaaugugaaguua

SEQ ID NO: 354691 - RNA, 19 nt, Homo sapiens
  misc_RNA (1)...(19): siRNA sense strand
ucgaauugauguugugagu

SEQ ID NO: 354692 - RNA, 19 nt, Homo sapiens
  misc_RNA (1)...(19): siRNA sense strand
agaguaugguucccugaug

SEQ ID NO: 354693 - RNA, 19 nt, Homo sapiens
  misc_RNA (1)...(19): siRNA sense strand
ggaugcacuuauuaaacau

SEQ ID NO: 354694 - RNA, 19 nt, Homo sapiens
  misc_RNA (1)...(19): siRNA sense strand
uucagccucuugauaauga

SEQ ID NO: 354695 - RNA, 19 nt, Homo sapiens
  misc_RNA (1)...(19): siRNA sense strand
cugauggaauucuuugugu

SEQ ID NO: 354696 - RNA, 19 nt, Homo sapiens
  misc_RNA (1)...(19): siRNA sense strand
acggguaggucucaacugu

SEQ ID NO: 354697 - RNA, 19 nt, Homo sapiens
  misc_RNA (1)...(19): siRNA sense strand
cgagacucauguuaaccuu

SEQ ID NO: 354698 - RNA, 19 nt, Homo sapiens
  misc_RNA (1)...(19): siRNA sense strand
aagcgagacucauguuaac

SEQ ID NO: 354699 - RNA, 19 nt, Homo sapiens
  misc_RNA (1)...(19): siRNA sense strand
uagcugcagugccuucauc

SEQ ID NO: 354700 - RNA, 19 nt, Homo sapiens
  misc_RNA (1)...(19): siRNA sense strand
agauucuuguggccaauaa

SEQ ID NO: 354701 - RNA, 19 nt, Homo sapiens
  misc_RNA (1)...(19): siRNA sense strand
ggaauucgagacguucuuc

SEQ ID NO: 354702 - RNA, 19 nt, Homo sapiens
  misc_RNA (1)...(19): siRNA sense strand
ggauuauagccuagaugaa

SEQ ID NO: 354703 - RNA, 19 nt, Homo sapiens
  misc_RNA (1)...(19): siRNA sense strand
guagcuguccucauguuuc

SEQ ID NO: 354704 - RNA, 19 nt, Homo sapiens
  misc_RNA (1)...(19): siRNA sense strand
ccucagcaaaugugaaguu

SEQ ID NO: 354705 - RNA, 19 nt, Homo sapiens
  misc_RNA (1)...(19): siRNA sense strand
aagauacaccaguggauga

SEQ ID NO: 354706 - RNA, 19 nt, Homo sapiens
  misc_RNA (1)...(19): siRNA sense strand
agagaacuggcguugaauu

SEQ ID NO: 354707 - RNA, 19 nt, Homo sapiens
  misc_RNA (1)...(19): siRNA sense strand
gccuucaucagguuuguaa

SEQ ID NO: 354708 - RNA, 19 nt, Homo sapiens
  misc_RNA (1)...(19): siRNA sense strand
ucuaagacucccaaagaug

SEQ ID NO: 354709 - RNA, 19 nt, Homo sapiens
  misc_RNA (1)...(19): siRNA sense strand
cccuagaguuaauguuguu

SEQ ID NO: 354710 - RNA, 19 nt, Homo sapiens
  misc_RNA (1)...(19): siRNA sense strand
gaagaaaccccuguuacuc

SEQ ID NO: 354711 - RNA, 19 nt, Homo sapiens
  misc_RNA (1)...(19): siRNA sense strand
ugucaaggccuuagagaac

SEQ ID NO: 354712 - RNA, 19 nt, Homo sapiens
  misc_RNA (1)...(19): siRNA sense strand
aaagaagaaaccccuguua

SEQ ID NO: 354713 - RNA, 19 nt, Homo sapiens
  misc_RNA (1)...(19): siRNA sense strand
ucaaggccuuagagaacug

SEQ ID NO: 354714 - RNA, 19 nt, Homo sapiens
  misc_RNA (1)...(19): siRNA sense strand
uuguguagcugaccguugu

SEQ ID NO: 354715 - RNA, 19 nt, Homo sapiens
  misc_RNA (1)...(19): siRNA sense strand
aggauuauagccuagauga

SEQ ID NO: 354716 - RNA, 19 nt, Homo sapiens
  misc_RNA (1)...(19): siRNA sense strand
uuguauugcugaacacugu

SEQ ID NO: 354717 - RNA, 19 nt, Homo sapiens
  misc_RNA (1)...(19): siRNA sense strand
ugaggauuauagccuagau

SEQ ID NO: 354718 - RNA, 19 nt, Homo sapiens
  misc_RNA (1)...(19): siRNA sense strand
cuucaucagguuuguaaga

SEQ ID NO: 354719 - RNA, 19 nt, Homo sapiens
  misc_RNA (1)...(19): siRNA sense strand
cuguuacucaccuuuauuu

SEQ ID NO: 354720 - RNA, 19 nt, Homo sapiens
  misc_RNA (1)...(19): siRNA sense strand
ucacacugaagucuccaaa

SEQ ID NO: 354721 - RNA, 19 nt, Homo sapiens
  misc_RNA (1)...(19): siRNA sense strand
agaacuggcguugaauuau

SEQ ID NO: 354722 - RNA, 19 nt, Homo sapiens
  misc_RNA (1)...(19): siRNA sense strand
gaguuaguggugugugcua

SEQ ID NO: 354723 - RNA, 19 nt, Homo sapiens
  misc_RNA (1)...(19): siRNA sense strand
caacugaacuugauacuga

SEQ ID NO: 354724 - RNA, 19 nt, Homo sapiens
  misc_RNA (1)...(19): siRNA sense strand
gaggagggcugccuuauuu

SEQ ID NO: 354725 - RNA, 19 nt, Homo sapiens
  misc_RNA (1)...(19): siRNA sense strand
gaaacagcauccaacuuua

SEQ ID NO: 354726 - RNA, 19 nt, Homo sapiens
  misc_RNA (1)...(19): siRNA sense strand
gcacaacacugcucucaga

SEQ ID NO: 354727 - RNA, 19 nt, Homo sapiens
  misc_RNA (1)...(19): siRNA sense strand
ggaaacagcauccaacuuu

SEQ ID NO: 354728 - RNA, 19 nt, Homo sapiens
  misc_RNA (1)...(19): siRNA sense strand
ggacuaagccuguuucuuc

SEQ ID NO: 354729 - RNA, 19 nt, Homo sapiens
  misc_RNA (1)...(19): siRNA sense strand
ggaugaagaugcugacauu

SEQ ID NO: 354730 - RNA, 19 nt, Homo sapiens
  misc_RNA (1)...(19): siRNA sense strand
gcauacagcucugcaguuu

SEQ ID NO: 354731 - RNA, 19 nt, Homo sapiens
  misc_RNA (1)...(19): siRNA sense strand
gaauuucacuucuccuuau

SEQ ID NO: 354732 - RNA, 19 nt, Homo sapiens
  misc_RNA (1)...(19): siRNA sense strand
gauguuagaugcugaagau

SEQ ID NO: 354733 - RNA, 19 nt, Homo sapiens
  misc_RNA (1)...(19): siRNA sense strand
ucagaacacuccacaggua

SEQ ID NO: 354734 - RNA, 19 nt, Homo sapiens
  misc_RNA (1)...(19): siRNA sense strand
gagguaaugcugucaauuu

SEQ ID NO: 354735 - RNA, 19 nt, Homo sapiens
  misc_RNA (1)...(19): siRNA sense strand
gaaauggucucagcugaca

SEQ ID NO: 354736 - RNA, 19 nt, Homo sapiens
  misc_RNA (1)...(19): siRNA sense strand
ggaacagcuuuaagaacua

SEQ ID NO: 354737 - RNA, 19 nt, Homo sapiens
  misc_RNA (1)...(19): siRNA sense strand
gaaaacaucuacaagcaaa

SEQ ID NO: 354738 - RNA, 19 nt, Homo sapiens
  misc_RNA (1)...(19): siRNA sense strand
cuccauggcuuaauucaua

SEQ ID NO: 354739 - RNA, 19 nt, Homo sapiens
  misc_RNA (1)...(19): siRNA sense strand
gcagccagaccauuuauaa

SEQ ID NO: 354740 - RNA, 19 nt, Homo sapiens
  misc_RNA (1)...(19): siRNA sense strand
guacuucuguuucucaguu

SEQ ID NO: 354741 - RNA, 19 nt, Homo sapiens
  misc_RNA (1)...(19): siRNA sense strand
gaacagcuuuaagaacuau

SEQ ID NO: 354742 - RNA, 19 nt, Homo sapiens
  misc_RNA (1)...(19): siRNA sense strand
caacgcagccagaccauuu

SEQ ID NO: 354743 - RNA, 19 nt, Homo sapiens
  misc_RNA (1)...(19): siRNA sense strand
augaagagcuuaaggauau

SEQ ID NO: 354744 - RNA, 19 nt, Homo sapiens
  misc_RNA (1)...(19): siRNA sense strand
ucaagagacuggacgugua

SEQ ID NO: 354745 - RNA, 19 nt, Homo sapiens
  misc_RNA (1)...(19): siRNA sense strand
uaaagaagcagaaguguca

SEQ ID NO: 354746 - RNA, 19 nt, Homo sapiens
  misc_RNA (1)...(19): siRNA sense strand
gaauggagacauagaaaug

SEQ ID NO: 354747 - RNA, 19 nt, Homo sapiens
  misc_RNA (1)...(19): siRNA sense strand
guuagaugcugaagauuug

SEQ ID NO: 354748 - RNA, 19 nt, Homo sapiens
  misc_RNA (1)...(19): siRNA sense strand
guauuguggucacucauuu

SEQ ID NO: 354749 - RNA, 19 nt, Homo sapiens
  misc_RNA (1)...(19): siRNA sense strand
gaagagcuuaaggauauua

SEQ ID NO: 354750 - RNA, 19 nt, Homo sapiens
  misc_RNA (1)...(19): siRNA sense strand
ggacauuguuggacuaagg

SEQ ID NO: 354751 - RNA, 19 nt, Homo sapiens
  misc_RNA (1)...(19): siRNA sense strand
gcggaggaaucaauugcua

SEQ ID NO: 354752 - RNA, 19 nt, Homo sapiens
  misc_RNA (1)...(19): siRNA sense strand
ugacauugaugaaucugaa

SEQ ID NO: 354753 - RNA, 19 nt, Homo sapiens
  misc_RNA (1)...(19): siRNA sense strand
gaacacuccacagguauaa

SEQ ID NO: 354754 - RNA, 19 nt, Homo sapiens
  misc_RNA (1)...(19): siRNA sense strand
ggucuuagccuauggaauc

SEQ ID NO: 354755 - RNA, 19 nt, Homo sapiens
  misc_RNA (1)...(19): siRNA sense strand
gaaggauacugcagaacuc

SEQ ID NO: 354756 - RNA, 19 nt, Homo sapiens
  misc_RNA (1)...(19): siRNA sense strand
gggcauuggagaagaaaua

SEQ ID NO: 354757 - RNA, 19 nt, Homo sapiens
  misc_RNA (1)...(19): siRNA sense strand
gccaguggaugccagaauu

SEQ ID NO: 354758 - RNA, 19 nt, Homo sapiens
  misc_RNA (1)...(19): siRNA sense strand
caagggcauuggagaagaa

SEQ ID NO: 354759 - RNA, 19 nt, Homo sapiens
  misc_RNA (1)...(19): siRNA sense strand
guccuucucugaaugauga

SEQ ID NO: 354760 - RNA, 19 nt, Homo sapiens
  misc_RNA (1)...(19): siRNA sense strand
caguuuaucuggauguuau

SEQ ID NO: 354761 - RNA, 19 nt, Homo sapiens
  misc_RNA (1)...(19): siRNA sense strand
agauuuggcugauauugaa

SEQ ID NO: 354762 - RNA, 19 nt, Homo sapiens
  misc_RNA (1)...(19): siRNA sense strand
gauguuaucagaucacaga

SEQ ID NO: 354763 - RNA, 19 nt, Homo sapiens
  misc_RNA (1)...(19): siRNA sense strand
uuacuacugugacaacauu

SEQ ID NO: 354764 - RNA, 19 nt, Homo sapiens
  misc_RNA (1)...(19): siRNA sense strand
ggauuugguuucagcaugu

SEQ ID NO: 354765 - RNA, 19 nt, Homo sapiens
  misc_RNA (1)...(19): siRNA sense strand
ucagaaggauacugcagaa

SEQ ID NO: 354766 - RNA, 19 nt, Homo sapiens
  misc_RNA (1)...(19): siRNA sense strand
ggaggagggcugccuuauu

SEQ ID NO: 354767 - RNA, 19 nt, Homo sapiens
  misc_RNA (1)...(19): siRNA sense strand
ugaagaugcugacauugau

SEQ ID NO: 354768 - RNA, 19 nt, Homo sapiens
  misc_RNA (1)...(19): siRNA sense strand
ucauaacguucuaccauau

SEQ ID NO: 354769 - RNA, 19 nt, Homo sapiens
  misc_RNA (1)...(19): siRNA sense strand
cgagaugcuuagccucuuu

SEQ ID NO: 354770 - RNA, 19 nt, Homo sapiens
  misc_RNA (1)...(19): siRNA sense strand
uaaggacauuguuggacua

SEQ ID NO: 354771 - RNA, 19 nt, Homo sapiens
  misc_RNA (1)...(19): siRNA sense strand
gcugaagauuuggcugaua

SEQ ID NO: 354772 - RNA, 19 nt, Homo sapiens
  misc_RNA (1)...(19): siRNA sense strand
gaaaagggacugaagaaug

SEQ ID NO: 354773 - RNA, 19 nt, Homo sapiens
  misc_RNA (1)...(19): siRNA sense strand
gaaagugauugcacaacac

SEQ ID NO: 354774 - RNA, 19 nt, Homo sapiens
  misc_RNA (1)...(19): siRNA sense strand
uaacaagggcauuggagaa

SEQ ID NO: 354775 - RNA, 19 nt, Homo sapiens
  misc_RNA (1)...(19): siRNA sense strand
auacugaaccugaugauga

SEQ ID NO: 354776 - RNA, 19 nt, Homo sapiens
  misc_RNA (1)...(19): siRNA sense strand
caaguaagcaugaaauggu

SEQ ID NO: 354777 - RNA, 19 nt, Homo sapiens
  misc_RNA (1)...(19): siRNA sense strand
uaagaacuaugucaucacu

SEQ ID NO: 354778 - RNA, 19 nt, Homo sapiens
  misc_RNA (1)...(19): siRNA sense strand
gaaagaggaagaggagguu

SEQ ID NO: 354779 - RNA, 19 nt, Homo sapiens
  misc_RNA (1)...(19): siRNA sense strand
cuaagccuguuucuucuga

SEQ ID NO: 354780 - RNA, 19 nt, Homo sapiens
  misc_RNA (1)...(19): siRNA sense strand
caagcaguaugccuguuug

SEQ ID NO: 354781 - RNA, 19 nt, Homo sapiens
  misc_RNA (1)...(19): siRNA sense strand
ugaugaaucugaagagucu

SEQ ID NO: 354782 - RNA, 19 nt, Homo sapiens
  misc_RNA (1)...(19): siRNA sense strand
agaggugacugguauagug

SEQ ID NO: 354783 - RNA, 19 nt, Homo sapiens
  misc_RNA (1)...(19): siRNA sense strand
aagcagaagugucagaaca

SEQ ID NO: 354784 - RNA, 19 nt, Homo sapiens
  misc_RNA (1)...(19): siRNA sense strand
agaaagugauugcacaaca

SEQ ID NO: 354785 - RNA, 19 nt, Homo sapiens
  misc_RNA (1)...(19): siRNA sense strand
gaacuccuuagaggucuua

SEQ ID NO: 354786 - RNA, 19 nt, Homo sapiens
  misc_RNA (1)...(19): siRNA sense strand
ggacguguacuucuguuuc

SEQ ID NO: 354787 - RNA, 19 nt, Homo sapiens
  misc_RNA (1)...(19): siRNA sense strand
ggaauggagacauagaaau

SEQ ID NO: 354788 - RNA, 19 nt, Homo sapiens
  misc_RNA (1)...(19): siRNA sense strand
gaagauuuggcugauauug

SEQ ID NO: 354789 - RNA, 19 nt, Homo sapiens
  misc_RNA (1)...(19): siRNA sense strand
cugaagauuuggcugauau

SEQ ID NO: 354790 - RNA, 19 nt, Homo sapiens
  misc_RNA (1)...(19): siRNA sense strand
gaucuuacccagacugaca

SEQ ID NO: 354791 - RNA, 19 nt, Homo sapiens
  misc_RNA (1)...(19): siRNA sense strand
uuaaauauuccguggauga

SEQ ID NO: 354792 - RNA, 19 nt, Homo sapiens
  misc_RNA (1)...(19): siRNA sense strand
ugaagagucugcggaggaa

SEQ ID NO: 354793 - RNA, 19 nt, Homo sapiens
  misc_RNA (1)...(19): siRNA sense strand
gcauguccuucucugaaug

SEQ ID NO: 354794 - RNA, 19 nt, Homo sapiens
  misc_RNA (1)...(19): siRNA sense strand
ggagaagaaauagauaaug

SEQ ID NO: 354795 - RNA, 19 nt, Homo sapiens
  misc_RNA (1)...(19): siRNA sense strand
gugcucuucugcagucuuu

SEQ ID NO: 354796 - RNA, 19 nt, Homo sapiens
  misc_RNA (1)...(19): siRNA sense strand
auaaagacauuaccaugca

SEQ ID NO: 354797 - RNA, 19 nt, Homo sapiens
  misc_RNA (1)...(19): siRNA sense strand
ucugacaucucaucaaagu

SEQ ID NO: 354798 - RNA, 19 nt, Homo sapiens
  misc_RNA (1)...(19): siRNA sense strand
gcucugcaguuuccagcaa

SEQ ID NO: 354799 - RNA, 19 nt, Homo sapiens
  misc_RNA (1)...(19): siRNA sense strand
aaagucagauaaagaagca

SEQ ID NO: 354800 - RNA, 19 nt, Homo sapiens
  misc_RNA (1)...(19): siRNA sense strand
uaauuuacuuugggaguga

SEQ ID NO: 354801 - RNA, 19 nt, Homo sapiens
  misc_RNA (1)...(19): siRNA sense strand
ugucaucacucccagaauc

SEQ ID NO: 354802 - RNA, 19 nt, Homo sapiens
  misc_RNA (1)...(19): siRNA sense strand
ccacagguauaacccaucu

SEQ ID NO: 354803 - RNA, 19 nt, Homo sapiens
  misc_RNA (1)...(19): siRNA sense strand
gcagucaaguaagcaugaa

SEQ ID NO: 354804 - RNA, 19 nt, Homo sapiens
  misc_RNA (1)...(19): siRNA sense strand
aaaagggacugaagaaugu

SEQ ID NO: 354805 - RNA, 19 nt, Homo sapiens
  misc_RNA (1)...(19): siRNA sense strand
ccaagcaguaugccuguuu

SEQ ID NO: 354806 - RNA, 19 nt, Homo sapiens
  misc_RNA (1)...(19): siRNA sense strand
uggcuuaauucauaacguu

SEQ ID NO: 354807 - RNA, 19 nt, Homo sapiens
  misc_RNA (1)...(19): siRNA sense strand
gcuaucagcauugcacaaa

SEQ ID NO: 354808 - RNA, 19 nt, Homo sapiens
  misc_RNA (1)...(19): siRNA sense strand
uaugaagagcuuaaggaua

SEQ ID NO: 354809 - RNA, 19 nt, Homo sapiens
  misc_RNA (1)...(19): siRNA sense strand
cagcauguccuucucugaa

SEQ ID NO: 354810 - RNA, 19 nt, Homo sapiens
  misc_RNA (1)...(19): siRNA sense strand
aggaacagcuuuaagaacu

SEQ ID NO: 354811 - RNA, 19 nt, Homo sapiens
  misc_RNA (1)...(19): siRNA sense strand
caaaaugcaugagcagauu

SEQ ID NO: 354812 - RNA, 19 nt, Homo sapiens
  misc_RNA (1)...(19): siRNA sense strand
uauugaagauacuguggaa

SEQ ID NO: 354813 - RNA, 19 nt, Homo sapiens
  misc_RNA (1)...(19): siRNA sense strand
auucugacaucucaucaaa

SEQ ID NO: 354814 - RNA, 19 nt, Homo sapiens
  misc_RNA (1)...(19): siRNA sense strand
ccagagcucuuggaauucu

SEQ ID NO: 354815 - RNA, 19 nt, Homo sapiens
  misc_RNA (1)...(19): siRNA sense strand
uucauaacguucuaccaua

SEQ ID NO: 354816 - RNA, 19 nt, Homo sapiens
  misc_RNA (1)...(19): siRNA sense strand
caagaguuaugucgaugca

SEQ ID NO: 354817 - RNA, 19 nt, Homo sapiens
  misc_RNA (1)...(19): siRNA sense strand
ccucaagaguuaugucgau

SEQ ID NO: 354818 - RNA, 19 nt, Homo sapiens
  misc_RNA (1)...(19): siRNA sense strand
uaacgguccucaugcugau

SEQ ID NO: 354819 - RNA, 19 nt, Homo sapiens
  misc_RNA (1)...(19): siRNA sense strand
ggaauucugacaucucauc

SEQ ID NO: 354820 - RNA, 19 nt, Homo sapiens
  misc_RNA (1)...(19): siRNA sense strand
cgggaucgcuuuggaaaca

SEQ ID NO: 354821 - RNA, 19 nt, Homo sapiens
  misc_RNA (1)...(19): siRNA sense strand
uacugaaccugaugaugaa

SEQ ID NO: 354822 - RNA, 19 nt, Homo sapiens
  misc_RNA (1)...(19): siRNA sense strand
guccuaaccuggagcaucu

SEQ ID NO: 354823 - RNA, 19 nt, Homo sapiens
  misc_RNA (1)...(19): siRNA sense strand
caacugaacuugauacuga

SEQ ID NO: 354824 - RNA, 19 nt, Homo sapiens
  misc_RNA (1)...(19): siRNA sense strand
gaggagggcugccuuauuu

SEQ ID NO: 354825 - RNA, 19 nt, Homo sapiens
  misc_RNA (1)...(19): siRNA sense strand
gaaacagcauccaacuuua

SEQ ID NO: 354826 - RNA, 19 nt, Homo sapiens
  misc_RNA (1)...(19): siRNA sense strand
gcacaacacugcucucaga

SEQ ID NO: 354827 - RNA, 19 nt, Homo sapiens
  misc_RNA (1)...(19): siRNA sense strand
ggaaacagcauccaacuuu

SEQ ID NO: 354828 - RNA, 19 nt, Homo sapiens
  misc_RNA (1)...(19): siRNA sense strand
ggacuaagccuguuucuuc

SEQ ID NO: 354829 - RNA, 19 nt, Homo sapiens
  misc_RNA (1)...(19): siRNA sense strand
ggaugaagaugcugacauu

SEQ ID NO: 354830 - RNA, 19 nt, Homo sapiens
  misc_RNA (1)...(19): siRNA sense strand
gcauacagcucugcaguuu

SEQ ID NO: 354831 - RNA, 19 nt, Homo sapiens
  misc_RNA (1)...(19): siRNA sense strand
gaauuucacuucuccuuau

SEQ ID NO: 354832 - RNA, 19 nt, Homo sapiens
  misc_RNA (1)...(19): siRNA sense strand
gauguuagaugcugaagau

SEQ ID NO: 354833 - RNA, 19 nt, Homo sapiens
  misc_RNA (1)...(19): siRNA sense strand
ucagaacacuccacaggua

SEQ ID NO: 354834 - RNA, 19 nt, Homo sapiens
  misc_RNA (1)...(19): siRNA sense strand
gagguaaugcugucaauuu

SEQ ID NO: 354835 - RNA, 19 nt, Homo sapiens
  misc_RNA (1)...(19): siRNA sense strand
gaaauggucucagcugaca

SEQ ID NO: 354836 - RNA, 19 nt, Homo sapiens
  misc_RNA (1)...(19): siRNA sense strand
ggaacagcuuuaagaacua

SEQ ID NO: 354837 - RNA, 19 nt, Homo sapiens
  misc_RNA (1)...(19): siRNA sense strand
gaaaacaucuacaagcaaa

SEQ ID NO: 354838 - RNA, 19 nt, Homo sapiens
  misc_RNA (1)...(19): siRNA sense strand
cuccauggcuuaauucaua

SEQ ID NO: 354839 - RNA, 19 nt, Homo sapiens
  misc_RNA (1)...(19): siRNA sense strand
gaacagcuuuaagaacuau

SEQ ID NO: 354840 - RNA, 19 nt, Homo sapiens
  misc_RNA (1)...(19): siRNA sense strand
guacuucuguuucucaguu

SEQ ID NO: 354841 - RNA, 19 nt, Homo sapiens
  misc_RNA (1)...(19): siRNA sense strand
uaaagaagcagaaguguca

SEQ ID NO: 354842 - RNA, 19 nt, Homo sapiens
  misc_RNA (1)...(19): siRNA sense strand
ucaagagacuggacgugua

SEQ ID NO: 354843 - RNA, 19 nt, Homo sapiens
  misc_RNA (1)...(19): siRNA sense strand
augaagagcuuaaggauau

SEQ ID NO: 354844 - RNA, 19 nt, Homo sapiens
  misc_RNA (1)...(19): siRNA sense strand
gaauggagacauagaaaug

SEQ ID NO: 354845 - RNA, 19 nt, Homo sapiens
  misc_RNA (1)...(19): siRNA sense strand
guuagaugcugaagauuug

SEQ ID NO: 354846 - RNA, 19 nt, Homo sapiens
  misc_RNA (1)...(19): siRNA sense strand
guauuguggucacucauuu

SEQ ID NO: 354847 - RNA, 19 nt, Homo sapiens
  misc_RNA (1)...(19): siRNA sense strand
ggucuuagccuauggaauc

SEQ ID NO: 354848 - RNA, 19 nt, Homo sapiens
  misc_RNA (1)...(19): siRNA sense strand
ggacauuguuggacuaagg

SEQ ID NO: 354849 - RNA, 19 nt, Homo sapiens
  misc_RNA (1)...(19): siRNA sense strand
gaagagcuuaaggauauua

SEQ ID NO: 354850 - RNA, 19 nt, Homo sapiens
  misc_RNA (1)...(19): siRNA sense strand
gcggaggaaucaauugcua

SEQ ID NO: 354851 - RNA, 19 nt, Homo sapiens
  misc_RNA (1)...(19): siRNA sense strand
ugacauugaugaaucugaa

SEQ ID NO: 354852 - RNA, 19 nt, Homo sapiens
  misc_RNA (1)...(19): siRNA sense strand
gaacacuccacagguauaa

SEQ ID NO: 354853 - RNA, 19 nt, Homo sapiens
  misc_RNA (1)...(19): siRNA sense strand
gaaggauacugcagaacuc

SEQ ID NO: 354854 - RNA, 19 nt, Homo sapiens
  misc_RNA (1)...(19): siRNA sense strand
gggcauuggagaagaaaua

SEQ ID NO: 354855 - RNA, 19 nt, Homo sapiens
  misc_RNA (1)...(19): siRNA sense strand
gccaguggaugccagaauu

SEQ ID NO: 354856 - RNA, 19 nt, Homo sapiens
  misc_RNA (1)...(19): siRNA sense strand
caagggcauuggagaagaa

SEQ ID NO: 354857 - RNA, 19 nt, Homo sapiens
  misc_RNA (1)...(19): siRNA sense strand
guccuucucugaaugauga

SEQ ID NO: 354858 - RNA, 19 nt, Homo sapiens
  misc_RNA (1)...(19): siRNA sense strand
caguuuaucuggauguuau

SEQ ID NO: 354859 - RNA, 19 nt, Homo sapiens
  misc_RNA (1)...(19): siRNA sense strand
agauuuggcugauauugaa

SEQ ID NO: 354860 - RNA, 19 nt, Homo sapiens
  misc_RNA (1)...(19): siRNA sense strand
gauguuaucagaucacaga

SEQ ID NO: 354861 - RNA, 19 nt, Homo sapiens
  misc_RNA (1)...(19): siRNA sense strand
uuacuacugugacaacauu

SEQ ID NO: 354862 - RNA, 19 nt, Homo sapiens
  misc_RNA (1)...(19): siRNA sense strand
ggauuugguuucagcaugu

SEQ ID NO: 354863 - RNA, 19 nt, Homo sapiens
  misc_RNA (1)...(19): siRNA sense strand
ucagaaggauacugcagaa

SEQ ID NO: 354864 - RNA, 19 nt, Homo sapiens
  misc_RNA (1)...(19): siRNA sense strand
ggaggagggcugccuuauu

SEQ ID NO: 354865 - RNA, 19 nt, Homo sapiens
  misc_RNA (1)...(19): siRNA sense strand
ugaagaugcugacauugau

SEQ ID NO: 354866 - RNA, 19 nt, Homo sapiens
  misc_RNA (1)...(19): siRNA sense strand
ucauaacguucuaccauau

SEQ ID NO: 354867 - RNA, 19 nt, Homo sapiens
  misc_RNA (1)...(19): siRNA sense strand
gcugaagauuuggcugaua

SEQ ID NO: 354868 - RNA, 19 nt, Homo sapiens
  misc_RNA (1)...(19): siRNA sense strand
uaaggacauuguuggacua

SEQ ID NO: 354869 - RNA, 19 nt, Homo sapiens
  misc_RNA (1)...(19): siRNA sense strand
uaacaagggcauuggagaa

SEQ ID NO: 354870 - RNA, 19 nt, Homo sapiens
  misc_RNA (1)...(19): siRNA sense strand
gaaagugauugcacaacac

SEQ ID NO: 354871 - RNA, 19 nt, Homo sapiens
  misc_RNA (1)...(19): siRNA sense strand
auacugaaccugaugauga

SEQ ID NO: 354872 - RNA, 19 nt, Homo sapiens
  misc_RNA (1)...(19): siRNA sense strand
caaguaagcaugaaauggu

SEQ ID NO: 354873 - RNA, 19 nt, Homo sapiens
  misc_RNA (1)...(19): siRNA sense strand
uaagaacuaugucaucacu

SEQ ID NO: 354874 - RNA, 19 nt, Homo sapiens
  misc_RNA (1)...(19): siRNA sense strand
aagcagaagugucagaaca

SEQ ID NO: 354875 - RNA, 19 nt, Homo sapiens
  misc_RNA (1)...(19): siRNA sense strand
agaaagugauugcacaaca

SEQ ID NO: 354876 - RNA, 19 nt, Homo sapiens
  misc_RNA (1)...(19): siRNA sense strand
cuaagccuguuucuucuga

SEQ ID NO: 354877 - RNA, 19 nt, Homo sapiens
  misc_RNA (1)...(19): siRNA sense strand
caagcaguaugccuguuug

SEQ ID NO: 354878 - RNA, 19 nt, Homo sapiens
  misc_RNA (1)...(19): siRNA sense strand
ugaugaaucugaagagucu

SEQ ID NO: 354879 - RNA, 19 nt, Homo sapiens
  misc_RNA (1)...(19): siRNA sense strand
gaaagaggaagaggagguu

SEQ ID NO: 354880 - RNA, 19 nt, Homo sapiens
  misc_RNA (1)...(19): siRNA sense strand
agaggugacugguauagug

SEQ ID NO: 354881 - RNA, 19 nt, Homo sapiens
  misc_RNA (1)...(19): siRNA sense strand
gaucuuacccagacugaca

SEQ ID NO: 354882 - RNA, 19 nt, Homo sapiens
  misc_RNA (1)...(19): siRNA sense strand
gaacuccuuagaggucuua

SEQ ID NO: 354883 - RNA, 19 nt, Homo sapiens
  misc_RNA (1)...(19): siRNA sense strand
ggacguguacuucuguuuc

SEQ ID NO: 354884 - RNA, 19 nt, Homo sapiens
  misc_RNA (1)...(19): siRNA sense strand
uuaaauauuccguggauga

SEQ ID NO: 354885 - RNA, 19 nt, Homo sapiens
  misc_RNA (1)...(19): siRNA sense strand
ggaauggagacauagaaau

SEQ ID NO: 354886 - RNA, 19 nt, Homo sapiens
  misc_RNA (1)...(19): siRNA sense strand
gaagauuuggcugauauug

SEQ ID NO: 354887 - RNA, 19 nt, Homo sapiens
  misc_RNA (1)...(19): siRNA sense strand
cugaagauuuggcugauau

SEQ ID NO: 354888 - RNA, 19 nt, Homo sapiens
  misc_RNA (1)...(19): siRNA sense strand
ugaagagucugcggaggaa

SEQ ID NO: 354889 - RNA, 19 nt, Homo sapiens
  misc_RNA (1)...(19): siRNA sense strand
gcauguccuucucugaaug

SEQ ID NO: 354890 - RNA, 19 nt, Homo sapiens
  misc_RNA (1)...(19): siRNA sense strand
ggagaagaaauagauaaug

SEQ ID NO: 354891 - RNA, 19 nt, Homo sapiens
  misc_RNA (1)...(19): siRNA sense strand
auaaagacauuaccaugca

SEQ ID NO: 354892 - RNA, 19 nt, Homo sapiens
  misc_RNA (1)...(19): siRNA sense strand
ucugacaucucaucaaagu

SEQ ID NO: 354893 - RNA, 19 nt, Homo sapiens
  misc_RNA (1)...(19): siRNA sense strand
gcucugcaguuuccagcaa

SEQ ID NO: 354894 - RNA, 19 nt, Homo sapiens
  misc_RNA (1)...(19): siRNA sense strand
aaagucagauaaagaagca

SEQ ID NO: 354895 - RNA, 19 nt, Homo sapiens
  misc_RNA (1)...(19): siRNA sense strand
uaauuuacuuugggaguga

SEQ ID NO: 354896 - RNA, 19 nt, Homo sapiens
  misc_RNA (1)...(19): siRNA sense strand
ugucaucacucccagaauc

SEQ ID NO: 354897 - RNA, 19 nt, Homo sapiens
  misc_RNA (1)...(19): siRNA sense strand
ccacagguauaacccaucu

SEQ ID NO: 354898 - RNA, 19 nt, Homo sapiens
  misc_RNA (1)...(19): siRNA sense strand
gcagucaaguaagcaugaa

SEQ ID NO: 354899 - RNA, 19 nt, Homo sapiens
  misc_RNA (1)...(19): siRNA sense strand
gcuaucagcauugcacaaa

SEQ ID NO: 354900 - RNA, 19 nt, Homo sapiens
  misc_RNA (1)...(19): siRNA sense strand
ccaagcaguaugccuguuu

SEQ ID NO: 354901 - RNA, 19 nt, Homo sapiens
  misc_RNA (1)...(19): siRNA sense strand
uggcuuaauucauaacguu

SEQ ID NO: 354902 - RNA, 19 nt, Homo sapiens
  misc_RNA (1)...(19): siRNA sense strand
uaugaagagcuuaaggaua

SEQ ID NO: 354903 - RNA, 19 nt, Homo sapiens
  misc_RNA (1)...(19): siRNA sense strand
cagcauguccuucucugaa

SEQ ID NO: 354904 - RNA, 19 nt, Homo sapiens
  misc_RNA (1)...(19): siRNA sense strand
aggaacagcuuuaagaacu

SEQ ID NO: 354905 - RNA, 19 nt, Homo sapiens
  misc_RNA (1)...(19): siRNA sense strand
uauugaagauacuguggaa

SEQ ID NO: 354906 - RNA, 19 nt, Homo sapiens
  misc_RNA (1)...(19): siRNA sense strand
auucugacaucucaucaaa

SEQ ID NO: 354907 - RNA, 19 nt, Homo sapiens
  misc_RNA (1)...(19): siRNA sense strand
ccagagcucuuggaauucu

SEQ ID NO: 354908 - RNA, 19 nt, Homo sapiens
  misc_RNA (1)...(19): siRNA sense strand
uucauaacguucuaccaua

SEQ ID NO: 354909 - RNA, 19 nt, Homo sapiens
  misc_RNA (1)...(19): siRNA sense strand
caagaguuaugucgaugca

SEQ ID NO: 354910 - RNA, 19 nt, Homo sapiens
  misc_RNA (1)...(19): siRNA sense strand
ccucaagaguuaugucgau

SEQ ID NO: 354911 - RNA, 19 nt, Homo sapiens
  misc_RNA (1)...(19): siRNA sense strand
uaacgguccucaugcugau

SEQ ID NO: 354912 - RNA, 19 nt, Homo sapiens
  misc_RNA (1)...(19): siRNA sense strand
ggaauucugacaucucauc

SEQ ID NO: 354913 - RNA, 19 nt, Homo sapiens
  misc_RNA (1)...(19): siRNA sense strand
cgggaucgcuuuggaaaca

SEQ ID NO: 354914 - RNA, 19 nt, Homo sapiens
  misc_RNA (1)...(19): siRNA sense strand
uacugaaccugaugaugaa

SEQ ID NO: 354915 - RNA, 19 nt, Homo sapiens
  misc_RNA (1)...(19): siRNA sense strand
guccuaaccuggagcaucu

SEQ ID NO: 354916 - RNA, 19 nt, Homo sapiens
  misc_RNA (1)...(19): siRNA sense strand
guaaugcugucaauuuuca

SEQ ID NO: 354917 - RNA, 19 nt, Homo sapiens
  misc_RNA (1)...(19): siRNA sense strand
ggggaaaagacuuaauuua

SEQ ID NO: 354918 - RNA, 19 nt, Homo sapiens
  misc_RNA (1)...(19): siRNA sense strand
acuguggaauggagacaua

SEQ ID NO: 354919 - RNA, 19 nt, Homo sapiens
  misc_RNA (1)...(19): siRNA sense strand
uggcugauauugaagauac

SEQ ID NO: 354920 - RNA, 19 nt, Homo sapiens
  misc_RNA (1)...(19): siRNA sense strand
gaagaugcugacauugaug

SEQ ID NO: 354921 - RNA, 19 nt, Homo sapiens
  misc_RNA (1)...(19): siRNA sense strand
gaagauacuguggaaugga

SEQ ID NO: 354922 - RNA, 19 nt, Homo sapiens
  misc_RNA (1)...(19): siRNA sense strand
gacuaagccuguuucuucu

SEQ ID NO: 354923 - RNA, 19 nt, Homo sapiens
  misc_RNA (1)...(19): siRNA sense strand
ggcccuggcugccuucuua

SEQ ID NO: 354924 - RNA, 19 nt, Homo sapiens
  misc_RNA (1)...(19): siRNA sense strand
gagcucaaccugcaacuuu

SEQ ID NO: 354925 - RNA, 19 nt, Homo sapiens
  misc_RNA (1)...(19): siRNA sense strand
gcaccggcaucaaccguaa

SEQ ID NO: 354926 - RNA, 19 nt, Homo sapiens
  misc_RNA (1)...(19): siRNA sense strand
caucaaccguaauagcauu

SEQ ID NO: 354927 - RNA, 19 nt, Homo sapiens
  misc_RNA (1)...(19): siRNA sense strand
ccagcccugugcucucuua

SEQ ID NO: 354928 - RNA, 19 nt, Homo sapiens
  misc_RNA (1)...(19): siRNA sense strand
ugucgaggcucugcagaaa

SEQ ID NO: 354929 - RNA, 19 nt, Homo sapiens
  misc_RNA (1)...(19): siRNA sense strand
acccagaaguggugccaua

SEQ ID NO: 354930 - RNA, 19 nt, Homo sapiens
  misc_RNA (1)...(19): siRNA sense strand
gcaaguuguggcugaccua

SEQ ID NO: 354931 - RNA, 19 nt, Homo sapiens
  misc_RNA (1)...(19): siRNA sense strand
gcuuaugcccaaucgguuu

SEQ ID NO: 354932 - RNA, 19 nt, Homo sapiens
  misc_RNA (1)...(19): siRNA sense strand
gagaccgcauucccuugga

SEQ ID NO: 354933 - RNA, 19 nt, Homo sapiens
  misc_RNA (1)...(19): siRNA sense strand
gcaacuuugugagcaacga

SEQ ID NO: 354934 - RNA, 19 nt, Homo sapiens
  misc_RNA (1)...(19): siRNA sense strand
uggaaauccuggugcagau

SEQ ID NO: 354935 - RNA, 19 nt, Homo sapiens
  misc_RNA (1)...(19): siRNA sense strand
cggcuggccuucaggaucu

SEQ ID NO: 354936 - RNA, 19 nt, Homo sapiens
  misc_RNA (1)...(19): siRNA sense strand
ggcaucaaccguaauagca

SEQ ID NO: 354937 - RNA, 19 nt, Homo sapiens
  misc_RNA (1)...(19): siRNA sense strand
gcuguccucggcucacuuu

SEQ ID NO: 354938 - RNA, 19 nt, Homo sapiens
  misc_RNA (1)...(19): siRNA sense strand
caagcacugucagcucugu

SEQ ID NO: 354939 - RNA, 19 nt, Homo sapiens
  misc_RNA (1)...(19): siRNA sense strand
gggucaaggcggagaagaa

SEQ ID NO: 354940 - RNA, 19 nt, Homo sapiens
  misc_RNA (1)...(19): siRNA sense strand
ucgaggcucugcagaaagg

SEQ ID NO: 354941 - RNA, 19 nt, Homo sapiens
  misc_RNA (1)...(19): siRNA sense strand
guaauagcauuccccuuca

SEQ ID NO: 354942 - RNA, 19 nt, Homo sapiens
  misc_RNA (1)...(19): siRNA sense strand
ggucaaggcggagaagaag

SEQ ID NO: 354943 - RNA, 19 nt, Homo sapiens
  misc_RNA (1)...(19): siRNA sense strand
cagaaguggugccauacac

SEQ ID NO: 354944 - RNA, 19 nt, Homo sapiens
  misc_RNA (1)...(19): siRNA sense strand
gcaucaaccguaauagcau

SEQ ID NO: 354945 - RNA, 19 nt, Homo sapiens
  misc_RNA (1)...(19): siRNA sense strand
caaccugcgcuuacuggau

SEQ ID NO: 354946 - RNA, 19 nt, Homo sapiens
  misc_RNA (1)...(19): siRNA sense strand
acugucagcucugugauca

SEQ ID NO: 354947 - RNA, 19 nt, Homo sapiens
  misc_RNA (1)...(19): siRNA sense strand
ggccagggguucagugaga

SEQ ID NO: 354948 - RNA, 19 nt, Homo sapiens
  misc_RNA (1)...(19): siRNA sense strand
ugcgagaacuggacuugag

SEQ ID NO: 354949 - RNA, 19 nt, Homo sapiens
  misc_RNA (1)...(19): siRNA sense strand
gcucaaccugcaacuuugu

SEQ ID NO: 354950 - RNA, 19 nt, Homo sapiens
  misc_RNA (1)...(19): siRNA sense strand
ggcccuggcugccuucuua

SEQ ID NO: 354951 - RNA, 19 nt, Homo sapiens
  misc_RNA (1)...(19): siRNA sense strand
gagcucaaccugcaacuuu

SEQ ID NO: 354952 - RNA, 19 nt, Homo sapiens
  misc_RNA (1)...(19): siRNA sense strand
gcaccggcaucaaccguaa

SEQ ID NO: 354953 - RNA, 19 nt, Homo sapiens
  misc_RNA (1)...(19): siRNA sense strand
caucaaccguaauagcauu

SEQ ID NO: 354954 - RNA, 19 nt, Homo sapiens
  misc_RNA (1)...(19): siRNA sense strand
ccagcccugugcucucuua

SEQ ID NO: 354955 - RNA, 19 nt, Homo sapiens
  misc_RNA (1)...(19): siRNA sense strand
ugucgaggcucugcagaaa

SEQ ID NO: 354956 - RNA, 19 nt, Homo sapiens
  misc_RNA (1)...(19): siRNA sense strand
acccagaaguggugccaua

SEQ ID NO: 354957 - RNA, 19 nt, Homo sapiens
  misc_RNA (1)...(19): siRNA sense strand
gcaaguuguggcugaccua

SEQ ID NO: 354958 - RNA, 19 nt, Homo sapiens
  misc_RNA (1)...(19): siRNA sense strand
gcuuaugcccaaucgguuu

SEQ ID NO: 354959 - RNA, 19 nt, Homo sapiens
  misc_RNA (1)...(19): siRNA sense strand
gagaccgcauucccuugga

SEQ ID NO: 354960 - RNA, 19 nt, Homo sapiens
  misc_RNA (1)...(19): siRNA sense strand
gcaacuuugugagcaacga

SEQ ID NO: 354961 - RNA, 19 nt, Homo sapiens
  misc_RNA (1)...(19): siRNA sense strand
uggaaauccuggugcagau

SEQ ID NO: 354962 - RNA, 19 nt, Homo sapiens
  misc_RNA (1)...(19): siRNA sense strand
cggcuggccuucaggaucu

SEQ ID NO: 354963 - RNA, 19 nt, Homo sapiens
  misc_RNA (1)...(19): siRNA sense strand
ggcaucaaccguaauagca

SEQ ID NO: 354964 - RNA, 19 nt, Homo sapiens
  misc_RNA (1)...(19): siRNA sense strand
gcuguccucggcucacuuu

SEQ ID NO: 354965 - RNA, 19 nt, Homo sapiens
  misc_RNA (1)...(19): siRNA sense strand
caagcacugucagcucugu

SEQ ID NO: 354966 - RNA, 19 nt, Homo sapiens
  misc_RNA (1)...(19): siRNA sense strand
gggucaaggcggagaagaa

SEQ ID NO: 354967 - RNA, 19 nt, Homo sapiens
  misc_RNA (1)...(19): siRNA sense strand
ucgaggcucugcagaaagg

SEQ ID NO: 354968 - RNA, 19 nt, Homo sapiens
  misc_RNA (1)...(19): siRNA sense strand
guaauagcauuccccuuca

SEQ ID NO: 354969 - RNA, 19 nt, Homo sapiens
  misc_RNA (1)...(19): siRNA sense strand
ggucaaggcggagaagaag

SEQ ID NO: 354970 - RNA, 19 nt, Homo sapiens
  misc_RNA (1)...(19): siRNA sense strand
cagaaguggugccauacac

SEQ ID NO: 354971 - RNA, 19 nt, Homo sapiens
  misc_RNA (1)...(19): siRNA sense strand
gcaucaaccguaauagcau

SEQ ID NO: 354972 - RNA, 19 nt, Homo sapiens
  misc_RNA (1)...(19): siRNA sense strand
caaccugcgcuuacuggau

SEQ ID NO: 354973 - RNA, 19 nt, Homo sapiens
  misc_RNA (1)...(19): siRNA sense strand
acugucagcucugugauca

SEQ ID NO: 354974 - RNA, 19 nt, Homo sapiens
  misc_RNA (1)...(19): siRNA sense strand
ggccagggguucagugaga

SEQ ID NO: 354975 - RNA, 19 nt, Homo sapiens
  misc_RNA (1)...(19): siRNA sense strand
ugcgagaacuggacuugag

SEQ ID NO: 354976 - RNA, 19 nt, Homo sapiens
  misc_RNA (1)...(19): siRNA sense strand
gcucaaccugcaacuuugu

SEQ ID NO: 354977 - RNA, 19 nt, Homo sapiens
  misc_RNA (1)...(19): siRNA sense strand
gcccacugcucuucauuga

SEQ ID NO: 354978 - RNA, 19 nt, Homo sapiens
  misc_RNA (1)...(19): siRNA sense strand
ggccaaggcugcagcaucu

SEQ ID NO: 354979 - RNA, 19 nt, Homo sapiens
  misc_RNA (1)...(19): siRNA sense strand
ccaaggugcuccaguuucu

SEQ ID NO: 354980 - RNA, 19 nt, Homo sapiens
  misc_RNA (1)...(19): siRNA sense strand
gagcaucaggccucaggua

SEQ ID NO: 354981 - RNA, 19 nt, Homo sapiens
  misc_RNA (1)...(19): siRNA sense strand
uagccaaggugcuccaguu

SEQ ID NO: 354982 - RNA, 19 nt, Homo sapiens
  misc_RNA (1)...(19): siRNA sense strand
ugaggcagcugucccuuag

SEQ ID NO: 354983 - RNA, 19 nt, Homo sapiens
  misc_RNA (1)...(19): siRNA sense strand
ugccagaacucacagacaa

SEQ ID NO: 354984 - RNA, 19 nt, Homo sapiens
  misc_RNA (1)...(19): siRNA sense strand
gggcugaccugacccuaac

SEQ ID NO: 354985 - RNA, 19 nt, Homo sapiens
  misc_RNA (1)...(19): siRNA sense strand
gaccugacccuaacacucu

SEQ ID NO: 354986 - RNA, 19 nt, Homo sapiens
  misc_RNA (1)...(19): siRNA sense strand
gcagacacuggaugcuauu

SEQ ID NO: 354987 - RNA, 19 nt, Homo sapiens
  misc_RNA (1)...(19): siRNA sense strand
caucaggccucagguacca

SEQ ID NO: 354988 - RNA, 19 nt, Homo sapiens
  misc_RNA (1)...(19): siRNA sense strand
guccuagccuggagcacuu

SEQ ID NO: 354989 - RNA, 19 nt, Homo sapiens
  misc_RNA (1)...(19): siRNA sense strand
gcagccgacucagugacaa

SEQ ID NO: 354990 - RNA, 19 nt, Homo sapiens
  misc_RNA (1)...(19): siRNA sense strand
cugaggcagcugucccuua

SEQ ID NO: 354991 - RNA, 19 nt, Homo sapiens
  misc_RNA (1)...(19): siRNA sense strand
ccaaggcugcagcaucuca

SEQ ID NO: 354992 - RNA, 19 nt, Homo sapiens
  misc_RNA (1)...(19): siRNA sense strand
ggagagaaaucaacuguaa

SEQ ID NO: 354993 - RNA, 19 nt, Homo sapiens
  misc_RNA (1)...(19): siRNA sense strand
ggaagaagguuuauuugaa

SEQ ID NO: 354994 - RNA, 19 nt, Homo sapiens
  misc_RNA (1)...(19): siRNA sense strand
caucaagacuccugagaua

SEQ ID NO: 354995 - RNA, 19 nt, Homo sapiens
  misc_RNA (1)...(19): siRNA sense strand
gcagacaaauaugagauua

SEQ ID NO: 354996 - RNA, 19 nt, Homo sapiens
  misc_RNA (1)...(19): siRNA sense strand
gaagaagguuuauuugaag

SEQ ID NO: 354997 - RNA, 19 nt, Homo sapiens
  misc_RNA (1)...(19): siRNA sense strand
ucaggcaucucuccaauaa

SEQ ID NO: 354998 - RNA, 19 nt, Homo sapiens
  misc_RNA (1)...(19): siRNA sense strand
gcaaagcugugggauguga

SEQ ID NO: 354999 - RNA, 19 nt, Homo sapiens
  misc_RNA (1)...(19): siRNA sense strand
ggacaugccugaacacacu

SEQ ID NO: 355000 - RNA, 19 nt, Homo sapiens
  misc_RNA (1)...(19): siRNA sense strand
ggaggaccaugaagccuuu

SEQ ID NO: 355001 - RNA, 19 nt, Homo sapiens
  misc_RNA (1)...(19): siRNA sense strand
ggacuacaaugaugaacug

SEQ ID NO: 355002 - RNA, 19 nt, Homo sapiens
  misc_RNA (1)...(19): siRNA sense strand
gaaaccucgucauuaauug

SEQ ID NO: 355003 - RNA, 19 nt, Homo sapiens
  misc_RNA (1)...(19): siRNA sense strand
agacauggcuugauaacau

SEQ ID NO: 355004 - RNA, 19 nt, Homo sapiens
  misc_RNA (1)...(19): siRNA sense strand
gaaguuugaugaacagaag

SEQ ID NO: 355005 - RNA, 19 nt, Homo sapiens
  misc_RNA (1)...(19): siRNA sense strand
ggacagagagccugauuag

SEQ ID NO: 355006 - RNA, 19 nt, Homo sapiens
  misc_RNA (1)...(19): siRNA sense strand
uuugaaaccucgucauuaa

SEQ ID NO: 355007 - RNA, 19 nt, Homo sapiens
  misc_RNA (1)...(19): siRNA sense strand
gugcagcggugaaguuuga

SEQ ID NO: 355008 - RNA, 19 nt, Homo sapiens
  misc_RNA (1)...(19): siRNA sense strand
ccucuuaagugcagacaaa

SEQ ID NO: 355009 - RNA, 19 nt, Homo sapiens
  misc_RNA (1)...(19): siRNA sense strand
gcucgauccucagacuuua

SEQ ID NO: 355010 - RNA, 19 nt, Homo sapiens
  misc_RNA (1)...(19): siRNA sense strand
cuacaaagauggacuucuc

SEQ ID NO: 355011 - RNA, 19 nt, Homo sapiens
  misc_RNA (1)...(19): siRNA sense strand
gacauggcuugauaacauu

SEQ ID NO: 355012 - RNA, 19 nt, Homo sapiens
  misc_RNA (1)...(19): siRNA sense strand
gagacuacauccucuuaag

SEQ ID NO: 355013 - RNA, 19 nt, Homo sapiens
  misc_RNA (1)...(19): siRNA sense strand
uuugagacauggcuugaua

SEQ ID NO: 355014 - RNA, 19 nt, Homo sapiens
  misc_RNA (1)...(19): siRNA sense strand
ugaaaccucgucauuaauu

SEQ ID NO: 355015 - RNA, 19 nt, Homo sapiens
  misc_RNA (1)...(19): siRNA sense strand
aaagauggacuucucugua

SEQ ID NO: 355016 - RNA, 19 nt, Homo sapiens
  misc_RNA (1)...(19): siRNA sense strand
caugcugccucgucucuaa

SEQ ID NO: 355017 - RNA, 19 nt, Homo sapiens
  misc_RNA (1)...(19): siRNA sense strand
ggaaugggucaccaaggua

SEQ ID NO: 355018 - RNA, 19 nt, Homo sapiens
  misc_RNA (1)...(19): siRNA sense strand
guaugcacuuuacuacaaa

SEQ ID NO: 355019 - RNA, 19 nt, Homo sapiens
  misc_RNA (1)...(19): siRNA sense strand
gcucaggcaucucuccaau

SEQ ID NO: 355020 - RNA, 19 nt, Homo sapiens
  misc_RNA (1)...(19): siRNA sense strand
ggugauaagugccuguaca

SEQ ID NO: 355021 - RNA, 19 nt, Homo sapiens
  misc_RNA (1)...(19): siRNA sense strand
acagagagccugauuaguc

SEQ ID NO: 355022 - RNA, 19 nt, Homo sapiens
  misc_RNA (1)...(19): siRNA sense strand
guacaggaaaucaaagaga

SEQ ID NO: 355023 - RNA, 19 nt, Homo sapiens
  misc_RNA (1)...(19): siRNA sense strand
cuacaaugaugaacuggau

SEQ ID NO: 355024 - RNA, 19 nt, Homo sapiens
  misc_RNA (1)...(19): siRNA sense strand
uugcuuggcuuuggagaua

SEQ ID NO: 355025 - RNA, 19 nt, Homo sapiens
  misc_RNA (1)...(19): siRNA sense strand
cugcaaagcugugggaugu

SEQ ID NO: 355026 - RNA, 19 nt, Homo sapiens
  misc_RNA (1)...(19): siRNA sense strand
auuaagauuuggccaauug

SEQ ID NO: 355027 - RNA, 19 nt, Homo sapiens
  misc_RNA (1)...(19): siRNA sense strand
gcuggcagauagaugauuc

SEQ ID NO: 355028 - RNA, 19 nt, Homo sapiens
  misc_RNA (1)...(19): siRNA sense strand
guucagcacuuggucucua

SEQ ID NO: 355029 - RNA, 19 nt, Homo sapiens
  misc_RNA (1)...(19): siRNA sense strand
uaagugcagacaaauauga

SEQ ID NO: 355030 - RNA, 19 nt, Homo sapiens
  misc_RNA (1)...(19): siRNA sense strand
gauuaagauuuggccaauu

SEQ ID NO: 355031 - RNA, 19 nt, Homo sapiens
  misc_RNA (1)...(19): siRNA sense strand
gaccaugaagccuuugaaa

SEQ ID NO: 355032 - RNA, 19 nt, Homo sapiens
  misc_RNA (1)...(19): siRNA sense strand
cagaguacaggaaaucaaa

SEQ ID NO: 355033 - RNA, 19 nt, Homo sapiens
  misc_RNA (1)...(19): siRNA sense strand
ggacuuugccaguuaugau

SEQ ID NO: 355034 - RNA, 19 nt, Homo sapiens
  misc_RNA (1)...(19): siRNA sense strand
agugggacuuugccaguua

SEQ ID NO: 355035 - RNA, 19 nt, Homo sapiens
  misc_RNA (1)...(19): siRNA sense strand
ggagacuacauccucuuaa

SEQ ID NO: 355036 - RNA, 19 nt, Homo sapiens
  misc_RNA (1)...(19): siRNA sense strand
gugacaggcuccuuugaca

SEQ ID NO: 355037 - RNA, 19 nt, Homo sapiens
  misc_RNA (1)...(19): siRNA sense strand
gacaaccgcuaccuguaca

SEQ ID NO: 355038 - RNA, 19 nt, Homo sapiens
  misc_RNA (1)...(19): siRNA sense strand
gcugggacaugccugaaca

SEQ ID NO: 355039 - RNA, 19 nt, Homo sapiens
  misc_RNA (1)...(19): siRNA sense strand
gauagaugauucuguucag

SEQ ID NO: 355040 - RNA, 19 nt, Homo sapiens
  misc_RNA (1)...(19): siRNA sense strand
caagcgggacuuccucaaa

SEQ ID NO: 355041 - RNA, 19 nt, Homo sapiens
  misc_RNA (1)...(19): siRNA sense strand
gcaacuggaggaccaugaa

SEQ ID NO: 355042 - RNA, 19 nt, Homo sapiens
  misc_RNA (1)...(19): siRNA sense strand
ucucuaaacaguggaauaa

SEQ ID NO: 355043 - RNA, 19 nt, Homo sapiens
  misc_RNA (1)...(19): siRNA sense strand
gacuuugccaguuaugaua

SEQ ID NO: 355044 - RNA, 19 nt, Homo sapiens
  misc_RNA (1)...(19): siRNA sense strand
cggaaugggucaccaaggu

SEQ ID NO: 355045 - RNA, 19 nt, Homo sapiens
  misc_RNA (1)...(19): siRNA sense strand
uggaagaagguuuauuuga

SEQ ID NO: 355046 - RNA, 19 nt, Homo sapiens
  misc_RNA (1)...(19): siRNA sense strand
aagauggacuucucuguac

SEQ ID NO: 355047 - RNA, 19 nt, Homo sapiens
  misc_RNA (1)...(19): siRNA sense strand
gauggcaaauacauugucu

SEQ ID NO: 355048 - RNA, 19 nt, Homo sapiens
  misc_RNA (1)...(19): siRNA sense strand
acuggaagaagguuuauuu

SEQ ID NO: 355049 - RNA, 19 nt, Homo sapiens
  misc_RNA (1)...(19): siRNA sense strand
gacuacauccucuuaagug

SEQ ID NO: 355050 - RNA, 19 nt, Homo sapiens
  misc_RNA (1)...(19): siRNA sense strand
augaugaacuggauaucuu

SEQ ID NO: 355051 - RNA, 19 nt, Homo sapiens
  misc_RNA (1)...(19): siRNA sense strand
ucuaaacaguggaauaagg

SEQ ID NO: 355052 - RNA, 19 nt, Homo sapiens
  misc_RNA (1)...(19): siRNA sense strand
gaguacaggaaaucaaaga

SEQ ID NO: 355053 - RNA, 19 nt, Homo sapiens
  misc_RNA (1)...(19): siRNA sense strand
acaguggaauaaggugaua

SEQ ID NO: 355054 - RNA, 19 nt, Homo sapiens
  misc_RNA (1)...(19): siRNA sense strand
gaagugcaaagucaagucu

SEQ ID NO: 355055 - RNA, 19 nt, Homo sapiens
  misc_RNA (1)...(19): siRNA sense strand
gaugaacagaagcuuguga

SEQ ID NO: 355056 - RNA, 19 nt, Homo sapiens
  misc_RNA (1)...(19): siRNA sense strand
gcauccagacccacacuug

SEQ ID NO: 355057 - RNA, 19 nt, Homo sapiens
  misc_RNA (1)...(19): siRNA sense strand
caaagauggacuucucugu

SEQ ID NO: 355058 - RNA, 19 nt, Homo sapiens
  misc_RNA (1)...(19): siRNA sense strand
cuuaagugcagacaaauau

SEQ ID NO: 355059 - RNA, 19 nt, Homo sapiens
  misc_RNA (1)...(19): siRNA sense strand
ccucagacuuuacucacau

SEQ ID NO: 355060 - RNA, 19 nt, Homo sapiens
  misc_RNA (1)...(19): siRNA sense strand
aauuugggcuggcagauag

SEQ ID NO: 355061 - RNA, 19 nt, Homo sapiens
  misc_RNA (1)...(19): siRNA sense strand
gauauucucagggucauca

SEQ ID NO: 355062 - RNA, 19 nt, Homo sapiens
  misc_RNA (1)...(19): siRNA sense strand
gggagagaaaucaacugua

SEQ ID NO: 355063 - RNA, 19 nt, Homo sapiens
  misc_RNA (1)...(19): siRNA sense strand
gcaucucuccaauaaccua

SEQ ID NO: 355064 - RNA, 19 nt, Homo sapiens
  misc_RNA (1)...(19): siRNA sense strand
gcagaagugcaaagucaag

SEQ ID NO: 355065 - RNA, 19 nt, Homo sapiens
  misc_RNA (1)...(19): siRNA sense strand
ccaauugggagagaaauca

SEQ ID NO: 355066 - RNA, 19 nt, Homo sapiens
  misc_RNA (1)...(19): siRNA sense strand
ucuuugcccugcuguuuga

SEQ ID NO: 355067 - RNA, 19 nt, Homo sapiens
  misc_RNA (1)...(19): siRNA sense strand
caagacuccugagauagca

SEQ ID NO: 355068 - RNA, 19 nt, Homo sapiens
  misc_RNA (1)...(19): siRNA sense strand
agagaaaucaacuguaagu

SEQ ID NO: 355069 - RNA, 19 nt, Homo sapiens
  misc_RNA (1)...(19): siRNA sense strand
ggaccaugaagccuuugaa

SEQ ID NO: 355070 - RNA, 19 nt, Homo sapiens
  misc_RNA (1)...(19): siRNA sense strand
caaagagaggcucaagcuu

SEQ ID NO: 355071 - RNA, 19 nt, Homo sapiens
  misc_RNA (1)...(19): siRNA sense strand
ucaaagagaggcucaagcu

SEQ ID NO: 355072 - RNA, 19 nt, Homo sapiens
  misc_RNA (1)...(19): siRNA sense strand
uaucuuugcccugcuguuu

SEQ ID NO: 355073 - RNA, 19 nt, Homo sapiens
  misc_RNA (1)...(19): siRNA sense strand
ggugaaguuugaugaacag

SEQ ID NO: 355074 - RNA, 19 nt, Homo sapiens
  misc_RNA (1)...(19): siRNA sense strand
aaauuugggcuggcagaua

SEQ ID NO: 355075 - RNA, 19 nt, Homo sapiens
  misc_RNA (1)...(19): siRNA sense strand
agauuaagauuuggccaau

SEQ ID NO: 355076 - RNA, 19 nt, Homo sapiens
  misc_RNA (1)...(19): siRNA sense strand
uggagacuacauccucuua

SEQ ID NO: 355077 - RNA, 19 nt, Homo sapiens
  misc_RNA (1)...(19): siRNA sense strand
gucauuaauuggacacagu

SEQ ID NO: 355078 - RNA, 19 nt, Homo sapiens
  misc_RNA (1)...(19): siRNA sense strand
uggaauaaggugauaagug

SEQ ID NO: 355079 - RNA, 19 nt, Homo sapiens
  misc_RNA (1)...(19): siRNA sense strand
cuccugagauagcaaacuu

SEQ ID NO: 355080 - RNA, 19 nt, Homo sapiens
  misc_RNA (1)...(19): siRNA sense strand
gcaaagucaagucucucuu

SEQ ID NO: 355081 - RNA, 19 nt, Homo sapiens
  misc_RNA (1)...(19): siRNA sense strand
cuuugaaaccucgucauua

SEQ ID NO: 355082 - RNA, 19 nt, Homo sapiens
  misc_RNA (1)...(19): siRNA sense strand
ggcucgauccucagacuuu

SEQ ID NO: 355083 - RNA, 19 nt, Homo sapiens
  misc_RNA (1)...(19): siRNA sense strand
acaaugaugaacuggauau

SEQ ID NO: 355084 - RNA, 19 nt, Homo sapiens
  misc_RNA (1)...(19): siRNA sense strand
uauuuagcguggacuacaa

SEQ ID NO: 355085 - RNA, 19 nt, Homo sapiens
  misc_RNA (1)...(19): siRNA sense strand
ggacuuccucaaacuccuu

SEQ ID NO: 355086 - RNA, 19 nt, Homo sapiens
  misc_RNA (1)...(19): siRNA sense strand
gcacuggaagaagguuuau

SEQ ID NO: 355087 - RNA, 19 nt, Homo sapiens
  misc_RNA (1)...(19): siRNA sense strand
gauccucagacuuuacuca

SEQ ID NO: 355088 - RNA, 19 nt, Homo sapiens
  misc_RNA (1)...(19): siRNA sense strand
gcggacagagagccugauu

SEQ ID NO: 355089 - RNA, 19 nt, Homo sapiens
  misc_RNA (1)...(19): siRNA sense strand
ugacaaccgcuaccuguac

SEQ ID NO: 355090 - RNA, 19 nt, Homo sapiens
  misc_RNA (1)...(19): siRNA sense strand
gagccaggacccagcacuu

SEQ ID NO: 355091 - RNA, 19 nt, Homo sapiens
  misc_RNA (1)...(19): siRNA sense strand
cggugaaguuugaugaaca

SEQ ID NO: 355092 - RNA, 19 nt, Homo sapiens
  misc_RNA (1)...(19): siRNA sense strand
ggaugaugcuuuguacaua

SEQ ID NO: 355093 - RNA, 19 nt, Homo sapiens
  misc_RNA (1)...(19): siRNA sense strand
ggaugcagcuagaggauga

SEQ ID NO: 355094 - RNA, 19 nt, Homo sapiens
  misc_RNA (1)...(19): siRNA sense strand
gaugaugcuuuguacauau

SEQ ID NO: 355095 - RNA, 19 nt, Homo sapiens
  misc_RNA (1)...(19): siRNA sense strand
gcuagaggaugaugcuuug

SEQ ID NO: 355096 - RNA, 19 nt, Homo sapiens
  misc_RNA (1)...(19): siRNA sense strand
guacugggcucaugaacag

SEQ ID NO: 355097 - RNA, 19 nt, Homo sapiens
  misc_RNA (1)...(19): siRNA sense strand
gaggugaacuguguggauu

SEQ ID NO: 355098 - RNA, 19 nt, Homo sapiens
  misc_RNA (1)...(19): siRNA sense strand
gcagucagaugcccuggau

SEQ ID NO: 355099 - RNA, 19 nt, Homo sapiens
  misc_RNA (1)...(19): siRNA sense strand
ggugcuggaugucauauau

SEQ ID NO: 355100 - RNA, 19 nt, Homo sapiens
  misc_RNA (1)...(19): siRNA sense strand
ugaggacguuugccacuuu

SEQ ID NO: 355101 - RNA, 19 nt, Homo sapiens
  misc_RNA (1)...(19): siRNA sense strand
ggccauuacucagcucuuu

SEQ ID NO: 355102 - RNA, 19 nt, Homo sapiens
  misc_RNA (1)...(19): siRNA sense strand
ugacacacuuggacagaga

SEQ ID NO: 355103 - RNA, 19 nt, Homo sapiens
  misc_RNA (1)...(19): siRNA sense strand
cagugaaggugucucagaa

SEQ ID NO: 355104 - RNA, 19 nt, Homo sapiens
  misc_RNA (1)...(19): siRNA sense strand
ugacagggacggcuuguug

SEQ ID NO: 355105 - RNA, 19 nt, Homo sapiens
  misc_RNA (1)...(19): siRNA sense strand
guacauaucccaggcuaau

SEQ ID NO: 355106 - RNA, 19 nt, Homo sapiens
  misc_RNA (1)...(19): siRNA sense strand
gcaccaguguccggaaaug

SEQ ID NO: 355107 - RNA, 19 nt, Homo sapiens
  misc_RNA (1)...(19): siRNA sense strand
acagguuccuccuucuaua

SEQ ID NO: 355108 - RNA, 19 nt, Homo sapiens
  misc_RNA (1)...(19): siRNA sense strand
gaacuguguggauugcaaa

SEQ ID NO: 355109 - RNA, 19 nt, Homo sapiens
  misc_RNA (1)...(19): siRNA sense strand
caaaucuggucuguugcua

SEQ ID NO: 355110 - RNA, 19 nt, Homo sapiens
  misc_RNA (1)...(19): siRNA sense strand
gggaagauuggccuuggua

SEQ ID NO: 355111 - RNA, 19 nt, Homo sapiens
  misc_RNA (1)...(19): siRNA sense strand
gauuggccuugguaagauu

SEQ ID NO: 355112 - RNA, 19 nt, Homo sapiens
  misc_RNA (1)...(19): siRNA sense strand
gcuaucaggccauuacuca

SEQ ID NO: 355113 - RNA, 19 nt, Homo sapiens
  misc_RNA (1)...(19): siRNA sense strand
uuacucagcucuuuuguga

SEQ ID NO: 355114 - RNA, 19 nt, Homo sapiens
  misc_RNA (1)...(19): siRNA sense strand
acauaucccaggcuaauuu

SEQ ID NO: 355115 - RNA, 19 nt, Homo sapiens
  misc_RNA (1)...(19): siRNA sense strand
cauccagacugaagaccaa

SEQ ID NO: 355116 - RNA, 19 nt, Homo sapiens
  misc_RNA (1)...(19): siRNA sense strand
gcaccuucgcugccaagua

SEQ ID NO: 355117 - RNA, 19 nt, Homo sapiens
  misc_RNA (1)...(19): siRNA sense strand
ggaagauuggccuugguaa

SEQ ID NO: 355118 - RNA, 19 nt, Homo sapiens
  misc_RNA (1)...(19): siRNA sense strand
gugggcagcugaugacaca

SEQ ID NO: 355119 - RNA, 19 nt, Homo sapiens
  misc_RNA (1)...(19): siRNA sense strand
uauacaccauccagacuga

SEQ ID NO: 355120 - RNA, 19 nt, Homo sapiens
  misc_RNA (1)...(19): siRNA sense strand
caccuucgcugccaaguac

SEQ ID NO: 355121 - RNA, 19 nt, Homo sapiens
  misc_RNA (1)...(19): siRNA sense strand
gaagauuggccuugguaag

SEQ ID NO: 355122 - RNA, 19 nt, Homo sapiens
  misc_RNA (1)...(19): siRNA sense strand
gaggacguuugccacuuug

SEQ ID NO: 355123 - RNA, 19 nt, Homo sapiens
  misc_RNA (1)...(19): siRNA sense strand
acacuuggacagagacuuu

SEQ ID NO: 355124 - RNA, 19 nt, Homo sapiens
  misc_RNA (1)...(19): siRNA sense strand
uagaggaugaugcuuugua

SEQ ID NO: 355125 - RNA, 19 nt, Homo sapiens
  misc_RNA (1)...(19): siRNA sense strand
aggaggagaugggaagauu

SEQ ID NO: 355126 - RNA, 19 nt, Homo sapiens
  misc_RNA (1)...(19): siRNA sense strand
ucuaugcugcgcugucuua

SEQ ID NO: 355127 - RNA, 19 nt, Homo sapiens
  misc_RNA (1)...(19): siRNA sense strand
ccacagguuccuccuucua

SEQ ID NO: 355128 - RNA, 19 nt, Homo sapiens
  misc_RNA (1)...(19): siRNA sense strand
ugaacuguguggauugcaa

SEQ ID NO: 355129 - RNA, 19 nt, Homo sapiens
  misc_RNA (1)...(19): siRNA sense strand
aaguggagaugcagucaga

SEQ ID NO: 355130 - RNA, 19 nt, Homo sapiens
  misc_RNA (1)...(19): siRNA sense strand
ccaaguacugggcucauga

SEQ ID NO: 355131 - RNA, 19 nt, Homo sapiens
  misc_RNA (1)...(19): siRNA sense strand
augcugcgcugucuuacaa

SEQ ID NO: 355132 - RNA, 19 nt, Homo sapiens
  misc_RNA (1)...(19): siRNA sense strand
aaucuggucuguugcuauc

SEQ ID NO: 355133 - RNA, 19 nt, Homo sapiens
  misc_RNA (1)...(19): siRNA sense strand
ggaggagaugggaagauug

SEQ ID NO: 355134 - RNA, 19 nt, Homo sapiens
  misc_RNA (1)...(19): siRNA sense strand
gugaaggugucucagaacu

SEQ ID NO: 355135 - RNA, 19 nt, Homo sapiens
  misc_RNA (1)...(19): siRNA sense strand
ggaggugaacuguguggau

SEQ ID NO: 355136 - RNA, 19 nt, Homo sapiens
  misc_RNA (1)...(19): siRNA sense strand
gagaggggauucugcugaa

SEQ ID NO: 355137 - RNA, 19 nt, Homo sapiens
  misc_RNA (1)...(19): siRNA sense strand
gaggagaugggaagauugg

SEQ ID NO: 355138 - RNA, 19 nt, Homo sapiens
  misc_RNA (1)...(19): siRNA sense strand
ggacguuugccacuuugug

SEQ ID NO: 355139 - RNA, 19 nt, Homo sapiens
  misc_RNA (1)...(19): siRNA sense strand
gccaaguacugggcucaug

SEQ ID NO: 355140 - RNA, 19 nt, Homo sapiens
  misc_RNA (1)...(19): siRNA sense strand
ugaccagugucccagugaa

SEQ ID NO: 355141 - RNA, 19 nt, Homo sapiens
  misc_RNA (1)...(19): siRNA sense strand
aagauuggccuugguaaga

SEQ ID NO: 355142 - RNA, 19 nt, Homo sapiens
  misc_RNA (1)...(19): siRNA sense strand
ccagugaaggugucucaga

SEQ ID NO: 355143 - RNA, 19 nt, Homo sapiens
  misc_RNA (1)...(19): siRNA sense strand
gaugacacacuuggacaga

SEQ ID NO: 355144 - RNA, 19 nt, Homo sapiens
  misc_RNA (1)...(19): siRNA sense strand
caaguacugggcucaugaa

SEQ ID NO: 355145 - RNA, 19 nt, Homo sapiens
  misc_RNA (1)...(19): siRNA sense strand
gcacuucucaccccugaaa

SEQ ID NO: 355146 - RNA, 19 nt, Homo sapiens
  misc_RNA (1)...(19): siRNA sense strand
ccgcaccaguguccggaaa

SEQ ID NO: 355147 - RNA, 19 nt, Homo sapiens
  misc_RNA (1)...(19): siRNA sense strand
gugcuggccaccucgcaua

SEQ ID NO: 355148 - RNA, 19 nt, Homo sapiens
  misc_RNA (1)...(19): siRNA sense strand
agacagauggcaaccacuu

SEQ ID NO: 355149 - RNA, 19 nt, Homo sapiens
  misc_RNA (1)...(19): siRNA sense strand
ccaaccugaugaccagugu

SEQ ID NO: 355150 - RNA, 19 nt, Homo sapiens
  misc_RNA (1)...(19): siRNA sense strand
cuggccaccucgcauauug

SEQ ID NO: 355151 - RNA, 19 nt, Homo sapiens
  misc_RNA (1)...(19): siRNA sense strand
gcucggcaccaaccugaug

SEQ ID NO: 355152 - RNA, 19 nt, Homo sapiens
  misc_RNA (1)...(19): siRNA sense strand
agaggaugaugcuuuguac

SEQ ID NO: 355153 - RNA, 19 nt, Homo sapiens
  misc_RNA (1)...(19): siRNA sense strand
ccaguuccguccagauggu

SEQ ID NO: 355154 - RNA, 19 nt, Homo sapiens
  misc_RNA (1)...(19): siRNA sense strand
ccagauggugccagcuuga

SEQ ID NO: 355155 - RNA, 19 nt, Homo sapiens
  misc_RNA (1)...(19): siRNA sense strand
gccugcaucucaccaccaa

SEQ ID NO: 355156 - RNA, 19 nt, Homo sapiens
  misc_RNA (1)...(19): siRNA sense strand
gacagauggcaaccacuug

SEQ ID NO: 355157 - RNA, 19 nt, Homo sapiens
  misc_RNA (1)...(19): siRNA sense strand
ggcaugaugaggacguuug

SEQ ID NO: 355158 - RNA, 19 nt, Homo sapiens
  misc_RNA (1)...(19): siRNA sense strand
acaccuauguucgcuacug

SEQ ID NO: 355159 - RNA, 19 nt, Homo sapiens
  misc_RNA (1)...(19): siRNA sense strand
caacagugggcagcugaug

SEQ ID NO: 355160 - RNA, 19 nt, Homo sapiens
  misc_RNA (1)...(19): siRNA sense strand
agauuggccuugguaagau

SEQ ID NO: 355161 - RNA, 19 nt, Homo sapiens
  misc_RNA (1)...(19): siRNA sense strand
guggagaugcagucagaug

SEQ ID NO: 355162 - RNA, 19 nt, Homo sapiens
  misc_RNA (1)...(19): siRNA sense strand
ggcagcugaugacacacuu

SEQ ID NO: 355163 - RNA, 19 nt, Homo sapiens
  misc_RNA (1)...(19): siRNA sense strand
ggacuuaucuuuguucauu

SEQ ID NO: 355164 - RNA, 19 nt, Homo sapiens
  misc_RNA (1)...(19): siRNA sense strand
guauaaaggugcacaugua

SEQ ID NO: 355165 - RNA, 19 nt, Homo sapiens
  misc_RNA (1)...(19): siRNA sense strand
gcaagcagguugguguuua

SEQ ID NO: 355166 - RNA, 19 nt, Homo sapiens
  misc_RNA (1)...(19): siRNA sense strand
ucagugaacuugcuaauga

SEQ ID NO: 355167 - RNA, 19 nt, Homo sapiens
  misc_RNA (1)...(19): siRNA sense strand
gaaaguggcagacaaaguu

SEQ ID NO: 355168 - RNA, 19 nt, Homo sapiens
  misc_RNA (1)...(19): siRNA sense strand
cauggaaacccaauuauua

SEQ ID NO: 355169 - RNA, 19 nt, Homo sapiens
  misc_RNA (1)...(19): siRNA sense strand
gcacaccacugcuuagaga

SEQ ID NO: 355170 - RNA, 19 nt, Homo sapiens
  misc_RNA (1)...(19): siRNA sense strand
ccaaaucccuggaaagaga

SEQ ID NO: 355171 - RNA, 19 nt, Homo sapiens
  misc_RNA (1)...(19): siRNA sense strand
ggaaaauucuaccagauua

SEQ ID NO: 355172 - RNA, 19 nt, Homo sapiens
  misc_RNA (1)...(19): siRNA sense strand
gauagcaggcuuugaagua

SEQ ID NO: 355173 - RNA, 19 nt, Homo sapiens
  misc_RNA (1)...(19): siRNA sense strand
gaauauacucgcccuauga

SEQ ID NO: 355174 - RNA, 19 nt, Homo sapiens
  misc_RNA (1)...(19): siRNA sense strand
ggaacaggaucuuuguaga

SEQ ID NO: 355175 - RNA, 19 nt, Homo sapiens
  misc_RNA (1)...(19): siRNA sense strand
guaaauuguagcccuauua

SEQ ID NO: 355176 - RNA, 19 nt, Homo sapiens
  misc_RNA (1)...(19): siRNA sense strand
gcagacaaaguuauaauug

SEQ ID NO: 355177 - RNA, 19 nt, Homo sapiens
  misc_RNA (1)...(19): siRNA sense strand
uagagcagcuuguguaugu

SEQ ID NO: 355178 - RNA, 19 nt, Homo sapiens
  misc_RNA (1)...(19): siRNA sense strand
gaacagcgugucccacaaa

SEQ ID NO: 355179 - RNA, 19 nt, Homo sapiens
  misc_RNA (1)...(19): siRNA sense strand
caaauuaggacaaacaguu

SEQ ID NO: 355180 - RNA, 19 nt, Homo sapiens
  misc_RNA (1)...(19): siRNA sense strand
cagaugaagugguucuaaa

SEQ ID NO: 355181 - RNA, 19 nt, Homo sapiens
  misc_RNA (1)...(19): siRNA sense strand
gcugaacauuucuacagua

SEQ ID NO: 355182 - RNA, 19 nt, Homo sapiens
  misc_RNA (1)...(19): siRNA sense strand
gggaauauaugaggauaau

SEQ ID NO: 355183 - RNA, 19 nt, Homo sapiens
  misc_RNA (1)...(19): siRNA sense strand
aaacaacuuugcaggugua

SEQ ID NO: 355184 - RNA, 19 nt, Homo sapiens
  misc_RNA (1)...(19): siRNA sense strand
caauggacauggagugcua

SEQ ID NO: 355185 - RNA, 19 nt, Homo sapiens
  misc_RNA (1)...(19): siRNA sense strand
gaggacaauucauagagaa

SEQ ID NO: 355186 - RNA, 19 nt, Homo sapiens
  misc_RNA (1)...(19): siRNA sense strand
ggacgaggccuuauugaag

SEQ ID NO: 355187 - RNA, 19 nt, Homo sapiens
  misc_RNA (1)...(19): siRNA sense strand
gaagaggacaauucauaga

SEQ ID NO: 355188 - RNA, 19 nt, Homo sapiens
  misc_RNA (1)...(19): siRNA sense strand
uggauuaccucaaauagug

SEQ ID NO: 355189 - RNA, 19 nt, Homo sapiens
  misc_RNA (1)...(19): siRNA sense strand
acaguaacccugcaagaua

SEQ ID NO: 355190 - RNA, 19 nt, Homo sapiens
  misc_RNA (1)...(19): siRNA sense strand
ugacaaaucugcacaacac

SEQ ID NO: 355191 - RNA, 19 nt, Homo sapiens
  misc_RNA (1)...(19): siRNA sense strand
ugaagaugcuuauguugga

SEQ ID NO: 355192 - RNA, 19 nt, Homo sapiens
  misc_RNA (1)...(19): siRNA sense strand
gaacauuucuacaguaacc

SEQ ID NO: 355193 - RNA, 19 nt, Homo sapiens
  misc_RNA (1)...(19): siRNA sense strand
gacaaggaguaauagaaga

SEQ ID NO: 355194 - RNA, 19 nt, Homo sapiens
  misc_RNA (1)...(19): siRNA sense strand
guuuaacccugaugacaaa

SEQ ID NO: 355195 - RNA, 19 nt, Homo sapiens
  misc_RNA (1)...(19): siRNA sense strand
caccacugcuuagagauua

SEQ ID NO: 355196 - RNA, 19 nt, Homo sapiens
  misc_RNA (1)...(19): siRNA sense strand
aggagaaacugccagauga

SEQ ID NO: 355197 - RNA, 19 nt, Homo sapiens
  misc_RNA (1)...(19): siRNA sense strand
ggacaaggaguaauagaag

SEQ ID NO: 355198 - RNA, 19 nt, Homo sapiens
  misc_RNA (1)...(19): siRNA sense strand
aaagggacaaggaguaaua

SEQ ID NO: 355199 - RNA, 19 nt, Homo sapiens
  misc_RNA (1)...(19): siRNA sense strand
aggaggaguuuacaucuuu

SEQ ID NO: 355200 - RNA, 19 nt, Homo sapiens
  misc_RNA (1)...(19): siRNA sense strand
ggaaaucaaggaggaguuu

SEQ ID NO: 355201 - RNA, 19 nt, Homo sapiens
  misc_RNA (1)...(19): siRNA sense strand
aauagugacccaacaauaa

SEQ ID NO: 355202 - RNA, 19 nt, Homo sapiens
  misc_RNA (1)...(19): siRNA sense strand
guguauggauuaccucaaa

SEQ ID NO: 355203 - RNA, 19 nt, Homo sapiens
  misc_RNA (1)...(19): siRNA sense strand
uggaaacgauuauauaugg

SEQ ID NO: 355204 - RNA, 19 nt, Homo sapiens
  misc_RNA (1)...(19): siRNA sense strand
ggaaacgauuauauaugga

SEQ ID NO: 355205 - RNA, 19 nt, Homo sapiens
  misc_RNA (1)...(19): siRNA sense strand
ggaaggcucugaagaugcu

SEQ ID NO: 355206 - RNA, 19 nt, Homo sapiens
  misc_RNA (1)...(19): siRNA sense strand
caguaacccugcaagauau

SEQ ID NO: 355207 - RNA, 19 nt, Homo sapiens
  misc_RNA (1)...(19): siRNA sense strand
gaaacugccagaugaagug

SEQ ID NO: 355208 - RNA, 19 nt, Homo sapiens
  misc_RNA (1)...(19): siRNA sense strand
gacauggagugcuagaaga

SEQ ID NO: 355209 - RNA, 19 nt, Homo sapiens
  misc_RNA (1)...(19): siRNA sense strand
aggaauauauguccaugaa

SEQ ID NO: 355210 - RNA, 19 nt, Homo sapiens
  misc_RNA (1)...(19): siRNA sense strand
gaacaggaucuuuguagag

SEQ ID NO: 355211 - RNA, 19 nt, Homo sapiens
  misc_RNA (1)...(19): siRNA sense strand
gugcaagagugucuggaaa

SEQ ID NO: 355212 - RNA, 19 nt, Homo sapiens
  misc_RNA (1)...(19): siRNA sense strand
caagcagguugguguuuau

SEQ ID NO: 355213 - RNA, 19 nt, Homo sapiens
  misc_RNA (1)...(19): siRNA sense strand
gaaaucaaggaggaguuua

SEQ ID NO: 355214 - RNA, 19 nt, Homo sapiens
  misc_RNA (1)...(19): siRNA sense strand
ggaagaggacaauucauag

SEQ ID NO: 355215 - RNA, 19 nt, Homo sapiens
  misc_RNA (1)...(19): siRNA sense strand
uggcauggguuacuuugaa

SEQ ID NO: 355216 - RNA, 19 nt, Homo sapiens
  misc_RNA (1)...(19): siRNA sense strand
aaucauggaaacccaauua

SEQ ID NO: 355217 - RNA, 19 nt, Homo sapiens
  misc_RNA (1)...(19): siRNA sense strand
gagcaugucccaccaucaa

SEQ ID NO: 355218 - RNA, 19 nt, Homo sapiens
  misc_RNA (1)...(19): siRNA sense strand
aacaguaucuucaggagaa

SEQ ID NO: 355219 - RNA, 19 nt, Homo sapiens
  misc_RNA (1)...(19): siRNA sense strand
gagcagcuuguguauguaa

SEQ ID NO: 355220 - RNA, 19 nt, Homo sapiens
  misc_RNA (1)...(19): siRNA sense strand
gaaaguugcaauauacaca

SEQ ID NO: 355221 - RNA, 19 nt, Homo sapiens
  misc_RNA (1)...(19): siRNA sense strand
cugaacauuucuacaguaa

SEQ ID NO: 355222 - RNA, 19 nt, Homo sapiens
  misc_RNA (1)...(19): siRNA sense strand
ggauuuaugugcaugaaaa

SEQ ID NO: 355223 - RNA, 19 nt, Homo sapiens
  misc_RNA (1)...(19): siRNA sense strand
aauuguagcccuauuauug

SEQ ID NO: 355224 - RNA, 19 nt, Homo sapiens
  misc_RNA (1)...(19): siRNA sense strand
ggacauggagugcuagaag

SEQ ID NO: 355225 - RNA, 19 nt, Homo sapiens
  misc_RNA (1)...(19): siRNA sense strand
gcagguugguguuuauuuu

SEQ ID NO: 355226 - RNA, 19 nt, Homo sapiens
  misc_RNA (1)...(19): siRNA sense strand
aggaagaggacaauucaua

SEQ ID NO: 355227 - RNA, 19 nt, Homo sapiens
  misc_RNA (1)...(19): siRNA sense strand
ggaggaguuuacaucuuug

SEQ ID NO: 355228 - RNA, 19 nt, Homo sapiens
  misc_RNA (1)...(19): siRNA sense strand
guauggauuaccucaaaua

SEQ ID NO: 355229 - RNA, 19 nt, Homo sapiens
  misc_RNA (1)...(19): siRNA sense strand
cauaccaacuucguagaaa

SEQ ID NO: 355230 - RNA, 19 nt, Homo sapiens
  misc_RNA (1)...(19): siRNA sense strand
ggagaaacugccagaugaa

SEQ ID NO: 355231 - RNA, 19 nt, Homo sapiens
  misc_RNA (1)...(19): siRNA sense strand
gcaaugcauuagcaggaau

SEQ ID NO: 355232 - RNA, 19 nt, Homo sapiens
  misc_RNA (1)...(19): siRNA sense strand
gauggacgaggccuuauug

SEQ ID NO: 355233 - RNA, 19 nt, Homo sapiens
  misc_RNA (1)...(19): siRNA sense strand
aaauagugacccaacaaua

SEQ ID NO: 355234 - RNA, 19 nt, Homo sapiens
  misc_RNA (1)...(19): siRNA sense strand
caaugcacaccacugcuua

SEQ ID NO: 355235 - RNA, 19 nt, Homo sapiens
  misc_RNA (1)...(19): siRNA sense strand
ugaauauacucgcccuaug

SEQ ID NO: 355236 - RNA, 19 nt, Homo sapiens
  misc_RNA (1)...(19): siRNA sense strand
gggacaaggaguaauagaa

SEQ ID NO: 355237 - RNA, 19 nt, Homo sapiens
  misc_RNA (1)...(19): siRNA sense strand
cuacagugguucgauguga

SEQ ID NO: 355238 - RNA, 19 nt, Homo sapiens
  misc_RNA (1)...(19): siRNA sense strand
uagcaggcuuugaaguaaa

SEQ ID NO: 355239 - RNA, 19 nt, Homo sapiens
  misc_RNA (1)...(19): siRNA sense strand
uaggauagcaggcuuugaa

SEQ ID NO: 355240 - RNA, 19 nt, Homo sapiens
  misc_RNA (1)...(19): siRNA sense strand
uagcugggauuuggguuaa

SEQ ID NO: 355241 - RNA, 19 nt, Homo sapiens
  misc_RNA (1)...(19): siRNA sense strand
uauaaaggugcacauguaa

SEQ ID NO: 355242 - RNA, 19 nt, Homo sapiens
  misc_RNA (1)...(19): siRNA sense strand
ggcauggguuacuuugaaa

SEQ ID NO: 355243 - RNA, 19 nt, Homo sapiens
  misc_RNA (1)...(19): siRNA sense strand
ggaaaguggcagacaaagu

SEQ ID NO: 355244 - RNA, 19 nt, Homo sapiens
  misc_RNA (1)...(19): siRNA sense strand
gaagaugcuuauguuggau

SEQ ID NO: 355245 - RNA, 19 nt, Homo sapiens
  misc_RNA (1)...(19): siRNA sense strand
cagcgugucccacaaagaa

SEQ ID NO: 355246 - RNA, 19 nt, Homo sapiens
  misc_RNA (1)...(19): siRNA sense strand
agaggacaauucauagaga

SEQ ID NO: 355247 - RNA, 19 nt, Homo sapiens
  misc_RNA (1)...(19): siRNA sense strand
gcagacuggaggaauauau

SEQ ID NO: 355248 - RNA, 19 nt, Homo sapiens
  misc_RNA (1)...(19): siRNA sense strand
ggauauaugacaauaaggu

SEQ ID NO: 355249 - RNA, 19 nt, Homo sapiens
  misc_RNA (1)...(19): siRNA sense strand
gcucugaagaugcuuaugu

SEQ ID NO: 355250 - RNA, 19 nt, Homo sapiens
  misc_RNA (1)...(19): siRNA sense strand
gcuagaagacaaugauauc

SEQ ID NO: 355251 - RNA, 19 nt, Homo sapiens
  misc_RNA (1)...(19): siRNA sense strand
ggugauggacgaggccuua

SEQ ID NO: 355252 - RNA, 19 nt, Homo sapiens
  misc_RNA (1)...(19): siRNA sense strand
caacuuugcagguguaugg

SEQ ID NO: 355253 - RNA, 19 nt, Homo sapiens
  misc_RNA (1)...(19): siRNA sense strand
cagggaauauaugaggaua

SEQ ID NO: 355254 - RNA, 19 nt, Homo sapiens
  misc_RNA (1)...(19): siRNA sense strand
uacaguugguucugcagua

SEQ ID NO: 355255 - RNA, 19 nt, Homo sapiens
  misc_RNA (1)...(19): siRNA sense strand
agaagaaaccggauacaca

SEQ ID NO: 355256 - RNA, 19 nt, Homo sapiens
  misc_RNA (1)...(19): siRNA sense strand
gaaaagggacaaggaguaa

SEQ ID NO: 355257 - RNA, 19 nt, Homo sapiens
  misc_RNA (1)...(19): siRNA sense strand
auagcaggcuuugaaguaa

SEQ ID NO: 355258 - RNA, 19 nt, Homo sapiens
  misc_RNA (1)...(19): siRNA sense strand
gcaauauacacagaaauag

SEQ ID NO: 355259 - RNA, 19 nt, Homo sapiens
  misc_RNA (1)...(19): siRNA sense strand
guugcaauauacacagaaa

SEQ ID NO: 355260 - RNA, 19 nt, Homo sapiens
  misc_RNA (1)...(19): siRNA sense strand
ggaauauauguccaugaaa

SEQ ID NO: 355261 - RNA, 19 nt, Homo sapiens
  misc_RNA (1)...(19): siRNA sense strand
gcauuagcaggaauucaaa

SEQ ID NO: 355262 - RNA, 19 nt, Homo sapiens
  misc_RNA (1)...(19): siRNA sense strand
aaaggaagaggacaauuca

SEQ ID NO: 355263 - RNA, 19 nt, Homo sapiens
  misc_RNA (1)...(19): siRNA sense strand
ggacuuaucuuuguucauu

SEQ ID NO: 355264 - RNA, 19 nt, Homo sapiens
  misc_RNA (1)...(19): siRNA sense strand
guauaaaggugcacaugua

SEQ ID NO: 355265 - RNA, 19 nt, Homo sapiens
  misc_RNA (1)...(19): siRNA sense strand
gcaagcagguugguguuua

SEQ ID NO: 355266 - RNA, 19 nt, Homo sapiens
  misc_RNA (1)...(19): siRNA sense strand
ucagugaacuugcuaauga

SEQ ID NO: 355267 - RNA, 19 nt, Homo sapiens
  misc_RNA (1)...(19): siRNA sense strand
gaaaguggcagacaaaguu

SEQ ID NO: 355268 - RNA, 19 nt, Homo sapiens
  misc_RNA (1)...(19): siRNA sense strand
cauggaaacccaauuauua

SEQ ID NO: 355269 - RNA, 19 nt, Homo sapiens
  misc_RNA (1)...(19): siRNA sense strand
gcacaccacugcuuagaga

SEQ ID NO: 355270 - RNA, 19 nt, Homo sapiens
  misc_RNA (1)...(19): siRNA sense strand
ccaaaucccuggaaagaga

SEQ ID NO: 355271 - RNA, 19 nt, Homo sapiens
  misc_RNA (1)...(19): siRNA sense strand
ggaaaauucuaccagauua

SEQ ID NO: 355272 - RNA, 19 nt, Homo sapiens
  misc_RNA (1)...(19): siRNA sense strand
gauagcaggcuuugaagua

SEQ ID NO: 355273 - RNA, 19 nt, Homo sapiens
  misc_RNA (1)...(19): siRNA sense strand
gaauauacucgcccuauga

SEQ ID NO: 355274 - RNA, 19 nt, Homo sapiens
  misc_RNA (1)...(19): siRNA sense strand
ggaacaggaucuuuguaga

SEQ ID NO: 355275 - RNA, 19 nt, Homo sapiens
  misc_RNA (1)...(19): siRNA sense strand
guaaauuguagcccuauua

SEQ ID NO: 355276 - RNA, 19 nt, Homo sapiens
  misc_RNA (1)...(19): siRNA sense strand
gcagacaaaguuauaauug

SEQ ID NO: 355277 - RNA, 19 nt, Homo sapiens
  misc_RNA (1)...(19): siRNA sense strand
uagagcagcuuguguaugu

SEQ ID NO: 355278 - RNA, 19 nt, Homo sapiens
  misc_RNA (1)...(19): siRNA sense strand
gaacagcgugucccacaaa

SEQ ID NO: 355279 - RNA, 19 nt, Homo sapiens
  misc_RNA (1)...(19): siRNA sense strand
caaauuaggacaaacaguu

SEQ ID NO: 355280 - RNA, 19 nt, Homo sapiens
  misc_RNA (1)...(19): siRNA sense strand
cagaugaagugguucuaaa

SEQ ID NO: 355281 - RNA, 19 nt, Homo sapiens
  misc_RNA (1)...(19): siRNA sense strand
gcugaacauuucuacagua

SEQ ID NO: 355282 - RNA, 19 nt, Homo sapiens
  misc_RNA (1)...(19): siRNA sense strand
gggaauauaugaggauaau

SEQ ID NO: 355283 - RNA, 19 nt, Homo sapiens
  misc_RNA (1)...(19): siRNA sense strand
aaacaacuuugcaggugua

SEQ ID NO: 355284 - RNA, 19 nt, Homo sapiens
  misc_RNA (1)...(19): siRNA sense strand
caauggacauggagugcua

SEQ ID NO: 355285 - RNA, 19 nt, Homo sapiens
  misc_RNA (1)...(19): siRNA sense strand
gaggacaauucauagagaa

SEQ ID NO: 355286 - RNA, 19 nt, Homo sapiens
  misc_RNA (1)...(19): siRNA sense strand
ggacgaggccuuauugaag

SEQ ID NO: 355287 - RNA, 19 nt, Homo sapiens
  misc_RNA (1)...(19): siRNA sense strand
gaagaggacaauucauaga

SEQ ID NO: 355288 - RNA, 19 nt, Homo sapiens
  misc_RNA (1)...(19): siRNA sense strand
uggauuaccucaaauagug

SEQ ID NO: 355289 - RNA, 19 nt, Homo sapiens
  misc_RNA (1)...(19): siRNA sense strand
acaguaacccugcaagaua

SEQ ID NO: 355290 - RNA, 19 nt, Homo sapiens
  misc_RNA (1)...(19): siRNA sense strand
ugacaaaucugcacaacac

SEQ ID NO: 355291 - RNA, 19 nt, Homo sapiens
  misc_RNA (1)...(19): siRNA sense strand
ugaagaugcuuauguugga

SEQ ID NO: 355292 - RNA, 19 nt, Homo sapiens
  misc_RNA (1)...(19): siRNA sense strand
gaacauuucuacaguaacc

SEQ ID NO: 355293 - RNA, 19 nt, Homo sapiens
  misc_RNA (1)...(19): siRNA sense strand
gacaaggaguaauagaaga

SEQ ID NO: 355294 - RNA, 19 nt, Homo sapiens
  misc_RNA (1)...(19): siRNA sense strand
guuuaacccugaugacaaa

SEQ ID NO: 355295 - RNA, 19 nt, Homo sapiens
  misc_RNA (1)...(19): siRNA sense strand
caccacugcuuagagauua

SEQ ID NO: 355296 - RNA, 19 nt, Homo sapiens
  misc_RNA (1)...(19): siRNA sense strand
aggagaaacugccagauga

SEQ ID NO: 355297 - RNA, 19 nt, Homo sapiens
  misc_RNA (1)...(19): siRNA sense strand
ggacaaggaguaauagaag

SEQ ID NO: 355298 - RNA, 19 nt, Homo sapiens
  misc_RNA (1)...(19): siRNA sense strand
aaagggacaaggaguaaua

SEQ ID NO: 355299 - RNA, 19 nt, Homo sapiens
  misc_RNA (1)...(19): siRNA sense strand
aggaggaguuuacaucuuu

SEQ ID NO: 355300 - RNA, 19 nt, Homo sapiens
  misc_RNA (1)...(19): siRNA sense strand
ggaaaucaaggaggaguuu

SEQ ID NO: 355301 - RNA, 19 nt, Homo sapiens
  misc_RNA (1)...(19): siRNA sense strand
aauagugacccaacaauaa

SEQ ID NO: 355302 - RNA, 19 nt, Homo sapiens
  misc_RNA (1)...(19): siRNA sense strand
guguauggauuaccucaaa

SEQ ID NO: 355303 - RNA, 19 nt, Homo sapiens
  misc_RNA (1)...(19): siRNA sense strand
uggaaacgauuauauaugg

SEQ ID NO: 355304 - RNA, 19 nt, Homo sapiens
  misc_RNA (1)...(19): siRNA sense strand
ggaaacgauuauauaugga

SEQ ID NO: 355305 - RNA, 19 nt, Homo sapiens
  misc_RNA (1)...(19): siRNA sense strand
ggaaggcucugaagaugcu

SEQ ID NO: 355306 - RNA, 19 nt, Homo sapiens
  misc_RNA (1)...(19): siRNA sense strand
caguaacccugcaagauau

SEQ ID NO: 355307 - RNA, 19 nt, Homo sapiens
  misc_RNA (1)...(19): siRNA sense strand
gaaacugccagaugaagug

SEQ ID NO: 355308 - RNA, 19 nt, Homo sapiens
  misc_RNA (1)...(19): siRNA sense strand
gacauggagugcuagaaga

SEQ ID NO: 355309 - RNA, 19 nt, Homo sapiens
  misc_RNA (1)...(19): siRNA sense strand
aggaauauauguccaugaa

SEQ ID NO: 355310 - RNA, 19 nt, Homo sapiens
  misc_RNA (1)...(19): siRNA sense strand
gaacaggaucuuuguagag

SEQ ID NO: 355311 - RNA, 19 nt, Homo sapiens
  misc_RNA (1)...(19): siRNA sense strand
gugcaagagugucuggaaa

SEQ ID NO: 355312 - RNA, 19 nt, Homo sapiens
  misc_RNA (1)...(19): siRNA sense strand
caagcagguugguguuuau

SEQ ID NO: 355313 - RNA, 19 nt, Homo sapiens
  misc_RNA (1)...(19): siRNA sense strand
gaaaucaaggaggaguuua

SEQ ID NO: 355314 - RNA, 19 nt, Homo sapiens
  misc_RNA (1)...(19): siRNA sense strand
ggaagaggacaauucauag

SEQ ID NO: 355315 - RNA, 19 nt, Homo sapiens
  misc_RNA (1)...(19): siRNA sense strand
uggcauggguuacuuugaa

SEQ ID NO: 355316 - RNA, 19 nt, Homo sapiens
  misc_RNA (1)...(19): siRNA sense strand
aaucauggaaacccaauua

SEQ ID NO: 355317 - RNA, 19 nt, Homo sapiens
  misc_RNA (1)...(19): siRNA sense strand
gagcaugucccaccaucaa

SEQ ID NO: 355318 - RNA, 19 nt, Homo sapiens
  misc_RNA (1)...(19): siRNA sense strand
aacaguaucuucaggagaa

SEQ ID NO: 355319 - RNA, 19 nt, Homo sapiens
  misc_RNA (1)...(19): siRNA sense strand
gagcagcuuguguauguaa

SEQ ID NO: 355320 - RNA, 19 nt, Homo sapiens
  misc_RNA (1)...(19): siRNA sense strand
gaaaguugcaauauacaca

SEQ ID NO: 355321 - RNA, 19 nt, Homo sapiens
  misc_RNA (1)...(19): siRNA sense strand
cugaacauuucuacaguaa

SEQ ID NO: 355322 - RNA, 19 nt, Homo sapiens
  misc_RNA (1)...(19): siRNA sense strand
ggauuuaugugcaugaaaa

SEQ ID NO: 355323 - RNA, 19 nt, Homo sapiens
  misc_RNA (1)...(19): siRNA sense strand
aauuguagcccuauuauug

SEQ ID NO: 355324 - RNA, 19 nt, Homo sapiens
  misc_RNA (1)...(19): siRNA sense strand
ggacauggagugcuagaag

SEQ ID NO: 355325 - RNA, 19 nt, Homo sapiens
  misc_RNA (1)...(19): siRNA sense strand
gcagguugguguuuauuuu

SEQ ID NO: 355326 - RNA, 19 nt, Homo sapiens
  misc_RNA (1)...(19): siRNA sense strand
aggaagaggacaauucaua

SEQ ID NO: 355327 - RNA, 19 nt, Homo sapiens
  misc_RNA (1)...(19): siRNA sense strand
ggaggaguuuacaucuuug

SEQ ID NO: 355328 - RNA, 19 nt, Homo sapiens
  misc_RNA (1)...(19): siRNA sense strand
guauggauuaccucaaaua

SEQ ID NO: 355329 - RNA, 19 nt, Homo sapiens
  misc_RNA (1)...(19): siRNA sense strand
cauaccaacuucguagaaa

SEQ ID NO: 355330 - RNA, 19 nt, Homo sapiens
  misc_RNA (1)...(19): siRNA sense strand
ggagaaacugccagaugaa

SEQ ID NO: 355331 - RNA, 19 nt, Homo sapiens
  misc_RNA (1)...(19): siRNA sense strand
gcaaugcauuagcaggaau

SEQ ID NO: 355332 - RNA, 19 nt, Homo sapiens
  misc_RNA (1)...(19): siRNA sense strand
gauggacgaggccuuauug

SEQ ID NO: 355333 - RNA, 19 nt, Homo sapiens
  misc_RNA (1)...(19): siRNA sense strand
aaauagugacccaacaaua

SEQ ID NO: 355334 - RNA, 19 nt, Homo sapiens
  misc_RNA (1)...(19): siRNA sense strand
caaugcacaccacugcuua

SEQ ID NO: 355335 - RNA, 19 nt, Homo sapiens
  misc_RNA (1)...(19): siRNA sense strand
ugaauauacucgcccuaug

SEQ ID NO: 355336 - RNA, 19 nt, Homo sapiens
  misc_RNA (1)...(19): siRNA sense strand
gggacaaggaguaauagaa

SEQ ID NO: 355337 - RNA, 19 nt, Homo sapiens
  misc_RNA (1)...(19): siRNA sense strand
cuacagugguucgauguga

SEQ ID NO: 355338 - RNA, 19 nt, Homo sapiens
  misc_RNA (1)...(19): siRNA sense strand
uagcaggcuuugaaguaaa

SEQ ID NO: 355339 - RNA, 19 nt, Homo sapiens
  misc_RNA (1)...(19): siRNA sense strand
uaggauagcaggcuuugaa

SEQ ID NO: 355340 - RNA, 19 nt, Homo sapiens
  misc_RNA (1)...(19): siRNA sense strand
uagcugggauuuggguuaa

SEQ ID NO: 355341 - RNA, 19 nt, Homo sapiens
  misc_RNA (1)...(19): siRNA sense strand
uauaaaggugcacauguaa

SEQ ID NO: 355342 - RNA, 19 nt, Homo sapiens
  misc_RNA (1)...(19): siRNA sense strand
ggcauggguuacuuugaaa

SEQ ID NO: 355343 - RNA, 19 nt, Homo sapiens
  misc_RNA (1)...(19): siRNA sense strand
ggaaaguggcagacaaagu

SEQ ID NO: 355344 - RNA, 19 nt, Homo sapiens
  misc_RNA (1)...(19): siRNA sense strand
gaagaugcuuauguuggau

SEQ ID NO: 355345 - RNA, 19 nt, Homo sapiens
  misc_RNA (1)...(19): siRNA sense strand
cagcgugucccacaaagaa

SEQ ID NO: 355346 - RNA, 19 nt, Homo sapiens
  misc_RNA (1)...(19): siRNA sense strand
agaggacaauucauagaga

SEQ ID NO: 355347 - RNA, 19 nt, Homo sapiens
  misc_RNA (1)...(19): siRNA sense strand
gcagacuggaggaauauau

SEQ ID NO: 355348 - RNA, 19 nt, Homo sapiens
  misc_RNA (1)...(19): siRNA sense strand
ggauauaugacaauaaggu

SEQ ID NO: 355349 - RNA, 19 nt, Homo sapiens
  misc_RNA (1)...(19): siRNA sense strand
gcucugaagaugcuuaugu

SEQ ID NO: 355350 - RNA, 19 nt, Homo sapiens
  misc_RNA (1)...(19): siRNA sense strand
gcuagaagacaaugauauc

SEQ ID NO: 355351 - RNA, 19 nt, Homo sapiens
  misc_RNA (1)...(19): siRNA sense strand
ggugauggacgaggccuua

SEQ ID NO: 355352 - RNA, 19 nt, Homo sapiens
  misc_RNA (1)...(19): siRNA sense strand
caacuuugcagguguaugg

SEQ ID NO: 355353 - RNA, 19 nt, Homo sapiens
  misc_RNA (1)...(19): siRNA sense strand
cagggaauauaugaggaua

SEQ ID NO: 355354 - RNA, 19 nt, Homo sapiens
  misc_RNA (1)...(19): siRNA sense strand
uacaguugguucugcagua

SEQ ID NO: 355355 - RNA, 19 nt, Homo sapiens
  misc_RNA (1)...(19): siRNA sense strand
agaagaaaccggauacaca

SEQ ID NO: 355356 - RNA, 19 nt, Homo sapiens
  misc_RNA (1)...(19): siRNA sense strand
gaaaagggacaaggaguaa

SEQ ID NO: 355357 - RNA, 19 nt, Homo sapiens
  misc_RNA (1)...(19): siRNA sense strand
auagcaggcuuugaaguaa

SEQ ID NO: 355358 - RNA, 19 nt, Homo sapiens
  misc_RNA (1)...(19): siRNA sense strand
gcaauauacacagaaauag

SEQ ID NO: 355359 - RNA, 19 nt, Homo sapiens
  misc_RNA (1)...(19): siRNA sense strand
guugcaauauacacagaaa

SEQ ID NO: 355360 - RNA, 19 nt, Homo sapiens
  misc_RNA (1)...(19): siRNA sense strand
ggaauauauguccaugaaa

SEQ ID NO: 355361 - RNA, 19 nt, Homo sapiens
  misc_RNA (1)...(19): siRNA sense strand
gcauuagcaggaauucaaa

SEQ ID NO: 355362 - RNA, 19 nt, Homo sapiens
  misc_RNA (1)...(19): siRNA sense strand
aaaggaagaggacaauuca

SEQ ID NO: 355363 - RNA, 19 nt, Homo sapiens
  misc_RNA (1)...(19): siRNA sense strand
ggacuuaucuuuguucauu

SEQ ID NO: 355364 - RNA, 19 nt, Homo sapiens
  misc_RNA (1)...(19): siRNA sense strand
guauaaaggugcacaugua

SEQ ID NO: 355365 - RNA, 19 nt, Homo sapiens
  misc_RNA (1)...(19): siRNA sense strand
gcaagcagguugguguuua

SEQ ID NO: 355366 - RNA, 19 nt, Homo sapiens
  misc_RNA (1)...(19): siRNA sense strand
ucagugaacuugcuaauga

SEQ ID NO: 355367 - RNA, 19 nt, Homo sapiens
  misc_RNA (1)...(19): siRNA sense strand
gaaaguggcagacaaaguu

SEQ ID NO: 355368 - RNA, 19 nt, Homo sapiens
  misc_RNA (1)...(19): siRNA sense strand
cauggaaacccaauuauua

SEQ ID NO: 355369 - RNA, 19 nt, Homo sapiens
  misc_RNA (1)...(19): siRNA sense strand
gcacaccacugcuuagaga

SEQ ID NO: 355370 - RNA, 19 nt, Homo sapiens
  misc_RNA (1)...(19): siRNA sense strand
ccaaaucccuggaaagaga

SEQ ID NO: 355371 - RNA, 19 nt, Homo sapiens
  misc_RNA (1)...(19): siRNA sense strand
ggaaaauucuaccagauua

SEQ ID NO: 355372 - RNA, 19 nt, Homo sapiens
  misc_RNA (1)...(19): siRNA sense strand
gauagcaggcuuugaagua

SEQ ID NO: 355373 - RNA, 19 nt, Homo sapiens
  misc_RNA (1)...(19): siRNA sense strand
gaauauacucgcccuauga

SEQ ID NO: 355374 - RNA, 19 nt, Homo sapiens
  misc_RNA (1)...(19): siRNA sense strand
ggaacaggaucuuuguaga

SEQ ID NO: 355375 - RNA, 19 nt, Homo sapiens
  misc_RNA (1)...(19): siRNA sense strand
guaaauuguagcccuauua

SEQ ID NO: 355376 - RNA, 19 nt, Homo sapiens
  misc_RNA (1)...(19): siRNA sense strand
gcagacaaaguuauaauug

SEQ ID NO: 355377 - RNA, 19 nt, Homo sapiens
  misc_RNA (1)...(19): siRNA sense strand
uagagcagcuuguguaugu

SEQ ID NO: 355378 - RNA, 19 nt, Homo sapiens
  misc_RNA (1)...(19): siRNA sense strand
gaacagcgugucccacaaa

SEQ ID NO: 355379 - RNA, 19 nt, Homo sapiens
  misc_RNA (1)...(19): siRNA sense strand
caaauuaggacaaacaguu

SEQ ID NO: 355380 - RNA, 19 nt, Homo sapiens
  misc_RNA (1)...(19): siRNA sense strand
cagaugaagugguucuaaa

SEQ ID NO: 355381 - RNA, 19 nt, Homo sapiens
  misc_RNA (1)...(19): siRNA sense strand
gcugaacauuucuacagua

SEQ ID NO: 355382 - RNA, 19 nt, Homo sapiens
  misc_RNA (1)...(19): siRNA sense strand
gggaauauaugaggauaau

SEQ ID NO: 355383 - RNA, 19 nt, Homo sapiens
  misc_RNA (1)...(19): siRNA sense strand
aaacaacuuugcaggugua

SEQ ID NO: 355384 - RNA, 19 nt, Homo sapiens
  misc_RNA (1)...(19): siRNA sense strand
caauggacauggagugcua

SEQ ID NO: 355385 - RNA, 19 nt, Homo sapiens
  misc_RNA (1)...(19): siRNA sense strand
gaggacaauucauagagaa

SEQ ID NO: 355386 - RNA, 19 nt, Homo sapiens
  misc_RNA (1)...(19): siRNA sense strand
ggacgaggccuuauugaag

SEQ ID NO: 355387 - RNA, 19 nt, Homo sapiens
  misc_RNA (1)...(19): siRNA sense strand
gaagaggacaauucauaga

SEQ ID NO: 355388 - RNA, 19 nt, Homo sapiens
  misc_RNA (1)...(19): siRNA sense strand
uggauuaccucaaauagug

SEQ ID NO: 355389 - RNA, 19 nt, Homo sapiens
  misc_RNA (1)...(19): siRNA sense strand
acaguaacccugcaagaua

SEQ ID NO: 355390 - RNA, 19 nt, Homo sapiens
  misc_RNA (1)...(19): siRNA sense strand
ugacaaaucugcacaacac

SEQ ID NO: 355391 - RNA, 19 nt, Homo sapiens
  misc_RNA (1)...(19): siRNA sense strand
ugaagaugcuuauguugga

SEQ ID NO: 355392 - RNA, 19 nt, Homo sapiens
  misc_RNA (1)...(19): siRNA sense strand
gaacauuucuacaguaacc

SEQ ID NO: 355393 - RNA, 19 nt, Homo sapiens
  misc_RNA (1)...(19): siRNA sense strand
gacaaggaguaauagaaga

SEQ ID NO: 355394 - RNA, 19 nt, Homo sapiens
  misc_RNA (1)...(19): siRNA sense strand
guuuaacccugaugacaaa

SEQ ID NO: 355395 - RNA, 19 nt, Homo sapiens
  misc_RNA (1)...(19): siRNA sense strand
caccacugcuuagagauua

SEQ ID NO: 355396 - RNA, 19 nt, Homo sapiens
  misc_RNA (1)...(19): siRNA sense strand
aggagaaacugccagauga

SEQ ID NO: 355397 - RNA, 19 nt, Homo sapiens
  misc_RNA (1)...(19): siRNA sense strand
ggacaaggaguaauagaag

SEQ ID NO: 355398 - RNA, 19 nt, Homo sapiens
  misc_RNA (1)...(19): siRNA sense strand
aaagggacaaggaguaaua

SEQ ID NO: 355399 - RNA, 19 nt, Homo sapiens
  misc_RNA (1)...(19): siRNA sense strand
aggaggaguuuacaucuuu

SEQ ID NO: 355400 - RNA, 19 nt, Homo sapiens
  misc_RNA (1)...(19): siRNA sense strand
ggaaaucaaggaggaguuu

SEQ ID NO: 355401 - RNA, 19 nt, Homo sapiens
  misc_RNA (1)...(19): siRNA sense strand
aauagugacccaacaauaa

SEQ ID NO: 355402 - RNA, 19 nt, Homo sapiens
  misc_RNA (1)...(19): siRNA sense strand
guguauggauuaccucaaa

SEQ ID NO: 355403 - RNA, 19 nt, Homo sapiens
  misc_RNA (1)...(19): siRNA sense strand
uggaaacgauuauauaugg

SEQ ID NO: 355404 - RNA, 19 nt, Homo sapiens
  misc_RNA (1)...(19): siRNA sense strand
ggaaacgauuauauaugga

SEQ ID NO: 355405 - RNA, 19 nt, Homo sapiens
  misc_RNA (1)...(19): siRNA sense strand
ggaaggcucugaagaugcu

SEQ ID NO: 355406 - RNA, 19 nt, Homo sapiens
  misc_RNA (1)...(19): siRNA sense strand
caguaacccugcaagauau

SEQ ID NO: 355407 - RNA, 19 nt, Homo sapiens
  misc_RNA (1)...(19): siRNA sense strand
gaaacugccagaugaagug

SEQ ID NO: 355408 - RNA, 19 nt, Homo sapiens
  misc_RNA (1)...(19): siRNA sense strand
gacauggagugcuagaaga

SEQ ID NO: 355409 - RNA, 19 nt, Homo sapiens
  misc_RNA (1)...(19): siRNA sense strand
aggaauauauguccaugaa

SEQ ID NO: 355410 - RNA, 19 nt, Homo sapiens
  misc_RNA (1)...(19): siRNA sense strand
gaacaggaucuuuguagag

SEQ ID NO: 355411 - RNA, 19 nt, Homo sapiens
  misc_RNA (1)...(19): siRNA sense strand
gugcaagagugucuggaaa

SEQ ID NO: 355412 - RNA, 19 nt, Homo sapiens
  misc_RNA (1)...(19): siRNA sense strand
caagcagguugguguuuau

SEQ ID NO: 355413 - RNA, 19 nt, Homo sapiens
  misc_RNA (1)...(19): siRNA sense strand
gaaaucaaggaggaguuua

SEQ ID NO: 355414 - RNA, 19 nt, Homo sapiens
  misc_RNA (1)...(19): siRNA sense strand
ggaagaggacaauucauag

SEQ ID NO: 355415 - RNA, 19 nt, Homo sapiens
  misc_RNA (1)...(19): siRNA sense strand
uggcauggguuacuuugaa

SEQ ID NO: 355416 - RNA, 19 nt, Homo sapiens
  misc_RNA (1)...(19): siRNA sense strand
aaucauggaaacccaauua

SEQ ID NO: 355417 - RNA, 19 nt, Homo sapiens
  misc_RNA (1)...(19): siRNA sense strand
gagcaugucccaccaucaa

SEQ ID NO: 355418 - RNA, 19 nt, Homo sapiens
  misc_RNA (1)...(19): siRNA sense strand
aacaguaucuucaggagaa

SEQ ID NO: 355419 - RNA, 19 nt, Homo sapiens
  misc_RNA (1)...(19): siRNA sense strand
gagcagcuuguguauguaa

SEQ ID NO: 355420 - RNA, 19 nt, Homo sapiens
  misc_RNA (1)...(19): siRNA sense strand
gaaaguugcaauauacaca

SEQ ID NO: 355421 - RNA, 19 nt, Homo sapiens
  misc_RNA (1)...(19): siRNA sense strand
cugaacauuucuacaguaa

SEQ ID NO: 355422 - RNA, 19 nt, Homo sapiens
  misc_RNA (1)...(19): siRNA sense strand
ggauuuaugugcaugaaaa

SEQ ID NO: 355423 - RNA, 19 nt, Homo sapiens
  misc_RNA (1)...(19): siRNA sense strand
aauuguagcccuauuauug

SEQ ID NO: 355424 - RNA, 19 nt, Homo sapiens
  misc_RNA (1)...(19): siRNA sense strand
ggacauggagugcuagaag

SEQ ID NO: 355425 - RNA, 19 nt, Homo sapiens
  misc_RNA (1)...(19): siRNA sense strand
gcagguugguguuuauuuu

SEQ ID NO: 355426 - RNA, 19 nt, Homo sapiens
  misc_RNA (1)...(19): siRNA sense strand
aggaagaggacaauucaua

SEQ ID NO: 355427 - RNA, 19 nt, Homo sapiens
  misc_RNA (1)...(19): siRNA sense strand
ggaggaguuuacaucuuug

SEQ ID NO: 355428 - RNA, 19 nt, Homo sapiens
  misc_RNA (1)...(19): siRNA sense strand
guauggauuaccucaaaua

SEQ ID NO: 355429 - RNA, 19 nt, Homo sapiens
  misc_RNA (1)...(19): siRNA sense strand
cauaccaacuucguagaaa

SEQ ID NO: 355430 - RNA, 19 nt, Homo sapiens
  misc_RNA (1)...(19): siRNA sense strand
ggagaaacugccagaugaa

SEQ ID NO: 355431 - RNA, 19 nt, Homo sapiens
  misc_RNA (1)...(19): siRNA sense strand
gcaaugcauuagcaggaau

SEQ ID NO: 355432 - RNA, 19 nt, Homo sapiens
  misc_RNA (1)...(19): siRNA sense strand
gauggacgaggccuuauug

SEQ ID NO: 355433 - RNA, 19 nt, Homo sapiens
  misc_RNA (1)...(19): siRNA sense strand
aaauagugacccaacaaua

SEQ ID NO: 355434 - RNA, 19 nt, Homo sapiens
  misc_RNA (1)...(19): siRNA sense strand
caaugcacaccacugcuua

SEQ ID NO: 355435 - RNA, 19 nt, Homo sapiens
  misc_RNA (1)...(19): siRNA sense strand
ugaauauacucgcccuaug

SEQ ID NO: 355436 - RNA, 19 nt, Homo sapiens
  misc_RNA (1)...(19): siRNA sense strand
gggacaaggaguaauagaa

SEQ ID NO: 355437 - RNA, 19 nt, Homo sapiens
  misc_RNA (1)...(19): siRNA sense strand
cuacagugguucgauguga

SEQ ID NO: 355438 - RNA, 19 nt, Homo sapiens
  misc_RNA (1)...(19): siRNA sense strand
uagcaggcuuugaaguaaa

SEQ ID NO: 355439 - RNA, 19 nt, Homo sapiens
  misc_RNA (1)...(19): siRNA sense strand
uaggauagcaggcuuugaa

SEQ ID NO: 355440 - RNA, 19 nt, Homo sapiens
  misc_RNA (1)...(19): siRNA sense strand
uagcugggauuuggguuaa

SEQ ID NO: 355441 - RNA, 19 nt, Homo sapiens
  misc_RNA (1)...(19): siRNA sense strand
uauaaaggugcacauguaa

SEQ ID NO: 355442 - RNA, 19 nt, Homo sapiens
  misc_RNA (1)...(19): siRNA sense strand
ggcauggguuacuuugaaa

SEQ ID NO: 355443 - RNA, 19 nt, Homo sapiens
  misc_RNA (1)...(19): siRNA sense strand
ggaaaguggcagacaaagu

SEQ ID NO: 355444 - RNA, 19 nt, Homo sapiens
  misc_RNA (1)...(19): siRNA sense strand
gaagaugcuuauguuggau

SEQ ID NO: 355445 - RNA, 19 nt, Homo sapiens
  misc_RNA (1)...(19): siRNA sense strand
cagcgugucccacaaagaa

SEQ ID NO: 355446 - RNA, 19 nt, Homo sapiens
  misc_RNA (1)...(19): siRNA sense strand
agaggacaauucauagaga

SEQ ID NO: 355447 - RNA, 19 nt, Homo sapiens
  misc_RNA (1)...(19): siRNA sense strand
gcagacuggaggaauauau

SEQ ID NO: 355448 - RNA, 19 nt, Homo sapiens
  misc_RNA (1)...(19): siRNA sense strand
ggauauaugacaauaaggu

SEQ ID NO: 355449 - RNA, 19 nt, Homo sapiens
  misc_RNA (1)...(19): siRNA sense strand
gcucugaagaugcuuaugu

SEQ ID NO: 355450 - RNA, 19 nt, Homo sapiens
  misc_RNA (1)...(19): siRNA sense strand
gcuagaagacaaugauauc

SEQ ID NO: 355451 - RNA, 19 nt, Homo sapiens
  misc_RNA (1)...(19): siRNA sense strand
ggugauggacgaggccuua

SEQ ID NO: 355452 - RNA, 19 nt, Homo sapiens
  misc_RNA (1)...(19): siRNA sense strand
caacuuugcagguguaugg

SEQ ID NO: 355453 - RNA, 19 nt, Homo sapiens
  misc_RNA (1)...(19): siRNA sense strand
cagggaauauaugaggaua

SEQ ID NO: 355454 - RNA, 19 nt, Homo sapiens
  misc_RNA (1)...(19): siRNA sense strand
uacaguugguucugcagua

SEQ ID NO: 355455 - RNA, 19 nt, Homo sapiens
  misc_RNA (1)...(19): siRNA sense strand
agaagaaaccggauacaca

SEQ ID NO: 355456 - RNA, 19 nt, Homo sapiens
  misc_RNA (1)...(19): siRNA sense strand
gaaaagggacaaggaguaa

SEQ ID NO: 355457 - RNA, 19 nt, Homo sapiens
  misc_RNA (1)...(19): siRNA sense strand
auagcaggcuuugaaguaa

SEQ ID NO: 355458 - RNA, 19 nt, Homo sapiens
  misc_RNA (1)...(19): siRNA sense strand
gcaauauacacagaaauag

SEQ ID NO: 355459 - RNA, 19 nt, Homo sapiens
  misc_RNA (1)...(19): siRNA sense strand
guugcaauauacacagaaa

SEQ ID NO: 355460 - RNA, 19 nt, Homo sapiens
  misc_RNA (1)...(19): siRNA sense strand
ggaauauauguccaugaaa

SEQ ID NO: 355461 - RNA, 19 nt, Homo sapiens
  misc_RNA (1)...(19): siRNA sense strand
gcauuagcaggaauucaaa

SEQ ID NO: 355462 - RNA, 19 nt, Homo sapiens
  misc_RNA (1)...(19): siRNA sense strand
aaaggaagaggacaauuca

SEQ ID NO: 355463 - RNA, 19 nt, Homo sapiens
  misc_RNA (1)...(19): siRNA sense strand
gcaaagcacaggucauuga

SEQ ID NO: 355464 - RNA, 19 nt, Homo sapiens
  misc_RNA (1)...(19): siRNA sense strand
guacuucgccuccuccuuu

SEQ ID NO: 355465 - RNA, 19 nt, Homo sapiens
  misc_RNA (1)...(19): siRNA sense strand
ucuacgagcucaccguuaa

SEQ ID NO: 355466 - RNA, 19 nt, Homo sapiens
  misc_RNA (1)...(19): siRNA sense strand
gaugagagcgucaagaagu

SEQ ID NO: 355467 - RNA, 19 nt, Homo sapiens
  misc_RNA (1)...(19): siRNA sense strand
ggagcugccuggagacagu

SEQ ID NO: 355468 - RNA, 19 nt, Homo sapiens
  misc_RNA (1)...(19): siRNA sense strand
agaacgugcuggcugaguu

SEQ ID NO: 355469 - RNA, 19 nt, Homo sapiens
  misc_RNA (1)...(19): siRNA sense strand
augagagcgucaagaagua

SEQ ID NO: 355470 - RNA, 19 nt, Homo sapiens
  misc_RNA (1)...(19): siRNA sense strand
ucgcaaagcacaggucauu

SEQ ID NO: 355471 - RNA, 19 nt, Homo sapiens
  misc_RNA (1)...(19): siRNA sense strand
ggaguucacccacgaugag

SEQ ID NO: 355472 - RNA, 19 nt, Homo sapiens
  misc_RNA (1)...(19): siRNA sense strand
ugaguggugucgcaaagca

SEQ ID NO: 355473 - RNA, 19 nt, Homo sapiens
  misc_RNA (1)...(19): siRNA sense strand
acgaugagagcgucaagaa

SEQ ID NO: 355474 - RNA, 19 nt, Homo sapiens
  misc_RNA (1)...(19): siRNA sense strand
cgacgcugguugccucuac

SEQ ID NO: 355475 - RNA, 19 nt, Homo sapiens
  misc_RNA (1)...(19): siRNA sense strand
gggcaggacuccgucuacu

SEQ ID NO: 355476 - RNA, 19 nt, Homo sapiens
  misc_RNA (1)...(19): siRNA sense strand
cgcuguggcugcucaagug

SEQ ID NO: 355477 - RNA, 19 nt, Homo sapiens
  misc_RNA (1)...(19): siRNA sense strand
cagaggagcuugagaaugu

SEQ ID NO: 355478 - RNA, 19 nt, Homo sapiens
  misc_RNA (1)...(19): siRNA sense strand
gaaaagaacuaguauggaa

SEQ ID NO: 355479 - RNA, 19 nt, Homo sapiens
  misc_RNA (1)...(19): siRNA sense strand
guaauuaucugcagcaagu

SEQ ID NO: 355480 - RNA, 19 nt, Homo sapiens
  misc_RNA (1)...(19): siRNA sense strand
guucgcaucuuaccacaua

SEQ ID NO: 355481 - RNA, 19 nt, Homo sapiens
  misc_RNA (1)...(19): siRNA sense strand
aaacagcacuugcccuuga

SEQ ID NO: 355482 - RNA, 19 nt, Homo sapiens
  misc_RNA (1)...(19): siRNA sense strand
ggaaauagaaauuggagaa

SEQ ID NO: 355483 - RNA, 19 nt, Homo sapiens
  misc_RNA (1)...(19): siRNA sense strand
caaucgaccucaggaaaua

SEQ ID NO: 355484 - RNA, 19 nt, Homo sapiens
  misc_RNA (1)...(19): siRNA sense strand
ugagaauguucgcaucuua

SEQ ID NO: 355485 - RNA, 19 nt, Homo sapiens
  misc_RNA (1)...(19): siRNA sense strand
gcaccuucguguugaguaa

SEQ ID NO: 355486 - RNA, 19 nt, Homo sapiens
  misc_RNA (1)...(19): siRNA sense strand
gaaauuggagaaucugguu

SEQ ID NO: 355487 - RNA, 19 nt, Homo sapiens
  misc_RNA (1)...(19): siRNA sense strand
gacaucaacucacugaagu

SEQ ID NO: 355488 - RNA, 19 nt, Homo sapiens
  misc_RNA (1)...(19): siRNA sense strand
guccuugucuuugguuaua

SEQ ID NO: 355489 - RNA, 19 nt, Homo sapiens
  misc_RNA (1)...(19): siRNA sense strand
gcaaucgaccucaggaaau

SEQ ID NO: 355490 - RNA, 19 nt, Homo sapiens
  misc_RNA (1)...(19): siRNA sense strand
agaaagacaucaacucacu

SEQ ID NO: 355491 - RNA, 19 nt, Homo sapiens
  misc_RNA (1)...(19): siRNA sense strand
ggugggagccaguaauuau

SEQ ID NO: 355492 - RNA, 19 nt, Homo sapiens
  misc_RNA (1)...(19): siRNA sense strand
gaaguaggucuuuuagaua

SEQ ID NO: 355493 - RNA, 19 nt, Homo sapiens
  misc_RNA (1)...(19): siRNA sense strand
gcaaggaaaagaacuagua

SEQ ID NO: 355494 - RNA, 19 nt, Homo sapiens
  misc_RNA (1)...(19): siRNA sense strand
caucuuaccacauacaguu

SEQ ID NO: 355495 - RNA, 19 nt, Homo sapiens
  misc_RNA (1)...(19): siRNA sense strand
ccacauacaguucuuuaca

SEQ ID NO: 355496 - RNA, 19 nt, Homo sapiens
  misc_RNA (1)...(19): siRNA sense strand
gcggagcaccuucguguug

SEQ ID NO: 355497 - RNA, 19 nt, Homo sapiens
  misc_RNA (1)...(19): siRNA sense strand
ugaaguaggucuuuuagau

SEQ ID NO: 355498 - RNA, 19 nt, Homo sapiens
  misc_RNA (1)...(19): siRNA sense strand
ucaacucacugaaguaggu

SEQ ID NO: 355499 - RNA, 19 nt, Homo sapiens
  misc_RNA (1)...(19): siRNA sense strand
acauacaguucuuuacaug

SEQ ID NO: 355500 - RNA, 19 nt, Homo sapiens
  misc_RNA (1)...(19): siRNA sense strand
gaagagugucguggccaua

SEQ ID NO: 355501 - RNA, 19 nt, Homo sapiens
  misc_RNA (1)...(19): siRNA sense strand
caaacaaugccaaguccuu

SEQ ID NO: 355502 - RNA, 19 nt, Homo sapiens
  misc_RNA (1)...(19): siRNA sense strand
ggaauuguagugacuccaa

SEQ ID NO: 355503 - RNA, 19 nt, Homo sapiens
  misc_RNA (1)...(19): siRNA sense strand
ccaaugggaucagguagca

SEQ ID NO: 355504 - RNA, 19 nt, Homo sapiens
  misc_RNA (1)...(19): siRNA sense strand
gguuauaauugcuguaagg

SEQ ID NO: 355505 - RNA, 19 nt, Homo sapiens
  misc_RNA (1)...(19): siRNA sense strand
uagcagaggagcuugagaa

SEQ ID NO: 355506 - RNA, 19 nt, Homo sapiens
  misc_RNA (1)...(19): siRNA sense strand
gcuuuauuauucccucaaa

SEQ ID NO: 355507 - RNA, 19 nt, Homo sapiens
  misc_RNA (1)...(19): siRNA sense strand
aaagacaucaacucacuga

SEQ ID NO: 355508 - RNA, 19 nt, Homo sapiens
  misc_RNA (1)...(19): siRNA sense strand
gggaucagguagcaaucga

SEQ ID NO: 355509 - RNA, 19 nt, Homo sapiens
  misc_RNA (1)...(19): siRNA sense strand
uuagaaagacaucaacuca

SEQ ID NO: 355510 - RNA, 19 nt, Homo sapiens
  misc_RNA (1)...(19): siRNA sense strand
gcagaggagcuugagaaug

SEQ ID NO: 355511 - RNA, 19 nt, Homo sapiens
  misc_RNA (1)...(19): siRNA sense strand
uaccacauacaguucuuua

SEQ ID NO: 355512 - RNA, 19 nt, Homo sapiens
  misc_RNA (1)...(19): siRNA sense strand
cacauacaguucuuuacau

SEQ ID NO: 355513 - RNA, 19 nt, Homo sapiens
  misc_RNA (1)...(19): siRNA sense strand
uuagauaacccugaacuuc

SEQ ID NO: 355514 - RNA, 19 nt, Homo sapiens
  misc_RNA (1)...(19): siRNA sense strand
guaaggugggagccaguaa

SEQ ID NO: 355515 - RNA, 19 nt, Homo sapiens
  misc_RNA (1)...(19): siRNA sense strand
cggagcaccuucguguuga

SEQ ID NO: 355516 - RNA, 19 nt, Homo sapiens
  misc_RNA (1)...(19): siRNA sense strand
ggagugugugcgcagagua

SEQ ID NO: 355517 - RNA, 19 nt, Homo sapiens
  misc_RNA (1)...(19): siRNA sense strand
cauaagagagcaaggaaaa

SEQ ID NO: 355518 - RNA, 19 nt, Homo sapiens
  misc_RNA (1)...(19): siRNA sense strand
uugcuugguucgcguggua

SEQ ID NO: 355519 - RNA, 19 nt, Homo sapiens
  misc_RNA (1)...(19): siRNA sense strand
ggaggggcauugcuugguu

SEQ ID NO: 355520 - RNA, 19 nt, Homo sapiens
  misc_RNA (1)...(19): siRNA sense strand
gagaauguucgcaucuuac

SEQ ID NO: 355521 - RNA, 19 nt, Homo sapiens
  misc_RNA (1)...(19): siRNA sense strand
gccauaagagagcaaggaa

SEQ ID NO: 355522 - RNA, 19 nt, Homo sapiens
  misc_RNA (1)...(19): siRNA sense strand
agaaucugguuuugcuuua

SEQ ID NO: 355523 - RNA, 19 nt, Homo sapiens
  misc_RNA (1)...(19): siRNA sense strand
gagaaucugguuuugcuuu

SEQ ID NO: 355524 - RNA, 19 nt, Homo sapiens
  misc_RNA (1)...(19): siRNA sense strand
agacaucaacucacugaag

SEQ ID NO: 355525 - RNA, 19 nt, Homo sapiens
  misc_RNA (1)...(19): siRNA sense strand
gaccucaggaaauagaaau

SEQ ID NO: 355526 - RNA, 19 nt, Homo sapiens
  misc_RNA (1)...(19): siRNA sense strand
gagugugugcgcagaguau

SEQ ID NO: 355527 - RNA, 19 nt, Homo sapiens
  misc_RNA (1)...(19): siRNA sense strand
ccucaggaaauagaaauug

SEQ ID NO: 355528 - RNA, 19 nt, Homo sapiens
  misc_RNA (1)...(19): siRNA sense strand
agauaacccugaacuucgu

SEQ ID NO: 355529 - RNA, 19 nt, Homo sapiens
  misc_RNA (1)...(19): siRNA sense strand
caucaacucacugaaguag

SEQ ID NO: 355530 - RNA, 19 nt, Homo sapiens
  misc_RNA (1)...(19): siRNA sense strand
ccauaagagagcaaggaaa

SEQ ID NO: 355531 - RNA, 19 nt, Homo sapiens
  misc_RNA (1)...(19): siRNA sense strand
gagaagcuauuccccaaac

SEQ ID NO: 355532 - RNA, 19 nt, Homo sapiens
  misc_RNA (1)...(19): siRNA sense strand
ggagcaccuucguguugag

SEQ ID NO: 355533 - RNA, 19 nt, Homo sapiens
  misc_RNA (1)...(19): siRNA sense strand
gggagugugugcgcagagu

SEQ ID NO: 355534 - RNA, 19 nt, Homo sapiens
  misc_RNA (1)...(19): siRNA sense strand
ugucuuugguuauaauugc

SEQ ID NO: 355535 - RNA, 19 nt, Homo sapiens
  misc_RNA (1)...(19): siRNA sense strand
gagugucguggccauaaga

SEQ ID NO: 355536 - RNA, 19 nt, Homo sapiens
  misc_RNA (1)...(19): siRNA sense strand
cagaggagcuugagaaugu

SEQ ID NO: 355537 - RNA, 19 nt, Homo sapiens
  misc_RNA (1)...(19): siRNA sense strand
gaaaagaacuaguauggaa

SEQ ID NO: 355538 - RNA, 19 nt, Homo sapiens
  misc_RNA (1)...(19): siRNA sense strand
guaauuaucugcagcaagu

SEQ ID NO: 355539 - RNA, 19 nt, Homo sapiens
  misc_RNA (1)...(19): siRNA sense strand
guucgcaucuuaccacaua

SEQ ID NO: 355540 - RNA, 19 nt, Homo sapiens
  misc_RNA (1)...(19): siRNA sense strand
aaacagcacuugcccuuga

SEQ ID NO: 355541 - RNA, 19 nt, Homo sapiens
  misc_RNA (1)...(19): siRNA sense strand
ggaaauagaaauuggagaa

SEQ ID NO: 355542 - RNA, 19 nt, Homo sapiens
  misc_RNA (1)...(19): siRNA sense strand
caaucgaccucaggaaaua

SEQ ID NO: 355543 - RNA, 19 nt, Homo sapiens
  misc_RNA (1)...(19): siRNA sense strand
ugagaauguucgcaucuua

SEQ ID NO: 355544 - RNA, 19 nt, Homo sapiens
  misc_RNA (1)...(19): siRNA sense strand
gcaccuucguguugaguaa

SEQ ID NO: 355545 - RNA, 19 nt, Homo sapiens
  misc_RNA (1)...(19): siRNA sense strand
gaaauuggagaaucugguu

SEQ ID NO: 355546 - RNA, 19 nt, Homo sapiens
  misc_RNA (1)...(19): siRNA sense strand
gacaucaacucacugaagu

SEQ ID NO: 355547 - RNA, 19 nt, Homo sapiens
  misc_RNA (1)...(19): siRNA sense strand
guccuugucuuugguuaua

SEQ ID NO: 355548 - RNA, 19 nt, Homo sapiens
  misc_RNA (1)...(19): siRNA sense strand
gcaaucgaccucaggaaau

SEQ ID NO: 355549 - RNA, 19 nt, Homo sapiens
  misc_RNA (1)...(19): siRNA sense strand
agaaagacaucaacucacu

SEQ ID NO: 355550 - RNA, 19 nt, Homo sapiens
  misc_RNA (1)...(19): siRNA sense strand
ggugggagccaguaauuau

SEQ ID NO: 355551 - RNA, 19 nt, Homo sapiens
  misc_RNA (1)...(19): siRNA sense strand
gaaguaggucuuuuagaua

SEQ ID NO: 355552 - RNA, 19 nt, Homo sapiens
  misc_RNA (1)...(19): siRNA sense strand
gcaaggaaaagaacuagua

SEQ ID NO: 355553 - RNA, 19 nt, Homo sapiens
  misc_RNA (1)...(19): siRNA sense strand
caucuuaccacauacaguu

SEQ ID NO: 355554 - RNA, 19 nt, Homo sapiens
  misc_RNA (1)...(19): siRNA sense strand
ccacauacaguucuuuaca

SEQ ID NO: 355555 - RNA, 19 nt, Homo sapiens
  misc_RNA (1)...(19): siRNA sense strand
gcggagcaccuucguguug

SEQ ID NO: 355556 - RNA, 19 nt, Homo sapiens
  misc_RNA (1)...(19): siRNA sense strand
ugaaguaggucuuuuagau

SEQ ID NO: 355557 - RNA, 19 nt, Homo sapiens
  misc_RNA (1)...(19): siRNA sense strand
ucaacucacugaaguaggu

SEQ ID NO: 355558 - RNA, 19 nt, Homo sapiens
  misc_RNA (1)...(19): siRNA sense strand
acauacaguucuuuacaug

SEQ ID NO: 355559 - RNA, 19 nt, Homo sapiens
  misc_RNA (1)...(19): siRNA sense strand
gaagagugucguggccaua

SEQ ID NO: 355560 - RNA, 19 nt, Homo sapiens
  misc_RNA (1)...(19): siRNA sense strand
caaacaaugccaaguccuu

SEQ ID NO: 355561 - RNA, 19 nt, Homo sapiens
  misc_RNA (1)...(19): siRNA sense strand
ggaauuguagugacuccaa

SEQ ID NO: 355562 - RNA, 19 nt, Homo sapiens
  misc_RNA (1)...(19): siRNA sense strand
ccaaugggaucagguagca

SEQ ID NO: 355563 - RNA, 19 nt, Homo sapiens
  misc_RNA (1)...(19): siRNA sense strand
gguuauaauugcuguaagg

SEQ ID NO: 355564 - RNA, 19 nt, Homo sapiens
  misc_RNA (1)...(19): siRNA sense strand
uagcagaggagcuugagaa

SEQ ID NO: 355565 - RNA, 19 nt, Homo sapiens
  misc_RNA (1)...(19): siRNA sense strand
gcuuuauuauucccucaaa

SEQ ID NO: 355566 - RNA, 19 nt, Homo sapiens
  misc_RNA (1)...(19): siRNA sense strand
aaagacaucaacucacuga

SEQ ID NO: 355567 - RNA, 19 nt, Homo sapiens
  misc_RNA (1)...(19): siRNA sense strand
gggaucagguagcaaucga

SEQ ID NO: 355568 - RNA, 19 nt, Homo sapiens
  misc_RNA (1)...(19): siRNA sense strand
uuagaaagacaucaacuca

SEQ ID NO: 355569 - RNA, 19 nt, Homo sapiens
  misc_RNA (1)...(19): siRNA sense strand
gcagaggagcuugagaaug

SEQ ID NO: 355570 - RNA, 19 nt, Homo sapiens
  misc_RNA (1)...(19): siRNA sense strand
uaccacauacaguucuuua

SEQ ID NO: 355571 - RNA, 19 nt, Homo sapiens
  misc_RNA (1)...(19): siRNA sense strand
cacauacaguucuuuacau

SEQ ID NO: 355572 - RNA, 19 nt, Homo sapiens
  misc_RNA (1)...(19): siRNA sense strand
uuagauaacccugaacuuc

SEQ ID NO: 355573 - RNA, 19 nt, Homo sapiens
  misc_RNA (1)...(19): siRNA sense strand
guaaggugggagccaguaa

SEQ ID NO: 355574 - RNA, 19 nt, Homo sapiens
  misc_RNA (1)...(19): siRNA sense strand
cggagcaccuucguguuga

SEQ ID NO: 355575 - RNA, 19 nt, Homo sapiens
  misc_RNA (1)...(19): siRNA sense strand
ggagugugugcgcagagua

SEQ ID NO: 355576 - RNA, 19 nt, Homo sapiens
  misc_RNA (1)...(19): siRNA sense strand
cauaagagagcaaggaaaa

SEQ ID NO: 355577 - RNA, 19 nt, Homo sapiens
  misc_RNA (1)...(19): siRNA sense strand
uugcuugguucgcguggua

SEQ ID NO: 355578 - RNA, 19 nt, Homo sapiens
  misc_RNA (1)...(19): siRNA sense strand
ggaggggcauugcuugguu

SEQ ID NO: 355579 - RNA, 19 nt, Homo sapiens
  misc_RNA (1)...(19): siRNA sense strand
gagaauguucgcaucuuac

SEQ ID NO: 355580 - RNA, 19 nt, Homo sapiens
  misc_RNA (1)...(19): siRNA sense strand
gccauaagagagcaaggaa

SEQ ID NO: 355581 - RNA, 19 nt, Homo sapiens
  misc_RNA (1)...(19): siRNA sense strand
agaaucugguuuugcuuua

SEQ ID NO: 355582 - RNA, 19 nt, Homo sapiens
  misc_RNA (1)...(19): siRNA sense strand
gagaaucugguuuugcuuu

SEQ ID NO: 355583 - RNA, 19 nt, Homo sapiens
  misc_RNA (1)...(19): siRNA sense strand
agacaucaacucacugaag

SEQ ID NO: 355584 - RNA, 19 nt, Homo sapiens
  misc_RNA (1)...(19): siRNA sense strand
gaccucaggaaauagaaau

SEQ ID NO: 355585 - RNA, 19 nt, Homo sapiens
  misc_RNA (1)...(19): siRNA sense strand
gagugugugcgcagaguau

SEQ ID NO: 355586 - RNA, 19 nt, Homo sapiens
  misc_RNA (1)...(19): siRNA sense strand
ccucaggaaauagaaauug

SEQ ID NO: 355587 - RNA, 19 nt, Homo sapiens
  misc_RNA (1)...(19): siRNA sense strand
agauaacccugaacuucgu

SEQ ID NO: 355588 - RNA, 19 nt, Homo sapiens
  misc_RNA (1)...(19): siRNA sense strand
caucaacucacugaaguag

SEQ ID NO: 355589 - RNA, 19 nt, Homo sapiens
  misc_RNA (1)...(19): siRNA sense strand
ccauaagagagcaaggaaa

SEQ ID NO: 355590 - RNA, 19 nt, Homo sapiens
  misc_RNA (1)...(19): siRNA sense strand
gagaagcuauuccccaaac

SEQ ID NO: 355591 - RNA, 19 nt, Homo sapiens
  misc_RNA (1)...(19): siRNA sense strand
ggagcaccuucguguugag

SEQ ID NO: 355592 - RNA, 19 nt, Homo sapiens
  misc_RNA (1)...(19): siRNA sense strand
gggagugugugcgcagagu

SEQ ID NO: 355593 - RNA, 19 nt, Homo sapiens
  misc_RNA (1)...(19): siRNA sense strand
ugucuuugguuauaauugc

SEQ ID NO: 355594 - RNA, 19 nt, Homo sapiens
  misc_RNA (1)...(19): siRNA sense strand
gagugucguggccauaaga

SEQ ID NO: 355595 - RNA, 19 nt, Homo sapiens
  misc_RNA (1)...(19): siRNA sense strand
guaaauaccucuacgucuu

SEQ ID NO: 355596 - RNA, 19 nt, Homo sapiens
  misc_RNA (1)...(19): siRNA sense strand
gaucacgucuucauucuug

SEQ ID NO: 355597 - RNA, 19 nt, Homo sapiens
  misc_RNA (1)...(19): siRNA sense strand
ugaggaaggugucccacua

SEQ ID NO: 355598 - RNA, 19 nt, Homo sapiens
  misc_RNA (1)...(19): siRNA sense strand
acacgaagggccuguauuu

SEQ ID NO: 355599 - RNA, 19 nt, Homo sapiens
  misc_RNA (1)...(19): siRNA sense strand
caccaaggaucacgucuuc

SEQ ID NO: 355600 - RNA, 19 nt, Homo sapiens
  misc_RNA (1)...(19): siRNA sense strand
ugaaugagacccagcuuga

SEQ ID NO: 355601 - RNA, 19 nt, Homo sapiens
  misc_RNA (1)...(19): siRNA sense strand
ggaggcgggugaagagaag

SEQ ID NO: 355602 - RNA, 19 nt, Homo sapiens
  misc_RNA (1)...(19): siRNA sense strand
uggagcauaucaucucauu

SEQ ID NO: 355603 - RNA, 19 nt, Homo sapiens
  misc_RNA (1)...(19): siRNA sense strand
cgaagggccuguauuucca

SEQ ID NO: 355604 - RNA, 19 nt, Homo sapiens
  misc_RNA (1)...(19): siRNA sense strand
uaaauaccucuacgucuug

SEQ ID NO: 355605 - RNA, 19 nt, Homo sapiens
  misc_RNA (1)...(19): siRNA sense strand
cgauuuccauccaguuguu

SEQ ID NO: 355606 - RNA, 19 nt, Homo sapiens
  misc_RNA (1)...(19): siRNA sense strand
gagcauaucaucucauucc

SEQ ID NO: 355607 - RNA, 19 nt, Homo sapiens
  misc_RNA (1)...(19): siRNA sense strand
ggaaggaaagaucuacucu

SEQ ID NO: 355608 - RNA, 19 nt, Homo sapiens
  misc_RNA (1)...(19): siRNA sense strand
gguggagcauaucaucuca

SEQ ID NO: 355609 - RNA, 19 nt, Homo sapiens
  misc_RNA (1)...(19): siRNA sense strand
caaggaucacgucuucauu

SEQ ID NO: 355610 - RNA, 19 nt, Homo sapiens
  misc_RNA (1)...(19): siRNA sense strand
cagagcugguggagcauau

SEQ ID NO: 355611 - RNA, 19 nt, Homo sapiens
  misc_RNA (1)...(19): siRNA sense strand
gaugacauuccaccacuca

SEQ ID NO: 355612 - RNA, 19 nt, Homo sapiens
  misc_RNA (1)...(19): siRNA sense strand
acucuuugguagugaauga

SEQ ID NO: 355613 - RNA, 19 nt, Homo sapiens
  misc_RNA (1)...(19): siRNA sense strand
ccaaggaucacgucuucau

SEQ ID NO: 355614 - RNA, 19 nt, Homo sapiens
  misc_RNA (1)...(19): siRNA sense strand
caaugaccuucaagcagau

SEQ ID NO: 355615 - RNA, 19 nt, Homo sapiens
  misc_RNA (1)...(19): siRNA sense strand
gugacuguguugaggucua

SEQ ID NO: 355616 - RNA, 19 nt, Homo sapiens
  misc_RNA (1)...(19): siRNA sense strand
ugacuguguugaggucuau

SEQ ID NO: 355617 - RNA, 19 nt, Homo sapiens
  misc_RNA (1)...(19): siRNA sense strand
ugacauuccaccacucaau

SEQ ID NO: 355618 - RNA, 19 nt, Homo sapiens
  misc_RNA (1)...(19): siRNA sense strand
gagcugguggagcauauca

SEQ ID NO: 355619 - RNA, 19 nt, Homo sapiens
  misc_RNA (1)...(19): siRNA sense strand
cagaggaaggaaagaucua

SEQ ID NO: 355620 - RNA, 19 nt, Homo sapiens
  misc_RNA (1)...(19): siRNA sense strand
ccagucagagaccuuguug

SEQ ID NO: 355621 - RNA, 19 nt, Homo sapiens
  misc_RNA (1)...(19): siRNA sense strand
gccgaugucucagcaagag

SEQ ID NO: 355622 - RNA, 19 nt, Homo sapiens
  misc_RNA (1)...(19): siRNA sense strand
ucacagaggaaggaaagau

SEQ ID NO: 355623 - RNA, 19 nt, Homo sapiens
  misc_RNA (1)...(19): siRNA sense strand
cgucuucauucuugacuac

SEQ ID NO: 355624 - RNA, 19 nt, Homo sapiens
  misc_RNA (1)...(19): siRNA sense strand
gauccuauucugugcucuu

SEQ ID NO: 355625 - RNA, 19 nt, Homo sapiens
  misc_RNA (1)...(19): siRNA sense strand
ccaccaaggaucacgucuu

SEQ ID NO: 355626 - RNA, 19 nt, Homo sapiens
  misc_RNA (1)...(19): siRNA sense strand
ucugugcucuuggcuacaa

SEQ ID NO: 355627 - RNA, 19 nt, Homo sapiens
  misc_RNA (1)...(19): siRNA sense strand
gacccucuucuuccucaaa

SEQ ID NO: 355628 - RNA, 19 nt, Homo sapiens
  misc_RNA (1)...(19): siRNA sense strand
aaggaucacgucuucauuc

SEQ ID NO: 355629 - RNA, 19 nt, Homo sapiens
  misc_RNA (1)...(19): siRNA sense strand
guaaauaccucuacgucuu

SEQ ID NO: 355630 - RNA, 19 nt, Homo sapiens
  misc_RNA (1)...(19): siRNA sense strand
gaucacgucuucauucuug

SEQ ID NO: 355631 - RNA, 19 nt, Homo sapiens
  misc_RNA (1)...(19): siRNA sense strand
gcaaggaaauaacagauac

SEQ ID NO: 355632 - RNA, 19 nt, Homo sapiens
  misc_RNA (1)...(19): siRNA sense strand
ugaggaaggugucccacua

SEQ ID NO: 355633 - RNA, 19 nt, Homo sapiens
  misc_RNA (1)...(19): siRNA sense strand
gcacggagaagaugaagga

SEQ ID NO: 355634 - RNA, 19 nt, Homo sapiens
  misc_RNA (1)...(19): siRNA sense strand
gaauuuggccgaaucuuca

SEQ ID NO: 355635 - RNA, 19 nt, Homo sapiens
  misc_RNA (1)...(19): siRNA sense strand
gcucagaguucagcaagga

SEQ ID NO: 355636 - RNA, 19 nt, Homo sapiens
  misc_RNA (1)...(19): siRNA sense strand
acacgaagggccuguauuu

SEQ ID NO: 355637 - RNA, 19 nt, Homo sapiens
  misc_RNA (1)...(19): siRNA sense strand
gaagaugaaggagaucgua

SEQ ID NO: 355638 - RNA, 19 nt, Homo sapiens
  misc_RNA (1)...(19): siRNA sense strand
caccaaggaucacgucuuc

SEQ ID NO: 355639 - RNA, 19 nt, Homo sapiens
  misc_RNA (1)...(19): siRNA sense strand
ugaaugagacccagcuuga

SEQ ID NO: 355640 - RNA, 19 nt, Homo sapiens
  misc_RNA (1)...(19): siRNA sense strand
ggaugaauuuggccgaauc

SEQ ID NO: 355641 - RNA, 19 nt, Homo sapiens
  misc_RNA (1)...(19): siRNA sense strand
cggagaagaugaaggagau

SEQ ID NO: 355642 - RNA, 19 nt, Homo sapiens
  misc_RNA (1)...(19): siRNA sense strand
gaaucuucaugcaaggaaa

SEQ ID NO: 355643 - RNA, 19 nt, Homo sapiens
  misc_RNA (1)...(19): siRNA sense strand
uaacagauacgggcagcua

SEQ ID NO: 355644 - RNA, 19 nt, Homo sapiens
  misc_RNA (1)...(19): siRNA sense strand
ucagccagauccacaguug

SEQ ID NO: 355645 - RNA, 19 nt, Homo sapiens
  misc_RNA (1)...(19): siRNA sense strand
uggagcauaucaucucauu

SEQ ID NO: 355646 - RNA, 19 nt, Homo sapiens
  misc_RNA (1)...(19): siRNA sense strand
ggaggcgggugaagagaag

SEQ ID NO: 355647 - RNA, 19 nt, Homo sapiens
  misc_RNA (1)...(19): siRNA sense strand
cgaagggccuguauuucca

SEQ ID NO: 355648 - RNA, 19 nt, Homo sapiens
  misc_RNA (1)...(19): siRNA sense strand
uaaauaccucuacgucuug

SEQ ID NO: 355649 - RNA, 19 nt, Homo sapiens
  misc_RNA (1)...(19): siRNA sense strand
cgauuuccauccaguuguu

SEQ ID NO: 355650 - RNA, 19 nt, Homo sapiens
  misc_RNA (1)...(19): siRNA sense strand
gagcauaucaucucauucc

SEQ ID NO: 355651 - RNA, 19 nt, Homo sapiens
  misc_RNA (1)...(19): siRNA sense strand
ggaaggaaagaucuacucu

SEQ ID NO: 355652 - RNA, 19 nt, Homo sapiens
  misc_RNA (1)...(19): siRNA sense strand
gguggagcauaucaucuca

SEQ ID NO: 355653 - RNA, 19 nt, Homo sapiens
  misc_RNA (1)...(19): siRNA sense strand
caaggaucacgucuucauu

SEQ ID NO: 355654 - RNA, 19 nt, Homo sapiens
  misc_RNA (1)...(19): siRNA sense strand
cagagcugguggagcauau

SEQ ID NO: 355655 - RNA, 19 nt, Homo sapiens
  misc_RNA (1)...(19): siRNA sense strand
gaugacauuccaccacuca

SEQ ID NO: 355656 - RNA, 19 nt, Homo sapiens
  misc_RNA (1)...(19): siRNA sense strand
gaacaggggacaaaaugga

SEQ ID NO: 355657 - RNA, 19 nt, Homo sapiens
  misc_RNA (1)...(19): siRNA sense strand
acucuuugguagugaauga

SEQ ID NO: 355658 - RNA, 19 nt, Homo sapiens
  misc_RNA (1)...(19): siRNA sense strand
ccaaggaucacgucuucau

SEQ ID NO: 355659 - RNA, 19 nt, Homo sapiens
  misc_RNA (1)...(19): siRNA sense strand
caaugaccuucaagcagau

SEQ ID NO: 355660 - RNA, 19 nt, Homo sapiens
  misc_RNA (1)...(19): siRNA sense strand
ugaauuuggccgaaucuuc

SEQ ID NO: 355661 - RNA, 19 nt, Homo sapiens
  misc_RNA (1)...(19): siRNA sense strand
gugacuguguugaggucua

SEQ ID NO: 355662 - RNA, 19 nt, Homo sapiens
  misc_RNA (1)...(19): siRNA sense strand
gauccacaguugccaaacg

SEQ ID NO: 355663 - RNA, 19 nt, Homo sapiens
  misc_RNA (1)...(19): siRNA sense strand
ugacuguguugaggucuau

SEQ ID NO: 355664 - RNA, 19 nt, Homo sapiens
  misc_RNA (1)...(19): siRNA sense strand
agccagagcucagaguuca

SEQ ID NO: 355665 - RNA, 19 nt, Homo sapiens
  misc_RNA (1)...(19): siRNA sense strand
ugacauuccaccacucaau

SEQ ID NO: 355666 - RNA, 19 nt, Homo sapiens
  misc_RNA (1)...(19): siRNA sense strand
ugcaaggaaauaacagaua

SEQ ID NO: 355667 - RNA, 19 nt, Homo sapiens
  misc_RNA (1)...(19): siRNA sense strand
gagcugguggagcauauca

SEQ ID NO: 355668 - RNA, 19 nt, Homo sapiens
  misc_RNA (1)...(19): siRNA sense strand
cagaggaaggaaagaucua

SEQ ID NO: 355669 - RNA, 19 nt, Homo sapiens
  misc_RNA (1)...(19): siRNA sense strand
ccagucagagaccuuguug

SEQ ID NO: 355670 - RNA, 19 nt, Homo sapiens
  misc_RNA (1)...(19): siRNA sense strand
gccgaugucucagcaagag

SEQ ID NO: 355671 - RNA, 19 nt, Homo sapiens
  misc_RNA (1)...(19): siRNA sense strand
ucacagaggaaggaaagau

SEQ ID NO: 355672 - RNA, 19 nt, Homo sapiens
  misc_RNA (1)...(19): siRNA sense strand
caagucaaggucccucugu

SEQ ID NO: 355673 - RNA, 19 nt, Homo sapiens
  misc_RNA (1)...(19): siRNA sense strand
cgucuucauucuugacuac

SEQ ID NO: 355674 - RNA, 19 nt, Homo sapiens
  misc_RNA (1)...(19): siRNA sense strand
ggaccgcacggagaagaug

SEQ ID NO: 355675 - RNA, 19 nt, Homo sapiens
  misc_RNA (1)...(19): siRNA sense strand
gauccuauucugugcucuu

SEQ ID NO: 355676 - RNA, 19 nt, Homo sapiens
  misc_RNA (1)...(19): siRNA sense strand
cgaaucuucaugcaaggaa

SEQ ID NO: 355677 - RNA, 19 nt, Homo sapiens
  misc_RNA (1)...(19): siRNA sense strand
ccaccaaggaucacgucuu

SEQ ID NO: 355678 - RNA, 19 nt, Homo sapiens
  misc_RNA (1)...(19): siRNA sense strand
ccugauggccgcacagaag

SEQ ID NO: 355679 - RNA, 19 nt, Homo sapiens
  misc_RNA (1)...(19): siRNA sense strand
cagauccacaguugccaaa

SEQ ID NO: 355680 - RNA, 19 nt, Homo sapiens
  misc_RNA (1)...(19): siRNA sense strand
ucgucaagcuccaagucaa

SEQ ID NO: 355681 - RNA, 19 nt, Homo sapiens
  misc_RNA (1)...(19): siRNA sense strand
ucugugcucuuggcuacaa

SEQ ID NO: 355682 - RNA, 19 nt, Homo sapiens
  misc_RNA (1)...(19): siRNA sense strand
gacccucuucuuccucaaa

SEQ ID NO: 355683 - RNA, 19 nt, Homo sapiens
  misc_RNA (1)...(19): siRNA sense strand
aaggaucacgucuucauuc

SEQ ID NO: 355684 - RNA, 19 nt, Homo sapiens
  misc_RNA (1)...(19): siRNA sense strand
gaggauggguuucuuaaua

SEQ ID NO: 355685 - RNA, 19 nt, Homo sapiens
  misc_RNA (1)...(19): siRNA sense strand
gcacuggccuuucccuaua

SEQ ID NO: 355686 - RNA, 19 nt, Homo sapiens
  misc_RNA (1)...(19): siRNA sense strand
gaagcaagauccuggugua

SEQ ID NO: 355687 - RNA, 19 nt, Homo sapiens
  misc_RNA (1)...(19): siRNA sense strand
ggaaagaacuaggaagaug

SEQ ID NO: 355688 - RNA, 19 nt, Homo sapiens
  misc_RNA (1)...(19): siRNA sense strand
gcaagauccugguguauag

SEQ ID NO: 355689 - RNA, 19 nt, Homo sapiens
  misc_RNA (1)...(19): siRNA sense strand
ccaacugccuuacgaauug

SEQ ID NO: 355690 - RNA, 19 nt, Homo sapiens
  misc_RNA (1)...(19): siRNA sense strand
gaugugccuuucuuugaua

SEQ ID NO: 355691 - RNA, 19 nt, Homo sapiens
  misc_RNA (1)...(19): siRNA sense strand
gcagccaaaugucuccuuu

SEQ ID NO: 355692 - RNA, 19 nt, Homo sapiens
  misc_RNA (1)...(19): siRNA sense strand
ugagcacgaugcaagaaua

SEQ ID NO: 355693 - RNA, 19 nt, Homo sapiens
  misc_RNA (1)...(19): siRNA sense strand
ggauggguuucuuaauauu

SEQ ID NO: 355694 - RNA, 19 nt, Homo sapiens
  misc_RNA (1)...(19): siRNA sense strand
ugaaugaugugccuuucuu

SEQ ID NO: 355695 - RNA, 19 nt, Homo sapiens
  misc_RNA (1)...(19): siRNA sense strand
gaaagaacuaggaagaugu

SEQ ID NO: 355696 - RNA, 19 nt, Homo sapiens
  misc_RNA (1)...(19): siRNA sense strand
cagcaucucugacuauucu

SEQ ID NO: 355697 - RNA, 19 nt, Homo sapiens
  misc_RNA (1)...(19): siRNA sense strand
ggacaggaaagaacuagga

SEQ ID NO: 355698 - RNA, 19 nt, Homo sapiens
  misc_RNA (1)...(19): siRNA sense strand
gcauguuccugacacaguu

SEQ ID NO: 355699 - RNA, 19 nt, Homo sapiens
  misc_RNA (1)...(19): siRNA sense strand
ugagcgagcuggagcaugu

SEQ ID NO: 355700 - RNA, 19 nt, Homo sapiens
  misc_RNA (1)...(19): siRNA sense strand
aggaugaggugcuguggua

SEQ ID NO: 355701 - RNA, 19 nt, Homo sapiens
  misc_RNA (1)...(19): siRNA sense strand
gaaggugauugcagaggau

SEQ ID NO: 355702 - RNA, 19 nt, Homo sapiens
  misc_RNA (1)...(19): siRNA sense strand
cgaaccaacuggaagaauc

SEQ ID NO: 355703 - RNA, 19 nt, Homo sapiens
  misc_RNA (1)...(19): siRNA sense strand
ucaguaccuugaaauaguu

SEQ ID NO: 355704 - RNA, 19 nt, Homo sapiens
  misc_RNA (1)...(19): siRNA sense strand
ugaaauaguuccagaaacc

SEQ ID NO: 355705 - RNA, 19 nt, Homo sapiens
  misc_RNA (1)...(19): siRNA sense strand
ggccacagcuucugcuuuu

SEQ ID NO: 355706 - RNA, 19 nt, Homo sapiens
  misc_RNA (1)...(19): siRNA sense strand
aggauggguuucuuaauau

SEQ ID NO: 355707 - RNA, 19 nt, Homo sapiens
  misc_RNA (1)...(19): siRNA sense strand
caggaaagaacuaggaaga

SEQ ID NO: 355708 - RNA, 19 nt, Homo sapiens
  misc_RNA (1)...(19): siRNA sense strand
gaaugaugugccuuucuuu

SEQ ID NO: 355709 - RNA, 19 nt, Homo sapiens
  misc_RNA (1)...(19): siRNA sense strand
ggaaugcagccaaaugucu

SEQ ID NO: 355710 - RNA, 19 nt, Homo sapiens
  misc_RNA (1)...(19): siRNA sense strand
aaacagcucguuggcagua

SEQ ID NO: 355711 - RNA, 19 nt, Homo sapiens
  misc_RNA (1)...(19): siRNA sense strand
ucacgaugguguggucauu

SEQ ID NO: 355712 - RNA, 19 nt, Homo sapiens
  misc_RNA (1)...(19): siRNA sense strand
ggaaaguacccuguucauc

SEQ ID NO: 355713 - RNA, 19 nt, Homo sapiens
  misc_RNA (1)...(19): siRNA sense strand
aguagcagcuuaugaggau

SEQ ID NO: 355714 - RNA, 19 nt, Homo sapiens
  misc_RNA (1)...(19): siRNA sense strand
ugaugugccuuucuuugau

SEQ ID NO: 355715 - RNA, 19 nt, Homo sapiens
  misc_RNA (1)...(19): siRNA sense strand
gaagcuggguaacguucuc

SEQ ID NO: 355716 - RNA, 19 nt, Homo sapiens
  misc_RNA (1)...(19): siRNA sense strand
ugugugaugugcauucuca

SEQ ID NO: 355717 - RNA, 19 nt, Homo sapiens
  misc_RNA (1)...(19): siRNA sense strand
gaccuggacagcuucacua

SEQ ID NO: 355718 - RNA, 19 nt, Homo sapiens
  misc_RNA (1)...(19): siRNA sense strand
ugauguaccugcucaaagc

SEQ ID NO: 355719 - RNA, 19 nt, Homo sapiens
  misc_RNA (1)...(19): siRNA sense strand
uucaguaucuggacaggaa

SEQ ID NO: 355720 - RNA, 19 nt, Homo sapiens
  misc_RNA (1)...(19): siRNA sense strand
gauagcugcggaauuugaa

SEQ ID NO: 355721 - RNA, 19 nt, Homo sapiens
  misc_RNA (1)...(19): siRNA sense strand
gcaagaauacaggcacuag

SEQ ID NO: 355722 - RNA, 19 nt, Homo sapiens
  misc_RNA (1)...(19): siRNA sense strand
gauagcagcaucucugacu

SEQ ID NO: 355723 - RNA, 19 nt, Homo sapiens
  misc_RNA (1)...(19): siRNA sense strand
guacgaaggaagcaagauc

SEQ ID NO: 355724 - RNA, 19 nt, Homo sapiens
  misc_RNA (1)...(19): siRNA sense strand
ggucauugcgggauauaca

SEQ ID NO: 355725 - RNA, 19 nt, Homo sapiens
  misc_RNA (1)...(19): siRNA sense strand
aaaguacccuguucaucgu

SEQ ID NO: 355726 - RNA, 19 nt, Homo sapiens
  misc_RNA (1)...(19): siRNA sense strand
uaugaggauggguuucuua

SEQ ID NO: 355727 - RNA, 19 nt, Homo sapiens
  misc_RNA (1)...(19): siRNA sense strand
gccgaagacuccgccagaa

SEQ ID NO: 355728 - RNA, 19 nt, Homo sapiens
  misc_RNA (1)...(19): siRNA sense strand
gggauuaucggaugaacca

SEQ ID NO: 355729 - RNA, 19 nt, Homo sapiens
  misc_RNA (1)...(19): siRNA sense strand
gaaccaacuggaagaaucg

SEQ ID NO: 355730 - RNA, 19 nt, Homo sapiens
  misc_RNA (1)...(19): siRNA sense strand
aaaugaaugaugugccuuu

SEQ ID NO: 355731 - RNA, 19 nt, Homo sapiens
  misc_RNA (1)...(19): siRNA sense strand
caacuggaagaaucgcaaa

SEQ ID NO: 355732 - RNA, 19 nt, Homo sapiens
  misc_RNA (1)...(19): siRNA sense strand
ggagcauguuccugacaca

SEQ ID NO: 355733 - RNA, 19 nt, Homo sapiens
  misc_RNA (1)...(19): siRNA sense strand
cuggacagcuucacuacuc

SEQ ID NO: 355734 - RNA, 19 nt, Homo sapiens
  misc_RNA (1)...(19): siRNA sense strand
aagguacccuguggcagua

SEQ ID NO: 355735 - RNA, 19 nt, Homo sapiens
  misc_RNA (1)...(19): siRNA sense strand
cagaggacgaggaggauga

SEQ ID NO: 355736 - RNA, 19 nt, Homo sapiens
  misc_RNA (1)...(19): siRNA sense strand
cacuggccuuucccuauaa

SEQ ID NO: 355737 - RNA, 19 nt, Homo sapiens
  misc_RNA (1)...(19): siRNA sense strand
gaaauaguuccagaaacca

SEQ ID NO: 355738 - RNA, 19 nt, Homo sapiens
  misc_RNA (1)...(19): siRNA sense strand
gacaggaaagaacuaggaa

SEQ ID NO: 355739 - RNA, 19 nt, Homo sapiens
  misc_RNA (1)...(19): siRNA sense strand
guaacguucuccgugacuu

SEQ ID NO: 355740 - RNA, 19 nt, Homo sapiens
  misc_RNA (1)...(19): siRNA sense strand
gaaugaaaugaaugaugug

SEQ ID NO: 355741 - RNA, 19 nt, Homo sapiens
  misc_RNA (1)...(19): siRNA sense strand
ggauggguguacgaaggaa

SEQ ID NO: 355742 - RNA, 19 nt, Homo sapiens
  misc_RNA (1)...(19): siRNA sense strand
gaugugcacaggugagcaa

SEQ ID NO: 355743 - RNA, 19 nt, Homo sapiens
  misc_RNA (1)...(19): siRNA sense strand
ggaggaugagccuggaaug

SEQ ID NO: 355744 - RNA, 19 nt, Homo sapiens
  misc_RNA (1)...(19): siRNA sense strand
ggacgacuacagccuggau

SEQ ID NO: 355745 - RNA, 19 nt, Homo sapiens
  misc_RNA (1)...(19): siRNA sense strand
cauggccacucacuacuac

SEQ ID NO: 355746 - RNA, 19 nt, Homo sapiens
  misc_RNA (1)...(19): siRNA sense strand
ccauggccacucacuacua

SEQ ID NO: 355747 - RNA, 19 nt, Homo sapiens
  misc_RNA (1)...(19): siRNA sense strand
ggcaaucaauauauuucag

SEQ ID NO: 355748 - RNA, 19 nt, Homo sapiens
  misc_RNA (1)...(19): siRNA sense strand
acuacagccuggaugaguu

SEQ ID NO: 355749 - RNA, 19 nt, Homo sapiens
  misc_RNA (1)...(19): siRNA sense strand
cuugaaauaguuccagaaa

SEQ ID NO: 355750 - RNA, 19 nt, Homo sapiens
  misc_RNA (1)...(19): siRNA sense strand
uagcagcaucucugacuau

SEQ ID NO: 355751 - RNA, 19 nt, Homo sapiens
  misc_RNA (1)...(19): siRNA sense strand
ggcaguagcagcuuaugag

SEQ ID NO: 355752 - RNA, 19 nt, Homo sapiens
  misc_RNA (1)...(19): siRNA sense strand
cguuggcaguagcagcuua

SEQ ID NO: 355753 - RNA, 19 nt, Homo sapiens
  misc_RNA (1)...(19): siRNA sense strand
uuacgaaccaacuggaaga

SEQ ID NO: 355754 - RNA, 19 nt, Homo sapiens
  misc_RNA (1)...(19): siRNA sense strand
gcaucucugacuauucuug

SEQ ID NO: 355755 - RNA, 19 nt, Homo sapiens
  misc_RNA (1)...(19): siRNA sense strand
ugaugugcauucucacgau

SEQ ID NO: 355756 - RNA, 19 nt, Homo sapiens
  misc_RNA (1)...(19): siRNA sense strand
gcaagacguggaaggugau

SEQ ID NO: 355757 - RNA, 19 nt, Homo sapiens
  misc_RNA (1)...(19): siRNA sense strand
gaugaggugcugugguaca

SEQ ID NO: 355758 - RNA, 19 nt, Homo sapiens
  misc_RNA (1)...(19): siRNA sense strand
agcaagauccugguguaua

SEQ ID NO: 355759 - RNA, 19 nt, Homo sapiens
  misc_RNA (1)...(19): siRNA sense strand
agauagcugcggaauuuga

SEQ ID NO: 355760 - RNA, 19 nt, Homo sapiens
  misc_RNA (1)...(19): siRNA sense strand
gcacgaugcaagaauacag

SEQ ID NO: 355761 - RNA, 19 nt, Homo sapiens
  misc_RNA (1)...(19): siRNA sense strand
gaccggaaaguacccuguu

SEQ ID NO: 355762 - RNA, 19 nt, Homo sapiens
  misc_RNA (1)...(19): siRNA sense strand
gaauuugaaguuccgaaac

SEQ ID NO: 355763 - RNA, 19 nt, Homo sapiens
  misc_RNA (1)...(19): siRNA sense strand
aaagaacuaggaagaugug

SEQ ID NO: 355764 - RNA, 19 nt, Homo sapiens
  misc_RNA (1)...(19): siRNA sense strand
gugcacaggugagcaagac

SEQ ID NO: 355765 - RNA, 19 nt, Homo sapiens
  misc_RNA (1)...(19): siRNA sense strand
cgaccucgcacuggccuuu

SEQ ID NO: 355766 - RNA, 19 nt, Homo sapiens
  misc_RNA (1)...(19): siRNA sense strand
gugacgccauggccacuca

SEQ ID NO: 355767 - RNA, 19 nt, Homo sapiens
  misc_RNA (1)...(19): siRNA sense strand
cuggagaucugauguaccu

SEQ ID NO: 355768 - RNA, 19 nt, Homo sapiens
  misc_RNA (1)...(19): siRNA sense strand
gcugcggaauuugaaguuc

SEQ ID NO: 355769 - RNA, 19 nt, Homo sapiens
  misc_RNA (1)...(19): siRNA sense strand
caacugccuuacgaauugg

SEQ ID NO: 355770 - RNA, 19 nt, Homo sapiens
  misc_RNA (1)...(19): siRNA sense strand
auagcagcaucucugacua

SEQ ID NO: 355771 - RNA, 19 nt, Homo sapiens
  misc_RNA (1)...(19): siRNA sense strand
gggauggguguacgaagga

SEQ ID NO: 355772 - RNA, 19 nt, Homo sapiens
  misc_RNA (1)...(19): siRNA sense strand
cgccagaacccuccuuuac

SEQ ID NO: 355773 - RNA, 19 nt, Homo sapiens
  misc_RNA (1)...(19): siRNA sense strand
aaugaugugccuuucuuug

SEQ ID NO: 355774 - RNA, 19 nt, Homo sapiens
  misc_RNA (1)...(19): siRNA sense strand
acgccgaccuggacagcuu

SEQ ID NO: 355775 - RNA, 19 nt, Homo sapiens
  misc_RNA (1)...(19): siRNA sense strand
gaagcugugggagguguau

SEQ ID NO: 355776 - RNA, 19 nt, Homo sapiens
  misc_RNA (1)...(19): siRNA sense strand
auuaucggaugaaccagaa

SEQ ID NO: 355777 - RNA, 19 nt, Homo sapiens
  misc_RNA (1)...(19): siRNA sense strand
ugguguccgugugggauua

SEQ ID NO: 355778 - RNA, 19 nt, Homo sapiens
  misc_RNA (1)...(19): siRNA sense strand
cacgaccuccgcaguggua

SEQ ID NO: 355779 - RNA, 19 nt, Homo sapiens
  misc_RNA (1)...(19): siRNA sense strand
ccgccagaacccuccuuua

SEQ ID NO: 355780 - RNA, 19 nt, Homo sapiens
  misc_RNA (1)...(19): siRNA sense strand
guguggucauugcgggaua

SEQ ID NO: 355781 - RNA, 19 nt, Homo sapiens
  misc_RNA (1)...(19): siRNA sense strand
gaggauggguuucuuaaua

SEQ ID NO: 355782 - RNA, 19 nt, Homo sapiens
  misc_RNA (1)...(19): siRNA sense strand
gcacuggccuuucccuaua

SEQ ID NO: 355783 - RNA, 19 nt, Homo sapiens
  misc_RNA (1)...(19): siRNA sense strand
gaagcaagauccuggugua

SEQ ID NO: 355784 - RNA, 19 nt, Homo sapiens
  misc_RNA (1)...(19): siRNA sense strand
ggaaagaacuaggaagaug

SEQ ID NO: 355785 - RNA, 19 nt, Homo sapiens
  misc_RNA (1)...(19): siRNA sense strand
gcaagauccugguguauag

SEQ ID NO: 355786 - RNA, 19 nt, Homo sapiens
  misc_RNA (1)...(19): siRNA sense strand
ccaacugccuuacgaauug

SEQ ID NO: 355787 - RNA, 19 nt, Homo sapiens
  misc_RNA (1)...(19): siRNA sense strand
gaugugccuuucuuugaua

SEQ ID NO: 355788 - RNA, 19 nt, Homo sapiens
  misc_RNA (1)...(19): siRNA sense strand
gcagccaaaugucuccuuu

SEQ ID NO: 355789 - RNA, 19 nt, Homo sapiens
  misc_RNA (1)...(19): siRNA sense strand
ugagcacgaugcaagaaua

SEQ ID NO: 355790 - RNA, 19 nt, Homo sapiens
  misc_RNA (1)...(19): siRNA sense strand
ggauggguuucuuaauauu

SEQ ID NO: 355791 - RNA, 19 nt, Homo sapiens
  misc_RNA (1)...(19): siRNA sense strand
ugaaugaugugccuuucuu

SEQ ID NO: 355792 - RNA, 19 nt, Homo sapiens
  misc_RNA (1)...(19): siRNA sense strand
gaaagaacuaggaagaugu

SEQ ID NO: 355793 - RNA, 19 nt, Homo sapiens
  misc_RNA (1)...(19): siRNA sense strand
cagcaucucugacuauucu

SEQ ID NO: 355794 - RNA, 19 nt, Homo sapiens
  misc_RNA (1)...(19): siRNA sense strand
ggacaggaaagaacuagga

SEQ ID NO: 355795 - RNA, 19 nt, Homo sapiens
  misc_RNA (1)...(19): siRNA sense strand
gcauguuccugacacaguu

SEQ ID NO: 355796 - RNA, 19 nt, Homo sapiens
  misc_RNA (1)...(19): siRNA sense strand
ugagcgagcuggagcaugu

SEQ ID NO: 355797 - RNA, 19 nt, Homo sapiens
  misc_RNA (1)...(19): siRNA sense strand
aggaugaggugcuguggua

SEQ ID NO: 355798 - RNA, 19 nt, Homo sapiens
  misc_RNA (1)...(19): siRNA sense strand
gaaggugauugcagaggau

SEQ ID NO: 355799 - RNA, 19 nt, Homo sapiens
  misc_RNA (1)...(19): siRNA sense strand
cgaaccaacuggaagaauc

SEQ ID NO: 355800 - RNA, 19 nt, Homo sapiens
  misc_RNA (1)...(19): siRNA sense strand
ucaguaccuugaaauaguu

SEQ ID NO: 355801 - RNA, 19 nt, Homo sapiens
  misc_RNA (1)...(19): siRNA sense strand
ugaaauaguuccagaaacc

SEQ ID NO: 355802 - RNA, 19 nt, Homo sapiens
  misc_RNA (1)...(19): siRNA sense strand
ggccacagcuucugcuuuu

SEQ ID NO: 355803 - RNA, 19 nt, Homo sapiens
  misc_RNA (1)...(19): siRNA sense strand
aggauggguuucuuaauau

SEQ ID NO: 355804 - RNA, 19 nt, Homo sapiens
  misc_RNA (1)...(19): siRNA sense strand
caggaaagaacuaggaaga

SEQ ID NO: 355805 - RNA, 19 nt, Homo sapiens
  misc_RNA (1)...(19): siRNA sense strand
gaaugaugugccuuucuuu

SEQ ID NO: 355806 - RNA, 19 nt, Homo sapiens
  misc_RNA (1)...(19): siRNA sense strand
ggaaugcagccaaaugucu

SEQ ID NO: 355807 - RNA, 19 nt, Homo sapiens
  misc_RNA (1)...(19): siRNA sense strand
aaacagcucguuggcagua

SEQ ID NO: 355808 - RNA, 19 nt, Homo sapiens
  misc_RNA (1)...(19): siRNA sense strand
ucacgaugguguggucauu

SEQ ID NO: 355809 - RNA, 19 nt, Homo sapiens
  misc_RNA (1)...(19): siRNA sense strand
ggaaaguacccuguucauc

SEQ ID NO: 355810 - RNA, 19 nt, Homo sapiens
  misc_RNA (1)...(19): siRNA sense strand
aguagcagcuuaugaggau

SEQ ID NO: 355811 - RNA, 19 nt, Homo sapiens
  misc_RNA (1)...(19): siRNA sense strand
ugaugugccuuucuuugau

SEQ ID NO: 355812 - RNA, 19 nt, Homo sapiens
  misc_RNA (1)...(19): siRNA sense strand
gaagcuggguaacguucuc

SEQ ID NO: 355813 - RNA, 19 nt, Homo sapiens
  misc_RNA (1)...(19): siRNA sense strand
ugugugaugugcauucuca

SEQ ID NO: 355814 - RNA, 19 nt, Homo sapiens
  misc_RNA (1)...(19): siRNA sense strand
gaccuggacagcuucacua

SEQ ID NO: 355815 - RNA, 19 nt, Homo sapiens
  misc_RNA (1)...(19): siRNA sense strand
ugauguaccugcucaaagc

SEQ ID NO: 355816 - RNA, 19 nt, Homo sapiens
  misc_RNA (1)...(19): siRNA sense strand
uucaguaucuggacaggaa

SEQ ID NO: 355817 - RNA, 19 nt, Homo sapiens
  misc_RNA (1)...(19): siRNA sense strand
gauagcugcggaauuugaa

SEQ ID NO: 355818 - RNA, 19 nt, Homo sapiens
  misc_RNA (1)...(19): siRNA sense strand
gcaagaauacaggcacuag

SEQ ID NO: 355819 - RNA, 19 nt, Homo sapiens
  misc_RNA (1)...(19): siRNA sense strand
gauagcagcaucucugacu

SEQ ID NO: 355820 - RNA, 19 nt, Homo sapiens
  misc_RNA (1)...(19): siRNA sense strand
guacgaaggaagcaagauc

SEQ ID NO: 355821 - RNA, 19 nt, Homo sapiens
  misc_RNA (1)...(19): siRNA sense strand
ggucauugcgggauauaca

SEQ ID NO: 355822 - RNA, 19 nt, Homo sapiens
  misc_RNA (1)...(19): siRNA sense strand
aaaguacccuguucaucgu

SEQ ID NO: 355823 - RNA, 19 nt, Homo sapiens
  misc_RNA (1)...(19): siRNA sense strand
uaugaggauggguuucuua

SEQ ID NO: 355824 - RNA, 19 nt, Homo sapiens
  misc_RNA (1)...(19): siRNA sense strand
gccgaagacuccgccagaa

SEQ ID NO: 355825 - RNA, 19 nt, Homo sapiens
  misc_RNA (1)...(19): siRNA sense strand
gggauuaucggaugaacca

SEQ ID NO: 355826 - RNA, 19 nt, Homo sapiens
  misc_RNA (1)...(19): siRNA sense strand
gaaccaacuggaagaaucg

SEQ ID NO: 355827 - RNA, 19 nt, Homo sapiens
  misc_RNA (1)...(19): siRNA sense strand
aaaugaaugaugugccuuu

SEQ ID NO: 355828 - RNA, 19 nt, Homo sapiens
  misc_RNA (1)...(19): siRNA sense strand
caacuggaagaaucgcaaa

SEQ ID NO: 355829 - RNA, 19 nt, Homo sapiens
  misc_RNA (1)...(19): siRNA sense strand
ggagcauguuccugacaca

SEQ ID NO: 355830 - RNA, 19 nt, Homo sapiens
  misc_RNA (1)...(19): siRNA sense strand
cuggacagcuucacuacuc

SEQ ID NO: 355831 - RNA, 19 nt, Homo sapiens
  misc_RNA (1)...(19): siRNA sense strand
aagguacccuguggcagua

SEQ ID NO: 355832 - RNA, 19 nt, Homo sapiens
  misc_RNA (1)...(19): siRNA sense strand
cagaggacgaggaggauga

SEQ ID NO: 355833 - RNA, 19 nt, Homo sapiens
  misc_RNA (1)...(19): siRNA sense strand
cacuggccuuucccuauaa

SEQ ID NO: 355834 - RNA, 19 nt, Homo sapiens
  misc_RNA (1)...(19): siRNA sense strand
gaaauaguuccagaaacca

SEQ ID NO: 355835 - RNA, 19 nt, Homo sapiens
  misc_RNA (1)...(19): siRNA sense strand
gacaggaaagaacuaggaa

SEQ ID NO: 355836 - RNA, 19 nt, Homo sapiens
  misc_RNA (1)...(19): siRNA sense strand
guaacguucuccgugacuu

SEQ ID NO: 355837 - RNA, 19 nt, Homo sapiens
  misc_RNA (1)...(19): siRNA sense strand
gaaugaaaugaaugaugug

SEQ ID NO: 355838 - RNA, 19 nt, Homo sapiens
  misc_RNA (1)...(19): siRNA sense strand
ggauggguguacgaaggaa

SEQ ID NO: 355839 - RNA, 19 nt, Homo sapiens
  misc_RNA (1)...(19): siRNA sense strand
gaugugcacaggugagcaa

SEQ ID NO: 355840 - RNA, 19 nt, Homo sapiens
  misc_RNA (1)...(19): siRNA sense strand
ggaggaugagccuggaaug

SEQ ID NO: 355841 - RNA, 19 nt, Homo sapiens
  misc_RNA (1)...(19): siRNA sense strand
ggacgacuacagccuggau

SEQ ID NO: 355842 - RNA, 19 nt, Homo sapiens
  misc_RNA (1)...(19): siRNA sense strand
cauggccacucacuacuac

SEQ ID NO: 355843 - RNA, 19 nt, Homo sapiens
  misc_RNA (1)...(19): siRNA sense strand
ccauggccacucacuacua

SEQ ID NO: 355844 - RNA, 19 nt, Homo sapiens
  misc_RNA (1)...(19): siRNA sense strand
ggcaaucaauauauuucag

SEQ ID NO: 355845 - RNA, 19 nt, Homo sapiens
  misc_RNA (1)...(19): siRNA sense strand
acuacagccuggaugaguu

SEQ ID NO: 355846 - RNA, 19 nt, Homo sapiens
  misc_RNA (1)...(19): siRNA sense strand
cuugaaauaguuccagaaa

SEQ ID NO: 355847 - RNA, 19 nt, Homo sapiens
  misc_RNA (1)...(19): siRNA sense strand
uagcagcaucucugacuau

SEQ ID NO: 355848 - RNA, 19 nt, Homo sapiens
  misc_RNA (1)...(19): siRNA sense strand
ggcaguagcagcuuaugag

SEQ ID NO: 355849 - RNA, 19 nt, Homo sapiens
  misc_RNA (1)...(19): siRNA sense strand
cguuggcaguagcagcuua

SEQ ID NO: 355850 - RNA, 19 nt, Homo sapiens
  misc_RNA (1)...(19): siRNA sense strand
uuacgaaccaacuggaaga

SEQ ID NO: 355851 - RNA, 19 nt, Homo sapiens
  misc_RNA (1)...(19): siRNA sense strand
gcaucucugacuauucuug

SEQ ID NO: 355852 - RNA, 19 nt, Homo sapiens
  misc_RNA (1)...(19): siRNA sense strand
ugaugugcauucucacgau

SEQ ID NO: 355853 - RNA, 19 nt, Homo sapiens
  misc_RNA (1)...(19): siRNA sense strand
gcaagacguggaaggugau

SEQ ID NO: 355854 - RNA, 19 nt, Homo sapiens
  misc_RNA (1)...(19): siRNA sense strand
gaugaggugcugugguaca

SEQ ID NO: 355855 - RNA, 19 nt, Homo sapiens
  misc_RNA (1)...(19): siRNA sense strand
agcaagauccugguguaua

SEQ ID NO: 355856 - RNA, 19 nt, Homo sapiens
  misc_RNA (1)...(19): siRNA sense strand
agauagcugcggaauuuga

SEQ ID NO: 355857 - RNA, 19 nt, Homo sapiens
  misc_RNA (1)...(19): siRNA sense strand
gcacgaugcaagaauacag

SEQ ID NO: 355858 - RNA, 19 nt, Homo sapiens
  misc_RNA (1)...(19): siRNA sense strand
gaccggaaaguacccuguu

SEQ ID NO: 355859 - RNA, 19 nt, Homo sapiens
  misc_RNA (1)...(19): siRNA sense strand
gaauuugaaguuccgaaac

SEQ ID NO: 355860 - RNA, 19 nt, Homo sapiens
  misc_RNA (1)...(19): siRNA sense strand
aaagaacuaggaagaugug

SEQ ID NO: 355861 - RNA, 19 nt, Homo sapiens
  misc_RNA (1)...(19): siRNA sense strand
gugcacaggugagcaagac

SEQ ID NO: 355862 - RNA, 19 nt, Homo sapiens
  misc_RNA (1)...(19): siRNA sense strand
cgaccucgcacuggccuuu

SEQ ID NO: 355863 - RNA, 19 nt, Homo sapiens
  misc_RNA (1)...(19): siRNA sense strand
gugacgccauggccacuca

SEQ ID NO: 355864 - RNA, 19 nt, Homo sapiens
  misc_RNA (1)...(19): siRNA sense strand
cuggagaucugauguaccu

SEQ ID NO: 355865 - RNA, 19 nt, Homo sapiens
  misc_RNA (1)...(19): siRNA sense strand
gcugcggaauuugaaguuc

SEQ ID NO: 355866 - RNA, 19 nt, Homo sapiens
  misc_RNA (1)...(19): siRNA sense strand
caacugccuuacgaauugg

SEQ ID NO: 355867 - RNA, 19 nt, Homo sapiens
  misc_RNA (1)...(19): siRNA sense strand
auagcagcaucucugacua

SEQ ID NO: 355868 - RNA, 19 nt, Homo sapiens
  misc_RNA (1)...(19): siRNA sense strand
gggauggguguacgaagga

SEQ ID NO: 355869 - RNA, 19 nt, Homo sapiens
  misc_RNA (1)...(19): siRNA sense strand
cgccagaacccuccuuuac

SEQ ID NO: 355870 - RNA, 19 nt, Homo sapiens
  misc_RNA (1)...(19): siRNA sense strand
aaugaugugccuuucuuug

SEQ ID NO: 355871 - RNA, 19 nt, Homo sapiens
  misc_RNA (1)...(19): siRNA sense strand
acgccgaccuggacagcuu

SEQ ID NO: 355872 - RNA, 19 nt, Homo sapiens
  misc_RNA (1)...(19): siRNA sense strand
gaagcugugggagguguau

SEQ ID NO: 355873 - RNA, 19 nt, Homo sapiens
  misc_RNA (1)...(19): siRNA sense strand
auuaucggaugaaccagaa

SEQ ID NO: 355874 - RNA, 19 nt, Homo sapiens
  misc_RNA (1)...(19): siRNA sense strand
ugguguccgugugggauua

SEQ ID NO: 355875 - RNA, 19 nt, Homo sapiens
  misc_RNA (1)...(19): siRNA sense strand
cacgaccuccgcaguggua

SEQ ID NO: 355876 - RNA, 19 nt, Homo sapiens
  misc_RNA (1)...(19): siRNA sense strand
ccgccagaacccuccuuua

SEQ ID NO: 355877 - RNA, 19 nt, Homo sapiens
  misc_RNA (1)...(19): siRNA sense strand
guguggucauugcgggaua

SEQ ID NO: 355878 - RNA, 19 nt, Homo sapiens
  misc_RNA (1)...(19): siRNA sense strand
gaagauacauugaccauua

SEQ ID NO: 355879 - RNA, 19 nt, Homo sapiens
  misc_RNA (1)...(19): siRNA sense strand
gggaugaucucaagaaaua

SEQ ID NO: 355880 - RNA, 19 nt, Homo sapiens
  misc_RNA (1)...(19): siRNA sense strand
gaaauacugucucccuuua

SEQ ID NO: 355881 - RNA, 19 nt, Homo sapiens
  misc_RNA (1)...(19): siRNA sense strand
ggaaaucucucuucauaga

SEQ ID NO: 355882 - RNA, 19 nt, Homo sapiens
  misc_RNA (1)...(19): siRNA sense strand
gacaagaucuuuaauguug

SEQ ID NO: 355883 - RNA, 19 nt, Homo sapiens
  misc_RNA (1)...(19): siRNA sense strand
gaacuuagcucuguacauc

SEQ ID NO: 355884 - RNA, 19 nt, Homo sapiens
  misc_RNA (1)...(19): siRNA sense strand
ucaaggaccuggaguaguu

SEQ ID NO: 355885 - RNA, 19 nt, Homo sapiens
  misc_RNA (1)...(19): siRNA sense strand
caggauacauggaaggaua

SEQ ID NO: 355886 - RNA, 19 nt, Homo sapiens
  misc_RNA (1)...(19): siRNA sense strand
gcauggcacugucuaauca

SEQ ID NO: 355887 - RNA, 19 nt, Homo sapiens
  misc_RNA (1)...(19): siRNA sense strand
uuggaaaucucucuucaua

SEQ ID NO: 355888 - RNA, 19 nt, Homo sapiens
  misc_RNA (1)...(19): siRNA sense strand
uggaguaguuggugaauuu

SEQ ID NO: 355889 - RNA, 19 nt, Homo sapiens
  misc_RNA (1)...(19): siRNA sense strand
gcaagcuuccugacgauua

SEQ ID NO: 355890 - RNA, 19 nt, Homo sapiens
  misc_RNA (1)...(19): siRNA sense strand
ccaaauggcucgaaaucca

SEQ ID NO: 355891 - RNA, 19 nt, Homo sapiens
  misc_RNA (1)...(19): siRNA sense strand
gacagucgcuauuggagaa

SEQ ID NO: 355892 - RNA, 19 nt, Homo sapiens
  misc_RNA (1)...(19): siRNA sense strand
ccauuaugcugcuauuaaa

SEQ ID NO: 355893 - RNA, 19 nt, Homo sapiens
  misc_RNA (1)...(19): siRNA sense strand
guuagugguuccuggguua

SEQ ID NO: 355894 - RNA, 19 nt, Homo sapiens
  misc_RNA (1)...(19): siRNA sense strand
gaaauccagcugcuauuga

SEQ ID NO: 355895 - RNA, 19 nt, Homo sapiens
  misc_RNA (1)...(19): siRNA sense strand
gcagagacagggacugaaa

SEQ ID NO: 355896 - RNA, 19 nt, Homo sapiens
  misc_RNA (1)...(19): siRNA sense strand
aauacuggcugauaucuga

SEQ ID NO: 355897 - RNA, 19 nt, Homo sapiens
  misc_RNA (1)...(19): siRNA sense strand
gacagggacugaaauacug

SEQ ID NO: 355898 - RNA, 19 nt, Homo sapiens
  misc_RNA (1)...(19): siRNA sense strand
ugagaaggccugucaguug

SEQ ID NO: 355899 - RNA, 19 nt, Homo sapiens
  misc_RNA (1)...(19): siRNA sense strand
gcugauaucugaggaagag

SEQ ID NO: 355900 - RNA, 19 nt, Homo sapiens
  misc_RNA (1)...(19): siRNA sense strand
caagcuuccugacgauuau

SEQ ID NO: 355901 - RNA, 19 nt, Homo sapiens
  misc_RNA (1)...(19): siRNA sense strand
guuuaccucuuaugucaaa

SEQ ID NO: 355902 - RNA, 19 nt, Homo sapiens
  misc_RNA (1)...(19): siRNA sense strand
cagcugcuauugacauguu

SEQ ID NO: 355903 - RNA, 19 nt, Homo sapiens
  misc_RNA (1)...(19): siRNA sense strand
aagaugcacuuccugagaa

SEQ ID NO: 355904 - RNA, 19 nt, Homo sapiens
  misc_RNA (1)...(19): siRNA sense strand
gaagaaucaguguuggaaa

SEQ ID NO: 355905 - RNA, 19 nt, Homo sapiens
  misc_RNA (1)...(19): siRNA sense strand
caggucggguauaugaaua

SEQ ID NO: 355906 - RNA, 19 nt, Homo sapiens
  misc_RNA (1)...(19): siRNA sense strand
ggagaauaacaaaugcuaa

SEQ ID NO: 355907 - RNA, 19 nt, Homo sapiens
  misc_RNA (1)...(19): siRNA sense strand
gagaccaaauuuucagaua

SEQ ID NO: 355908 - RNA, 19 nt, Homo sapiens
  misc_RNA (1)...(19): siRNA sense strand
ucauagauacuuacucuga

SEQ ID NO: 355909 - RNA, 19 nt, Homo sapiens
  misc_RNA (1)...(19): siRNA sense strand
aagaaucaguguuggaaau

SEQ ID NO: 355910 - RNA, 19 nt, Homo sapiens
  misc_RNA (1)...(19): siRNA sense strand
gcagagggccgaaacaaaa

SEQ ID NO: 355911 - RNA, 19 nt, Homo sapiens
  misc_RNA (1)...(19): siRNA sense strand
ugaaauacugucucccuuu

SEQ ID NO: 355912 - RNA, 19 nt, Homo sapiens
  misc_RNA (1)...(19): siRNA sense strand
gagaauaacaaaugcuaag

SEQ ID NO: 355913 - RNA, 19 nt, Homo sapiens
  misc_RNA (1)...(19): siRNA sense strand
caucaucagagaccaaauu

SEQ ID NO: 355914 - RNA, 19 nt, Homo sapiens
  misc_RNA (1)...(19): siRNA sense strand
cugacugguuuaccucuua

SEQ ID NO: 355915 - RNA, 19 nt, Homo sapiens
  misc_RNA (1)...(19): siRNA sense strand
gaagcauggcacugucuaa

SEQ ID NO: 355916 - RNA, 19 nt, Homo sapiens
  misc_RNA (1)...(19): siRNA sense strand
gcccaggucggguauauga

SEQ ID NO: 355917 - RNA, 19 nt, Homo sapiens
  misc_RNA (1)...(19): siRNA sense strand
ucacaauggacagaaguua

SEQ ID NO: 355918 - RNA, 19 nt, Homo sapiens
  misc_RNA (1)...(19): siRNA sense strand
cacauucucuacaacauca

SEQ ID NO: 355919 - RNA, 19 nt, Homo sapiens
  misc_RNA (1)...(19): siRNA sense strand
cccacuauuucuucacaua

SEQ ID NO: 355920 - RNA, 19 nt, Homo sapiens
  misc_RNA (1)...(19): siRNA sense strand
cuucauagauacuuacucu

SEQ ID NO: 355921 - RNA, 19 nt, Homo sapiens
  misc_RNA (1)...(19): siRNA sense strand
gaccaaauggcucgaaauc

SEQ ID NO: 355922 - RNA, 19 nt, Homo sapiens
  misc_RNA (1)...(19): siRNA sense strand
agagacagggacugaaaua

SEQ ID NO: 355923 - RNA, 19 nt, Homo sapiens
  misc_RNA (1)...(19): siRNA sense strand
agaccucgaugcuguggaa

SEQ ID NO: 355924 - RNA, 19 nt, Homo sapiens
  misc_RNA (1)...(19): siRNA sense strand
ggcacugucuaaucacuau

SEQ ID NO: 355925 - RNA, 19 nt, Homo sapiens
  misc_RNA (1)...(19): siRNA sense strand
gauacuuacucugauguag

SEQ ID NO: 355926 - RNA, 19 nt, Homo sapiens
  misc_RNA (1)...(19): siRNA sense strand
caacauucagggugucuau

SEQ ID NO: 355927 - RNA, 19 nt, Homo sapiens
  misc_RNA (1)...(19): siRNA sense strand
ugguuuaccucuuauguca

SEQ ID NO: 355928 - RNA, 19 nt, Homo sapiens
  misc_RNA (1)...(19): siRNA sense strand
cuaccaauguccagaccaa

SEQ ID NO: 355929 - RNA, 19 nt, Homo sapiens
  misc_RNA (1)...(19): siRNA sense strand
ucacuaucguucugaagau

SEQ ID NO: 355930 - RNA, 19 nt, Homo sapiens
  misc_RNA (1)...(19): siRNA sense strand
gaagagaaaacacagaaga

SEQ ID NO: 355931 - RNA, 19 nt, Homo sapiens
  misc_RNA (1)...(19): siRNA sense strand
gaccaaauuuucagauaug

SEQ ID NO: 355932 - RNA, 19 nt, Homo sapiens
  misc_RNA (1)...(19): siRNA sense strand
ggaagcauggcacugucua

SEQ ID NO: 355933 - RNA, 19 nt, Homo sapiens
  misc_RNA (1)...(19): siRNA sense strand
agagggugcucgagaggaa

SEQ ID NO: 355934 - RNA, 19 nt, Homo sapiens
  misc_RNA (1)...(19): siRNA sense strand
cacagaagaaucaguguug

SEQ ID NO: 355935 - RNA, 19 nt, Homo sapiens
  misc_RNA (1)...(19): siRNA sense strand
uuucagauauguucacgau

SEQ ID NO: 355936 - RNA, 19 nt, Homo sapiens
  misc_RNA (1)...(19): siRNA sense strand
cagaccaaauggcucgaaa

SEQ ID NO: 355937 - RNA, 19 nt, Homo sapiens
  misc_RNA (1)...(19): siRNA sense strand
guacauagcaguggaagcu

SEQ ID NO: 355938 - RNA, 19 nt, Homo sapiens
  misc_RNA (1)...(19): siRNA sense strand
cauagauacuuacucugau

SEQ ID NO: 355939 - RNA, 19 nt, Homo sapiens
  misc_RNA (1)...(19): siRNA sense strand
gaaucaguguuggaaaucu

SEQ ID NO: 355940 - RNA, 19 nt, Homo sapiens
  misc_RNA (1)...(19): siRNA sense strand
ggccugggaugaucucaag

SEQ ID NO: 355941 - RNA, 19 nt, Homo sapiens
  misc_RNA (1)...(19): siRNA sense strand
aaagaugcacuuccugaga

SEQ ID NO: 355942 - RNA, 19 nt, Homo sapiens
  misc_RNA (1)...(19): siRNA sense strand
cgaaauccagcugcuauug

SEQ ID NO: 355943 - RNA, 19 nt, Homo sapiens
  misc_RNA (1)...(19): siRNA sense strand
gauacauggaaggauauua

SEQ ID NO: 355944 - RNA, 19 nt, Homo sapiens
  misc_RNA (1)...(19): siRNA sense strand
acucugauguaggaagaua

SEQ ID NO: 355945 - RNA, 19 nt, Homo sapiens
  misc_RNA (1)...(19): siRNA sense strand
cacaagcuguaccacauuc

SEQ ID NO: 355946 - RNA, 19 nt, Homo sapiens
  misc_RNA (1)...(19): siRNA sense strand
cagcccaggucggguauau

SEQ ID NO: 355947 - RNA, 19 nt, Homo sapiens
  misc_RNA (1)...(19): siRNA sense strand
ucacauaccgaaucaggau

SEQ ID NO: 355948 - RNA, 19 nt, Homo sapiens
  misc_RNA (1)...(19): siRNA sense strand
gauccagaauguguagcaa

SEQ ID NO: 355949 - RNA, 19 nt, Homo sapiens
  misc_RNA (1)...(19): siRNA sense strand
uugcauacauacugguuug

SEQ ID NO: 355950 - RNA, 19 nt, Homo sapiens
  misc_RNA (1)...(19): siRNA sense strand
gauaucugaggaagagaaa

SEQ ID NO: 355951 - RNA, 19 nt, Homo sapiens
  misc_RNA (1)...(19): siRNA sense strand
guucauaccgaauucacaa

SEQ ID NO: 355952 - RNA, 19 nt, Homo sapiens
  misc_RNA (1)...(19): siRNA sense strand
ggaagauacauugaccauu

SEQ ID NO: 355953 - RNA, 19 nt, Homo sapiens
  misc_RNA (1)...(19): siRNA sense strand
gaccauuaugcugcuauua

SEQ ID NO: 355954 - RNA, 19 nt, Homo sapiens
  misc_RNA (1)...(19): siRNA sense strand
ccaauguccagaccaaaug

SEQ ID NO: 355955 - RNA, 19 nt, Homo sapiens
  misc_RNA (1)...(19): siRNA sense strand
guucugaagauuuguuaga

SEQ ID NO: 355956 - RNA, 19 nt, Homo sapiens
  misc_RNA (1)...(19): siRNA sense strand
gauuaucgauguucauacc

SEQ ID NO: 355957 - RNA, 19 nt, Homo sapiens
  misc_RNA (1)...(19): siRNA sense strand
auagauacuuacucugaug

SEQ ID NO: 355958 - RNA, 19 nt, Homo sapiens
  misc_RNA (1)...(19): siRNA sense strand
caacaucaggauacaugga

SEQ ID NO: 355959 - RNA, 19 nt, Homo sapiens
  misc_RNA (1)...(19): siRNA sense strand
ugacugguuuaccucuuau

SEQ ID NO: 355960 - RNA, 19 nt, Homo sapiens
  misc_RNA (1)...(19): siRNA sense strand
cagcagagacagggacuga

SEQ ID NO: 355961 - RNA, 19 nt, Homo sapiens
  misc_RNA (1)...(19): siRNA sense strand
uaaucacuaucguucugaa

SEQ ID NO: 355962 - RNA, 19 nt, Homo sapiens
  misc_RNA (1)...(19): siRNA sense strand
ucuaaucacuaucguucug

SEQ ID NO: 355963 - RNA, 19 nt, Homo sapiens
  misc_RNA (1)...(19): siRNA sense strand
ugaccauuaugcugcuauu

SEQ ID NO: 355964 - RNA, 19 nt, Homo sapiens
  misc_RNA (1)...(19): siRNA sense strand
uuacucugauguaggaaga

SEQ ID NO: 355965 - RNA, 19 nt, Homo sapiens
  misc_RNA (1)...(19): siRNA sense strand
ggacuaucgggaucuaauc

SEQ ID NO: 355966 - RNA, 19 nt, Homo sapiens
  misc_RNA (1)...(19): siRNA sense strand
cauacauacugguuugagu

SEQ ID NO: 355967 - RNA, 19 nt, Homo sapiens
  misc_RNA (1)...(19): siRNA sense strand
cagaauguguagcaacaac

SEQ ID NO: 355968 - RNA, 19 nt, Homo sapiens
  misc_RNA (1)...(19): siRNA sense strand
ccauauggcauguccaaca

SEQ ID NO: 355969 - RNA, 19 nt, Homo sapiens
  misc_RNA (1)...(19): siRNA sense strand
gaauguguagcaacaacug

SEQ ID NO: 355970 - RNA, 19 nt, Homo sapiens
  misc_RNA (1)...(19): siRNA sense strand
uacuuacucugauguagga

SEQ ID NO: 355971 - RNA, 19 nt, Homo sapiens
  misc_RNA (1)...(19): siRNA sense strand
agaagaaucaguguuggaa

SEQ ID NO: 355972 - RNA, 19 nt, Homo sapiens
  misc_RNA (1)...(19): siRNA sense strand
caucagagaccaaauuuuc

SEQ ID NO: 355973 - RNA, 19 nt, Homo sapiens
  misc_RNA (1)...(19): siRNA sense strand
accauuaugcugcuauuaa

SEQ ID NO: 355974 - RNA, 19 nt, Homo sapiens
  misc_RNA (1)...(19): siRNA sense strand
guggagaagacauugcaaa

SEQ ID NO: 355975 - RNA, 19 nt, Homo sapiens
  misc_RNA (1)...(19): siRNA sense strand
gauccgcuguggagaagac

SEQ ID NO: 355976 - RNA, 19 nt, Homo sapiens
  misc_RNA (1)...(19): siRNA sense strand
cuaucguucugaagauuug

SEQ ID NO: 355977 - RNA, 19 nt, Homo sapiens
  misc_RNA (1)...(19): siRNA sense strand
guaccacauucucuacaac

SEQ ID NO: 355978 - RNA, 19 nt, Homo sapiens
  misc_RNA (1)...(19): siRNA sense strand
gaagauacauugaccauua

SEQ ID NO: 355979 - RNA, 19 nt, Homo sapiens
  misc_RNA (1)...(19): siRNA sense strand
gggaugaucucaagaaaua

SEQ ID NO: 355980 - RNA, 19 nt, Homo sapiens
  misc_RNA (1)...(19): siRNA sense strand
gaaauacugucucccuuua

SEQ ID NO: 355981 - RNA, 19 nt, Homo sapiens
  misc_RNA (1)...(19): siRNA sense strand
ggaaaucucucuucauaga

SEQ ID NO: 355982 - RNA, 19 nt, Homo sapiens
  misc_RNA (1)...(19): siRNA sense strand
gacaagaucuuuaauguug

SEQ ID NO: 355983 - RNA, 19 nt, Homo sapiens
  misc_RNA (1)...(19): siRNA sense strand
gaacuuagcucuguacauc

SEQ ID NO: 355984 - RNA, 19 nt, Homo sapiens
  misc_RNA (1)...(19): siRNA sense strand
ucaaggaccuggaguaguu

SEQ ID NO: 355985 - RNA, 19 nt, Homo sapiens
  misc_RNA (1)...(19): siRNA sense strand
caggauacauggaaggaua

SEQ ID NO: 355986 - RNA, 19 nt, Homo sapiens
  misc_RNA (1)...(19): siRNA sense strand
gcauggcacugucuaauca

SEQ ID NO: 355987 - RNA, 19 nt, Homo sapiens
  misc_RNA (1)...(19): siRNA sense strand
uuggaaaucucucuucaua

SEQ ID NO: 355988 - RNA, 19 nt, Homo sapiens
  misc_RNA (1)...(19): siRNA sense strand
uggaguaguuggugaauuu

SEQ ID NO: 355989 - RNA, 19 nt, Homo sapiens
  misc_RNA (1)...(19): siRNA sense strand
gcaagcuuccugacgauua

SEQ ID NO: 355990 - RNA, 19 nt, Homo sapiens
  misc_RNA (1)...(19): siRNA sense strand
ccaaauggcucgaaaucca

SEQ ID NO: 355991 - RNA, 19 nt, Homo sapiens
  misc_RNA (1)...(19): siRNA sense strand
gacagucgcuauuggagaa

SEQ ID NO: 355992 - RNA, 19 nt, Homo sapiens
  misc_RNA (1)...(19): siRNA sense strand
ccauuaugcugcuauuaaa

SEQ ID NO: 355993 - RNA, 19 nt, Homo sapiens
  misc_RNA (1)...(19): siRNA sense strand
guuagugguuccuggguua

SEQ ID NO: 355994 - RNA, 19 nt, Homo sapiens
  misc_RNA (1)...(19): siRNA sense strand
gaaauccagcugcuauuga

SEQ ID NO: 355995 - RNA, 19 nt, Homo sapiens
  misc_RNA (1)...(19): siRNA sense strand
gcagagacagggacugaaa

SEQ ID NO: 355996 - RNA, 19 nt, Homo sapiens
  misc_RNA (1)...(19): siRNA sense strand
aauacuggcugauaucuga

SEQ ID NO: 355997 - RNA, 19 nt, Homo sapiens
  misc_RNA (1)...(19): siRNA sense strand
gacagggacugaaauacug

SEQ ID NO: 355998 - RNA, 19 nt, Homo sapiens
  misc_RNA (1)...(19): siRNA sense strand
ugagaaggccugucaguug

SEQ ID NO: 355999 - RNA, 19 nt, Homo sapiens
  misc_RNA (1)...(19): siRNA sense strand
gcugauaucugaggaagag

SEQ ID NO: 356000 - RNA, 19 nt, Homo sapiens
  misc_RNA (1)...(19): siRNA sense strand
caagcuuccugacgauuau

SEQ ID NO: 356001 - RNA, 19 nt, Homo sapiens
  misc_RNA (1)...(19): siRNA sense strand
guuuaccucuuaugucaaa

SEQ ID NO: 356002 - RNA, 19 nt, Homo sapiens
  misc_RNA (1)...(19): siRNA sense strand
cagcugcuauugacauguu

SEQ ID NO: 356003 - RNA, 19 nt, Homo sapiens
  misc_RNA (1)...(19): siRNA sense strand
aagaugcacuuccugagaa

SEQ ID NO: 356004 - RNA, 19 nt, Homo sapiens
  misc_RNA (1)...(19): siRNA sense strand
gaagaaucaguguuggaaa

SEQ ID NO: 356005 - RNA, 19 nt, Homo sapiens
  misc_RNA (1)...(19): siRNA sense strand
caggucggguauaugaaua

SEQ ID NO: 356006 - RNA, 19 nt, Homo sapiens
  misc_RNA (1)...(19): siRNA sense strand
ggagaauaacaaaugcuaa

SEQ ID NO: 356007 - RNA, 19 nt, Homo sapiens
  misc_RNA (1)...(19): siRNA sense strand
gagaccaaauuuucagaua

SEQ ID NO: 356008 - RNA, 19 nt, Homo sapiens
  misc_RNA (1)...(19): siRNA sense strand
ucauagauacuuacucuga

SEQ ID NO: 356009 - RNA, 19 nt, Homo sapiens
  misc_RNA (1)...(19): siRNA sense strand
aagaaucaguguuggaaau

SEQ ID NO: 356010 - RNA, 19 nt, Homo sapiens
  misc_RNA (1)...(19): siRNA sense strand
gcagagggccgaaacaaaa

SEQ ID NO: 356011 - RNA, 19 nt, Homo sapiens
  misc_RNA (1)...(19): siRNA sense strand
ugaaauacugucucccuuu

SEQ ID NO: 356012 - RNA, 19 nt, Homo sapiens
  misc_RNA (1)...(19): siRNA sense strand
gagaauaacaaaugcuaag

SEQ ID NO: 356013 - RNA, 19 nt, Homo sapiens
  misc_RNA (1)...(19): siRNA sense strand
caucaucagagaccaaauu

SEQ ID NO: 356014 - RNA, 19 nt, Homo sapiens
  misc_RNA (1)...(19): siRNA sense strand
cugacugguuuaccucuua

SEQ ID NO: 356015 - RNA, 19 nt, Homo sapiens
  misc_RNA (1)...(19): siRNA sense strand
gaagcauggcacugucuaa

SEQ ID NO: 356016 - RNA, 19 nt, Homo sapiens
  misc_RNA (1)...(19): siRNA sense strand
gcccaggucggguauauga

SEQ ID NO: 356017 - RNA, 19 nt, Homo sapiens
  misc_RNA (1)...(19): siRNA sense strand
ucacaauggacagaaguua

SEQ ID NO: 356018 - RNA, 19 nt, Homo sapiens
  misc_RNA (1)...(19): siRNA sense strand
cacauucucuacaacauca

SEQ ID NO: 356019 - RNA, 19 nt, Homo sapiens
  misc_RNA (1)...(19): siRNA sense strand
cccacuauuucuucacaua

SEQ ID NO: 356020 - RNA, 19 nt, Homo sapiens
  misc_RNA (1)...(19): siRNA sense strand
cuucauagauacuuacucu

SEQ ID NO: 356021 - RNA, 19 nt, Homo sapiens
  misc_RNA (1)...(19): siRNA sense strand
gaccaaauggcucgaaauc

SEQ ID NO: 356022 - RNA, 19 nt, Homo sapiens
  misc_RNA (1)...(19): siRNA sense strand
agagacagggacugaaaua

SEQ ID NO: 356023 - RNA, 19 nt, Homo sapiens
  misc_RNA (1)...(19): siRNA sense strand
agaccucgaugcuguggaa

SEQ ID NO: 356024 - RNA, 19 nt, Homo sapiens
  misc_RNA (1)...(19): siRNA sense strand
ggcacugucuaaucacuau

SEQ ID NO: 356025 - RNA, 19 nt, Homo sapiens
  misc_RNA (1)...(19): siRNA sense strand
gauacuuacucugauguag

SEQ ID NO: 356026 - RNA, 19 nt, Homo sapiens
  misc_RNA (1)...(19): siRNA sense strand
caacauucagggugucuau

SEQ ID NO: 356027 - RNA, 19 nt, Homo sapiens
  misc_RNA (1)...(19): siRNA sense strand
ugguuuaccucuuauguca

SEQ ID NO: 356028 - RNA, 19 nt, Homo sapiens
  misc_RNA (1)...(19): siRNA sense strand
cuaccaauguccagaccaa

SEQ ID NO: 356029 - RNA, 19 nt, Homo sapiens
  misc_RNA (1)...(19): siRNA sense strand
ucacuaucguucugaagau

SEQ ID NO: 356030 - RNA, 19 nt, Homo sapiens
  misc_RNA (1)...(19): siRNA sense strand
gaagagaaaacacagaaga

SEQ ID NO: 356031 - RNA, 19 nt, Homo sapiens
  misc_RNA (1)...(19): siRNA sense strand
gaccaaauuuucagauaug

SEQ ID NO: 356032 - RNA, 19 nt, Homo sapiens
  misc_RNA (1)...(19): siRNA sense strand
ggaagcauggcacugucua

SEQ ID NO: 356033 - RNA, 19 nt, Homo sapiens
  misc_RNA (1)...(19): siRNA sense strand
agagggugcucgagaggaa

SEQ ID NO: 356034 - RNA, 19 nt, Homo sapiens
  misc_RNA (1)...(19): siRNA sense strand
cacagaagaaucaguguug

SEQ ID NO: 356035 - RNA, 19 nt, Homo sapiens
  misc_RNA (1)...(19): siRNA sense strand
uuucagauauguucacgau

SEQ ID NO: 356036 - RNA, 19 nt, Homo sapiens
  misc_RNA (1)...(19): siRNA sense strand
cagaccaaauggcucgaaa

SEQ ID NO: 356037 - RNA, 19 nt, Homo sapiens
  misc_RNA (1)...(19): siRNA sense strand
guacauagcaguggaagcu

SEQ ID NO: 356038 - RNA, 19 nt, Homo sapiens
  misc_RNA (1)...(19): siRNA sense strand
cauagauacuuacucugau

SEQ ID NO: 356039 - RNA, 19 nt, Homo sapiens
  misc_RNA (1)...(19): siRNA sense strand
gaaucaguguuggaaaucu

SEQ ID NO: 356040 - RNA, 19 nt, Homo sapiens
  misc_RNA (1)...(19): siRNA sense strand
ggccugggaugaucucaag

SEQ ID NO: 356041 - RNA, 19 nt, Homo sapiens
  misc_RNA (1)...(19): siRNA sense strand
aaagaugcacuuccugaga

SEQ ID NO: 356042 - RNA, 19 nt, Homo sapiens
  misc_RNA (1)...(19): siRNA sense strand
cgaaauccagcugcuauug

SEQ ID NO: 356043 - RNA, 19 nt, Homo sapiens
  misc_RNA (1)...(19): siRNA sense strand
gauacauggaaggauauua

SEQ ID NO: 356044 - RNA, 19 nt, Homo sapiens
  misc_RNA (1)...(19): siRNA sense strand
acucugauguaggaagaua

SEQ ID NO: 356045 - RNA, 19 nt, Homo sapiens
  misc_RNA (1)...(19): siRNA sense strand
cacaagcuguaccacauuc

SEQ ID NO: 356046 - RNA, 19 nt, Homo sapiens
  misc_RNA (1)...(19): siRNA sense strand
cagcccaggucggguauau

SEQ ID NO: 356047 - RNA, 19 nt, Homo sapiens
  misc_RNA (1)...(19): siRNA sense strand
ucacauaccgaaucaggau

SEQ ID NO: 356048 - RNA, 19 nt, Homo sapiens
  misc_RNA (1)...(19): siRNA sense strand
gauccagaauguguagcaa

SEQ ID NO: 356049 - RNA, 19 nt, Homo sapiens
  misc_RNA (1)...(19): siRNA sense strand
uugcauacauacugguuug

SEQ ID NO: 356050 - RNA, 19 nt, Homo sapiens
  misc_RNA (1)...(19): siRNA sense strand
gauaucugaggaagagaaa

SEQ ID NO: 356051 - RNA, 19 nt, Homo sapiens
  misc_RNA (1)...(19): siRNA sense strand
guucauaccgaauucacaa

SEQ ID NO: 356052 - RNA, 19 nt, Homo sapiens
  misc_RNA (1)...(19): siRNA sense strand
ggaagauacauugaccauu

SEQ ID NO: 356053 - RNA, 19 nt, Homo sapiens
  misc_RNA (1)...(19): siRNA sense strand
gaccauuaugcugcuauua

SEQ ID NO: 356054 - RNA, 19 nt, Homo sapiens
  misc_RNA (1)...(19): siRNA sense strand
ccaauguccagaccaaaug

SEQ ID NO: 356055 - RNA, 19 nt, Homo sapiens
  misc_RNA (1)...(19): siRNA sense strand
guucugaagauuuguuaga

SEQ ID NO: 356056 - RNA, 19 nt, Homo sapiens
  misc_RNA (1)...(19): siRNA sense strand
gauuaucgauguucauacc

SEQ ID NO: 356057 - RNA, 19 nt, Homo sapiens
  misc_RNA (1)...(19): siRNA sense strand
auagauacuuacucugaug

SEQ ID NO: 356058 - RNA, 19 nt, Homo sapiens
  misc_RNA (1)...(19): siRNA sense strand
caacaucaggauacaugga

SEQ ID NO: 356059 - RNA, 19 nt, Homo sapiens
  misc_RNA (1)...(19): siRNA sense strand
ugacugguuuaccucuuau

SEQ ID NO: 356060 - RNA, 19 nt, Homo sapiens
  misc_RNA (1)...(19): siRNA sense strand
cagcagagacagggacuga

SEQ ID NO: 356061 - RNA, 19 nt, Homo sapiens
  misc_RNA (1)...(19): siRNA sense strand
uaaucacuaucguucugaa

SEQ ID NO: 356062 - RNA, 19 nt, Homo sapiens
  misc_RNA (1)...(19): siRNA sense strand
ucuaaucacuaucguucug

SEQ ID NO: 356063 - RNA, 19 nt, Homo sapiens
  misc_RNA (1)...(19): siRNA sense strand
ugaccauuaugcugcuauu

SEQ ID NO: 356064 - RNA, 19 nt, Homo sapiens
  misc_RNA (1)...(19): siRNA sense strand
uuacucugauguaggaaga

SEQ ID NO: 356065 - RNA, 19 nt, Homo sapiens
  misc_RNA (1)...(19): siRNA sense strand
ggacuaucgggaucuaauc

SEQ ID NO: 356066 - RNA, 19 nt, Homo sapiens
  misc_RNA (1)...(19): siRNA sense strand
cauacauacugguuugagu

SEQ ID NO: 356067 - RNA, 19 nt, Homo sapiens
  misc_RNA (1)...(19): siRNA sense strand
cagaauguguagcaacaac

SEQ ID NO: 356068 - RNA, 19 nt, Homo sapiens
  misc_RNA (1)...(19): siRNA sense strand
ccauauggcauguccaaca

SEQ ID NO: 356069 - RNA, 19 nt, Homo sapiens
  misc_RNA (1)...(19): siRNA sense strand
gaauguguagcaacaacug

SEQ ID NO: 356070 - RNA, 19 nt, Homo sapiens
  misc_RNA (1)...(19): siRNA sense strand
uacuuacucugauguagga

SEQ ID NO: 356071 - RNA, 19 nt, Homo sapiens
  misc_RNA (1)...(19): siRNA sense strand
agaagaaucaguguuggaa

SEQ ID NO: 356072 - RNA, 19 nt, Homo sapiens
  misc_RNA (1)...(19): siRNA sense strand
caucagagaccaaauuuuc

SEQ ID NO: 356073 - RNA, 19 nt, Homo sapiens
  misc_RNA (1)...(19): siRNA sense strand
accauuaugcugcuauuaa

SEQ ID NO: 356074 - RNA, 19 nt, Homo sapiens
  misc_RNA (1)...(19): siRNA sense strand
guggagaagacauugcaaa

SEQ ID NO: 356075 - RNA, 19 nt, Homo sapiens
  misc_RNA (1)...(19): siRNA sense strand
gauccgcuguggagaagac

SEQ ID NO: 356076 - RNA, 19 nt, Homo sapiens
  misc_RNA (1)...(19): siRNA sense strand
cuaucguucugaagauuug

SEQ ID NO: 356077 - RNA, 19 nt, Homo sapiens
  misc_RNA (1)...(19): siRNA sense strand
guaccacauucucuacaac

SEQ ID NO: 356078 - RNA, 19 nt, Homo sapiens
  misc_RNA (1)...(19): siRNA sense strand
gaaugaaacuguaagagau

SEQ ID NO: 356079 - RNA, 19 nt, Homo sapiens
  misc_RNA (1)...(19): siRNA sense strand
gaacaaccaacauaaauuc

SEQ ID NO: 356080 - RNA, 19 nt, Homo sapiens
  misc_RNA (1)...(19): siRNA sense strand
gaaccacgauuugcuaugu

SEQ ID NO: 356081 - RNA, 19 nt, Homo sapiens
  misc_RNA (1)...(19): siRNA sense strand
ggaaugaaacuguaagaga

SEQ ID NO: 356082 - RNA, 19 nt, Homo sapiens
  misc_RNA (1)...(19): siRNA sense strand
ugagggaucuuccuucuug

SEQ ID NO: 356083 - RNA, 19 nt, Homo sapiens
  misc_RNA (1)...(19): siRNA sense strand
gaauaccucuuugguguug

SEQ ID NO: 356084 - RNA, 19 nt, Homo sapiens
  misc_RNA (1)...(19): siRNA sense strand
gcagauugaugguauugga

SEQ ID NO: 356085 - RNA, 19 nt, Homo sapiens
  misc_RNA (1)...(19): siRNA sense strand
gagcauacaagugcaguua

SEQ ID NO: 356086 - RNA, 19 nt, Homo sapiens
  misc_RNA (1)...(19): siRNA sense strand
ggaagccgguacaguguga

SEQ ID NO: 356087 - RNA, 19 nt, Homo sapiens
  misc_RNA (1)...(19): siRNA sense strand
ggucacugauggugcauuu

SEQ ID NO: 356088 - RNA, 19 nt, Homo sapiens
  misc_RNA (1)...(19): siRNA sense strand
gaccagguuuggaagaauu

SEQ ID NO: 356089 - RNA, 19 nt, Homo sapiens
  misc_RNA (1)...(19): siRNA sense strand
caagugcaguuaacaagau

SEQ ID NO: 356090 - RNA, 19 nt, Homo sapiens
  misc_RNA (1)...(19): siRNA sense strand
guucaucuauguugcaaau

SEQ ID NO: 356091 - RNA, 19 nt, Homo sapiens
  misc_RNA (1)...(19): siRNA sense strand
ggucuucuguugacuggaa

SEQ ID NO: 356092 - RNA, 19 nt, Homo sapiens
  misc_RNA (1)...(19): siRNA sense strand
cgauugauguacagcuaua

SEQ ID NO: 356093 - RNA, 19 nt, Homo sapiens
  misc_RNA (1)...(19): siRNA sense strand
guauggagcugucacuucu

SEQ ID NO: 356094 - RNA, 19 nt, Homo sapiens
  misc_RNA (1)...(19): siRNA sense strand
gauguucagucgacacaau

SEQ ID NO: 356095 - RNA, 19 nt, Homo sapiens
  misc_RNA (1)...(19): siRNA sense strand
uguaagagauccaauucug

SEQ ID NO: 356096 - RNA, 19 nt, Homo sapiens
  misc_RNA (1)...(19): siRNA sense strand
cuacauggcagucuauaga

SEQ ID NO: 356097 - RNA, 19 nt, Homo sapiens
  misc_RNA (1)...(19): siRNA sense strand
gguauuggaucaggaguca

SEQ ID NO: 356098 - RNA, 19 nt, Homo sapiens
  misc_RNA (1)...(19): siRNA sense strand
caaccaacauaaauucaac

SEQ ID NO: 356099 - RNA, 19 nt, Homo sapiens
  misc_RNA (1)...(19): siRNA sense strand
caaaugcugaagcucauaa

SEQ ID NO: 356100 - RNA, 19 nt, Homo sapiens
  misc_RNA (1)...(19): siRNA sense strand
gcauacaagugcaguuaac

SEQ ID NO: 356101 - RNA, 19 nt, Homo sapiens
  misc_RNA (1)...(19): siRNA sense strand
agaaugugcuguccauaca

SEQ ID NO: 356102 - RNA, 19 nt, Homo sapiens
  misc_RNA (1)...(19): siRNA sense strand
gccgauugauguacagcua

SEQ ID NO: 356103 - RNA, 19 nt, Homo sapiens
  misc_RNA (1)...(19): siRNA sense strand
agaggcagauugaugguau

SEQ ID NO: 356104 - RNA, 19 nt, Homo sapiens
  misc_RNA (1)...(19): siRNA sense strand
cagaaugaaccacgauuug

SEQ ID NO: 356105 - RNA, 19 nt, Homo sapiens
  misc_RNA (1)...(19): siRNA sense strand
ggaccagguuuggaagaau

SEQ ID NO: 356106 - RNA, 19 nt, Homo sapiens
  misc_RNA (1)...(19): siRNA sense strand
gaucaggagucaauuuuca

SEQ ID NO: 356107 - RNA, 19 nt, Homo sapiens
  misc_RNA (1)...(19): siRNA sense strand
guguugagcuugaugucuu

SEQ ID NO: 356108 - RNA, 19 nt, Homo sapiens
  misc_RNA (1)...(19): siRNA sense strand
agaauugaauaccucuuug

SEQ ID NO: 356109 - RNA, 19 nt, Homo sapiens
  misc_RNA (1)...(19): siRNA sense strand
cuugaugucuucagaggaa

SEQ ID NO: 356110 - RNA, 19 nt, Homo sapiens
  misc_RNA (1)...(19): siRNA sense strand
gaucuuccuucuuggucuu

SEQ ID NO: 356111 - RNA, 19 nt, Homo sapiens
  misc_RNA (1)...(19): siRNA sense strand
aaaagugugugaaguugua

SEQ ID NO: 356112 - RNA, 19 nt, Homo sapiens
  misc_RNA (1)...(19): siRNA sense strand
ccaauucuguggagauacu

SEQ ID NO: 356113 - RNA, 19 nt, Homo sapiens
  misc_RNA (1)...(19): siRNA sense strand
gcaaaugcugaagcucaua

SEQ ID NO: 356114 - RNA, 19 nt, Homo sapiens
  misc_RNA (1)...(19): siRNA sense strand
ucaacuaccagaaaggaaa

SEQ ID NO: 356115 - RNA, 19 nt, Homo sapiens
  misc_RNA (1)...(19): siRNA sense strand
uauagaaugugcuguccau

SEQ ID NO: 356116 - RNA, 19 nt, Homo sapiens
  misc_RNA (1)...(19): siRNA sense strand
ucagaaugaaccacgauuu

SEQ ID NO: 356117 - RNA, 19 nt, Homo sapiens
  misc_RNA (1)...(19): siRNA sense strand
gaggcagauugaugguauu

SEQ ID NO: 356118 - RNA, 19 nt, Homo sapiens
  misc_RNA (1)...(19): siRNA sense strand
guaagagauccaauucugu

SEQ ID NO: 356119 - RNA, 19 nt, Homo sapiens
  misc_RNA (1)...(19): siRNA sense strand
caacaaggaagccgguaca

SEQ ID NO: 356120 - RNA, 19 nt, Homo sapiens
  misc_RNA (1)...(19): siRNA sense strand
ugggaaguacaaaucauua

SEQ ID NO: 356121 - RNA, 19 nt, Homo sapiens
  misc_RNA (1)...(19): siRNA sense strand
gcaagggaagagcauacaa

SEQ ID NO: 356122 - RNA, 19 nt, Homo sapiens
  misc_RNA (1)...(19): siRNA sense strand
gggaaguacaaaucauuau

SEQ ID NO: 356123 - RNA, 19 nt, Homo sapiens
  misc_RNA (1)...(19): siRNA sense strand
guugagggaucuuccuucu

SEQ ID NO: 356124 - RNA, 19 nt, Homo sapiens
  misc_RNA (1)...(19): siRNA sense strand
gaggaacuuugcccaacag

SEQ ID NO: 356125 - RNA, 19 nt, Homo sapiens
  misc_RNA (1)...(19): siRNA sense strand
ugagcuugaugucuucaga

SEQ ID NO: 356126 - RNA, 19 nt, Homo sapiens
  misc_RNA (1)...(19): siRNA sense strand
uacacucccugaucauuca

SEQ ID NO: 356127 - RNA, 19 nt, Homo sapiens
  misc_RNA (1)...(19): siRNA sense strand
cagaaaggaaagagauaga

SEQ ID NO: 356128 - RNA, 19 nt, Homo sapiens
  misc_RNA (1)...(19): siRNA sense strand
gaaugaaccacgauuugcu

SEQ ID NO: 356129 - RNA, 19 nt, Homo sapiens
  misc_RNA (1)...(19): siRNA sense strand
auggagcugucacuucuuu

SEQ ID NO: 356130 - RNA, 19 nt, Homo sapiens
  misc_RNA (1)...(19): siRNA sense strand
gaauugaauaccucuuugg

SEQ ID NO: 356131 - RNA, 19 nt, Homo sapiens
  misc_RNA (1)...(19): siRNA sense strand
ccucuuugguguugagcuu

SEQ ID NO: 356132 - RNA, 19 nt, Homo sapiens
  misc_RNA (1)...(19): siRNA sense strand
caagggaagagcauacaag

SEQ ID NO: 356133 - RNA, 19 nt, Homo sapiens
  misc_RNA (1)...(19): siRNA sense strand
agaggaacuuugcccaaca

SEQ ID NO: 356134 - RNA, 19 nt, Homo sapiens
  misc_RNA (1)...(19): siRNA sense strand
gaaacuguaagagauccaa

SEQ ID NO: 356135 - RNA, 19 nt, Homo sapiens
  misc_RNA (1)...(19): siRNA sense strand
ucaucuauguugcaaaugc

SEQ ID NO: 356136 - RNA, 19 nt, Homo sapiens
  misc_RNA (1)...(19): siRNA sense strand
gagcaagggaagagcauac

SEQ ID NO: 356137 - RNA, 19 nt, Homo sapiens
  misc_RNA (1)...(19): siRNA sense strand
cucaugaucugugucaguu

SEQ ID NO: 356138 - RNA, 19 nt, Homo sapiens
  misc_RNA (1)...(19): siRNA sense strand
aaauccagccguccuaugu

SEQ ID NO: 356139 - RNA, 19 nt, Homo sapiens
  misc_RNA (1)...(19): siRNA sense strand
acauggcagucuauagaau

SEQ ID NO: 356140 - RNA, 19 nt, Homo sapiens
  misc_RNA (1)...(19): siRNA sense strand
gugauuccacagauucaaa

SEQ ID NO: 356141 - RNA, 19 nt, Homo sapiens
  misc_RNA (1)...(19): siRNA sense strand
accacgauuugcuauguuu

SEQ ID NO: 356142 - RNA, 19 nt, Homo sapiens
  misc_RNA (1)...(19): siRNA sense strand
aaugaaccacgauuugcua

SEQ ID NO: 356143 - RNA, 19 nt, Homo sapiens
  misc_RNA (1)...(19): siRNA sense strand
ggcagucagugagcaagga

SEQ ID NO: 356144 - RNA, 19 nt, Homo sapiens
  misc_RNA (1)...(19): siRNA sense strand
gguuuggaagaauugaaua

SEQ ID NO: 356145 - RNA, 19 nt, Homo sapiens
  misc_RNA (1)...(19): siRNA sense strand
uggaccagguuuggaagaa

SEQ ID NO: 356146 - RNA, 19 nt, Homo sapiens
  misc_RNA (1)...(19): siRNA sense strand
acaagugcaguuaacaaga

SEQ ID NO: 356147 - RNA, 19 nt, Homo sapiens
  misc_RNA (1)...(19): siRNA sense strand
ccagaaaggaaagagauag

SEQ ID NO: 356148 - RNA, 19 nt, Homo sapiens
  misc_RNA (1)...(19): siRNA sense strand
acagcugguuugccucaga

SEQ ID NO: 356149 - RNA, 19 nt, Homo sapiens
  misc_RNA (1)...(19): siRNA sense strand
cauggcagucuauagaaug

SEQ ID NO: 356150 - RNA, 19 nt, Homo sapiens
  misc_RNA (1)...(19): siRNA sense strand
guugggaaguacaaaucau

SEQ ID NO: 356151 - RNA, 19 nt, Homo sapiens
  misc_RNA (1)...(19): siRNA sense strand
gccuauaucugaggucacu

SEQ ID NO: 356152 - RNA, 19 nt, Homo sapiens
  misc_RNA (1)...(19): siRNA sense strand
uagaaugugcuguccauac

SEQ ID NO: 356153 - RNA, 19 nt, Homo sapiens
  misc_RNA (1)...(19): siRNA sense strand
ugaauaccucuuugguguu

SEQ ID NO: 356154 - RNA, 19 nt, Homo sapiens
  misc_RNA (1)...(19): siRNA sense strand
auacaagugcaguuaacaa

SEQ ID NO: 356155 - RNA, 19 nt, Homo sapiens
  misc_RNA (1)...(19): siRNA sense strand
caacuaccagaaaggaaag

SEQ ID NO: 356156 - RNA, 19 nt, Homo sapiens
  misc_RNA (1)...(19): siRNA sense strand
gaaugaaacuguaagagau

SEQ ID NO: 356157 - RNA, 19 nt, Homo sapiens
  misc_RNA (1)...(19): siRNA sense strand
gaacaaccaacauaaauuc

SEQ ID NO: 356158 - RNA, 19 nt, Homo sapiens
  misc_RNA (1)...(19): siRNA sense strand
gaaccacgauuugcuaugu

SEQ ID NO: 356159 - RNA, 19 nt, Homo sapiens
  misc_RNA (1)...(19): siRNA sense strand
ggaaugaaacuguaagaga

SEQ ID NO: 356160 - RNA, 19 nt, Homo sapiens
  misc_RNA (1)...(19): siRNA sense strand
ugagggaucuuccuucuug

SEQ ID NO: 356161 - RNA, 19 nt, Homo sapiens
  misc_RNA (1)...(19): siRNA sense strand
gaauaccucuuugguguug

SEQ ID NO: 356162 - RNA, 19 nt, Homo sapiens
  misc_RNA (1)...(19): siRNA sense strand
gcagauugaugguauugga

SEQ ID NO: 356163 - RNA, 19 nt, Homo sapiens
  misc_RNA (1)...(19): siRNA sense strand
gagcauacaagugcaguua

SEQ ID NO: 356164 - RNA, 19 nt, Homo sapiens
  misc_RNA (1)...(19): siRNA sense strand
ggaagccgguacaguguga

SEQ ID NO: 356165 - RNA, 19 nt, Homo sapiens
  misc_RNA (1)...(19): siRNA sense strand
ggucacugauggugcauuu

SEQ ID NO: 356166 - RNA, 19 nt, Homo sapiens
  misc_RNA (1)...(19): siRNA sense strand
gaccagguuuggaagaauu

SEQ ID NO: 356167 - RNA, 19 nt, Homo sapiens
  misc_RNA (1)...(19): siRNA sense strand
caagugcaguuaacaagau

SEQ ID NO: 356168 - RNA, 19 nt, Homo sapiens
  misc_RNA (1)...(19): siRNA sense strand
guucaucuauguugcaaau

SEQ ID NO: 356169 - RNA, 19 nt, Homo sapiens
  misc_RNA (1)...(19): siRNA sense strand
ggucuucuguugacuggaa

SEQ ID NO: 356170 - RNA, 19 nt, Homo sapiens
  misc_RNA (1)...(19): siRNA sense strand
cgauugauguacagcuaua

SEQ ID NO: 356171 - RNA, 19 nt, Homo sapiens
  misc_RNA (1)...(19): siRNA sense strand
guauggagcugucacuucu

SEQ ID NO: 356172 - RNA, 19 nt, Homo sapiens
  misc_RNA (1)...(19): siRNA sense strand
gauguucagucgacacaau

SEQ ID NO: 356173 - RNA, 19 nt, Homo sapiens
  misc_RNA (1)...(19): siRNA sense strand
uguaagagauccaauucug

SEQ ID NO: 356174 - RNA, 19 nt, Homo sapiens
  misc_RNA (1)...(19): siRNA sense strand
cuacauggcagucuauaga

SEQ ID NO: 356175 - RNA, 19 nt, Homo sapiens
  misc_RNA (1)...(19): siRNA sense strand
gguauuggaucaggaguca

SEQ ID NO: 356176 - RNA, 19 nt, Homo sapiens
  misc_RNA (1)...(19): siRNA sense strand
caaccaacauaaauucaac

SEQ ID NO: 356177 - RNA, 19 nt, Homo sapiens
  misc_RNA (1)...(19): siRNA sense strand
caaaugcugaagcucauaa

SEQ ID NO: 356178 - RNA, 19 nt, Homo sapiens
  misc_RNA (1)...(19): siRNA sense strand
gcauacaagugcaguuaac

SEQ ID NO: 356179 - RNA, 19 nt, Homo sapiens
  misc_RNA (1)...(19): siRNA sense strand
agaaugugcuguccauaca

SEQ ID NO: 356180 - RNA, 19 nt, Homo sapiens
  misc_RNA (1)...(19): siRNA sense strand
gccgauugauguacagcua

SEQ ID NO: 356181 - RNA, 19 nt, Homo sapiens
  misc_RNA (1)...(19): siRNA sense strand
agaggcagauugaugguau

SEQ ID NO: 356182 - RNA, 19 nt, Homo sapiens
  misc_RNA (1)...(19): siRNA sense strand
cagaaugaaccacgauuug

SEQ ID NO: 356183 - RNA, 19 nt, Homo sapiens
  misc_RNA (1)...(19): siRNA sense strand
ggaccagguuuggaagaau

SEQ ID NO: 356184 - RNA, 19 nt, Homo sapiens
  misc_RNA (1)...(19): siRNA sense strand
gaucaggagucaauuuuca

SEQ ID NO: 356185 - RNA, 19 nt, Homo sapiens
  misc_RNA (1)...(19): siRNA sense strand
guguugagcuugaugucuu

SEQ ID NO: 356186 - RNA, 19 nt, Homo sapiens
  misc_RNA (1)...(19): siRNA sense strand
agaauugaauaccucuuug

SEQ ID NO: 356187 - RNA, 19 nt, Homo sapiens
  misc_RNA (1)...(19): siRNA sense strand
cuugaugucuucagaggaa

SEQ ID NO: 356188 - RNA, 19 nt, Homo sapiens
  misc_RNA (1)...(19): siRNA sense strand
gaucuuccuucuuggucuu

SEQ ID NO: 356189 - RNA, 19 nt, Homo sapiens
  misc_RNA (1)...(19): siRNA sense strand
aaaagugugugaaguugua

SEQ ID NO: 356190 - RNA, 19 nt, Homo sapiens
  misc_RNA (1)...(19): siRNA sense strand
ccaauucuguggagauacu

SEQ ID NO: 356191 - RNA, 19 nt, Homo sapiens
  misc_RNA (1)...(19): siRNA sense strand
gcaaaugcugaagcucaua

SEQ ID NO: 356192 - RNA, 19 nt, Homo sapiens
  misc_RNA (1)...(19): siRNA sense strand
ucaacuaccagaaaggaaa

SEQ ID NO: 356193 - RNA, 19 nt, Homo sapiens
  misc_RNA (1)...(19): siRNA sense strand
uauagaaugugcuguccau

SEQ ID NO: 356194 - RNA, 19 nt, Homo sapiens
  misc_RNA (1)...(19): siRNA sense strand
ucagaaugaaccacgauuu

SEQ ID NO: 356195 - RNA, 19 nt, Homo sapiens
  misc_RNA (1)...(19): siRNA sense strand
gaggcagauugaugguauu

SEQ ID NO: 356196 - RNA, 19 nt, Homo sapiens
  misc_RNA (1)...(19): siRNA sense strand
guaagagauccaauucugu

SEQ ID NO: 356197 - RNA, 19 nt, Homo sapiens
  misc_RNA (1)...(19): siRNA sense strand
caacaaggaagccgguaca

SEQ ID NO: 356198 - RNA, 19 nt, Homo sapiens
  misc_RNA (1)...(19): siRNA sense strand
ugggaaguacaaaucauua

SEQ ID NO: 356199 - RNA, 19 nt, Homo sapiens
  misc_RNA (1)...(19): siRNA sense strand
gcaagggaagagcauacaa

SEQ ID NO: 356200 - RNA, 19 nt, Homo sapiens
  misc_RNA (1)...(19): siRNA sense strand
gggaaguacaaaucauuau

SEQ ID NO: 356201 - RNA, 19 nt, Homo sapiens
  misc_RNA (1)...(19): siRNA sense strand
guugagggaucuuccuucu

SEQ ID NO: 356202 - RNA, 19 nt, Homo sapiens
  misc_RNA (1)...(19): siRNA sense strand
gaggaacuuugcccaacag

SEQ ID NO: 356203 - RNA, 19 nt, Homo sapiens
  misc_RNA (1)...(19): siRNA sense strand
ugagcuugaugucuucaga

SEQ ID NO: 356204 - RNA, 19 nt, Homo sapiens
  misc_RNA (1)...(19): siRNA sense strand
uacacucccugaucauuca

SEQ ID NO: 356205 - RNA, 19 nt, Homo sapiens
  misc_RNA (1)...(19): siRNA sense strand
cagaaaggaaagagauaga

SEQ ID NO: 356206 - RNA, 19 nt, Homo sapiens
  misc_RNA (1)...(19): siRNA sense strand
gaaugaaccacgauuugcu

SEQ ID NO: 356207 - RNA, 19 nt, Homo sapiens
  misc_RNA (1)...(19): siRNA sense strand
auggagcugucacuucuuu

SEQ ID NO: 356208 - RNA, 19 nt, Homo sapiens
  misc_RNA (1)...(19): siRNA sense strand
gaauugaauaccucuuugg

SEQ ID NO: 356209 - RNA, 19 nt, Homo sapiens
  misc_RNA (1)...(19): siRNA sense strand
ccucuuugguguugagcuu

SEQ ID NO: 356210 - RNA, 19 nt, Homo sapiens
  misc_RNA (1)...(19): siRNA sense strand
caagggaagagcauacaag

SEQ ID NO: 356211 - RNA, 19 nt, Homo sapiens
  misc_RNA (1)...(19): siRNA sense strand
agaggaacuuugcccaaca

SEQ ID NO: 356212 - RNA, 19 nt, Homo sapiens
  misc_RNA (1)...(19): siRNA sense strand
gaaacuguaagagauccaa

SEQ ID NO: 356213 - RNA, 19 nt, Homo sapiens
  misc_RNA (1)...(19): siRNA sense strand
ucaucuauguugcaaaugc

SEQ ID NO: 356214 - RNA, 19 nt, Homo sapiens
  misc_RNA (1)...(19): siRNA sense strand
gagcaagggaagagcauac

SEQ ID NO: 356215 - RNA, 19 nt, Homo sapiens
  misc_RNA (1)...(19): siRNA sense strand
cucaugaucugugucaguu

SEQ ID NO: 356216 - RNA, 19 nt, Homo sapiens
  misc_RNA (1)...(19): siRNA sense strand
aaauccagccguccuaugu

SEQ ID NO: 356217 - RNA, 19 nt, Homo sapiens
  misc_RNA (1)...(19): siRNA sense strand
acauggcagucuauagaau

SEQ ID NO: 356218 - RNA, 19 nt, Homo sapiens
  misc_RNA (1)...(19): siRNA sense strand
gugauuccacagauucaaa

SEQ ID NO: 356219 - RNA, 19 nt, Homo sapiens
  misc_RNA (1)...(19): siRNA sense strand
accacgauuugcuauguuu

SEQ ID NO: 356220 - RNA, 19 nt, Homo sapiens
  misc_RNA (1)...(19): siRNA sense strand
aaugaaccacgauuugcua

SEQ ID NO: 356221 - RNA, 19 nt, Homo sapiens
  misc_RNA (1)...(19): siRNA sense strand
ggcagucagugagcaagga

SEQ ID NO: 356222 - RNA, 19 nt, Homo sapiens
  misc_RNA (1)...(19): siRNA sense strand
gguuuggaagaauugaaua

SEQ ID NO: 356223 - RNA, 19 nt, Homo sapiens
  misc_RNA (1)...(19): siRNA sense strand
uggaccagguuuggaagaa

SEQ ID NO: 356224 - RNA, 19 nt, Homo sapiens
  misc_RNA (1)...(19): siRNA sense strand
acaagugcaguuaacaaga

SEQ ID NO: 356225 - RNA, 19 nt, Homo sapiens
  misc_RNA (1)...(19): siRNA sense strand
ccagaaaggaaagagauag

SEQ ID NO: 356226 - RNA, 19 nt, Homo sapiens
  misc_RNA (1)...(19): siRNA sense strand
acagcugguuugccucaga

SEQ ID NO: 356227 - RNA, 19 nt, Homo sapiens
  misc_RNA (1)...(19): siRNA sense strand
cauggcagucuauagaaug

SEQ ID NO: 356228 - RNA, 19 nt, Homo sapiens
  misc_RNA (1)...(19): siRNA sense strand
guugggaaguacaaaucau

SEQ ID NO: 356229 - RNA, 19 nt, Homo sapiens
  misc_RNA (1)...(19): siRNA sense strand
gccuauaucugaggucacu

SEQ ID NO: 356230 - RNA, 19 nt, Homo sapiens
  misc_RNA (1)...(19): siRNA sense strand
uagaaugugcuguccauac

SEQ ID NO: 356231 - RNA, 19 nt, Homo sapiens
  misc_RNA (1)...(19): siRNA sense strand
ugaauaccucuuugguguu

SEQ ID NO: 356232 - RNA, 19 nt, Homo sapiens
  misc_RNA (1)...(19): siRNA sense strand
auacaagugcaguuaacaa

SEQ ID NO: 356233 - RNA, 19 nt, Homo sapiens
  misc_RNA (1)...(19): siRNA sense strand
caacuaccagaaaggaaag

SEQ ID NO: 356234 - RNA, 19 nt, Homo sapiens
  misc_RNA (1)...(19): siRNA sense strand
gaaaggcugucauguauug

SEQ ID NO: 356235 - RNA, 19 nt, Homo sapiens
  misc_RNA (1)...(19): siRNA sense strand
ggaagaagauccuagaaga

SEQ ID NO: 356236 - RNA, 19 nt, Homo sapiens
  misc_RNA (1)...(19): siRNA sense strand
caacagacacuuaauagua

SEQ ID NO: 356237 - RNA, 19 nt, Homo sapiens
  misc_RNA (1)...(19): siRNA sense strand
cgaagugucucuguaauua

SEQ ID NO: 356238 - RNA, 19 nt, Homo sapiens
  misc_RNA (1)...(19): siRNA sense strand
gaauuucggugacagucua

SEQ ID NO: 356239 - RNA, 19 nt, Homo sapiens
  misc_RNA (1)...(19): siRNA sense strand
gaaauuauagccagaggaa

SEQ ID NO: 356240 - RNA, 19 nt, Homo sapiens
  misc_RNA (1)...(19): siRNA sense strand
gacauggacuuaaucaaug

SEQ ID NO: 356241 - RNA, 19 nt, Homo sapiens
  misc_RNA (1)...(19): siRNA sense strand
ccaguagacuuuaugaaga

SEQ ID NO: 356242 - RNA, 19 nt, Homo sapiens
  misc_RNA (1)...(19): siRNA sense strand
gaaagguucuacuuauagu

SEQ ID NO: 356243 - RNA, 19 nt, Homo sapiens
  misc_RNA (1)...(19): siRNA sense strand
uaaaguagaucgggagaug

SEQ ID NO: 356244 - RNA, 19 nt, Homo sapiens
  misc_RNA (1)...(19): siRNA sense strand
cgagaaggcuguggauuug

SEQ ID NO: 356245 - RNA, 19 nt, Homo sapiens
  misc_RNA (1)...(19): siRNA sense strand
cagagaauauguuauguuc

SEQ ID NO: 356246 - RNA, 19 nt, Homo sapiens
  misc_RNA (1)...(19): siRNA sense strand
gguaaaaccugaugacauu

SEQ ID NO: 356247 - RNA, 19 nt, Homo sapiens
  misc_RNA (1)...(19): siRNA sense strand
gagaauauguuauguucag

SEQ ID NO: 356248 - RNA, 19 nt, Homo sapiens
  misc_RNA (1)...(19): siRNA sense strand
ccuagaauguguagauauu

SEQ ID NO: 356249 - RNA, 19 nt, Homo sapiens
  misc_RNA (1)...(19): siRNA sense strand
guacgaagugucucuguaa

SEQ ID NO: 356250 - RNA, 19 nt, Homo sapiens
  misc_RNA (1)...(19): siRNA sense strand
gaaauagaagcacuagaga

SEQ ID NO: 356251 - RNA, 19 nt, Homo sapiens
  misc_RNA (1)...(19): siRNA sense strand
guaaagacugcauuaaaga

SEQ ID NO: 356252 - RNA, 19 nt, Homo sapiens
  misc_RNA (1)...(19): siRNA sense strand
gggagaugcugaaggaaau

SEQ ID NO: 356253 - RNA, 19 nt, Homo sapiens
  misc_RNA (1)...(19): siRNA sense strand
guaaagcaauacaaagagu

SEQ ID NO: 356254 - RNA, 19 nt, Homo sapiens
  misc_RNA (1)...(19): siRNA sense strand
gcauuccaguuguacagua

SEQ ID NO: 356255 - RNA, 19 nt, Homo sapiens
  misc_RNA (1)...(19): siRNA sense strand
agaccaauaucccaacaaa

SEQ ID NO: 356256 - RNA, 19 nt, Homo sapiens
  misc_RNA (1)...(19): siRNA sense strand
caaagccaguuguaaaaua

SEQ ID NO: 356257 - RNA, 19 nt, Homo sapiens
  misc_RNA (1)...(19): siRNA sense strand
gagcacaacuuggaagaag

SEQ ID NO: 356258 - RNA, 19 nt, Homo sapiens
  misc_RNA (1)...(19): siRNA sense strand
uguaaagacugcauuaaag

SEQ ID NO: 356259 - RNA, 19 nt, Homo sapiens
  misc_RNA (1)...(19): siRNA sense strand
gcuguggauuugauuauug

SEQ ID NO: 356260 - RNA, 19 nt, Homo sapiens
  misc_RNA (1)...(19): siRNA sense strand
aaaccaaguuauccaauca

SEQ ID NO: 356261 - RNA, 19 nt, Homo sapiens
  misc_RNA (1)...(19): siRNA sense strand
ggauaguuguaaagaagaa

SEQ ID NO: 356262 - RNA, 19 nt, Homo sapiens
  misc_RNA (1)...(19): siRNA sense strand
gaagguuccuguaaagacu

SEQ ID NO: 356263 - RNA, 19 nt, Homo sapiens
  misc_RNA (1)...(19): siRNA sense strand
guaauucaccugcaaaaua

SEQ ID NO: 356264 - RNA, 19 nt, Homo sapiens
  misc_RNA (1)...(19): siRNA sense strand
cuagagaccaguagacuuu

SEQ ID NO: 356265 - RNA, 19 nt, Homo sapiens
  misc_RNA (1)...(19): siRNA sense strand
gaagaagauccuagaagau

SEQ ID NO: 356266 - RNA, 19 nt, Homo sapiens
  misc_RNA (1)...(19): siRNA sense strand
caaaccaaguuauccaauc

SEQ ID NO: 356267 - RNA, 19 nt, Homo sapiens
  misc_RNA (1)...(19): siRNA sense strand
ucagugacauggacuuaau

SEQ ID NO: 356268 - RNA, 19 nt, Homo sapiens
  misc_RNA (1)...(19): siRNA sense strand
ugacauggacuuaaucaau

SEQ ID NO: 356269 - RNA, 19 nt, Homo sapiens
  misc_RNA (1)...(19): siRNA sense strand
gacauuggaagacuaguuu

SEQ ID NO: 356270 - RNA, 19 nt, Homo sapiens
  misc_RNA (1)...(19): siRNA sense strand
gugcaacagacacuuaaua

SEQ ID NO: 356271 - RNA, 19 nt, Homo sapiens
  misc_RNA (1)...(19): siRNA sense strand
guuguacaguaaagcaaua

SEQ ID NO: 356272 - RNA, 19 nt, Homo sapiens
  misc_RNA (1)...(19): siRNA sense strand
ccucaaagccaguuguaaa

SEQ ID NO: 356273 - RNA, 19 nt, Homo sapiens
  misc_RNA (1)...(19): siRNA sense strand
acuaaagacuguucagaug

SEQ ID NO: 356274 - RNA, 19 nt, Homo sapiens
  misc_RNA (1)...(19): siRNA sense strand
ggccuagaauguguagaua

SEQ ID NO: 356275 - RNA, 19 nt, Homo sapiens
  misc_RNA (1)...(19): siRNA sense strand
gaaaucagcagcccagacu

SEQ ID NO: 356276 - RNA, 19 nt, Homo sapiens
  misc_RNA (1)...(19): siRNA sense strand
uguauugggucaccgauug

SEQ ID NO: 356277 - RNA, 19 nt, Homo sapiens
  misc_RNA (1)...(19): siRNA sense strand
acaaagcccagaccaauau

SEQ ID NO: 356278 - RNA, 19 nt, Homo sapiens
  misc_RNA (1)...(19): siRNA sense strand
agaagauccuagaagauga

SEQ ID NO: 356279 - RNA, 19 nt, Homo sapiens
  misc_RNA (1)...(19): siRNA sense strand
caaaguggccucagugaac

SEQ ID NO: 356280 - RNA, 19 nt, Homo sapiens
  misc_RNA (1)...(19): siRNA sense strand
gagaugcugaaggaaauua

SEQ ID NO: 356281 - RNA, 19 nt, Homo sapiens
  misc_RNA (1)...(19): siRNA sense strand
ugaaauagaagcacuagag

SEQ ID NO: 356282 - RNA, 19 nt, Homo sapiens
  misc_RNA (1)...(19): siRNA sense strand
caaguuauccaaucaaggu

SEQ ID NO: 356283 - RNA, 19 nt, Homo sapiens
  misc_RNA (1)...(19): siRNA sense strand
ucaaccagagaauauguua

SEQ ID NO: 356284 - RNA, 19 nt, Homo sapiens
  misc_RNA (1)...(19): siRNA sense strand
caguaaagcaauacaaaga

SEQ ID NO: 356285 - RNA, 19 nt, Homo sapiens
  misc_RNA (1)...(19): siRNA sense strand
caguggcuauuccucauuu

SEQ ID NO: 356286 - RNA, 19 nt, Homo sapiens
  misc_RNA (1)...(19): siRNA sense strand
guucuacccuuucugucaa

SEQ ID NO: 356287 - RNA, 19 nt, Homo sapiens
  misc_RNA (1)...(19): siRNA sense strand
gcacaacuuggaagaagau

SEQ ID NO: 356288 - RNA, 19 nt, Homo sapiens
  misc_RNA (1)...(19): siRNA sense strand
gaagugucucuguaauuau

SEQ ID NO: 356289 - RNA, 19 nt, Homo sapiens
  misc_RNA (1)...(19): siRNA sense strand
auacaaagaguuaccgaaa

SEQ ID NO: 356290 - RNA, 19 nt, Homo sapiens
  misc_RNA (1)...(19): siRNA sense strand
cauguucauuccggacuua

SEQ ID NO: 356291 - RNA, 19 nt, Homo sapiens
  misc_RNA (1)...(19): siRNA sense strand
gaugcugaaggaaauuaua

SEQ ID NO: 356292 - RNA, 19 nt, Homo sapiens
  misc_RNA (1)...(19): siRNA sense strand
gaggagaauuucggugaca

SEQ ID NO: 356293 - RNA, 19 nt, Homo sapiens
  misc_RNA (1)...(19): siRNA sense strand
gcaacagacacuuaauagu

SEQ ID NO: 356294 - RNA, 19 nt, Homo sapiens
  misc_RNA (1)...(19): siRNA sense strand
aaacgaaauccuaaaguag

SEQ ID NO: 356295 - RNA, 19 nt, Homo sapiens
  misc_RNA (1)...(19): siRNA sense strand
uacaaagcccagaccaaua

SEQ ID NO: 356296 - RNA, 19 nt, Homo sapiens
  misc_RNA (1)...(19): siRNA sense strand
uuguacaacuugaaacuga

SEQ ID NO: 356297 - RNA, 19 nt, Homo sapiens
  misc_RNA (1)...(19): siRNA sense strand
uguacgaagugucucugua

SEQ ID NO: 356298 - RNA, 19 nt, Homo sapiens
  misc_RNA (1)...(19): siRNA sense strand
acgagaaggcuguggauuu

SEQ ID NO: 356299 - RNA, 19 nt, Homo sapiens
  misc_RNA (1)...(19): siRNA sense strand
cauuccaguuguacaguaa

SEQ ID NO: 356300 - RNA, 19 nt, Homo sapiens
  misc_RNA (1)...(19): siRNA sense strand
guacaacuugaaacugaaa

SEQ ID NO: 356301 - RNA, 19 nt, Homo sapiens
  misc_RNA (1)...(19): siRNA sense strand
gacaguggcuauuccucau

SEQ ID NO: 356302 - RNA, 19 nt, Homo sapiens
  misc_RNA (1)...(19): siRNA sense strand
ggauuugauuauuguacga

SEQ ID NO: 356303 - RNA, 19 nt, Homo sapiens
  misc_RNA (1)...(19): siRNA sense strand
ucggauaguuguaaagaag

SEQ ID NO: 356304 - RNA, 19 nt, Homo sapiens
  misc_RNA (1)...(19): siRNA sense strand
ccagagaauauguuauguu

SEQ ID NO: 356305 - RNA, 19 nt, Homo sapiens
  misc_RNA (1)...(19): siRNA sense strand
guacaguaaagcaauacaa

SEQ ID NO: 356306 - RNA, 19 nt, Homo sapiens
  misc_RNA (1)...(19): siRNA sense strand
gauccuagaagaugauaag

SEQ ID NO: 356307 - RNA, 19 nt, Homo sapiens
  misc_RNA (1)...(19): siRNA sense strand
gaagauccuagaagaugau

SEQ ID NO: 356308 - RNA, 19 nt, Homo sapiens
  misc_RNA (1)...(19): siRNA sense strand
ggacuuaaucaaugugucu

SEQ ID NO: 356309 - RNA, 19 nt, Homo sapiens
  misc_RNA (1)...(19): siRNA sense strand
aagacugcauuaaagacua

SEQ ID NO: 356310 - RNA, 19 nt, Homo sapiens
  misc_RNA (1)...(19): siRNA sense strand
caugugcaacagacacuua

SEQ ID NO: 356311 - RNA, 19 nt, Homo sapiens
  misc_RNA (1)...(19): siRNA sense strand
gaagacuaguuuccuacac

SEQ ID NO: 356312 - RNA, 19 nt, Homo sapiens
  misc_RNA (1)...(19): siRNA sense strand
agacugcauuaaagacuau

SEQ ID NO: 356313 - RNA, 19 nt, Homo sapiens
  misc_RNA (1)...(19): siRNA sense strand
cauuaaagacuaugaaagg

SEQ ID NO: 356314 - RNA, 19 nt, Homo sapiens
  misc_RNA (1)...(19): siRNA sense strand
agaaggcuguggauuugau

SEQ ID NO: 356315 - RNA, 19 nt, Homo sapiens
  misc_RNA (1)...(19): siRNA sense strand
aaagaacgaaagccucaaa

SEQ ID NO: 356316 - RNA, 19 nt, Homo sapiens
  misc_RNA (1)...(19): siRNA sense strand
aagaagauccuagaagaug

SEQ ID NO: 356317 - RNA, 19 nt, Homo sapiens
  misc_RNA (1)...(19): siRNA sense strand
ccucgacccucggauaguu

SEQ ID NO: 356318 - RNA, 19 nt, Homo sapiens
  misc_RNA (1)...(19): siRNA sense strand
gaagcacuagagaccagua

SEQ ID NO: 356319 - RNA, 19 nt, Homo sapiens
  misc_RNA (1)...(19): siRNA sense strand
caaggaaaaucaacaugug

SEQ ID NO: 356320 - RNA, 19 nt, Homo sapiens
  misc_RNA (1)...(19): siRNA sense strand
gcauuaaagacuaugaaag

SEQ ID NO: 356321 - RNA, 19 nt, Homo sapiens
  misc_RNA (1)...(19): siRNA sense strand
caaugaauucucugagguu

SEQ ID NO: 356322 - RNA, 19 nt, Homo sapiens
  misc_RNA (1)...(19): siRNA sense strand
aaaugggccuagaaugugu

SEQ ID NO: 356323 - RNA, 19 nt, Homo sapiens
  misc_RNA (1)...(19): siRNA sense strand
gcccuaggauuguacaacu

SEQ ID NO: 356324 - RNA, 19 nt, Homo sapiens
  misc_RNA (1)...(19): siRNA sense strand
gagguugccaagacauuga

SEQ ID NO: 356325 - RNA, 19 nt, Homo sapiens
  misc_RNA (1)...(19): siRNA sense strand
aauccugccugcuacaaau

SEQ ID NO: 356326 - RNA, 19 nt, Homo sapiens
  misc_RNA (1)...(19): siRNA sense strand
aacagacacuuaauaguac

SEQ ID NO: 356327 - RNA, 19 nt, Homo sapiens
  misc_RNA (1)...(19): siRNA sense strand
aaaguggccucagugaaca

SEQ ID NO: 356328 - RNA, 19 nt, Homo sapiens
  misc_RNA (1)...(19): siRNA sense strand
gaaagccucaaagccugua

SEQ ID NO: 356329 - RNA, 19 nt, Homo sapiens
  misc_RNA (1)...(19): siRNA sense strand
cuguaaagacugcauuaaa

SEQ ID NO: 356330 - RNA, 19 nt, Homo sapiens
  misc_RNA (1)...(19): siRNA sense strand
gaaggggacucagacaugu

SEQ ID NO: 356331 - RNA, 19 nt, Homo sapiens
  misc_RNA (1)...(19): siRNA sense strand
cagaauauaauuggcagaa

SEQ ID NO: 356332 - RNA, 19 nt, Homo sapiens
  misc_RNA (1)...(19): siRNA sense strand
ugaugacauuggaagacua

SEQ ID NO: 356333 - RNA, 19 nt, Homo sapiens
  misc_RNA (1)...(19): siRNA sense strand
ggcuguggauuugauuauu

SEQ ID NO: 356334 - RNA, 19 nt, Homo sapiens
  misc_RNA (1)...(19): siRNA sense strand
gaacccaccuuuaggauuu

SEQ ID NO: 356335 - RNA, 19 nt, Homo sapiens
  misc_RNA (1)...(19): siRNA sense strand
gaacaggaaggauucauua

SEQ ID NO: 356336 - RNA, 19 nt, Homo sapiens
  misc_RNA (1)...(19): siRNA sense strand
ggagagaugucuuggauga

SEQ ID NO: 356337 - RNA, 19 nt, Homo sapiens
  misc_RNA (1)...(19): siRNA sense strand
gaaaucaguucuugccaaa

SEQ ID NO: 356338 - RNA, 19 nt, Homo sapiens
  misc_RNA (1)...(19): siRNA sense strand
ggagugaacuacuuuaugu

SEQ ID NO: 356339 - RNA, 19 nt, Homo sapiens
  misc_RNA (1)...(19): siRNA sense strand
uaacaaaguucucacauag

SEQ ID NO: 356340 - RNA, 19 nt, Homo sapiens
  misc_RNA (1)...(19): siRNA sense strand
caaaggaaauagcaaaguu

SEQ ID NO: 356341 - RNA, 19 nt, Homo sapiens
  misc_RNA (1)...(19): siRNA sense strand
gagaaucuaucuugaugaa

SEQ ID NO: 356342 - RNA, 19 nt, Homo sapiens
  misc_RNA (1)...(19): siRNA sense strand
caggaaggauucauuaauu

SEQ ID NO: 356343 - RNA, 19 nt, Homo sapiens
  misc_RNA (1)...(19): siRNA sense strand
caagaacacuaaauuggaa

SEQ ID NO: 356344 - RNA, 19 nt, Homo sapiens
  misc_RNA (1)...(19): siRNA sense strand
caaaugcacugagagaauu

SEQ ID NO: 356345 - RNA, 19 nt, Homo sapiens
  misc_RNA (1)...(19): siRNA sense strand
ggcaggaccuugcgaauga

SEQ ID NO: 356346 - RNA, 19 nt, Homo sapiens
  misc_RNA (1)...(19): siRNA sense strand
gaaucuaucuugaugaaag

SEQ ID NO: 356347 - RNA, 19 nt, Homo sapiens
  misc_RNA (1)...(19): siRNA sense strand
guacugugcuacucuuuga

SEQ ID NO: 356348 - RNA, 19 nt, Homo sapiens
  misc_RNA (1)...(19): siRNA sense strand
gcaaggaaaucgaaagaac

SEQ ID NO: 356349 - RNA, 19 nt, Homo sapiens
  misc_RNA (1)...(19): siRNA sense strand
gcccucaugugaagaauaa

SEQ ID NO: 356350 - RNA, 19 nt, Homo sapiens
  misc_RNA (1)...(19): siRNA sense strand
gaaagaacaggaaggauuc

SEQ ID NO: 356351 - RNA, 19 nt, Homo sapiens
  misc_RNA (1)...(19): siRNA sense strand
uaacaccaaucaucguaaa

SEQ ID NO: 356352 - RNA, 19 nt, Homo sapiens
  misc_RNA (1)...(19): siRNA sense strand
uggaugaccuuguaacauu

SEQ ID NO: 356353 - RNA, 19 nt, Homo sapiens
  misc_RNA (1)...(19): siRNA sense strand
ccaaggaggcauugacaua

SEQ ID NO: 356354 - RNA, 19 nt, Homo sapiens
  misc_RNA (1)...(19): siRNA sense strand
gagcagagcaggagaaugg

SEQ ID NO: 356355 - RNA, 19 nt, Homo sapiens
  misc_RNA (1)...(19): siRNA sense strand
guacaagaacacuaaauug

SEQ ID NO: 356356 - RNA, 19 nt, Homo sapiens
  misc_RNA (1)...(19): siRNA sense strand
caacauuucuaacaccaau

SEQ ID NO: 356357 - RNA, 19 nt, Homo sapiens
  misc_RNA (1)...(19): siRNA sense strand
cgaaagaacaggaaggauu

SEQ ID NO: 356358 - RNA, 19 nt, Homo sapiens
  misc_RNA (1)...(19): siRNA sense strand
ggaaggauucauuaauuug

SEQ ID NO: 356359 - RNA, 19 nt, Homo sapiens
  misc_RNA (1)...(19): siRNA sense strand
aaacugagaaucuaucuug

SEQ ID NO: 356360 - RNA, 19 nt, Homo sapiens
  misc_RNA (1)...(19): siRNA sense strand
ggaaauagcaaaguuuauc

SEQ ID NO: 356361 - RNA, 19 nt, Homo sapiens
  misc_RNA (1)...(19): siRNA sense strand
caauaagaacccaccuuua

SEQ ID NO: 356362 - RNA, 19 nt, Homo sapiens
  misc_RNA (1)...(19): siRNA sense strand
aaggaggcauugacauaua

SEQ ID NO: 356363 - RNA, 19 nt, Homo sapiens
  misc_RNA (1)...(19): siRNA sense strand
acaaaguucucacauagau

SEQ ID NO: 356364 - RNA, 19 nt, Homo sapiens
  misc_RNA (1)...(19): siRNA sense strand
ggaugaccuuguaacauug

SEQ ID NO: 356365 - RNA, 19 nt, Homo sapiens
  misc_RNA (1)...(19): siRNA sense strand
ugucuuggaugaccuugua

SEQ ID NO: 356366 - RNA, 19 nt, Homo sapiens
  misc_RNA (1)...(19): siRNA sense strand
gcuaagcuuuaccaucuug

SEQ ID NO: 356367 - RNA, 19 nt, Homo sapiens
  misc_RNA (1)...(19): siRNA sense strand
ugaagagcguggagaguau

SEQ ID NO: 356368 - RNA, 19 nt, Homo sapiens
  misc_RNA (1)...(19): siRNA sense strand
aaucaguucuugccaaaug

SEQ ID NO: 356369 - RNA, 19 nt, Homo sapiens
  misc_RNA (1)...(19): siRNA sense strand
uagcaaaguuuaucuucug

SEQ ID NO: 356370 - RNA, 19 nt, Homo sapiens
  misc_RNA (1)...(19): siRNA sense strand
caaaguuuaucuucuguac

SEQ ID NO: 356371 - RNA, 19 nt, Homo sapiens
  misc_RNA (1)...(19): siRNA sense strand
gggcaucuuuaugacaaua

SEQ ID NO: 356372 - RNA, 19 nt, Homo sapiens
  misc_RNA (1)...(19): siRNA sense strand
uugcaacccugauuuaaug

SEQ ID NO: 356373 - RNA, 19 nt, Homo sapiens
  misc_RNA (1)...(19): siRNA sense strand
gcauugacauauaucaucu

SEQ ID NO: 356374 - RNA, 19 nt, Homo sapiens
  misc_RNA (1)...(19): siRNA sense strand
gaaaucgaaagaacaggaa

SEQ ID NO: 356375 - RNA, 19 nt, Homo sapiens
  misc_RNA (1)...(19): siRNA sense strand
gugcuacucuuugauucua

SEQ ID NO: 356376 - RNA, 19 nt, Homo sapiens
  misc_RNA (1)...(19): siRNA sense strand
acaauaagaacccaccuuu

SEQ ID NO: 356377 - RNA, 19 nt, Homo sapiens
  misc_RNA (1)...(19): siRNA sense strand
aauaagaacccaccuuuag

SEQ ID NO: 356378 - RNA, 19 nt, Homo sapiens
  misc_RNA (1)...(19): siRNA sense strand
aaggagagaugucuuggau

SEQ ID NO: 356379 - RNA, 19 nt, Homo sapiens
  misc_RNA (1)...(19): siRNA sense strand
uggcaaggguugugcaaau

SEQ ID NO: 356380 - RNA, 19 nt, Homo sapiens
  misc_RNA (1)...(19): siRNA sense strand
ccaaaugcacugagagaau

SEQ ID NO: 356381 - RNA, 19 nt, Homo sapiens
  misc_RNA (1)...(19): siRNA sense strand
cugagaaucuaucuugaug

SEQ ID NO: 356382 - RNA, 19 nt, Homo sapiens
  misc_RNA (1)...(19): siRNA sense strand
uaagaacccaccuuuagga

SEQ ID NO: 356383 - RNA, 19 nt, Homo sapiens
  misc_RNA (1)...(19): siRNA sense strand
ugaacuacuuuauguccaa

SEQ ID NO: 356384 - RNA, 19 nt, Homo sapiens
  misc_RNA (1)...(19): siRNA sense strand
gcaaaguuuaucuucugua

SEQ ID NO: 356385 - RNA, 19 nt, Homo sapiens
  misc_RNA (1)...(19): siRNA sense strand
gcaacaagaaggcuacagu

SEQ ID NO: 356386 - RNA, 19 nt, Homo sapiens
  misc_RNA (1)...(19): siRNA sense strand
uagggcaucuuuaugacaa

SEQ ID NO: 356387 - RNA, 19 nt, Homo sapiens
  misc_RNA (1)...(19): siRNA sense strand
gcuuuaccaucuuguccua

SEQ ID NO: 356388 - RNA, 19 nt, Homo sapiens
  misc_RNA (1)...(19): siRNA sense strand
gaaggauucauuaauuugg

SEQ ID NO: 356389 - RNA, 19 nt, Homo sapiens
  misc_RNA (1)...(19): siRNA sense strand
caaggaggcauugacauau

SEQ ID NO: 356390 - RNA, 19 nt, Homo sapiens
  misc_RNA (1)...(19): siRNA sense strand
gcgagaacuuggccuuagu

SEQ ID NO: 356391 - RNA, 19 nt, Homo sapiens
  misc_RNA (1)...(19): siRNA sense strand
gaccuuguaacauugcaua

SEQ ID NO: 356392 - RNA, 19 nt, Homo sapiens
  misc_RNA (1)...(19): siRNA sense strand
aauguugccuccugagcua

SEQ ID NO: 356393 - RNA, 19 nt, Homo sapiens
  misc_RNA (1)...(19): siRNA sense strand
ggucacugguccauauaca

SEQ ID NO: 356394 - RNA, 19 nt, Homo sapiens
  misc_RNA (1)...(19): siRNA sense strand
ugaaaggagagaugucuug

SEQ ID NO: 356395 - RNA, 19 nt, Homo sapiens
  misc_RNA (1)...(19): siRNA sense strand
gaaggcaaggaaaucgaaa

SEQ ID NO: 356396 - RNA, 19 nt, Homo sapiens
  misc_RNA (1)...(19): siRNA sense strand
caccaaucaucguaaacaa

SEQ ID NO: 356397 - RNA, 19 nt, Homo sapiens
  misc_RNA (1)...(19): siRNA sense strand
cagaugagggagugaacua

SEQ ID NO: 356398 - RNA, 19 nt, Homo sapiens
  misc_RNA (1)...(19): siRNA sense strand
caucuuguccuaccugaau

SEQ ID NO: 356399 - RNA, 19 nt, Homo sapiens
  misc_RNA (1)...(19): siRNA sense strand
gagcguggagaguaucuug

SEQ ID NO: 356400 - RNA, 19 nt, Homo sapiens
  misc_RNA (1)...(19): siRNA sense strand
ggagaauggcugcgagcaa

SEQ ID NO: 356401 - RNA, 19 nt, Homo sapiens
  misc_RNA (1)...(19): siRNA sense strand
acaagaacacuaaauugga

SEQ ID NO: 356402 - RNA, 19 nt, Homo sapiens
  misc_RNA (1)...(19): siRNA sense strand
gcgagcaacauuucuaaca

SEQ ID NO: 356403 - RNA, 19 nt, Homo sapiens
  misc_RNA (1)...(19): siRNA sense strand
caaggaaaucgaaagaaca

SEQ ID NO: 356404 - RNA, 19 nt, Homo sapiens
  misc_RNA (1)...(19): siRNA sense strand
ugauucuacuuuccauuga

SEQ ID NO: 356405 - RNA, 19 nt, Homo sapiens
  misc_RNA (1)...(19): siRNA sense strand
gggagugaacuacuuuaug

SEQ ID NO: 356406 - RNA, 19 nt, Homo sapiens
  misc_RNA (1)...(19): siRNA sense strand
ccaaucaucguaaacaagu

SEQ ID NO: 356407 - RNA, 19 nt, Homo sapiens
  misc_RNA (1)...(19): siRNA sense strand
acugguccauauacaauaa

SEQ ID NO: 356408 - RNA, 19 nt, Homo sapiens
  misc_RNA (1)...(19): siRNA sense strand
uugcuuggcuucauguguu

SEQ ID NO: 356409 - RNA, 19 nt, Homo sapiens
  misc_RNA (1)...(19): siRNA sense strand
gagggagugaacuacuuua

SEQ ID NO: 356410 - RNA, 19 nt, Homo sapiens
  misc_RNA (1)...(19): siRNA sense strand
guucucacauagauucugu

SEQ ID NO: 356411 - RNA, 19 nt, Homo sapiens
  misc_RNA (1)...(19): siRNA sense strand
aaaguucucacauagauuc

SEQ ID NO: 356412 - RNA, 19 nt, Homo sapiens
  misc_RNA (1)...(19): siRNA sense strand
gaugauucgccaaaggaaa

SEQ ID NO: 356413 - RNA, 19 nt, Homo sapiens
  misc_RNA (1)...(19): siRNA sense strand
aaggcuaccucaccagaga

SEQ ID NO: 356414 - RNA, 19 nt, Homo sapiens
  misc_RNA (1)...(19): siRNA sense strand
ugaaugcaacugaccuuug

SEQ ID NO: 356415 - RNA, 19 nt, Homo sapiens
  misc_RNA (1)...(19): siRNA sense strand
gauuuaaugcgagaacuug

SEQ ID NO: 356416 - RNA, 19 nt, Homo sapiens
  misc_RNA (1)...(19): siRNA sense strand
ucacugguccauauacaau

SEQ ID NO: 356417 - RNA, 19 nt, Homo sapiens
  misc_RNA (1)...(19): siRNA sense strand
ggcaaggguugugcaaauc

SEQ ID NO: 356418 - RNA, 19 nt, Homo sapiens
  misc_RNA (1)...(19): siRNA sense strand
ggaccuugcgaaugaugaa

SEQ ID NO: 356419 - RNA, 19 nt, Homo sapiens
  misc_RNA (1)...(19): siRNA sense strand
gcaucuuuaugacaauauc

SEQ ID NO: 356420 - RNA, 19 nt, Homo sapiens
  misc_RNA (1)...(19): siRNA sense strand
cugaagagcguggagagua

SEQ ID NO: 356421 - RNA, 19 nt, Homo sapiens
  misc_RNA (1)...(19): siRNA sense strand
aggaggcauugacauauau

SEQ ID NO: 356422 - RNA, 19 nt, Homo sapiens
  misc_RNA (1)...(19): siRNA sense strand
acaggaaggauucauuaau

SEQ ID NO: 356423 - RNA, 19 nt, Homo sapiens
  misc_RNA (1)...(19): siRNA sense strand
gaugcugucuauguacugu

SEQ ID NO: 356424 - RNA, 19 nt, Homo sapiens
  misc_RNA (1)...(19): siRNA sense strand
cguggagaguaucuugaaa

SEQ ID NO: 356425 - RNA, 19 nt, Homo sapiens
  misc_RNA (1)...(19): siRNA sense strand
gcugcgagcaacauuucua

SEQ ID NO: 356426 - RNA, 19 nt, Homo sapiens
  misc_RNA (1)...(19): siRNA sense strand
uguggagaguggucagaaa

SEQ ID NO: 356427 - RNA, 19 nt, Homo sapiens
  misc_RNA (1)...(19): siRNA sense strand
ugagggagugaacuacuuu

SEQ ID NO: 356428 - RNA, 19 nt, Homo sapiens
  misc_RNA (1)...(19): siRNA sense strand
uacaagaacacuaaauugg

SEQ ID NO: 356429 - RNA, 19 nt, Homo sapiens
  misc_RNA (1)...(19): siRNA sense strand
gcuugcaacccugauuuaa

SEQ ID NO: 356430 - RNA, 19 nt, Homo sapiens
  misc_RNA (1)...(19): siRNA sense strand
ucuaacaccaaucaucgua

SEQ ID NO: 356431 - RNA, 19 nt, Homo sapiens
  misc_RNA (1)...(19): siRNA sense strand
caaaguucucacauagauu

SEQ ID NO: 356432 - RNA, 19 nt, Homo sapiens
  misc_RNA (1)...(19): siRNA sense strand
gaugaaaggagagaugucu

SEQ ID NO: 356433 - RNA, 19 nt, Homo sapiens
  misc_RNA (1)...(19): siRNA sense strand
cgagcaacauuucuaacac

SEQ ID NO: 356434 - RNA, 19 nt, Homo sapiens
  misc_RNA (1)...(19): siRNA sense strand
ucucaaagcuggugaagaa

SEQ ID NO: 356435 - RNA, 19 nt, Homo sapiens
  misc_RNA (1)...(19): siRNA sense strand
ggaacgggcuguugaggaa

SEQ ID NO: 356436 - RNA, 19 nt, Homo sapiens
  misc_RNA (1)...(19): siRNA sense strand
gcacggagaccgccuugua

SEQ ID NO: 356437 - RNA, 19 nt, Homo sapiens
  misc_RNA (1)...(19): siRNA sense strand
gcacagcuccugcaguuga

SEQ ID NO: 356438 - RNA, 19 nt, Homo sapiens
  misc_RNA (1)...(19): siRNA sense strand
agacgucgcuggagaaugg

SEQ ID NO: 356439 - RNA, 19 nt, Homo sapiens
  misc_RNA (1)...(19): siRNA sense strand
aggcacagcuccugcaguu

SEQ ID NO: 356440 - RNA, 19 nt, Homo sapiens
  misc_RNA (1)...(19): siRNA sense strand
caacaucaaggcucucuuc

SEQ ID NO: 356441 - RNA, 19 nt, Homo sapiens
  misc_RNA (1)...(19): siRNA sense strand
ccauggaaguggcuguuug

SEQ ID NO: 356442 - RNA, 19 nt, Homo sapiens
  misc_RNA (1)...(19): siRNA sense strand
caaagcuggugaagaagca

SEQ ID NO: 356443 - RNA, 19 nt, Homo sapiens
  misc_RNA (1)...(19): siRNA sense strand
gaagaguggcuggacauuc

SEQ ID NO: 356444 - RNA, 19 nt, Homo sapiens
  misc_RNA (1)...(19): siRNA sense strand
aagaguggcuggacauucu

SEQ ID NO: 356445 - RNA, 19 nt, Homo sapiens
  misc_RNA (1)...(19): siRNA sense strand
ucacugcugacuccaagua

SEQ ID NO: 356446 - RNA, 19 nt, Homo sapiens
  misc_RNA (1)...(19): siRNA sense strand
ugaagugucugaacaaccu

SEQ ID NO: 356447 - RNA, 19 nt, Homo sapiens
  misc_RNA (1)...(19): siRNA sense strand
ccuacgaccucgccaucaa

SEQ ID NO: 356448 - RNA, 19 nt, Homo sapiens
  misc_RNA (1)...(19): siRNA sense strand
ccaaaguggacaugacguu

SEQ ID NO: 356449 - RNA, 19 nt, Homo sapiens
  misc_RNA (1)...(19): siRNA sense strand
gcaccagccagacaacauc

SEQ ID NO: 356450 - RNA, 19 nt, Homo sapiens
  misc_RNA (1)...(19): siRNA sense strand
aaggugaagugucugaaca

SEQ ID NO: 356451 - RNA, 19 nt, Homo sapiens
  misc_RNA (1)...(19): siRNA sense strand
gccuggaggugacccugaa

SEQ ID NO: 356452 - RNA, 19 nt, Homo sapiens
  misc_RNA (1)...(19): siRNA sense strand
ggccugaccuggagaugcu

SEQ ID NO: 356453 - RNA, 19 nt, Homo sapiens
  misc_RNA (1)...(19): siRNA sense strand
gaaggugaagugucugaac

SEQ ID NO: 356454 - RNA, 19 nt, Homo sapiens
  misc_RNA (1)...(19): siRNA sense strand
gcgccaaaguggacaugac

SEQ ID NO: 356455 - RNA, 19 nt, Homo sapiens
  misc_RNA (1)...(19): siRNA sense strand
cagcaggagcccauacauc

SEQ ID NO: 356456 - RNA, 19 nt, Homo sapiens
  misc_RNA (1)...(19): siRNA sense strand
ccacgcagagcucucaaag

SEQ ID NO: 356457 - RNA, 19 nt, Homo sapiens
  misc_RNA (1)...(19): siRNA sense strand
gauccacgcagagcucuca

SEQ ID NO: 356458 - RNA, 19 nt, Homo sapiens
  misc_RNA (1)...(19): siRNA sense strand
ggugaagugucugaacaac

SEQ ID NO: 356459 - RNA, 19 nt, Homo sapiens
  misc_RNA (1)...(19): siRNA sense strand
cacagcuccugcaguugaa

SEQ ID NO: 356460 - RNA, 19 nt, Homo sapiens
  misc_RNA (1)...(19): siRNA sense strand
gcagacgucgcuggagaau

SEQ ID NO: 356461 - RNA, 19 nt, Homo sapiens
  misc_RNA (1)...(19): siRNA sense strand
ugaagccgccuuacucgua

SEQ ID NO: 356462 - RNA, 19 nt, Homo sapiens
  misc_RNA (1)...(19): siRNA sense strand
cagcaucgagaacaucaua

SEQ ID NO: 356463 - RNA, 19 nt, Homo sapiens
  misc_RNA (1)...(19): siRNA sense strand
gcagacggcgcucaugaug

SEQ ID NO: 356464 - RNA, 19 nt, Homo sapiens
  misc_RNA (1)...(19): siRNA sense strand
agacggcgcucaugaugca

SEQ ID NO: 356465 - RNA, 19 nt, Homo sapiens
  misc_RNA (1)...(19): siRNA sense strand
ccgcgucgcucaucaaguc

SEQ ID NO: 356466 - RNA, 19 nt, Homo sapiens
  misc_RNA (1)...(19): siRNA sense strand
gcacggcgcagucguuucu

SEQ ID NO: 356467 - RNA, 19 nt, Homo sapiens
  misc_RNA (1)...(19): siRNA sense strand
ccgaggacauguucgacaa

SEQ ID NO: 356468 - RNA, 19 nt, Homo sapiens
  misc_RNA (1)...(19): siRNA sense strand
gccacaaccucucacucaa

SEQ ID NO: 356469 - RNA, 19 nt, Homo sapiens
  misc_RNA (1)...(19): siRNA sense strand
gcucauggccacccaccaa

SEQ ID NO: 356470 - RNA, 19 nt, Homo sapiens
  misc_RNA (1)...(19): siRNA sense strand
gaacagcauccgccacaac

SEQ ID NO: 356471 - RNA, 19 nt, Homo sapiens
  misc_RNA (1)...(19): siRNA sense strand
caagaacagccuagugaag

SEQ ID NO: 356472 - RNA, 19 nt, Homo sapiens
  misc_RNA (1)...(19): siRNA sense strand
cccaagaacagccuaguga

SEQ ID NO: 356473 - RNA, 19 nt, Homo sapiens
  misc_RNA (1)...(19): siRNA sense strand
ccaagaacagccuagugaa

SEQ ID NO: 356474 - RNA, 19 nt, Homo sapiens
  misc_RNA (1)...(19): siRNA sense strand
gccacucuccggacaguuu

SEQ ID NO: 356475 - RNA, 19 nt, Homo sapiens
  misc_RNA (1)...(19): siRNA sense strand
acgacgggcuggaagagaa

SEQ ID NO: 356476 - RNA, 19 nt, Homo sapiens
  misc_RNA (1)...(19): siRNA sense strand
cgagcaagcccaagaacag

SEQ ID NO: 356477 - RNA, 19 nt, Homo sapiens
  misc_RNA (1)...(19): siRNA sense strand
ccgaggacguggacaucga

SEQ ID NO: 356478 - RNA, 19 nt, Homo sapiens
  misc_RNA (1)...(19): siRNA sense strand
gagcggcaucugcgaguuc

SEQ ID NO: 356479 - RNA, 19 nt, Homo sapiens
  misc_RNA (1)...(19): siRNA sense strand
gcagagcccgcagaagaag

SEQ ID NO: 356480 - RNA, 19 nt, Homo sapiens
  misc_RNA (1)...(19): siRNA sense strand
cgccacaaccucucacuca

SEQ ID NO: 356481 - RNA, 19 nt, Homo sapiens
  misc_RNA (1)...(19): siRNA sense strand
cagcacggcgcagucguuu

SEQ ID NO: 356482 - RNA, 19 nt, Homo sapiens
  misc_RNA (1)...(19): siRNA sense strand
agaugaaccucuacuauga

SEQ ID NO: 356483 - RNA, 19 nt, Homo sapiens
  misc_RNA (1)...(19): siRNA sense strand
gaucugugcucagccaauu

SEQ ID NO: 356484 - RNA, 19 nt, Homo sapiens
  misc_RNA (1)...(19): siRNA sense strand
gagaugaaccucuacuaug

SEQ ID NO: 356485 - RNA, 19 nt, Homo sapiens
  misc_RNA (1)...(19): siRNA sense strand
ccaccaacaugcucagcua

SEQ ID NO: 356486 - RNA, 19 nt, Homo sapiens
  misc_RNA (1)...(19): siRNA sense strand
guacguggccgacaacuuc

SEQ ID NO: 356487 - RNA, 19 nt, Homo sapiens
  misc_RNA (1)...(19): siRNA sense strand
gacaagcgccucacucuca

SEQ ID NO: 356488 - RNA, 19 nt, Homo sapiens
  misc_RNA (1)...(19): siRNA sense strand
ucagccagaucuaccagua

SEQ ID NO: 356489 - RNA, 19 nt, Homo sapiens
  misc_RNA (1)...(19): siRNA sense strand
cgagaugaaccucuacuau

SEQ ID NO: 356490 - RNA, 19 nt, Homo sapiens
  misc_RNA (1)...(19): siRNA sense strand
agaacucacugaccuucaa

SEQ ID NO: 356491 - RNA, 19 nt, Homo sapiens
  misc_RNA (1)...(19): siRNA sense strand
gcucaacgacugcuucaag

SEQ ID NO: 356492 - RNA, 19 nt, Homo sapiens
  misc_RNA (1)...(19): siRNA sense strand
gaaccucuacuaugagaac

SEQ ID NO: 356493 - RNA, 19 nt, Homo sapiens
  misc_RNA (1)...(19): siRNA sense strand
gccacaaccugucgcucaa

SEQ ID NO: 356494 - RNA, 19 nt, Homo sapiens
  misc_RNA (1)...(19): siRNA sense strand
ccaauucagcccucacuuc

SEQ ID NO: 356495 - RNA, 19 nt, Homo sapiens
  misc_RNA (1)...(19): siRNA sense strand
ucaccaaccucagcaacca

SEQ ID NO: 356496 - RNA, 19 nt, Homo sapiens
  misc_RNA (1)...(19): siRNA sense strand
caauucagcccucacuucu

SEQ ID NO: 356497 - RNA, 19 nt, Homo sapiens
  misc_RNA (1)...(19): siRNA sense strand
cucaacgacugcuucaaga

SEQ ID NO: 356498 - RNA, 19 nt, Homo sapiens
  misc_RNA (1)...(19): siRNA sense strand
ccucuacuaugagaacuuc

SEQ ID NO: 356499 - RNA, 19 nt, Homo sapiens
  misc_RNA (1)...(19): siRNA sense strand
gcccugagcccagugacaa

SEQ ID NO: 356500 - RNA, 19 nt, Homo sapiens
  misc_RNA (1)...(19): siRNA sense strand
gcucagcuacggaggaucu

SEQ ID NO: 356501 - RNA, 19 nt, Homo sapiens
  misc_RNA (1)...(19): siRNA sense strand
ucaacgacugcuucaagaa

SEQ ID NO: 356502 - RNA, 19 nt, Homo sapiens
  misc_RNA (1)...(19): siRNA sense strand
auucagcccucacuucuac

SEQ ID NO: 356503 - RNA, 19 nt, Homo sapiens
  misc_RNA (1)...(19): siRNA sense strand
augaaccucuacuaugaga

SEQ ID NO: 356504 - RNA, 19 nt, Homo sapiens
  misc_RNA (1)...(19): siRNA sense strand
agaugaaccucuacuauga

SEQ ID NO: 356505 - RNA, 19 nt, Homo sapiens
  misc_RNA (1)...(19): siRNA sense strand
gaucugugcucagccaauu

SEQ ID NO: 356506 - RNA, 19 nt, Homo sapiens
  misc_RNA (1)...(19): siRNA sense strand
gagaugaaccucuacuaug

SEQ ID NO: 356507 - RNA, 19 nt, Homo sapiens
  misc_RNA (1)...(19): siRNA sense strand
ccaccaacaugcucagcua

SEQ ID NO: 356508 - RNA, 19 nt, Homo sapiens
  misc_RNA (1)...(19): siRNA sense strand
guacguggccgacaacuuc

SEQ ID NO: 356509 - RNA, 19 nt, Homo sapiens
  misc_RNA (1)...(19): siRNA sense strand
gacaagcgccucacucuca

SEQ ID NO: 356510 - RNA, 19 nt, Homo sapiens
  misc_RNA (1)...(19): siRNA sense strand
ucagccagaucuaccagua

SEQ ID NO: 356511 - RNA, 19 nt, Homo sapiens
  misc_RNA (1)...(19): siRNA sense strand
cgagaugaaccucuacuau

SEQ ID NO: 356512 - RNA, 19 nt, Homo sapiens
  misc_RNA (1)...(19): siRNA sense strand
agaacucacugaccuucaa

SEQ ID NO: 356513 - RNA, 19 nt, Homo sapiens
  misc_RNA (1)...(19): siRNA sense strand
gcucaacgacugcuucaag

SEQ ID NO: 356514 - RNA, 19 nt, Homo sapiens
  misc_RNA (1)...(19): siRNA sense strand
gaaccucuacuaugagaac

SEQ ID NO: 356515 - RNA, 19 nt, Homo sapiens
  misc_RNA (1)...(19): siRNA sense strand
gccacaaccugucgcucaa

SEQ ID NO: 356516 - RNA, 19 nt, Homo sapiens
  misc_RNA (1)...(19): siRNA sense strand
ccaauucagcccucacuuc

SEQ ID NO: 356517 - RNA, 19 nt, Homo sapiens
  misc_RNA (1)...(19): siRNA sense strand
ucaccaaccucagcaacca

SEQ ID NO: 356518 - RNA, 19 nt, Homo sapiens
  misc_RNA (1)...(19): siRNA sense strand
caauucagcccucacuucu

SEQ ID NO: 356519 - RNA, 19 nt, Homo sapiens
  misc_RNA (1)...(19): siRNA sense strand
cucaacgacugcuucaaga

SEQ ID NO: 356520 - RNA, 19 nt, Homo sapiens
  misc_RNA (1)...(19): siRNA sense strand
ccucuacuaugagaacuuc

SEQ ID NO: 356521 - RNA, 19 nt, Homo sapiens
  misc_RNA (1)...(19): siRNA sense strand
gcccugagcccagugacaa

SEQ ID NO: 356522 - RNA, 19 nt, Homo sapiens
  misc_RNA (1)...(19): siRNA sense strand
gcucagcuacggaggaucu

SEQ ID NO: 356523 - RNA, 19 nt, Homo sapiens
  misc_RNA (1)...(19): siRNA sense strand
ucaacgacugcuucaagaa

SEQ ID NO: 356524 - RNA, 19 nt, Homo sapiens
  misc_RNA (1)...(19): siRNA sense strand
auucagcccucacuucuac

SEQ ID NO: 356525 - RNA, 19 nt, Homo sapiens
  misc_RNA (1)...(19): siRNA sense strand
augaaccucuacuaugaga

SEQ ID NO: 356526 - RNA, 19 nt, Homo sapiens
  misc_RNA (1)...(19): siRNA sense strand
uaaaguaccuacccagaug

SEQ ID NO: 356527 - RNA, 19 nt, Homo sapiens
  misc_RNA (1)...(19): siRNA sense strand
gaacgacaccacagaagaa

SEQ ID NO: 356528 - RNA, 19 nt, Homo sapiens
  misc_RNA (1)...(19): siRNA sense strand
guagagaaauggucagaag

SEQ ID NO: 356529 - RNA, 19 nt, Homo sapiens
  misc_RNA (1)...(19): siRNA sense strand
gagaaauggucagaaggaa

SEQ ID NO: 356530 - RNA, 19 nt, Homo sapiens
  misc_RNA (1)...(19): siRNA sense strand
ggaagcaguugguggucuu

SEQ ID NO: 356531 - RNA, 19 nt, Homo sapiens
  misc_RNA (1)...(19): siRNA sense strand
cgacaccacagaagaaauu

SEQ ID NO: 356532 - RNA, 19 nt, Homo sapiens
  misc_RNA (1)...(19): siRNA sense strand
gaaggaacgacaccacaga

SEQ ID NO: 356533 - RNA, 19 nt, Homo sapiens
  misc_RNA (1)...(19): siRNA sense strand
ggaacgacaccacagaaga

SEQ ID NO: 356534 - RNA, 19 nt, Homo sapiens
  misc_RNA (1)...(19): siRNA sense strand
gaacagaauauagugacaa

SEQ ID NO: 356535 - RNA, 19 nt, Homo sapiens
  misc_RNA (1)...(19): siRNA sense strand
caauguaaccagaacagaa

SEQ ID NO: 356536 - RNA, 19 nt, Homo sapiens
  misc_RNA (1)...(19): siRNA sense strand
guaccuacccagauggaaa

SEQ ID NO: 356537 - RNA, 19 nt, Homo sapiens
  misc_RNA (1)...(19): siRNA sense strand
gcuugcugcucagauguua

SEQ ID NO: 356538 - RNA, 19 nt, Homo sapiens
  misc_RNA (1)...(19): siRNA sense strand
guaaccagaacagaauaua

SEQ ID NO: 356539 - RNA, 19 nt, Homo sapiens
  misc_RNA (1)...(19): siRNA sense strand
ccacagaagaaauuagaau

SEQ ID NO: 356540 - RNA, 19 nt, Homo sapiens
  misc_RNA (1)...(19): siRNA sense strand
acacagacgaggacaaugu

SEQ ID NO: 356541 - RNA, 19 nt, Homo sapiens
  misc_RNA (1)...(19): siRNA sense strand
caccagaguuugccuacgu

SEQ ID NO: 356542 - RNA, 19 nt, Homo sapiens
  misc_RNA (1)...(19): siRNA sense strand
ccacccaguuuccaucagu

SEQ ID NO: 356543 - RNA, 19 nt, Homo sapiens
  misc_RNA (1)...(19): siRNA sense strand
ccagaacagaauauaguga

SEQ ID NO: 356544 - RNA, 19 nt, Homo sapiens
  misc_RNA (1)...(19): siRNA sense strand
gagcaaacggaagcaguug

SEQ ID NO: 356545 - RNA, 19 nt, Homo sapiens
  misc_RNA (1)...(19): siRNA sense strand
caccacagaagaaauuaga

SEQ ID NO: 356546 - RNA, 19 nt, Homo sapiens
  misc_RNA (1)...(19): siRNA sense strand
agagaaauggucagaagga

SEQ ID NO: 356547 - RNA, 19 nt, Homo sapiens
  misc_RNA (1)...(19): siRNA sense strand
gcaaacggaagcaguuggu

SEQ ID NO: 356548 - RNA, 19 nt, Homo sapiens
  misc_RNA (1)...(19): siRNA sense strand
uaaccagaacagaauauag

SEQ ID NO: 356549 - RNA, 19 nt, Homo sapiens
  misc_RNA (1)...(19): siRNA sense strand
gaggacaauguaaccagaa

SEQ ID NO: 356550 - RNA, 19 nt, Homo sapiens
  misc_RNA (1)...(19): siRNA sense strand
cacagacgaggacaaugua

SEQ ID NO: 356551 - RNA, 19 nt, Homo sapiens
  misc_RNA (1)...(19): siRNA sense strand
gcaguugguggucuuucuu

SEQ ID NO: 356552 - RNA, 19 nt, Homo sapiens
  misc_RNA (1)...(19): siRNA sense strand
ccaguuuccaucaguuuau

SEQ ID NO: 356553 - RNA, 19 nt, Homo sapiens
  misc_RNA (1)...(19): siRNA sense strand
cuaaaguaccuacccagau

SEQ ID NO: 356554 - RNA, 19 nt, Homo sapiens
  misc_RNA (1)...(19): siRNA sense strand
gacaccacagaagaaauua

SEQ ID NO: 356555 - RNA, 19 nt, Homo sapiens
  misc_RNA (1)...(19): siRNA sense strand
cacagaagaaauuagaaug

SEQ ID NO: 356556 - RNA, 19 nt, Homo sapiens
  misc_RNA (1)...(19): siRNA sense strand
ugagcaaacggaagcaguu

SEQ ID NO: 356557 - RNA, 19 nt, Homo sapiens
  misc_RNA (1)...(19): siRNA sense strand
ggacaauguaaccagaaca

SEQ ID NO: 356558 - RNA, 19 nt, Homo sapiens
  misc_RNA (1)...(19): siRNA sense strand
gaagcaguugguggucuuu

SEQ ID NO: 356559 - RNA, 19 nt, Homo sapiens
  misc_RNA (1)...(19): siRNA sense strand
agaacagaauauagugaca

SEQ ID NO: 356560 - RNA, 19 nt, Homo sapiens
  misc_RNA (1)...(19): siRNA sense strand
aauguaaccagaacagaau

SEQ ID NO: 356561 - RNA, 19 nt, Homo sapiens
  misc_RNA (1)...(19): siRNA sense strand
acagcugucucaccagagu

SEQ ID NO: 356562 - RNA, 19 nt, Homo sapiens
  misc_RNA (1)...(19): siRNA sense strand
agacacagacgaggacaau

SEQ ID NO: 356563 - RNA, 19 nt, Homo sapiens
  misc_RNA (1)...(19): siRNA sense strand
aaccagaacagaauauagu

SEQ ID NO: 356564 - RNA, 19 nt, Homo sapiens
  misc_RNA (1)...(19): siRNA sense strand
ugacaaaugugcucccuuu

SEQ ID NO: 356565 - RNA, 19 nt, Homo sapiens
  misc_RNA (1)...(19): siRNA sense strand
ucacaaacgucgcaaagca

SEQ ID NO: 356566 - RNA, 19 nt, Homo sapiens
  misc_RNA (1)...(19): siRNA sense strand
ggaagcaguugguggucuu

SEQ ID NO: 356567 - RNA, 19 nt, Homo sapiens
  misc_RNA (1)...(19): siRNA sense strand
gaacagaauauagugacaa

SEQ ID NO: 356568 - RNA, 19 nt, Homo sapiens
  misc_RNA (1)...(19): siRNA sense strand
caauguaaccagaacagaa

SEQ ID NO: 356569 - RNA, 19 nt, Homo sapiens
  misc_RNA (1)...(19): siRNA sense strand
gcuugcugcucagauguua

SEQ ID NO: 356570 - RNA, 19 nt, Homo sapiens
  misc_RNA (1)...(19): siRNA sense strand
guaaccagaacagaauaua

SEQ ID NO: 356571 - RNA, 19 nt, Homo sapiens
  misc_RNA (1)...(19): siRNA sense strand
uucaggaucuggugacaaa

SEQ ID NO: 356572 - RNA, 19 nt, Homo sapiens
  misc_RNA (1)...(19): siRNA sense strand
ucgcaaagcagaaacugaa

SEQ ID NO: 356573 - RNA, 19 nt, Homo sapiens
  misc_RNA (1)...(19): siRNA sense strand
gagguaaccgugacuacug

SEQ ID NO: 356574 - RNA, 19 nt, Homo sapiens
  misc_RNA (1)...(19): siRNA sense strand
acacagacgaggacaaugu

SEQ ID NO: 356575 - RNA, 19 nt, Homo sapiens
  misc_RNA (1)...(19): siRNA sense strand
caccagaguuugccuacgu

SEQ ID NO: 356576 - RNA, 19 nt, Homo sapiens
  misc_RNA (1)...(19): siRNA sense strand
ccacccaguuuccaucagu

SEQ ID NO: 356577 - RNA, 19 nt, Homo sapiens
  misc_RNA (1)...(19): siRNA sense strand
gugcucccuuuggaaguua

SEQ ID NO: 356578 - RNA, 19 nt, Homo sapiens
  misc_RNA (1)...(19): siRNA sense strand
ccagaacagaauauaguga

SEQ ID NO: 356579 - RNA, 19 nt, Homo sapiens
  misc_RNA (1)...(19): siRNA sense strand
gagcaaacggaagcaguug

SEQ ID NO: 356580 - RNA, 19 nt, Homo sapiens
  misc_RNA (1)...(19): siRNA sense strand
uaaccagaacagaauauag

SEQ ID NO: 356581 - RNA, 19 nt, Homo sapiens
  misc_RNA (1)...(19): siRNA sense strand
gcaaacggaagcaguuggu

SEQ ID NO: 356582 - RNA, 19 nt, Homo sapiens
  misc_RNA (1)...(19): siRNA sense strand
gaggacaauguaaccagaa

SEQ ID NO: 356583 - RNA, 19 nt, Homo sapiens
  misc_RNA (1)...(19): siRNA sense strand
aaacgucgcaaagcagaaa

SEQ ID NO: 356584 - RNA, 19 nt, Homo sapiens
  misc_RNA (1)...(19): siRNA sense strand
gcucacaaacgucgcaaag

SEQ ID NO: 356585 - RNA, 19 nt, Homo sapiens
  misc_RNA (1)...(19): siRNA sense strand
cacagacgaggacaaugua

SEQ ID NO: 356586 - RNA, 19 nt, Homo sapiens
  misc_RNA (1)...(19): siRNA sense strand
gcaguugguggucuuucuu

SEQ ID NO: 356587 - RNA, 19 nt, Homo sapiens
  misc_RNA (1)...(19): siRNA sense strand
ccaguuuccaucaguuuau

SEQ ID NO: 356588 - RNA, 19 nt, Homo sapiens
  misc_RNA (1)...(19): siRNA sense strand
ugagcaaacggaagcaguu

SEQ ID NO: 356589 - RNA, 19 nt, Homo sapiens
  misc_RNA (1)...(19): siRNA sense strand
caggaucuggugacaaaug

SEQ ID NO: 356590 - RNA, 19 nt, Homo sapiens
  misc_RNA (1)...(19): siRNA sense strand
agaacagaauauagugaca

SEQ ID NO: 356591 - RNA, 19 nt, Homo sapiens
  misc_RNA (1)...(19): siRNA sense strand
gcaaagcagaaacugaaaa

SEQ ID NO: 356592 - RNA, 19 nt, Homo sapiens
  misc_RNA (1)...(19): siRNA sense strand
cuuuggaaguuacgguauu

SEQ ID NO: 356593 - RNA, 19 nt, Homo sapiens
  misc_RNA (1)...(19): siRNA sense strand
ggacaauguaaccagaaca

SEQ ID NO: 356594 - RNA, 19 nt, Homo sapiens
  misc_RNA (1)...(19): siRNA sense strand
gaagcaguugguggucuuu

SEQ ID NO: 356595 - RNA, 19 nt, Homo sapiens
  misc_RNA (1)...(19): siRNA sense strand
aauguaaccagaacagaau

SEQ ID NO: 356596 - RNA, 19 nt, Homo sapiens
  misc_RNA (1)...(19): siRNA sense strand
agacacagacgaggacaau

SEQ ID NO: 356597 - RNA, 19 nt, Homo sapiens
  misc_RNA (1)...(19): siRNA sense strand
acagcugucucaccagagu

SEQ ID NO: 356598 - RNA, 19 nt, Homo sapiens
  misc_RNA (1)...(19): siRNA sense strand
ggagguaaccgugacuacu

SEQ ID NO: 356599 - RNA, 19 nt, Homo sapiens
  misc_RNA (1)...(19): siRNA sense strand
gacuacugcucacaaacgu

SEQ ID NO: 356600 - RNA, 19 nt, Homo sapiens
  misc_RNA (1)...(19): siRNA sense strand
aaccagaacagaauauagu

SEQ ID NO: 356601 - RNA, 19 nt, Homo sapiens
  misc_RNA (1)...(19): siRNA sense strand
agcagaaacugaaaacuga

SEQ ID NO: 356602 - RNA, 19 nt, Homo sapiens
  misc_RNA (1)...(19): siRNA sense strand
ugacaaaugugcucccuuu

SEQ ID NO: 356603 - RNA, 19 nt, Homo sapiens
  misc_RNA (1)...(19): siRNA sense strand
uaaaguaccuacccagaug

SEQ ID NO: 356604 - RNA, 19 nt, Homo sapiens
  misc_RNA (1)...(19): siRNA sense strand
gaacgacaccacagaagaa

SEQ ID NO: 356605 - RNA, 19 nt, Homo sapiens
  misc_RNA (1)...(19): siRNA sense strand
guagagaaauggucagaag

SEQ ID NO: 356606 - RNA, 19 nt, Homo sapiens
  misc_RNA (1)...(19): siRNA sense strand
ucacaaacgucgcaaagca

SEQ ID NO: 356607 - RNA, 19 nt, Homo sapiens
  misc_RNA (1)...(19): siRNA sense strand
gagaaauggucagaaggaa

SEQ ID NO: 356608 - RNA, 19 nt, Homo sapiens
  misc_RNA (1)...(19): siRNA sense strand
ggaagcaguugguggucuu

SEQ ID NO: 356609 - RNA, 19 nt, Homo sapiens
  misc_RNA (1)...(19): siRNA sense strand
cgacaccacagaagaaauu

SEQ ID NO: 356610 - RNA, 19 nt, Homo sapiens
  misc_RNA (1)...(19): siRNA sense strand
gaaggaacgacaccacaga

SEQ ID NO: 356611 - RNA, 19 nt, Homo sapiens
  misc_RNA (1)...(19): siRNA sense strand
ggaacgacaccacagaaga

SEQ ID NO: 356612 - RNA, 19 nt, Homo sapiens
  misc_RNA (1)...(19): siRNA sense strand
gaacagaauauagugacaa

SEQ ID NO: 356613 - RNA, 19 nt, Homo sapiens
  misc_RNA (1)...(19): siRNA sense strand
caauguaaccagaacagaa

SEQ ID NO: 356614 - RNA, 19 nt, Homo sapiens
  misc_RNA (1)...(19): siRNA sense strand
guaccuacccagauggaaa

SEQ ID NO: 356615 - RNA, 19 nt, Homo sapiens
  misc_RNA (1)...(19): siRNA sense strand
gcuugcugcucagauguua

SEQ ID NO: 356616 - RNA, 19 nt, Homo sapiens
  misc_RNA (1)...(19): siRNA sense strand
guaaccagaacagaauaua

SEQ ID NO: 356617 - RNA, 19 nt, Homo sapiens
  misc_RNA (1)...(19): siRNA sense strand
ccacagaagaaauuagaau

SEQ ID NO: 356618 - RNA, 19 nt, Homo sapiens
  misc_RNA (1)...(19): siRNA sense strand
uucaggaucuggugacaaa

SEQ ID NO: 356619 - RNA, 19 nt, Homo sapiens
  misc_RNA (1)...(19): siRNA sense strand
ucgcaaagcagaaacugaa

SEQ ID NO: 356620 - RNA, 19 nt, Homo sapiens
  misc_RNA (1)...(19): siRNA sense strand
gagguaaccgugacuacug

SEQ ID NO: 356621 - RNA, 19 nt, Homo sapiens
  misc_RNA (1)...(19): siRNA sense strand
acacagacgaggacaaugu

SEQ ID NO: 356622 - RNA, 19 nt, Homo sapiens
  misc_RNA (1)...(19): siRNA sense strand
caccagaguuugccuacgu

SEQ ID NO: 356623 - RNA, 19 nt, Homo sapiens
  misc_RNA (1)...(19): siRNA sense strand
ccacccaguuuccaucagu

SEQ ID NO: 356624 - RNA, 19 nt, Homo sapiens
  misc_RNA (1)...(19): siRNA sense strand
gugcucccuuuggaaguua

SEQ ID NO: 356625 - RNA, 19 nt, Homo sapiens
  misc_RNA (1)...(19): siRNA sense strand
ccagaacagaauauaguga

SEQ ID NO: 356626 - RNA, 19 nt, Homo sapiens
  misc_RNA (1)...(19): siRNA sense strand
gagcaaacggaagcaguug

SEQ ID NO: 356627 - RNA, 19 nt, Homo sapiens
  misc_RNA (1)...(19): siRNA sense strand
caccacagaagaaauuaga

SEQ ID NO: 356628 - RNA, 19 nt, Homo sapiens
  misc_RNA (1)...(19): siRNA sense strand
uaaccagaacagaauauag

SEQ ID NO: 356629 - RNA, 19 nt, Homo sapiens
  misc_RNA (1)...(19): siRNA sense strand
gcaaacggaagcaguuggu

SEQ ID NO: 356630 - RNA, 19 nt, Homo sapiens
  misc_RNA (1)...(19): siRNA sense strand
agagaaauggucagaagga

SEQ ID NO: 356631 - RNA, 19 nt, Homo sapiens
  misc_RNA (1)...(19): siRNA sense strand
gaggacaauguaaccagaa

SEQ ID NO: 356632 - RNA, 19 nt, Homo sapiens
  misc_RNA (1)...(19): siRNA sense strand
aaacgucgcaaagcagaaa

SEQ ID NO: 356633 - RNA, 19 nt, Homo sapiens
  misc_RNA (1)...(19): siRNA sense strand
gcucacaaacgucgcaaag

SEQ ID NO: 356634 - RNA, 19 nt, Homo sapiens
  misc_RNA (1)...(19): siRNA sense strand
cacagacgaggacaaugua

SEQ ID NO: 356635 - RNA, 19 nt, Homo sapiens
  misc_RNA (1)...(19): siRNA sense strand
gcaguugguggucuuucuu

SEQ ID NO: 356636 - RNA, 19 nt, Homo sapiens
  misc_RNA (1)...(19): siRNA sense strand
ccaguuuccaucaguuuau

SEQ ID NO: 356637 - RNA, 19 nt, Homo sapiens
  misc_RNA (1)...(19): siRNA sense strand
gacaccacagaagaaauua

SEQ ID NO: 356638 - RNA, 19 nt, Homo sapiens
  misc_RNA (1)...(19): siRNA sense strand
cacagaagaaauuagaaug

SEQ ID NO: 356639 - RNA, 19 nt, Homo sapiens
  misc_RNA (1)...(19): siRNA sense strand
cuaaaguaccuacccagau

SEQ ID NO: 356640 - RNA, 19 nt, Homo sapiens
  misc_RNA (1)...(19): siRNA sense strand
ugagcaaacggaagcaguu

SEQ ID NO: 356641 - RNA, 19 nt, Homo sapiens
  misc_RNA (1)...(19): siRNA sense strand
caggaucuggugacaaaug

SEQ ID NO: 356642 - RNA, 19 nt, Homo sapiens
  misc_RNA (1)...(19): siRNA sense strand
agaacagaauauagugaca

SEQ ID NO: 356643 - RNA, 19 nt, Homo sapiens
  misc_RNA (1)...(19): siRNA sense strand
gcaaagcagaaacugaaaa

SEQ ID NO: 356644 - RNA, 19 nt, Homo sapiens
  misc_RNA (1)...(19): siRNA sense strand
cuuuggaaguuacgguauu

SEQ ID NO: 356645 - RNA, 19 nt, Homo sapiens
  misc_RNA (1)...(19): siRNA sense strand
ggacaauguaaccagaaca

SEQ ID NO: 356646 - RNA, 19 nt, Homo sapiens
  misc_RNA (1)...(19): siRNA sense strand
gaagcaguugguggucuuu

SEQ ID NO: 356647 - RNA, 19 nt, Homo sapiens
  misc_RNA (1)...(19): siRNA sense strand
agacacagacgaggacaau

SEQ ID NO: 356648 - RNA, 19 nt, Homo sapiens
  misc_RNA (1)...(19): siRNA sense strand
aauguaaccagaacagaau

SEQ ID NO: 356649 - RNA, 19 nt, Homo sapiens
  misc_RNA (1)...(19): siRNA sense strand
acagcugucucaccagagu

SEQ ID NO: 356650 - RNA, 19 nt, Homo sapiens
  misc_RNA (1)...(19): siRNA sense strand
aaccagaacagaauauagu

SEQ ID NO: 356651 - RNA, 19 nt, Homo sapiens
  misc_RNA (1)...(19): siRNA sense strand
gacuacugcucacaaacgu

SEQ ID NO: 356652 - RNA, 19 nt, Homo sapiens
  misc_RNA (1)...(19): siRNA sense strand
ggagguaaccgugacuacu

SEQ ID NO: 356653 - RNA, 19 nt, Homo sapiens
  misc_RNA (1)...(19): siRNA sense strand
agcagaaacugaaaacuga

SEQ ID NO: 356654 - RNA, 19 nt, Homo sapiens
  misc_RNA (1)...(19): siRNA sense strand
uaaaguaccuacccagaug

SEQ ID NO: 356655 - RNA, 19 nt, Homo sapiens
  misc_RNA (1)...(19): siRNA sense strand
gaacgacaccacagaagaa

SEQ ID NO: 356656 - RNA, 19 nt, Homo sapiens
  misc_RNA (1)...(19): siRNA sense strand
guagagaaauggucagaag

SEQ ID NO: 356657 - RNA, 19 nt, Homo sapiens
  misc_RNA (1)...(19): siRNA sense strand
gagaaauggucagaaggaa

SEQ ID NO: 356658 - RNA, 19 nt, Homo sapiens
  misc_RNA (1)...(19): siRNA sense strand
ggaagcaguugguggucuu

SEQ ID NO: 356659 - RNA, 19 nt, Homo sapiens
  misc_RNA (1)...(19): siRNA sense strand
cgacaccacagaagaaauu

SEQ ID NO: 356660 - RNA, 19 nt, Homo sapiens
  misc_RNA (1)...(19): siRNA sense strand
gaaggaacgacaccacaga

SEQ ID NO: 356661 - RNA, 19 nt, Homo sapiens
  misc_RNA (1)...(19): siRNA sense strand
ggaacgacaccacagaaga

SEQ ID NO: 356662 - RNA, 19 nt, Homo sapiens
  misc_RNA (1)...(19): siRNA sense strand
gaacagaauauagugacaa

SEQ ID NO: 356663 - RNA, 19 nt, Homo sapiens
  misc_RNA (1)...(19): siRNA sense strand
caauguaaccagaacagaa

SEQ ID NO: 356664 - RNA, 19 nt, Homo sapiens
  misc_RNA (1)...(19): siRNA sense strand
guaccuacccagauggaaa

SEQ ID NO: 356665 - RNA, 19 nt, Homo sapiens
  misc_RNA (1)...(19): siRNA sense strand
gcuugcugcucagauguua

SEQ ID NO: 356666 - RNA, 19 nt, Homo sapiens
  misc_RNA (1)...(19): siRNA sense strand
guaaccagaacagaauaua

SEQ ID NO: 356667 - RNA, 19 nt, Homo sapiens
  misc_RNA (1)...(19): siRNA sense strand
ccacagaagaaauuagaau

SEQ ID NO: 356668 - RNA, 19 nt, Homo sapiens
  misc_RNA (1)...(19): siRNA sense strand
acacagacgaggacaaugu

SEQ ID NO: 356669 - RNA, 19 nt, Homo sapiens
  misc_RNA (1)...(19): siRNA sense strand
caccagaguuugccuacgu

SEQ ID NO: 356670 - RNA, 19 nt, Homo sapiens
  misc_RNA (1)...(19): siRNA sense strand
ccacccaguuuccaucagu

SEQ ID NO: 356671 - RNA, 19 nt, Homo sapiens
  misc_RNA (1)...(19): siRNA sense strand
ccagaacagaauauaguga

SEQ ID NO: 356672 - RNA, 19 nt, Homo sapiens
  misc_RNA (1)...(19): siRNA sense strand
gagcaaacggaagcaguug

SEQ ID NO: 356673 - RNA, 19 nt, Homo sapiens
  misc_RNA (1)...(19): siRNA sense strand
caccacagaagaaauuaga

SEQ ID NO: 356674 - RNA, 19 nt, Homo sapiens
  misc_RNA (1)...(19): siRNA sense strand
agagaaauggucagaagga

SEQ ID NO: 356675 - RNA, 19 nt, Homo sapiens
  misc_RNA (1)...(19): siRNA sense strand
gcaaacggaagcaguuggu

SEQ ID NO: 356676 - RNA, 19 nt, Homo sapiens
  misc_RNA (1)...(19): siRNA sense strand
uaaccagaacagaauauag

SEQ ID NO: 356677 - RNA, 19 nt, Homo sapiens
  misc_RNA (1)...(19): siRNA sense strand
gaggacaauguaaccagaa

SEQ ID NO: 356678 - RNA, 19 nt, Homo sapiens
  misc_RNA (1)...(19): siRNA sense strand
cacagacgaggacaaugua

SEQ ID NO: 356679 - RNA, 19 nt, Homo sapiens
  misc_RNA (1)...(19): siRNA sense strand
gcaguugguggucuuucuu

SEQ ID NO: 356680 - RNA, 19 nt, Homo sapiens
  misc_RNA (1)...(19): siRNA sense strand
ccaguuuccaucaguuuau

SEQ ID NO: 356681 - RNA, 19 nt, Homo sapiens
  misc_RNA (1)...(19): siRNA sense strand
cuaaaguaccuacccagau

SEQ ID NO: 356682 - RNA, 19 nt, Homo sapiens
  misc_RNA (1)...(19): siRNA sense strand
gacaccacagaagaaauua

SEQ ID NO: 356683 - RNA, 19 nt, Homo sapiens
  misc_RNA (1)...(19): siRNA sense strand
cacagaagaaauuagaaug

SEQ ID NO: 356684 - RNA, 19 nt, Homo sapiens
  misc_RNA (1)...(19): siRNA sense strand
ugagcaaacggaagcaguu

SEQ ID NO: 356685 - RNA, 19 nt, Homo sapiens
  misc_RNA (1)...(19): siRNA sense strand
ggacaauguaaccagaaca

SEQ ID NO: 356686 - RNA, 19 nt, Homo sapiens
  misc_RNA (1)...(19): siRNA sense strand
gaagcaguugguggucuuu

SEQ ID NO: 356687 - RNA, 19 nt, Homo sapiens
  misc_RNA (1)...(19): siRNA sense strand
agaacagaauauagugaca

SEQ ID NO: 356688 - RNA, 19 nt, Homo sapiens
  misc_RNA (1)...(19): siRNA sense strand
aauguaaccagaacagaau

SEQ ID NO: 356689 - RNA, 19 nt, Homo sapiens
  misc_RNA (1)...(19): siRNA sense strand
acagcugucucaccagagu

SEQ ID NO: 356690 - RNA, 19 nt, Homo sapiens
  misc_RNA (1)...(19): siRNA sense strand
agacacagacgaggacaau

SEQ ID NO: 356691 - RNA, 19 nt, Homo sapiens
  misc_RNA (1)...(19): siRNA sense strand
aaccagaacagaauauagu

SEQ ID NO: 356692 - RNA, 19 nt, Homo sapiens
  misc_RNA (1)...(19): siRNA sense strand
ugacaaaugugcucccuuu

SEQ ID NO: 356693 - RNA, 19 nt, Homo sapiens
  misc_RNA (1)...(19): siRNA sense strand
uaaaguaccuacccagaug

SEQ ID NO: 356694 - RNA, 19 nt, Homo sapiens
  misc_RNA (1)...(19): siRNA sense strand
gaacgacaccacagaagaa

SEQ ID NO: 356695 - RNA, 19 nt, Homo sapiens
  misc_RNA (1)...(19): siRNA sense strand
guagagaaauggucagaag

SEQ ID NO: 356696 - RNA, 19 nt, Homo sapiens
  misc_RNA (1)...(19): siRNA sense strand
ucacaaacgucgcaaagca

SEQ ID NO: 356697 - RNA, 19 nt, Homo sapiens
  misc_RNA (1)...(19): siRNA sense strand
gagaaauggucagaaggaa

SEQ ID NO: 356698 - RNA, 19 nt, Homo sapiens
  misc_RNA (1)...(19): siRNA sense strand
ggaagcaguugguggucuu

SEQ ID NO: 356699 - RNA, 19 nt, Homo sapiens
  misc_RNA (1)...(19): siRNA sense strand
cgacaccacagaagaaauu

SEQ ID NO: 356700 - RNA, 19 nt, Homo sapiens
  misc_RNA (1)...(19): siRNA sense strand
gaaggaacgacaccacaga

SEQ ID NO: 356701 - RNA, 19 nt, Homo sapiens
  misc_RNA (1)...(19): siRNA sense strand
ggaacgacaccacagaaga

SEQ ID NO: 356702 - RNA, 19 nt, Homo sapiens
  misc_RNA (1)...(19): siRNA sense strand
gaacagaauauagugacaa

SEQ ID NO: 356703 - RNA, 19 nt, Homo sapiens
  misc_RNA (1)...(19): siRNA sense strand
caauguaaccagaacagaa

SEQ ID NO: 356704 - RNA, 19 nt, Homo sapiens
  misc_RNA (1)...(19): siRNA sense strand
guaccuacccagauggaaa

SEQ ID NO: 356705 - RNA, 19 nt, Homo sapiens
  misc_RNA (1)...(19): siRNA sense strand
gcuugcugcucagauguua

SEQ ID NO: 356706 - RNA, 19 nt, Homo sapiens
  misc_RNA (1)...(19): siRNA sense strand
guaaccagaacagaauaua

SEQ ID NO: 356707 - RNA, 19 nt, Homo sapiens
  misc_RNA (1)...(19): siRNA sense strand
ccacagaagaaauuagaau

SEQ ID NO: 356708 - RNA, 19 nt, Homo sapiens
  misc_RNA (1)...(19): siRNA sense strand
uucaggaucuggugacaaa

SEQ ID NO: 356709 - RNA, 19 nt, Homo sapiens
  misc_RNA (1)...(19): siRNA sense strand
ucgcaaagcagaaacugaa

SEQ ID NO: 356710 - RNA, 19 nt, Homo sapiens
  misc_RNA (1)...(19): siRNA sense strand
gagguaaccgugacuacug

SEQ ID NO: 356711 - RNA, 19 nt, Homo sapiens
  misc_RNA (1)...(19): siRNA sense strand
acacagacgaggacaaugu

SEQ ID NO: 356712 - RNA, 19 nt, Homo sapiens
  misc_RNA (1)...(19): siRNA sense strand
caccagaguuugccuacgu

SEQ ID NO: 356713 - RNA, 19 nt, Homo sapiens
  misc_RNA (1)...(19): siRNA sense strand
ccacccaguuuccaucagu

SEQ ID NO: 356714 - RNA, 19 nt, Homo sapiens
  misc_RNA (1)...(19): siRNA sense strand
gugcucccuuuggaaguua

SEQ ID NO: 356715 - RNA, 19 nt, Homo sapiens
  misc_RNA (1)...(19): siRNA sense strand
ccagaacagaauauaguga

SEQ ID NO: 356716 - RNA, 19 nt, Homo sapiens
  misc_RNA (1)...(19): siRNA sense strand
gagcaaacggaagcaguug

SEQ ID NO: 356717 - RNA, 19 nt, Homo sapiens
  misc_RNA (1)...(19): siRNA sense strand
caccacagaagaaauuaga

SEQ ID NO: 356718 - RNA, 19 nt, Homo sapiens
  misc_RNA (1)...(19): siRNA sense strand
uaaccagaacagaauauag

SEQ ID NO: 356719 - RNA, 19 nt, Homo sapiens
  misc_RNA (1)...(19): siRNA sense strand
gcaaacggaagcaguuggu

SEQ ID NO: 356720 - RNA, 19 nt, Homo sapiens
  misc_RNA (1)...(19): siRNA sense strand
agagaaauggucagaagga

SEQ ID NO: 356721 - RNA, 19 nt, Homo sapiens
  misc_RNA (1)...(19): siRNA sense strand
gaggacaauguaaccagaa

SEQ ID NO: 356722 - RNA, 19 nt, Homo sapiens
  misc_RNA (1)...(19): siRNA sense strand
aaacgucgcaaagcagaaa

SEQ ID NO: 356723 - RNA, 19 nt, Homo sapiens
  misc_RNA (1)...(19): siRNA sense strand
gcucacaaacgucgcaaag

SEQ ID NO: 356724 - RNA, 19 nt, Homo sapiens
  misc_RNA (1)...(19): siRNA sense strand
cacagacgaggacaaugua

SEQ ID NO: 356725 - RNA, 19 nt, Homo sapiens
  misc_RNA (1)...(19): siRNA sense strand
gcaguugguggucuuucuu

SEQ ID NO: 356726 - RNA, 19 nt, Homo sapiens
  misc_RNA (1)...(19): siRNA sense strand
ccaguuuccaucaguuuau

SEQ ID NO: 356727 - RNA, 19 nt, Homo sapiens
  misc_RNA (1)...(19): siRNA sense strand
gacaccacagaagaaauua

SEQ ID NO: 356728 - RNA, 19 nt, Homo sapiens
  misc_RNA (1)...(19): siRNA sense strand
cacagaagaaauuagaaug

SEQ ID NO: 356729 - RNA, 19 nt, Homo sapiens
  misc_RNA (1)...(19): siRNA sense strand
cuaaaguaccuacccagau

SEQ ID NO: 356730 - RNA, 19 nt, Homo sapiens
  misc_RNA (1)...(19): siRNA sense strand
ugagcaaacggaagcaguu

SEQ ID NO: 356731 - RNA, 19 nt, Homo sapiens
  misc_RNA (1)...(19): siRNA sense strand
caggaucuggugacaaaug

SEQ ID NO: 356732 - RNA, 19 nt, Homo sapiens
  misc_RNA (1)...(19): siRNA sense strand
agaacagaauauagugaca

SEQ ID NO: 356733 - RNA, 19 nt, Homo sapiens
  misc_RNA (1)...(19): siRNA sense strand
gcaaagcagaaacugaaaa

SEQ ID NO: 356734 - RNA, 19 nt, Homo sapiens
  misc_RNA (1)...(19): siRNA sense strand
cuuuggaaguuacgguauu

SEQ ID NO: 356735 - RNA, 19 nt, Homo sapiens
  misc_RNA (1)...(19): siRNA sense strand
ggacaauguaaccagaaca

SEQ ID NO: 356736 - RNA, 19 nt, Homo sapiens
  misc_RNA (1)...(19): siRNA sense strand
gaagcaguugguggucuuu

SEQ ID NO: 356737 - RNA, 19 nt, Homo sapiens
  misc_RNA (1)...(19): siRNA sense strand
agacacagacgaggacaau

SEQ ID NO: 356738 - RNA, 19 nt, Homo sapiens
  misc_RNA (1)...(19): siRNA sense strand
aauguaaccagaacagaau

SEQ ID NO: 356739 - RNA, 19 nt, Homo sapiens
  misc_RNA (1)...(19): siRNA sense strand
acagcugucucaccagagu

SEQ ID NO: 356740 - RNA, 19 nt, Homo sapiens
  misc_RNA (1)...(19): siRNA sense strand
aaccagaacagaauauagu

SEQ ID NO: 356741 - RNA, 19 nt, Homo sapiens
  misc_RNA (1)...(19): siRNA sense strand
gacuacugcucacaaacgu

SEQ ID NO: 356742 - RNA, 19 nt, Homo sapiens
  misc_RNA (1)...(19): siRNA sense strand
ggagguaaccgugacuacu

SEQ ID NO: 356743 - RNA, 19 nt, Homo sapiens
  misc_RNA (1)...(19): siRNA sense strand
agcagaaacugaaaacuga

SEQ ID NO: 356744 - RNA, 19 nt, Homo sapiens
  misc_RNA (1)...(19): siRNA sense strand
ugacaaaugugcucccuuu

SEQ ID NO: 356745 - RNA, 19 nt, Homo sapiens
  misc_RNA (1)...(19): siRNA sense strand
uaaaguaccuacccagaug

SEQ ID NO: 356746 - RNA, 19 nt, Homo sapiens
  misc_RNA (1)...(19): siRNA sense strand
gaacgacaccacagaagaa

SEQ ID NO: 356747 - RNA, 19 nt, Homo sapiens
  misc_RNA (1)...(19): siRNA sense strand
guagagaaauggucagaag

SEQ ID NO: 356748 - RNA, 19 nt, Homo sapiens
  misc_RNA (1)...(19): siRNA sense strand
ucacaaacgucgcaaagca

SEQ ID NO: 356749 - RNA, 19 nt, Homo sapiens
  misc_RNA (1)...(19): siRNA sense strand
gagaaauggucagaaggaa

SEQ ID NO: 356750 - RNA, 19 nt, Homo sapiens
  misc_RNA (1)...(19): siRNA sense strand
ggaagcaguugguggucuu

SEQ ID NO: 356751 - RNA, 19 nt, Homo sapiens
  misc_RNA (1)...(19): siRNA sense strand
cgacaccacagaagaaauu

SEQ ID NO: 356752 - RNA, 19 nt, Homo sapiens
  misc_RNA (1)...(19): siRNA sense strand
gaaggaacgacaccacaga

SEQ ID NO: 356753 - RNA, 19 nt, Homo sapiens
  misc_RNA (1)...(19): siRNA sense strand
ggaacgacaccacagaaga

SEQ ID NO: 356754 - RNA, 19 nt, Homo sapiens
  misc_RNA (1)...(19): siRNA sense strand
gaacagaauauagugacaa

SEQ ID NO: 356755 - RNA, 19 nt, Homo sapiens
  misc_RNA (1)...(19): siRNA sense strand
caauguaaccagaacagaa

SEQ ID NO: 356756 - RNA, 19 nt, Homo sapiens
  misc_RNA (1)...(19): siRNA sense strand
guaccuacccagauggaaa

SEQ ID NO: 356757 - RNA, 19 nt, Homo sapiens
  misc_RNA (1)...(19): siRNA sense strand
gcuugcugcucagauguua

SEQ ID NO: 356758 - RNA, 19 nt, Homo sapiens
  misc_RNA (1)...(19): siRNA sense strand
guaaccagaacagaauaua

SEQ ID NO: 356759 - RNA, 19 nt, Homo sapiens
  misc_RNA (1)...(19): siRNA sense strand
ccacagaagaaauuagaau

SEQ ID NO: 356760 - RNA, 19 nt, Homo sapiens
  misc_RNA (1)...(19): siRNA sense strand
uucaggaucuggugacaaa

SEQ ID NO: 356761 - RNA, 19 nt, Homo sapiens
  misc_RNA (1)...(19): siRNA sense strand
ucgcaaagcagaaacugaa

SEQ ID NO: 356762 - RNA, 19 nt, Homo sapiens
  misc_RNA (1)...(19): siRNA sense strand
gagguaaccgugacuacug

SEQ ID NO: 356763 - RNA, 19 nt, Homo sapiens
  misc_RNA (1)...(19): siRNA sense strand
acacagacgaggacaaugu

SEQ ID NO: 356764 - RNA, 19 nt, Homo sapiens
  misc_RNA (1)...(19): siRNA sense strand
caccagaguuugccuacgu

SEQ ID NO: 356765 - RNA, 19 nt, Homo sapiens
  misc_RNA (1)...(19): siRNA sense strand
ccacccaguuuccaucagu

SEQ ID NO: 356766 - RNA, 19 nt, Homo sapiens
  misc_RNA (1)...(19): siRNA sense strand
gugcucccuuuggaaguua

SEQ ID NO: 356767 - RNA, 19 nt, Homo sapiens
  misc_RNA (1)...(19): siRNA sense strand
ccagaacagaauauaguga

SEQ ID NO: 356768 - RNA, 19 nt, Homo sapiens
  misc_RNA (1)...(19): siRNA sense strand
gagcaaacggaagcaguug

SEQ ID NO: 356769 - RNA, 19 nt, Homo sapiens
  misc_RNA (1)...(19): siRNA sense strand
caccacagaagaaauuaga

SEQ ID NO: 356770 - RNA, 19 nt, Homo sapiens
  misc_RNA (1)...(19): siRNA sense strand
uaaccagaacagaauauag

SEQ ID NO: 356771 - RNA, 19 nt, Homo sapiens
  misc_RNA (1)...(19): siRNA sense strand
gcaaacggaagcaguuggu

SEQ ID NO: 356772 - RNA, 19 nt, Homo sapiens
  misc_RNA (1)...(19): siRNA sense strand
agagaaauggucagaagga

SEQ ID NO: 356773 - RNA, 19 nt, Homo sapiens
  misc_RNA (1)...(19): siRNA sense strand
gaggacaauguaaccagaa

SEQ ID NO: 356774 - RNA, 19 nt, Homo sapiens
  misc_RNA (1)...(19): siRNA sense strand
aaacgucgcaaagcagaaa

SEQ ID NO: 356775 - RNA, 19 nt, Homo sapiens
  misc_RNA (1)...(19): siRNA sense strand
gcucacaaacgucgcaaag

SEQ ID NO: 356776 - RNA, 19 nt, Homo sapiens
  misc_RNA (1)...(19): siRNA sense strand
cacagacgaggacaaugua

SEQ ID NO: 356777 - RNA, 19 nt, Homo sapiens
  misc_RNA (1)...(19): siRNA sense strand
gcaguugguggucuuucuu

SEQ ID NO: 356778 - RNA, 19 nt, Homo sapiens
  misc_RNA (1)...(19): siRNA sense strand
ccaguuuccaucaguuuau

SEQ ID NO: 356779 - RNA, 19 nt, Homo sapiens
  misc_RNA (1)...(19): siRNA sense strand
gacaccacagaagaaauua

SEQ ID NO: 356780 - RNA, 19 nt, Homo sapiens
  misc_RNA (1)...(19): siRNA sense strand
cacagaagaaauuagaaug

SEQ ID NO: 356781 - RNA, 19 nt, Homo sapiens
  misc_RNA (1)...(19): siRNA sense strand
cuaaaguaccuacccagau

SEQ ID NO: 356782 - RNA, 19 nt, Homo sapiens
  misc_RNA (1)...(19): siRNA sense strand
ugagcaaacggaagcaguu

SEQ ID NO: 356783 - RNA, 19 nt, Homo sapiens
  misc_RNA (1)...(19): siRNA sense strand
caggaucuggugacaaaug

SEQ ID NO: 356784 - RNA, 19 nt, Homo sapiens
  misc_RNA (1)...(19): siRNA sense strand
agaacagaauauagugaca

SEQ ID NO: 356785 - RNA, 19 nt, Homo sapiens
  misc_RNA (1)...(19): siRNA sense strand
gcaaagcagaaacugaaaa

SEQ ID NO: 356786 - RNA, 19 nt, Homo sapiens
  misc_RNA (1)...(19): siRNA sense strand
cuuuggaaguuacgguauu

SEQ ID NO: 356787 - RNA, 19 nt, Homo sapiens
  misc_RNA (1)...(19): siRNA sense strand
ggacaauguaaccagaaca

SEQ ID NO: 356788 - RNA, 19 nt, Homo sapiens
  misc_RNA (1)...(19): siRNA sense strand
gaagcaguugguggucuuu

SEQ ID NO: 356789 - RNA, 19 nt, Homo sapiens
  misc_RNA (1)...(19): siRNA sense strand
agacacagacgaggacaau

SEQ ID NO: 356790 - RNA, 19 nt, Homo sapiens
  misc_RNA (1)...(19): siRNA sense strand
aauguaaccagaacagaau

SEQ ID NO: 356791 - RNA, 19 nt, Homo sapiens
  misc_RNA (1)...(19): siRNA sense strand
acagcugucucaccagagu

SEQ ID NO: 356792 - RNA, 19 nt, Homo sapiens
  misc_RNA (1)...(19): siRNA sense strand
aaccagaacagaauauagu

SEQ ID NO: 356793 - RNA, 19 nt, Homo sapiens
  misc_RNA (1)...(19): siRNA sense strand
gacuacugcucacaaacgu

SEQ ID NO: 356794 - RNA, 19 nt, Homo sapiens
  misc_RNA (1)...(19): siRNA sense strand
ggagguaaccgugacuacu

SEQ ID NO: 356795 - RNA, 19 nt, Homo sapiens
  misc_RNA (1)...(19): siRNA sense strand
agcagaaacugaaaacuga

SEQ ID NO: 356796 - RNA, 19 nt, Homo sapiens
  misc_RNA (1)...(19): siRNA sense strand
uugcagagcugacauuaaa

SEQ ID NO: 356797 - RNA, 19 nt, Homo sapiens
  misc_RNA (1)...(19): siRNA sense strand
gaacagaaacugacauuuu

SEQ ID NO: 356798 - RNA, 19 nt, Homo sapiens
  misc_RNA (1)...(19): siRNA sense strand
guacauggcauccaccuuu

SEQ ID NO: 356799 - RNA, 19 nt, Homo sapiens
  misc_RNA (1)...(19): siRNA sense strand
gaagaggugcggaagauga

SEQ ID NO: 356800 - RNA, 19 nt, Homo sapiens
  misc_RNA (1)...(19): siRNA sense strand
guugaagacuccacugauu

SEQ ID NO: 356801 - RNA, 19 nt, Homo sapiens
  misc_RNA (1)...(19): siRNA sense strand
ccaaaguccuggagguuga

SEQ ID NO: 356802 - RNA, 19 nt, Homo sapiens
  misc_RNA (1)...(19): siRNA sense strand
ggccaggguucuucuuuga

SEQ ID NO: 356803 - RNA, 19 nt, Homo sapiens
  misc_RNA (1)...(19): siRNA sense strand
gcugaucgcugagggcaaa

SEQ ID NO: 356804 - RNA, 19 nt, Homo sapiens
  misc_RNA (1)...(19): siRNA sense strand
ggaacacaguggugaucaa

SEQ ID NO: 356805 - RNA, 19 nt, Homo sapiens
  misc_RNA (1)...(19): siRNA sense strand
acucaacgcugaacacuuc

SEQ ID NO: 356806 - RNA, 19 nt, Homo sapiens
  misc_RNA (1)...(19): siRNA sense strand
ggacuucauccagcuguua

SEQ ID NO: 356807 - RNA, 19 nt, Homo sapiens
  misc_RNA (1)...(19): siRNA sense strand
ccacugauuucuucaaguc

SEQ ID NO: 356808 - RNA, 19 nt, Homo sapiens
  misc_RNA (1)...(19): siRNA sense strand
gaaggagggccacgaagug

SEQ ID NO: 356809 - RNA, 19 nt, Homo sapiens
  misc_RNA (1)...(19): siRNA sense strand
gaagaccacauguucauag

SEQ ID NO: 356810 - RNA, 19 nt, Homo sapiens
  misc_RNA (1)...(19): siRNA sense strand
caaaggagagaauugcauu

SEQ ID NO: 356811 - RNA, 19 nt, Homo sapiens
  misc_RNA (1)...(19): siRNA sense strand
gugauggccuggaguuaga

SEQ ID NO: 356812 - RNA, 19 nt, Homo sapiens
  misc_RNA (1)...(19): siRNA sense strand
gagugccgguauucaagua

SEQ ID NO: 356813 - RNA, 19 nt, Homo sapiens
  misc_RNA (1)...(19): siRNA sense strand
agacagugaccuucgaaua

SEQ ID NO: 356814 - RNA, 19 nt, Homo sapiens
  misc_RNA (1)...(19): siRNA sense strand
ggaaggagccaccuaugag

SEQ ID NO: 356815 - RNA, 19 nt, Homo sapiens
  misc_RNA (1)...(19): siRNA sense strand
uagaagaggugcggaagau

SEQ ID NO: 356816 - RNA, 19 nt, Homo sapiens
  misc_RNA (1)...(19): siRNA sense strand
ggaagaccacauguucaua

SEQ ID NO: 356817 - RNA, 19 nt, Homo sapiens
  misc_RNA (1)...(19): siRNA sense strand
agacuccacugauuucuuc

SEQ ID NO: 356818 - RNA, 19 nt, Homo sapiens
  misc_RNA (1)...(19): siRNA sense strand
ccaaaggugugguuaacgu

SEQ ID NO: 356819 - RNA, 19 nt, Homo sapiens
  misc_RNA (1)...(19): siRNA sense strand
ggaaauggcagugaacaag

SEQ ID NO: 356820 - RNA, 19 nt, Homo sapiens
  misc_RNA (1)...(19): siRNA sense strand
guacaaccgcuuccucuuc

SEQ ID NO: 356821 - RNA, 19 nt, Homo sapiens
  misc_RNA (1)...(19): siRNA sense strand
uugugaagcugauggagua

SEQ ID NO: 356822 - RNA, 19 nt, Homo sapiens
  misc_RNA (1)...(19): siRNA sense strand
gcagcaggccgacucuuug

SEQ ID NO: 356823 - RNA, 19 nt, Homo sapiens
  misc_RNA (1)...(19): siRNA sense strand
gaaggagacagccaagauc

SEQ ID NO: 356824 - RNA, 19 nt, Homo sapiens
  misc_RNA (1)...(19): siRNA sense strand
ggaaggagggccacgaagu

SEQ ID NO: 356825 - RNA, 19 nt, Homo sapiens
  misc_RNA (1)...(19): siRNA sense strand
gaagauugcagugauugga

SEQ ID NO: 356826 - RNA, 19 nt, Homo sapiens
  misc_RNA (1)...(19): siRNA sense strand
caacaaggcccuguauguc

SEQ ID NO: 356827 - RNA, 19 nt, Homo sapiens
  misc_RNA (1)...(19): siRNA sense strand
ucaacaaggcccuguaugu

SEQ ID NO: 356828 - RNA, 19 nt, Homo sapiens
  misc_RNA (1)...(19): siRNA sense strand
aaaugcugcuggugaagaa

SEQ ID NO: 356829 - RNA, 19 nt, Homo sapiens
  misc_RNA (1)...(19): siRNA sense strand
aggcggcucugaacgagua

SEQ ID NO: 356830 - RNA, 19 nt, Homo sapiens
  misc_RNA (1)...(19): siRNA sense strand
gaaucaccaugcccaccuu

SEQ ID NO: 356831 - RNA, 19 nt, Homo sapiens
  misc_RNA (1)...(19): siRNA sense strand
gagggcgagugcagcauug

SEQ ID NO: 356832 - RNA, 19 nt, Homo sapiens
  misc_RNA (1)...(19): siRNA sense strand
ugaugaugcuguccuggaa

SEQ ID NO: 356833 - RNA, 19 nt, Homo sapiens
  misc_RNA (1)...(19): siRNA sense strand
gaucaucucucgguuugcu

SEQ ID NO: 356834 - RNA, 19 nt, Homo sapiens
  misc_RNA (1)...(19): siRNA sense strand
gcaagcacaucaugaaaag

SEQ ID NO: 356835 - RNA, 19 nt, Homo sapiens
  misc_RNA (1)...(19): siRNA sense strand
gggcaagcacaucaugaaa

SEQ ID NO: 356836 - RNA, 19 nt, Homo sapiens
  misc_RNA (1)...(19): siRNA sense strand
gacagugaccuucgaauac

SEQ ID NO: 356837 - RNA, 19 nt, Homo sapiens
  misc_RNA (1)...(19): siRNA sense strand
cagaggccauucacaacug

SEQ ID NO: 356838 - RNA, 19 nt, Homo sapiens
  misc_RNA (1)...(19): siRNA sense strand
ucaagacagugaccuucga

SEQ ID NO: 356839 - RNA, 19 nt, Homo sapiens
  misc_RNA (1)...(19): siRNA sense strand
gaugaguucuguuuucuuc

SEQ ID NO: 356840 - RNA, 19 nt, Homo sapiens
  misc_RNA (1)...(19): siRNA sense strand
acucacagccuugaaguuu

SEQ ID NO: 356841 - RNA, 19 nt, Homo sapiens
  misc_RNA (1)...(19): siRNA sense strand
gaacacaguggugaucaag

SEQ ID NO: 356842 - RNA, 19 nt, Homo sapiens
  misc_RNA (1)...(19): siRNA sense strand
ggagggcgagugcagcauu

SEQ ID NO: 356843 - RNA, 19 nt, Homo sapiens
  misc_RNA (1)...(19): siRNA sense strand
caccaaagcaggacucauc

SEQ ID NO: 356844 - RNA, 19 nt, Homo sapiens
  misc_RNA (1)...(19): siRNA sense strand
gaggaaggagggccacgaa

SEQ ID NO: 356845 - RNA, 19 nt, Homo sapiens
  misc_RNA (1)...(19): siRNA sense strand
ccaggcaggcacuguguuu

SEQ ID NO: 356846 - RNA, 19 nt, Homo sapiens
  misc_RNA (1)...(19): siRNA sense strand
caacaaaggagagaauugc

SEQ ID NO: 356847 - RNA, 19 nt, Homo sapiens
  misc_RNA (1)...(19): siRNA sense strand
cggcagaggccauucacaa

SEQ ID NO: 356848 - RNA, 19 nt, Homo sapiens
  misc_RNA (1)...(19): siRNA sense strand
gucaacacguacaacaaga

SEQ ID NO: 356849 - RNA, 19 nt, Homo sapiens
  misc_RNA (1)...(19): siRNA sense strand
gggccaaugccacggaauu

SEQ ID NO: 356850 - RNA, 19 nt, Homo sapiens
  misc_RNA (1)...(19): siRNA sense strand
gugaacagaaacugacauu

SEQ ID NO: 356851 - RNA, 19 nt, Homo sapiens
  misc_RNA (1)...(19): siRNA sense strand
gcagagcugacauuaaagg

SEQ ID NO: 356852 - RNA, 19 nt, Homo sapiens
  misc_RNA (1)...(19): siRNA sense strand
cagcauugacuacguggaa

SEQ ID NO: 356853 - RNA, 19 nt, Homo sapiens
  misc_RNA (1)...(19): siRNA sense strand
ugaagacuccacugauuuc

SEQ ID NO: 356854 - RNA, 19 nt, Homo sapiens
  misc_RNA (1)...(19): siRNA sense strand
aaaugauccuggccucgaa

SEQ ID NO: 356855 - RNA, 19 nt, Homo sapiens
  misc_RNA (1)...(19): siRNA sense strand
gcagaggccauucacaacu

SEQ ID NO: 356856 - RNA, 19 nt, Homo sapiens
  misc_RNA (1)...(19): siRNA sense strand
gauucaaacagucuggauu

SEQ ID NO: 356857 - RNA, 19 nt, Homo sapiens
  misc_RNA (1)...(19): siRNA sense strand
ggccaaugccacggaauuu

SEQ ID NO: 356858 - RNA, 19 nt, Homo sapiens
  misc_RNA (1)...(19): siRNA sense strand
gauccuggccucgaacuuc

SEQ ID NO: 356859 - RNA, 19 nt, Homo sapiens
  misc_RNA (1)...(19): siRNA sense strand
gaggcugugcggaguguuu

SEQ ID NO: 356860 - RNA, 19 nt, Homo sapiens
  misc_RNA (1)...(19): siRNA sense strand
gaauuuggccuggcuucug

SEQ ID NO: 356861 - RNA, 19 nt, Homo sapiens
  misc_RNA (1)...(19): siRNA sense strand
guggguguguucacuguuc

SEQ ID NO: 356862 - RNA, 19 nt, Homo sapiens
  misc_RNA (1)...(19): siRNA sense strand
cggccaggguucuucuuug

SEQ ID NO: 356863 - RNA, 19 nt, Homo sapiens
  misc_RNA (1)...(19): siRNA sense strand
guagaagaggugcggaaga

SEQ ID NO: 356864 - RNA, 19 nt, Homo sapiens
  misc_RNA (1)...(19): siRNA sense strand
ucaacaaaggagagaauug

SEQ ID NO: 356865 - RNA, 19 nt, Homo sapiens
  misc_RNA (1)...(19): siRNA sense strand
ucacagccuugaaguuugc

SEQ ID NO: 356866 - RNA, 19 nt, Homo sapiens
  misc_RNA (1)...(19): siRNA sense strand
gaggaaggagccaccuaug

SEQ ID NO: 356867 - RNA, 19 nt, Homo sapiens
  misc_RNA (1)...(19): siRNA sense strand
caucaacaaggcccuguau

SEQ ID NO: 356868 - RNA, 19 nt, Homo sapiens
  misc_RNA (1)...(19): siRNA sense strand
agaaggagacagccaagau

SEQ ID NO: 356869 - RNA, 19 nt, Homo sapiens
  misc_RNA (1)...(19): siRNA sense strand
ugaagcugauggaguacug

SEQ ID NO: 356870 - RNA, 19 nt, Homo sapiens
  misc_RNA (1)...(19): siRNA sense strand
ucuggaagcugagaaggau

SEQ ID NO: 356871 - RNA, 19 nt, Homo sapiens
  misc_RNA (1)...(19): siRNA sense strand
gaaguuugcagagcugaca

SEQ ID NO: 356872 - RNA, 19 nt, Homo sapiens
  misc_RNA (1)...(19): siRNA sense strand
uacauggcauccaccuuug

SEQ ID NO: 356873 - RNA, 19 nt, Homo sapiens
  misc_RNA (1)...(19): siRNA sense strand
uugaagacuccacugauuu

SEQ ID NO: 356874 - RNA, 19 nt, Homo sapiens
  misc_RNA (1)...(19): siRNA sense strand
ggagacagccaagaucaac

SEQ ID NO: 356875 - RNA, 19 nt, Homo sapiens
  misc_RNA (1)...(19): siRNA sense strand
caagacagugaccuucgaa

SEQ ID NO: 356876 - RNA, 19 nt, Homo sapiens
  misc_RNA (1)...(19): siRNA sense strand
augaucaucucucgguuug

SEQ ID NO: 356877 - RNA, 19 nt, Homo sapiens
  misc_RNA (1)...(19): siRNA sense strand
caugaucaucucucgguuu

SEQ ID NO: 356878 - RNA, 19 nt, Homo sapiens
  misc_RNA (1)...(19): siRNA sense strand
caccaugcccaccuuguga

SEQ ID NO: 356879 - RNA, 19 nt, Homo sapiens
  misc_RNA (1)...(19): siRNA sense strand
gaggugggcaagcacauca

SEQ ID NO: 356880 - RNA, 19 nt, Homo sapiens
  misc_RNA (1)...(19): siRNA sense strand
gugaaggagcugugugaug

SEQ ID NO: 356881 - RNA, 19 nt, Homo sapiens
  misc_RNA (1)...(19): siRNA sense strand
gcuggaggauggcaaaaug

SEQ ID NO: 356882 - RNA, 19 nt, Homo sapiens
  misc_RNA (1)...(19): siRNA sense strand
auucaaacagucuggauuu

SEQ ID NO: 356883 - RNA, 19 nt, Homo sapiens
  misc_RNA (1)...(19): siRNA sense strand
gcgagugcagcauugacua

SEQ ID NO: 356884 - RNA, 19 nt, Homo sapiens
  misc_RNA (1)...(19): siRNA sense strand
ucaacuggacccucauuca

SEQ ID NO: 356885 - RNA, 19 nt, Homo sapiens
  misc_RNA (1)...(19): siRNA sense strand
ugaggaaggagccaccuau

SEQ ID NO: 356886 - RNA, 19 nt, Homo sapiens
  misc_RNA (1)...(19): siRNA sense strand
gccucgaacuucuuuaagg

SEQ ID NO: 356887 - RNA, 19 nt, Homo sapiens
  misc_RNA (1)...(19): siRNA sense strand
acaaaaugcugcuggugaa

SEQ ID NO: 356888 - RNA, 19 nt, Homo sapiens
  misc_RNA (1)...(19): siRNA sense strand
aggaaggagccaccuauga

SEQ ID NO: 356889 - RNA, 19 nt, Homo sapiens
  misc_RNA (1)...(19): siRNA sense strand
acagugaccuucgaauacu

SEQ ID NO: 356890 - RNA, 19 nt, Homo sapiens
  misc_RNA (1)...(19): siRNA sense strand
cuucgggccugucaugauc

SEQ ID NO: 356891 - RNA, 19 nt, Homo sapiens
  misc_RNA (1)...(19): siRNA sense strand
agugucaucugccagguau

SEQ ID NO: 356892 - RNA, 19 nt, Homo sapiens
  misc_RNA (1)...(19): siRNA sense strand
gcauugacuacguggaaau

SEQ ID NO: 356893 - RNA, 19 nt, Homo sapiens
  misc_RNA (1)...(19): siRNA sense strand
ggaagugaaggagcugugu

SEQ ID NO: 356894 - RNA, 19 nt, Homo sapiens
  misc_RNA (1)...(19): siRNA sense strand
guuagaaaaugaagaugug

SEQ ID NO: 356895 - RNA, 19 nt, Homo sapiens
  misc_RNA (1)...(19): siRNA sense strand
ggagugccgguauucaagu

SEQ ID NO: 356896 - RNA, 19 nt, Homo sapiens
  misc_RNA (1)...(19): siRNA sense strand
gaacagaaacugacauuuu

SEQ ID NO: 356897 - RNA, 19 nt, Homo sapiens
  misc_RNA (1)...(19): siRNA sense strand
guacauggcauccaccuuu

SEQ ID NO: 356898 - RNA, 19 nt, Homo sapiens
  misc_RNA (1)...(19): siRNA sense strand
guugaagacuccacugauu

SEQ ID NO: 356899 - RNA, 19 nt, Homo sapiens
  misc_RNA (1)...(19): siRNA sense strand
ccaaaguccuggagguuga

SEQ ID NO: 356900 - RNA, 19 nt, Homo sapiens
  misc_RNA (1)...(19): siRNA sense strand
gcugaucgcugagggcaaa

SEQ ID NO: 356901 - RNA, 19 nt, Homo sapiens
  misc_RNA (1)...(19): siRNA sense strand
acucaacgcugaacacuuc

SEQ ID NO: 356902 - RNA, 19 nt, Homo sapiens
  misc_RNA (1)...(19): siRNA sense strand
ggacuucauccagcuguua

SEQ ID NO: 356903 - RNA, 19 nt, Homo sapiens
  misc_RNA (1)...(19): siRNA sense strand
ccacugauuucuucaaguc

SEQ ID NO: 356904 - RNA, 19 nt, Homo sapiens
  misc_RNA (1)...(19): siRNA sense strand
gaaggagggccacgaagug

SEQ ID NO: 356905 - RNA, 19 nt, Homo sapiens
  misc_RNA (1)...(19): siRNA sense strand
gugauggccuggaguuaga

SEQ ID NO: 356906 - RNA, 19 nt, Homo sapiens
  misc_RNA (1)...(19): siRNA sense strand
gagugccgguauucaagua

SEQ ID NO: 356907 - RNA, 19 nt, Homo sapiens
  misc_RNA (1)...(19): siRNA sense strand
ggaaggagccaccuaugag

SEQ ID NO: 356908 - RNA, 19 nt, Homo sapiens
  misc_RNA (1)...(19): siRNA sense strand
agacuccacugauuucuuc

SEQ ID NO: 356909 - RNA, 19 nt, Homo sapiens
  misc_RNA (1)...(19): siRNA sense strand
ggaaauggcagugaacaag

SEQ ID NO: 356910 - RNA, 19 nt, Homo sapiens
  misc_RNA (1)...(19): siRNA sense strand
guacaaccgcuuccucuuc

SEQ ID NO: 356911 - RNA, 19 nt, Homo sapiens
  misc_RNA (1)...(19): siRNA sense strand
ggaaggagggccacgaagu

SEQ ID NO: 356912 - RNA, 19 nt, Homo sapiens
  misc_RNA (1)...(19): siRNA sense strand
gaaggagacagccaagauc

SEQ ID NO: 356913 - RNA, 19 nt, Homo sapiens
  misc_RNA (1)...(19): siRNA sense strand
gaagauugcagugauugga

SEQ ID NO: 356914 - RNA, 19 nt, Homo sapiens
  misc_RNA (1)...(19): siRNA sense strand
aaaugcugcuggugaagaa

SEQ ID NO: 356915 - RNA, 19 nt, Homo sapiens
  misc_RNA (1)...(19): siRNA sense strand
gagggcgagugcagcauug

SEQ ID NO: 356916 - RNA, 19 nt, Homo sapiens
  misc_RNA (1)...(19): siRNA sense strand
cagaggccauucacaacug

SEQ ID NO: 356917 - RNA, 19 nt, Homo sapiens
  misc_RNA (1)...(19): siRNA sense strand
ggagggcgagugcagcauu

SEQ ID NO: 356918 - RNA, 19 nt, Homo sapiens
  misc_RNA (1)...(19): siRNA sense strand
caccaaagcaggacucauc

SEQ ID NO: 356919 - RNA, 19 nt, Homo sapiens
  misc_RNA (1)...(19): siRNA sense strand
gaggaaggagggccacgaa

SEQ ID NO: 356920 - RNA, 19 nt, Homo sapiens
  misc_RNA (1)...(19): siRNA sense strand
cggcagaggccauucacaa

SEQ ID NO: 356921 - RNA, 19 nt, Homo sapiens
  misc_RNA (1)...(19): siRNA sense strand
gugaacagaaacugacauu

SEQ ID NO: 356922 - RNA, 19 nt, Homo sapiens
  misc_RNA (1)...(19): siRNA sense strand
cagcauugacuacguggaa

SEQ ID NO: 356923 - RNA, 19 nt, Homo sapiens
  misc_RNA (1)...(19): siRNA sense strand
ugaagacuccacugauuuc

SEQ ID NO: 356924 - RNA, 19 nt, Homo sapiens
  misc_RNA (1)...(19): siRNA sense strand
aaaugauccuggccucgaa

SEQ ID NO: 356925 - RNA, 19 nt, Homo sapiens
  misc_RNA (1)...(19): siRNA sense strand
gcagaggccauucacaacu

SEQ ID NO: 356926 - RNA, 19 nt, Homo sapiens
  misc_RNA (1)...(19): siRNA sense strand
gauccuggccucgaacuuc

SEQ ID NO: 356927 - RNA, 19 nt, Homo sapiens
  misc_RNA (1)...(19): siRNA sense strand
guggguguguucacuguuc

SEQ ID NO: 356928 - RNA, 19 nt, Homo sapiens
  misc_RNA (1)...(19): siRNA sense strand
gaggcugugcggaguguuu

SEQ ID NO: 356929 - RNA, 19 nt, Homo sapiens
  misc_RNA (1)...(19): siRNA sense strand
gaggaaggagccaccuaug

SEQ ID NO: 356930 - RNA, 19 nt, Homo sapiens
  misc_RNA (1)...(19): siRNA sense strand
agaaggagacagccaagau

SEQ ID NO: 356931 - RNA, 19 nt, Homo sapiens
  misc_RNA (1)...(19): siRNA sense strand
uacauggcauccaccuuug

SEQ ID NO: 356932 - RNA, 19 nt, Homo sapiens
  misc_RNA (1)...(19): siRNA sense strand
uugaagacuccacugauuu

SEQ ID NO: 356933 - RNA, 19 nt, Homo sapiens
  misc_RNA (1)...(19): siRNA sense strand
ucuggaagcugagaaggau

SEQ ID NO: 356934 - RNA, 19 nt, Homo sapiens
  misc_RNA (1)...(19): siRNA sense strand
ggagacagccaagaucaac

SEQ ID NO: 356935 - RNA, 19 nt, Homo sapiens
  misc_RNA (1)...(19): siRNA sense strand
gugaaggagcugugugaug

SEQ ID NO: 356936 - RNA, 19 nt, Homo sapiens
  misc_RNA (1)...(19): siRNA sense strand
ucaacuggacccucauuca

SEQ ID NO: 356937 - RNA, 19 nt, Homo sapiens
  misc_RNA (1)...(19): siRNA sense strand
gcgagugcagcauugacua

SEQ ID NO: 356938 - RNA, 19 nt, Homo sapiens
  misc_RNA (1)...(19): siRNA sense strand
gcuggaggauggcaaaaug

SEQ ID NO: 356939 - RNA, 19 nt, Homo sapiens
  misc_RNA (1)...(19): siRNA sense strand
ugaggaaggagccaccuau

SEQ ID NO: 356940 - RNA, 19 nt, Homo sapiens
  misc_RNA (1)...(19): siRNA sense strand
gccucgaacuucuuuaagg

SEQ ID NO: 356941 - RNA, 19 nt, Homo sapiens
  misc_RNA (1)...(19): siRNA sense strand
acaaaaugcugcuggugaa

SEQ ID NO: 356942 - RNA, 19 nt, Homo sapiens
  misc_RNA (1)...(19): siRNA sense strand
aggaaggagccaccuauga

SEQ ID NO: 356943 - RNA, 19 nt, Homo sapiens
  misc_RNA (1)...(19): siRNA sense strand
agugucaucugccagguau

SEQ ID NO: 356944 - RNA, 19 nt, Homo sapiens
  misc_RNA (1)...(19): siRNA sense strand
gcauugacuacguggaaau

SEQ ID NO: 356945 - RNA, 19 nt, Homo sapiens
  misc_RNA (1)...(19): siRNA sense strand
ggaagugaaggagcugugu

SEQ ID NO: 356946 - RNA, 19 nt, Homo sapiens
  misc_RNA (1)...(19): siRNA sense strand
guuagaaaaugaagaugug

SEQ ID NO: 356947 - RNA, 19 nt, Homo sapiens
  misc_RNA (1)...(19): siRNA sense strand
caucaacuggacccucauu

SEQ ID NO: 356948 - RNA, 19 nt, Homo sapiens
  misc_RNA (1)...(19): siRNA sense strand
gacagaggcagagcugguu

SEQ ID NO: 356949 - RNA, 19 nt, Homo sapiens
  misc_RNA (1)...(19): siRNA sense strand
ggagugccgguauucaagu

SEQ ID NO: 356950 - RNA, 19 nt, Homo sapiens
  misc_RNA (1)...(19): siRNA sense strand
cgaagugguggguguguuc

SEQ ID NO: 356951 - RNA, 19 nt, Homo sapiens
  misc_RNA (1)...(19): siRNA sense strand
caacuggacccucauucac

SEQ ID NO: 356952 - RNA, 19 nt, Homo sapiens
  misc_RNA (1)...(19): siRNA sense strand
cccaccagcucuucauugg

SEQ ID NO: 356953 - RNA, 19 nt, Homo sapiens
  misc_RNA (1)...(19): siRNA sense strand
ggauggagugccgguauuc

SEQ ID NO: 356954 - RNA, 19 nt, Homo sapiens
  misc_RNA (1)...(19): siRNA sense strand
acagaggcagagcugguua

SEQ ID NO: 356955 - RNA, 19 nt, Homo sapiens
  misc_RNA (1)...(19): siRNA sense strand
gggacuucauccagcuguu

SEQ ID NO: 356956 - RNA, 19 nt, Homo sapiens
  misc_RNA (1)...(19): siRNA sense strand
aggauggagugccgguauu

SEQ ID NO: 356957 - RNA, 19 nt, Homo sapiens
  misc_RNA (1)...(19): siRNA sense strand
ucacuguuccagacaagga

SEQ ID NO: 356958 - RNA, 19 nt, Homo sapiens
  misc_RNA (1)...(19): siRNA sense strand
cugaugugguggcaaaaua

SEQ ID NO: 356959 - RNA, 19 nt, Homo sapiens
  misc_RNA (1)...(19): siRNA sense strand
ggacaaagacagacaaguu

SEQ ID NO: 356960 - RNA, 19 nt, Homo sapiens
  misc_RNA (1)...(19): siRNA sense strand
ucacaccgcucauccagua

SEQ ID NO: 356961 - RNA, 19 nt, Homo sapiens
  misc_RNA (1)...(19): siRNA sense strand
gaucgauucuucuagguuu

SEQ ID NO: 356962 - RNA, 19 nt, Homo sapiens
  misc_RNA (1)...(19): siRNA sense strand
gaaaugcacagcucuuauu

SEQ ID NO: 356963 - RNA, 19 nt, Homo sapiens
  misc_RNA (1)...(19): siRNA sense strand
ccaaggaguucacugauau

SEQ ID NO: 356964 - RNA, 19 nt, Homo sapiens
  misc_RNA (1)...(19): siRNA sense strand
gacaaagacagacaaguua

SEQ ID NO: 356965 - RNA, 19 nt, Homo sapiens
  misc_RNA (1)...(19): siRNA sense strand
gaaccaauucugaucagua

SEQ ID NO: 356966 - RNA, 19 nt, Homo sapiens
  misc_RNA (1)...(19): siRNA sense strand
gccaaggaguucacugaua

SEQ ID NO: 356967 - RNA, 19 nt, Homo sapiens
  misc_RNA (1)...(19): siRNA sense strand
ggugaauucuggaaaggua

SEQ ID NO: 356968 - RNA, 19 nt, Homo sapiens
  misc_RNA (1)...(19): siRNA sense strand
gagaagagaggaaaugguu

SEQ ID NO: 356969 - RNA, 19 nt, Homo sapiens
  misc_RNA (1)...(19): siRNA sense strand
gcacagagaagaucaacau

SEQ ID NO: 356970 - RNA, 19 nt, Homo sapiens
  misc_RNA (1)...(19): siRNA sense strand
ggauuugccuggccagaga

SEQ ID NO: 356971 - RNA, 19 nt, Homo sapiens
  misc_RNA (1)...(19): siRNA sense strand
ggucaaaucuucaaaagga

SEQ ID NO: 356972 - RNA, 19 nt, Homo sapiens
  misc_RNA (1)...(19): siRNA sense strand
cucaguaugugcuauaaua

SEQ ID NO: 356973 - RNA, 19 nt, Homo sapiens
  misc_RNA (1)...(19): siRNA sense strand
guucauugcugcagguuug

SEQ ID NO: 356974 - RNA, 19 nt, Homo sapiens
  misc_RNA (1)...(19): siRNA sense strand
gcaugugucuuucagucaa

SEQ ID NO: 356975 - RNA, 19 nt, Homo sapiens
  misc_RNA (1)...(19): siRNA sense strand
cagcugcaguucuuccuuu

SEQ ID NO: 356976 - RNA, 19 nt, Homo sapiens
  misc_RNA (1)...(19): siRNA sense strand
caagaaggacuuaagaaca

SEQ ID NO: 356977 - RNA, 19 nt, Homo sapiens
  misc_RNA (1)...(19): siRNA sense strand
aaaggagccugaacugugu

SEQ ID NO: 356978 - RNA, 19 nt, Homo sapiens
  misc_RNA (1)...(19): siRNA sense strand
cgugugugauugccuguua

SEQ ID NO: 356979 - RNA, 19 nt, Homo sapiens
  misc_RNA (1)...(19): siRNA sense strand
uagaaagacugauggucaa

SEQ ID NO: 356980 - RNA, 19 nt, Homo sapiens
  misc_RNA (1)...(19): siRNA sense strand
gaaaaccauugucaucuug

SEQ ID NO: 356981 - RNA, 19 nt, Homo sapiens
  misc_RNA (1)...(19): siRNA sense strand
gcaaauucccaccacagaa

SEQ ID NO: 356982 - RNA, 19 nt, Homo sapiens
  misc_RNA (1)...(19): siRNA sense strand
gcucaaguguggcuaugau

SEQ ID NO: 356983 - RNA, 19 nt, Homo sapiens
  misc_RNA (1)...(19): siRNA sense strand
gcuacaacgugaccaagau

SEQ ID NO: 356984 - RNA, 19 nt, Homo sapiens
  misc_RNA (1)...(19): siRNA sense strand
gcuaugaugcuggcuuaua

SEQ ID NO: 356985 - RNA, 19 nt, Homo sapiens
  misc_RNA (1)...(19): siRNA sense strand
ggaagggccaggugaugaa

SEQ ID NO: 356986 - RNA, 19 nt, Homo sapiens
  misc_RNA (1)...(19): siRNA sense strand
gaacgaccacaaccacaug

SEQ ID NO: 356987 - RNA, 19 nt, Homo sapiens
  misc_RNA (1)...(19): siRNA sense strand
uggcuaugaugcuggcuua

SEQ ID NO: 356988 - RNA, 19 nt, Homo sapiens
  misc_RNA (1)...(19): siRNA sense strand
agucugaacugcagcaaau

SEQ ID NO: 356989 - RNA, 19 nt, Homo sapiens
  misc_RNA (1)...(19): siRNA sense strand
ggaaagguaaagagagaga

SEQ ID NO: 356990 - RNA, 19 nt, Homo sapiens
  misc_RNA (1)...(19): siRNA sense strand
cccaucauauuucucagua

SEQ ID NO: 356991 - RNA, 19 nt, Homo sapiens
  misc_RNA (1)...(19): siRNA sense strand
ggucaugaagccauugaaa

SEQ ID NO: 356992 - RNA, 19 nt, Homo sapiens
  misc_RNA (1)...(19): siRNA sense strand
gccagaaccucggcuacaa

SEQ ID NO: 356993 - RNA, 19 nt, Homo sapiens
  misc_RNA (1)...(19): siRNA sense strand
ggaugcagaugaacugacu

SEQ ID NO: 356994 - RNA, 19 nt, Homo sapiens
  misc_RNA (1)...(19): siRNA sense strand
caaguuagaaagacugaug

SEQ ID NO: 356995 - RNA, 19 nt, Homo sapiens
  misc_RNA (1)...(19): siRNA sense strand
caaagacagacaaguuaga

SEQ ID NO: 356996 - RNA, 19 nt, Homo sapiens
  misc_RNA (1)...(19): siRNA sense strand
gaaagacugauggucaaga

SEQ ID NO: 356997 - RNA, 19 nt, Homo sapiens
  misc_RNA (1)...(19): siRNA sense strand
gcucuuauuuccacauugc

SEQ ID NO: 356998 - RNA, 19 nt, Homo sapiens
  misc_RNA (1)...(19): siRNA sense strand
cuggaaagguaaagagaga

SEQ ID NO: 356999 - RNA, 19 nt, Homo sapiens
  misc_RNA (1)...(19): siRNA sense strand
aaagacugauggucaagau

SEQ ID NO: 357000 - RNA, 19 nt, Homo sapiens
  misc_RNA (1)...(19): siRNA sense strand
ugaacugugugcucaagug

SEQ ID NO: 357001 - RNA, 19 nt, Homo sapiens
  misc_RNA (1)...(19): siRNA sense strand
aaaauucggucaaaucuuc

SEQ ID NO: 357002 - RNA, 19 nt, Homo sapiens
  misc_RNA (1)...(19): siRNA sense strand
ccugaaggaauuuggauuu

SEQ ID NO: 357003 - RNA, 19 nt, Homo sapiens
  misc_RNA (1)...(19): siRNA sense strand
uuacuuauuuggucauugg

SEQ ID NO: 357004 - RNA, 19 nt, Homo sapiens
  misc_RNA (1)...(19): siRNA sense strand
ugaccuuccugaucgauuc

SEQ ID NO: 357005 - RNA, 19 nt, Homo sapiens
  misc_RNA (1)...(19): siRNA sense strand
gaacugugugcucaagugu

SEQ ID NO: 357006 - RNA, 19 nt, Homo sapiens
  misc_RNA (1)...(19): siRNA sense strand
gacagacaaguuagaaaga

SEQ ID NO: 357007 - RNA, 19 nt, Homo sapiens
  misc_RNA (1)...(19): siRNA sense strand
ccauugucaucuugauuau

SEQ ID NO: 357008 - RNA, 19 nt, Homo sapiens
  misc_RNA (1)...(19): siRNA sense strand
caucuccacugccuucaca

SEQ ID NO: 357009 - RNA, 19 nt, Homo sapiens
  misc_RNA (1)...(19): siRNA sense strand
agacugauggucaagauug

SEQ ID NO: 357010 - RNA, 19 nt, Homo sapiens
  misc_RNA (1)...(19): siRNA sense strand
cagcucuuauuuccacauu

SEQ ID NO: 357011 - RNA, 19 nt, Homo sapiens
  misc_RNA (1)...(19): siRNA sense strand
cugcaguucuuccuuuguu

SEQ ID NO: 357012 - RNA, 19 nt, Homo sapiens
  misc_RNA (1)...(19): siRNA sense strand
ggacuuaagaacacaggau

SEQ ID NO: 357013 - RNA, 19 nt, Homo sapiens
  misc_RNA (1)...(19): siRNA sense strand
gcugugaacccguccugaa

SEQ ID NO: 357014 - RNA, 19 nt, Homo sapiens
  misc_RNA (1)...(19): siRNA sense strand
cuaugaugcuggcuuauac

SEQ ID NO: 357015 - RNA, 19 nt, Homo sapiens
  misc_RNA (1)...(19): siRNA sense strand
aagaaggacuuaagaacac

SEQ ID NO: 357016 - RNA, 19 nt, Homo sapiens
  misc_RNA (1)...(19): siRNA sense strand
cugaaggaauuuggauuug

SEQ ID NO: 357017 - RNA, 19 nt, Homo sapiens
  misc_RNA (1)...(19): siRNA sense strand
aaagacagacaaguuagaa

SEQ ID NO: 357018 - RNA, 19 nt, Homo sapiens
  misc_RNA (1)...(19): siRNA sense strand
ccaagaaggacuuaagaac

SEQ ID NO: 357019 - RNA, 19 nt, Homo sapiens
  misc_RNA (1)...(19): siRNA sense strand
cagccaaggaguucacuga

SEQ ID NO: 357020 - RNA, 19 nt, Homo sapiens
  misc_RNA (1)...(19): siRNA sense strand
gaaagguaaagagagagaa

SEQ ID NO: 357021 - RNA, 19 nt, Homo sapiens
  misc_RNA (1)...(19): siRNA sense strand
guucuuccuuuguucuguu

SEQ ID NO: 357022 - RNA, 19 nt, Homo sapiens
  misc_RNA (1)...(19): siRNA sense strand
uuuaugaaaucuccaacug

SEQ ID NO: 357023 - RNA, 19 nt, Homo sapiens
  misc_RNA (1)...(19): siRNA sense strand
ggaaccaauucugaucagu

SEQ ID NO: 357024 - RNA, 19 nt, Homo sapiens
  misc_RNA (1)...(19): siRNA sense strand
cagguuugguggccuuguu

SEQ ID NO: 357025 - RNA, 19 nt, Homo sapiens
  misc_RNA (1)...(19): siRNA sense strand
accauugucaucuugauua

SEQ ID NO: 357026 - RNA, 19 nt, Homo sapiens
  misc_RNA (1)...(19): siRNA sense strand
caaauucccaccacagaac

SEQ ID NO: 357027 - RNA, 19 nt, Homo sapiens
  misc_RNA (1)...(19): siRNA sense strand
ugaaaugcacagcucuuau

SEQ ID NO: 357028 - RNA, 19 nt, Homo sapiens
  misc_RNA (1)...(19): siRNA sense strand
gauauccugugauuuugaa

SEQ ID NO: 357029 - RNA, 19 nt, Homo sapiens
  misc_RNA (1)...(19): siRNA sense strand
ugacuggcuugugcuaugu

SEQ ID NO: 357030 - RNA, 19 nt, Homo sapiens
  misc_RNA (1)...(19): siRNA sense strand
ugaccaagaugcccaaccu

SEQ ID NO: 357031 - RNA, 19 nt, Homo sapiens
  misc_RNA (1)...(19): siRNA sense strand
agacagacaaguuagaaag

SEQ ID NO: 357032 - RNA, 19 nt, Homo sapiens
  misc_RNA (1)...(19): siRNA sense strand
ugaaaaccauugucaucuu

SEQ ID NO: 357033 - RNA, 19 nt, Homo sapiens
  misc_RNA (1)...(19): siRNA sense strand
ugaugaagaggugcccuua

SEQ ID NO: 357034 - RNA, 19 nt, Homo sapiens
  misc_RNA (1)...(19): siRNA sense strand
cuucaggcauguggauuug

SEQ ID NO: 357035 - RNA, 19 nt, Homo sapiens
  misc_RNA (1)...(19): siRNA sense strand
gguauucugcagaugauuc

SEQ ID NO: 357036 - RNA, 19 nt, Homo sapiens
  misc_RNA (1)...(19): siRNA sense strand
cugacuggcuugugcuaug

SEQ ID NO: 357037 - RNA, 19 nt, Homo sapiens
  misc_RNA (1)...(19): siRNA sense strand
aaaccauugucaucuugau

SEQ ID NO: 357038 - RNA, 19 nt, Homo sapiens
  misc_RNA (1)...(19): siRNA sense strand
gcaucuccaugugccagaa

SEQ ID NO: 357039 - RNA, 19 nt, Homo sapiens
  misc_RNA (1)...(19): siRNA sense strand
gggaaccaauucugaucag

SEQ ID NO: 357040 - RNA, 19 nt, Homo sapiens
  misc_RNA (1)...(19): siRNA sense strand
aaccaauucugaucaguac

SEQ ID NO: 357041 - RNA, 19 nt, Homo sapiens
  misc_RNA (1)...(19): siRNA sense strand
gagagaagagaggaaaugg

SEQ ID NO: 357042 - RNA, 19 nt, Homo sapiens
  misc_RNA (1)...(19): siRNA sense strand
cauggcuguugaaauguug

SEQ ID NO: 357043 - RNA, 19 nt, Homo sapiens
  misc_RNA (1)...(19): siRNA sense strand
uggcuccccucuuuacuua

SEQ ID NO: 357044 - RNA, 19 nt, Homo sapiens
  misc_RNA (1)...(19): siRNA sense strand
acugguggaugcagaugaa

SEQ ID NO: 357045 - RNA, 19 nt, Homo sapiens
  misc_RNA (1)...(19): siRNA sense strand
aaccuguucucauccaaga

SEQ ID NO: 357046 - RNA, 19 nt, Homo sapiens
  misc_RNA (1)...(19): siRNA sense strand
gucaugaagccauugaaau

SEQ ID NO: 357047 - RNA, 19 nt, Homo sapiens
  misc_RNA (1)...(19): siRNA sense strand
caacagauuggugaauucu

SEQ ID NO: 357048 - RNA, 19 nt, Homo sapiens
  misc_RNA (1)...(19): siRNA sense strand
ugaaggaauuuggauuugc

SEQ ID NO: 357049 - RNA, 19 nt, Homo sapiens
  misc_RNA (1)...(19): siRNA sense strand
acaggaugugcaauaauuu

SEQ ID NO: 357050 - RNA, 19 nt, Homo sapiens
  misc_RNA (1)...(19): siRNA sense strand
gaggaaaugguugggugaa

SEQ ID NO: 357051 - RNA, 19 nt, Homo sapiens
  misc_RNA (1)...(19): siRNA sense strand
agagagagaagagaggaaa

SEQ ID NO: 357052 - RNA, 19 nt, Homo sapiens
  misc_RNA (1)...(19): siRNA sense strand
ucaggcauguggauuuggu

SEQ ID NO: 357053 - RNA, 19 nt, Homo sapiens
  misc_RNA (1)...(19): siRNA sense strand
gacaaguuagaaagacuga

SEQ ID NO: 357054 - RNA, 19 nt, Homo sapiens
  misc_RNA (1)...(19): siRNA sense strand
cgugguggcuccccucuuu

SEQ ID NO: 357055 - RNA, 19 nt, Homo sapiens
  misc_RNA (1)...(19): siRNA sense strand
uugaaaugcacagcucuua

SEQ ID NO: 357056 - RNA, 19 nt, Homo sapiens
  misc_RNA (1)...(19): siRNA sense strand
ggacucaaauggggucaug

SEQ ID NO: 357057 - RNA, 19 nt, Homo sapiens
  misc_RNA (1)...(19): siRNA sense strand
gguaaagagagagaagaga

SEQ ID NO: 357058 - RNA, 19 nt, Homo sapiens
  misc_RNA (1)...(19): siRNA sense strand
gagagagaagagaggaaau

SEQ ID NO: 357059 - RNA, 19 nt, Homo sapiens
  misc_RNA (1)...(19): siRNA sense strand
gaaaagcaaucacaguguu

SEQ ID NO: 357060 - RNA, 19 nt, Homo sapiens
  misc_RNA (1)...(19): siRNA sense strand
cguagagccuccugaaaug

SEQ ID NO: 357061 - RNA, 19 nt, Homo sapiens
  misc_RNA (1)...(19): siRNA sense strand
cgaggaagaucgaccuauc

SEQ ID NO: 357062 - RNA, 19 nt, Homo sapiens
  misc_RNA (1)...(19): siRNA sense strand
gaaaacgccugaagaaggu

SEQ ID NO: 357063 - RNA, 19 nt, Homo sapiens
  misc_RNA (1)...(19): siRNA sense strand
gagauggacccgccaaauc

SEQ ID NO: 357064 - RNA, 19 nt, Homo sapiens
  misc_RNA (1)...(19): siRNA sense strand
gggagcaucugcaggucaa

SEQ ID NO: 357065 - RNA, 19 nt, Homo sapiens
  misc_RNA (1)...(19): siRNA sense strand
gaaaugauugggccuaugc

SEQ ID NO: 357066 - RNA, 19 nt, Homo sapiens
  misc_RNA (1)...(19): siRNA sense strand
ugaagaaggugaaaagcaa

SEQ ID NO: 357067 - RNA, 19 nt, Homo sapiens
  misc_RNA (1)...(19): siRNA sense strand
ggagauggacccgccaaau

SEQ ID NO: 357068 - RNA, 19 nt, Homo sapiens
  misc_RNA (1)...(19): siRNA sense strand
gaccaagacgcuacguaga

SEQ ID NO: 357069 - RNA, 19 nt, Homo sapiens
  misc_RNA (1)...(19): siRNA sense strand
ggaaccagcaacaccugaa

SEQ ID NO: 357070 - RNA, 19 nt, Homo sapiens
  misc_RNA (1)...(19): siRNA sense strand
ggcccgagcaguucaguga

SEQ ID NO: 357071 - RNA, 19 nt, Homo sapiens
  misc_RNA (1)...(19): siRNA sense strand
guagagccuccugaaauga

SEQ ID NO: 357072 - RNA, 19 nt, Homo sapiens
  misc_RNA (1)...(19): siRNA sense strand
ugaaaugauugggccuaug

SEQ ID NO: 357073 - RNA, 19 nt, Homo sapiens
  misc_RNA (1)...(19): siRNA sense strand
ccgagcaguucagugauga

SEQ ID NO: 357074 - RNA, 19 nt, Homo sapiens
  misc_RNA (1)...(19): siRNA sense strand
cuacguagagccuccugaa

SEQ ID NO: 357075 - RNA, 19 nt, Homo sapiens
  misc_RNA (1)...(19): siRNA sense strand
aaagcaaucacaguguuaa

SEQ ID NO: 357076 - RNA, 19 nt, Homo sapiens
  misc_RNA (1)...(19): siRNA sense strand
gaaccagcaacaccugaag

SEQ ID NO: 357077 - RNA, 19 nt, Homo sapiens
  misc_RNA (1)...(19): siRNA sense strand
gugugaagaugguccugau

SEQ ID NO: 357078 - RNA, 19 nt, Homo sapiens
  misc_RNA (1)...(19): siRNA sense strand
ggugaaaacgccugaagaa

SEQ ID NO: 357079 - RNA, 19 nt, Homo sapiens
  misc_RNA (1)...(19): siRNA sense strand
agagccuccugaaaugauu

SEQ ID NO: 357080 - RNA, 19 nt, Homo sapiens
  misc_RNA (1)...(19): siRNA sense strand
ggaaccagcaacucaacgu

SEQ ID NO: 357081 - RNA, 19 nt, Homo sapiens
  misc_RNA (1)...(19): siRNA sense strand
cccgagcaguucagugaug

SEQ ID NO: 357082 - RNA, 19 nt, Homo sapiens
  misc_RNA (1)...(19): siRNA sense strand
acguagagccuccugaaau

SEQ ID NO: 357083 - RNA, 19 nt, Homo sapiens
  misc_RNA (1)...(19): siRNA sense strand
ugaaguggaaccagcaaca

SEQ ID NO: 357084 - RNA, 19 nt, Homo sapiens
  misc_RNA (1)...(19): siRNA sense strand
agacugggugugaguguga

SEQ ID NO: 357085 - RNA, 19 nt, Homo sapiens
  misc_RNA (1)...(19): siRNA sense strand
caaauccagaggaggugaa

SEQ ID NO: 357086 - RNA, 19 nt, Homo sapiens
  misc_RNA (1)...(19): siRNA sense strand
uuggaaaccugcagaauua

SEQ ID NO: 357087 - RNA, 19 nt, Homo sapiens
  misc_RNA (1)...(19): siRNA sense strand
ccucaaacauuaacuacua

SEQ ID NO: 357088 - RNA, 19 nt, Homo sapiens
  misc_RNA (1)...(19): siRNA sense strand
caacaagggucugcgaauu

SEQ ID NO: 357089 - RNA, 19 nt, Homo sapiens
  misc_RNA (1)...(19): siRNA sense strand
ggaggaggguuuggaaauu

SEQ ID NO: 357090 - RNA, 19 nt, Homo sapiens
  misc_RNA (1)...(19): siRNA sense strand
gaggaggguuuggaaauuu

SEQ ID NO: 357091 - RNA, 19 nt, Homo sapiens
  misc_RNA (1)...(19): siRNA sense strand
ugaaguggaugcugaagaa

SEQ ID NO: 357092 - RNA, 19 nt, Homo sapiens
  misc_RNA (1)...(19): siRNA sense strand
ugacagauuucuuuaggaa

SEQ ID NO: 357093 - RNA, 19 nt, Homo sapiens
  misc_RNA (1)...(19): siRNA sense strand
gaauuaugauugccauguu

SEQ ID NO: 357094 - RNA, 19 nt, Homo sapiens
  misc_RNA (1)...(19): siRNA sense strand
gaacuucagagauguuuga

SEQ ID NO: 357095 - RNA, 19 nt, Homo sapiens
  misc_RNA (1)...(19): siRNA sense strand
gugacuccguguauacuua

SEQ ID NO: 357096 - RNA, 19 nt, Homo sapiens
  misc_RNA (1)...(19): siRNA sense strand
uagcaagaauggcagaauu

SEQ ID NO: 357097 - RNA, 19 nt, Homo sapiens
  misc_RNA (1)...(19): siRNA sense strand
gaaaccugcagaauuauga

SEQ ID NO: 357098 - RNA, 19 nt, Homo sapiens
  misc_RNA (1)...(19): siRNA sense strand
gggauuuaaugcauucaaa

SEQ ID NO: 357099 - RNA, 19 nt, Homo sapiens
  misc_RNA (1)...(19): siRNA sense strand
cagcauauucagacacuua

SEQ ID NO: 357100 - RNA, 19 nt, Homo sapiens
  misc_RNA (1)...(19): siRNA sense strand
ggucugcgaauuucauaua

SEQ ID NO: 357101 - RNA, 19 nt, Homo sapiens
  misc_RNA (1)...(19): siRNA sense strand
gaaaagagaccacuugcaa

SEQ ID NO: 357102 - RNA, 19 nt, Homo sapiens
  misc_RNA (1)...(19): siRNA sense strand
ggacagccagugccagaaa

SEQ ID NO: 357103 - RNA, 19 nt, Homo sapiens
  misc_RNA (1)...(19): siRNA sense strand
gcagggcacuauggcaauu

SEQ ID NO: 357104 - RNA, 19 nt, Homo sapiens
  misc_RNA (1)...(19): siRNA sense strand
gacacagucuggaauuaau

SEQ ID NO: 357105 - RNA, 19 nt, Homo sapiens
  misc_RNA (1)...(19): siRNA sense strand
ggaacuuacucucccuuca

SEQ ID NO: 357106 - RNA, 19 nt, Homo sapiens
  misc_RNA (1)...(19): siRNA sense strand
gcauugacagauuucuuua

SEQ ID NO: 357107 - RNA, 19 nt, Homo sapiens
  misc_RNA (1)...(19): siRNA sense strand
agaaacaggcccagcuaua

SEQ ID NO: 357108 - RNA, 19 nt, Homo sapiens
  misc_RNA (1)...(19): siRNA sense strand
cuuaaugccuggaaggaaa

SEQ ID NO: 357109 - RNA, 19 nt, Homo sapiens
  misc_RNA (1)...(19): siRNA sense strand
guuaaacguuauagcaaga

SEQ ID NO: 357110 - RNA, 19 nt, Homo sapiens
  misc_RNA (1)...(19): siRNA sense strand
gaaacaggcccagcuauac

SEQ ID NO: 357111 - RNA, 19 nt, Homo sapiens
  misc_RNA (1)...(19): siRNA sense strand
gcuggugacuccguguaua

SEQ ID NO: 357112 - RNA, 19 nt, Homo sapiens
  misc_RNA (1)...(19): siRNA sense strand
aguagaacaucaugaguug

SEQ ID NO: 357113 - RNA, 19 nt, Homo sapiens
  misc_RNA (1)...(19): siRNA sense strand
agauggaaguggcacagua

SEQ ID NO: 357114 - RNA, 19 nt, Homo sapiens
  misc_RNA (1)...(19): siRNA sense strand
cuucaugacuguugaucaa

SEQ ID NO: 357115 - RNA, 19 nt, Homo sapiens
  misc_RNA (1)...(19): siRNA sense strand
caucaugaguugcgucaag

SEQ ID NO: 357116 - RNA, 19 nt, Homo sapiens
  misc_RNA (1)...(19): siRNA sense strand
ugacacagucuggaauuaa

SEQ ID NO: 357117 - RNA, 19 nt, Homo sapiens
  misc_RNA (1)...(19): siRNA sense strand
ggaaaccugcagaauuaug

SEQ ID NO: 357118 - RNA, 19 nt, Homo sapiens
  misc_RNA (1)...(19): siRNA sense strand
ugaguugcgucaagccauu

SEQ ID NO: 357119 - RNA, 19 nt, Homo sapiens
  misc_RNA (1)...(19): siRNA sense strand
gcuaugggcagcucuuaau

SEQ ID NO: 357120 - RNA, 19 nt, Homo sapiens
  misc_RNA (1)...(19): siRNA sense strand
gcaacaagggucugcgaau

SEQ ID NO: 357121 - RNA, 19 nt, Homo sapiens
  misc_RNA (1)...(19): siRNA sense strand
gugugaagcuucgagcauu

SEQ ID NO: 357122 - RNA, 19 nt, Homo sapiens
  misc_RNA (1)...(19): siRNA sense strand
gcacaguagaacaucauga

SEQ ID NO: 357123 - RNA, 19 nt, Homo sapiens
  misc_RNA (1)...(19): siRNA sense strand
cgucaagccauuggucuua

SEQ ID NO: 357124 - RNA, 19 nt, Homo sapiens
  misc_RNA (1)...(19): siRNA sense strand
acaagggucugcgaauuuc

SEQ ID NO: 357125 - RNA, 19 nt, Homo sapiens
  misc_RNA (1)...(19): siRNA sense strand
aaagagaccacuugcaaca

SEQ ID NO: 357126 - RNA, 19 nt, Homo sapiens
  misc_RNA (1)...(19): siRNA sense strand
ucaugacuguugaucaaga

SEQ ID NO: 357127 - RNA, 19 nt, Homo sapiens
  misc_RNA (1)...(19): siRNA sense strand
cuauacuccucgauggaua

SEQ ID NO: 357128 - RNA, 19 nt, Homo sapiens
  misc_RNA (1)...(19): siRNA sense strand
gaacuuacucucccuucag

SEQ ID NO: 357129 - RNA, 19 nt, Homo sapiens
  misc_RNA (1)...(19): siRNA sense strand
ccagaaacaggcccagcua

SEQ ID NO: 357130 - RNA, 19 nt, Homo sapiens
  misc_RNA (1)...(19): siRNA sense strand
cuucgagcauugacagauu

SEQ ID NO: 357131 - RNA, 19 nt, Homo sapiens
  misc_RNA (1)...(19): siRNA sense strand
gggauacggaggaggguuu

SEQ ID NO: 357132 - RNA, 19 nt, Homo sapiens
  misc_RNA (1)...(19): siRNA sense strand
gagcauugacagauuucuu

SEQ ID NO: 357133 - RNA, 19 nt, Homo sapiens
  misc_RNA (1)...(19): siRNA sense strand
caguagaacaucaugaguu

SEQ ID NO: 357134 - RNA, 19 nt, Homo sapiens
  misc_RNA (1)...(19): siRNA sense strand
ggaauuaauggaacuuacu

SEQ ID NO: 357135 - RNA, 19 nt, Homo sapiens
  misc_RNA (1)...(19): siRNA sense strand
aacaagggucugcgaauuu

SEQ ID NO: 357136 - RNA, 19 nt, Homo sapiens
  misc_RNA (1)...(19): siRNA sense strand
gaaguggcacaguagaaca

SEQ ID NO: 357137 - RNA, 19 nt, Homo sapiens
  misc_RNA (1)...(19): siRNA sense strand
uauguugcuugcuguguga

SEQ ID NO: 357138 - RNA, 19 nt, Homo sapiens
  misc_RNA (1)...(19): siRNA sense strand
cauauucagacacuuauuc

SEQ ID NO: 357139 - RNA, 19 nt, Homo sapiens
  misc_RNA (1)...(19): siRNA sense strand
uugacacagucuggaauua

SEQ ID NO: 357140 - RNA, 19 nt, Homo sapiens
  misc_RNA (1)...(19): siRNA sense strand
ucaagccauuggucuuaug

SEQ ID NO: 357141 - RNA, 19 nt, Homo sapiens
  misc_RNA (1)...(19): siRNA sense strand
auagagaucacacaggaaa

SEQ ID NO: 357142 - RNA, 19 nt, Homo sapiens
  misc_RNA (1)...(19): siRNA sense strand
ugauugccauguuggauag

SEQ ID NO: 357143 - RNA, 19 nt, Homo sapiens
  misc_RNA (1)...(19): siRNA sense strand
gaaaacuucaugacuguug

SEQ ID NO: 357144 - RNA, 19 nt, Homo sapiens
  misc_RNA (1)...(19): siRNA sense strand
aauuaugauugccauguug

SEQ ID NO: 357145 - RNA, 19 nt, Homo sapiens
  misc_RNA (1)...(19): siRNA sense strand
gauggaaguggcacaguag

SEQ ID NO: 357146 - RNA, 19 nt, Homo sapiens
  misc_RNA (1)...(19): siRNA sense strand
gaauuaauggaacuuacuc

SEQ ID NO: 357147 - RNA, 19 nt, Homo sapiens
  misc_RNA (1)...(19): siRNA sense strand
ugugaagcuucgagcauug

SEQ ID NO: 357148 - RNA, 19 nt, Homo sapiens
  misc_RNA (1)...(19): siRNA sense strand
ggucuuauggguuauaggu

SEQ ID NO: 357149 - RNA, 19 nt, Homo sapiens
  misc_RNA (1)...(19): siRNA sense strand
ggaaguggcacaguagaac

SEQ ID NO: 357150 - RNA, 19 nt, Homo sapiens
  misc_RNA (1)...(19): siRNA sense strand
gcaagaauggcagaauuuu

SEQ ID NO: 357151 - RNA, 19 nt, Homo sapiens
  misc_RNA (1)...(19): siRNA sense strand
uggacaggauggugaagug

SEQ ID NO: 357152 - RNA, 19 nt, Homo sapiens
  misc_RNA (1)...(19): siRNA sense strand
gacuguugaucaagaugga

SEQ ID NO: 357153 - RNA, 19 nt, Homo sapiens
  misc_RNA (1)...(19): siRNA sense strand
gauagagaucacacaggaa

SEQ ID NO: 357154 - RNA, 19 nt, Homo sapiens
  misc_RNA (1)...(19): siRNA sense strand
cagagauguuugacacagu

SEQ ID NO: 357155 - RNA, 19 nt, Homo sapiens
  misc_RNA (1)...(19): siRNA sense strand
aguggaugcugaagaacuu

SEQ ID NO: 357156 - RNA, 19 nt, Homo sapiens
  misc_RNA (1)...(19): siRNA sense strand
uuuggaaaccugcagaauu

SEQ ID NO: 357157 - RNA, 19 nt, Homo sapiens
  misc_RNA (1)...(19): siRNA sense strand
gcauauucagacacuuauu

SEQ ID NO: 357158 - RNA, 19 nt, Homo sapiens
  misc_RNA (1)...(19): siRNA sense strand
caugacuguugaucaagau

SEQ ID NO: 357159 - RNA, 19 nt, Homo sapiens
  misc_RNA (1)...(19): siRNA sense strand
ggauuuaaugcauucaaag

SEQ ID NO: 357160 - RNA, 19 nt, Homo sapiens
  misc_RNA (1)...(19): siRNA sense strand
cuuacucucccuucaguuu

SEQ ID NO: 357161 - RNA, 19 nt, Homo sapiens
  misc_RNA (1)...(19): siRNA sense strand
gucaagccauuggucuuau

SEQ ID NO: 357162 - RNA, 19 nt, Homo sapiens
  misc_RNA (1)...(19): siRNA sense strand
cguguauacuuacuucagu

SEQ ID NO: 357163 - RNA, 19 nt, Homo sapiens
  misc_RNA (1)...(19): siRNA sense strand
cuuauggguuauagguuga

SEQ ID NO: 357164 - RNA, 19 nt, Homo sapiens
  misc_RNA (1)...(19): siRNA sense strand
gccagcauauucagacacu

SEQ ID NO: 357165 - RNA, 19 nt, Homo sapiens
  misc_RNA (1)...(19): siRNA sense strand
cggaggaggguuuggaaau

SEQ ID NO: 357166 - RNA, 19 nt, Homo sapiens
  misc_RNA (1)...(19): siRNA sense strand
acaggauggugaaguggau

SEQ ID NO: 357167 - RNA, 19 nt, Homo sapiens
  misc_RNA (1)...(19): siRNA sense strand
ucugcgaauuucauauaug

SEQ ID NO: 357168 - RNA, 19 nt, Homo sapiens
  misc_RNA (1)...(19): siRNA sense strand
gucugcgaauuucauauau

SEQ ID NO: 357169 - RNA, 19 nt, Homo sapiens
  misc_RNA (1)...(19): siRNA sense strand
agcaagaauggcagaauuu

SEQ ID NO: 357170 - RNA, 19 nt, Homo sapiens
  misc_RNA (1)...(19): siRNA sense strand
gggccagcauauucagaca

SEQ ID NO: 357171 - RNA, 19 nt, Homo sapiens
  misc_RNA (1)...(19): siRNA sense strand
cagaaacaggcccagcuau

SEQ ID NO: 357172 - RNA, 19 nt, Homo sapiens
  misc_RNA (1)...(19): siRNA sense strand
gcuauacuccucgauggau

SEQ ID NO: 357173 - RNA, 19 nt, Homo sapiens
  misc_RNA (1)...(19): siRNA sense strand
aaacaggcccagcuauacu

SEQ ID NO: 357174 - RNA, 19 nt, Homo sapiens
  misc_RNA (1)...(19): siRNA sense strand
gugaaguggaugcugaaga

SEQ ID NO: 357175 - RNA, 19 nt, Homo sapiens
  misc_RNA (1)...(19): siRNA sense strand
agcauugacagauuucuuu

SEQ ID NO: 357176 - RNA, 19 nt, Homo sapiens
  misc_RNA (1)...(19): siRNA sense strand
uucgagcauugacagauuu

SEQ ID NO: 357177 - RNA, 19 nt, Homo sapiens
  misc_RNA (1)...(19): siRNA sense strand
gagaagaggugcucaagaa

SEQ ID NO: 357178 - RNA, 19 nt, Homo sapiens
  misc_RNA (1)...(19): siRNA sense strand
caacuuagaucccuacauc

SEQ ID NO: 357179 - RNA, 19 nt, Homo sapiens
  misc_RNA (1)...(19): siRNA sense strand
ggaaacaguucuacaaugg

SEQ ID NO: 357180 - RNA, 19 nt, Homo sapiens
  misc_RNA (1)...(19): siRNA sense strand
caacaucacccacccauuu

SEQ ID NO: 357181 - RNA, 19 nt, Homo sapiens
  misc_RNA (1)...(19): siRNA sense strand
ggaaguaccgcguguguaa

SEQ ID NO: 357182 - RNA, 19 nt, Homo sapiens
  misc_RNA (1)...(19): siRNA sense strand
ggaaggaucgaaucuuuaa

SEQ ID NO: 357183 - RNA, 19 nt, Homo sapiens
  misc_RNA (1)...(19): siRNA sense strand
ggcaagagaucauugaaga

SEQ ID NO: 357184 - RNA, 19 nt, Homo sapiens
  misc_RNA (1)...(19): siRNA sense strand
caagaucaaugucaaacuu

SEQ ID NO: 357185 - RNA, 19 nt, Homo sapiens
  misc_RNA (1)...(19): siRNA sense strand
ucaagcuccuggccaauua

SEQ ID NO: 357186 - RNA, 19 nt, Homo sapiens
  misc_RNA (1)...(19): siRNA sense strand
gcacaguggcacaguauuu

SEQ ID NO: 357187 - RNA, 19 nt, Homo sapiens
  misc_RNA (1)...(19): siRNA sense strand
cuagaggucuguaacauug

SEQ ID NO: 357188 - RNA, 19 nt, Homo sapiens
  misc_RNA (1)...(19): siRNA sense strand
gagauacacucuugggaau

SEQ ID NO: 357189 - RNA, 19 nt, Homo sapiens
  misc_RNA (1)...(19): siRNA sense strand
gggcagcgcuguauuaaaa

SEQ ID NO: 357190 - RNA, 19 nt, Homo sapiens
  misc_RNA (1)...(19): siRNA sense strand
gggaaacaguucuacaaug

SEQ ID NO: 357191 - RNA, 19 nt, Homo sapiens
  misc_RNA (1)...(19): siRNA sense strand
ggaucaaagugaaggauga

SEQ ID NO: 357192 - RNA, 19 nt, Homo sapiens
  misc_RNA (1)...(19): siRNA sense strand
ggaagaugaugcucaacau

SEQ ID NO: 357193 - RNA, 19 nt, Homo sapiens
  misc_RNA (1)...(19): siRNA sense strand
agaagaacauuuacacugu

SEQ ID NO: 357194 - RNA, 19 nt, Homo sapiens
  misc_RNA (1)...(19): siRNA sense strand
gucaagaccucaccucaga

SEQ ID NO: 357195 - RNA, 19 nt, Homo sapiens
  misc_RNA (1)...(19): siRNA sense strand
gaaugccagcuacaacuua

SEQ ID NO: 357196 - RNA, 19 nt, Homo sapiens
  misc_RNA (1)...(19): siRNA sense strand
caacgaacgggucgacuuu

SEQ ID NO: 357197 - RNA, 19 nt, Homo sapiens
  misc_RNA (1)...(19): siRNA sense strand
gaguuugacuucuaucugu

SEQ ID NO: 357198 - RNA, 19 nt, Homo sapiens
  misc_RNA (1)...(19): siRNA sense strand
aaccagaccucgaccauga

SEQ ID NO: 357199 - RNA, 19 nt, Homo sapiens
  misc_RNA (1)...(19): siRNA sense strand
gaaagaagaacauuuacac

SEQ ID NO: 357200 - RNA, 19 nt, Homo sapiens
  misc_RNA (1)...(19): siRNA sense strand
ugacaagaaugagcgaauu

SEQ ID NO: 357201 - RNA, 19 nt, Homo sapiens
  misc_RNA (1)...(19): siRNA sense strand
ugauugaguucauguguga

SEQ ID NO: 357202 - RNA, 19 nt, Homo sapiens
  misc_RNA (1)...(19): siRNA sense strand
gaagaugaugcucaacauu

SEQ ID NO: 357203 - RNA, 19 nt, Homo sapiens
  misc_RNA (1)...(19): siRNA sense strand
gauaaaggccacagcuaga

SEQ ID NO: 357204 - RNA, 19 nt, Homo sapiens
  misc_RNA (1)...(19): siRNA sense strand
gggaaggaucgaaucuuua

SEQ ID NO: 357205 - RNA, 19 nt, Homo sapiens
  misc_RNA (1)...(19): siRNA sense strand
ggaagacgccgguguaugc

SEQ ID NO: 357206 - RNA, 19 nt, Homo sapiens
  misc_RNA (1)...(19): siRNA sense strand
gcagaaauauaaccuucag

SEQ ID NO: 357207 - RNA, 19 nt, Homo sapiens
  misc_RNA (1)...(19): siRNA sense strand
ucacagcacugcccauugg

SEQ ID NO: 357208 - RNA, 19 nt, Homo sapiens
  misc_RNA (1)...(19): siRNA sense strand
guggacagaugaagaggaa

SEQ ID NO: 357209 - RNA, 19 nt, Homo sapiens
  misc_RNA (1)...(19): siRNA sense strand
ggaaagaagaacauuuaca

SEQ ID NO: 357210 - RNA, 19 nt, Homo sapiens
  misc_RNA (1)...(19): siRNA sense strand
agggaaggaucgaaucuuu

SEQ ID NO: 357211 - RNA, 19 nt, Homo sapiens
  misc_RNA (1)...(19): siRNA sense strand
ccaaagccgugcagguuca

SEQ ID NO: 357212 - RNA, 19 nt, Homo sapiens
  misc_RNA (1)...(19): siRNA sense strand
cauuugaguuugacuucua

SEQ ID NO: 357213 - RNA, 19 nt, Homo sapiens
  misc_RNA (1)...(19): siRNA sense strand
ggugaaacgugucggagau

SEQ ID NO: 357214 - RNA, 19 nt, Homo sapiens
  misc_RNA (1)...(19): siRNA sense strand
gaccagcugcggaagauuu

SEQ ID NO: 357215 - RNA, 19 nt, Homo sapiens
  misc_RNA (1)...(19): siRNA sense strand
aauauaaccuucagcucaa

SEQ ID NO: 357216 - RNA, 19 nt, Homo sapiens
  misc_RNA (1)...(19): siRNA sense strand
gggaauggcuacgcagugu

SEQ ID NO: 357217 - RNA, 19 nt, Homo sapiens
  misc_RNA (1)...(19): siRNA sense strand
ggacaaggagcaugacagu

SEQ ID NO: 357218 - RNA, 19 nt, Homo sapiens
  misc_RNA (1)...(19): siRNA sense strand
gaccaucccauuacuaugu

SEQ ID NO: 357219 - RNA, 19 nt, Homo sapiens
  misc_RNA (1)...(19): siRNA sense strand
caccagcgcucugccguuu

SEQ ID NO: 357220 - RNA, 19 nt, Homo sapiens
  misc_RNA (1)...(19): siRNA sense strand
gggaagugguggaauacau

SEQ ID NO: 357221 - RNA, 19 nt, Homo sapiens
  misc_RNA (1)...(19): siRNA sense strand
agagaucauugaagacuug

SEQ ID NO: 357222 - RNA, 19 nt, Homo sapiens
  misc_RNA (1)...(19): siRNA sense strand
ugucggagauacacucuug

SEQ ID NO: 357223 - RNA, 19 nt, Homo sapiens
  misc_RNA (1)...(19): siRNA sense strand
uagauccgcuccagacaga

SEQ ID NO: 357224 - RNA, 19 nt, Homo sapiens
  misc_RNA (1)...(19): siRNA sense strand
gcuccuggccaauuacuuu

SEQ ID NO: 357225 - RNA, 19 nt, Homo sapiens
  misc_RNA (1)...(19): siRNA sense strand
gauggaaagaagaacauuu

SEQ ID NO: 357226 - RNA, 19 nt, Homo sapiens
  misc_RNA (1)...(19): siRNA sense strand
uaccgcguguguaauguua

SEQ ID NO: 357227 - RNA, 19 nt, Homo sapiens
  misc_RNA (1)...(19): siRNA sense strand
gguguaugcugaggugaaa

SEQ ID NO: 357228 - RNA, 19 nt, Homo sapiens
  misc_RNA (1)...(19): siRNA sense strand
gaauacaugguccagcauu

SEQ ID NO: 357229 - RNA, 19 nt, Homo sapiens
  misc_RNA (1)...(19): siRNA sense strand
gauacacucuugggaaugg

SEQ ID NO: 357230 - RNA, 19 nt, Homo sapiens
  misc_RNA (1)...(19): siRNA sense strand
ggaagugguggaauacaug

SEQ ID NO: 357231 - RNA, 19 nt, Homo sapiens
  misc_RNA (1)...(19): siRNA sense strand
gggcugcagcucauuauug

SEQ ID NO: 357232 - RNA, 19 nt, Homo sapiens
  misc_RNA (1)...(19): siRNA sense strand
caaccuuguuucugcaaau

SEQ ID NO: 357233 - RNA, 19 nt, Homo sapiens
  misc_RNA (1)...(19): siRNA sense strand
cacaguauuucaagcagaa

SEQ ID NO: 357234 - RNA, 19 nt, Homo sapiens
  misc_RNA (1)...(19): siRNA sense strand
ucccuaagaucgacgugua

SEQ ID NO: 357235 - RNA, 19 nt, Homo sapiens
  misc_RNA (1)...(19): siRNA sense strand
gaacauuuacacugucaca

SEQ ID NO: 357236 - RNA, 19 nt, Homo sapiens
  misc_RNA (1)...(19): siRNA sense strand
uuucaagccucagaucuuu

SEQ ID NO: 357237 - RNA, 19 nt, Homo sapiens
  misc_RNA (1)...(19): siRNA sense strand
aagaggugcucaagaacuu

SEQ ID NO: 357238 - RNA, 19 nt, Homo sapiens
  misc_RNA (1)...(19): siRNA sense strand
ugucaaacuugguggcauu

SEQ ID NO: 357239 - RNA, 19 nt, Homo sapiens
  misc_RNA (1)...(19): siRNA sense strand
gcaacgaacgggucgacuu

SEQ ID NO: 357240 - RNA, 19 nt, Homo sapiens
  misc_RNA (1)...(19): siRNA sense strand
ugaagaacguggucaagac

SEQ ID NO: 357241 - RNA, 19 nt, Homo sapiens
  misc_RNA (1)...(19): siRNA sense strand
ggacaucaggaacauagau

SEQ ID NO: 357242 - RNA, 19 nt, Homo sapiens
  misc_RNA (1)...(19): siRNA sense strand
gcacacgcucugucucuau

SEQ ID NO: 357243 - RNA, 19 nt, Homo sapiens
  misc_RNA (1)...(19): siRNA sense strand
ugggaucacuuauauugug

SEQ ID NO: 357244 - RNA, 19 nt, Homo sapiens
  misc_RNA (1)...(19): siRNA sense strand
cccagauacuccacuauga

SEQ ID NO: 357245 - RNA, 19 nt, Homo sapiens
  misc_RNA (1)...(19): siRNA sense strand
ggcugcagcucauuauugu

SEQ ID NO: 357246 - RNA, 19 nt, Homo sapiens
  misc_RNA (1)...(19): siRNA sense strand
gaagaggugcucaagaacu

SEQ ID NO: 357247 - RNA, 19 nt, Homo sapiens
  misc_RNA (1)...(19): siRNA sense strand
gaagaaugccagcuacaac

SEQ ID NO: 357248 - RNA, 19 nt, Homo sapiens
  misc_RNA (1)...(19): siRNA sense strand
caucugcccugccuacaag

SEQ ID NO: 357249 - RNA, 19 nt, Homo sapiens
  misc_RNA (1)...(19): siRNA sense strand
ggacagaugaagaggaagu

SEQ ID NO: 357250 - RNA, 19 nt, Homo sapiens
  misc_RNA (1)...(19): siRNA sense strand
caaguuggccaggaacaaa

SEQ ID NO: 357251 - RNA, 19 nt, Homo sapiens
  misc_RNA (1)...(19): siRNA sense strand
cagaugagcuccagauccu

SEQ ID NO: 357252 - RNA, 19 nt, Homo sapiens
  misc_RNA (1)...(19): siRNA sense strand
caaagugaaggaugacaug

SEQ ID NO: 357253 - RNA, 19 nt, Homo sapiens
  misc_RNA (1)...(19): siRNA sense strand
gagguggacaucccuaaga

SEQ ID NO: 357254 - RNA, 19 nt, Homo sapiens
  misc_RNA (1)...(19): siRNA sense strand
aauacaugguccagcauuu

SEQ ID NO: 357255 - RNA, 19 nt, Homo sapiens
  misc_RNA (1)...(19): siRNA sense strand
ggccaaagccgugcagguu

SEQ ID NO: 357256 - RNA, 19 nt, Homo sapiens
  misc_RNA (1)...(19): siRNA sense strand
gaauugggaagagugguaa

SEQ ID NO: 357257 - RNA, 19 nt, Homo sapiens
  misc_RNA (1)...(19): siRNA sense strand
gacaagaaugagcgaauug

SEQ ID NO: 357258 - RNA, 19 nt, Homo sapiens
  misc_RNA (1)...(19): siRNA sense strand
ccugggaucacuuauauug

SEQ ID NO: 357259 - RNA, 19 nt, Homo sapiens
  misc_RNA (1)...(19): siRNA sense strand
gauacuccacuaugagcua

SEQ ID NO: 357260 - RNA, 19 nt, Homo sapiens
  misc_RNA (1)...(19): siRNA sense strand
gcacagccagugauugagu

SEQ ID NO: 357261 - RNA, 19 nt, Homo sapiens
  misc_RNA (1)...(19): siRNA sense strand
gaagggaaggaucgaaucu

SEQ ID NO: 357262 - RNA, 19 nt, Homo sapiens
  misc_RNA (1)...(19): siRNA sense strand
cgaauugggaagaguggua

SEQ ID NO: 357263 - RNA, 19 nt, Homo sapiens
  misc_RNA (1)...(19): siRNA sense strand
gcaucaaacuggaaaagga

SEQ ID NO: 357264 - RNA, 19 nt, Homo sapiens
  misc_RNA (1)...(19): siRNA sense strand
aagaugaugcucaacauug

SEQ ID NO: 357265 - RNA, 19 nt, Homo sapiens
  misc_RNA (1)...(19): siRNA sense strand
acgaacgggucgacuuuga

SEQ ID NO: 357266 - RNA, 19 nt, Homo sapiens
  misc_RNA (1)...(19): siRNA sense strand
cccagcaccugccuacuau

SEQ ID NO: 357267 - RNA, 19 nt, Homo sapiens
  misc_RNA (1)...(19): siRNA sense strand
agccugggaucacuuauau

SEQ ID NO: 357268 - RNA, 19 nt, Homo sapiens
  misc_RNA (1)...(19): siRNA sense strand
caaacuugguggcauuaac

SEQ ID NO: 357269 - RNA, 19 nt, Homo sapiens
  misc_RNA (1)...(19): siRNA sense strand
gaauggcuacgcagugugu

SEQ ID NO: 357270 - RNA, 19 nt, Homo sapiens
  misc_RNA (1)...(19): siRNA sense strand
ccuacaaguuggccaggaa

SEQ ID NO: 357271 - RNA, 19 nt, Homo sapiens
  misc_RNA (1)...(19): siRNA sense strand
uuuaaggucuccaucaagu

SEQ ID NO: 357272 - RNA, 19 nt, Homo sapiens
  misc_RNA (1)...(19): siRNA sense strand
caucaagccggauaagugu

SEQ ID NO: 357273 - RNA, 19 nt, Homo sapiens
  misc_RNA (1)...(19): siRNA sense strand
ggaagggaaggaucgaauc

SEQ ID NO: 357274 - RNA, 19 nt, Homo sapiens
  misc_RNA (1)...(19): siRNA sense strand
gugccacacuuacguacga

SEQ ID NO: 357275 - RNA, 19 nt, Homo sapiens
  misc_RNA (1)...(19): siRNA sense strand
ccauuacuauguucuuugg

SEQ ID NO: 357276 - RNA, 19 nt, Homo sapiens
  misc_RNA (1)...(19): siRNA sense strand
ccagaccucgaccaugaua

SEQ ID NO: 357277 - RNA, 19 nt, Homo sapiens
  misc_RNA (1)...(19): siRNA sense strand
ggacagagaagcccaagau

SEQ ID NO: 357278 - RNA, 19 nt, Homo sapiens
  misc_RNA (1)...(19): siRNA sense strand
ccaaggagucgucuacuuu

SEQ ID NO: 357279 - RNA, 19 nt, Homo sapiens
  misc_RNA (1)...(19): siRNA sense strand
ccuacuaucuauguuguua

SEQ ID NO: 357280 - RNA, 19 nt, Homo sapiens
  misc_RNA (1)...(19): siRNA sense strand
cagagaagcccaagaugaa

SEQ ID NO: 357281 - RNA, 19 nt, Homo sapiens
  misc_RNA (1)...(19): siRNA sense strand
gcucagacccagcaauuga

SEQ ID NO: 357282 - RNA, 19 nt, Homo sapiens
  misc_RNA (1)...(19): siRNA sense strand
agaaggaucugaggauuuc

SEQ ID NO: 357283 - RNA, 19 nt, Homo sapiens
  misc_RNA (1)...(19): siRNA sense strand
uaagcccaaugcccaauuu

SEQ ID NO: 357284 - RNA, 19 nt, Homo sapiens
  misc_RNA (1)...(19): siRNA sense strand
caacugcacucggguacug

SEQ ID NO: 357285 - RNA, 19 nt, Homo sapiens
  misc_RNA (1)...(19): siRNA sense strand
guacugguguggcauacuc

SEQ ID NO: 357286 - RNA, 19 nt, Homo sapiens
  misc_RNA (1)...(19): siRNA sense strand
gggcucagacccagcaauu

SEQ ID NO: 357287 - RNA, 19 nt, Homo sapiens
  misc_RNA (1)...(19): siRNA sense strand
acagagaagcccaagauga

SEQ ID NO: 357288 - RNA, 19 nt, Homo sapiens
  misc_RNA (1)...(19): siRNA sense strand
gaagcugaagaacguguuu

SEQ ID NO: 357289 - RNA, 19 nt, Homo sapiens
  misc_RNA (1)...(19): siRNA sense strand
caaggagucgucuacuuug

SEQ ID NO: 357290 - RNA, 19 nt, Homo sapiens
  misc_RNA (1)...(19): siRNA sense strand
ugcccuugcuguuagauaa

SEQ ID NO: 357291 - RNA, 19 nt, Homo sapiens
  misc_RNA (1)...(19): siRNA sense strand
gcagagcugguacgacugu

SEQ ID NO: 357292 - RNA, 19 nt, Homo sapiens
  misc_RNA (1)...(19): siRNA sense strand
gcccugcccuugcuguuag

SEQ ID NO: 357293 - RNA, 19 nt, Homo sapiens
  misc_RNA (1)...(19): siRNA sense strand
ggcccugccuacuaucuau

SEQ ID NO: 357294 - RNA, 19 nt, Homo sapiens
  misc_RNA (1)...(19): siRNA sense strand
cuggagagcagucuucuga

SEQ ID NO: 357295 - RNA, 19 nt, Homo sapiens
  misc_RNA (1)...(19): siRNA sense strand
gcccuucccuguggauaug

SEQ ID NO: 357296 - RNA, 19 nt, Homo sapiens
  misc_RNA (1)...(19): siRNA sense strand
gcuguuagauaagcccaau

SEQ ID NO: 357297 - RNA, 19 nt, Homo sapiens
  misc_RNA (1)...(19): siRNA sense strand
cccaaggagucgucuacuu

SEQ ID NO: 357298 - RNA, 19 nt, Homo sapiens
  misc_RNA (1)...(19): siRNA sense strand
ccaaugcccaauuugauuc

SEQ ID NO: 357299 - RNA, 19 nt, Homo sapiens
  misc_RNA (1)...(19): siRNA sense strand
acagaaggcagagcuggua

SEQ ID NO: 357300 - RNA, 19 nt, Homo sapiens
  misc_RNA (1)...(19): siRNA sense strand
gcccaaugcccaauuugau

SEQ ID NO: 357301 - RNA, 19 nt, Homo sapiens
  misc_RNA (1)...(19): siRNA sense strand
cuacuuugcugacgaugac

SEQ ID NO: 357302 - RNA, 19 nt, Homo sapiens
  misc_RNA (1)...(19): siRNA sense strand
gaaggcagagcugguacga

SEQ ID NO: 357303 - RNA, 19 nt, Homo sapiens
  misc_RNA (1)...(19): siRNA sense strand
cccaaugcccaauuugauu

SEQ ID NO: 357304 - RNA, 19 nt, Homo sapiens
  misc_RNA (1)...(19): siRNA sense strand
ccgagcagcuacggcagaa

SEQ ID NO: 357305 - RNA, 19 nt, Homo sapiens
  misc_RNA (1)...(19): siRNA sense strand
ggcccugcccuugcuguua

SEQ ID NO: 357306 - RNA, 19 nt, Homo sapiens
  misc_RNA (1)...(19): siRNA sense strand
ggcauacucggacagagaa

SEQ ID NO: 357307 - RNA, 19 nt, Homo sapiens
  misc_RNA (1)...(19): siRNA sense strand
gacagagaagcccaagaug

SEQ ID NO: 357308 - RNA, 19 nt, Homo sapiens
  misc_RNA (1)...(19): siRNA sense strand
cuagugaacucaagcugua

SEQ ID NO: 357309 - RNA, 19 nt, Homo sapiens
  misc_RNA (1)...(19): siRNA sense strand
ccacuuggcuuuggaugaa

SEQ ID NO: 357310 - RNA, 19 nt, Homo sapiens
  misc_RNA (1)...(19): siRNA sense strand
cagaaccacugccuacaaa

SEQ ID NO: 357311 - RNA, 19 nt, Homo sapiens
  misc_RNA (1)...(19): siRNA sense strand
gggagccgaugccuaguga

SEQ ID NO: 357312 - RNA, 19 nt, Homo sapiens
  misc_RNA (1)...(19): siRNA sense strand
cgucguggccugcuccuua

SEQ ID NO: 357313 - RNA, 19 nt, Homo sapiens
  misc_RNA (1)...(19): siRNA sense strand
gggccaaucucaaagucau

SEQ ID NO: 357314 - RNA, 19 nt, Homo sapiens
  misc_RNA (1)...(19): siRNA sense strand
gcaucgaccacuuggcuuu

SEQ ID NO: 357315 - RNA, 19 nt, Homo sapiens
  misc_RNA (1)...(19): siRNA sense strand
guucgucacccgcaggaua

SEQ ID NO: 357316 - RNA, 19 nt, Homo sapiens
  misc_RNA (1)...(19): siRNA sense strand
ugagcuggcugcccaaucu

SEQ ID NO: 357317 - RNA, 19 nt, Homo sapiens
  misc_RNA (1)...(19): siRNA sense strand
ucgaggaagugaagaaugg

SEQ ID NO: 357318 - RNA, 19 nt, Homo sapiens
  misc_RNA (1)...(19): siRNA sense strand
gucguggccugcuccuuaa

SEQ ID NO: 357319 - RNA, 19 nt, Homo sapiens
  misc_RNA (1)...(19): siRNA sense strand
ccagaaccacugccuacaa

SEQ ID NO: 357320 - RNA, 19 nt, Homo sapiens
  misc_RNA (1)...(19): siRNA sense strand
aggcagaguuugugucuac

SEQ ID NO: 357321 - RNA, 19 nt, Homo sapiens
  misc_RNA (1)...(19): siRNA sense strand
gcaacaaggacuucuucca

SEQ ID NO: 357322 - RNA, 19 nt, Homo sapiens
  misc_RNA (1)...(19): siRNA sense strand
ccgagggacucugcaacaa

SEQ ID NO: 357323 - RNA, 19 nt, Homo sapiens
  misc_RNA (1)...(19): siRNA sense strand
ccugaagaacugugugauu

SEQ ID NO: 357324 - RNA, 19 nt, Homo sapiens
  misc_RNA (1)...(19): siRNA sense strand
ggcuuuggaugaaaucaag

SEQ ID NO: 357325 - RNA, 19 nt, Homo sapiens
  misc_RNA (1)...(19): siRNA sense strand
aaagucaucagcaccaugu

SEQ ID NO: 357326 - RNA, 19 nt, Homo sapiens
  misc_RNA (1)...(19): siRNA sense strand
uccagaagaugaaggaaac

SEQ ID NO: 357327 - RNA, 19 nt, Homo sapiens
  misc_RNA (1)...(19): siRNA sense strand
cauucgguguccagagauu

SEQ ID NO: 357328 - RNA, 19 nt, Homo sapiens
  misc_RNA (1)...(19): siRNA sense strand
gccgaugccuagugaacuc

SEQ ID NO: 357329 - RNA, 19 nt, Homo sapiens
  misc_RNA (1)...(19): siRNA sense strand
caaccgagggacucugcaa

SEQ ID NO: 357330 - RNA, 19 nt, Homo sapiens
  misc_RNA (1)...(19): siRNA sense strand
accauucgguguccagaga

SEQ ID NO: 357331 - RNA, 19 nt, Homo sapiens
  misc_RNA (1)...(19): siRNA sense strand
ggaugugacgagcccagaa

SEQ ID NO: 357332 - RNA, 19 nt, Homo sapiens
  misc_RNA (1)...(19): siRNA sense strand
gaaccacugccuacaaacc

SEQ ID NO: 357333 - RNA, 19 nt, Homo sapiens
  misc_RNA (1)...(19): siRNA sense strand
cuugcuggcuggccugaga

SEQ ID NO: 357334 - RNA, 19 nt, Homo sapiens
  misc_RNA (1)...(19): siRNA sense strand
gaaggacuaucacaucgaa

SEQ ID NO: 357335 - RNA, 19 nt, Homo sapiens
  misc_RNA (1)...(19): siRNA sense strand
cgaagagggugaagaggua

SEQ ID NO: 357336 - RNA, 19 nt, Homo sapiens
  misc_RNA (1)...(19): siRNA sense strand
ccacagagguuugccaaca

SEQ ID NO: 357337 - RNA, 19 nt, Homo sapiens
  misc_RNA (1)...(19): siRNA sense strand
uagaugggcucagguacua

SEQ ID NO: 357338 - RNA, 19 nt, Homo sapiens
  misc_RNA (1)...(19): siRNA sense strand
ccauggacguucuguuuga

SEQ ID NO: 357339 - RNA, 19 nt, Homo sapiens
  misc_RNA (1)...(19): siRNA sense strand
gagccaccauucccucuga

SEQ ID NO: 357340 - RNA, 19 nt, Homo sapiens
  misc_RNA (1)...(19): siRNA sense strand
gcgaaggccugagacagaa

SEQ ID NO: 357341 - RNA, 19 nt, Homo sapiens
  misc_RNA (1)...(19): siRNA sense strand
gcacaccacucagccuguu

SEQ ID NO: 357342 - RNA, 19 nt, Homo sapiens
  misc_RNA (1)...(19): siRNA sense strand
caccauggacguucuguuu

SEQ ID NO: 357343 - RNA, 19 nt, Homo sapiens
  misc_RNA (1)...(19): siRNA sense strand
gggccugggugaaggagaa

SEQ ID NO: 357344 - RNA, 19 nt, Homo sapiens
  misc_RNA (1)...(19): siRNA sense strand
gcuccucgguggugacaau

SEQ ID NO: 357345 - RNA, 19 nt, Homo sapiens
  misc_RNA (1)...(19): siRNA sense strand
gagcaguacagaacaggaa

SEQ ID NO: 357346 - RNA, 19 nt, Homo sapiens
  misc_RNA (1)...(19): siRNA sense strand
gagcacacgauccaucaug

SEQ ID NO: 357347 - RNA, 19 nt, Homo sapiens
  misc_RNA (1)...(19): siRNA sense strand
cugaccagcugcucaagga

SEQ ID NO: 357348 - RNA, 19 nt, Homo sapiens
  misc_RNA (1)...(19): siRNA sense strand
ggaaggacuaucacaucga

SEQ ID NO: 357349 - RNA, 19 nt, Homo sapiens
  misc_RNA (1)...(19): siRNA sense strand
acaccgggauguggucauu

SEQ ID NO: 357350 - RNA, 19 nt, Homo sapiens
  misc_RNA (1)...(19): siRNA sense strand
gaaggccugagacagaaug

SEQ ID NO: 357351 - RNA, 19 nt, Homo sapiens
  misc_RNA (1)...(19): siRNA sense strand
caggaaggacuaucacauc

SEQ ID NO: 357352 - RNA, 19 nt, Homo sapiens
  misc_RNA (1)...(19): siRNA sense strand
ccacucaccacagagguuu

SEQ ID NO: 357353 - RNA, 19 nt, Homo sapiens
  misc_RNA (1)...(19): siRNA sense strand
cagcagcgaaggccugaga

SEQ ID NO: 357354 - RNA, 19 nt, Homo sapiens
  misc_RNA (1)...(19): siRNA sense strand
gaugggcucagguacuaug

SEQ ID NO: 357355 - RNA, 19 nt, Homo sapiens
  misc_RNA (1)...(19): siRNA sense strand
caucgaagagggugaagag

SEQ ID NO: 357356 - RNA, 19 nt, Homo sapiens
  misc_RNA (1)...(19): siRNA sense strand
gcagcucaaagucauguuc

SEQ ID NO: 357357 - RNA, 19 nt, Homo sapiens
  misc_RNA (1)...(19): siRNA sense strand
gaagagggugaagagguau

SEQ ID NO: 357358 - RNA, 19 nt, Homo sapiens
  misc_RNA (1)...(19): siRNA sense strand
ccaggaaggacuaucacau

SEQ ID NO: 357359 - RNA, 19 nt, Homo sapiens
  misc_RNA (1)...(19): siRNA sense strand
ggacccugccugcaagaag

SEQ ID NO: 357360 - RNA, 19 nt, Homo sapiens
  misc_RNA (1)...(19): siRNA sense strand
gcuggagggagacaugguu

SEQ ID NO: 357361 - RNA, 19 nt, Homo sapiens
  misc_RNA (1)...(19): siRNA sense strand
ggacuaucacaucgaagag

SEQ ID NO: 357362 - RNA, 19 nt, Homo sapiens
  misc_RNA (1)...(19): siRNA sense strand
ccaacaccaggaaggacua

SEQ ID NO: 357363 - RNA, 19 nt, Homo sapiens
  misc_RNA (1)...(19): siRNA sense strand
ggaaauaguucaguucuuu

SEQ ID NO: 357364 - RNA, 19 nt, Homo sapiens
  misc_RNA (1)...(19): siRNA sense strand
gaacucuucuugaauucua

SEQ ID NO: 357365 - RNA, 19 nt, Homo sapiens
  misc_RNA (1)...(19): siRNA sense strand
gaagagauggaauggauaa

SEQ ID NO: 357366 - RNA, 19 nt, Homo sapiens
  misc_RNA (1)...(19): siRNA sense strand
gagauggaauggauaauca

SEQ ID NO: 357367 - RNA, 19 nt, Homo sapiens
  misc_RNA (1)...(19): siRNA sense strand
agaagcagauguagaguuu

SEQ ID NO: 357368 - RNA, 19 nt, Homo sapiens
  misc_RNA (1)...(19): siRNA sense strand
gaaacacaaggaaagaaua

SEQ ID NO: 357369 - RNA, 19 nt, Homo sapiens
  misc_RNA (1)...(19): siRNA sense strand
gcacagguauauugagauc

SEQ ID NO: 357370 - RNA, 19 nt, Homo sapiens
  misc_RNA (1)...(19): siRNA sense strand
ugacauugcuaauuucuuc

SEQ ID NO: 357371 - RNA, 19 nt, Homo sapiens
  misc_RNA (1)...(19): siRNA sense strand
caacaucgauauauugaac

SEQ ID NO: 357372 - RNA, 19 nt, Homo sapiens
  misc_RNA (1)...(19): siRNA sense strand
gaaacauaaugguccaaau

SEQ ID NO: 357373 - RNA, 19 nt, Homo sapiens
  misc_RNA (1)...(19): siRNA sense strand
gggcacagguauauugaga

SEQ ID NO: 357374 - RNA, 19 nt, Homo sapiens
  misc_RNA (1)...(19): siRNA sense strand
uagcaggagugaaaucaaa

SEQ ID NO: 357375 - RNA, 19 nt, Homo sapiens
  misc_RNA (1)...(19): siRNA sense strand
gaauagggcacagguauau

SEQ ID NO: 357376 - RNA, 19 nt, Homo sapiens
  misc_RNA (1)...(19): siRNA sense strand
cagcaaagaggaaauaguu

SEQ ID NO: 357377 - RNA, 19 nt, Homo sapiens
  misc_RNA (1)...(19): siRNA sense strand
gcaaagaggaaauaguuca

SEQ ID NO: 357378 - RNA, 19 nt, Homo sapiens
  misc_RNA (1)...(19): siRNA sense strand
caaaggagauagcagaaaa

SEQ ID NO: 357379 - RNA, 19 nt, Homo sapiens
  misc_RNA (1)...(19): siRNA sense strand
agaaguagcaggagugaaa

SEQ ID NO: 357380 - RNA, 19 nt, Homo sapiens
  misc_RNA (1)...(19): siRNA sense strand
caauuacaguggaggauau

SEQ ID NO: 357381 - RNA, 19 nt, Homo sapiens
  misc_RNA (1)...(19): siRNA sense strand
cggaagagauggaauggau

SEQ ID NO: 357382 - RNA, 19 nt, Homo sapiens
  misc_RNA (1)...(19): siRNA sense strand
gcugccaugucuaaagaua

SEQ ID NO: 357383 - RNA, 19 nt, Homo sapiens
  misc_RNA (1)...(19): siRNA sense strand
caugggagguucuggaaug

SEQ ID NO: 357384 - RNA, 19 nt, Homo sapiens
  misc_RNA (1)...(19): siRNA sense strand
uaacauugacgauggacua

SEQ ID NO: 357385 - RNA, 19 nt, Homo sapiens
  misc_RNA (1)...(19): siRNA sense strand
ggaaacacaaggaaagaau

SEQ ID NO: 357386 - RNA, 19 nt, Homo sapiens
  misc_RNA (1)...(19): siRNA sense strand
caugcaacaucgauauauu

SEQ ID NO: 357387 - RNA, 19 nt, Homo sapiens
  misc_RNA (1)...(19): siRNA sense strand
cgaccgggaccauaugaua

SEQ ID NO: 357388 - RNA, 19 nt, Homo sapiens
  misc_RNA (1)...(19): siRNA sense strand
gggaggcuauggaucaguu

SEQ ID NO: 357389 - RNA, 19 nt, Homo sapiens
  misc_RNA (1)...(19): siRNA sense strand
ggauaacauugacgaugga

SEQ ID NO: 357390 - RNA, 19 nt, Homo sapiens
  misc_RNA (1)...(19): siRNA sense strand
ggaagagauggaauggaua

SEQ ID NO: 357391 - RNA, 19 nt, Homo sapiens
  misc_RNA (1)...(19): siRNA sense strand
uaacaugcaacaucgauau

SEQ ID NO: 357392 - RNA, 19 nt, Homo sapiens
  misc_RNA (1)...(19): siRNA sense strand
uagcugccaugucuaaaga

SEQ ID NO: 357393 - RNA, 19 nt, Homo sapiens
  misc_RNA (1)...(19): siRNA sense strand
ccaaaugacgcuagugaug

SEQ ID NO: 357394 - RNA, 19 nt, Homo sapiens
  misc_RNA (1)...(19): siRNA sense strand
aaacauaaugguccaaaug

SEQ ID NO: 357395 - RNA, 19 nt, Homo sapiens
  misc_RNA (1)...(19): siRNA sense strand
ugacuaugguggcuauaau

SEQ ID NO: 357396 - RNA, 19 nt, Homo sapiens
  misc_RNA (1)...(19): siRNA sense strand
acagguauauugagaucuu

SEQ ID NO: 357397 - RNA, 19 nt, Homo sapiens
  misc_RNA (1)...(19): siRNA sense strand
gaugacagaaugagagaug

SEQ ID NO: 357398 - RNA, 19 nt, Homo sapiens
  misc_RNA (1)...(19): siRNA sense strand
ugccaugucuaaagauaaa

SEQ ID NO: 357399 - RNA, 19 nt, Homo sapiens
  misc_RNA (1)...(19): siRNA sense strand
gcagauguagaguuuguga

SEQ ID NO: 357400 - RNA, 19 nt, Homo sapiens
  misc_RNA (1)...(19): siRNA sense strand
gagaagcagauguagaguu

SEQ ID NO: 357401 - RNA, 19 nt, Homo sapiens
  misc_RNA (1)...(19): siRNA sense strand
gacuaugguggcuauaaua

SEQ ID NO: 357402 - RNA, 19 nt, Homo sapiens
  misc_RNA (1)...(19): siRNA sense strand
aagcagauguagaguuugu

SEQ ID NO: 357403 - RNA, 19 nt, Homo sapiens
  misc_RNA (1)...(19): siRNA sense strand
ucaugguggucauuucgua

SEQ ID NO: 357404 - RNA, 19 nt, Homo sapiens
  misc_RNA (1)...(19): siRNA sense strand
aagaggaaauaguucaguu

SEQ ID NO: 357405 - RNA, 19 nt, Homo sapiens
  misc_RNA (1)...(19): siRNA sense strand
gguggucauuucguacaua

SEQ ID NO: 357406 - RNA, 19 nt, Homo sapiens
  misc_RNA (1)...(19): siRNA sense strand
gggaggacauggcuauggu

SEQ ID NO: 357407 - RNA, 19 nt, Homo sapiens
  misc_RNA (1)...(19): siRNA sense strand
cacaggagaagcagaugua

SEQ ID NO: 357408 - RNA, 19 nt, Homo sapiens
  misc_RNA (1)...(19): siRNA sense strand
ucagggaggcuauggauca

SEQ ID NO: 357409 - RNA, 19 nt, Homo sapiens
  misc_RNA (1)...(19): siRNA sense strand
agaauagggcacagguaua

SEQ ID NO: 357410 - RNA, 19 nt, Homo sapiens
  misc_RNA (1)...(19): siRNA sense strand
gggaggccuucgugcaguu

SEQ ID NO: 357411 - RNA, 19 nt, Homo sapiens
  misc_RNA (1)...(19): siRNA sense strand
aaacacaaggaaagaauag

SEQ ID NO: 357412 - RNA, 19 nt, Homo sapiens
  misc_RNA (1)...(19): siRNA sense strand
uggaucaguuggaagaaug

SEQ ID NO: 357413 - RNA, 19 nt, Homo sapiens
  misc_RNA (1)...(19): siRNA sense strand
guggucauuucguacauau

SEQ ID NO: 357414 - RNA, 19 nt, Homo sapiens
  misc_RNA (1)...(19): siRNA sense strand
aagaauagggcacagguau

SEQ ID NO: 357415 - RNA, 19 nt, Homo sapiens
  misc_RNA (1)...(19): siRNA sense strand
ggauaugguacuccugaug

SEQ ID NO: 357416 - RNA, 19 nt, Homo sapiens
  misc_RNA (1)...(19): siRNA sense strand
gaugggacaguacgacuuc

SEQ ID NO: 357417 - RNA, 19 nt, Homo sapiens
  misc_RNA (1)...(19): siRNA sense strand
ugaugacuaugguggcuau

SEQ ID NO: 357418 - RNA, 19 nt, Homo sapiens
  misc_RNA (1)...(19): siRNA sense strand
caguagcugccaugucuaa

SEQ ID NO: 357419 - RNA, 19 nt, Homo sapiens
  misc_RNA (1)...(19): siRNA sense strand
cuaaauccaauacgaguuc

SEQ ID NO: 357420 - RNA, 19 nt, Homo sapiens
  misc_RNA (1)...(19): siRNA sense strand
uggcuuugaugacagaaug

SEQ ID NO: 357421 - RNA, 19 nt, Homo sapiens
  misc_RNA (1)...(19): siRNA sense strand
gaggaaauaguucaguucu

SEQ ID NO: 357422 - RNA, 19 nt, Homo sapiens
  misc_RNA (1)...(19): siRNA sense strand
gggaaacacaaggaaagaa

SEQ ID NO: 357423 - RNA, 19 nt, Homo sapiens
  misc_RNA (1)...(19): siRNA sense strand
gcaguggagguuacuaugg

SEQ ID NO: 357424 - RNA, 19 nt, Homo sapiens
  misc_RNA (1)...(19): siRNA sense strand
guccaaaugacgcuaguga

SEQ ID NO: 357425 - RNA, 19 nt, Homo sapiens
  misc_RNA (1)...(19): siRNA sense strand
gcaacaucgauauauugaa

SEQ ID NO: 357426 - RNA, 19 nt, Homo sapiens
  misc_RNA (1)...(19): siRNA sense strand
gagcuggugaugcaaguuc

SEQ ID NO: 357427 - RNA, 19 nt, Homo sapiens
  misc_RNA (1)...(19): siRNA sense strand
cagaaugagagauggaaga

SEQ ID NO: 357428 - RNA, 19 nt, Homo sapiens
  misc_RNA (1)...(19): siRNA sense strand
aacauaaugguccaaauga

SEQ ID NO: 357429 - RNA, 19 nt, Homo sapiens
  misc_RNA (1)...(19): siRNA sense strand
acaauuacaguggaggaua

SEQ ID NO: 357430 - RNA, 19 nt, Homo sapiens
  misc_RNA (1)...(19): siRNA sense strand
ggcuauggaucaguuggaa

SEQ ID NO: 357431 - RNA, 19 nt, Homo sapiens
  misc_RNA (1)...(19): siRNA sense strand
gaaguagcaggagugaaau

SEQ ID NO: 357432 - RNA, 19 nt, Homo sapiens
  misc_RNA (1)...(19): siRNA sense strand
accauaugauagaccaaua

SEQ ID NO: 357433 - RNA, 19 nt, Homo sapiens
  misc_RNA (1)...(19): siRNA sense strand
acaugaagaugcaguagcu

SEQ ID NO: 357434 - RNA, 19 nt, Homo sapiens
  misc_RNA (1)...(19): siRNA sense strand
ucaaaggagauagcagaaa

SEQ ID NO: 357435 - RNA, 19 nt, Homo sapiens
  misc_RNA (1)...(19): siRNA sense strand
gaccgggaccauaugauag

SEQ ID NO: 357436 - RNA, 19 nt, Homo sapiens
  misc_RNA (1)...(19): siRNA sense strand
gcagcaaagaggaaauagu

SEQ ID NO: 357437 - RNA, 19 nt, Homo sapiens
  misc_RNA (1)...(19): siRNA sense strand
cuacggaagagauggaaug

SEQ ID NO: 357438 - RNA, 19 nt, Homo sapiens
  misc_RNA (1)...(19): siRNA sense strand
aauuucuucucaccacuaa

SEQ ID NO: 357439 - RNA, 19 nt, Homo sapiens
  misc_RNA (1)...(19): siRNA sense strand
acuaugguggcuauaauaa

SEQ ID NO: 357440 - RNA, 19 nt, Homo sapiens
  misc_RNA (1)...(19): siRNA sense strand
aaagaauagggcacaggua

SEQ ID NO: 357441 - RNA, 19 nt, Homo sapiens
  misc_RNA (1)...(19): siRNA sense strand
aauccaauacgaguucaua

SEQ ID NO: 357442 - RNA, 19 nt, Homo sapiens
  misc_RNA (1)...(19): siRNA sense strand
ucucaccacuaaauccaau

SEQ ID NO: 357443 - RNA, 19 nt, Homo sapiens
  misc_RNA (1)...(19): siRNA sense strand
ugauggcuuugaugacaga

SEQ ID NO: 357444 - RNA, 19 nt, Homo sapiens
  misc_RNA (1)...(19): siRNA sense strand
ggugaugcaaguucagguu

SEQ ID NO: 357445 - RNA, 19 nt, Homo sapiens
  misc_RNA (1)...(19): siRNA sense strand
guggauggcgugggaugua

SEQ ID NO: 357446 - RNA, 19 nt, Homo sapiens
  misc_RNA (1)...(19): siRNA sense strand
uacaguggaggauauggua

SEQ ID NO: 357447 - RNA, 19 nt, Homo sapiens
  misc_RNA (1)...(19): siRNA sense strand
ugaaacauaaugguccaaa

SEQ ID NO: 357448 - RNA, 19 nt, Homo sapiens
  misc_RNA (1)...(19): siRNA sense strand
gugaugcaaguucagguuu

SEQ ID NO: 357449 - RNA, 19 nt, Homo sapiens
  misc_RNA (1)...(19): siRNA sense strand
uggaaaucgugccaaaugg

SEQ ID NO: 357450 - RNA, 19 nt, Homo sapiens
  misc_RNA (1)...(19): siRNA sense strand
cuauggaucaguuggaaga

SEQ ID NO: 357451 - RNA, 19 nt, Homo sapiens
  misc_RNA (1)...(19): siRNA sense strand
ggauuggguuaugaaacau

SEQ ID NO: 357452 - RNA, 19 nt, Homo sapiens
  misc_RNA (1)...(19): siRNA sense strand
gacacaugaagaugcagua

SEQ ID NO: 357453 - RNA, 19 nt, Homo sapiens
  misc_RNA (1)...(19): siRNA sense strand
uaaauccaauacgaguuca

SEQ ID NO: 357454 - RNA, 19 nt, Homo sapiens
  misc_RNA (1)...(19): siRNA sense strand
uaauuucuucucaccacua

SEQ ID NO: 357455 - RNA, 19 nt, Homo sapiens
  misc_RNA (1)...(19): siRNA sense strand
gaccauaugauagaccaau

SEQ ID NO: 357456 - RNA, 19 nt, Homo sapiens
  misc_RNA (1)...(19): siRNA sense strand
cuucguggacuaccauuug

SEQ ID NO: 357457 - RNA, 19 nt, Homo sapiens
  misc_RNA (1)...(19): siRNA sense strand
aaugggaggcuacggaaga

SEQ ID NO: 357458 - RNA, 19 nt, Homo sapiens
  misc_RNA (1)...(19): siRNA sense strand
auaguucaguucuuucaag

SEQ ID NO: 357459 - RNA, 19 nt, Homo sapiens
  misc_RNA (1)...(19): siRNA sense strand
auagggcacagguauauug

SEQ ID NO: 357460 - RNA, 19 nt, Homo sapiens
  misc_RNA (1)...(19): siRNA sense strand
gacagaaugagagauggaa

SEQ ID NO: 357461 - RNA, 19 nt, Homo sapiens
  misc_RNA (1)...(19): siRNA sense strand
gauagaccaauaggaggaa

SEQ ID NO: 357462 - RNA, 19 nt, Homo sapiens
  misc_RNA (1)...(19): siRNA sense strand
cugaugguuugggugguua

SEQ ID NO: 357463 - RNA, 19 nt, Homo sapiens
  misc_RNA (1)...(19): siRNA sense strand
ggaaauaguucaguucuuu

SEQ ID NO: 357464 - RNA, 19 nt, Homo sapiens
  misc_RNA (1)...(19): siRNA sense strand
gaacucuucuugaauucua

SEQ ID NO: 357465 - RNA, 19 nt, Homo sapiens
  misc_RNA (1)...(19): siRNA sense strand
gaagagauggaauggauaa

SEQ ID NO: 357466 - RNA, 19 nt, Homo sapiens
  misc_RNA (1)...(19): siRNA sense strand
gagauggaauggauaauca

SEQ ID NO: 357467 - RNA, 19 nt, Homo sapiens
  misc_RNA (1)...(19): siRNA sense strand
agaagcagauguagaguuu

SEQ ID NO: 357468 - RNA, 19 nt, Homo sapiens
  misc_RNA (1)...(19): siRNA sense strand
gaaacacaaggaaagaaua

SEQ ID NO: 357469 - RNA, 19 nt, Homo sapiens
  misc_RNA (1)...(19): siRNA sense strand
gcacagguauauugagauc

SEQ ID NO: 357470 - RNA, 19 nt, Homo sapiens
  misc_RNA (1)...(19): siRNA sense strand
ggaaugauggcuuugauga

SEQ ID NO: 357471 - RNA, 19 nt, Homo sapiens
  misc_RNA (1)...(19): siRNA sense strand
ugacauugcuaauuucuuc

SEQ ID NO: 357472 - RNA, 19 nt, Homo sapiens
  misc_RNA (1)...(19): siRNA sense strand
caacaucgauauauugaac

SEQ ID NO: 357473 - RNA, 19 nt, Homo sapiens
  misc_RNA (1)...(19): siRNA sense strand
gaaacauaaugguccaaau

SEQ ID NO: 357474 - RNA, 19 nt, Homo sapiens
  misc_RNA (1)...(19): siRNA sense strand
gggcacagguauauugaga

SEQ ID NO: 357475 - RNA, 19 nt, Homo sapiens
  misc_RNA (1)...(19): siRNA sense strand
uagcaggagugaaaucaaa

SEQ ID NO: 357476 - RNA, 19 nt, Homo sapiens
  misc_RNA (1)...(19): siRNA sense strand
gaauagggcacagguauau

SEQ ID NO: 357477 - RNA, 19 nt, Homo sapiens
  misc_RNA (1)...(19): siRNA sense strand
cagcaaagaggaaauaguu

SEQ ID NO: 357478 - RNA, 19 nt, Homo sapiens
  misc_RNA (1)...(19): siRNA sense strand
gcaaagaggaaauaguuca

SEQ ID NO: 357479 - RNA, 19 nt, Homo sapiens
  misc_RNA (1)...(19): siRNA sense strand
caaaggagauagcagaaaa

SEQ ID NO: 357480 - RNA, 19 nt, Homo sapiens
  misc_RNA (1)...(19): siRNA sense strand
agaaguagcaggagugaaa

SEQ ID NO: 357481 - RNA, 19 nt, Homo sapiens
  misc_RNA (1)...(19): siRNA sense strand
caauuacaguggaggauau

SEQ ID NO: 357482 - RNA, 19 nt, Homo sapiens
  misc_RNA (1)...(19): siRNA sense strand
cggaagagauggaauggau

SEQ ID NO: 357483 - RNA, 19 nt, Homo sapiens
  misc_RNA (1)...(19): siRNA sense strand
gcugccaugucuaaagaua

SEQ ID NO: 357484 - RNA, 19 nt, Homo sapiens
  misc_RNA (1)...(19): siRNA sense strand
caugggagguucuggaaug

SEQ ID NO: 357485 - RNA, 19 nt, Homo sapiens
  misc_RNA (1)...(19): siRNA sense strand
uaacauugacgauggacua

SEQ ID NO: 357486 - RNA, 19 nt, Homo sapiens
  misc_RNA (1)...(19): siRNA sense strand
ggaaacacaaggaaagaau

SEQ ID NO: 357487 - RNA, 19 nt, Homo sapiens
  misc_RNA (1)...(19): siRNA sense strand
caugcaacaucgauauauu

SEQ ID NO: 357488 - RNA, 19 nt, Homo sapiens
  misc_RNA (1)...(19): siRNA sense strand
cgaccgggaccauaugaua

SEQ ID NO: 357489 - RNA, 19 nt, Homo sapiens
  misc_RNA (1)...(19): siRNA sense strand
gggaggcuauggaucaguu

SEQ ID NO: 357490 - RNA, 19 nt, Homo sapiens
  misc_RNA (1)...(19): siRNA sense strand
ggauaacauugacgaugga

SEQ ID NO: 357491 - RNA, 19 nt, Homo sapiens
  misc_RNA (1)...(19): siRNA sense strand
ggaagagauggaauggaua

SEQ ID NO: 357492 - RNA, 19 nt, Homo sapiens
  misc_RNA (1)...(19): siRNA sense strand
uaacaugcaacaucgauau

SEQ ID NO: 357493 - RNA, 19 nt, Homo sapiens
  misc_RNA (1)...(19): siRNA sense strand
uagcugccaugucuaaaga

SEQ ID NO: 357494 - RNA, 19 nt, Homo sapiens
  misc_RNA (1)...(19): siRNA sense strand
ccaaaugacgcuagugaug

SEQ ID NO: 357495 - RNA, 19 nt, Homo sapiens
  misc_RNA (1)...(19): siRNA sense strand
aaacauaaugguccaaaug

SEQ ID NO: 357496 - RNA, 19 nt, Homo sapiens
  misc_RNA (1)...(19): siRNA sense strand
ugacuaugguggcuauaau

SEQ ID NO: 357497 - RNA, 19 nt, Homo sapiens
  misc_RNA (1)...(19): siRNA sense strand
acagguauauugagaucuu

SEQ ID NO: 357498 - RNA, 19 nt, Homo sapiens
  misc_RNA (1)...(19): siRNA sense strand
gaugacagaaugagagaug

SEQ ID NO: 357499 - RNA, 19 nt, Homo sapiens
  misc_RNA (1)...(19): siRNA sense strand
ugccaugucuaaagauaaa

SEQ ID NO: 357500 - RNA, 19 nt, Homo sapiens
  misc_RNA (1)...(19): siRNA sense strand
gcagauguagaguuuguga

SEQ ID NO: 357501 - RNA, 19 nt, Homo sapiens
  misc_RNA (1)...(19): siRNA sense strand
gagaagcagauguagaguu

SEQ ID NO: 357502 - RNA, 19 nt, Homo sapiens
  misc_RNA (1)...(19): siRNA sense strand
gacuaugguggcuauaaua

SEQ ID NO: 357503 - RNA, 19 nt, Homo sapiens
  misc_RNA (1)...(19): siRNA sense strand
aagcagauguagaguuugu

SEQ ID NO: 357504 - RNA, 19 nt, Homo sapiens
  misc_RNA (1)...(19): siRNA sense strand
aagaggaaauaguucaguu

SEQ ID NO: 357505 - RNA, 19 nt, Homo sapiens
  misc_RNA (1)...(19): siRNA sense strand
gguggucauuucguacaua

SEQ ID NO: 357506 - RNA, 19 nt, Homo sapiens
  misc_RNA (1)...(19): siRNA sense strand
ucaugguggucauuucgua

SEQ ID NO: 357507 - RNA, 19 nt, Homo sapiens
  misc_RNA (1)...(19): siRNA sense strand
gggaggacauggcuauggu

SEQ ID NO: 357508 - RNA, 19 nt, Homo sapiens
  misc_RNA (1)...(19): siRNA sense strand
cuaugggaaugauggcuuu

SEQ ID NO: 357509 - RNA, 19 nt, Homo sapiens
  misc_RNA (1)...(19): siRNA sense strand
ucagggaggcuauggauca

SEQ ID NO: 357510 - RNA, 19 nt, Homo sapiens
  misc_RNA (1)...(19): siRNA sense strand
cacaggagaagcagaugua

SEQ ID NO: 357511 - RNA, 19 nt, Homo sapiens
  misc_RNA (1)...(19): siRNA sense strand
aaugauggcuuugaugaca

SEQ ID NO: 357512 - RNA, 19 nt, Homo sapiens
  misc_RNA (1)...(19): siRNA sense strand
agaauagggcacagguaua

SEQ ID NO: 357513 - RNA, 19 nt, Homo sapiens
  misc_RNA (1)...(19): siRNA sense strand
gggaggccuucgugcaguu

SEQ ID NO: 357514 - RNA, 19 nt, Homo sapiens
  misc_RNA (1)...(19): siRNA sense strand
aaacacaaggaaagaauag

SEQ ID NO: 357515 - RNA, 19 nt, Homo sapiens
  misc_RNA (1)...(19): siRNA sense strand
uggaucaguuggaagaaug

SEQ ID NO: 357516 - RNA, 19 nt, Homo sapiens
  misc_RNA (1)...(19): siRNA sense strand
guggucauuucguacauau

SEQ ID NO: 357517 - RNA, 19 nt, Homo sapiens
  misc_RNA (1)...(19): siRNA sense strand
aagaauagggcacagguau

SEQ ID NO: 357518 - RNA, 19 nt, Homo sapiens
  misc_RNA (1)...(19): siRNA sense strand
ggauaugguacuccugaug

SEQ ID NO: 357519 - RNA, 19 nt, Homo sapiens
  misc_RNA (1)...(19): siRNA sense strand
gaugggacaguacgacuuc

SEQ ID NO: 357520 - RNA, 19 nt, Homo sapiens
  misc_RNA (1)...(19): siRNA sense strand
gaggaaauaguucaguucu

SEQ ID NO: 357521 - RNA, 19 nt, Homo sapiens
  misc_RNA (1)...(19): siRNA sense strand
caguagcugccaugucuaa

SEQ ID NO: 357522 - RNA, 19 nt, Homo sapiens
  misc_RNA (1)...(19): siRNA sense strand
cuaaauccaauacgaguuc

SEQ ID NO: 357523 - RNA, 19 nt, Homo sapiens
  misc_RNA (1)...(19): siRNA sense strand
uggcuuugaugacagaaug

SEQ ID NO: 357524 - RNA, 19 nt, Homo sapiens
  misc_RNA (1)...(19): siRNA sense strand
ugaugacuaugguggcuau

SEQ ID NO: 357525 - RNA, 19 nt, Homo sapiens
  misc_RNA (1)...(19): siRNA sense strand
gggaaacacaaggaaagaa

SEQ ID NO: 357526 - RNA, 19 nt, Homo sapiens
  misc_RNA (1)...(19): siRNA sense strand
gcaguggagguuacuaugg

SEQ ID NO: 357527 - RNA, 19 nt, Homo sapiens
  misc_RNA (1)...(19): siRNA sense strand
guccaaaugacgcuaguga

SEQ ID NO: 357528 - RNA, 19 nt, Homo sapiens
  misc_RNA (1)...(19): siRNA sense strand
gcaacaucgauauauugaa

SEQ ID NO: 357529 - RNA, 19 nt, Homo sapiens
  misc_RNA (1)...(19): siRNA sense strand
gagcuggugaugcaaguuc

SEQ ID NO: 357530 - RNA, 19 nt, Homo sapiens
  misc_RNA (1)...(19): siRNA sense strand
cagaaugagagauggaaga

SEQ ID NO: 357531 - RNA, 19 nt, Homo sapiens
  misc_RNA (1)...(19): siRNA sense strand
aacauaaugguccaaauga

SEQ ID NO: 357532 - RNA, 19 nt, Homo sapiens
  misc_RNA (1)...(19): siRNA sense strand
acaauuacaguggaggaua

SEQ ID NO: 357533 - RNA, 19 nt, Homo sapiens
  misc_RNA (1)...(19): siRNA sense strand
ggcuauggaucaguuggaa

SEQ ID NO: 357534 - RNA, 19 nt, Homo sapiens
  misc_RNA (1)...(19): siRNA sense strand
gaaguagcaggagugaaau

SEQ ID NO: 357535 - RNA, 19 nt, Homo sapiens
  misc_RNA (1)...(19): siRNA sense strand
accauaugauagaccaaua

SEQ ID NO: 357536 - RNA, 19 nt, Homo sapiens
  misc_RNA (1)...(19): siRNA sense strand
ucaaaggagauagcagaaa

SEQ ID NO: 357537 - RNA, 19 nt, Homo sapiens
  misc_RNA (1)...(19): siRNA sense strand
acaugaagaugcaguagcu

SEQ ID NO: 357538 - RNA, 19 nt, Homo sapiens
  misc_RNA (1)...(19): siRNA sense strand
gaccgggaccauaugauag

SEQ ID NO: 357539 - RNA, 19 nt, Homo sapiens
  misc_RNA (1)...(19): siRNA sense strand
cuacggaagagauggaaug

SEQ ID NO: 357540 - RNA, 19 nt, Homo sapiens
  misc_RNA (1)...(19): siRNA sense strand
gcagcaaagaggaaauagu

SEQ ID NO: 357541 - RNA, 19 nt, Homo sapiens
  misc_RNA (1)...(19): siRNA sense strand
aauuucuucucaccacuaa

SEQ ID NO: 357542 - RNA, 19 nt, Homo sapiens
  misc_RNA (1)...(19): siRNA sense strand
acuaugguggcuauaauaa

SEQ ID NO: 357543 - RNA, 19 nt, Homo sapiens
  misc_RNA (1)...(19): siRNA sense strand
aaagaauagggcacaggua

SEQ ID NO: 357544 - RNA, 19 nt, Homo sapiens
  misc_RNA (1)...(19): siRNA sense strand
aauccaauacgaguucaua

SEQ ID NO: 357545 - RNA, 19 nt, Homo sapiens
  misc_RNA (1)...(19): siRNA sense strand
ucucaccacuaaauccaau

SEQ ID NO: 357546 - RNA, 19 nt, Homo sapiens
  misc_RNA (1)...(19): siRNA sense strand
ugauggcuuugaugacaga

SEQ ID NO: 357547 - RNA, 19 nt, Homo sapiens
  misc_RNA (1)...(19): siRNA sense strand
uaauuacggcuaugggaau

SEQ ID NO: 357548 - RNA, 19 nt, Homo sapiens
  misc_RNA (1)...(19): siRNA sense strand
guggauggcgugggaugua

SEQ ID NO: 357549 - RNA, 19 nt, Homo sapiens
  misc_RNA (1)...(19): siRNA sense strand
uacaguggaggauauggua

SEQ ID NO: 357550 - RNA, 19 nt, Homo sapiens
  misc_RNA (1)...(19): siRNA sense strand
ugaaacauaaugguccaaa

SEQ ID NO: 357551 - RNA, 19 nt, Homo sapiens
  misc_RNA (1)...(19): siRNA sense strand
gugaugcaaguucagguuu

SEQ ID NO: 357552 - RNA, 19 nt, Homo sapiens
  misc_RNA (1)...(19): siRNA sense strand
ggugaugcaaguucagguu

SEQ ID NO: 357553 - RNA, 19 nt, Homo sapiens
  misc_RNA (1)...(19): siRNA sense strand
gggaaugauggcuuugaug

SEQ ID NO: 357554 - RNA, 19 nt, Homo sapiens
  misc_RNA (1)...(19): siRNA sense strand
ggauuggguuaugaaacau

SEQ ID NO: 357555 - RNA, 19 nt, Homo sapiens
  misc_RNA (1)...(19): siRNA sense strand
cuauggaucaguuggaaga

SEQ ID NO: 357556 - RNA, 19 nt, Homo sapiens
  misc_RNA (1)...(19): siRNA sense strand
gacacaugaagaugcagua

SEQ ID NO: 357557 - RNA, 19 nt, Homo sapiens
  misc_RNA (1)...(19): siRNA sense strand
uggaaaucgugccaaaugg

SEQ ID NO: 357558 - RNA, 19 nt, Homo sapiens
  misc_RNA (1)...(19): siRNA sense strand
uaaauccaauacgaguuca

SEQ ID NO: 357559 - RNA, 19 nt, Homo sapiens
  misc_RNA (1)...(19): siRNA sense strand
uaauuucuucucaccacua

SEQ ID NO: 357560 - RNA, 19 nt, Homo sapiens
  misc_RNA (1)...(19): siRNA sense strand
auaguucaguucuuucaag

SEQ ID NO: 357561 - RNA, 19 nt, Homo sapiens
  misc_RNA (1)...(19): siRNA sense strand
aaugggaggcuacggaaga

SEQ ID NO: 357562 - RNA, 19 nt, Homo sapiens
  misc_RNA (1)...(19): siRNA sense strand
cuucguggacuaccauuug

SEQ ID NO: 357563 - RNA, 19 nt, Homo sapiens
  misc_RNA (1)...(19): siRNA sense strand
guggaaagcuuugguguuu

SEQ ID NO: 357564 - RNA, 19 nt, Homo sapiens
  misc_RNA (1)...(19): siRNA sense strand
gcaggcagauguagcacua

SEQ ID NO: 357565 - RNA, 19 nt, Homo sapiens
  misc_RNA (1)...(19): siRNA sense strand
gaucagggguggucaaaua

SEQ ID NO: 357566 - RNA, 19 nt, Homo sapiens
  misc_RNA (1)...(19): siRNA sense strand
gcauagcccuaacuccuaa

SEQ ID NO: 357567 - RNA, 19 nt, Homo sapiens
  misc_RNA (1)...(19): siRNA sense strand
gcaucaagaucuacagcua

SEQ ID NO: 357568 - RNA, 19 nt, Homo sapiens
  misc_RNA (1)...(19): siRNA sense strand
gagcugugguuugguguua

SEQ ID NO: 357569 - RNA, 19 nt, Homo sapiens
  misc_RNA (1)...(19): siRNA sense strand
gagaagcuauuggccagua

SEQ ID NO: 357570 - RNA, 19 nt, Homo sapiens
  misc_RNA (1)...(19): siRNA sense strand
ccaggaauguucaaucuuc

SEQ ID NO: 357571 - RNA, 19 nt, Homo sapiens
  misc_RNA (1)...(19): siRNA sense strand
caaccucacuccucucuca

SEQ ID NO: 357572 - RNA, 19 nt, Homo sapiens
  misc_RNA (1)...(19): siRNA sense strand
caaauuggacaagcuguua

SEQ ID NO: 357573 - RNA, 19 nt, Homo sapiens
  misc_RNA (1)...(19): siRNA sense strand
gaaguugagaaguccaaua

SEQ ID NO: 357574 - RNA, 19 nt, Homo sapiens
  misc_RNA (1)...(19): siRNA sense strand
gaucaagcaggcagaugua

SEQ ID NO: 357575 - RNA, 19 nt, Homo sapiens
  misc_RNA (1)...(19): siRNA sense strand
ugacugacagcuaugauaa

SEQ ID NO: 357576 - RNA, 19 nt, Homo sapiens
  misc_RNA (1)...(19): siRNA sense strand
caaauacagcugccuaugu

SEQ ID NO: 357577 - RNA, 19 nt, Homo sapiens
  misc_RNA (1)...(19): siRNA sense strand
ugacccagcugacagacaa

SEQ ID NO: 357578 - RNA, 19 nt, Homo sapiens
  misc_RNA (1)...(19): siRNA sense strand
cagucaaggugaaguacua

SEQ ID NO: 357579 - RNA, 19 nt, Homo sapiens
  misc_RNA (1)...(19): siRNA sense strand
auaacucccucaagguaua

SEQ ID NO: 357580 - RNA, 19 nt, Homo sapiens
  misc_RNA (1)...(19): siRNA sense strand
gggcuauaguguccuuauu

SEQ ID NO: 357581 - RNA, 19 nt, Homo sapiens
  misc_RNA (1)...(19): siRNA sense strand
guugagaaguccaauaguc

SEQ ID NO: 357582 - RNA, 19 nt, Homo sapiens
  misc_RNA (1)...(19): siRNA sense strand
gagcucacccugcaagaug

SEQ ID NO: 357583 - RNA, 19 nt, Homo sapiens
  misc_RNA (1)...(19): siRNA sense strand
gaggguggcuuuuccauug

SEQ ID NO: 357584 - RNA, 19 nt, Homo sapiens
  misc_RNA (1)...(19): siRNA sense strand
cagcaagauuacccgcaua

SEQ ID NO: 357585 - RNA, 19 nt, Homo sapiens
  misc_RNA (1)...(19): siRNA sense strand
ugacaguagucgcaaggaa

SEQ ID NO: 357586 - RNA, 19 nt, Homo sapiens
  misc_RNA (1)...(19): siRNA sense strand
caucguggcugacaguagu

SEQ ID NO: 357587 - RNA, 19 nt, Homo sapiens
  misc_RNA (1)...(19): siRNA sense strand
guacacucccugucaaaga

SEQ ID NO: 357588 - RNA, 19 nt, Homo sapiens
  misc_RNA (1)...(19): siRNA sense strand
gaagauauuccaccccaua

SEQ ID NO: 357589 - RNA, 19 nt, Homo sapiens
  misc_RNA (1)...(19): siRNA sense strand
gaggauuuccgcugcauug

SEQ ID NO: 357590 - RNA, 19 nt, Homo sapiens
  misc_RNA (1)...(19): siRNA sense strand
ugauaacucccucaaggua

SEQ ID NO: 357591 - RNA, 19 nt, Homo sapiens
  misc_RNA (1)...(19): siRNA sense strand
caagauguggagcuccuua

SEQ ID NO: 357592 - RNA, 19 nt, Homo sapiens
  misc_RNA (1)...(19): siRNA sense strand
ggcaagguauaaagcaguu

SEQ ID NO: 357593 - RNA, 19 nt, Homo sapiens
  misc_RNA (1)...(19): siRNA sense strand
ccuagggccucaccugcua

SEQ ID NO: 357594 - RNA, 19 nt, Homo sapiens
  misc_RNA (1)...(19): siRNA sense strand
uggacaagcuguuaagaag

SEQ ID NO: 357595 - RNA, 19 nt, Homo sapiens
  misc_RNA (1)...(19): siRNA sense strand
ugacagugcuaaagaucau

SEQ ID NO: 357596 - RNA, 19 nt, Homo sapiens
  misc_RNA (1)...(19): siRNA sense strand
gacaguagucgcaaggaaa

SEQ ID NO: 357597 - RNA, 19 nt, Homo sapiens
  misc_RNA (1)...(19): siRNA sense strand
guaacuaucguauacaagu

SEQ ID NO: 357598 - RNA, 19 nt, Homo sapiens
  misc_RNA (1)...(19): siRNA sense strand
uuagagagauggacaugag

SEQ ID NO: 357599 - RNA, 19 nt, Homo sapiens
  misc_RNA (1)...(19): siRNA sense strand
gugguuugguguuauguga

SEQ ID NO: 357600 - RNA, 19 nt, Homo sapiens
  misc_RNA (1)...(19): siRNA sense strand
caguuaacguggaagauuc

SEQ ID NO: 357601 - RNA, 19 nt, Homo sapiens
  misc_RNA (1)...(19): siRNA sense strand
ccaguggcauugauagcuu

SEQ ID NO: 357602 - RNA, 19 nt, Homo sapiens
  misc_RNA (1)...(19): siRNA sense strand
uacacucccugucaaagaa

SEQ ID NO: 357603 - RNA, 19 nt, Homo sapiens
  misc_RNA (1)...(19): siRNA sense strand
gggcagaucuacccaaccu

SEQ ID NO: 357604 - RNA, 19 nt, Homo sapiens
  misc_RNA (1)...(19): siRNA sense strand
cgugguaacuaucguauac

SEQ ID NO: 357605 - RNA, 19 nt, Homo sapiens
  misc_RNA (1)...(19): siRNA sense strand
ggacaguuaacguggaaga

SEQ ID NO: 357606 - RNA, 19 nt, Homo sapiens
  misc_RNA (1)...(19): siRNA sense strand
cagcagugccucuuucuca

SEQ ID NO: 357607 - RNA, 19 nt, Homo sapiens
  misc_RNA (1)...(19): siRNA sense strand
uggagaaucggcagaauga

SEQ ID NO: 357608 - RNA, 19 nt, Homo sapiens
  misc_RNA (1)...(19): siRNA sense strand
gauaacucccucaagguau

SEQ ID NO: 357609 - RNA, 19 nt, Homo sapiens
  misc_RNA (1)...(19): siRNA sense strand
ggacaugagcccggaggaa

SEQ ID NO: 357610 - RNA, 19 nt, Homo sapiens
  misc_RNA (1)...(19): siRNA sense strand
cuacuucacccagggcuua

SEQ ID NO: 357611 - RNA, 19 nt, Homo sapiens
  misc_RNA (1)...(19): siRNA sense strand
gcuuugguguuucacaguu

SEQ ID NO: 357612 - RNA, 19 nt, Homo sapiens
  misc_RNA (1)...(19): siRNA sense strand
aggcagcacuccaggaaug

SEQ ID NO: 357613 - RNA, 19 nt, Homo sapiens
  misc_RNA (1)...(19): siRNA sense strand
uaacuaucguauacaaguc

SEQ ID NO: 357614 - RNA, 19 nt, Homo sapiens
  misc_RNA (1)...(19): siRNA sense strand
gcuauaguguccuuauucg

SEQ ID NO: 357615 - RNA, 19 nt, Homo sapiens
  misc_RNA (1)...(19): siRNA sense strand
cugcauugcuggcaugugu

SEQ ID NO: 357616 - RNA, 19 nt, Homo sapiens
  misc_RNA (1)...(19): siRNA sense strand
uguaguaaccgauguggaa

SEQ ID NO: 357617 - RNA, 19 nt, Homo sapiens
  misc_RNA (1)...(19): siRNA sense strand
gaccagucaaggugaagua

SEQ ID NO: 357618 - RNA, 19 nt, Homo sapiens
  misc_RNA (1)...(19): siRNA sense strand
ggcauagcccuaacuccua

SEQ ID NO: 357619 - RNA, 19 nt, Homo sapiens
  misc_RNA (1)...(19): siRNA sense strand
gcugugguuugguguuaug

SEQ ID NO: 357620 - RNA, 19 nt, Homo sapiens
  misc_RNA (1)...(19): siRNA sense strand
cuacagcuaccaucugaga

SEQ ID NO: 357621 - RNA, 19 nt, Homo sapiens
  misc_RNA (1)...(19): siRNA sense strand
uguggaagguggaaagcuu

SEQ ID NO: 357622 - RNA, 19 nt, Homo sapiens
  misc_RNA (1)...(19): siRNA sense strand
gugacugacagcuaugaua

SEQ ID NO: 357623 - RNA, 19 nt, Homo sapiens
  misc_RNA (1)...(19): siRNA sense strand
uggcugaaguugagaaguc

SEQ ID NO: 357624 - RNA, 19 nt, Homo sapiens
  misc_RNA (1)...(19): siRNA sense strand
aaaggcagcacuccaggaa

SEQ ID NO: 357625 - RNA, 19 nt, Homo sapiens
  misc_RNA (1)...(19): siRNA sense strand
cagcuaccaucugagaaga

SEQ ID NO: 357626 - RNA, 19 nt, Homo sapiens
  misc_RNA (1)...(19): siRNA sense strand
gggcuuaggccucaaucug

SEQ ID NO: 357627 - RNA, 19 nt, Homo sapiens
  misc_RNA (1)...(19): siRNA sense strand
gcucuuuggcugaaguuga

SEQ ID NO: 357628 - RNA, 19 nt, Homo sapiens
  misc_RNA (1)...(19): siRNA sense strand
cuucugcacuguggccaua

SEQ ID NO: 357629 - RNA, 19 nt, Homo sapiens
  misc_RNA (1)...(19): siRNA sense strand
ggccucaccugcuaaacag

SEQ ID NO: 357630 - RNA, 19 nt, Homo sapiens
  misc_RNA (1)...(19): siRNA sense strand
cagauuagccacuucuucu

SEQ ID NO: 357631 - RNA, 19 nt, Homo sapiens
  misc_RNA (1)...(19): siRNA sense strand
cgucgggacuuuggagaga

SEQ ID NO: 357632 - RNA, 19 nt, Homo sapiens
  misc_RNA (1)...(19): siRNA sense strand
ugguaacuaucguauacaa

SEQ ID NO: 357633 - RNA, 19 nt, Homo sapiens
  misc_RNA (1)...(19): siRNA sense strand
caguggcauugauagcuuu

SEQ ID NO: 357634 - RNA, 19 nt, Homo sapiens
  misc_RNA (1)...(19): siRNA sense strand
aaucugacagugcuaaaga

SEQ ID NO: 357635 - RNA, 19 nt, Homo sapiens
  misc_RNA (1)...(19): siRNA sense strand
gguggaaagcuuugguguu

SEQ ID NO: 357636 - RNA, 19 nt, Homo sapiens
  misc_RNA (1)...(19): siRNA sense strand
gacaaucugacagugcuaa

SEQ ID NO: 357637 - RNA, 19 nt, Homo sapiens
  misc_RNA (1)...(19): siRNA sense strand
gaucuacagcuaccaucug

SEQ ID NO: 357638 - RNA, 19 nt, Homo sapiens
  misc_RNA (1)...(19): siRNA sense strand
acaagucuuuacccgcaaa

SEQ ID NO: 357639 - RNA, 19 nt, Homo sapiens
  misc_RNA (1)...(19): siRNA sense strand
caagcaggcagauguagca

SEQ ID NO: 357640 - RNA, 19 nt, Homo sapiens
  misc_RNA (1)...(19): siRNA sense strand
ugagggcaccgucuacuuc

SEQ ID NO: 357641 - RNA, 19 nt, Homo sapiens
  misc_RNA (1)...(19): siRNA sense strand
gggccucaccugcuaaaca

SEQ ID NO: 357642 - RNA, 19 nt, Homo sapiens
  misc_RNA (1)...(19): siRNA sense strand
acaguuaacguggaagauu

SEQ ID NO: 357643 - RNA, 19 nt, Homo sapiens
  misc_RNA (1)...(19): siRNA sense strand
ccggacaguuaacguggaa

SEQ ID NO: 357644 - RNA, 19 nt, Homo sapiens
  misc_RNA (1)...(19): siRNA sense strand
ugggaucauugcaucaaga

SEQ ID NO: 357645 - RNA, 19 nt, Homo sapiens
  misc_RNA (1)...(19): siRNA sense strand
ccucuaccucuguuacuuu

SEQ ID NO: 357646 - RNA, 19 nt, Homo sapiens
  misc_RNA (1)...(19): siRNA sense strand
guucuucacaggcucuuug

SEQ ID NO: 357647 - RNA, 19 nt, Homo sapiens
  misc_RNA (1)...(19): siRNA sense strand
ggcuauaguguccuuauuc

SEQ ID NO: 357648 - RNA, 19 nt, Homo sapiens
  misc_RNA (1)...(19): siRNA sense strand
ccagauuagccacuucuuc

SEQ ID NO: 357649 - RNA, 19 nt, Homo sapiens
  misc_RNA (1)...(19): siRNA sense strand
gaagguggaaagcuuuggu

SEQ ID NO: 357650 - RNA, 19 nt, Homo sapiens
  misc_RNA (1)...(19): siRNA sense strand
gcuaugauaacucccucaa

SEQ ID NO: 357651 - RNA, 19 nt, Homo sapiens
  misc_RNA (1)...(19): siRNA sense strand
gguguccgcugucccuuuu

SEQ ID NO: 357652 - RNA, 19 nt, Homo sapiens
  misc_RNA (1)...(19): siRNA sense strand
cacaggcucuuuggcugaa

SEQ ID NO: 357653 - RNA, 19 nt, Homo sapiens
  misc_RNA (1)...(19): siRNA sense strand
ggagccagcugagcaaacc

SEQ ID NO: 357654 - RNA, 19 nt, Homo sapiens
  misc_RNA (1)...(19): siRNA sense strand
gaccgugguaacuaucgua

SEQ ID NO: 357655 - RNA, 19 nt, Homo sapiens
  misc_RNA (1)...(19): siRNA sense strand
ugagaaguccaauagucaa

SEQ ID NO: 357656 - RNA, 19 nt, Homo sapiens
  misc_RNA (1)...(19): siRNA sense strand
gagaaguccaauagucaag

SEQ ID NO: 357657 - RNA, 19 nt, Homo sapiens
  misc_RNA (1)...(19): siRNA sense strand
gagggcaccgucuacuuca

SEQ ID NO: 357658 - RNA, 19 nt, Homo sapiens
  misc_RNA (1)...(19): siRNA sense strand
aagauuacccgcauaacca

SEQ ID NO: 357659 - RNA, 19 nt, Homo sapiens
  misc_RNA (1)...(19): siRNA sense strand
uaacucgucugcgggaacu

SEQ ID NO: 357660 - RNA, 19 nt, Homo sapiens
  misc_RNA (1)...(19): siRNA sense strand
ucaaauacagcugccuaug

SEQ ID NO: 357661 - RNA, 19 nt, Homo sapiens
  misc_RNA (1)...(19): siRNA sense strand
guggaagguggaaagcuuu

SEQ ID NO: 357662 - RNA, 19 nt, Homo sapiens
  misc_RNA (1)...(19): siRNA sense strand
uaucacagccuugccaucu

SEQ ID NO: 357663 - RNA, 19 nt, Homo sapiens
  misc_RNA (1)...(19): siRNA sense strand
gaagauggcuauuucagaa

SEQ ID NO: 357664 - RNA, 19 nt, Homo sapiens
  misc_RNA (1)...(19): siRNA sense strand
gaaguuggacuguguuaua

SEQ ID NO: 357665 - RNA, 19 nt, Homo sapiens
  misc_RNA (1)...(19): siRNA sense strand
gagacuacaucuuguuuaa

SEQ ID NO: 357666 - RNA, 19 nt, Homo sapiens
  misc_RNA (1)...(19): siRNA sense strand
gaacaggaguuucaauagu

SEQ ID NO: 357667 - RNA, 19 nt, Homo sapiens
  misc_RNA (1)...(19): siRNA sense strand
guaaggaugcguugaauaa

SEQ ID NO: 357668 - RNA, 19 nt, Homo sapiens
  misc_RNA (1)...(19): siRNA sense strand
gagugaagguuuggaaaua

SEQ ID NO: 357669 - RNA, 19 nt, Homo sapiens
  misc_RNA (1)...(19): siRNA sense strand
gaaagcaaaucugcgaauu

SEQ ID NO: 357670 - RNA, 19 nt, Homo sapiens
  misc_RNA (1)...(19): siRNA sense strand
gagaauuccuugcuuugaa

SEQ ID NO: 357671 - RNA, 19 nt, Homo sapiens
  misc_RNA (1)...(19): siRNA sense strand
cagcugggcuucauuggua

SEQ ID NO: 357672 - RNA, 19 nt, Homo sapiens
  misc_RNA (1)...(19): siRNA sense strand
ucgaauagcugaacacaga

SEQ ID NO: 357673 - RNA, 19 nt, Homo sapiens
  misc_RNA (1)...(19): siRNA sense strand
gaagagagaaguuaaaucu

SEQ ID NO: 357674 - RNA, 19 nt, Homo sapiens
  misc_RNA (1)...(19): siRNA sense strand
ucacagcgcucuucugaau

SEQ ID NO: 357675 - RNA, 19 nt, Homo sapiens
  misc_RNA (1)...(19): siRNA sense strand
caaagaaaccaaagacaaa

SEQ ID NO: 357676 - RNA, 19 nt, Homo sapiens
  misc_RNA (1)...(19): siRNA sense strand
gcaaagaaaccaaagacaa

SEQ ID NO: 357677 - RNA, 19 nt, Homo sapiens
  misc_RNA (1)...(19): siRNA sense strand
acagcgcucuucugaauua

SEQ ID NO: 357678 - RNA, 19 nt, Homo sapiens
  misc_RNA (1)...(19): siRNA sense strand
cgaauucgcuucagaccuu

SEQ ID NO: 357679 - RNA, 19 nt, Homo sapiens
  misc_RNA (1)...(19): siRNA sense strand
uaaauacgauugugcaaca

SEQ ID NO: 357680 - RNA, 19 nt, Homo sapiens
  misc_RNA (1)...(19): siRNA sense strand
ggucugcacucaucacuau

SEQ ID NO: 357681 - RNA, 19 nt, Homo sapiens
  misc_RNA (1)...(19): siRNA sense strand
gagagacagauauugauua

SEQ ID NO: 357682 - RNA, 19 nt, Homo sapiens
  misc_RNA (1)...(19): siRNA sense strand
gaaguaaggaugcguugaa

SEQ ID NO: 357683 - RNA, 19 nt, Homo sapiens
  misc_RNA (1)...(19): siRNA sense strand
ucauuugccucauuuauug

SEQ ID NO: 357684 - RNA, 19 nt, Homo sapiens
  misc_RNA (1)...(19): siRNA sense strand
caacgagaauuccuugcuu

SEQ ID NO: 357685 - RNA, 19 nt, Homo sapiens
  misc_RNA (1)...(19): siRNA sense strand
gacaaacgauuagaagaug

SEQ ID NO: 357686 - RNA, 19 nt, Homo sapiens
  misc_RNA (1)...(19): siRNA sense strand
agaguaagauggagaacaa

SEQ ID NO: 357687 - RNA, 19 nt, Homo sapiens
  misc_RNA (1)...(19): siRNA sense strand
uaaaggaguuaacaagcaa

SEQ ID NO: 357688 - RNA, 19 nt, Homo sapiens
  misc_RNA (1)...(19): siRNA sense strand
ucacuuccuuccuuacuuu

SEQ ID NO: 357689 - RNA, 19 nt, Homo sapiens
  misc_RNA (1)...(19): siRNA sense strand
gaaagaguaagauggagaa

SEQ ID NO: 357690 - RNA, 19 nt, Homo sapiens
  misc_RNA (1)...(19): siRNA sense strand
guuggacuguguuauagua

SEQ ID NO: 357691 - RNA, 19 nt, Homo sapiens
  misc_RNA (1)...(19): siRNA sense strand
ggagauauucugcuaaaca

SEQ ID NO: 357692 - RNA, 19 nt, Homo sapiens
  misc_RNA (1)...(19): siRNA sense strand
uagccaaccuggagaaaga

SEQ ID NO: 357693 - RNA, 19 nt, Homo sapiens
  misc_RNA (1)...(19): siRNA sense strand
ggagagacagauauugauu

SEQ ID NO: 357694 - RNA, 19 nt, Homo sapiens
  misc_RNA (1)...(19): siRNA sense strand
ccaagaacauccuggagau

SEQ ID NO: 357695 - RNA, 19 nt, Homo sapiens
  misc_RNA (1)...(19): siRNA sense strand
gaacuguagccacugcuuu

SEQ ID NO: 357696 - RNA, 19 nt, Homo sapiens
  misc_RNA (1)...(19): siRNA sense strand
ggagacuacaucuuguuua

SEQ ID NO: 357697 - RNA, 19 nt, Homo sapiens
  misc_RNA (1)...(19): siRNA sense strand
gaaacucuucauucccuua

SEQ ID NO: 357698 - RNA, 19 nt, Homo sapiens
  misc_RNA (1)...(19): siRNA sense strand
aaccaaagacaaacgauua

SEQ ID NO: 357699 - RNA, 19 nt, Homo sapiens
  misc_RNA (1)...(19): siRNA sense strand
gagagaaguuaaaucuuac

SEQ ID NO: 357700 - RNA, 19 nt, Homo sapiens
  misc_RNA (1)...(19): siRNA sense strand
ggagaaacccauugauugg

SEQ ID NO: 357701 - RNA, 19 nt, Homo sapiens
  misc_RNA (1)...(19): siRNA sense strand
gggcauauauuacauucag

SEQ ID NO: 357702 - RNA, 19 nt, Homo sapiens
  misc_RNA (1)...(19): siRNA sense strand
gcagaaacaaauggaagua

SEQ ID NO: 357703 - RNA, 19 nt, Homo sapiens
  misc_RNA (1)...(19): siRNA sense strand
caaagacaaacgauuagaa

SEQ ID NO: 357704 - RNA, 19 nt, Homo sapiens
  misc_RNA (1)...(19): siRNA sense strand
cccuaaagcuguuaaagga

SEQ ID NO: 357705 - RNA, 19 nt, Homo sapiens
  misc_RNA (1)...(19): siRNA sense strand
caaccuggagaaagaauuu

SEQ ID NO: 357706 - RNA, 19 nt, Homo sapiens
  misc_RNA (1)...(19): siRNA sense strand
gaaauaagcaaagaaacca

SEQ ID NO: 357707 - RNA, 19 nt, Homo sapiens
  misc_RNA (1)...(19): siRNA sense strand
cagucaauguagaaaguua

SEQ ID NO: 357708 - RNA, 19 nt, Homo sapiens
  misc_RNA (1)...(19): siRNA sense strand
ugauaaaccagucaaugua

SEQ ID NO: 357709 - RNA, 19 nt, Homo sapiens
  misc_RNA (1)...(19): siRNA sense strand
agaauuccuugcuuugaaa

SEQ ID NO: 357710 - RNA, 19 nt, Homo sapiens
  misc_RNA (1)...(19): siRNA sense strand
gaaugguguugcagaagga

SEQ ID NO: 357711 - RNA, 19 nt, Homo sapiens
  misc_RNA (1)...(19): siRNA sense strand
ugagaaugguguugcagaa

SEQ ID NO: 357712 - RNA, 19 nt, Homo sapiens
  misc_RNA (1)...(19): siRNA sense strand
gcgcucuucugaauuaaau

SEQ ID NO: 357713 - RNA, 19 nt, Homo sapiens
  misc_RNA (1)...(19): siRNA sense strand
gaacaaagcaaaaccuaga

SEQ ID NO: 357714 - RNA, 19 nt, Homo sapiens
  misc_RNA (1)...(19): siRNA sense strand
gaaaagggcauauauuaca

SEQ ID NO: 357715 - RNA, 19 nt, Homo sapiens
  misc_RNA (1)...(19): siRNA sense strand
aaugauguaugcucaagaa

SEQ ID NO: 357716 - RNA, 19 nt, Homo sapiens
  misc_RNA (1)...(19): siRNA sense strand
aagaacaggaguuucaaua

SEQ ID NO: 357717 - RNA, 19 nt, Homo sapiens
  misc_RNA (1)...(19): siRNA sense strand
cauagaaacucuucauucc

SEQ ID NO: 357718 - RNA, 19 nt, Homo sapiens
  misc_RNA (1)...(19): siRNA sense strand
gauuagaagauggcuauuu

SEQ ID NO: 357719 - RNA, 19 nt, Homo sapiens
  misc_RNA (1)...(19): siRNA sense strand
gagaaguuggacuguguua

SEQ ID NO: 357720 - RNA, 19 nt, Homo sapiens
  misc_RNA (1)...(19): siRNA sense strand
ucaaccugcuguacagauu

SEQ ID NO: 357721 - RNA, 19 nt, Homo sapiens
  misc_RNA (1)...(19): siRNA sense strand
gaacauccuggagauauuc

SEQ ID NO: 357722 - RNA, 19 nt, Homo sapiens
  misc_RNA (1)...(19): siRNA sense strand
gaucuuacucugauuguag

SEQ ID NO: 357723 - RNA, 19 nt, Homo sapiens
  misc_RNA (1)...(19): siRNA sense strand
aaagaaagaguaagaugga

SEQ ID NO: 357724 - RNA, 19 nt, Homo sapiens
  misc_RNA (1)...(19): siRNA sense strand
aaucuuaccucauagaaac

SEQ ID NO: 357725 - RNA, 19 nt, Homo sapiens
  misc_RNA (1)...(19): siRNA sense strand
ucaacuuucuucugaggaa

SEQ ID NO: 357726 - RNA, 19 nt, Homo sapiens
  misc_RNA (1)...(19): siRNA sense strand
ccaagucucaaucccauuu

SEQ ID NO: 357727 - RNA, 19 nt, Homo sapiens
  misc_RNA (1)...(19): siRNA sense strand
gauauucugcuaaacacaa

SEQ ID NO: 357728 - RNA, 19 nt, Homo sapiens
  misc_RNA (1)...(19): siRNA sense strand
gauaaaccagucaauguag

SEQ ID NO: 357729 - RNA, 19 nt, Homo sapiens
  misc_RNA (1)...(19): siRNA sense strand
gaagaacaggaguuucaau

SEQ ID NO: 357730 - RNA, 19 nt, Homo sapiens
  misc_RNA (1)...(19): siRNA sense strand
gaaagucugcaacccugaa

SEQ ID NO: 357731 - RNA, 19 nt, Homo sapiens
  misc_RNA (1)...(19): siRNA sense strand
ggaucuuacucugauugua

SEQ ID NO: 357732 - RNA, 19 nt, Homo sapiens
  misc_RNA (1)...(19): siRNA sense strand
gcuccgcaauggaacugua

SEQ ID NO: 357733 - RNA, 19 nt, Homo sapiens
  misc_RNA (1)...(19): siRNA sense strand
agaaacaaauggaaguaag

SEQ ID NO: 357734 - RNA, 19 nt, Homo sapiens
  misc_RNA (1)...(19): siRNA sense strand
gacuuucaguuauucagaa

SEQ ID NO: 357735 - RNA, 19 nt, Homo sapiens
  misc_RNA (1)...(19): siRNA sense strand
cuggagauauucugcuaaa

SEQ ID NO: 357736 - RNA, 19 nt, Homo sapiens
  misc_RNA (1)...(19): siRNA sense strand
agaacauccuggagauauu

SEQ ID NO: 357737 - RNA, 19 nt, Homo sapiens
  misc_RNA (1)...(19): siRNA sense strand
cacuucaacuuucuucuga

SEQ ID NO: 357738 - RNA, 19 nt, Homo sapiens
  misc_RNA (1)...(19): siRNA sense strand
ccaaagaaagaguaagaug

SEQ ID NO: 357739 - RNA, 19 nt, Homo sapiens
  misc_RNA (1)...(19): siRNA sense strand
aagagaaguuggacugugu

SEQ ID NO: 357740 - RNA, 19 nt, Homo sapiens
  misc_RNA (1)...(19): siRNA sense strand
caagugccaaguauuuauu

SEQ ID NO: 357741 - RNA, 19 nt, Homo sapiens
  misc_RNA (1)...(19): siRNA sense strand
gccuuucgacuuucaguua

SEQ ID NO: 357742 - RNA, 19 nt, Homo sapiens
  misc_RNA (1)...(19): siRNA sense strand
gagauauucugcuaaacac

SEQ ID NO: 357743 - RNA, 19 nt, Homo sapiens
  misc_RNA (1)...(19): siRNA sense strand
caagaacauccuggagaua

SEQ ID NO: 357744 - RNA, 19 nt, Homo sapiens
  misc_RNA (1)...(19): siRNA sense strand
uaggagagacagauauuga

SEQ ID NO: 357745 - RNA, 19 nt, Homo sapiens
  misc_RNA (1)...(19): siRNA sense strand
cuucaagugccaaguauuu

SEQ ID NO: 357746 - RNA, 19 nt, Homo sapiens
  misc_RNA (1)...(19): siRNA sense strand
auuagaagauggcuauuuc

SEQ ID NO: 357747 - RNA, 19 nt, Homo sapiens
  misc_RNA (1)...(19): siRNA sense strand
acucaucacuaucaggaaa

SEQ ID NO: 357748 - RNA, 19 nt, Homo sapiens
  misc_RNA (1)...(19): siRNA sense strand
gcacuucaacuuucuucug

SEQ ID NO: 357749 - RNA, 19 nt, Homo sapiens
  misc_RNA (1)...(19): siRNA sense strand
cuucauucccuuauugaua

SEQ ID NO: 357750 - RNA, 19 nt, Homo sapiens
  misc_RNA (1)...(19): siRNA sense strand
uaaccuguauccugaagag

SEQ ID NO: 357751 - RNA, 19 nt, Homo sapiens
  misc_RNA (1)...(19): siRNA sense strand
ggaaauaagcaaagaaacc

SEQ ID NO: 357752 - RNA, 19 nt, Homo sapiens
  misc_RNA (1)...(19): siRNA sense strand
agugaagguuuggaaauaa

SEQ ID NO: 357753 - RNA, 19 nt, Homo sapiens
  misc_RNA (1)...(19): siRNA sense strand
uauaguagucuucauagga

SEQ ID NO: 357754 - RNA, 19 nt, Homo sapiens
  misc_RNA (1)...(19): siRNA sense strand
gaaacaaauggaaguaagg

SEQ ID NO: 357755 - RNA, 19 nt, Homo sapiens
  misc_RNA (1)...(19): siRNA sense strand
gcuguuugggccauucuua

SEQ ID NO: 357756 - RNA, 19 nt, Homo sapiens
  misc_RNA (1)...(19): siRNA sense strand
caaagcaaaaccuagauua

SEQ ID NO: 357757 - RNA, 19 nt, Homo sapiens
  misc_RNA (1)...(19): siRNA sense strand
cauaggagagacagauauu

SEQ ID NO: 357758 - RNA, 19 nt, Homo sapiens
  misc_RNA (1)...(19): siRNA sense strand
ucauagaaacucuucauuc

SEQ ID NO: 357759 - RNA, 19 nt, Homo sapiens
  misc_RNA (1)...(19): siRNA sense strand
uuuaucacuuccuuccuua

SEQ ID NO: 357760 - RNA, 19 nt, Homo sapiens
  misc_RNA (1)...(19): siRNA sense strand
agacaaacgauuagaagau

SEQ ID NO: 357761 - RNA, 19 nt, Homo sapiens
  misc_RNA (1)...(19): siRNA sense strand
gcuuuagcauuuaucacuu

SEQ ID NO: 357762 - RNA, 19 nt, Homo sapiens
  misc_RNA (1)...(19): siRNA sense strand
uagcauuuaucacuuccuu

SEQ ID NO: 357763 - RNA, 19 nt, Homo sapiens
  misc_RNA (1)...(19): siRNA sense strand
gaugaaagcucucuaaaga

SEQ ID NO: 357764 - RNA, 19 nt, Homo sapiens
  misc_RNA (1)...(19): siRNA sense strand
ggaagaaugugacgaguug

SEQ ID NO: 357765 - RNA, 19 nt, Homo sapiens
  misc_RNA (1)...(19): siRNA sense strand
gaacaaaucccuaaugauc

SEQ ID NO: 357766 - RNA, 19 nt, Homo sapiens
  misc_RNA (1)...(19): siRNA sense strand
guagacagcuggaugauug

SEQ ID NO: 357767 - RNA, 19 nt, Homo sapiens
  misc_RNA (1)...(19): siRNA sense strand
caaaucagcuccaaagaau

SEQ ID NO: 357768 - RNA, 19 nt, Homo sapiens
  misc_RNA (1)...(19): siRNA sense strand
gagcauauccugaaagaaa

SEQ ID NO: 357769 - RNA, 19 nt, Homo sapiens
  misc_RNA (1)...(19): siRNA sense strand
ucaaauggccaaacuaaua

SEQ ID NO: 357770 - RNA, 19 nt, Homo sapiens
  misc_RNA (1)...(19): siRNA sense strand
gaugugaccuucauucuuc

SEQ ID NO: 357771 - RNA, 19 nt, Homo sapiens
  misc_RNA (1)...(19): siRNA sense strand
gaacauguacuguguaucu

SEQ ID NO: 357772 - RNA, 19 nt, Homo sapiens
  misc_RNA (1)...(19): siRNA sense strand
agacaaagguuaugaaacu

SEQ ID NO: 357773 - RNA, 19 nt, Homo sapiens
  misc_RNA (1)...(19): siRNA sense strand
acaacaauaugcugucuuu

SEQ ID NO: 357774 - RNA, 19 nt, Homo sapiens
  misc_RNA (1)...(19): siRNA sense strand
ugaaagcucucuaaagaag

SEQ ID NO: 357775 - RNA, 19 nt, Homo sapiens
  misc_RNA (1)...(19): siRNA sense strand
acaauaugcugucuuucua

SEQ ID NO: 357776 - RNA, 19 nt, Homo sapiens
  misc_RNA (1)...(19): siRNA sense strand
caaccaagcugagcauauc

SEQ ID NO: 357777 - RNA, 19 nt, Homo sapiens
  misc_RNA (1)...(19): siRNA sense strand
acaaacagccaacccuuua

SEQ ID NO: 357778 - RNA, 19 nt, Homo sapiens
  misc_RNA (1)...(19): siRNA sense strand
gcaaaugaucgcugucaaa

SEQ ID NO: 357779 - RNA, 19 nt, Homo sapiens
  misc_RNA (1)...(19): siRNA sense strand
gaucucggaugaugaguuc

SEQ ID NO: 357780 - RNA, 19 nt, Homo sapiens
  misc_RNA (1)...(19): siRNA sense strand
ggucauggguuccucaaca

SEQ ID NO: 357781 - RNA, 19 nt, Homo sapiens
  misc_RNA (1)...(19): siRNA sense strand
uggaacaaaucccuaauga

SEQ ID NO: 357782 - RNA, 19 nt, Homo sapiens
  misc_RNA (1)...(19): siRNA sense strand
gcaagaaugccuccucaug

SEQ ID NO: 357783 - RNA, 19 nt, Homo sapiens
  misc_RNA (1)...(19): siRNA sense strand
gagcuucaguacaccauau

SEQ ID NO: 357784 - RNA, 19 nt, Homo sapiens
  misc_RNA (1)...(19): siRNA sense strand
caacaguccucaucaacca

SEQ ID NO: 357785 - RNA, 19 nt, Homo sapiens
  misc_RNA (1)...(19): siRNA sense strand
caauugaucugugccuuau

SEQ ID NO: 357786 - RNA, 19 nt, Homo sapiens
  misc_RNA (1)...(19): siRNA sense strand
uugaagaucuccaaugaug

SEQ ID NO: 357787 - RNA, 19 nt, Homo sapiens
  misc_RNA (1)...(19): siRNA sense strand
gaucugugccuuaugcaaa

SEQ ID NO: 357788 - RNA, 19 nt, Homo sapiens
  misc_RNA (1)...(19): siRNA sense strand
cagccaacccuuuaaauug

SEQ ID NO: 357789 - RNA, 19 nt, Homo sapiens
  misc_RNA (1)...(19): siRNA sense strand
ggucaacaguccucaucaa

SEQ ID NO: 357790 - RNA, 19 nt, Homo sapiens
  misc_RNA (1)...(19): siRNA sense strand
caagcaaacucuggagaug

SEQ ID NO: 357791 - RNA, 19 nt, Homo sapiens
  misc_RNA (1)...(19): siRNA sense strand
gauugcagauggagaagga

SEQ ID NO: 357792 - RNA, 19 nt, Homo sapiens
  misc_RNA (1)...(19): siRNA sense strand
ucaccugccuggaccauga

SEQ ID NO: 357793 - RNA, 19 nt, Homo sapiens
  misc_RNA (1)...(19): siRNA sense strand
gcaggaaauauauucauug

SEQ ID NO: 357794 - RNA, 19 nt, Homo sapiens
  misc_RNA (1)...(19): siRNA sense strand
ucaaagagacaaagguuau

SEQ ID NO: 357795 - RNA, 19 nt, Homo sapiens
  misc_RNA (1)...(19): siRNA sense strand
gcaacugcaucuucucaag

SEQ ID NO: 357796 - RNA, 19 nt, Homo sapiens
  misc_RNA (1)...(19): siRNA sense strand
ggucuucucucgcugcaau

SEQ ID NO: 357797 - RNA, 19 nt, Homo sapiens
  misc_RNA (1)...(19): siRNA sense strand
ggaaugugacucugcagaa

SEQ ID NO: 357798 - RNA, 19 nt, Homo sapiens
  misc_RNA (1)...(19): siRNA sense strand
cgcuacaucuucaucguua

SEQ ID NO: 357799 - RNA, 19 nt, Homo sapiens
  misc_RNA (1)...(19): siRNA sense strand
gugaacauguacuguguau

SEQ ID NO: 357800 - RNA, 19 nt, Homo sapiens
  misc_RNA (1)...(19): siRNA sense strand
caaaaugacucacaagaag

SEQ ID NO: 357801 - RNA, 19 nt, Homo sapiens
  misc_RNA (1)...(19): siRNA sense strand
cagcagaggaagcaaauga

SEQ ID NO: 357802 - RNA, 19 nt, Homo sapiens
  misc_RNA (1)...(19): siRNA sense strand
ccaauugaucugugccuua

SEQ ID NO: 357803 - RNA, 19 nt, Homo sapiens
  misc_RNA (1)...(19): siRNA sense strand
gcucacagccucugcuuca

SEQ ID NO: 357804 - RNA, 19 nt, Homo sapiens
  misc_RNA (1)...(19): siRNA sense strand
cacaagaaguugaagaucu

SEQ ID NO: 357805 - RNA, 19 nt, Homo sapiens
  misc_RNA (1)...(19): siRNA sense strand
aaucaaauggccaaacuaa

SEQ ID NO: 357806 - RNA, 19 nt, Homo sapiens
  misc_RNA (1)...(19): siRNA sense strand
gccuagaguuguuugaaga

SEQ ID NO: 357807 - RNA, 19 nt, Homo sapiens
  misc_RNA (1)...(19): siRNA sense strand
gcgcaacagcgaacuagaa

SEQ ID NO: 357808 - RNA, 19 nt, Homo sapiens
  misc_RNA (1)...(19): siRNA sense strand
ccaguuuguccaacauuua

SEQ ID NO: 357809 - RNA, 19 nt, Homo sapiens
  misc_RNA (1)...(19): siRNA sense strand
aguugaagaucuccaauga

SEQ ID NO: 357810 - RNA, 19 nt, Homo sapiens
  misc_RNA (1)...(19): siRNA sense strand
acaaaucagcuccaaagaa

SEQ ID NO: 357811 - RNA, 19 nt, Homo sapiens
  misc_RNA (1)...(19): siRNA sense strand
gaccuucauucuuccaguu

SEQ ID NO: 357812 - RNA, 19 nt, Homo sapiens
  misc_RNA (1)...(19): siRNA sense strand
ugaauacugcuaugcauga

SEQ ID NO: 357813 - RNA, 19 nt, Homo sapiens
  misc_RNA (1)...(19): siRNA sense strand
ccuaugagcuucaguacac

SEQ ID NO: 357814 - RNA, 19 nt, Homo sapiens
  misc_RNA (1)...(19): siRNA sense strand
gccaagggaugcaguaaaa

SEQ ID NO: 357815 - RNA, 19 nt, Homo sapiens
  misc_RNA (1)...(19): siRNA sense strand
uggguguccuccuggauua

SEQ ID NO: 357816 - RNA, 19 nt, Homo sapiens
  misc_RNA (1)...(19): siRNA sense strand
aaucagcuccaaagaauga

SEQ ID NO: 357817 - RNA, 19 nt, Homo sapiens
  misc_RNA (1)...(19): siRNA sense strand
ggaugaaagcucucuaaag

SEQ ID NO: 357818 - RNA, 19 nt, Homo sapiens
  misc_RNA (1)...(19): siRNA sense strand
aaacagccaacccuuuaaa

SEQ ID NO: 357819 - RNA, 19 nt, Homo sapiens
  misc_RNA (1)...(19): siRNA sense strand
caaacagccaacccuuuaa

SEQ ID NO: 357820 - RNA, 19 nt, Homo sapiens
  misc_RNA (1)...(19): siRNA sense strand
ugaaugaucgauuugagaa

SEQ ID NO: 357821 - RNA, 19 nt, Homo sapiens
  misc_RNA (1)...(19): siRNA sense strand
augagaaagugaacaugua

SEQ ID NO: 357822 - RNA, 19 nt, Homo sapiens
  misc_RNA (1)...(19): siRNA sense strand
gggacucgcuacaucuuca

SEQ ID NO: 357823 - RNA, 19 nt, Homo sapiens
  misc_RNA (1)...(19): siRNA sense strand
ugaauggauuggcaagaau

SEQ ID NO: 357824 - RNA, 19 nt, Homo sapiens
  misc_RNA (1)...(19): siRNA sense strand
cuucaucguuaaagccaua

SEQ ID NO: 357825 - RNA, 19 nt, Homo sapiens
  misc_RNA (1)...(19): siRNA sense strand
gaaugugacucugcagaac

SEQ ID NO: 357826 - RNA, 19 nt, Homo sapiens
  misc_RNA (1)...(19): siRNA sense strand
caacugcaggccucaagaa

SEQ ID NO: 357827 - RNA, 19 nt, Homo sapiens
  misc_RNA (1)...(19): siRNA sense strand
caacauuuacaaucuggaa

SEQ ID NO: 357828 - RNA, 19 nt, Homo sapiens
  misc_RNA (1)...(19): siRNA sense strand
cuaacucucuccaucuuca

SEQ ID NO: 357829 - RNA, 19 nt, Homo sapiens
  misc_RNA (1)...(19): siRNA sense strand
ccaaagaaugaauggauug

SEQ ID NO: 357830 - RNA, 19 nt, Homo sapiens
  misc_RNA (1)...(19): siRNA sense strand
gccagcagguugaggugaa

SEQ ID NO: 357831 - RNA, 19 nt, Homo sapiens
  misc_RNA (1)...(19): siRNA sense strand
ccccagauuuuauugauua

SEQ ID NO: 357832 - RNA, 19 nt, Homo sapiens
  misc_RNA (1)...(19): siRNA sense strand
cagugaaccuacccgacua

SEQ ID NO: 357833 - RNA, 19 nt, Homo sapiens
  misc_RNA (1)...(19): siRNA sense strand
gaaagugaacauguacugu

SEQ ID NO: 357834 - RNA, 19 nt, Homo sapiens
  misc_RNA (1)...(19): siRNA sense strand
acacuggagucugaauuga

SEQ ID NO: 357835 - RNA, 19 nt, Homo sapiens
  misc_RNA (1)...(19): siRNA sense strand
cuacaaaucagcuccaaag

SEQ ID NO: 357836 - RNA, 19 nt, Homo sapiens
  misc_RNA (1)...(19): siRNA sense strand
caaucugccuagaguuguu

SEQ ID NO: 357837 - RNA, 19 nt, Homo sapiens
  misc_RNA (1)...(19): siRNA sense strand
caaauggccaaacuaauac

SEQ ID NO: 357838 - RNA, 19 nt, Homo sapiens
  misc_RNA (1)...(19): siRNA sense strand
ggugaauacugcuaugcau

SEQ ID NO: 357839 - RNA, 19 nt, Homo sapiens
  misc_RNA (1)...(19): siRNA sense strand
ggaacaaaucccuaaugau

SEQ ID NO: 357840 - RNA, 19 nt, Homo sapiens
  misc_RNA (1)...(19): siRNA sense strand
aggaaaugcugguggaugu

SEQ ID NO: 357841 - RNA, 19 nt, Homo sapiens
  misc_RNA (1)...(19): siRNA sense strand
gaauggauuggcaagaaug

SEQ ID NO: 357842 - RNA, 19 nt, Homo sapiens
  misc_RNA (1)...(19): siRNA sense strand
acaagaaguugaagaucuc

SEQ ID NO: 357843 - RNA, 19 nt, Homo sapiens
  misc_RNA (1)...(19): siRNA sense strand
gguauguuaucucgcugaa

SEQ ID NO: 357844 - RNA, 19 nt, Homo sapiens
  misc_RNA (1)...(19): siRNA sense strand
guuaugaaacugagaaagu

SEQ ID NO: 357845 - RNA, 19 nt, Homo sapiens
  misc_RNA (1)...(19): siRNA sense strand
uguaucugaugaccaauug

SEQ ID NO: 357846 - RNA, 19 nt, Homo sapiens
  misc_RNA (1)...(19): siRNA sense strand
caacaugguaugcaauugg

SEQ ID NO: 357847 - RNA, 19 nt, Homo sapiens
  misc_RNA (1)...(19): siRNA sense strand
cugagcauauccugaaaga

SEQ ID NO: 357848 - RNA, 19 nt, Homo sapiens
  misc_RNA (1)...(19): siRNA sense strand
gcagaggaagcaaaugauc

SEQ ID NO: 357849 - RNA, 19 nt, Homo sapiens
  misc_RNA (1)...(19): siRNA sense strand
agcaaacucuggagaugaa

SEQ ID NO: 357850 - RNA, 19 nt, Homo sapiens
  misc_RNA (1)...(19): siRNA sense strand
gaaugaucgauuugagaaa

SEQ ID NO: 357851 - RNA, 19 nt, Homo sapiens
  misc_RNA (1)...(19): siRNA sense strand
ccugugaggucuccuacug

SEQ ID NO: 357852 - RNA, 19 nt, Homo sapiens
  misc_RNA (1)...(19): siRNA sense strand
gaaagcucucuaaagaaga

SEQ ID NO: 357853 - RNA, 19 nt, Homo sapiens
  misc_RNA (1)...(19): siRNA sense strand
ugaauccauugaacccauu

SEQ ID NO: 357854 - RNA, 19 nt, Homo sapiens
  misc_RNA (1)...(19): siRNA sense strand
gcuacaucuucaucguuaa

SEQ ID NO: 357855 - RNA, 19 nt, Homo sapiens
  misc_RNA (1)...(19): siRNA sense strand
gaauccauugaacccauua

SEQ ID NO: 357856 - RNA, 19 nt, Homo sapiens
  misc_RNA (1)...(19): siRNA sense strand
aauaugcugucuuucuaug

SEQ ID NO: 357857 - RNA, 19 nt, Homo sapiens
  misc_RNA (1)...(19): siRNA sense strand
acagccaacccuuuaaauu

SEQ ID NO: 357858 - RNA, 19 nt, Homo sapiens
  misc_RNA (1)...(19): siRNA sense strand
gacaaagguuaugaaacug

SEQ ID NO: 357859 - RNA, 19 nt, Homo sapiens
  misc_RNA (1)...(19): siRNA sense strand
uguccaacauuuacaaucu

SEQ ID NO: 357860 - RNA, 19 nt, Homo sapiens
  misc_RNA (1)...(19): siRNA sense strand
cagcucuggugaauccauu

SEQ ID NO: 357861 - RNA, 19 nt, Homo sapiens
  misc_RNA (1)...(19): siRNA sense strand
caagaauccccuuauguuu

SEQ ID NO: 357862 - RNA, 19 nt, Homo sapiens
  misc_RNA (1)...(19): siRNA sense strand
gggcagcaggaaauauauu

SEQ ID NO: 357863 - RNA, 19 nt, Homo sapiens
  misc_RNA (1)...(19): siRNA sense strand
gaugaaagcucucuaaaga

SEQ ID NO: 357864 - RNA, 19 nt, Homo sapiens
  misc_RNA (1)...(19): siRNA sense strand
ggaagaaugugacgaguug

SEQ ID NO: 357865 - RNA, 19 nt, Homo sapiens
  misc_RNA (1)...(19): siRNA sense strand
gaacaaaucccuaaugauc

SEQ ID NO: 357866 - RNA, 19 nt, Homo sapiens
  misc_RNA (1)...(19): siRNA sense strand
guagacagcuggaugauug

SEQ ID NO: 357867 - RNA, 19 nt, Homo sapiens
  misc_RNA (1)...(19): siRNA sense strand
caaaucagcuccaaagaau

SEQ ID NO: 357868 - RNA, 19 nt, Homo sapiens
  misc_RNA (1)...(19): siRNA sense strand
gagcauauccugaaagaaa

SEQ ID NO: 357869 - RNA, 19 nt, Homo sapiens
  misc_RNA (1)...(19): siRNA sense strand
ucaaauggccaaacuaaua

SEQ ID NO: 357870 - RNA, 19 nt, Homo sapiens
  misc_RNA (1)...(19): siRNA sense strand
gaugugaccuucauucuuc

SEQ ID NO: 357871 - RNA, 19 nt, Homo sapiens
  misc_RNA (1)...(19): siRNA sense strand
gaacauguacuguguaucu

SEQ ID NO: 357872 - RNA, 19 nt, Homo sapiens
  misc_RNA (1)...(19): siRNA sense strand
agacaaagguuaugaaacu

SEQ ID NO: 357873 - RNA, 19 nt, Homo sapiens
  misc_RNA (1)...(19): siRNA sense strand
acaacaauaugcugucuuu

SEQ ID NO: 357874 - RNA, 19 nt, Homo sapiens
  misc_RNA (1)...(19): siRNA sense strand
ugaaagcucucuaaagaag

SEQ ID NO: 357875 - RNA, 19 nt, Homo sapiens
  misc_RNA (1)...(19): siRNA sense strand
acaauaugcugucuuucua

SEQ ID NO: 357876 - RNA, 19 nt, Homo sapiens
  misc_RNA (1)...(19): siRNA sense strand
caaccaagcugagcauauc

SEQ ID NO: 357877 - RNA, 19 nt, Homo sapiens
  misc_RNA (1)...(19): siRNA sense strand
acaaacagccaacccuuua

SEQ ID NO: 357878 - RNA, 19 nt, Homo sapiens
  misc_RNA (1)...(19): siRNA sense strand
gcaaaugaucgcugucaaa

SEQ ID NO: 357879 - RNA, 19 nt, Homo sapiens
  misc_RNA (1)...(19): siRNA sense strand
gaucucggaugaugaguuc

SEQ ID NO: 357880 - RNA, 19 nt, Homo sapiens
  misc_RNA (1)...(19): siRNA sense strand
ggucauggguuccucaaca

SEQ ID NO: 357881 - RNA, 19 nt, Homo sapiens
  misc_RNA (1)...(19): siRNA sense strand
uggaacaaaucccuaauga

SEQ ID NO: 357882 - RNA, 19 nt, Homo sapiens
  misc_RNA (1)...(19): siRNA sense strand
gcaagaaugccuccucaug

SEQ ID NO: 357883 - RNA, 19 nt, Homo sapiens
  misc_RNA (1)...(19): siRNA sense strand
gagcuucaguacaccauau

SEQ ID NO: 357884 - RNA, 19 nt, Homo sapiens
  misc_RNA (1)...(19): siRNA sense strand
caacaguccucaucaacca

SEQ ID NO: 357885 - RNA, 19 nt, Homo sapiens
  misc_RNA (1)...(19): siRNA sense strand
caauugaucugugccuuau

SEQ ID NO: 357886 - RNA, 19 nt, Homo sapiens
  misc_RNA (1)...(19): siRNA sense strand
uugaagaucuccaaugaug

SEQ ID NO: 357887 - RNA, 19 nt, Homo sapiens
  misc_RNA (1)...(19): siRNA sense strand
gaucugugccuuaugcaaa

SEQ ID NO: 357888 - RNA, 19 nt, Homo sapiens
  misc_RNA (1)...(19): siRNA sense strand
cagccaacccuuuaaauug

SEQ ID NO: 357889 - RNA, 19 nt, Homo sapiens
  misc_RNA (1)...(19): siRNA sense strand
ggucaacaguccucaucaa

SEQ ID NO: 357890 - RNA, 19 nt, Homo sapiens
  misc_RNA (1)...(19): siRNA sense strand
caagcaaacucuggagaug

SEQ ID NO: 357891 - RNA, 19 nt, Homo sapiens
  misc_RNA (1)...(19): siRNA sense strand
gauugcagauggagaagga

SEQ ID NO: 357892 - RNA, 19 nt, Homo sapiens
  misc_RNA (1)...(19): siRNA sense strand
ucaccugccuggaccauga

SEQ ID NO: 357893 - RNA, 19 nt, Homo sapiens
  misc_RNA (1)...(19): siRNA sense strand
gcaggaaauauauucauug

SEQ ID NO: 357894 - RNA, 19 nt, Homo sapiens
  misc_RNA (1)...(19): siRNA sense strand
ucaaagagacaaagguuau

SEQ ID NO: 357895 - RNA, 19 nt, Homo sapiens
  misc_RNA (1)...(19): siRNA sense strand
gcaacugcaucuucucaag

SEQ ID NO: 357896 - RNA, 19 nt, Homo sapiens
  misc_RNA (1)...(19): siRNA sense strand
ggucuucucucgcugcaau

SEQ ID NO: 357897 - RNA, 19 nt, Homo sapiens
  misc_RNA (1)...(19): siRNA sense strand
ggaaugugacucugcagaa

SEQ ID NO: 357898 - RNA, 19 nt, Homo sapiens
  misc_RNA (1)...(19): siRNA sense strand
cgcuacaucuucaucguua

SEQ ID NO: 357899 - RNA, 19 nt, Homo sapiens
  misc_RNA (1)...(19): siRNA sense strand
gugaacauguacuguguau

SEQ ID NO: 357900 - RNA, 19 nt, Homo sapiens
  misc_RNA (1)...(19): siRNA sense strand
caaaaugacucacaagaag

SEQ ID NO: 357901 - RNA, 19 nt, Homo sapiens
  misc_RNA (1)...(19): siRNA sense strand
cagcagaggaagcaaauga

SEQ ID NO: 357902 - RNA, 19 nt, Homo sapiens
  misc_RNA (1)...(19): siRNA sense strand
ccaauugaucugugccuua

SEQ ID NO: 357903 - RNA, 19 nt, Homo sapiens
  misc_RNA (1)...(19): siRNA sense strand
gcucacagccucugcuuca

SEQ ID NO: 357904 - RNA, 19 nt, Homo sapiens
  misc_RNA (1)...(19): siRNA sense strand
cacaagaaguugaagaucu

SEQ ID NO: 357905 - RNA, 19 nt, Homo sapiens
  misc_RNA (1)...(19): siRNA sense strand
aaucaaauggccaaacuaa

SEQ ID NO: 357906 - RNA, 19 nt, Homo sapiens
  misc_RNA (1)...(19): siRNA sense strand
gccuagaguuguuugaaga

SEQ ID NO: 357907 - RNA, 19 nt, Homo sapiens
  misc_RNA (1)...(19): siRNA sense strand
gcgcaacagcgaacuagaa

SEQ ID NO: 357908 - RNA, 19 nt, Homo sapiens
  misc_RNA (1)...(19): siRNA sense strand
ccaguuuguccaacauuua

SEQ ID NO: 357909 - RNA, 19 nt, Homo sapiens
  misc_RNA (1)...(19): siRNA sense strand
aguugaagaucuccaauga

SEQ ID NO: 357910 - RNA, 19 nt, Homo sapiens
  misc_RNA (1)...(19): siRNA sense strand
acaaaucagcuccaaagaa

SEQ ID NO: 357911 - RNA, 19 nt, Homo sapiens
  misc_RNA (1)...(19): siRNA sense strand
gaccuucauucuuccaguu

SEQ ID NO: 357912 - RNA, 19 nt, Homo sapiens
  misc_RNA (1)...(19): siRNA sense strand
ugaauacugcuaugcauga

SEQ ID NO: 357913 - RNA, 19 nt, Homo sapiens
  misc_RNA (1)...(19): siRNA sense strand
ccuaugagcuucaguacac

SEQ ID NO: 357914 - RNA, 19 nt, Homo sapiens
  misc_RNA (1)...(19): siRNA sense strand
gccaagggaugcaguaaaa

SEQ ID NO: 357915 - RNA, 19 nt, Homo sapiens
  misc_RNA (1)...(19): siRNA sense strand
uggguguccuccuggauua

SEQ ID NO: 357916 - RNA, 19 nt, Homo sapiens
  misc_RNA (1)...(19): siRNA sense strand
aaucagcuccaaagaauga

SEQ ID NO: 357917 - RNA, 19 nt, Homo sapiens
  misc_RNA (1)...(19): siRNA sense strand
ggaugaaagcucucuaaag

SEQ ID NO: 357918 - RNA, 19 nt, Homo sapiens
  misc_RNA (1)...(19): siRNA sense strand
aaacagccaacccuuuaaa

SEQ ID NO: 357919 - RNA, 19 nt, Homo sapiens
  misc_RNA (1)...(19): siRNA sense strand
caaacagccaacccuuuaa

SEQ ID NO: 357920 - RNA, 19 nt, Homo sapiens
  misc_RNA (1)...(19): siRNA sense strand
ugaaugaucgauuugagaa

SEQ ID NO: 357921 - RNA, 19 nt, Homo sapiens
  misc_RNA (1)...(19): siRNA sense strand
augagaaagugaacaugua

SEQ ID NO: 357922 - RNA, 19 nt, Homo sapiens
  misc_RNA (1)...(19): siRNA sense strand
gggacucgcuacaucuuca

SEQ ID NO: 357923 - RNA, 19 nt, Homo sapiens
  misc_RNA (1)...(19): siRNA sense strand
ugaauggauuggcaagaau

SEQ ID NO: 357924 - RNA, 19 nt, Homo sapiens
  misc_RNA (1)...(19): siRNA sense strand
cuucaucguuaaagccaua

SEQ ID NO: 357925 - RNA, 19 nt, Homo sapiens
  misc_RNA (1)...(19): siRNA sense strand
gaaugugacucugcagaac

SEQ ID NO: 357926 - RNA, 19 nt, Homo sapiens
  misc_RNA (1)...(19): siRNA sense strand
caacugcaggccucaagaa

SEQ ID NO: 357927 - RNA, 19 nt, Homo sapiens
  misc_RNA (1)...(19): siRNA sense strand
caacauuuacaaucuggaa

SEQ ID NO: 357928 - RNA, 19 nt, Homo sapiens
  misc_RNA (1)...(19): siRNA sense strand
cuaacucucuccaucuuca

SEQ ID NO: 357929 - RNA, 19 nt, Homo sapiens
  misc_RNA (1)...(19): siRNA sense strand
ccaaagaaugaauggauug

SEQ ID NO: 357930 - RNA, 19 nt, Homo sapiens
  misc_RNA (1)...(19): siRNA sense strand
gccagcagguugaggugaa

SEQ ID NO: 357931 - RNA, 19 nt, Homo sapiens
  misc_RNA (1)...(19): siRNA sense strand
ccccagauuuuauugauua

SEQ ID NO: 357932 - RNA, 19 nt, Homo sapiens
  misc_RNA (1)...(19): siRNA sense strand
cagugaaccuacccgacua

SEQ ID NO: 357933 - RNA, 19 nt, Homo sapiens
  misc_RNA (1)...(19): siRNA sense strand
gaaagugaacauguacugu

SEQ ID NO: 357934 - RNA, 19 nt, Homo sapiens
  misc_RNA (1)...(19): siRNA sense strand
acacuggagucugaauuga

SEQ ID NO: 357935 - RNA, 19 nt, Homo sapiens
  misc_RNA (1)...(19): siRNA sense strand
cuacaaaucagcuccaaag

SEQ ID NO: 357936 - RNA, 19 nt, Homo sapiens
  misc_RNA (1)...(19): siRNA sense strand
caaucugccuagaguuguu

SEQ ID NO: 357937 - RNA, 19 nt, Homo sapiens
  misc_RNA (1)...(19): siRNA sense strand
caaauggccaaacuaauac

SEQ ID NO: 357938 - RNA, 19 nt, Homo sapiens
  misc_RNA (1)...(19): siRNA sense strand
ggugaauacugcuaugcau

SEQ ID NO: 357939 - RNA, 19 nt, Homo sapiens
  misc_RNA (1)...(19): siRNA sense strand
ggaacaaaucccuaaugau

SEQ ID NO: 357940 - RNA, 19 nt, Homo sapiens
  misc_RNA (1)...(19): siRNA sense strand
aggaaaugcugguggaugu

SEQ ID NO: 357941 - RNA, 19 nt, Homo sapiens
  misc_RNA (1)...(19): siRNA sense strand
gaauggauuggcaagaaug

SEQ ID NO: 357942 - RNA, 19 nt, Homo sapiens
  misc_RNA (1)...(19): siRNA sense strand
acaagaaguugaagaucuc

SEQ ID NO: 357943 - RNA, 19 nt, Homo sapiens
  misc_RNA (1)...(19): siRNA sense strand
gguauguuaucucgcugaa

SEQ ID NO: 357944 - RNA, 19 nt, Homo sapiens
  misc_RNA (1)...(19): siRNA sense strand
guuaugaaacugagaaagu

SEQ ID NO: 357945 - RNA, 19 nt, Homo sapiens
  misc_RNA (1)...(19): siRNA sense strand
uguaucugaugaccaauug

SEQ ID NO: 357946 - RNA, 19 nt, Homo sapiens
  misc_RNA (1)...(19): siRNA sense strand
caacaugguaugcaauugg

SEQ ID NO: 357947 - RNA, 19 nt, Homo sapiens
  misc_RNA (1)...(19): siRNA sense strand
cugagcauauccugaaaga

SEQ ID NO: 357948 - RNA, 19 nt, Homo sapiens
  misc_RNA (1)...(19): siRNA sense strand
gcagaggaagcaaaugauc

SEQ ID NO: 357949 - RNA, 19 nt, Homo sapiens
  misc_RNA (1)...(19): siRNA sense strand
agcaaacucuggagaugaa

SEQ ID NO: 357950 - RNA, 19 nt, Homo sapiens
  misc_RNA (1)...(19): siRNA sense strand
gaaugaucgauuugagaaa

SEQ ID NO: 357951 - RNA, 19 nt, Homo sapiens
  misc_RNA (1)...(19): siRNA sense strand
ccugugaggucuccuacug

SEQ ID NO: 357952 - RNA, 19 nt, Homo sapiens
  misc_RNA (1)...(19): siRNA sense strand
gaaagcucucuaaagaaga

SEQ ID NO: 357953 - RNA, 19 nt, Homo sapiens
  misc_RNA (1)...(19): siRNA sense strand
ugaauccauugaacccauu

SEQ ID NO: 357954 - RNA, 19 nt, Homo sapiens
  misc_RNA (1)...(19): siRNA sense strand
gcuacaucuucaucguuaa

SEQ ID NO: 357955 - RNA, 19 nt, Homo sapiens
  misc_RNA (1)...(19): siRNA sense strand
gaauccauugaacccauua

SEQ ID NO: 357956 - RNA, 19 nt, Homo sapiens
  misc_RNA (1)...(19): siRNA sense strand
aauaugcugucuuucuaug

SEQ ID NO: 357957 - RNA, 19 nt, Homo sapiens
  misc_RNA (1)...(19): siRNA sense strand
acagccaacccuuuaaauu

SEQ ID NO: 357958 - RNA, 19 nt, Homo sapiens
  misc_RNA (1)...(19): siRNA sense strand
gacaaagguuaugaaacug

SEQ ID NO: 357959 - RNA, 19 nt, Homo sapiens
  misc_RNA (1)...(19): siRNA sense strand
uguccaacauuuacaaucu

SEQ ID NO: 357960 - RNA, 19 nt, Homo sapiens
  misc_RNA (1)...(19): siRNA sense strand
cagcucuggugaauccauu

SEQ ID NO: 357961 - RNA, 19 nt, Homo sapiens
  misc_RNA (1)...(19): siRNA sense strand
caagaauccccuuauguuu

SEQ ID NO: 357962 - RNA, 19 nt, Homo sapiens
  misc_RNA (1)...(19): siRNA sense strand
gggcagcaggaaauauauu

SEQ ID NO: 357963 - RNA, 19 nt, Homo sapiens
  misc_RNA (1)...(19): siRNA sense strand
gagaagaaauggagaaagu

SEQ ID NO: 357964 - RNA, 19 nt, Homo sapiens
  misc_RNA (1)...(19): siRNA sense strand
gcaaagcauucuuccguuu

SEQ ID NO: 357965 - RNA, 19 nt, Homo sapiens
  misc_RNA (1)...(19): siRNA sense strand
agaagaagauucagaagaa

SEQ ID NO: 357966 - RNA, 19 nt, Homo sapiens
  misc_RNA (1)...(19): siRNA sense strand
gcugaagucuugugucauu

SEQ ID NO: 357967 - RNA, 19 nt, Homo sapiens
  misc_RNA (1)...(19): siRNA sense strand
gaagaagauucagaagaaa

SEQ ID NO: 357968 - RNA, 19 nt, Homo sapiens
  misc_RNA (1)...(19): siRNA sense strand
gagaaacgcuaucagucaa

SEQ ID NO: 357969 - RNA, 19 nt, Homo sapiens
  misc_RNA (1)...(19): siRNA sense strand
ccaagaaaccaaagaauga

SEQ ID NO: 357970 - RNA, 19 nt, Homo sapiens
  misc_RNA (1)...(19): siRNA sense strand
ccaacgggcugaagucuug

SEQ ID NO: 357971 - RNA, 19 nt, Homo sapiens
  misc_RNA (1)...(19): siRNA sense strand
gaagaaauggagaaaguau

SEQ ID NO: 357972 - RNA, 19 nt, Homo sapiens
  misc_RNA (1)...(19): siRNA sense strand
gaccgaaauuugcugcuaa

SEQ ID NO: 357973 - RNA, 19 nt, Homo sapiens
  misc_RNA (1)...(19): siRNA sense strand
ucauggagcugaacgagaa

SEQ ID NO: 357974 - RNA, 19 nt, Homo sapiens
  misc_RNA (1)...(19): siRNA sense strand
ggagaaacgcuaucaguca

SEQ ID NO: 357975 - RNA, 19 nt, Homo sapiens
  misc_RNA (1)...(19): siRNA sense strand
ggaccgaaauuugcugcua

SEQ ID NO: 357976 - RNA, 19 nt, Homo sapiens
  misc_RNA (1)...(19): siRNA sense strand
gaaaguauuagcuggagaa

SEQ ID NO: 357977 - RNA, 19 nt, Homo sapiens
  misc_RNA (1)...(19): siRNA sense strand
caaagcauucuuccguuua

SEQ ID NO: 357978 - RNA, 19 nt, Homo sapiens
  misc_RNA (1)...(19): siRNA sense strand
gggcugaagucuuguguca

SEQ ID NO: 357979 - RNA, 19 nt, Homo sapiens
  misc_RNA (1)...(19): siRNA sense strand
ggagguugauggcaauuca

SEQ ID NO: 357980 - RNA, 19 nt, Homo sapiens
  misc_RNA (1)...(19): siRNA sense strand
gaagacaaguacgaaauac

SEQ ID NO: 357981 - RNA, 19 nt, Homo sapiens
  misc_RNA (1)...(19): siRNA sense strand
gcaagaacccagucaugga

SEQ ID NO: 357982 - RNA, 19 nt, Homo sapiens
  misc_RNA (1)...(19): siRNA sense strand
ggacuacaccguucagauc

SEQ ID NO: 357983 - RNA, 19 nt, Homo sapiens
  misc_RNA (1)...(19): siRNA sense strand
ugacaaagcacggcaagaa

SEQ ID NO: 357984 - RNA, 19 nt, Homo sapiens
  misc_RNA (1)...(19): siRNA sense strand
cgaaguggauggacagaag

SEQ ID NO: 357985 - RNA, 19 nt, Homo sapiens
  misc_RNA (1)...(19): siRNA sense strand
gaaugccggugcuggguau

SEQ ID NO: 357986 - RNA, 19 nt, Homo sapiens
  misc_RNA (1)...(19): siRNA sense strand
caaccgcccuccuggacaa

SEQ ID NO: 357987 - RNA, 19 nt, Homo sapiens
  misc_RNA (1)...(19): siRNA sense strand
agaagacaaguacgaaaua

SEQ ID NO: 357988 - RNA, 19 nt, Homo sapiens
  misc_RNA (1)...(19): siRNA sense strand
uaacagaagacaaguacga

SEQ ID NO: 357989 - RNA, 19 nt, Homo sapiens
  misc_RNA (1)...(19): siRNA sense strand
gcauuuaugacccuuguga

SEQ ID NO: 357990 - RNA, 19 nt, Homo sapiens
  misc_RNA (1)...(19): siRNA sense strand
gaagaggcgugggcucaag

SEQ ID NO: 357991 - RNA, 19 nt, Homo sapiens
  misc_RNA (1)...(19): siRNA sense strand
agaagccacugaugcuauu

SEQ ID NO: 357992 - RNA, 19 nt, Homo sapiens
  misc_RNA (1)...(19): siRNA sense strand
gaagucuugugucauugug

SEQ ID NO: 357993 - RNA, 19 nt, Homo sapiens
  misc_RNA (1)...(19): siRNA sense strand
agaagaagaagauucagaa

SEQ ID NO: 357994 - RNA, 19 nt, Homo sapiens
  misc_RNA (1)...(19): siRNA sense strand
aaagcauucuuccguuuau

SEQ ID NO: 357995 - RNA, 19 nt, Homo sapiens
  misc_RNA (1)...(19): siRNA sense strand
cuuccaagaugcccaagaa

SEQ ID NO: 357996 - RNA, 19 nt, Homo sapiens
  misc_RNA (1)...(19): siRNA sense strand
caagaaaccaaagaaugaa

SEQ ID NO: 357997 - RNA, 19 nt, Homo sapiens
  misc_RNA (1)...(19): siRNA sense strand
guucagaucccaccaagca

SEQ ID NO: 357998 - RNA, 19 nt, Homo sapiens
  misc_RNA (1)...(19): siRNA sense strand
gagcuggugcugcugugua

SEQ ID NO: 357999 - RNA, 19 nt, Homo sapiens
  misc_RNA (1)...(19): siRNA sense strand
ggcgugggcucaaguacga

SEQ ID NO: 358000 - RNA, 19 nt, Homo sapiens
  misc_RNA (1)...(19): siRNA sense strand
caaaagagccuccauuguc

SEQ ID NO: 358001 - RNA, 19 nt, Homo sapiens
  misc_RNA (1)...(19): siRNA sense strand
cgacaagcgcuucgucaug

SEQ ID NO: 358002 - RNA, 19 nt, Homo sapiens
  misc_RNA (1)...(19): siRNA sense strand
aguauuagcuggagaaacg

SEQ ID NO: 358003 - RNA, 19 nt, Homo sapiens
  misc_RNA (1)...(19): siRNA sense strand
cagaagacaaguacgaaau

SEQ ID NO: 358004 - RNA, 19 nt, Homo sapiens
  misc_RNA (1)...(19): siRNA sense strand
gaagaagaagauucagaag

SEQ ID NO: 358005 - RNA, 19 nt, Homo sapiens
  misc_RNA (1)...(19): siRNA sense strand
gacagcaacgggaagauau

SEQ ID NO: 358006 - RNA, 19 nt, Homo sapiens
  misc_RNA (1)...(19): siRNA sense strand
ugucgacgaugcugcgauu

SEQ ID NO: 358007 - RNA, 19 nt, Homo sapiens
  misc_RNA (1)...(19): siRNA sense strand
gagcaggcagaguccgaua

SEQ ID NO: 358008 - RNA, 19 nt, Homo sapiens
  misc_RNA (1)...(19): siRNA sense strand
cgacgaugcugcgauugug

SEQ ID NO: 358009 - RNA, 19 nt, Homo sapiens
  misc_RNA (1)...(19): siRNA sense strand
ccaugucuguggagguuga

SEQ ID NO: 358010 - RNA, 19 nt, Homo sapiens
  misc_RNA (1)...(19): siRNA sense strand
acgaaauacugcaaucugu

SEQ ID NO: 358011 - RNA, 19 nt, Homo sapiens
  misc_RNA (1)...(19): siRNA sense strand
ccaccaagcaccaccuaug

SEQ ID NO: 358012 - RNA, 19 nt, Homo sapiens
  misc_RNA (1)...(19): siRNA sense strand
agacagcaacgggaagaua

SEQ ID NO: 358013 - RNA, 19 nt, Homo sapiens
  misc_RNA (1)...(19): siRNA sense strand
augcugcgauugugauaaa

SEQ ID NO: 358014 - RNA, 19 nt, Homo sapiens
  misc_RNA (1)...(19): siRNA sense strand
gcaacgggaagauaucaca

SEQ ID NO: 358015 - RNA, 19 nt, Homo sapiens
  misc_RNA (1)...(19): siRNA sense strand
uaccaugucuguggagguu

SEQ ID NO: 358016 - RNA, 19 nt, Homo sapiens
  misc_RNA (1)...(19): siRNA sense strand
gagcuccugugugagaaau

SEQ ID NO: 358017 - RNA, 19 nt, Homo sapiens
  misc_RNA (1)...(19): siRNA sense strand
aaugaugaccgccauguga

SEQ ID NO: 358018 - RNA, 19 nt, Homo sapiens
  misc_RNA (1)...(19): siRNA sense strand
aagaagaagauucagaaga

SEQ ID NO: 358019 - RNA, 19 nt, Homo sapiens
  misc_RNA (1)...(19): siRNA sense strand
gaaauggagaaaguauuag

SEQ ID NO: 358020 - RNA, 19 nt, Homo sapiens
  misc_RNA (1)...(19): siRNA sense strand
ggcagaguccgauaacaug

SEQ ID NO: 358021 - RNA, 19 nt, Homo sapiens
  misc_RNA (1)...(19): siRNA sense strand
cagaagacggagcacauga

SEQ ID NO: 358022 - RNA, 19 nt, Homo sapiens
  misc_RNA (1)...(19): siRNA sense strand
ccagcuccauaaaguccua

SEQ ID NO: 358023 - RNA, 19 nt, Homo sapiens
  misc_RNA (1)...(19): siRNA sense strand
agaugguucuggcauuuau

SEQ ID NO: 358024 - RNA, 19 nt, Homo sapiens
  misc_RNA (1)...(19): siRNA sense strand
guaaggagaagcccacaac

SEQ ID NO: 358025 - RNA, 19 nt, Homo sapiens
  misc_RNA (1)...(19): siRNA sense strand
cccaagaaaccaaagaaug

SEQ ID NO: 358026 - RNA, 19 nt, Homo sapiens
  misc_RNA (1)...(19): siRNA sense strand
ggcuaugaaugcccugaug

SEQ ID NO: 358027 - RNA, 19 nt, Homo sapiens
  misc_RNA (1)...(19): siRNA sense strand
agaagauucagaagaaaga

SEQ ID NO: 358028 - RNA, 19 nt, Homo sapiens
  misc_RNA (1)...(19): siRNA sense strand
agaagaaauggagaaagua

SEQ ID NO: 358029 - RNA, 19 nt, Homo sapiens
  misc_RNA (1)...(19): siRNA sense strand
gaaugaugaccgccaugug

SEQ ID NO: 358030 - RNA, 19 nt, Homo sapiens
  misc_RNA (1)...(19): siRNA sense strand
uggacaagguggccgacaa

SEQ ID NO: 358031 - RNA, 19 nt, Homo sapiens
  misc_RNA (1)...(19): siRNA sense strand
ggccuacgcugcucuugcu

SEQ ID NO: 358032 - RNA, 19 nt, Homo sapiens
  misc_RNA (1)...(19): siRNA sense strand
ggccgauccugacaaagca

SEQ ID NO: 358033 - RNA, 19 nt, Homo sapiens
  misc_RNA (1)...(19): siRNA sense strand
ucagagaagaaauggagaa

SEQ ID NO: 358034 - RNA, 19 nt, Homo sapiens
  misc_RNA (1)...(19): siRNA sense strand
aaagaagccacugaugcua

SEQ ID NO: 358035 - RNA, 19 nt, Homo sapiens
  misc_RNA (1)...(19): siRNA sense strand
gcaucuagacagacagcaa

SEQ ID NO: 358036 - RNA, 19 nt, Homo sapiens
  misc_RNA (1)...(19): siRNA sense strand
cagagaagaaauggagaaa

SEQ ID NO: 358037 - RNA, 19 nt, Homo sapiens
  misc_RNA (1)...(19): siRNA sense strand
ucggccagcuccauaaagu

SEQ ID NO: 358038 - RNA, 19 nt, Homo sapiens
  misc_RNA (1)...(19): siRNA sense strand
ggacaagguggccgacaac

SEQ ID NO: 358039 - RNA, 19 nt, Homo sapiens
  misc_RNA (1)...(19): siRNA sense strand
agaggacgacaguaaagaa

SEQ ID NO: 358040 - RNA, 19 nt, Homo sapiens
  misc_RNA (1)...(19): siRNA sense strand
gaaguggauggacagaagu

SEQ ID NO: 358041 - RNA, 19 nt, Homo sapiens
  misc_RNA (1)...(19): siRNA sense strand
gugcggccuuucccucaga

SEQ ID NO: 358042 - RNA, 19 nt, Homo sapiens
  misc_RNA (1)...(19): siRNA sense strand
uauugggcaucuagacaga

SEQ ID NO: 358043 - RNA, 19 nt, Homo sapiens
  misc_RNA (1)...(19): siRNA sense strand
gcuauugggcaucuagaca

SEQ ID NO: 358044 - RNA, 19 nt, Homo sapiens
  misc_RNA (1)...(19): siRNA sense strand
caugugauggcaaagcauu

SEQ ID NO: 358045 - RNA, 19 nt, Homo sapiens
  misc_RNA (1)...(19): siRNA sense strand
gaggacgacaguaaagaag

SEQ ID NO: 358046 - RNA, 19 nt, Homo sapiens
  misc_RNA (1)...(19): siRNA sense strand
ggaggcaguccagaacaug

SEQ ID NO: 358047 - RNA, 19 nt, Homo sapiens
  misc_RNA (1)...(19): siRNA sense strand
acagaagacaaguacgaaa

SEQ ID NO: 358048 - RNA, 19 nt, Homo sapiens
  misc_RNA (1)...(19): siRNA sense strand
ccagaggacgacaguaaag

SEQ ID NO: 358049 - RNA, 19 nt, Homo sapiens
  misc_RNA (1)...(19): siRNA sense strand
aagaagaagaagauucaga

SEQ ID NO: 358050 - RNA, 19 nt, Homo sapiens
  misc_RNA (1)...(19): siRNA sense strand
aagcaccaccuaugccauu

SEQ ID NO: 358051 - RNA, 19 nt, Homo sapiens
  misc_RNA (1)...(19): siRNA sense strand
aagaagccacugaugcuau

SEQ ID NO: 358052 - RNA, 19 nt, Homo sapiens
  misc_RNA (1)...(19): siRNA sense strand
gaaggccuacgcugcucuu

SEQ ID NO: 358053 - RNA, 19 nt, Homo sapiens
  misc_RNA (1)...(19): siRNA sense strand
cgucauggaggucgaagug

SEQ ID NO: 358054 - RNA, 19 nt, Homo sapiens
  misc_RNA (1)...(19): siRNA sense strand
gcccaagaaaccaaagaau

SEQ ID NO: 358055 - RNA, 19 nt, Homo sapiens
  misc_RNA (1)...(19): siRNA sense strand
gcaggcagaguccgauaac

SEQ ID NO: 358056 - RNA, 19 nt, Homo sapiens
  misc_RNA (1)...(19): siRNA sense strand
gcucuugcugcccuagaaa

SEQ ID NO: 358057 - RNA, 19 nt, Homo sapiens
  misc_RNA (1)...(19): siRNA sense strand
cggcaagaacccagucaug

SEQ ID NO: 358058 - RNA, 19 nt, Homo sapiens
  misc_RNA (1)...(19): siRNA sense strand
cagaggacgacaguaaaga

SEQ ID NO: 358059 - RNA, 19 nt, Homo sapiens
  misc_RNA (1)...(19): siRNA sense strand
cucucgagcuccuguguga

SEQ ID NO: 358060 - RNA, 19 nt, Homo sapiens
  misc_RNA (1)...(19): siRNA sense strand
uggcauuuaugacccuugu

SEQ ID NO: 358061 - RNA, 19 nt, Homo sapiens
  misc_RNA (1)...(19): siRNA sense strand
gacaaagcacggcaagaac

SEQ ID NO: 358062 - RNA, 19 nt, Homo sapiens
  misc_RNA (1)...(19): siRNA sense strand
gacgaugcugcgauuguga

SEQ ID NO: 358063 - RNA, 19 nt, Homo sapiens
  misc_RNA (1)...(19): siRNA sense strand
gagaagaaauggagaaagu

SEQ ID NO: 358064 - RNA, 19 nt, Homo sapiens
  misc_RNA (1)...(19): siRNA sense strand
gcaaagcauucuuccguuu

SEQ ID NO: 358065 - RNA, 19 nt, Homo sapiens
  misc_RNA (1)...(19): siRNA sense strand
agaagaagauucagaagaa

SEQ ID NO: 358066 - RNA, 19 nt, Homo sapiens
  misc_RNA (1)...(19): siRNA sense strand
gcugaagucuugugucauu

SEQ ID NO: 358067 - RNA, 19 nt, Homo sapiens
  misc_RNA (1)...(19): siRNA sense strand
gaagaagauucagaagaaa

SEQ ID NO: 358068 - RNA, 19 nt, Homo sapiens
  misc_RNA (1)...(19): siRNA sense strand
gagaaacgcuaucagucaa

SEQ ID NO: 358069 - RNA, 19 nt, Homo sapiens
  misc_RNA (1)...(19): siRNA sense strand
ccaagaaaccaaagaauga

SEQ ID NO: 358070 - RNA, 19 nt, Homo sapiens
  misc_RNA (1)...(19): siRNA sense strand
ccaacgggcugaagucuug

SEQ ID NO: 358071 - RNA, 19 nt, Homo sapiens
  misc_RNA (1)...(19): siRNA sense strand
gaagaaauggagaaaguau

SEQ ID NO: 358072 - RNA, 19 nt, Homo sapiens
  misc_RNA (1)...(19): siRNA sense strand
gaccgaaauuugcugcuaa

SEQ ID NO: 358073 - RNA, 19 nt, Homo sapiens
  misc_RNA (1)...(19): siRNA sense strand
ucauggagcugaacgagaa

SEQ ID NO: 358074 - RNA, 19 nt, Homo sapiens
  misc_RNA (1)...(19): siRNA sense strand
ggagaaacgcuaucaguca

SEQ ID NO: 358075 - RNA, 19 nt, Homo sapiens
  misc_RNA (1)...(19): siRNA sense strand
ggaccgaaauuugcugcua

SEQ ID NO: 358076 - RNA, 19 nt, Homo sapiens
  misc_RNA (1)...(19): siRNA sense strand
gaaaguauuagcuggagaa

SEQ ID NO: 358077 - RNA, 19 nt, Homo sapiens
  misc_RNA (1)...(19): siRNA sense strand
caaagcauucuuccguuua

SEQ ID NO: 358078 - RNA, 19 nt, Homo sapiens
  misc_RNA (1)...(19): siRNA sense strand
gggcugaagucuuguguca

SEQ ID NO: 358079 - RNA, 19 nt, Homo sapiens
  misc_RNA (1)...(19): siRNA sense strand
ggagguugauggcaauuca

SEQ ID NO: 358080 - RNA, 19 nt, Homo sapiens
  misc_RNA (1)...(19): siRNA sense strand
gaagacaaguacgaaauac

SEQ ID NO: 358081 - RNA, 19 nt, Homo sapiens
  misc_RNA (1)...(19): siRNA sense strand
gcaagaacccagucaugga

SEQ ID NO: 358082 - RNA, 19 nt, Homo sapiens
  misc_RNA (1)...(19): siRNA sense strand
ggacuacaccguucagauc

SEQ ID NO: 358083 - RNA, 19 nt, Homo sapiens
  misc_RNA (1)...(19): siRNA sense strand
ugacaaagcacggcaagaa

SEQ ID NO: 358084 - RNA, 19 nt, Homo sapiens
  misc_RNA (1)...(19): siRNA sense strand
cgaaguggauggacagaag

SEQ ID NO: 358085 - RNA, 19 nt, Homo sapiens
  misc_RNA (1)...(19): siRNA sense strand
gaaugccggugcuggguau

SEQ ID NO: 358086 - RNA, 19 nt, Homo sapiens
  misc_RNA (1)...(19): siRNA sense strand
caaccgcccuccuggacaa

SEQ ID NO: 358087 - RNA, 19 nt, Homo sapiens
  misc_RNA (1)...(19): siRNA sense strand
agaagacaaguacgaaaua

SEQ ID NO: 358088 - RNA, 19 nt, Homo sapiens
  misc_RNA (1)...(19): siRNA sense strand
uaacagaagacaaguacga

SEQ ID NO: 358089 - RNA, 19 nt, Homo sapiens
  misc_RNA (1)...(19): siRNA sense strand
gcauuuaugacccuuguga

SEQ ID NO: 358090 - RNA, 19 nt, Homo sapiens
  misc_RNA (1)...(19): siRNA sense strand
gaagaggcgugggcucaag

SEQ ID NO: 358091 - RNA, 19 nt, Homo sapiens
  misc_RNA (1)...(19): siRNA sense strand
agaagccacugaugcuauu

SEQ ID NO: 358092 - RNA, 19 nt, Homo sapiens
  misc_RNA (1)...(19): siRNA sense strand
gaagucuugugucauugug

SEQ ID NO: 358093 - RNA, 19 nt, Homo sapiens
  misc_RNA (1)...(19): siRNA sense strand
agaagaagaagauucagaa

SEQ ID NO: 358094 - RNA, 19 nt, Homo sapiens
  misc_RNA (1)...(19): siRNA sense strand
aaagcauucuuccguuuau

SEQ ID NO: 358095 - RNA, 19 nt, Homo sapiens
  misc_RNA (1)...(19): siRNA sense strand
cuuccaagaugcccaagaa

SEQ ID NO: 358096 - RNA, 19 nt, Homo sapiens
  misc_RNA (1)...(19): siRNA sense strand
caagaaaccaaagaaugaa

SEQ ID NO: 358097 - RNA, 19 nt, Homo sapiens
  misc_RNA (1)...(19): siRNA sense strand
guucagaucccaccaagca

SEQ ID NO: 358098 - RNA, 19 nt, Homo sapiens
  misc_RNA (1)...(19): siRNA sense strand
gagcuggugcugcugugua

SEQ ID NO: 358099 - RNA, 19 nt, Homo sapiens
  misc_RNA (1)...(19): siRNA sense strand
ggcgugggcucaaguacga

SEQ ID NO: 358100 - RNA, 19 nt, Homo sapiens
  misc_RNA (1)...(19): siRNA sense strand
caaaagagccuccauuguc

SEQ ID NO: 358101 - RNA, 19 nt, Homo sapiens
  misc_RNA (1)...(19): siRNA sense strand
cgacaagcgcuucgucaug

SEQ ID NO: 358102 - RNA, 19 nt, Homo sapiens
  misc_RNA (1)...(19): siRNA sense strand
aguauuagcuggagaaacg

SEQ ID NO: 358103 - RNA, 19 nt, Homo sapiens
  misc_RNA (1)...(19): siRNA sense strand
cagaagacaaguacgaaau

SEQ ID NO: 358104 - RNA, 19 nt, Homo sapiens
  misc_RNA (1)...(19): siRNA sense strand
gaagaagaagauucagaag

SEQ ID NO: 358105 - RNA, 19 nt, Homo sapiens
  misc_RNA (1)...(19): siRNA sense strand
gacagcaacgggaagauau

SEQ ID NO: 358106 - RNA, 19 nt, Homo sapiens
  misc_RNA (1)...(19): siRNA sense strand
ugucgacgaugcugcgauu

SEQ ID NO: 358107 - RNA, 19 nt, Homo sapiens
  misc_RNA (1)...(19): siRNA sense strand
gagcaggcagaguccgaua

SEQ ID NO: 358108 - RNA, 19 nt, Homo sapiens
  misc_RNA (1)...(19): siRNA sense strand
cgacgaugcugcgauugug

SEQ ID NO: 358109 - RNA, 19 nt, Homo sapiens
  misc_RNA (1)...(19): siRNA sense strand
ccaugucuguggagguuga

SEQ ID NO: 358110 - RNA, 19 nt, Homo sapiens
  misc_RNA (1)...(19): siRNA sense strand
acgaaauacugcaaucugu

SEQ ID NO: 358111 - RNA, 19 nt, Homo sapiens
  misc_RNA (1)...(19): siRNA sense strand
ccaccaagcaccaccuaug

SEQ ID NO: 358112 - RNA, 19 nt, Homo sapiens
  misc_RNA (1)...(19): siRNA sense strand
agacagcaacgggaagaua

SEQ ID NO: 358113 - RNA, 19 nt, Homo sapiens
  misc_RNA (1)...(19): siRNA sense strand
augcugcgauugugauaaa

SEQ ID NO: 358114 - RNA, 19 nt, Homo sapiens
  misc_RNA (1)...(19): siRNA sense strand
gcaacgggaagauaucaca

SEQ ID NO: 358115 - RNA, 19 nt, Homo sapiens
  misc_RNA (1)...(19): siRNA sense strand
uaccaugucuguggagguu

SEQ ID NO: 358116 - RNA, 19 nt, Homo sapiens
  misc_RNA (1)...(19): siRNA sense strand
gagcuccugugugagaaau

SEQ ID NO: 358117 - RNA, 19 nt, Homo sapiens
  misc_RNA (1)...(19): siRNA sense strand
aaugaugaccgccauguga

SEQ ID NO: 358118 - RNA, 19 nt, Homo sapiens
  misc_RNA (1)...(19): siRNA sense strand
aagaagaagauucagaaga

SEQ ID NO: 358119 - RNA, 19 nt, Homo sapiens
  misc_RNA (1)...(19): siRNA sense strand
gaaauggagaaaguauuag

SEQ ID NO: 358120 - RNA, 19 nt, Homo sapiens
  misc_RNA (1)...(19): siRNA sense strand
ggcagaguccgauaacaug

SEQ ID NO: 358121 - RNA, 19 nt, Homo sapiens
  misc_RNA (1)...(19): siRNA sense strand
cagaagacggagcacauga

SEQ ID NO: 358122 - RNA, 19 nt, Homo sapiens
  misc_RNA (1)...(19): siRNA sense strand
ccagcuccauaaaguccua

SEQ ID NO: 358123 - RNA, 19 nt, Homo sapiens
  misc_RNA (1)...(19): siRNA sense strand
agaugguucuggcauuuau

SEQ ID NO: 358124 - RNA, 19 nt, Homo sapiens
  misc_RNA (1)...(19): siRNA sense strand
guaaggagaagcccacaac

SEQ ID NO: 358125 - RNA, 19 nt, Homo sapiens
  misc_RNA (1)...(19): siRNA sense strand
cccaagaaaccaaagaaug

SEQ ID NO: 358126 - RNA, 19 nt, Homo sapiens
  misc_RNA (1)...(19): siRNA sense strand
ggcuaugaaugcccugaug

SEQ ID NO: 358127 - RNA, 19 nt, Homo sapiens
  misc_RNA (1)...(19): siRNA sense strand
agaagauucagaagaaaga

SEQ ID NO: 358128 - RNA, 19 nt, Homo sapiens
  misc_RNA (1)...(19): siRNA sense strand
agaagaaauggagaaagua

SEQ ID NO: 358129 - RNA, 19 nt, Homo sapiens
  misc_RNA (1)...(19): siRNA sense strand
gaaugaugaccgccaugug

SEQ ID NO: 358130 - RNA, 19 nt, Homo sapiens
  misc_RNA (1)...(19): siRNA sense strand
uggacaagguggccgacaa

SEQ ID NO: 358131 - RNA, 19 nt, Homo sapiens
  misc_RNA (1)...(19): siRNA sense strand
ggccuacgcugcucuugcu

SEQ ID NO: 358132 - RNA, 19 nt, Homo sapiens
  misc_RNA (1)...(19): siRNA sense strand
ggccgauccugacaaagca

SEQ ID NO: 358133 - RNA, 19 nt, Homo sapiens
  misc_RNA (1)...(19): siRNA sense strand
ucagagaagaaauggagaa

SEQ ID NO: 358134 - RNA, 19 nt, Homo sapiens
  misc_RNA (1)...(19): siRNA sense strand
aaagaagccacugaugcua

SEQ ID NO: 358135 - RNA, 19 nt, Homo sapiens
  misc_RNA (1)...(19): siRNA sense strand
gcaucuagacagacagcaa

SEQ ID NO: 358136 - RNA, 19 nt, Homo sapiens
  misc_RNA (1)...(19): siRNA sense strand
cagagaagaaauggagaaa

SEQ ID NO: 358137 - RNA, 19 nt, Homo sapiens
  misc_RNA (1)...(19): siRNA sense strand
ucggccagcuccauaaagu

SEQ ID NO: 358138 - RNA, 19 nt, Homo sapiens
  misc_RNA (1)...(19): siRNA sense strand
ggacaagguggccgacaac

SEQ ID NO: 358139 - RNA, 19 nt, Homo sapiens
  misc_RNA (1)...(19): siRNA sense strand
agaggacgacaguaaagaa

SEQ ID NO: 358140 - RNA, 19 nt, Homo sapiens
  misc_RNA (1)...(19): siRNA sense strand
gaaguggauggacagaagu

SEQ ID NO: 358141 - RNA, 19 nt, Homo sapiens
  misc_RNA (1)...(19): siRNA sense strand
gugcggccuuucccucaga

SEQ ID NO: 358142 - RNA, 19 nt, Homo sapiens
  misc_RNA (1)...(19): siRNA sense strand
uauugggcaucuagacaga

SEQ ID NO: 358143 - RNA, 19 nt, Homo sapiens
  misc_RNA (1)...(19): siRNA sense strand
gcuauugggcaucuagaca

SEQ ID NO: 358144 - RNA, 19 nt, Homo sapiens
  misc_RNA (1)...(19): siRNA sense strand
caugugauggcaaagcauu

SEQ ID NO: 358145 - RNA, 19 nt, Homo sapiens
  misc_RNA (1)...(19): siRNA sense strand
gaggacgacaguaaagaag

SEQ ID NO: 358146 - RNA, 19 nt, Homo sapiens
  misc_RNA (1)...(19): siRNA sense strand
ggaggcaguccagaacaug

SEQ ID NO: 358147 - RNA, 19 nt, Homo sapiens
  misc_RNA (1)...(19): siRNA sense strand
acagaagacaaguacgaaa

SEQ ID NO: 358148 - RNA, 19 nt, Homo sapiens
  misc_RNA (1)...(19): siRNA sense strand
ccagaggacgacaguaaag

SEQ ID NO: 358149 - RNA, 19 nt, Homo sapiens
  misc_RNA (1)...(19): siRNA sense strand
aagaagaagaagauucaga

SEQ ID NO: 358150 - RNA, 19 nt, Homo sapiens
  misc_RNA (1)...(19): siRNA sense strand
aagcaccaccuaugccauu

SEQ ID NO: 358151 - RNA, 19 nt, Homo sapiens
  misc_RNA (1)...(19): siRNA sense strand
aagaagccacugaugcuau

SEQ ID NO: 358152 - RNA, 19 nt, Homo sapiens
  misc_RNA (1)...(19): siRNA sense strand
gaaggccuacgcugcucuu

SEQ ID NO: 358153 - RNA, 19 nt, Homo sapiens
  misc_RNA (1)...(19): siRNA sense strand
cgucauggaggucgaagug

SEQ ID NO: 358154 - RNA, 19 nt, Homo sapiens
  misc_RNA (1)...(19): siRNA sense strand
gcccaagaaaccaaagaau

SEQ ID NO: 358155 - RNA, 19 nt, Homo sapiens
  misc_RNA (1)...(19): siRNA sense strand
gcaggcagaguccgauaac

SEQ ID NO: 358156 - RNA, 19 nt, Homo sapiens
  misc_RNA (1)...(19): siRNA sense strand
gcucuugcugcccuagaaa

SEQ ID NO: 358157 - RNA, 19 nt, Homo sapiens
  misc_RNA (1)...(19): siRNA sense strand
cggcaagaacccagucaug

SEQ ID NO: 358158 - RNA, 19 nt, Homo sapiens
  misc_RNA (1)...(19): siRNA sense strand
cagaggacgacaguaaaga

SEQ ID NO: 358159 - RNA, 19 nt, Homo sapiens
  misc_RNA (1)...(19): siRNA sense strand
cucucgagcuccuguguga

SEQ ID NO: 358160 - RNA, 19 nt, Homo sapiens
  misc_RNA (1)...(19): siRNA sense strand
uggcauuuaugacccuugu

SEQ ID NO: 358161 - RNA, 19 nt, Homo sapiens
  misc_RNA (1)...(19): siRNA sense strand
gacaaagcacggcaagaac

SEQ ID NO: 358162 - RNA, 19 nt, Homo sapiens
  misc_RNA (1)...(19): siRNA sense strand
gacgaugcugcgauuguga

SEQ ID NO: 358163 - RNA, 19 nt, Homo sapiens
  misc_RNA (1)...(19): siRNA sense strand
gagaagaaauggagaaagu

SEQ ID NO: 358164 - RNA, 19 nt, Homo sapiens
  misc_RNA (1)...(19): siRNA sense strand
gcaaagcauucuuccguuu

SEQ ID NO: 358165 - RNA, 19 nt, Homo sapiens
  misc_RNA (1)...(19): siRNA sense strand
agaagaagauucagaagaa

SEQ ID NO: 358166 - RNA, 19 nt, Homo sapiens
  misc_RNA (1)...(19): siRNA sense strand
gcugaagucuugugucauu

SEQ ID NO: 358167 - RNA, 19 nt, Homo sapiens
  misc_RNA (1)...(19): siRNA sense strand
gaagaagauucagaagaaa

SEQ ID NO: 358168 - RNA, 19 nt, Homo sapiens
  misc_RNA (1)...(19): siRNA sense strand
gagaaacgcuaucagucaa

SEQ ID NO: 358169 - RNA, 19 nt, Homo sapiens
  misc_RNA (1)...(19): siRNA sense strand
ccaagaaaccaaagaauga

SEQ ID NO: 358170 - RNA, 19 nt, Homo sapiens
  misc_RNA (1)...(19): siRNA sense strand
ccaacgggcugaagucuug

SEQ ID NO: 358171 - RNA, 19 nt, Homo sapiens
  misc_RNA (1)...(19): siRNA sense strand
gaagaaauggagaaaguau

SEQ ID NO: 358172 - RNA, 19 nt, Homo sapiens
  misc_RNA (1)...(19): siRNA sense strand
gaccgaaauuugcugcuaa

SEQ ID NO: 358173 - RNA, 19 nt, Homo sapiens
  misc_RNA (1)...(19): siRNA sense strand
ucauggagcugaacgagaa

SEQ ID NO: 358174 - RNA, 19 nt, Homo sapiens
  misc_RNA (1)...(19): siRNA sense strand
ggagaaacgcuaucaguca

SEQ ID NO: 358175 - RNA, 19 nt, Homo sapiens
  misc_RNA (1)...(19): siRNA sense strand
ggaccgaaauuugcugcua

SEQ ID NO: 358176 - RNA, 19 nt, Homo sapiens
  misc_RNA (1)...(19): siRNA sense strand
gaaaguauuagcuggagaa

SEQ ID NO: 358177 - RNA, 19 nt, Homo sapiens
  misc_RNA (1)...(19): siRNA sense strand
caaagcauucuuccguuua

SEQ ID NO: 358178 - RNA, 19 nt, Homo sapiens
  misc_RNA (1)...(19): siRNA sense strand
gggcugaagucuuguguca

SEQ ID NO: 358179 - RNA, 19 nt, Homo sapiens
  misc_RNA (1)...(19): siRNA sense strand
ggagguugauggcaauuca

SEQ ID NO: 358180 - RNA, 19 nt, Homo sapiens
  misc_RNA (1)...(19): siRNA sense strand
gaagacaaguacgaaauac

SEQ ID NO: 358181 - RNA, 19 nt, Homo sapiens
  misc_RNA (1)...(19): siRNA sense strand
gcaagaacccagucaugga

SEQ ID NO: 358182 - RNA, 19 nt, Homo sapiens
  misc_RNA (1)...(19): siRNA sense strand
ggacuacaccguucagauc

SEQ ID NO: 358183 - RNA, 19 nt, Homo sapiens
  misc_RNA (1)...(19): siRNA sense strand
ugacaaagcacggcaagaa

SEQ ID NO: 358184 - RNA, 19 nt, Homo sapiens
  misc_RNA (1)...(19): siRNA sense strand
cgaaguggauggacagaag

SEQ ID NO: 358185 - RNA, 19 nt, Homo sapiens
  misc_RNA (1)...(19): siRNA sense strand
gaaugccggugcuggguau

SEQ ID NO: 358186 - RNA, 19 nt, Homo sapiens
  misc_RNA (1)...(19): siRNA sense strand
caaccgcccuccuggacaa

SEQ ID NO: 358187 - RNA, 19 nt, Homo sapiens
  misc_RNA (1)...(19): siRNA sense strand
agaagacaaguacgaaaua

SEQ ID NO: 358188 - RNA, 19 nt, Homo sapiens
  misc_RNA (1)...(19): siRNA sense strand
uaacagaagacaaguacga

SEQ ID NO: 358189 - RNA, 19 nt, Homo sapiens
  misc_RNA (1)...(19): siRNA sense strand
gcauuuaugacccuuguga

SEQ ID NO: 358190 - RNA, 19 nt, Homo sapiens
  misc_RNA (1)...(19): siRNA sense strand
gaagaggcgugggcucaag

SEQ ID NO: 358191 - RNA, 19 nt, Homo sapiens
  misc_RNA (1)...(19): siRNA sense strand
agaagccacugaugcuauu

SEQ ID NO: 358192 - RNA, 19 nt, Homo sapiens
  misc_RNA (1)...(19): siRNA sense strand
gaagucuugugucauugug

SEQ ID NO: 358193 - RNA, 19 nt, Homo sapiens
  misc_RNA (1)...(19): siRNA sense strand
agaagaagaagauucagaa

SEQ ID NO: 358194 - RNA, 19 nt, Homo sapiens
  misc_RNA (1)...(19): siRNA sense strand
aaagcauucuuccguuuau

SEQ ID NO: 358195 - RNA, 19 nt, Homo sapiens
  misc_RNA (1)...(19): siRNA sense strand
cuuccaagaugcccaagaa

SEQ ID NO: 358196 - RNA, 19 nt, Homo sapiens
  misc_RNA (1)...(19): siRNA sense strand
caagaaaccaaagaaugaa

SEQ ID NO: 358197 - RNA, 19 nt, Homo sapiens
  misc_RNA (1)...(19): siRNA sense strand
guucagaucccaccaagca

SEQ ID NO: 358198 - RNA, 19 nt, Homo sapiens
  misc_RNA (1)...(19): siRNA sense strand
gagcuggugcugcugugua

SEQ ID NO: 358199 - RNA, 19 nt, Homo sapiens
  misc_RNA (1)...(19): siRNA sense strand
ggcgugggcucaaguacga

SEQ ID NO: 358200 - RNA, 19 nt, Homo sapiens
  misc_RNA (1)...(19): siRNA sense strand
caaaagagccuccauuguc

SEQ ID NO: 358201 - RNA, 19 nt, Homo sapiens
  misc_RNA (1)...(19): siRNA sense strand
cgacaagcgcuucgucaug

SEQ ID NO: 358202 - RNA, 19 nt, Homo sapiens
  misc_RNA (1)...(19): siRNA sense strand
aguauuagcuggagaaacg

SEQ ID NO: 358203 - RNA, 19 nt, Homo sapiens
  misc_RNA (1)...(19): siRNA sense strand
cagaagacaaguacgaaau

SEQ ID NO: 358204 - RNA, 19 nt, Homo sapiens
  misc_RNA (1)...(19): siRNA sense strand
gaagaagaagauucagaag

SEQ ID NO: 358205 - RNA, 19 nt, Homo sapiens
  misc_RNA (1)...(19): siRNA sense strand
gacagcaacgggaagauau

SEQ ID NO: 358206 - RNA, 19 nt, Homo sapiens
  misc_RNA (1)...(19): siRNA sense strand
ugucgacgaugcugcgauu

SEQ ID NO: 358207 - RNA, 19 nt, Homo sapiens
  misc_RNA (1)...(19): siRNA sense strand
gagcaggcagaguccgaua

SEQ ID NO: 358208 - RNA, 19 nt, Homo sapiens
  misc_RNA (1)...(19): siRNA sense strand
cgacgaugcugcgauugug

SEQ ID NO: 358209 - RNA, 19 nt, Homo sapiens
  misc_RNA (1)...(19): siRNA sense strand
ccaugucuguggagguuga

SEQ ID NO: 358210 - RNA, 19 nt, Homo sapiens
  misc_RNA (1)...(19): siRNA sense strand
acgaaauacugcaaucugu

SEQ ID NO: 358211 - RNA, 19 nt, Homo sapiens
  misc_RNA (1)...(19): siRNA sense strand
ccaccaagcaccaccuaug

SEQ ID NO: 358212 - RNA, 19 nt, Homo sapiens
  misc_RNA (1)...(19): siRNA sense strand
agacagcaacgggaagaua

SEQ ID NO: 358213 - RNA, 19 nt, Homo sapiens
  misc_RNA (1)...(19): siRNA sense strand
augcugcgauugugauaaa

SEQ ID NO: 358214 - RNA, 19 nt, Homo sapiens
  misc_RNA (1)...(19): siRNA sense strand
gcaacgggaagauaucaca

SEQ ID NO: 358215 - RNA, 19 nt, Homo sapiens
  misc_RNA (1)...(19): siRNA sense strand
uaccaugucuguggagguu

SEQ ID NO: 358216 - RNA, 19 nt, Homo sapiens
  misc_RNA (1)...(19): siRNA sense strand
gagcuccugugugagaaau

SEQ ID NO: 358217 - RNA, 19 nt, Homo sapiens
  misc_RNA (1)...(19): siRNA sense strand
aaugaugaccgccauguga

SEQ ID NO: 358218 - RNA, 19 nt, Homo sapiens
  misc_RNA (1)...(19): siRNA sense strand
aagaagaagauucagaaga

SEQ ID NO: 358219 - RNA, 19 nt, Homo sapiens
  misc_RNA (1)...(19): siRNA sense strand
gaaauggagaaaguauuag

SEQ ID NO: 358220 - RNA, 19 nt, Homo sapiens
  misc_RNA (1)...(19): siRNA sense strand
ggcagaguccgauaacaug

SEQ ID NO: 358221 - RNA, 19 nt, Homo sapiens
  misc_RNA (1)...(19): siRNA sense strand
cagaagacggagcacauga

SEQ ID NO: 358222 - RNA, 19 nt, Homo sapiens
  misc_RNA (1)...(19): siRNA sense strand
ccagcuccauaaaguccua

SEQ ID NO: 358223 - RNA, 19 nt, Homo sapiens
  misc_RNA (1)...(19): siRNA sense strand
agaugguucuggcauuuau

SEQ ID NO: 358224 - RNA, 19 nt, Homo sapiens
  misc_RNA (1)...(19): siRNA sense strand
guaaggagaagcccacaac

SEQ ID NO: 358225 - RNA, 19 nt, Homo sapiens
  misc_RNA (1)...(19): siRNA sense strand
cccaagaaaccaaagaaug

SEQ ID NO: 358226 - RNA, 19 nt, Homo sapiens
  misc_RNA (1)...(19): siRNA sense strand
ggcuaugaaugcccugaug

SEQ ID NO: 358227 - RNA, 19 nt, Homo sapiens
  misc_RNA (1)...(19): siRNA sense strand
agaagauucagaagaaaga

SEQ ID NO: 358228 - RNA, 19 nt, Homo sapiens
  misc_RNA (1)...(19): siRNA sense strand
agaagaaauggagaaagua

SEQ ID NO: 358229 - RNA, 19 nt, Homo sapiens
  misc_RNA (1)...(19): siRNA sense strand
gaaugaugaccgccaugug

SEQ ID NO: 358230 - RNA, 19 nt, Homo sapiens
  misc_RNA (1)...(19): siRNA sense strand
uggacaagguggccgacaa

SEQ ID NO: 358231 - RNA, 19 nt, Homo sapiens
  misc_RNA (1)...(19): siRNA sense strand
ggccuacgcugcucuugcu

SEQ ID NO: 358232 - RNA, 19 nt, Homo sapiens
  misc_RNA (1)...(19): siRNA sense strand
ggccgauccugacaaagca

SEQ ID NO: 358233 - RNA, 19 nt, Homo sapiens
  misc_RNA (1)...(19): siRNA sense strand
ucagagaagaaauggagaa

SEQ ID NO: 358234 - RNA, 19 nt, Homo sapiens
  misc_RNA (1)...(19): siRNA sense strand
aaagaagccacugaugcua

SEQ ID NO: 358235 - RNA, 19 nt, Homo sapiens
  misc_RNA (1)...(19): siRNA sense strand
gcaucuagacagacagcaa

SEQ ID NO: 358236 - RNA, 19 nt, Homo sapiens
  misc_RNA (1)...(19): siRNA sense strand
cagagaagaaauggagaaa

SEQ ID NO: 358237 - RNA, 19 nt, Homo sapiens
  misc_RNA (1)...(19): siRNA sense strand
ucggccagcuccauaaagu

SEQ ID NO: 358238 - RNA, 19 nt, Homo sapiens
  misc_RNA (1)...(19): siRNA sense strand
ggacaagguggccgacaac

SEQ ID NO: 358239 - RNA, 19 nt, Homo sapiens
  misc_RNA (1)...(19): siRNA sense strand
agaggacgacaguaaagaa

SEQ ID NO: 358240 - RNA, 19 nt, Homo sapiens
  misc_RNA (1)...(19): siRNA sense strand
gaaguggauggacagaagu

SEQ ID NO: 358241 - RNA, 19 nt, Homo sapiens
  misc_RNA (1)...(19): siRNA sense strand
gugcggccuuucccucaga

SEQ ID NO: 358242 - RNA, 19 nt, Homo sapiens
  misc_RNA (1)...(19): siRNA sense strand
uauugggcaucuagacaga

SEQ ID NO: 358243 - RNA, 19 nt, Homo sapiens
  misc_RNA (1)...(19): siRNA sense strand
gcuauugggcaucuagaca

SEQ ID NO: 358244 - RNA, 19 nt, Homo sapiens
  misc_RNA (1)...(19): siRNA sense strand
caugugauggcaaagcauu

SEQ ID NO: 358245 - RNA, 19 nt, Homo sapiens
  misc_RNA (1)...(19): siRNA sense strand
gaggacgacaguaaagaag

SEQ ID NO: 358246 - RNA, 19 nt, Homo sapiens
  misc_RNA (1)...(19): siRNA sense strand
ggaggcaguccagaacaug

SEQ ID NO: 358247 - RNA, 19 nt, Homo sapiens
  misc_RNA (1)...(19): siRNA sense strand
acagaagacaaguacgaaa

SEQ ID NO: 358248 - RNA, 19 nt, Homo sapiens
  misc_RNA (1)...(19): siRNA sense strand
ccagaggacgacaguaaag

SEQ ID NO: 358249 - RNA, 19 nt, Homo sapiens
  misc_RNA (1)...(19): siRNA sense strand
aagaagaagaagauucaga

SEQ ID NO: 358250 - RNA, 19 nt, Homo sapiens
  misc_RNA (1)...(19): siRNA sense strand
aagcaccaccuaugccauu

SEQ ID NO: 358251 - RNA, 19 nt, Homo sapiens
  misc_RNA (1)...(19): siRNA sense strand
aagaagccacugaugcuau

SEQ ID NO: 358252 - RNA, 19 nt, Homo sapiens
  misc_RNA (1)...(19): siRNA sense strand
gaaggccuacgcugcucuu

SEQ ID NO: 358253 - RNA, 19 nt, Homo sapiens
  misc_RNA (1)...(19): siRNA sense strand
cgucauggaggucgaagug

SEQ ID NO: 358254 - RNA, 19 nt, Homo sapiens
  misc_RNA (1)...(19): siRNA sense strand
gcccaagaaaccaaagaau

SEQ ID NO: 358255 - RNA, 19 nt, Homo sapiens
  misc_RNA (1)...(19): siRNA sense strand
gcaggcagaguccgauaac

SEQ ID NO: 358256 - RNA, 19 nt, Homo sapiens
  misc_RNA (1)...(19): siRNA sense strand
gcucuugcugcccuagaaa

SEQ ID NO: 358257 - RNA, 19 nt, Homo sapiens
  misc_RNA (1)...(19): siRNA sense strand
cggcaagaacccagucaug

SEQ ID NO: 358258 - RNA, 19 nt, Homo sapiens
  misc_RNA (1)...(19): siRNA sense strand
cagaggacgacaguaaaga

SEQ ID NO: 358259 - RNA, 19 nt, Homo sapiens
  misc_RNA (1)...(19): siRNA sense strand
cucucgagcuccuguguga

SEQ ID NO: 358260 - RNA, 19 nt, Homo sapiens
  misc_RNA (1)...(19): siRNA sense strand
uggcauuuaugacccuugu

SEQ ID NO: 358261 - RNA, 19 nt, Homo sapiens
  misc_RNA (1)...(19): siRNA sense strand
gacaaagcacggcaagaac

SEQ ID NO: 358262 - RNA, 19 nt, Homo sapiens
  misc_RNA (1)...(19): siRNA sense strand
gacgaugcugcgauuguga

SEQ ID NO: 358263 - RNA, 19 nt, Homo sapiens
  misc_RNA (1)...(19): siRNA sense strand
ggaagaagaccaaauauuc

SEQ ID NO: 358264 - RNA, 19 nt, Homo sapiens
  misc_RNA (1)...(19): siRNA sense strand
ggaggaagaagaccaaaua

SEQ ID NO: 358265 - RNA, 19 nt, Homo sapiens
  misc_RNA (1)...(19): siRNA sense strand
gaccaaauauuccuugaug

SEQ ID NO: 358266 - RNA, 19 nt, Homo sapiens
  misc_RNA (1)...(19): siRNA sense strand
gcuaaugacuccagaaaca

SEQ ID NO: 358267 - RNA, 19 nt, Homo sapiens
  misc_RNA (1)...(19): siRNA sense strand
ucaaagagaagaagaagaa

SEQ ID NO: 358268 - RNA, 19 nt, Homo sapiens
  misc_RNA (1)...(19): siRNA sense strand
auaaucagcucaacacugu

SEQ ID NO: 358269 - RNA, 19 nt, Homo sapiens
  misc_RNA (1)...(19): siRNA sense strand
aaaggagacuguacugagu

SEQ ID NO: 358270 - RNA, 19 nt, Homo sapiens
  misc_RNA (1)...(19): siRNA sense strand
ggacaguggaggaagaaga

SEQ ID NO: 358271 - RNA, 19 nt, Homo sapiens
  misc_RNA (1)...(19): siRNA sense strand
gcaaaggagacuguacuga

SEQ ID NO: 358272 - RNA, 19 nt, Homo sapiens
  misc_RNA (1)...(19): siRNA sense strand
aaaggacaguggaggaaga

SEQ ID NO: 358273 - RNA, 19 nt, Homo sapiens
  misc_RNA (1)...(19): siRNA sense strand
gaagaagaccaaauauucc

SEQ ID NO: 358274 - RNA, 19 nt, Homo sapiens
  misc_RNA (1)...(19): siRNA sense strand
gaggaagaagaccaaauau

SEQ ID NO: 358275 - RNA, 19 nt, Homo sapiens
  misc_RNA (1)...(19): siRNA sense strand
ccagauacacuccaguuca

SEQ ID NO: 358276 - RNA, 19 nt, Homo sapiens
  misc_RNA (1)...(19): siRNA sense strand
gcagauaaucagcucaaca

SEQ ID NO: 358277 - RNA, 19 nt, Homo sapiens
  misc_RNA (1)...(19): siRNA sense strand
acacuguccucaccaucaa

SEQ ID NO: 358278 - RNA, 19 nt, Homo sapiens
  misc_RNA (1)...(19): siRNA sense strand
gcgauaccagagcagauaa

SEQ ID NO: 358279 - RNA, 19 nt, Homo sapiens
  misc_RNA (1)...(19): siRNA sense strand
caaagagaagaagaagaaa

SEQ ID NO: 358280 - RNA, 19 nt, Homo sapiens
  misc_RNA (1)...(19): siRNA sense strand
ugacagaagaagcagaugu

SEQ ID NO: 358281 - RNA, 19 nt, Homo sapiens
  misc_RNA (1)...(19): siRNA sense strand
ggccagauacacuccaguu

SEQ ID NO: 358282 - RNA, 19 nt, Homo sapiens
  misc_RNA (1)...(19): siRNA sense strand
aggaagaagaccaaauauu

SEQ ID NO: 358283 - RNA, 19 nt, Homo sapiens
  misc_RNA (1)...(19): siRNA sense strand
gaaaaggacaguggaggaa

SEQ ID NO: 358284 - RNA, 19 nt, Homo sapiens
  misc_RNA (1)...(19): siRNA sense strand
uaaugacuccagaaacaug

SEQ ID NO: 358285 - RNA, 19 nt, Homo sapiens
  misc_RNA (1)...(19): siRNA sense strand
cagauacacuccaguucac

SEQ ID NO: 358286 - RNA, 19 nt, Homo sapiens
  misc_RNA (1)...(19): siRNA sense strand
gaucgccccuccugacaga

SEQ ID NO: 358287 - RNA, 19 nt, Homo sapiens
  misc_RNA (1)...(19): siRNA sense strand
aagaccaaauauuccuuga

SEQ ID NO: 358288 - RNA, 19 nt, Homo sapiens
  misc_RNA (1)...(19): siRNA sense strand
guucacaguggaugucuuc

SEQ ID NO: 358289 - RNA, 19 nt, Homo sapiens
  misc_RNA (1)...(19): siRNA sense strand
ucaacacuguccucaccau

SEQ ID NO: 358290 - RNA, 19 nt, Homo sapiens
  misc_RNA (1)...(19): siRNA sense strand
gauaccagagcagauaauc

SEQ ID NO: 358291 - RNA, 19 nt, Homo sapiens
  misc_RNA (1)...(19): siRNA sense strand
ugucgacggucucacugau

SEQ ID NO: 358292 - RNA, 19 nt, Homo sapiens
  misc_RNA (1)...(19): siRNA sense strand
gaugucuuccacuuugcua

SEQ ID NO: 358293 - RNA, 19 nt, Homo sapiens
  misc_RNA (1)...(19): siRNA sense strand
uguccucaccaucaaguaa

SEQ ID NO: 358294 - RNA, 19 nt, Homo sapiens
  misc_RNA (1)...(19): siRNA sense strand
ugccucuucugcauucaaa

SEQ ID NO: 358295 - RNA, 19 nt, Homo sapiens
  misc_RNA (1)...(19): siRNA sense strand
ggaagaagaccaaauauuc

SEQ ID NO: 358296 - RNA, 19 nt, Homo sapiens
  misc_RNA (1)...(19): siRNA sense strand
ggaggaagaagaccaaaua

SEQ ID NO: 358297 - RNA, 19 nt, Homo sapiens
  misc_RNA (1)...(19): siRNA sense strand
gaccaaauauuccuugaug

SEQ ID NO: 358298 - RNA, 19 nt, Homo sapiens
  misc_RNA (1)...(19): siRNA sense strand
gcuaaugacuccagaaaca

SEQ ID NO: 358299 - RNA, 19 nt, Homo sapiens
  misc_RNA (1)...(19): siRNA sense strand
ucaaagagaagaagaagaa

SEQ ID NO: 358300 - RNA, 19 nt, Homo sapiens
  misc_RNA (1)...(19): siRNA sense strand
auaaucagcucaacacugu

SEQ ID NO: 358301 - RNA, 19 nt, Homo sapiens
  misc_RNA (1)...(19): siRNA sense strand
aaaggagacuguacugagu

SEQ ID NO: 358302 - RNA, 19 nt, Homo sapiens
  misc_RNA (1)...(19): siRNA sense strand
ggacaguggaggaagaaga

SEQ ID NO: 358303 - RNA, 19 nt, Homo sapiens
  misc_RNA (1)...(19): siRNA sense strand
gcaaaggagacuguacuga

SEQ ID NO: 358304 - RNA, 19 nt, Homo sapiens
  misc_RNA (1)...(19): siRNA sense strand
aaaggacaguggaggaaga

SEQ ID NO: 358305 - RNA, 19 nt, Homo sapiens
  misc_RNA (1)...(19): siRNA sense strand
gaagaagaccaaauauucc

SEQ ID NO: 358306 - RNA, 19 nt, Homo sapiens
  misc_RNA (1)...(19): siRNA sense strand
gaggaagaagaccaaauau

SEQ ID NO: 358307 - RNA, 19 nt, Homo sapiens
  misc_RNA (1)...(19): siRNA sense strand
ccagauacacuccaguuca

SEQ ID NO: 358308 - RNA, 19 nt, Homo sapiens
  misc_RNA (1)...(19): siRNA sense strand
gcagauaaucagcucaaca

SEQ ID NO: 358309 - RNA, 19 nt, Homo sapiens
  misc_RNA (1)...(19): siRNA sense strand
acacuguccucaccaucaa

SEQ ID NO: 358310 - RNA, 19 nt, Homo sapiens
  misc_RNA (1)...(19): siRNA sense strand
gcgauaccagagcagauaa

SEQ ID NO: 358311 - RNA, 19 nt, Homo sapiens
  misc_RNA (1)...(19): siRNA sense strand
caaagagaagaagaagaaa

SEQ ID NO: 358312 - RNA, 19 nt, Homo sapiens
  misc_RNA (1)...(19): siRNA sense strand
ggccagauacacuccaguu

SEQ ID NO: 358313 - RNA, 19 nt, Homo sapiens
  misc_RNA (1)...(19): siRNA sense strand
aggaagaagaccaaauauu

SEQ ID NO: 358314 - RNA, 19 nt, Homo sapiens
  misc_RNA (1)...(19): siRNA sense strand
gaaaaggacaguggaggaa

SEQ ID NO: 358315 - RNA, 19 nt, Homo sapiens
  misc_RNA (1)...(19): siRNA sense strand
uaaugacuccagaaacaug

SEQ ID NO: 358316 - RNA, 19 nt, Homo sapiens
  misc_RNA (1)...(19): siRNA sense strand
cagauacacuccaguucac

SEQ ID NO: 358317 - RNA, 19 nt, Homo sapiens
  misc_RNA (1)...(19): siRNA sense strand
gaucgccccuccugacaga

SEQ ID NO: 358318 - RNA, 19 nt, Homo sapiens
  misc_RNA (1)...(19): siRNA sense strand
aagaccaaauauuccuuga

SEQ ID NO: 358319 - RNA, 19 nt, Homo sapiens
  misc_RNA (1)...(19): siRNA sense strand
guucacaguggaugucuuc

SEQ ID NO: 358320 - RNA, 19 nt, Homo sapiens
  misc_RNA (1)...(19): siRNA sense strand
ucaacacuguccucaccau

SEQ ID NO: 358321 - RNA, 19 nt, Homo sapiens
  misc_RNA (1)...(19): siRNA sense strand
gauaccagagcagauaauc

SEQ ID NO: 358322 - RNA, 19 nt, Homo sapiens
  misc_RNA (1)...(19): siRNA sense strand
ugucgacggucucacugau

SEQ ID NO: 358323 - RNA, 19 nt, Homo sapiens
  misc_RNA (1)...(19): siRNA sense strand
gaugucuuccacuuugcua

SEQ ID NO: 358324 - RNA, 19 nt, Homo sapiens
  misc_RNA (1)...(19): siRNA sense strand
ugccucuucugcauucaaa

SEQ ID NO: 358325 - RNA, 19 nt, Homo sapiens
  misc_RNA (1)...(19): siRNA sense strand
uguccucaccaucaaguaa

SEQ ID NO: 358326 - RNA, 19 nt, Homo sapiens
  misc_RNA (1)...(19): siRNA sense strand
gaucucagguuaagaauaa

SEQ ID NO: 358327 - RNA, 19 nt, Homo sapiens
  misc_RNA (1)...(19): siRNA sense strand
gaagaggaguuaaaugauu

SEQ ID NO: 358328 - RNA, 19 nt, Homo sapiens
  misc_RNA (1)...(19): siRNA sense strand
aauaauggcuucuggaaua

SEQ ID NO: 358329 - RNA, 19 nt, Homo sapiens
  misc_RNA (1)...(19): siRNA sense strand
caacagagccauuuacuau

SEQ ID NO: 358330 - RNA, 19 nt, Homo sapiens
  misc_RNA (1)...(19): siRNA sense strand
gaagccagaagauuuauua

SEQ ID NO: 358331 - RNA, 19 nt, Homo sapiens
  misc_RNA (1)...(19): siRNA sense strand
uaaauuagguccuguuugu

SEQ ID NO: 358332 - RNA, 19 nt, Homo sapiens
  misc_RNA (1)...(19): siRNA sense strand
gaaaggaaguuuacaacca

SEQ ID NO: 358333 - RNA, 19 nt, Homo sapiens
  misc_RNA (1)...(19): siRNA sense strand
ggaggaggaugaagaagaa

SEQ ID NO: 358334 - RNA, 19 nt, Homo sapiens
  misc_RNA (1)...(19): siRNA sense strand
gaaacuggcugcgauaugu

SEQ ID NO: 358335 - RNA, 19 nt, Homo sapiens
  misc_RNA (1)...(19): siRNA sense strand
uaagaaagguggacacuca

SEQ ID NO: 358336 - RNA, 19 nt, Homo sapiens
  misc_RNA (1)...(19): siRNA sense strand
gaaauacggugugaugaga

SEQ ID NO: 358337 - RNA, 19 nt, Homo sapiens
  misc_RNA (1)...(19): siRNA sense strand
gcagaaggccgacuugaaa

SEQ ID NO: 358338 - RNA, 19 nt, Homo sapiens
  misc_RNA (1)...(19): siRNA sense strand
caacagaggcagugucuuu

SEQ ID NO: 358339 - RNA, 19 nt, Homo sapiens
  misc_RNA (1)...(19): siRNA sense strand
acagagccauuuacuauaa

SEQ ID NO: 358340 - RNA, 19 nt, Homo sapiens
  misc_RNA (1)...(19): siRNA sense strand
gaaaaggugucgacaauau

SEQ ID NO: 358341 - RNA, 19 nt, Homo sapiens
  misc_RNA (1)...(19): siRNA sense strand
gccagaagauccuuuagaa

SEQ ID NO: 358342 - RNA, 19 nt, Homo sapiens
  misc_RNA (1)...(19): siRNA sense strand
uaacaacacuaguaacugu

SEQ ID NO: 358343 - RNA, 19 nt, Homo sapiens
  misc_RNA (1)...(19): siRNA sense strand
gaagacugcucagagguaa

SEQ ID NO: 358344 - RNA, 19 nt, Homo sapiens
  misc_RNA (1)...(19): siRNA sense strand
caucaaagcucaaacaacu

SEQ ID NO: 358345 - RNA, 19 nt, Homo sapiens
  misc_RNA (1)...(19): siRNA sense strand
ggccaauggugauguauuu

SEQ ID NO: 358346 - RNA, 19 nt, Homo sapiens
  misc_RNA (1)...(19): siRNA sense strand
ggaagcagaugauguguac

SEQ ID NO: 358347 - RNA, 19 nt, Homo sapiens
  misc_RNA (1)...(19): siRNA sense strand
ggaagacaacccugagaua

SEQ ID NO: 358348 - RNA, 19 nt, Homo sapiens
  misc_RNA (1)...(19): siRNA sense strand
gcacacaucacgaguuuga

SEQ ID NO: 358349 - RNA, 19 nt, Homo sapiens
  misc_RNA (1)...(19): siRNA sense strand
ucacgaacgucaucugauu

SEQ ID NO: 358350 - RNA, 19 nt, Homo sapiens
  misc_RNA (1)...(19): siRNA sense strand
acagaccgguucaauauaa

SEQ ID NO: 358351 - RNA, 19 nt, Homo sapiens
  misc_RNA (1)...(19): siRNA sense strand
gcaaggaauucaaagaaag

SEQ ID NO: 358352 - RNA, 19 nt, Homo sapiens
  misc_RNA (1)...(19): siRNA sense strand
gcaauaucaucuguuguuu

SEQ ID NO: 358353 - RNA, 19 nt, Homo sapiens
  misc_RNA (1)...(19): siRNA sense strand
gaagagcuuuacacgacua

SEQ ID NO: 358354 - RNA, 19 nt, Homo sapiens
  misc_RNA (1)...(19): siRNA sense strand
uaaagaagaagaggaguua

SEQ ID NO: 358355 - RNA, 19 nt, Homo sapiens
  misc_RNA (1)...(19): siRNA sense strand
gggaauaucuuuguguguu

SEQ ID NO: 358356 - RNA, 19 nt, Homo sapiens
  misc_RNA (1)...(19): siRNA sense strand
ggacauuucuagcaauauc

SEQ ID NO: 358357 - RNA, 19 nt, Homo sapiens
  misc_RNA (1)...(19): siRNA sense strand
gaucaugaauucagagaag

SEQ ID NO: 358358 - RNA, 19 nt, Homo sapiens
  misc_RNA (1)...(19): siRNA sense strand
gaauggcccuucaaaugug

SEQ ID NO: 358359 - RNA, 19 nt, Homo sapiens
  misc_RNA (1)...(19): siRNA sense strand
gcagauuuguaugguauaa

SEQ ID NO: 358360 - RNA, 19 nt, Homo sapiens
  misc_RNA (1)...(19): siRNA sense strand
gaagauccuuuagaaacuu

SEQ ID NO: 358361 - RNA, 19 nt, Homo sapiens
  misc_RNA (1)...(19): siRNA sense strand
ggcaaggaauucaaagaaa

SEQ ID NO: 358362 - RNA, 19 nt, Homo sapiens
  misc_RNA (1)...(19): siRNA sense strand
ggauggaugugcauugaug

SEQ ID NO: 358363 - RNA, 19 nt, Homo sapiens
  misc_RNA (1)...(19): siRNA sense strand
ccacaaauuucacuacaca

SEQ ID NO: 358364 - RNA, 19 nt, Homo sapiens
  misc_RNA (1)...(19): siRNA sense strand
gugcacacaucacgaguuu

SEQ ID NO: 358365 - RNA, 19 nt, Homo sapiens
  misc_RNA (1)...(19): siRNA sense strand
gguaacaccugccaugcaa

SEQ ID NO: 358366 - RNA, 19 nt, Homo sapiens
  misc_RNA (1)...(19): siRNA sense strand
ggagguguauuacccaaau

SEQ ID NO: 358367 - RNA, 19 nt, Homo sapiens
  misc_RNA (1)...(19): siRNA sense strand
gagaaaacguugcuucaaa

SEQ ID NO: 358368 - RNA, 19 nt, Homo sapiens
  misc_RNA (1)...(19): siRNA sense strand
ugagaagccagaagauuua

SEQ ID NO: 358369 - RNA, 19 nt, Homo sapiens
  misc_RNA (1)...(19): siRNA sense strand
gcaucaauguugccuguga

SEQ ID NO: 358370 - RNA, 19 nt, Homo sapiens
  misc_RNA (1)...(19): siRNA sense strand
ggcagugucuuuccacaaa

SEQ ID NO: 358371 - RNA, 19 nt, Homo sapiens
  misc_RNA (1)...(19): siRNA sense strand
ggaucuggcugauggcaaa

SEQ ID NO: 358372 - RNA, 19 nt, Homo sapiens
  misc_RNA (1)...(19): siRNA sense strand
agaagaagaugaugaugau

SEQ ID NO: 358373 - RNA, 19 nt, Homo sapiens
  misc_RNA (1)...(19): siRNA sense strand
cuaaagcuguggccaagaa

SEQ ID NO: 358374 - RNA, 19 nt, Homo sapiens
  misc_RNA (1)...(19): siRNA sense strand
ucaaacaacuucuucaaac

SEQ ID NO: 358375 - RNA, 19 nt, Homo sapiens
  misc_RNA (1)...(19): siRNA sense strand
ggacagcuaguucugcuuu

SEQ ID NO: 358376 - RNA, 19 nt, Homo sapiens
  misc_RNA (1)...(19): siRNA sense strand
aggcuuaacuuuaguguug

SEQ ID NO: 358377 - RNA, 19 nt, Homo sapiens
  misc_RNA (1)...(19): siRNA sense strand
caugauaucuuucaaacag

SEQ ID NO: 358378 - RNA, 19 nt, Homo sapiens
  misc_RNA (1)...(19): siRNA sense strand
gccagaagauuuauuagag

SEQ ID NO: 358379 - RNA, 19 nt, Homo sapiens
  misc_RNA (1)...(19): siRNA sense strand
ccaagcuccuccucuuuaa

SEQ ID NO: 358380 - RNA, 19 nt, Homo sapiens
  misc_RNA (1)...(19): siRNA sense strand
gagcuuuacacgacuauaa

SEQ ID NO: 358381 - RNA, 19 nt, Homo sapiens
  misc_RNA (1)...(19): siRNA sense strand
cuugugaggugaaugauuu

SEQ ID NO: 358382 - RNA, 19 nt, Homo sapiens
  misc_RNA (1)...(19): siRNA sense strand
aaaccaagcuccuccucuu

SEQ ID NO: 358383 - RNA, 19 nt, Homo sapiens
  misc_RNA (1)...(19): siRNA sense strand
ggaugaagaagaagaagaa

SEQ ID NO: 358384 - RNA, 19 nt, Homo sapiens
  misc_RNA (1)...(19): siRNA sense strand
gaagccagcaugccaaaug

SEQ ID NO: 358385 - RNA, 19 nt, Homo sapiens
  misc_RNA (1)...(19): siRNA sense strand
gccauucgcugcacaaagu

SEQ ID NO: 358386 - RNA, 19 nt, Homo sapiens
  misc_RNA (1)...(19): siRNA sense strand
ggaauaucuuuguguguuc

SEQ ID NO: 358387 - RNA, 19 nt, Homo sapiens
  misc_RNA (1)...(19): siRNA sense strand
gcacaguccugcccuucga

SEQ ID NO: 358388 - RNA, 19 nt, Homo sapiens
  misc_RNA (1)...(19): siRNA sense strand
aaaggaaguuuacaaccaa

SEQ ID NO: 358389 - RNA, 19 nt, Homo sapiens
  misc_RNA (1)...(19): siRNA sense strand
gaagacaagugagccagau

SEQ ID NO: 358390 - RNA, 19 nt, Homo sapiens
  misc_RNA (1)...(19): siRNA sense strand
aagaagaggaguuaaauga

SEQ ID NO: 358391 - RNA, 19 nt, Homo sapiens
  misc_RNA (1)...(19): siRNA sense strand
gcagacacccucccuuuca

SEQ ID NO: 358392 - RNA, 19 nt, Homo sapiens
  misc_RNA (1)...(19): siRNA sense strand
uggcaucgauuuaccugua

SEQ ID NO: 358393 - RNA, 19 nt, Homo sapiens
  misc_RNA (1)...(19): siRNA sense strand
gaagacaacccugagauag

SEQ ID NO: 358394 - RNA, 19 nt, Homo sapiens
  misc_RNA (1)...(19): siRNA sense strand
cagcauuacccaagcuuua

SEQ ID NO: 358395 - RNA, 19 nt, Homo sapiens
  misc_RNA (1)...(19): siRNA sense strand
gaagaagaggaguuaaaug

SEQ ID NO: 358396 - RNA, 19 nt, Homo sapiens
  misc_RNA (1)...(19): siRNA sense strand
gaugagagagaaacuguga

SEQ ID NO: 358397 - RNA, 19 nt, Homo sapiens
  misc_RNA (1)...(19): siRNA sense strand
ggaaaucaacagagccauu

SEQ ID NO: 358398 - RNA, 19 nt, Homo sapiens
  misc_RNA (1)...(19): siRNA sense strand
gacaaaagauccagauguu

SEQ ID NO: 358399 - RNA, 19 nt, Homo sapiens
  misc_RNA (1)...(19): siRNA sense strand
guguagugcuguaaagaaa

SEQ ID NO: 358400 - RNA, 19 nt, Homo sapiens
  misc_RNA (1)...(19): siRNA sense strand
ccagugggaaucugucuua

SEQ ID NO: 358401 - RNA, 19 nt, Homo sapiens
  misc_RNA (1)...(19): siRNA sense strand
ccaguuacaguggaaauua

SEQ ID NO: 358402 - RNA, 19 nt, Homo sapiens
  misc_RNA (1)...(19): siRNA sense strand
uaaagaagacgaagagaag

SEQ ID NO: 358403 - RNA, 19 nt, Homo sapiens
  misc_RNA (1)...(19): siRNA sense strand
cagcugcgauugaggaaga

SEQ ID NO: 358404 - RNA, 19 nt, Homo sapiens
  misc_RNA (1)...(19): siRNA sense strand
ugugaaagagccagaaaua

SEQ ID NO: 358405 - RNA, 19 nt, Homo sapiens
  misc_RNA (1)...(19): siRNA sense strand
guaaucgagaguucacuua

SEQ ID NO: 358406 - RNA, 19 nt, Homo sapiens
  misc_RNA (1)...(19): siRNA sense strand
caagugacaagaagaggua

SEQ ID NO: 358407 - RNA, 19 nt, Homo sapiens
  misc_RNA (1)...(19): siRNA sense strand
gaauauaauggcaucgauu

SEQ ID NO: 358408 - RNA, 19 nt, Homo sapiens
  misc_RNA (1)...(19): siRNA sense strand
caauggugauguauuugaa

SEQ ID NO: 358409 - RNA, 19 nt, Homo sapiens
  misc_RNA (1)...(19): siRNA sense strand
ugagauagcagcugcgauu

SEQ ID NO: 358410 - RNA, 19 nt, Homo sapiens
  misc_RNA (1)...(19): siRNA sense strand
aagaauggcccuucaaaug

SEQ ID NO: 358411 - RNA, 19 nt, Homo sapiens
  misc_RNA (1)...(19): siRNA sense strand
ugcagaagguccuaaagaa

SEQ ID NO: 358412 - RNA, 19 nt, Homo sapiens
  misc_RNA (1)...(19): siRNA sense strand
aagcaaagcuguuuuacaa

SEQ ID NO: 358413 - RNA, 19 nt, Homo sapiens
  misc_RNA (1)...(19): siRNA sense strand
guuaaaugauuccucugaa

SEQ ID NO: 358414 - RNA, 19 nt, Homo sapiens
  misc_RNA (1)...(19): siRNA sense strand
ucaggaaacauucaacaaa

SEQ ID NO: 358415 - RNA, 19 nt, Homo sapiens
  misc_RNA (1)...(19): siRNA sense strand
gaacuucauccgugcaaau

SEQ ID NO: 358416 - RNA, 19 nt, Homo sapiens
  misc_RNA (1)...(19): siRNA sense strand
aaagaucucagguuaagaa

SEQ ID NO: 358417 - RNA, 19 nt, Homo sapiens
  misc_RNA (1)...(19): siRNA sense strand
cagaagguccuaaagaaga

SEQ ID NO: 358418 - RNA, 19 nt, Homo sapiens
  misc_RNA (1)...(19): siRNA sense strand
ggaauuagagaaugaaggu

SEQ ID NO: 358419 - RNA, 19 nt, Homo sapiens
  misc_RNA (1)...(19): siRNA sense strand
cagcuucggugaaauccaa

SEQ ID NO: 358420 - RNA, 19 nt, Homo sapiens
  misc_RNA (1)...(19): siRNA sense strand
uaaaugauuccucugaaga

SEQ ID NO: 358421 - RNA, 19 nt, Homo sapiens
  misc_RNA (1)...(19): siRNA sense strand
ggacacucaucaccugcaa

SEQ ID NO: 358422 - RNA, 19 nt, Homo sapiens
  misc_RNA (1)...(19): siRNA sense strand
gcacgugaggguacagaaa

SEQ ID NO: 358423 - RNA, 19 nt, Homo sapiens
  misc_RNA (1)...(19): siRNA sense strand
aaacggacuugucagaaca

SEQ ID NO: 358424 - RNA, 19 nt, Homo sapiens
  misc_RNA (1)...(19): siRNA sense strand
cagcggaugcggagauuaa

SEQ ID NO: 358425 - RNA, 19 nt, Homo sapiens
  misc_RNA (1)...(19): siRNA sense strand
gaaagguggacacucauca

SEQ ID NO: 358426 - RNA, 19 nt, Homo sapiens
  misc_RNA (1)...(19): siRNA sense strand
gaucucagguuaagaauaa

SEQ ID NO: 358427 - RNA, 19 nt, Homo sapiens
  misc_RNA (1)...(19): siRNA sense strand
gaagaggaguuaaaugauu

SEQ ID NO: 358428 - RNA, 19 nt, Homo sapiens
  misc_RNA (1)...(19): siRNA sense strand
aauaauggcuucuggaaua

SEQ ID NO: 358429 - RNA, 19 nt, Homo sapiens
  misc_RNA (1)...(19): siRNA sense strand
caacagagccauuuacuau

SEQ ID NO: 358430 - RNA, 19 nt, Homo sapiens
  misc_RNA (1)...(19): siRNA sense strand
gaagccagaagauuuauua

SEQ ID NO: 358431 - RNA, 19 nt, Homo sapiens
  misc_RNA (1)...(19): siRNA sense strand
uaaauuagguccuguuugu

SEQ ID NO: 358432 - RNA, 19 nt, Homo sapiens
  misc_RNA (1)...(19): siRNA sense strand
gaaaggaaguuuacaacca

SEQ ID NO: 358433 - RNA, 19 nt, Homo sapiens
  misc_RNA (1)...(19): siRNA sense strand
ggaggaggaugaagaagaa

SEQ ID NO: 358434 - RNA, 19 nt, Homo sapiens
  misc_RNA (1)...(19): siRNA sense strand
gaaacuggcugcgauaugu

SEQ ID NO: 358435 - RNA, 19 nt, Homo sapiens
  misc_RNA (1)...(19): siRNA sense strand
uaagaaagguggacacuca

SEQ ID NO: 358436 - RNA, 19 nt, Homo sapiens
  misc_RNA (1)...(19): siRNA sense strand
gaaauacggugugaugaga

SEQ ID NO: 358437 - RNA, 19 nt, Homo sapiens
  misc_RNA (1)...(19): siRNA sense strand
gcagaaggccgacuugaaa

SEQ ID NO: 358438 - RNA, 19 nt, Homo sapiens
  misc_RNA (1)...(19): siRNA sense strand
caacagaggcagugucuuu

SEQ ID NO: 358439 - RNA, 19 nt, Homo sapiens
  misc_RNA (1)...(19): siRNA sense strand
acagagccauuuacuauaa

SEQ ID NO: 358440 - RNA, 19 nt, Homo sapiens
  misc_RNA (1)...(19): siRNA sense strand
gaaaaggugucgacaauau

SEQ ID NO: 358441 - RNA, 19 nt, Homo sapiens
  misc_RNA (1)...(19): siRNA sense strand
gccagaagauccuuuagaa

SEQ ID NO: 358442 - RNA, 19 nt, Homo sapiens
  misc_RNA (1)...(19): siRNA sense strand
uaacaacacuaguaacugu

SEQ ID NO: 358443 - RNA, 19 nt, Homo sapiens
  misc_RNA (1)...(19): siRNA sense strand
gaagacugcucagagguaa

SEQ ID NO: 358444 - RNA, 19 nt, Homo sapiens
  misc_RNA (1)...(19): siRNA sense strand
caucaaagcucaaacaacu

SEQ ID NO: 358445 - RNA, 19 nt, Homo sapiens
  misc_RNA (1)...(19): siRNA sense strand
ggccaauggugauguauuu

SEQ ID NO: 358446 - RNA, 19 nt, Homo sapiens
  misc_RNA (1)...(19): siRNA sense strand
ggaagcagaugauguguac

SEQ ID NO: 358447 - RNA, 19 nt, Homo sapiens
  misc_RNA (1)...(19): siRNA sense strand
ggaagacaacccugagaua

SEQ ID NO: 358448 - RNA, 19 nt, Homo sapiens
  misc_RNA (1)...(19): siRNA sense strand
gcacacaucacgaguuuga

SEQ ID NO: 358449 - RNA, 19 nt, Homo sapiens
  misc_RNA (1)...(19): siRNA sense strand
ucacgaacgucaucugauu

SEQ ID NO: 358450 - RNA, 19 nt, Homo sapiens
  misc_RNA (1)...(19): siRNA sense strand
acagaccgguucaauauaa

SEQ ID NO: 358451 - RNA, 19 nt, Homo sapiens
  misc_RNA (1)...(19): siRNA sense strand
gcaaggaauucaaagaaag

SEQ ID NO: 358452 - RNA, 19 nt, Homo sapiens
  misc_RNA (1)...(19): siRNA sense strand
gcaauaucaucuguuguuu

SEQ ID NO: 358453 - RNA, 19 nt, Homo sapiens
  misc_RNA (1)...(19): siRNA sense strand
gaagagcuuuacacgacua

SEQ ID NO: 358454 - RNA, 19 nt, Homo sapiens
  misc_RNA (1)...(19): siRNA sense strand
uaaagaagaagaggaguua

SEQ ID NO: 358455 - RNA, 19 nt, Homo sapiens
  misc_RNA (1)...(19): siRNA sense strand
gggaauaucuuuguguguu

SEQ ID NO: 358456 - RNA, 19 nt, Homo sapiens
  misc_RNA (1)...(19): siRNA sense strand
ggacauuucuagcaauauc

SEQ ID NO: 358457 - RNA, 19 nt, Homo sapiens
  misc_RNA (1)...(19): siRNA sense strand
gaucaugaauucagagaag

SEQ ID NO: 358458 - RNA, 19 nt, Homo sapiens
  misc_RNA (1)...(19): siRNA sense strand
gaauggcccuucaaaugug

SEQ ID NO: 358459 - RNA, 19 nt, Homo sapiens
  misc_RNA (1)...(19): siRNA sense strand
gcagauuuguaugguauaa

SEQ ID NO: 358460 - RNA, 19 nt, Homo sapiens
  misc_RNA (1)...(19): siRNA sense strand
gaagauccuuuagaaacuu

SEQ ID NO: 358461 - RNA, 19 nt, Homo sapiens
  misc_RNA (1)...(19): siRNA sense strand
ggcaaggaauucaaagaaa

SEQ ID NO: 358462 - RNA, 19 nt, Homo sapiens
  misc_RNA (1)...(19): siRNA sense strand
ggauggaugugcauugaug

SEQ ID NO: 358463 - RNA, 19 nt, Homo sapiens
  misc_RNA (1)...(19): siRNA sense strand
ccacaaauuucacuacaca

SEQ ID NO: 358464 - RNA, 19 nt, Homo sapiens
  misc_RNA (1)...(19): siRNA sense strand
gugcacacaucacgaguuu

SEQ ID NO: 358465 - RNA, 19 nt, Homo sapiens
  misc_RNA (1)...(19): siRNA sense strand
gguaacaccugccaugcaa

SEQ ID NO: 358466 - RNA, 19 nt, Homo sapiens
  misc_RNA (1)...(19): siRNA sense strand
ggagguguauuacccaaau

SEQ ID NO: 358467 - RNA, 19 nt, Homo sapiens
  misc_RNA (1)...(19): siRNA sense strand
gagaaaacguugcuucaaa

SEQ ID NO: 358468 - RNA, 19 nt, Homo sapiens
  misc_RNA (1)...(19): siRNA sense strand
ugagaagccagaagauuua

SEQ ID NO: 358469 - RNA, 19 nt, Homo sapiens
  misc_RNA (1)...(19): siRNA sense strand
gcaucaauguugccuguga

SEQ ID NO: 358470 - RNA, 19 nt, Homo sapiens
  misc_RNA (1)...(19): siRNA sense strand
ggcagugucuuuccacaaa

SEQ ID NO: 358471 - RNA, 19 nt, Homo sapiens
  misc_RNA (1)...(19): siRNA sense strand
ggaucuggcugauggcaaa

SEQ ID NO: 358472 - RNA, 19 nt, Homo sapiens
  misc_RNA (1)...(19): siRNA sense strand
agaagaagaugaugaugau

SEQ ID NO: 358473 - RNA, 19 nt, Homo sapiens
  misc_RNA (1)...(19): siRNA sense strand
cuaaagcuguggccaagaa

SEQ ID NO: 358474 - RNA, 19 nt, Homo sapiens
  misc_RNA (1)...(19): siRNA sense strand
ucaaacaacuucuucaaac

SEQ ID NO: 358475 - RNA, 19 nt, Homo sapiens
  misc_RNA (1)...(19): siRNA sense strand
ggacagcuaguucugcuuu

SEQ ID NO: 358476 - RNA, 19 nt, Homo sapiens
  misc_RNA (1)...(19): siRNA sense strand
aggcuuaacuuuaguguug

SEQ ID NO: 358477 - RNA, 19 nt, Homo sapiens
  misc_RNA (1)...(19): siRNA sense strand
caugauaucuuucaaacag

SEQ ID NO: 358478 - RNA, 19 nt, Homo sapiens
  misc_RNA (1)...(19): siRNA sense strand
gccagaagauuuauuagag

SEQ ID NO: 358479 - RNA, 19 nt, Homo sapiens
  misc_RNA (1)...(19): siRNA sense strand
ccaagcuccuccucuuuaa

SEQ ID NO: 358480 - RNA, 19 nt, Homo sapiens
  misc_RNA (1)...(19): siRNA sense strand
gagcuuuacacgacuauaa

SEQ ID NO: 358481 - RNA, 19 nt, Homo sapiens
  misc_RNA (1)...(19): siRNA sense strand
cuugugaggugaaugauuu

SEQ ID NO: 358482 - RNA, 19 nt, Homo sapiens
  misc_RNA (1)...(19): siRNA sense strand
aaaccaagcuccuccucuu

SEQ ID NO: 358483 - RNA, 19 nt, Homo sapiens
  misc_RNA (1)...(19): siRNA sense strand
ggaugaagaagaagaagaa

SEQ ID NO: 358484 - RNA, 19 nt, Homo sapiens
  misc_RNA (1)...(19): siRNA sense strand
gaagccagcaugccaaaug

SEQ ID NO: 358485 - RNA, 19 nt, Homo sapiens
  misc_RNA (1)...(19): siRNA sense strand
gccauucgcugcacaaagu

SEQ ID NO: 358486 - RNA, 19 nt, Homo sapiens
  misc_RNA (1)...(19): siRNA sense strand
ggaauaucuuuguguguuc

SEQ ID NO: 358487 - RNA, 19 nt, Homo sapiens
  misc_RNA (1)...(19): siRNA sense strand
gcacaguccugcccuucga

SEQ ID NO: 358488 - RNA, 19 nt, Homo sapiens
  misc_RNA (1)...(19): siRNA sense strand
aaaggaaguuuacaaccaa

SEQ ID NO: 358489 - RNA, 19 nt, Homo sapiens
  misc_RNA (1)...(19): siRNA sense strand
gaagacaagugagccagau

SEQ ID NO: 358490 - RNA, 19 nt, Homo sapiens
  misc_RNA (1)...(19): siRNA sense strand
aagaagaggaguuaaauga

SEQ ID NO: 358491 - RNA, 19 nt, Homo sapiens
  misc_RNA (1)...(19): siRNA sense strand
gcagacacccucccuuuca

SEQ ID NO: 358492 - RNA, 19 nt, Homo sapiens
  misc_RNA (1)...(19): siRNA sense strand
uggcaucgauuuaccugua

SEQ ID NO: 358493 - RNA, 19 nt, Homo sapiens
  misc_RNA (1)...(19): siRNA sense strand
gaagacaacccugagauag

SEQ ID NO: 358494 - RNA, 19 nt, Homo sapiens
  misc_RNA (1)...(19): siRNA sense strand
cagcauuacccaagcuuua

SEQ ID NO: 358495 - RNA, 19 nt, Homo sapiens
  misc_RNA (1)...(19): siRNA sense strand
gaagaagaggaguuaaaug

SEQ ID NO: 358496 - RNA, 19 nt, Homo sapiens
  misc_RNA (1)...(19): siRNA sense strand
gaugagagagaaacuguga

SEQ ID NO: 358497 - RNA, 19 nt, Homo sapiens
  misc_RNA (1)...(19): siRNA sense strand
ggaaaucaacagagccauu

SEQ ID NO: 358498 - RNA, 19 nt, Homo sapiens
  misc_RNA (1)...(19): siRNA sense strand
gacaaaagauccagauguu

SEQ ID NO: 358499 - RNA, 19 nt, Homo sapiens
  misc_RNA (1)...(19): siRNA sense strand
guguagugcuguaaagaaa

SEQ ID NO: 358500 - RNA, 19 nt, Homo sapiens
  misc_RNA (1)...(19): siRNA sense strand
ccagugggaaucugucuua

SEQ ID NO: 358501 - RNA, 19 nt, Homo sapiens
  misc_RNA (1)...(19): siRNA sense strand
ccaguuacaguggaaauua

SEQ ID NO: 358502 - RNA, 19 nt, Homo sapiens
  misc_RNA (1)...(19): siRNA sense strand
uaaagaagacgaagagaag

SEQ ID NO: 358503 - RNA, 19 nt, Homo sapiens
  misc_RNA (1)...(19): siRNA sense strand
cagcugcgauugaggaaga

SEQ ID NO: 358504 - RNA, 19 nt, Homo sapiens
  misc_RNA (1)...(19): siRNA sense strand
ugugaaagagccagaaaua

SEQ ID NO: 358505 - RNA, 19 nt, Homo sapiens
  misc_RNA (1)...(19): siRNA sense strand
guaaucgagaguucacuua

SEQ ID NO: 358506 - RNA, 19 nt, Homo sapiens
  misc_RNA (1)...(19): siRNA sense strand
caagugacaagaagaggua

SEQ ID NO: 358507 - RNA, 19 nt, Homo sapiens
  misc_RNA (1)...(19): siRNA sense strand
gaauauaauggcaucgauu

SEQ ID NO: 358508 - RNA, 19 nt, Homo sapiens
  misc_RNA (1)...(19): siRNA sense strand
caauggugauguauuugaa

SEQ ID NO: 358509 - RNA, 19 nt, Homo sapiens
  misc_RNA (1)...(19): siRNA sense strand
ugagauagcagcugcgauu

SEQ ID NO: 358510 - RNA, 19 nt, Homo sapiens
  misc_RNA (1)...(19): siRNA sense strand
aagaauggcccuucaaaug

SEQ ID NO: 358511 - RNA, 19 nt, Homo sapiens
  misc_RNA (1)...(19): siRNA sense strand
ugcagaagguccuaaagaa

SEQ ID NO: 358512 - RNA, 19 nt, Homo sapiens
  misc_RNA (1)...(19): siRNA sense strand
aagcaaagcuguuuuacaa

SEQ ID NO: 358513 - RNA, 19 nt, Homo sapiens
  misc_RNA (1)...(19): siRNA sense strand
guuaaaugauuccucugaa

SEQ ID NO: 358514 - RNA, 19 nt, Homo sapiens
  misc_RNA (1)...(19): siRNA sense strand
ucaggaaacauucaacaaa

SEQ ID NO: 358515 - RNA, 19 nt, Homo sapiens
  misc_RNA (1)...(19): siRNA sense strand
gaacuucauccgugcaaau

SEQ ID NO: 358516 - RNA, 19 nt, Homo sapiens
  misc_RNA (1)...(19): siRNA sense strand
aaagaucucagguuaagaa

SEQ ID NO: 358517 - RNA, 19 nt, Homo sapiens
  misc_RNA (1)...(19): siRNA sense strand
cagaagguccuaaagaaga

SEQ ID NO: 358518 - RNA, 19 nt, Homo sapiens
  misc_RNA (1)...(19): siRNA sense strand
ggaauuagagaaugaaggu

SEQ ID NO: 358519 - RNA, 19 nt, Homo sapiens
  misc_RNA (1)...(19): siRNA sense strand
cagcuucggugaaauccaa

SEQ ID NO: 358520 - RNA, 19 nt, Homo sapiens
  misc_RNA (1)...(19): siRNA sense strand
uaaaugauuccucugaaga

SEQ ID NO: 358521 - RNA, 19 nt, Homo sapiens
  misc_RNA (1)...(19): siRNA sense strand
ggacacucaucaccugcaa

SEQ ID NO: 358522 - RNA, 19 nt, Homo sapiens
  misc_RNA (1)...(19): siRNA sense strand
gcacgugaggguacagaaa

SEQ ID NO: 358523 - RNA, 19 nt, Homo sapiens
  misc_RNA (1)...(19): siRNA sense strand
aaacggacuugucagaaca

SEQ ID NO: 358524 - RNA, 19 nt, Homo sapiens
  misc_RNA (1)...(19): siRNA sense strand
cagcggaugcggagauuaa

SEQ ID NO: 358525 - RNA, 19 nt, Homo sapiens
  misc_RNA (1)...(19): siRNA sense strand
gaaagguggacacucauca

SEQ ID NO: 358526 - RNA, 19 nt, Homo sapiens
  misc_RNA (1)...(19): siRNA sense strand
gagaucagcuauuucaaga

SEQ ID NO: 358527 - RNA, 19 nt, Homo sapiens
  misc_RNA (1)...(19): siRNA sense strand
gaggaggcauggacuuuga

SEQ ID NO: 358528 - RNA, 19 nt, Homo sapiens
  misc_RNA (1)...(19): siRNA sense strand
ccgcuaagcuggaugaaag

SEQ ID NO: 358529 - RNA, 19 nt, Homo sapiens
  misc_RNA (1)...(19): siRNA sense strand
uaagcuggaugaaagagaa

SEQ ID NO: 358530 - RNA, 19 nt, Homo sapiens
  misc_RNA (1)...(19): siRNA sense strand
gaagccugauaucgucuuu

SEQ ID NO: 358531 - RNA, 19 nt, Homo sapiens
  misc_RNA (1)...(19): siRNA sense strand
gcgcguuucuucuccugua

SEQ ID NO: 358532 - RNA, 19 nt, Homo sapiens
  misc_RNA (1)...(19): siRNA sense strand
gcacggcaccuucuacaca

SEQ ID NO: 358533 - RNA, 19 nt, Homo sapiens
  misc_RNA (1)...(19): siRNA sense strand
ucuuugagaucagcuauuu

SEQ ID NO: 358534 - RNA, 19 nt, Homo sapiens
  misc_RNA (1)...(19): siRNA sense strand
ccaccggccucuaugacaa

SEQ ID NO: 358535 - RNA, 19 nt, Homo sapiens
  misc_RNA (1)...(19): siRNA sense strand
gcccaagugugaagacugu

SEQ ID NO: 358536 - RNA, 19 nt, Homo sapiens
  misc_RNA (1)...(19): siRNA sense strand
uagauacccuggagcgaau

SEQ ID NO: 358537 - RNA, 19 nt, Homo sapiens
  misc_RNA (1)...(19): siRNA sense strand
uggacgagcugaccuugga

SEQ ID NO: 358538 - RNA, 19 nt, Homo sapiens
  misc_RNA (1)...(19): siRNA sense strand
ggacuuugacuccaagaag

SEQ ID NO: 358539 - RNA, 19 nt, Homo sapiens
  misc_RNA (1)...(19): siRNA sense strand
augacaaccuagagaagua

SEQ ID NO: 358540 - RNA, 19 nt, Homo sapiens
  misc_RNA (1)...(19): siRNA sense strand
ccagaggccaucuuugaga

SEQ ID NO: 358541 - RNA, 19 nt, Homo sapiens
  misc_RNA (1)...(19): siRNA sense strand
gagggagcacgccagcaua

SEQ ID NO: 358542 - RNA, 19 nt, Homo sapiens
  misc_RNA (1)...(19): siRNA sense strand
gagcacgccagcauagaug

SEQ ID NO: 358543 - RNA, 19 nt, Homo sapiens
  misc_RNA (1)...(19): siRNA sense strand
gcuacacgcagaacauaga

SEQ ID NO: 358544 - RNA, 19 nt, Homo sapiens
  misc_RNA (1)...(19): siRNA sense strand
caacagagagggagaaacc

SEQ ID NO: 358545 - RNA, 19 nt, Homo sapiens
  misc_RNA (1)...(19): siRNA sense strand
ggacaacagagagggagaa

SEQ ID NO: 358546 - RNA, 19 nt, Homo sapiens
  misc_RNA (1)...(19): siRNA sense strand
ggaggaggcauggacuuug

SEQ ID NO: 358547 - RNA, 19 nt, Homo sapiens
  misc_RNA (1)...(19): siRNA sense strand
aaccaucugucacuacuuc

SEQ ID NO: 358548 - RNA, 19 nt, Homo sapiens
  misc_RNA (1)...(19): siRNA sense strand
ggagcacgccagcauagau

SEQ ID NO: 358549 - RNA, 19 nt, Homo sapiens
  misc_RNA (1)...(19): siRNA sense strand
gagaagcagacauggacuu

SEQ ID NO: 358550 - RNA, 19 nt, Homo sapiens
  misc_RNA (1)...(19): siRNA sense strand
ccaaccaucugucacuacu

SEQ ID NO: 358551 - RNA, 19 nt, Homo sapiens
  misc_RNA (1)...(19): siRNA sense strand
ggacgaggccaggacaaca

SEQ ID NO: 358552 - RNA, 19 nt, Homo sapiens
  misc_RNA (1)...(19): siRNA sense strand
gaacgcugucgcagaguca

SEQ ID NO: 358553 - RNA, 19 nt, Homo sapiens
  misc_RNA (1)...(19): siRNA sense strand
ccagcugccggcacgaaua

SEQ ID NO: 358554 - RNA, 19 nt, Homo sapiens
  misc_RNA (1)...(19): siRNA sense strand
cggccucuaugacaaccua

SEQ ID NO: 358555 - RNA, 19 nt, Homo sapiens
  misc_RNA (1)...(19): siRNA sense strand
gacuuucgcucuccaucca

SEQ ID NO: 358556 - RNA, 19 nt, Homo sapiens
  misc_RNA (1)...(19): siRNA sense strand
gcucaucaacaaggagaaa

SEQ ID NO: 358557 - RNA, 19 nt, Homo sapiens
  misc_RNA (1)...(19): siRNA sense strand
cggcacgaauacccgcuaa

SEQ ID NO: 358558 - RNA, 19 nt, Homo sapiens
  misc_RNA (1)...(19): siRNA sense strand
cuacccagaggccaucuuu

SEQ ID NO: 358559 - RNA, 19 nt, Homo sapiens
  misc_RNA (1)...(19): siRNA sense strand
ucaugcgccugcugaagga

SEQ ID NO: 358560 - RNA, 19 nt, Homo sapiens
  misc_RNA (1)...(19): siRNA sense strand
aggagccgcugguggagaa

SEQ ID NO: 358561 - RNA, 19 nt, Homo sapiens
  misc_RNA (1)...(19): siRNA sense strand
acccagaggccaucuuuga

SEQ ID NO: 358562 - RNA, 19 nt, Homo sapiens
  misc_RNA (1)...(19): siRNA sense strand
ugagaucagcuauuucaag

SEQ ID NO: 358563 - RNA, 19 nt, Homo sapiens
  misc_RNA (1)...(19): siRNA sense strand
gcacgaauacccgcuaagc

SEQ ID NO: 358564 - RNA, 19 nt, Homo sapiens
  misc_RNA (1)...(19): siRNA sense strand
gacaacagagagggagaaa

SEQ ID NO: 358565 - RNA, 19 nt, Homo sapiens
  misc_RNA (1)...(19): siRNA sense strand
ucuccuguaugcagucaga

SEQ ID NO: 358566 - RNA, 19 nt, Homo sapiens
  misc_RNA (1)...(19): siRNA sense strand
cggaggaggcauggacuuu

SEQ ID NO: 358567 - RNA, 19 nt, Homo sapiens
  misc_RNA (1)...(19): siRNA sense strand
uuugagaucagcuauuuca

SEQ ID NO: 358568 - RNA, 19 nt, Homo sapiens
  misc_RNA (1)...(19): siRNA sense strand
ggacgagcugaccuuggaa

SEQ ID NO: 358569 - RNA, 19 nt, Homo sapiens
  misc_RNA (1)...(19): siRNA sense strand
guucaagccaaccaucugu

SEQ ID NO: 358570 - RNA, 19 nt, Homo sapiens
  misc_RNA (1)...(19): siRNA sense strand
gagaucagcuauuucaaga

SEQ ID NO: 358571 - RNA, 19 nt, Homo sapiens
  misc_RNA (1)...(19): siRNA sense strand
gaggaggcauggacuuuga

SEQ ID NO: 358572 - RNA, 19 nt, Homo sapiens
  misc_RNA (1)...(19): siRNA sense strand
ccgcuaagcuggaugaaag

SEQ ID NO: 358573 - RNA, 19 nt, Homo sapiens
  misc_RNA (1)...(19): siRNA sense strand
uaagcuggaugaaagagaa

SEQ ID NO: 358574 - RNA, 19 nt, Homo sapiens
  misc_RNA (1)...(19): siRNA sense strand
gaagccugauaucgucuuu

SEQ ID NO: 358575 - RNA, 19 nt, Homo sapiens
  misc_RNA (1)...(19): siRNA sense strand
gcgcguuucuucuccugua

SEQ ID NO: 358576 - RNA, 19 nt, Homo sapiens
  misc_RNA (1)...(19): siRNA sense strand
gcacggcaccuucuacaca

SEQ ID NO: 358577 - RNA, 19 nt, Homo sapiens
  misc_RNA (1)...(19): siRNA sense strand
ucuuugagaucagcuauuu

SEQ ID NO: 358578 - RNA, 19 nt, Homo sapiens
  misc_RNA (1)...(19): siRNA sense strand
ccaccggccucuaugacaa

SEQ ID NO: 358579 - RNA, 19 nt, Homo sapiens
  misc_RNA (1)...(19): siRNA sense strand
gcccaagugugaagacugu

SEQ ID NO: 358580 - RNA, 19 nt, Homo sapiens
  misc_RNA (1)...(19): siRNA sense strand
uagauacccuggagcgaau

SEQ ID NO: 358581 - RNA, 19 nt, Homo sapiens
  misc_RNA (1)...(19): siRNA sense strand
uggacgagcugaccuugga

SEQ ID NO: 358582 - RNA, 19 nt, Homo sapiens
  misc_RNA (1)...(19): siRNA sense strand
ggacuuugacuccaagaag

SEQ ID NO: 358583 - RNA, 19 nt, Homo sapiens
  misc_RNA (1)...(19): siRNA sense strand
augacaaccuagagaagua

SEQ ID NO: 358584 - RNA, 19 nt, Homo sapiens
  misc_RNA (1)...(19): siRNA sense strand
ccagaggccaucuuugaga

SEQ ID NO: 358585 - RNA, 19 nt, Homo sapiens
  misc_RNA (1)...(19): siRNA sense strand
gagggagcacgccagcaua

SEQ ID NO: 358586 - RNA, 19 nt, Homo sapiens
  misc_RNA (1)...(19): siRNA sense strand
gagcacgccagcauagaug

SEQ ID NO: 358587 - RNA, 19 nt, Homo sapiens
  misc_RNA (1)...(19): siRNA sense strand
gcuacacgcagaacauaga

SEQ ID NO: 358588 - RNA, 19 nt, Homo sapiens
  misc_RNA (1)...(19): siRNA sense strand
caacagagagggagaaacc

SEQ ID NO: 358589 - RNA, 19 nt, Homo sapiens
  misc_RNA (1)...(19): siRNA sense strand
ggacaacagagagggagaa

SEQ ID NO: 358590 - RNA, 19 nt, Homo sapiens
  misc_RNA (1)...(19): siRNA sense strand
ggaggaggcauggacuuug

SEQ ID NO: 358591 - RNA, 19 nt, Homo sapiens
  misc_RNA (1)...(19): siRNA sense strand
aaccaucugucacuacuuc

SEQ ID NO: 358592 - RNA, 19 nt, Homo sapiens
  misc_RNA (1)...(19): siRNA sense strand
ggagcacgccagcauagau

SEQ ID NO: 358593 - RNA, 19 nt, Homo sapiens
  misc_RNA (1)...(19): siRNA sense strand
ccaaccaucugucacuacu

SEQ ID NO: 358594 - RNA, 19 nt, Homo sapiens
  misc_RNA (1)...(19): siRNA sense strand
ggacgaggccaggacaaca

SEQ ID NO: 358595 - RNA, 19 nt, Homo sapiens
  misc_RNA (1)...(19): siRNA sense strand
gaacgcugucgcagaguca

SEQ ID NO: 358596 - RNA, 19 nt, Homo sapiens
  misc_RNA (1)...(19): siRNA sense strand
ccagcugccggcacgaaua

SEQ ID NO: 358597 - RNA, 19 nt, Homo sapiens
  misc_RNA (1)...(19): siRNA sense strand
cggccucuaugacaaccua

SEQ ID NO: 358598 - RNA, 19 nt, Homo sapiens
  misc_RNA (1)...(19): siRNA sense strand
cggcacgaauacccgcuaa

SEQ ID NO: 358599 - RNA, 19 nt, Homo sapiens
  misc_RNA (1)...(19): siRNA sense strand
gacuuucgcucuccaucca

SEQ ID NO: 358600 - RNA, 19 nt, Homo sapiens
  misc_RNA (1)...(19): siRNA sense strand
gcucaucaacaaggagaaa

SEQ ID NO: 358601 - RNA, 19 nt, Homo sapiens
  misc_RNA (1)...(19): siRNA sense strand
cuacccagaggccaucuuu

SEQ ID NO: 358602 - RNA, 19 nt, Homo sapiens
  misc_RNA (1)...(19): siRNA sense strand
ucaugcgccugcugaagga

SEQ ID NO: 358603 - RNA, 19 nt, Homo sapiens
  misc_RNA (1)...(19): siRNA sense strand
acccagaggccaucuuuga

SEQ ID NO: 358604 - RNA, 19 nt, Homo sapiens
  misc_RNA (1)...(19): siRNA sense strand
ugagaucagcuauuucaag

SEQ ID NO: 358605 - RNA, 19 nt, Homo sapiens
  misc_RNA (1)...(19): siRNA sense strand
gcacgaauacccgcuaagc

SEQ ID NO: 358606 - RNA, 19 nt, Homo sapiens
  misc_RNA (1)...(19): siRNA sense strand
gacaacagagagggagaaa

SEQ ID NO: 358607 - RNA, 19 nt, Homo sapiens
  misc_RNA (1)...(19): siRNA sense strand
ucuccuguaugcagucaga

SEQ ID NO: 358608 - RNA, 19 nt, Homo sapiens
  misc_RNA (1)...(19): siRNA sense strand
cggaggaggcauggacuuu

SEQ ID NO: 358609 - RNA, 19 nt, Homo sapiens
  misc_RNA (1)...(19): siRNA sense strand
uuugagaucagcuauuuca

SEQ ID NO: 358610 - RNA, 19 nt, Homo sapiens
  misc_RNA (1)...(19): siRNA sense strand
ggacgagcugaccuuggaa

SEQ ID NO: 358611 - RNA, 19 nt, Homo sapiens
  misc_RNA (1)...(19): siRNA sense strand
guucaagccaaccaucugu

SEQ ID NO: 358612 - RNA, 19 nt, Homo sapiens
  misc_RNA (1)...(19): siRNA sense strand
ggaaauauauccuggacaa

SEQ ID NO: 358613 - RNA, 19 nt, Homo sapiens
  misc_RNA (1)...(19): siRNA sense strand
ugaagaugcugugaaauua

SEQ ID NO: 358614 - RNA, 19 nt, Homo sapiens
  misc_RNA (1)...(19): siRNA sense strand
ugaagugccucagauauua

SEQ ID NO: 358615 - RNA, 19 nt, Homo sapiens
  misc_RNA (1)...(19): siRNA sense strand
caucuugccugauuuguaa

SEQ ID NO: 358616 - RNA, 19 nt, Homo sapiens
  misc_RNA (1)...(19): siRNA sense strand
guacaaacuucuaggaaug

SEQ ID NO: 358617 - RNA, 19 nt, Homo sapiens
  misc_RNA (1)...(19): siRNA sense strand
ggaugaaagugaaauugaa

SEQ ID NO: 358618 - RNA, 19 nt, Homo sapiens
  misc_RNA (1)...(19): siRNA sense strand
agaauuggcuuauuuguca

SEQ ID NO: 358619 - RNA, 19 nt, Homo sapiens
  misc_RNA (1)...(19): siRNA sense strand
gaaguugaccuccucauug

SEQ ID NO: 358620 - RNA, 19 nt, Homo sapiens
  misc_RNA (1)...(19): siRNA sense strand
gcaaaggagcagauuagua

SEQ ID NO: 358621 - RNA, 19 nt, Homo sapiens
  misc_RNA (1)...(19): siRNA sense strand
guaggcggcuugaugguaa

SEQ ID NO: 358622 - RNA, 19 nt, Homo sapiens
  misc_RNA (1)...(19): siRNA sense strand
gauagagccucacaugcaa

SEQ ID NO: 358623 - RNA, 19 nt, Homo sapiens
  misc_RNA (1)...(19): siRNA sense strand
gaacuauccaucaaacaaa

SEQ ID NO: 358624 - RNA, 19 nt, Homo sapiens
  misc_RNA (1)...(19): siRNA sense strand
gcgauuggguaccgagaua

SEQ ID NO: 358625 - RNA, 19 nt, Homo sapiens
  misc_RNA (1)...(19): siRNA sense strand
caaaggagcagauuaguag

SEQ ID NO: 358626 - RNA, 19 nt, Homo sapiens
  misc_RNA (1)...(19): siRNA sense strand
uagguuagguggugaauau

SEQ ID NO: 358627 - RNA, 19 nt, Homo sapiens
  misc_RNA (1)...(19): siRNA sense strand
gaacauagacacgcuggaa

SEQ ID NO: 358628 - RNA, 19 nt, Homo sapiens
  misc_RNA (1)...(19): siRNA sense strand
gcacagauccucgaacaau

SEQ ID NO: 358629 - RNA, 19 nt, Homo sapiens
  misc_RNA (1)...(19): siRNA sense strand
ggauagguccauauacuuu

SEQ ID NO: 358630 - RNA, 19 nt, Homo sapiens
  misc_RNA (1)...(19): siRNA sense strand
uaacagacaugaacuaucc

SEQ ID NO: 358631 - RNA, 19 nt, Homo sapiens
  misc_RNA (1)...(19): siRNA sense strand
gaugacgucuuauccucua

SEQ ID NO: 358632 - RNA, 19 nt, Homo sapiens
  misc_RNA (1)...(19): siRNA sense strand
gauccucgaacaauucuua

SEQ ID NO: 358633 - RNA, 19 nt, Homo sapiens
  misc_RNA (1)...(19): siRNA sense strand
caagcgauguuugauauug

SEQ ID NO: 358634 - RNA, 19 nt, Homo sapiens
  misc_RNA (1)...(19): siRNA sense strand
gacaugaacuauccaucaa

SEQ ID NO: 358635 - RNA, 19 nt, Homo sapiens
  misc_RNA (1)...(19): siRNA sense strand
gaacuucaccaccagauuc

SEQ ID NO: 358636 - RNA, 19 nt, Homo sapiens
  misc_RNA (1)...(19): siRNA sense strand
cuaggaauguugaaaguau

SEQ ID NO: 358637 - RNA, 19 nt, Homo sapiens
  misc_RNA (1)...(19): siRNA sense strand
ugacaaagaugaaguugac

SEQ ID NO: 358638 - RNA, 19 nt, Homo sapiens
  misc_RNA (1)...(19): siRNA sense strand
ggcaauuaaugaagcuaua

SEQ ID NO: 358639 - RNA, 19 nt, Homo sapiens
  misc_RNA (1)...(19): siRNA sense strand
agaaaaugcuggccuaaua

SEQ ID NO: 358640 - RNA, 19 nt, Homo sapiens
  misc_RNA (1)...(19): siRNA sense strand
ccacaccucuucauguuuc

SEQ ID NO: 358641 - RNA, 19 nt, Homo sapiens
  misc_RNA (1)...(19): siRNA sense strand
gucaagggaugguauuuau

SEQ ID NO: 358642 - RNA, 19 nt, Homo sapiens
  misc_RNA (1)...(19): siRNA sense strand
ucagcaacaucuuaugauu

SEQ ID NO: 358643 - RNA, 19 nt, Homo sapiens
  misc_RNA (1)...(19): siRNA sense strand
ccacggauagguccauaua

SEQ ID NO: 358644 - RNA, 19 nt, Homo sapiens
  misc_RNA (1)...(19): siRNA sense strand
ggauagagccucacaugca

SEQ ID NO: 358645 - RNA, 19 nt, Homo sapiens
  misc_RNA (1)...(19): siRNA sense strand
gaucaagaggcaauuaaug

SEQ ID NO: 358646 - RNA, 19 nt, Homo sapiens
  misc_RNA (1)...(19): siRNA sense strand
ggucaagggaugguauuua

SEQ ID NO: 358647 - RNA, 19 nt, Homo sapiens
  misc_RNA (1)...(19): siRNA sense strand
uguggcagauuguuauuaa

SEQ ID NO: 358648 - RNA, 19 nt, Homo sapiens
  misc_RNA (1)...(19): siRNA sense strand
caacuauacccagaacaua

SEQ ID NO: 358649 - RNA, 19 nt, Homo sapiens
  misc_RNA (1)...(19): siRNA sense strand
auacaaaguugacugugaa

SEQ ID NO: 358650 - RNA, 19 nt, Homo sapiens
  misc_RNA (1)...(19): siRNA sense strand
caccugaguuggaugauau

SEQ ID NO: 358651 - RNA, 19 nt, Homo sapiens
  misc_RNA (1)...(19): siRNA sense strand
cagcuaagaguaaugauga

SEQ ID NO: 358652 - RNA, 19 nt, Homo sapiens
  misc_RNA (1)...(19): siRNA sense strand
gaagugccucagauauuaa

SEQ ID NO: 358653 - RNA, 19 nt, Homo sapiens
  misc_RNA (1)...(19): siRNA sense strand
auagagccaugaaguauga

SEQ ID NO: 358654 - RNA, 19 nt, Homo sapiens
  misc_RNA (1)...(19): siRNA sense strand
caugaaguaugacaaagau

SEQ ID NO: 358655 - RNA, 19 nt, Homo sapiens
  misc_RNA (1)...(19): siRNA sense strand
guugaccuccucauuguua

SEQ ID NO: 358656 - RNA, 19 nt, Homo sapiens
  misc_RNA (1)...(19): siRNA sense strand
aauugaagaugcugugaaa

SEQ ID NO: 358657 - RNA, 19 nt, Homo sapiens
  misc_RNA (1)...(19): siRNA sense strand
ggaaguaacagacaugaac

SEQ ID NO: 358658 - RNA, 19 nt, Homo sapiens
  misc_RNA (1)...(19): siRNA sense strand
ccauggcgcugagguauau

SEQ ID NO: 358659 - RNA, 19 nt, Homo sapiens
  misc_RNA (1)...(19): siRNA sense strand
ucuguucggugaugaaauu

SEQ ID NO: 358660 - RNA, 19 nt, Homo sapiens
  misc_RNA (1)...(19): siRNA sense strand
aauacaaaguugacuguga

SEQ ID NO: 358661 - RNA, 19 nt, Homo sapiens
  misc_RNA (1)...(19): siRNA sense strand
aaagauuuauugccggaaa

SEQ ID NO: 358662 - RNA, 19 nt, Homo sapiens
  misc_RNA (1)...(19): siRNA sense strand
uacaauggcuuagaagaug

SEQ ID NO: 358663 - RNA, 19 nt, Homo sapiens
  misc_RNA (1)...(19): siRNA sense strand
cuaauagaguggcaaagga

SEQ ID NO: 358664 - RNA, 19 nt, Homo sapiens
  misc_RNA (1)...(19): siRNA sense strand
ccagaacaguuucauagag

SEQ ID NO: 358665 - RNA, 19 nt, Homo sapiens
  misc_RNA (1)...(19): siRNA sense strand
ccaccugaguuggaugaua

SEQ ID NO: 358666 - RNA, 19 nt, Homo sapiens
  misc_RNA (1)...(19): siRNA sense strand
ugaguuggaugauaugaca

SEQ ID NO: 358667 - RNA, 19 nt, Homo sapiens
  misc_RNA (1)...(19): siRNA sense strand
gaaguaugacaaagaugaa

SEQ ID NO: 358668 - RNA, 19 nt, Homo sapiens
  misc_RNA (1)...(19): siRNA sense strand
ugaaguaugacaaagauga

SEQ ID NO: 358669 - RNA, 19 nt, Homo sapiens
  misc_RNA (1)...(19): siRNA sense strand
ucagguaguuccucgaugu

SEQ ID NO: 358670 - RNA, 19 nt, Homo sapiens
  misc_RNA (1)...(19): siRNA sense strand
gaaaacuacuucgcaacua

SEQ ID NO: 358671 - RNA, 19 nt, Homo sapiens
  misc_RNA (1)...(19): siRNA sense strand
aauauauccuggacaauuc

SEQ ID NO: 358672 - RNA, 19 nt, Homo sapiens
  misc_RNA (1)...(19): siRNA sense strand
agacucaaguucaccagaa

SEQ ID NO: 358673 - RNA, 19 nt, Homo sapiens
  misc_RNA (1)...(19): siRNA sense strand
ggucuucccucaaaguaag

SEQ ID NO: 358674 - RNA, 19 nt, Homo sapiens
  misc_RNA (1)...(19): siRNA sense strand
gcuguagacuucccagauc

SEQ ID NO: 358675 - RNA, 19 nt, Homo sapiens
  misc_RNA (1)...(19): siRNA sense strand
gaagcuauaucugugaaac

SEQ ID NO: 358676 - RNA, 19 nt, Homo sapiens
  misc_RNA (1)...(19): siRNA sense strand
gaugaucaagaggcaauua

SEQ ID NO: 358677 - RNA, 19 nt, Homo sapiens
  misc_RNA (1)...(19): siRNA sense strand
gaagaugagccugauguuc

SEQ ID NO: 358678 - RNA, 19 nt, Homo sapiens
  misc_RNA (1)...(19): siRNA sense strand
gaguccaaguuuagaagaa

SEQ ID NO: 358679 - RNA, 19 nt, Homo sapiens
  misc_RNA (1)...(19): siRNA sense strand
gaaaguauugcugaacaga

SEQ ID NO: 358680 - RNA, 19 nt, Homo sapiens
  misc_RNA (1)...(19): siRNA sense strand
guaccgagauaaccuucug

SEQ ID NO: 358681 - RNA, 19 nt, Homo sapiens
  misc_RNA (1)...(19): siRNA sense strand
ugagguauauucagacucu

SEQ ID NO: 358682 - RNA, 19 nt, Homo sapiens
  misc_RNA (1)...(19): siRNA sense strand
ccaccagauucuucaguga

SEQ ID NO: 358683 - RNA, 19 nt, Homo sapiens
  misc_RNA (1)...(19): siRNA sense strand
gaagcuguacgaggagaua

SEQ ID NO: 358684 - RNA, 19 nt, Homo sapiens
  misc_RNA (1)...(19): siRNA sense strand
gcaucuugccugauuugua

SEQ ID NO: 358685 - RNA, 19 nt, Homo sapiens
  misc_RNA (1)...(19): siRNA sense strand
cacagauccucgaacaauu

SEQ ID NO: 358686 - RNA, 19 nt, Homo sapiens
  misc_RNA (1)...(19): siRNA sense strand
cauggaggaugaaagugaa

SEQ ID NO: 358687 - RNA, 19 nt, Homo sapiens
  misc_RNA (1)...(19): siRNA sense strand
ccaagcagcuaagaguaau

SEQ ID NO: 358688 - RNA, 19 nt, Homo sapiens
  misc_RNA (1)...(19): siRNA sense strand
gcaacuauacccagaacau

SEQ ID NO: 358689 - RNA, 19 nt, Homo sapiens
  misc_RNA (1)...(19): siRNA sense strand
caaguuugcaaaggaaaua

SEQ ID NO: 358690 - RNA, 19 nt, Homo sapiens
  misc_RNA (1)...(19): siRNA sense strand
aacagcaucuugccugauu

SEQ ID NO: 358691 - RNA, 19 nt, Homo sapiens
  misc_RNA (1)...(19): siRNA sense strand
gagcuggauuugggacuga

SEQ ID NO: 358692 - RNA, 19 nt, Homo sapiens
  misc_RNA (1)...(19): siRNA sense strand
gaccaagcagcuaagagua

SEQ ID NO: 358693 - RNA, 19 nt, Homo sapiens
  misc_RNA (1)...(19): siRNA sense strand
gacucaaguucaccagaaa

SEQ ID NO: 358694 - RNA, 19 nt, Homo sapiens
  misc_RNA (1)...(19): siRNA sense strand
gugccucagauauuaauua

SEQ ID NO: 358695 - RNA, 19 nt, Homo sapiens
  misc_RNA (1)...(19): siRNA sense strand
aaacuacuucgcaacuaua

SEQ ID NO: 358696 - RNA, 19 nt, Homo sapiens
  misc_RNA (1)...(19): siRNA sense strand
gccaccaaaucguuacauu

SEQ ID NO: 358697 - RNA, 19 nt, Homo sapiens
  misc_RNA (1)...(19): siRNA sense strand
uauugggucuucccucaaa

SEQ ID NO: 358698 - RNA, 19 nt, Homo sapiens
  misc_RNA (1)...(19): siRNA sense strand
gaaaagauccaagaccauu

SEQ ID NO: 358699 - RNA, 19 nt, Homo sapiens
  misc_RNA (1)...(19): siRNA sense strand
agaauucuacaauggcuua

SEQ ID NO: 358700 - RNA, 19 nt, Homo sapiens
  misc_RNA (1)...(19): siRNA sense strand
guucagcaacaucuuauga

SEQ ID NO: 358701 - RNA, 19 nt, Homo sapiens
  misc_RNA (1)...(19): siRNA sense strand
caaaguaagaccaguagca

SEQ ID NO: 358702 - RNA, 19 nt, Homo sapiens
  misc_RNA (1)...(19): siRNA sense strand
gaaccgcuugcuaucauga

SEQ ID NO: 358703 - RNA, 19 nt, Homo sapiens
  misc_RNA (1)...(19): siRNA sense strand
auaauucagugucaugguu

SEQ ID NO: 358704 - RNA, 19 nt, Homo sapiens
  misc_RNA (1)...(19): siRNA sense strand
uugaagaugcugugaaauu

SEQ ID NO: 358705 - RNA, 19 nt, Homo sapiens
  misc_RNA (1)...(19): siRNA sense strand
ugaacuauccaucaaacaa

SEQ ID NO: 358706 - RNA, 19 nt, Homo sapiens
  misc_RNA (1)...(19): siRNA sense strand
ucaagaggcaauuaaugaa

SEQ ID NO: 358707 - RNA, 19 nt, Homo sapiens
  misc_RNA (1)...(19): siRNA sense strand
ggaggaugaaagugaaauu

SEQ ID NO: 358708 - RNA, 19 nt, Homo sapiens
  misc_RNA (1)...(19): siRNA sense strand
ucagugucaugguuccuuu

SEQ ID NO: 358709 - RNA, 19 nt, Homo sapiens
  misc_RNA (1)...(19): siRNA sense strand
aagaacccauggaggauga

SEQ ID NO: 358710 - RNA, 19 nt, Homo sapiens
  misc_RNA (1)...(19): siRNA sense strand
ugauuuagaugugucugaa

SEQ ID NO: 358711 - RNA, 19 nt, Homo sapiens
  misc_RNA (1)...(19): siRNA sense strand
cagcaacaucuuaugauug

SEQ ID NO: 358712 - RNA, 19 nt, Homo sapiens
  misc_RNA (1)...(19): siRNA sense strand
caacgucacucacuacuuu

SEQ ID NO: 358713 - RNA, 19 nt, Homo sapiens
  misc_RNA (1)...(19): siRNA sense strand
gaacucccauucuucuuuc

SEQ ID NO: 358714 - RNA, 19 nt, Homo sapiens
  misc_RNA (1)...(19): siRNA sense strand
ggaguggccuguacagcaa

SEQ ID NO: 358715 - RNA, 19 nt, Homo sapiens
  misc_RNA (1)...(19): siRNA sense strand
gaacaucgaugggcuugag

SEQ ID NO: 358716 - RNA, 19 nt, Homo sapiens
  misc_RNA (1)...(19): siRNA sense strand
acagcaaccuccagcagua

SEQ ID NO: 358717 - RNA, 19 nt, Homo sapiens
  misc_RNA (1)...(19): siRNA sense strand
ggcagcagcucccaguuuc

SEQ ID NO: 358718 - RNA, 19 nt, Homo sapiens
  misc_RNA (1)...(19): siRNA sense strand
gggcagcagcucccaguuu

SEQ ID NO: 358719 - RNA, 19 nt, Homo sapiens
  misc_RNA (1)...(19): siRNA sense strand
gcuguacccuggaaacuac

SEQ ID NO: 358720 - RNA, 19 nt, Homo sapiens
  misc_RNA (1)...(19): siRNA sense strand
ugaacucccauucuucuuu

SEQ ID NO: 358721 - RNA, 19 nt, Homo sapiens
  misc_RNA (1)...(19): siRNA sense strand
gaaacugggaagcuugaug

SEQ ID NO: 358722 - RNA, 19 nt, Homo sapiens
  misc_RNA (1)...(19): siRNA sense strand
gcgggaaacugggaagcuu

SEQ ID NO: 358723 - RNA, 19 nt, Homo sapiens
  misc_RNA (1)...(19): siRNA sense strand
ccaguggcauuccagacuu

SEQ ID NO: 358724 - RNA, 19 nt, Homo sapiens
  misc_RNA (1)...(19): siRNA sense strand
ucgaugggcuugagagagu

SEQ ID NO: 358725 - RNA, 19 nt, Homo sapiens
  misc_RNA (1)...(19): siRNA sense strand
ugaagcucauggaaccuuu

SEQ ID NO: 358726 - RNA, 19 nt, Homo sapiens
  misc_RNA (1)...(19): siRNA sense strand
gaaacuacaagcccaacgu

SEQ ID NO: 358727 - RNA, 19 nt, Homo sapiens
  misc_RNA (1)...(19): siRNA sense strand
gcccgacauuguguucuuu

SEQ ID NO: 358728 - RNA, 19 nt, Homo sapiens
  misc_RNA (1)...(19): siRNA sense strand
gaaguggaggcagcaguga

SEQ ID NO: 358729 - RNA, 19 nt, Homo sapiens
  misc_RNA (1)...(19): siRNA sense strand
gggaaacugggaagcuuga

SEQ ID NO: 358730 - RNA, 19 nt, Homo sapiens
  misc_RNA (1)...(19): siRNA sense strand
cauucgggcugacgugaug

SEQ ID NO: 358731 - RNA, 19 nt, Homo sapiens
  misc_RNA (1)...(19): siRNA sense strand
uugauggaccagacaaaua

SEQ ID NO: 358732 - RNA, 19 nt, Homo sapiens
  misc_RNA (1)...(19): siRNA sense strand
cagcacacccaguggcauu

SEQ ID NO: 358733 - RNA, 19 nt, Homo sapiens
  misc_RNA (1)...(19): siRNA sense strand
ugauggaccagacaaauag

SEQ ID NO: 358734 - RNA, 19 nt, Homo sapiens
  misc_RNA (1)...(19): siRNA sense strand
gggcuggacagaagagaug

SEQ ID NO: 358735 - RNA, 19 nt, Homo sapiens
  misc_RNA (1)...(19): siRNA sense strand
gugggugcuucaaguguug

SEQ ID NO: 358736 - RNA, 19 nt, Homo sapiens
  misc_RNA (1)...(19): siRNA sense strand
gcucaucaaccgggacuug

SEQ ID NO: 358737 - RNA, 19 nt, Homo sapiens
  misc_RNA (1)...(19): siRNA sense strand
gaagcccgacauuguguuc

SEQ ID NO: 358738 - RNA, 19 nt, Homo sapiens
  misc_RNA (1)...(19): siRNA sense strand
cccuggagguggagccuuu

SEQ ID NO: 358739 - RNA, 19 nt, Homo sapiens
  misc_RNA (1)...(19): siRNA sense strand
gaagcucauggaaccuuug

SEQ ID NO: 358740 - RNA, 19 nt, Homo sapiens
  misc_RNA (1)...(19): siRNA sense strand
ugugggugcuucaaguguu

SEQ ID NO: 358741 - RNA, 19 nt, Homo sapiens
  misc_RNA (1)...(19): siRNA sense strand
gcucccaguuucuucuuuu

SEQ ID NO: 358742 - RNA, 19 nt, Homo sapiens
  misc_RNA (1)...(19): siRNA sense strand
cagcagcucccaguuucuu

SEQ ID NO: 358743 - RNA, 19 nt, Homo sapiens
  misc_RNA (1)...(19): siRNA sense strand
aaggagcuguacccuggaa

SEQ ID NO: 358744 - RNA, 19 nt, Homo sapiens
  misc_RNA (1)...(19): siRNA sense strand
cugcacagucugccaaaga

SEQ ID NO: 358745 - RNA, 19 nt, Homo sapiens
  misc_RNA (1)...(19): siRNA sense strand
gaucauccuugcagguaua

SEQ ID NO: 358746 - RNA, 19 nt, Homo sapiens
  misc_RNA (1)...(19): siRNA sense strand
gcaggaaucuccaccgaau

SEQ ID NO: 358747 - RNA, 19 nt, Homo sapiens
  misc_RNA (1)...(19): siRNA sense strand
gaaagccuccauuggguua

SEQ ID NO: 358748 - RNA, 19 nt, Homo sapiens
  misc_RNA (1)...(19): siRNA sense strand
gaaacugaauucucguugu

SEQ ID NO: 358749 - RNA, 19 nt, Homo sapiens
  misc_RNA (1)...(19): siRNA sense strand
gagaagaagcucccgauug

SEQ ID NO: 358750 - RNA, 19 nt, Homo sapiens
  misc_RNA (1)...(19): siRNA sense strand
ucggaaagcuguacugguu

SEQ ID NO: 358751 - RNA, 19 nt, Homo sapiens
  misc_RNA (1)...(19): siRNA sense strand
gcaagagcguuuccaaguc

SEQ ID NO: 358752 - RNA, 19 nt, Homo sapiens
  misc_RNA (1)...(19): siRNA sense strand
gcacaagcguguaaaagaa

SEQ ID NO: 358753 - RNA, 19 nt, Homo sapiens
  misc_RNA (1)...(19): siRNA sense strand
gagaguugcugccuuugau

SEQ ID NO: 358754 - RNA, 19 nt, Homo sapiens
  misc_RNA (1)...(19): siRNA sense strand
guggagaguugcugccuuu

SEQ ID NO: 358755 - RNA, 19 nt, Homo sapiens
  misc_RNA (1)...(19): siRNA sense strand
aagaugagcuuugcguuga

SEQ ID NO: 358756 - RNA, 19 nt, Homo sapiens
  misc_RNA (1)...(19): siRNA sense strand
agaagaagcucccgauugc

SEQ ID NO: 358757 - RNA, 19 nt, Homo sapiens
  misc_RNA (1)...(19): siRNA sense strand
gaagcucccgauugcaaua

SEQ ID NO: 358758 - RNA, 19 nt, Homo sapiens
  misc_RNA (1)...(19): siRNA sense strand
aaacugaauucucguugug

SEQ ID NO: 358759 - RNA, 19 nt, Homo sapiens
  misc_RNA (1)...(19): siRNA sense strand
ugagaaggucaaagaguua

SEQ ID NO: 358760 - RNA, 19 nt, Homo sapiens
  misc_RNA (1)...(19): siRNA sense strand
cugagaaggucaaagaguu

SEQ ID NO: 358761 - RNA, 19 nt, Homo sapiens
  misc_RNA (1)...(19): siRNA sense strand
ugacuuggcgugucugaaa

SEQ ID NO: 358762 - RNA, 19 nt, Homo sapiens
  misc_RNA (1)...(19): siRNA sense strand
gagcaaguccggagcuuuc

SEQ ID NO: 358763 - RNA, 19 nt, Homo sapiens
  misc_RNA (1)...(19): siRNA sense strand
ggagaguugcugccuuuga

SEQ ID NO: 358764 - RNA, 19 nt, Homo sapiens
  misc_RNA (1)...(19): siRNA sense strand
guacugggcgagaaacuuc

SEQ ID NO: 358765 - RNA, 19 nt, Homo sapiens
  misc_RNA (1)...(19): siRNA sense strand
gggagaaacucggaaagcu

SEQ ID NO: 358766 - RNA, 19 nt, Homo sapiens
  misc_RNA (1)...(19): siRNA sense strand
gcagguauacucugguuac

SEQ ID NO: 358767 - RNA, 19 nt, Homo sapiens
  misc_RNA (1)...(19): siRNA sense strand
caucacccuuuccaagaga

SEQ ID NO: 358768 - RNA, 19 nt, Homo sapiens
  misc_RNA (1)...(19): siRNA sense strand
uggcgugucugaaacugaa

SEQ ID NO: 358769 - RNA, 19 nt, Homo sapiens
  misc_RNA (1)...(19): siRNA sense strand
caauguggaggccaucuga

SEQ ID NO: 358770 - RNA, 19 nt, Homo sapiens
  misc_RNA (1)...(19): siRNA sense strand
auacucugguuacagguuu

SEQ ID NO: 358771 - RNA, 19 nt, Homo sapiens
  misc_RNA (1)...(19): siRNA sense strand
ggagcaaguccggagcuuu

SEQ ID NO: 358772 - RNA, 19 nt, Homo sapiens
  misc_RNA (1)...(19): siRNA sense strand
gcucgaaagccuccauugg

SEQ ID NO: 358773 - RNA, 19 nt, Homo sapiens
  misc_RNA (1)...(19): siRNA sense strand
aagaagcucccgauugcaa

SEQ ID NO: 358774 - RNA, 19 nt, Homo sapiens
  misc_RNA (1)...(19): siRNA sense strand
cccaaaauguggaugcuuu

SEQ ID NO: 358775 - RNA, 19 nt, Homo sapiens
  misc_RNA (1)...(19): siRNA sense strand
gauggugacgucuuucucu

SEQ ID NO: 358776 - RNA, 19 nt, Homo sapiens
  misc_RNA (1)...(19): siRNA sense strand
ccagacuacaggucagaaa

SEQ ID NO: 358777 - RNA, 19 nt, Homo sapiens
  misc_RNA (1)...(19): siRNA sense strand
agaagccgacucccucuug

SEQ ID NO: 358778 - RNA, 19 nt, Homo sapiens
  misc_RNA (1)...(19): siRNA sense strand
gaguuacagcgcuucauca

SEQ ID NO: 358779 - RNA, 19 nt, Homo sapiens
  misc_RNA (1)...(19): siRNA sense strand
cgauugcaauacugaacau

SEQ ID NO: 358780 - RNA, 19 nt, Homo sapiens
  misc_RNA (1)...(19): siRNA sense strand
cagcgguacugggcgagaa

SEQ ID NO: 358781 - RNA, 19 nt, Homo sapiens
  misc_RNA (1)...(19): siRNA sense strand
ucaucacccuuuccaagag

SEQ ID NO: 358782 - RNA, 19 nt, Homo sapiens
  misc_RNA (1)...(19): siRNA sense strand
ccacacggucggaugacuu

SEQ ID NO: 358783 - RNA, 19 nt, Homo sapiens
  misc_RNA (1)...(19): siRNA sense strand
gucccaaccugcguucaau

SEQ ID NO: 358784 - RNA, 19 nt, Homo sapiens
  misc_RNA (1)...(19): siRNA sense strand
ggucccaaccugcguucaa

SEQ ID NO: 358785 - RNA, 19 nt, Homo sapiens
  misc_RNA (1)...(19): siRNA sense strand
ugcaagagcguuuccaagu

SEQ ID NO: 358786 - RNA, 19 nt, Homo sapiens
  misc_RNA (1)...(19): siRNA sense strand
aagagacuccuugugauga

SEQ ID NO: 358787 - RNA, 19 nt, Homo sapiens
  misc_RNA (1)...(19): siRNA sense strand
cauccagcauggugauuuu

SEQ ID NO: 358788 - RNA, 19 nt, Homo sapiens
  misc_RNA (1)...(19): siRNA sense strand
gaguugcugccuuugauag

SEQ ID NO: 358789 - RNA, 19 nt, Homo sapiens
  misc_RNA (1)...(19): siRNA sense strand
cggaugacuuggcgugucu

SEQ ID NO: 358790 - RNA, 19 nt, Homo sapiens
  misc_RNA (1)...(19): siRNA sense strand
uugcagguauacucugguu

SEQ ID NO: 358791 - RNA, 19 nt, Homo sapiens
  misc_RNA (1)...(19): siRNA sense strand
gagcuuugcguugacuuuc

SEQ ID NO: 358792 - RNA, 19 nt, Homo sapiens
  misc_RNA (1)...(19): siRNA sense strand
ggaaaugcgugcccaagua

SEQ ID NO: 358793 - RNA, 19 nt, Homo sapiens
  misc_RNA (1)...(19): siRNA sense strand
gagaagagcugggaucaaa

SEQ ID NO: 358794 - RNA, 19 nt, Homo sapiens
  misc_RNA (1)...(19): siRNA sense strand
gauaagaggucgaaacuuc

SEQ ID NO: 358795 - RNA, 19 nt, Homo sapiens
  misc_RNA (1)...(19): siRNA sense strand
gaagagaaacuuagagaaa

SEQ ID NO: 358796 - RNA, 19 nt, Homo sapiens
  misc_RNA (1)...(19): siRNA sense strand
ggucgaaacuucagagaaa

SEQ ID NO: 358797 - RNA, 19 nt, Homo sapiens
  misc_RNA (1)...(19): siRNA sense strand
gaauaaagaccaacagauu

SEQ ID NO: 358798 - RNA, 19 nt, Homo sapiens
  misc_RNA (1)...(19): siRNA sense strand
gaagauuccuccuuguauu

SEQ ID NO: 358799 - RNA, 19 nt, Homo sapiens
  misc_RNA (1)...(19): siRNA sense strand
gcaaaggguuauacaauuc

SEQ ID NO: 358800 - RNA, 19 nt, Homo sapiens
  misc_RNA (1)...(19): siRNA sense strand
caaauacacugaccugguu

SEQ ID NO: 358801 - RNA, 19 nt, Homo sapiens
  misc_RNA (1)...(19): siRNA sense strand
caaaggagguuaugaaugc

SEQ ID NO: 358802 - RNA, 19 nt, Homo sapiens
  misc_RNA (1)...(19): siRNA sense strand
gcaaaggcccgaugaagaa

SEQ ID NO: 358803 - RNA, 19 nt, Homo sapiens
  misc_RNA (1)...(19): siRNA sense strand
ggauaucagugaaguuauu

SEQ ID NO: 358804 - RNA, 19 nt, Homo sapiens
  misc_RNA (1)...(19): siRNA sense strand
caacaagaguggaagauuc

SEQ ID NO: 358805 - RNA, 19 nt, Homo sapiens
  misc_RNA (1)...(19): siRNA sense strand
ccuccaagguucaagauua

SEQ ID NO: 358806 - RNA, 19 nt, Homo sapiens
  misc_RNA (1)...(19): siRNA sense strand
aaagaugacuguaaaggaa

SEQ ID NO: 358807 - RNA, 19 nt, Homo sapiens
  misc_RNA (1)...(19): siRNA sense strand
gaagaggacuacagacagu

SEQ ID NO: 358808 - RNA, 19 nt, Homo sapiens
  misc_RNA (1)...(19): siRNA sense strand
ugaagaagcuauuaaagag

SEQ ID NO: 358809 - RNA, 19 nt, Homo sapiens
  misc_RNA (1)...(19): siRNA sense strand
caaaggcucuucaaccaau

SEQ ID NO: 358810 - RNA, 19 nt, Homo sapiens
  misc_RNA (1)...(19): siRNA sense strand
cuggauaccucgguuauua

SEQ ID NO: 358811 - RNA, 19 nt, Homo sapiens
  misc_RNA (1)...(19): siRNA sense strand
gaucaaaacucauguggaa

SEQ ID NO: 358812 - RNA, 19 nt, Homo sapiens
  misc_RNA (1)...(19): siRNA sense strand
gcagaagcccucuacauug

SEQ ID NO: 358813 - RNA, 19 nt, Homo sapiens
  misc_RNA (1)...(19): siRNA sense strand
acacugaccugguuccaaa

SEQ ID NO: 358814 - RNA, 19 nt, Homo sapiens
  misc_RNA (1)...(19): siRNA sense strand
gauauggcccagaguauuu

SEQ ID NO: 358815 - RNA, 19 nt, Homo sapiens
  misc_RNA (1)...(19): siRNA sense strand
gccgaaagaugacuguaaa

SEQ ID NO: 358816 - RNA, 19 nt, Homo sapiens
  misc_RNA (1)...(19): siRNA sense strand
ucgagcagcugacaaauug

SEQ ID NO: 358817 - RNA, 19 nt, Homo sapiens
  misc_RNA (1)...(19): siRNA sense strand
gaaagaugacuguaaagga

SEQ ID NO: 358818 - RNA, 19 nt, Homo sapiens
  misc_RNA (1)...(19): siRNA sense strand
cagcaugaccggaaucuuu

SEQ ID NO: 358819 - RNA, 19 nt, Homo sapiens
  misc_RNA (1)...(19): siRNA sense strand
caaggucauuuauagcaaa

SEQ ID NO: 358820 - RNA, 19 nt, Homo sapiens
  misc_RNA (1)...(19): siRNA sense strand
ggcagaagcccucuacauu

SEQ ID NO: 358821 - RNA, 19 nt, Homo sapiens
  misc_RNA (1)...(19): siRNA sense strand
caaaagacaaggucauuua

SEQ ID NO: 358822 - RNA, 19 nt, Homo sapiens
  misc_RNA (1)...(19): siRNA sense strand
guggagaagaugaaauuua

SEQ ID NO: 358823 - RNA, 19 nt, Homo sapiens
  misc_RNA (1)...(19): siRNA sense strand
cuacagacaguacacauaa

SEQ ID NO: 358824 - RNA, 19 nt, Homo sapiens
  misc_RNA (1)...(19): siRNA sense strand
gaugaaauccggcaugaca

SEQ ID NO: 358825 - RNA, 19 nt, Homo sapiens
  misc_RNA (1)...(19): siRNA sense strand
ggaagaagccaaacagcau

SEQ ID NO: 358826 - RNA, 19 nt, Homo sapiens
  misc_RNA (1)...(19): siRNA sense strand
ggacauguauggugaugac

SEQ ID NO: 358827 - RNA, 19 nt, Homo sapiens
  misc_RNA (1)...(19): siRNA sense strand
aagacaaggucauuuauag

SEQ ID NO: 358828 - RNA, 19 nt, Homo sapiens
  misc_RNA (1)...(19): siRNA sense strand
ccaaggaacacgagcauga

SEQ ID NO: 358829 - RNA, 19 nt, Homo sapiens
  misc_RNA (1)...(19): siRNA sense strand
gaaguucaguaugaccaaa

SEQ ID NO: 358830 - RNA, 19 nt, Homo sapiens
  misc_RNA (1)...(19): siRNA sense strand
gaacaacaagaguggaaga

SEQ ID NO: 358831 - RNA, 19 nt, Homo sapiens
  misc_RNA (1)...(19): siRNA sense strand
gcauucaacucuggagcua

SEQ ID NO: 358832 - RNA, 19 nt, Homo sapiens
  misc_RNA (1)...(19): siRNA sense strand
ugcaaaggguuauacaauu

SEQ ID NO: 358833 - RNA, 19 nt, Homo sapiens
  misc_RNA (1)...(19): siRNA sense strand
ggauaugggacgaaagaaa

SEQ ID NO: 358834 - RNA, 19 nt, Homo sapiens
  misc_RNA (1)...(19): siRNA sense strand
uuagagaaauggcccagaa

SEQ ID NO: 358835 - RNA, 19 nt, Homo sapiens
  misc_RNA (1)...(19): siRNA sense strand
ggagcuaaacagaggguua

SEQ ID NO: 358836 - RNA, 19 nt, Homo sapiens
  misc_RNA (1)...(19): siRNA sense strand
gaagaagcuauuaaagaga

SEQ ID NO: 358837 - RNA, 19 nt, Homo sapiens
  misc_RNA (1)...(19): siRNA sense strand
gacaagaguagccuuagaa

SEQ ID NO: 358838 - RNA, 19 nt, Homo sapiens
  misc_RNA (1)...(19): siRNA sense strand
gaaaagagagacagcauga

SEQ ID NO: 358839 - RNA, 19 nt, Homo sapiens
  misc_RNA (1)...(19): siRNA sense strand
ugaccuagaagccagaaua

SEQ ID NO: 358840 - RNA, 19 nt, Homo sapiens
  misc_RNA (1)...(19): siRNA sense strand
gagaggugguaaagauaug

SEQ ID NO: 358841 - RNA, 19 nt, Homo sapiens
  misc_RNA (1)...(19): siRNA sense strand
ggagaggugguaaagauau

SEQ ID NO: 358842 - RNA, 19 nt, Homo sapiens
  misc_RNA (1)...(19): siRNA sense strand
ccaagguucaagauuaaua

SEQ ID NO: 358843 - RNA, 19 nt, Homo sapiens
  misc_RNA (1)...(19): siRNA sense strand
guauggugaugaccuagaa

SEQ ID NO: 358844 - RNA, 19 nt, Homo sapiens
  misc_RNA (1)...(19): siRNA sense strand
agagaaacuuagagaaaug

SEQ ID NO: 358845 - RNA, 19 nt, Homo sapiens
  misc_RNA (1)...(19): siRNA sense strand
aaagauauggcccagagua

SEQ ID NO: 358846 - RNA, 19 nt, Homo sapiens
  misc_RNA (1)...(19): siRNA sense strand
gagaaggaccagugcaguu

SEQ ID NO: 358847 - RNA, 19 nt, Homo sapiens
  misc_RNA (1)...(19): siRNA sense strand
aaagacaagaguagccuua

SEQ ID NO: 358848 - RNA, 19 nt, Homo sapiens
  misc_RNA (1)...(19): siRNA sense strand
gcaagaagaggaggaagga

SEQ ID NO: 358849 - RNA, 19 nt, Homo sapiens
  misc_RNA (1)...(19): siRNA sense strand
gaccuagaagccagaauaa

SEQ ID NO: 358850 - RNA, 19 nt, Homo sapiens
  misc_RNA (1)...(19): siRNA sense strand
gauggaagaggacuacaga

SEQ ID NO: 358851 - RNA, 19 nt, Homo sapiens
  misc_RNA (1)...(19): siRNA sense strand
gaaaugcgugcccaaguag

SEQ ID NO: 358852 - RNA, 19 nt, Homo sapiens
  misc_RNA (1)...(19): siRNA sense strand
agacaguacacauaaauga

SEQ ID NO: 358853 - RNA, 19 nt, Homo sapiens
  misc_RNA (1)...(19): siRNA sense strand
agaagaggaggaaggaaua

SEQ ID NO: 358854 - RNA, 19 nt, Homo sapiens
  misc_RNA (1)...(19): siRNA sense strand
guauuuauaggcccaguaa

SEQ ID NO: 358855 - RNA, 19 nt, Homo sapiens
  misc_RNA (1)...(19): siRNA sense strand
cagaagcccucuacauugc

SEQ ID NO: 358856 - RNA, 19 nt, Homo sapiens
  misc_RNA (1)...(19): siRNA sense strand
cgaugaagaagcuauuaaa

SEQ ID NO: 358857 - RNA, 19 nt, Homo sapiens
  misc_RNA (1)...(19): siRNA sense strand
cgggauaucagugaaguua

SEQ ID NO: 358858 - RNA, 19 nt, Homo sapiens
  misc_RNA (1)...(19): siRNA sense strand
cuccaagguucaagauuaa

SEQ ID NO: 358859 - RNA, 19 nt, Homo sapiens
  misc_RNA (1)...(19): siRNA sense strand
ugguagaaaugcagaaaga

SEQ ID NO: 358860 - RNA, 19 nt, Homo sapiens
  misc_RNA (1)...(19): siRNA sense strand
agacaagaguagccuuaga

SEQ ID NO: 358861 - RNA, 19 nt, Homo sapiens
  misc_RNA (1)...(19): siRNA sense strand
ggaagauccuuuugguuug

SEQ ID NO: 358862 - RNA, 19 nt, Homo sapiens
  misc_RNA (1)...(19): siRNA sense strand
gagcaugaaggcaagaaga

SEQ ID NO: 358863 - RNA, 19 nt, Homo sapiens
  misc_RNA (1)...(19): siRNA sense strand
cuggagaggugguaaagau

SEQ ID NO: 358864 - RNA, 19 nt, Homo sapiens
  misc_RNA (1)...(19): siRNA sense strand
cauguauggugaugaccua

SEQ ID NO: 358865 - RNA, 19 nt, Homo sapiens
  misc_RNA (1)...(19): siRNA sense strand
gacaguacacauaaaugaa

SEQ ID NO: 358866 - RNA, 19 nt, Homo sapiens
  misc_RNA (1)...(19): siRNA sense strand
gaaggaccagugcaguuug

SEQ ID NO: 358867 - RNA, 19 nt, Homo sapiens
  misc_RNA (1)...(19): siRNA sense strand
cuagaagccagaauaaaga

SEQ ID NO: 358868 - RNA, 19 nt, Homo sapiens
  misc_RNA (1)...(19): siRNA sense strand
gacaaggucauuuauagca

SEQ ID NO: 358869 - RNA, 19 nt, Homo sapiens
  misc_RNA (1)...(19): siRNA sense strand
ucuccuagccgaaagauga

SEQ ID NO: 358870 - RNA, 19 nt, Homo sapiens
  misc_RNA (1)...(19): siRNA sense strand
guagaaaugcagaaagauc

SEQ ID NO: 358871 - RNA, 19 nt, Homo sapiens
  misc_RNA (1)...(19): siRNA sense strand
ccaaaggagguuaugaaug

SEQ ID NO: 358872 - RNA, 19 nt, Homo sapiens
  misc_RNA (1)...(19): siRNA sense strand
gaugaagaagcuauuaaag

SEQ ID NO: 358873 - RNA, 19 nt, Homo sapiens
  misc_RNA (1)...(19): siRNA sense strand
gagcugggaucaaaacuca

SEQ ID NO: 358874 - RNA, 19 nt, Homo sapiens
  misc_RNA (1)...(19): siRNA sense strand
gagcuaaacagaggguuau

SEQ ID NO: 358875 - RNA, 19 nt, Homo sapiens
  misc_RNA (1)...(19): siRNA sense strand
auucaacucuggagcuaaa

SEQ ID NO: 358876 - RNA, 19 nt, Homo sapiens
  misc_RNA (1)...(19): siRNA sense strand
ugcaauugcucgacaagga

SEQ ID NO: 358877 - RNA, 19 nt, Homo sapiens
  misc_RNA (1)...(19): siRNA sense strand
acagagaggccgagaagga

SEQ ID NO: 358878 - RNA, 19 nt, Homo sapiens
  misc_RNA (1)...(19): siRNA sense strand
auaaagaccaacagauuug

SEQ ID NO: 358879 - RNA, 19 nt, Homo sapiens
  misc_RNA (1)...(19): siRNA sense strand
ccuagaagccagaauaaag

SEQ ID NO: 358880 - RNA, 19 nt, Homo sapiens
  misc_RNA (1)...(19): siRNA sense strand
gagacagcaugaccggaau

SEQ ID NO: 358881 - RNA, 19 nt, Homo sapiens
  misc_RNA (1)...(19): siRNA sense strand
ggauaccucgguuauuaga

SEQ ID NO: 358882 - RNA, 19 nt, Homo sapiens
  misc_RNA (1)...(19): siRNA sense strand
ccagaaagccagggagaga

SEQ ID NO: 358883 - RNA, 19 nt, Homo sapiens
  misc_RNA (1)...(19): siRNA sense strand
gguuaugaaugcagaugau

SEQ ID NO: 358884 - RNA, 19 nt, Homo sapiens
  misc_RNA (1)...(19): siRNA sense strand
gggcagcuccugauaagag

SEQ ID NO: 358885 - RNA, 19 nt, Homo sapiens
  misc_RNA (1)...(19): siRNA sense strand
ggguauggacaguggauuu

SEQ ID NO: 358886 - RNA, 19 nt, Homo sapiens
  misc_RNA (1)...(19): siRNA sense strand
guaaaggaacaacaagagu

SEQ ID NO: 358887 - RNA, 19 nt, Homo sapiens
  misc_RNA (1)...(19): siRNA sense strand
agaaggaccagugcaguuu

SEQ ID NO: 358888 - RNA, 19 nt, Homo sapiens
  misc_RNA (1)...(19): siRNA sense strand
gagagaagagcugggauca

SEQ ID NO: 358889 - RNA, 19 nt, Homo sapiens
  misc_RNA (1)...(19): siRNA sense strand
ucgugaagcuguggaaaug

SEQ ID NO: 358890 - RNA, 19 nt, Homo sapiens
  misc_RNA (1)...(19): siRNA sense strand
acaaggucauuuauagcaa

SEQ ID NO: 358891 - RNA, 19 nt, Homo sapiens
  misc_RNA (1)...(19): siRNA sense strand
cagaauaaagaccaacaga

SEQ ID NO: 358892 - RNA, 19 nt, Homo sapiens
  misc_RNA (1)...(19): siRNA sense strand
gaaaugaaguguccuuugu

SEQ ID NO: 358893 - RNA, 19 nt, Homo sapiens
  misc_RNA (1)...(19): siRNA sense strand
ggucaacccuuggauuaua

SEQ ID NO: 358894 - RNA, 19 nt, Homo sapiens
  misc_RNA (1)...(19): siRNA sense strand
gaaaucaaauccuccaagu

SEQ ID NO: 358895 - RNA, 19 nt, Homo sapiens
  misc_RNA (1)...(19): siRNA sense strand
caaggaaccucagcugaaa

SEQ ID NO: 358896 - RNA, 19 nt, Homo sapiens
  misc_RNA (1)...(19): siRNA sense strand
gaaguguccuuuguuauuc

SEQ ID NO: 358897 - RNA, 19 nt, Homo sapiens
  misc_RNA (1)...(19): siRNA sense strand
aaugaaguguccuuuguua

SEQ ID NO: 358898 - RNA, 19 nt, Homo sapiens
  misc_RNA (1)...(19): siRNA sense strand
ggaauaaaguaaagauggu

SEQ ID NO: 358899 - RNA, 19 nt, Homo sapiens
  misc_RNA (1)...(19): siRNA sense strand
ggaagaggcgucccaggaa

SEQ ID NO: 358900 - RNA, 19 nt, Homo sapiens
  misc_RNA (1)...(19): siRNA sense strand
gcagaccacggacuucuuu

SEQ ID NO: 358901 - RNA, 19 nt, Homo sapiens
  misc_RNA (1)...(19): siRNA sense strand
ugaaguguccuuuguuauu

SEQ ID NO: 358902 - RNA, 19 nt, Homo sapiens
  misc_RNA (1)...(19): siRNA sense strand
guggucaacccuuggauua

SEQ ID NO: 358903 - RNA, 19 nt, Homo sapiens
  misc_RNA (1)...(19): siRNA sense strand
ggagcuggccuaucaggaa

SEQ ID NO: 358904 - RNA, 19 nt, Homo sapiens
  misc_RNA (1)...(19): siRNA sense strand
guucaaaugccuccucuga

SEQ ID NO: 358905 - RNA, 19 nt, Homo sapiens
  misc_RNA (1)...(19): siRNA sense strand
caggaagccauguucaaua

SEQ ID NO: 358906 - RNA, 19 nt, Homo sapiens
  misc_RNA (1)...(19): siRNA sense strand
aggaagccauguucaauau

SEQ ID NO: 358907 - RNA, 19 nt, Homo sapiens
  misc_RNA (1)...(19): siRNA sense strand
gucaacccuuggauuauaa

SEQ ID NO: 358908 - RNA, 19 nt, Homo sapiens
  misc_RNA (1)...(19): siRNA sense strand
caaggccaguggacgguuu

SEQ ID NO: 358909 - RNA, 19 nt, Homo sapiens
  misc_RNA (1)...(19): siRNA sense strand
caauauggcuacccucaac

SEQ ID NO: 358910 - RNA, 19 nt, Homo sapiens
  misc_RNA (1)...(19): siRNA sense strand
gcccaccaauggcuggaua

SEQ ID NO: 358911 - RNA, 19 nt, Homo sapiens
  misc_RNA (1)...(19): siRNA sense strand
ugacaagccgcgaguuauu

SEQ ID NO: 358912 - RNA, 19 nt, Homo sapiens
  misc_RNA (1)...(19): siRNA sense strand
ugauuugucugccaagaga

SEQ ID NO: 358913 - RNA, 19 nt, Homo sapiens
  misc_RNA (1)...(19): siRNA sense strand
uaacgccacucauggucaa

SEQ ID NO: 358914 - RNA, 19 nt, Homo sapiens
  misc_RNA (1)...(19): siRNA sense strand
ucaaggaaccucagcugaa

SEQ ID NO: 358915 - RNA, 19 nt, Homo sapiens
  misc_RNA (1)...(19): siRNA sense strand
ggccggagcuucucgaacu

SEQ ID NO: 358916 - RNA, 19 nt, Homo sapiens
  misc_RNA (1)...(19): siRNA sense strand
caacaaagaaaugaagugu

SEQ ID NO: 358917 - RNA, 19 nt, Homo sapiens
  misc_RNA (1)...(19): siRNA sense strand
gugccaacgugcugaguga

SEQ ID NO: 358918 - RNA, 19 nt, Homo sapiens
  misc_RNA (1)...(19): siRNA sense strand
uagaagaucccuacaugau

SEQ ID NO: 358919 - RNA, 19 nt, Homo sapiens
  misc_RNA (1)...(19): siRNA sense strand
ggaugcggcugaggaagga

SEQ ID NO: 358920 - RNA, 19 nt, Homo sapiens
  misc_RNA (1)...(19): siRNA sense strand
guaguaugccaaccaaaug

SEQ ID NO: 358921 - RNA, 19 nt, Homo sapiens
  misc_RNA (1)...(19): siRNA sense strand
guacggagagggucaccaa

SEQ ID NO: 358922 - RNA, 19 nt, Homo sapiens
  misc_RNA (1)...(19): siRNA sense strand
uaucacaggcuuuggcauu

SEQ ID NO: 358923 - RNA, 19 nt, Homo sapiens
  misc_RNA (1)...(19): siRNA sense strand
aaucaaauccuccaaguac

SEQ ID NO: 358924 - RNA, 19 nt, Homo sapiens
  misc_RNA (1)...(19): siRNA sense strand
gaguaugagugaggaggaa

SEQ ID NO: 358925 - RNA, 19 nt, Homo sapiens
  misc_RNA (1)...(19): siRNA sense strand
aaagguaacgccacucaug

SEQ ID NO: 358926 - RNA, 19 nt, Homo sapiens
  misc_RNA (1)...(19): siRNA sense strand
gaaggagggacggcaguga

SEQ ID NO: 358927 - RNA, 19 nt, Homo sapiens
  misc_RNA (1)...(19): siRNA sense strand
agguggagcuggccuauca

SEQ ID NO: 358928 - RNA, 19 nt, Homo sapiens
  misc_RNA (1)...(19): siRNA sense strand
gacaagccgcgaguuauug

SEQ ID NO: 358929 - RNA, 19 nt, Homo sapiens
  misc_RNA (1)...(19): siRNA sense strand
gcagugaccggugggcaaa

SEQ ID NO: 358930 - RNA, 19 nt, Homo sapiens
  misc_RNA (1)...(19): siRNA sense strand
gcaaaacaacaaagaaaug

SEQ ID NO: 358931 - RNA, 19 nt, Homo sapiens
  misc_RNA (1)...(19): siRNA sense strand
ggaguugccacuguaguau

SEQ ID NO: 358932 - RNA, 19 nt, Homo sapiens
  misc_RNA (1)...(19): siRNA sense strand
ggaggaacgcgaaaaggua

SEQ ID NO: 358933 - RNA, 19 nt, Homo sapiens
  misc_RNA (1)...(19): siRNA sense strand
gcuccugacaguucaaaug

SEQ ID NO: 358934 - RNA, 19 nt, Homo sapiens
  misc_RNA (1)...(19): siRNA sense strand
guggaucguuggcauugug

SEQ ID NO: 358935 - RNA, 19 nt, Homo sapiens
  misc_RNA (1)...(19): siRNA sense strand
gcccaugcggccacagaua

SEQ ID NO: 358936 - RNA, 19 nt, Homo sapiens
  misc_RNA (1)...(19): siRNA sense strand
aaaucaaauccuccaagua

SEQ ID NO: 358937 - RNA, 19 nt, Homo sapiens
  misc_RNA (1)...(19): siRNA sense strand
gccggagcuucucgaacua

SEQ ID NO: 358938 - RNA, 19 nt, Homo sapiens
  misc_RNA (1)...(19): siRNA sense strand
gaucguuggcauuguggaa

SEQ ID NO: 358939 - RNA, 19 nt, Homo sapiens
  misc_RNA (1)...(19): siRNA sense strand
gaacaggcggcucgcuuuu

SEQ ID NO: 358940 - RNA, 19 nt, Homo sapiens
  misc_RNA (1)...(19): siRNA sense strand
agaaaugaaguguccuuug

SEQ ID NO: 358941 - RNA, 19 nt, Homo sapiens
  misc_RNA (1)...(19): siRNA sense strand
cacaggcuuuggcauucua

SEQ ID NO: 358942 - RNA, 19 nt, Homo sapiens
  misc_RNA (1)...(19): siRNA sense strand
gaaaagguaacgccacuca

SEQ ID NO: 358943 - RNA, 19 nt, Homo sapiens
  misc_RNA (1)...(19): siRNA sense strand
uggaguugccacuguagua

SEQ ID NO: 358944 - RNA, 19 nt, Homo sapiens
  misc_RNA (1)...(19): siRNA sense strand
agaacaggcggcucgcuuu

SEQ ID NO: 358945 - RNA, 19 nt, Homo sapiens
  misc_RNA (1)...(19): siRNA sense strand
ggaagccauguucaauaug

SEQ ID NO: 358946 - RNA, 19 nt, Homo sapiens
  misc_RNA (1)...(19): siRNA sense strand
ucaggaagccauguucaau

SEQ ID NO: 358947 - RNA, 19 nt, Homo sapiens
  misc_RNA (1)...(19): siRNA sense strand
gggacgugcugguguuaac

SEQ ID NO: 358948 - RNA, 19 nt, Homo sapiens
  misc_RNA (1)...(19): siRNA sense strand
agaagaucccuacaugaug

SEQ ID NO: 358949 - RNA, 19 nt, Homo sapiens
  misc_RNA (1)...(19): siRNA sense strand
aggaggcgcugcucaaacu

SEQ ID NO: 358950 - RNA, 19 nt, Homo sapiens
  misc_RNA (1)...(19): siRNA sense strand
acagauaucacaggcuuug

SEQ ID NO: 358951 - RNA, 19 nt, Homo sapiens
  misc_RNA (1)...(19): siRNA sense strand
ucaccaagcguggaucguu

SEQ ID NO: 358952 - RNA, 19 nt, Homo sapiens
  misc_RNA (1)...(19): siRNA sense strand
aaagaaaugaaguguccuu

SEQ ID NO: 358953 - RNA, 19 nt, Homo sapiens
  misc_RNA (1)...(19): siRNA sense strand
uguaguaugccaaccaaau

SEQ ID NO: 358954 - RNA, 19 nt, Homo sapiens
  misc_RNA (1)...(19): siRNA sense strand
aaaugaaguguccuuuguu

SEQ ID NO: 358955 - RNA, 19 nt, Homo sapiens
  misc_RNA (1)...(19): siRNA sense strand
gguggucaacccuuggauu

SEQ ID NO: 358956 - RNA, 19 nt, Homo sapiens
  misc_RNA (1)...(19): siRNA sense strand
acaagccgcgaguuauuga

SEQ ID NO: 358957 - RNA, 19 nt, Homo sapiens
  misc_RNA (1)...(19): siRNA sense strand
uaguaugccaaccaaauga

SEQ ID NO: 358958 - RNA, 19 nt, Homo sapiens
  misc_RNA (1)...(19): siRNA sense strand
gaggaacgcgaaaagguaa

SEQ ID NO: 358959 - RNA, 19 nt, Homo sapiens
  misc_RNA (1)...(19): siRNA sense strand
uggcuacccucaacagaac

SEQ ID NO: 358960 - RNA, 19 nt, Homo sapiens
  misc_RNA (1)...(19): siRNA sense strand
ugucaaugcccaccaaugg

SEQ ID NO: 358961 - RNA, 19 nt, Homo sapiens
  misc_RNA (1)...(19): siRNA sense strand
ucagccagaguaugaguga

SEQ ID NO: 358962 - RNA, 19 nt, Homo sapiens
  misc_RNA (1)...(19): siRNA sense strand
ucacaggcuuuggcauucu

SEQ ID NO: 358963 - RNA, 19 nt, Homo sapiens
  misc_RNA (1)...(19): siRNA sense strand
ccagaaccuugcaaaacaa

SEQ ID NO: 358964 - RNA, 19 nt, Homo sapiens
  misc_RNA (1)...(19): siRNA sense strand
gcaagaugcuguccuuauc

SEQ ID NO: 358965 - RNA, 19 nt, Homo sapiens
  misc_RNA (1)...(19): siRNA sense strand
ccagaggaccggacacaua

SEQ ID NO: 358966 - RNA, 19 nt, Homo sapiens
  misc_RNA (1)...(19): siRNA sense strand
gcaacagguuaacguguau

SEQ ID NO: 358967 - RNA, 19 nt, Homo sapiens
  misc_RNA (1)...(19): siRNA sense strand
gaacauccgcugcuucuac

SEQ ID NO: 358968 - RNA, 19 nt, Homo sapiens
  misc_RNA (1)...(19): siRNA sense strand
cagcagcgcuucgguccua

SEQ ID NO: 358969 - RNA, 19 nt, Homo sapiens
  misc_RNA (1)...(19): siRNA sense strand
gcagccgccugacaccuuu

SEQ ID NO: 358970 - RNA, 19 nt, Homo sapiens
  misc_RNA (1)...(19): siRNA sense strand
gcccugcccucuucaucua

SEQ ID NO: 358971 - RNA, 19 nt, Homo sapiens
  misc_RNA (1)...(19): siRNA sense strand
cagcauggcgugacaguga

SEQ ID NO: 358972 - RNA, 19 nt, Homo sapiens
  misc_RNA (1)...(19): siRNA sense strand
cagcugaugaugugguuua

SEQ ID NO: 358973 - RNA, 19 nt, Homo sapiens
  misc_RNA (1)...(19): siRNA sense strand
ccuuugagcuggugcaguu

SEQ ID NO: 358974 - RNA, 19 nt, Homo sapiens
  misc_RNA (1)...(19): siRNA sense strand
gggagagccuggaggagau

SEQ ID NO: 358975 - RNA, 19 nt, Homo sapiens
  misc_RNA (1)...(19): siRNA sense strand
ugcaacagguuaacgugua

SEQ ID NO: 358976 - RNA, 19 nt, Homo sapiens
  misc_RNA (1)...(19): siRNA sense strand
caacaugggcuuagucaac

SEQ ID NO: 358977 - RNA, 19 nt, Homo sapiens
  misc_RNA (1)...(19): siRNA sense strand
gagcggguacugcagauga

SEQ ID NO: 358978 - RNA, 19 nt, Homo sapiens
  misc_RNA (1)...(19): siRNA sense strand
gcagguggacuucuugcaa

SEQ ID NO: 358979 - RNA, 19 nt, Homo sapiens
  misc_RNA (1)...(19): siRNA sense strand
ggcaaucgggcgacguuua

SEQ ID NO: 358980 - RNA, 19 nt, Homo sapiens
  misc_RNA (1)...(19): siRNA sense strand
gguugacccucuguuugua

SEQ ID NO: 358981 - RNA, 19 nt, Homo sapiens
  misc_RNA (1)...(19): siRNA sense strand
cggcugaugugaucuucuu

SEQ ID NO: 358982 - RNA, 19 nt, Homo sapiens
  misc_RNA (1)...(19): siRNA sense strand
acacgguccugccucugua

SEQ ID NO: 358983 - RNA, 19 nt, Homo sapiens
  misc_RNA (1)...(19): siRNA sense strand
ggagaagcccugcccucuu

SEQ ID NO: 358984 - RNA, 19 nt, Homo sapiens
  misc_RNA (1)...(19): siRNA sense strand
gaaguuguaccagcacguu

SEQ ID NO: 358985 - RNA, 19 nt, Homo sapiens
  misc_RNA (1)...(19): siRNA sense strand
cagccauccucacgcauga

SEQ ID NO: 358986 - RNA, 19 nt, Homo sapiens
  misc_RNA (1)...(19): siRNA sense strand
gcugggaucacauggagaa

SEQ ID NO: 358987 - RNA, 19 nt, Homo sapiens
  misc_RNA (1)...(19): siRNA sense strand
ccugacaccuuuguagaug

SEQ ID NO: 358988 - RNA, 19 nt, Homo sapiens
  misc_RNA (1)...(19): siRNA sense strand
ggacuucuugcaacagguu

SEQ ID NO: 358989 - RNA, 19 nt, Homo sapiens
  misc_RNA (1)...(19): siRNA sense strand
gauccucggcugcuuagau

SEQ ID NO: 358990 - RNA, 19 nt, Homo sapiens
  misc_RNA (1)...(19): siRNA sense strand
gcaaucgggcgacguuuac

SEQ ID NO: 358991 - RNA, 19 nt, Homo sapiens
  misc_RNA (1)...(19): siRNA sense strand
guacugcagaugagcaaga

SEQ ID NO: 358992 - RNA, 19 nt, Homo sapiens
  misc_RNA (1)...(19): siRNA sense strand
gggcgacguuuacuacaac

SEQ ID NO: 358993 - RNA, 19 nt, Homo sapiens
  misc_RNA (1)...(19): siRNA sense strand
ggcaaugggcaauggacua

SEQ ID NO: 358994 - RNA, 19 nt, Homo sapiens
  misc_RNA (1)...(19): siRNA sense strand
gaaauguaccaggcugugu

SEQ ID NO: 358995 - RNA, 19 nt, Homo sapiens
  misc_RNA (1)...(19): siRNA sense strand
ccugcccucuucaucuaua

SEQ ID NO: 358996 - RNA, 19 nt, Homo sapiens
  misc_RNA (1)...(19): siRNA sense strand
ggacuacgggcugaugugu

SEQ ID NO: 358997 - RNA, 19 nt, Homo sapiens
  misc_RNA (1)...(19): siRNA sense strand
ucccacauguugcgugcua

SEQ ID NO: 358998 - RNA, 19 nt, Homo sapiens
  misc_RNA (1)...(19): siRNA sense strand
caccugggccugaagauca

SEQ ID NO: 358999 - RNA, 19 nt, Homo sapiens
  misc_RNA (1)...(19): siRNA sense strand
gcugccggcugaugugauc

SEQ ID NO: 359000 - RNA, 19 nt, Homo sapiens
  misc_RNA (1)...(19): siRNA sense strand
ugucgcagguggacuucuu

SEQ ID NO: 359001 - RNA, 19 nt, Homo sapiens
  misc_RNA (1)...(19): siRNA sense strand
gcugcaggcugagaacauc

SEQ ID NO: 359002 - RNA, 19 nt, Homo sapiens
  misc_RNA (1)...(19): siRNA sense strand
uacuugggcuggccauguu

SEQ ID NO: 359003 - RNA, 19 nt, Homo sapiens
  misc_RNA (1)...(19): siRNA sense strand
gggacguacuggccaugga

SEQ ID NO: 359004 - RNA, 19 nt, Homo sapiens
  misc_RNA (1)...(19): siRNA sense strand
cgggcgacguuuacuacaa

SEQ ID NO: 359005 - RNA, 19 nt, Homo sapiens
  misc_RNA (1)...(19): siRNA sense strand
gaaggcaacaugggcuuag

SEQ ID NO: 359006 - RNA, 19 nt, Homo sapiens
  misc_RNA (1)...(19): siRNA sense strand
gcaaugggcaauggacuac

SEQ ID NO: 359007 - RNA, 19 nt, Homo sapiens
  misc_RNA (1)...(19): siRNA sense strand
ugagcugccuccuccgaau

SEQ ID NO: 359008 - RNA, 19 nt, Homo sapiens
  misc_RNA (1)...(19): siRNA sense strand
guuccagcccuguguaugu

SEQ ID NO: 359009 - RNA, 19 nt, Homo sapiens
  misc_RNA (1)...(19): siRNA sense strand
gagcugccuccuccgaaug

SEQ ID NO: 359010 - RNA, 19 nt, Homo sapiens
  misc_RNA (1)...(19): siRNA sense strand
cagaggaccggacacauac

SEQ ID NO: 359011 - RNA, 19 nt, Homo sapiens
  misc_RNA (1)...(19): siRNA sense strand
cugcgguacuuguguaaca

SEQ ID NO: 359012 - RNA, 19 nt, Homo sapiens
  misc_RNA (1)...(19): siRNA sense strand
accagcacguucaaacuga

SEQ ID NO: 359013 - RNA, 19 nt, Homo sapiens
  misc_RNA (1)...(19): siRNA sense strand
gugguugacccucuguuug

SEQ ID NO: 359014 - RNA, 19 nt, Homo sapiens
  misc_RNA (1)...(19): siRNA sense strand
gggcuucugcaucccugua

SEQ ID NO: 359015 - RNA, 19 nt, Homo sapiens
  misc_RNA (1)...(19): siRNA sense strand
gaggucaccagcacguuca

SEQ ID NO: 359016 - RNA, 19 nt, Homo sapiens
  misc_RNA (1)...(19): siRNA sense strand
gauggaagggcgagaacgu

SEQ ID NO: 359017 - RNA, 19 nt, Homo sapiens
  misc_RNA (1)...(19): siRNA sense strand
ccaagcugcaggcugagaa

SEQ ID NO: 359018 - RNA, 19 nt, Homo sapiens
  misc_RNA (1)...(19): siRNA sense strand
ccagcacguucaaacugau

SEQ ID NO: 359019 - RNA, 19 nt, Homo sapiens
  misc_RNA (1)...(19): siRNA sense strand
ggcaacaugggcuuaguca

SEQ ID NO: 359020 - RNA, 19 nt, Homo sapiens
  misc_RNA (1)...(19): siRNA sense strand
gcacuucauuuaccaauau

SEQ ID NO: 359021 - RNA, 19 nt, Homo sapiens
  misc_RNA (1)...(19): siRNA sense strand
cugaagaacuugaagauuu

SEQ ID NO: 359022 - RNA, 19 nt, Homo sapiens
  misc_RNA (1)...(19): siRNA sense strand
gaaauugagcagcgacaua

SEQ ID NO: 359023 - RNA, 19 nt, Homo sapiens
  misc_RNA (1)...(19): siRNA sense strand
gaaaucucaucuuaggaaa

SEQ ID NO: 359024 - RNA, 19 nt, Homo sapiens
  misc_RNA (1)...(19): siRNA sense strand
cuacagcaaucugauauuu

SEQ ID NO: 359025 - RNA, 19 nt, Homo sapiens
  misc_RNA (1)...(19): siRNA sense strand
gcgaugcucuucuuggaaa

SEQ ID NO: 359026 - RNA, 19 nt, Homo sapiens
  misc_RNA (1)...(19): siRNA sense strand
agaaagggcuauugcaaga

SEQ ID NO: 359027 - RNA, 19 nt, Homo sapiens
  misc_RNA (1)...(19): siRNA sense strand
gaucaggugcgcuuuguaa

SEQ ID NO: 359028 - RNA, 19 nt, Homo sapiens
  misc_RNA (1)...(19): siRNA sense strand
gaggcuaguuucuuauuau

SEQ ID NO: 359029 - RNA, 19 nt, Homo sapiens
  misc_RNA (1)...(19): siRNA sense strand
gaauaaauaccauguccuu

SEQ ID NO: 359030 - RNA, 19 nt, Homo sapiens
  misc_RNA (1)...(19): siRNA sense strand
uugagaggcuaguuucuua

SEQ ID NO: 359031 - RNA, 19 nt, Homo sapiens
  misc_RNA (1)...(19): siRNA sense strand
uuaccaauaucgccuauga

SEQ ID NO: 359032 - RNA, 19 nt, Homo sapiens
  misc_RNA (1)...(19): siRNA sense strand
gcaaucugauauuuggaaa

SEQ ID NO: 359033 - RNA, 19 nt, Homo sapiens
  misc_RNA (1)...(19): siRNA sense strand
gaccuuugaugaaugugua

SEQ ID NO: 359034 - RNA, 19 nt, Homo sapiens
  misc_RNA (1)...(19): siRNA sense strand
ggugaucauuuauaacaga

SEQ ID NO: 359035 - RNA, 19 nt, Homo sapiens
  misc_RNA (1)...(19): siRNA sense strand
ggaagcaggugggcuaugg

SEQ ID NO: 359036 - RNA, 19 nt, Homo sapiens
  misc_RNA (1)...(19): siRNA sense strand
gcacaggaaagaaaucuca

SEQ ID NO: 359037 - RNA, 19 nt, Homo sapiens
  misc_RNA (1)...(19): siRNA sense strand
gaaaagauuuacccuaagu

SEQ ID NO: 359038 - RNA, 19 nt, Homo sapiens
  misc_RNA (1)...(19): siRNA sense strand
agaggcuaguuucuuauua

SEQ ID NO: 359039 - RNA, 19 nt, Homo sapiens
  misc_RNA (1)...(19): siRNA sense strand
ggugggaguuacugaagaa

SEQ ID NO: 359040 - RNA, 19 nt, Homo sapiens
  misc_RNA (1)...(19): siRNA sense strand
agaagaaacuccccacuaa

SEQ ID NO: 359041 - RNA, 19 nt, Homo sapiens
  misc_RNA (1)...(19): siRNA sense strand
caagaugccacuuuagaug

SEQ ID NO: 359042 - RNA, 19 nt, Homo sapiens
  misc_RNA (1)...(19): siRNA sense strand
caagccaaguauaaccuaa

SEQ ID NO: 359043 - RNA, 19 nt, Homo sapiens
  misc_RNA (1)...(19): siRNA sense strand
gugaagaagaaaccaauuu

SEQ ID NO: 359044 - RNA, 19 nt, Homo sapiens
  misc_RNA (1)...(19): siRNA sense strand
gcaagcacuucauuuacca

SEQ ID NO: 359045 - RNA, 19 nt, Homo sapiens
  misc_RNA (1)...(19): siRNA sense strand
ggacauggugaucauuuau

SEQ ID NO: 359046 - RNA, 19 nt, Homo sapiens
  misc_RNA (1)...(19): siRNA sense strand
gaggacauggugaucauuu

SEQ ID NO: 359047 - RNA, 19 nt, Homo sapiens
  misc_RNA (1)...(19): siRNA sense strand
acacgaaguccgagaaauu

SEQ ID NO: 359048 - RNA, 19 nt, Homo sapiens
  misc_RNA (1)...(19): siRNA sense strand
cauaagggauccuauugag

SEQ ID NO: 359049 - RNA, 19 nt, Homo sapiens
  misc_RNA (1)...(19): siRNA sense strand
gaagaagaaaccaauuuac

SEQ ID NO: 359050 - RNA, 19 nt, Homo sapiens
  misc_RNA (1)...(19): siRNA sense strand
gcaagaugccacuuuagau

SEQ ID NO: 359051 - RNA, 19 nt, Homo sapiens
  misc_RNA (1)...(19): siRNA sense strand
gacauggugaucauuuaua

SEQ ID NO: 359052 - RNA, 19 nt, Homo sapiens
  misc_RNA (1)...(19): siRNA sense strand
aaacuacagcaaucugaua

SEQ ID NO: 359053 - RNA, 19 nt, Homo sapiens
  misc_RNA (1)...(19): siRNA sense strand
ugaugaauguguagcagaa

SEQ ID NO: 359054 - RNA, 19 nt, Homo sapiens
  misc_RNA (1)...(19): siRNA sense strand
uaaauaccauguccuucau

SEQ ID NO: 359055 - RNA, 19 nt, Homo sapiens
  misc_RNA (1)...(19): siRNA sense strand
gaagaggacauggugauca

SEQ ID NO: 359056 - RNA, 19 nt, Homo sapiens
  misc_RNA (1)...(19): siRNA sense strand
ccuaugaccugugugcaaa

SEQ ID NO: 359057 - RNA, 19 nt, Homo sapiens
  misc_RNA (1)...(19): siRNA sense strand
cuagagcaguuccaauuca

SEQ ID NO: 359058 - RNA, 19 nt, Homo sapiens
  misc_RNA (1)...(19): siRNA sense strand
gcaggugggcuauggauca

SEQ ID NO: 359059 - RNA, 19 nt, Homo sapiens
  misc_RNA (1)...(19): siRNA sense strand
gagaggcuaguuucuuauu

SEQ ID NO: 359060 - RNA, 19 nt, Homo sapiens
  misc_RNA (1)...(19): siRNA sense strand
agaaaucucaucuuaggaa

SEQ ID NO: 359061 - RNA, 19 nt, Homo sapiens
  misc_RNA (1)...(19): siRNA sense strand
cuaaacaaaccauugcaaa

SEQ ID NO: 359062 - RNA, 19 nt, Homo sapiens
  misc_RNA (1)...(19): siRNA sense strand
gagcagcgacauacaaugg

SEQ ID NO: 359063 - RNA, 19 nt, Homo sapiens
  misc_RNA (1)...(19): siRNA sense strand
gcagcgacauacaauggau

SEQ ID NO: 359064 - RNA, 19 nt, Homo sapiens
  misc_RNA (1)...(19): siRNA sense strand
acagcaaucugauauuugg

SEQ ID NO: 359065 - RNA, 19 nt, Homo sapiens
  misc_RNA (1)...(19): siRNA sense strand
aggacauggugaucauuua

SEQ ID NO: 359066 - RNA, 19 nt, Homo sapiens
  misc_RNA (1)...(19): siRNA sense strand
gagcaguuccaauucauca

SEQ ID NO: 359067 - RNA, 19 nt, Homo sapiens
  misc_RNA (1)...(19): siRNA sense strand
ucaaaucccguucuucugu

SEQ ID NO: 359068 - RNA, 19 nt, Homo sapiens
  misc_RNA (1)...(19): siRNA sense strand
gagauuuggagaugauuau

SEQ ID NO: 359069 - RNA, 19 nt, Homo sapiens
  misc_RNA (1)...(19): siRNA sense strand
uaccauguccuucauauca

SEQ ID NO: 359070 - RNA, 19 nt, Homo sapiens
  misc_RNA (1)...(19): siRNA sense strand
gcaguuccaauucaucaga

SEQ ID NO: 359071 - RNA, 19 nt, Homo sapiens
  misc_RNA (1)...(19): siRNA sense strand
ugaccugugugcaaagaau

SEQ ID NO: 359072 - RNA, 19 nt, Homo sapiens
  misc_RNA (1)...(19): siRNA sense strand
uggaucaagccaaguauaa

SEQ ID NO: 359073 - RNA, 19 nt, Homo sapiens
  misc_RNA (1)...(19): siRNA sense strand
agacugugcuccagagaag

SEQ ID NO: 359074 - RNA, 19 nt, Homo sapiens
  misc_RNA (1)...(19): siRNA sense strand
aaagggcuauugcaagaca

SEQ ID NO: 359075 - RNA, 19 nt, Homo sapiens
  misc_RNA (1)...(19): siRNA sense strand
acacguuucuuacuuggau

SEQ ID NO: 359076 - RNA, 19 nt, Homo sapiens
  misc_RNA (1)...(19): siRNA sense strand
auaauccagugaugucauu

SEQ ID NO: 359077 - RNA, 19 nt, Homo sapiens
  misc_RNA (1)...(19): siRNA sense strand
cacuagagcaguuccaauu

SEQ ID NO: 359078 - RNA, 19 nt, Homo sapiens
  misc_RNA (1)...(19): siRNA sense strand
ggauggcccucggcaagau

SEQ ID NO: 359079 - RNA, 19 nt, Homo sapiens
  misc_RNA (1)...(19): siRNA sense strand
gcccaugccguucgagaaa

SEQ ID NO: 359080 - RNA, 19 nt, Homo sapiens
  misc_RNA (1)...(19): siRNA sense strand
acggcaagcacuucauuua

SEQ ID NO: 359081 - RNA, 19 nt, Homo sapiens
  misc_RNA (1)...(19): siRNA sense strand
ugaguucuaugaauuugca

SEQ ID NO: 359082 - RNA, 19 nt, Homo sapiens
  misc_RNA (1)...(19): siRNA sense strand
gaaaauggagaaugaguuc

SEQ ID NO: 359083 - RNA, 19 nt, Homo sapiens
  misc_RNA (1)...(19): siRNA sense strand
ggccauagcuccgaaugcu

SEQ ID NO: 359084 - RNA, 19 nt, Homo sapiens
  misc_RNA (1)...(19): siRNA sense strand
gaugaaaccaggauuuuau

SEQ ID NO: 359085 - RNA, 19 nt, Homo sapiens
  misc_RNA (1)...(19): siRNA sense strand
aauaccauguccuucauau

SEQ ID NO: 359086 - RNA, 19 nt, Homo sapiens
  misc_RNA (1)...(19): siRNA sense strand
gugcaaagaauaaauacca

SEQ ID NO: 359087 - RNA, 19 nt, Homo sapiens
  misc_RNA (1)...(19): siRNA sense strand
auaaauaccauguccuuca

SEQ ID NO: 359088 - RNA, 19 nt, Homo sapiens
  misc_RNA (1)...(19): siRNA sense strand
agauuuacccuaagucgaa

SEQ ID NO: 359089 - RNA, 19 nt, Homo sapiens
  misc_RNA (1)...(19): siRNA sense strand
cuagaaagggcuauugcaa

SEQ ID NO: 359090 - RNA, 19 nt, Homo sapiens
  misc_RNA (1)...(19): siRNA sense strand
gaagaaacuccccacuaaa

SEQ ID NO: 359091 - RNA, 19 nt, Homo sapiens
  misc_RNA (1)...(19): siRNA sense strand
gagaagaaacuccccacua

SEQ ID NO: 359092 - RNA, 19 nt, Homo sapiens
  misc_RNA (1)...(19): siRNA sense strand
agccaaguauaaccuaauu

SEQ ID NO: 359093 - RNA, 19 nt, Homo sapiens
  misc_RNA (1)...(19): siRNA sense strand
agagaugaaaccaggauuu

SEQ ID NO: 359094 - RNA, 19 nt, Homo sapiens
  misc_RNA (1)...(19): siRNA sense strand
caagaucaggugcgcuuug

SEQ ID NO: 359095 - RNA, 19 nt, Homo sapiens
  misc_RNA (1)...(19): siRNA sense strand
aaacggcaagcacuucauu

SEQ ID NO: 359096 - RNA, 19 nt, Homo sapiens
  misc_RNA (1)...(19): siRNA sense strand
ugagauuuggagaugauua

SEQ ID NO: 359097 - RNA, 19 nt, Homo sapiens
  misc_RNA (1)...(19): siRNA sense strand
ucauaagggauccuauuga

SEQ ID NO: 359098 - RNA, 19 nt, Homo sapiens
  misc_RNA (1)...(19): siRNA sense strand
gacacgaaguccgagaaau

SEQ ID NO: 359099 - RNA, 19 nt, Homo sapiens
  misc_RNA (1)...(19): siRNA sense strand
gaccugugugcaaagaaua

SEQ ID NO: 359100 - RNA, 19 nt, Homo sapiens
  misc_RNA (1)...(19): siRNA sense strand
gcacuagagcaguuccaau

SEQ ID NO: 359101 - RNA, 19 nt, Homo sapiens
  misc_RNA (1)...(19): siRNA sense strand
uggacacguuucuuacuug

SEQ ID NO: 359102 - RNA, 19 nt, Homo sapiens
  misc_RNA (1)...(19): siRNA sense strand
guuauuggaggcagcauug

SEQ ID NO: 359103 - RNA, 19 nt, Homo sapiens
  misc_RNA (1)...(19): siRNA sense strand
gccaaguauaaccuaauua

SEQ ID NO: 359104 - RNA, 19 nt, Homo sapiens
  misc_RNA (1)...(19): siRNA sense strand
uuucugagauuuggagaug

SEQ ID NO: 359105 - RNA, 19 nt, Homo sapiens
  misc_RNA (1)...(19): siRNA sense strand
aauuuggugugaagaagaa

SEQ ID NO: 359106 - RNA, 19 nt, Homo sapiens
  misc_RNA (1)...(19): siRNA sense strand
gucauaagggauccuauug

SEQ ID NO: 359107 - RNA, 19 nt, Homo sapiens
  misc_RNA (1)...(19): siRNA sense strand
uggcgaugcucuucuugga

SEQ ID NO: 359108 - RNA, 19 nt, Homo sapiens
  misc_RNA (1)...(19): siRNA sense strand
ggaaaaccacagagaagaa

SEQ ID NO: 359109 - RNA, 19 nt, Homo sapiens
  misc_RNA (1)...(19): siRNA sense strand
gaacucuaucgcacaggaa

SEQ ID NO: 359110 - RNA, 19 nt, Homo sapiens
  misc_RNA (1)...(19): siRNA sense strand
gaagcuagaaagggcuauu

SEQ ID NO: 359111 - RNA, 19 nt, Homo sapiens
  misc_RNA (1)...(19): siRNA sense strand
cuauggaucaagccaagua

SEQ ID NO: 359112 - RNA, 19 nt, Homo sapiens
  misc_RNA (1)...(19): siRNA sense strand
aaaccaggauuuuaucaug

SEQ ID NO: 359113 - RNA, 19 nt, Homo sapiens
  misc_RNA (1)...(19): siRNA sense strand
gaaaaccacagagaagaaa

SEQ ID NO: 359114 - RNA, 19 nt, Homo sapiens
  misc_RNA (1)...(19): siRNA sense strand
uaacagaguucccaaaacg

SEQ ID NO: 359115 - RNA, 19 nt, Homo sapiens
  misc_RNA (1)...(19): siRNA sense strand
ggcaagcacuucauuuacc

SEQ ID NO: 359116 - RNA, 19 nt, Homo sapiens
  misc_RNA (1)...(19): siRNA sense strand
aagaugccacuuuagauga

SEQ ID NO: 359117 - RNA, 19 nt, Homo sapiens
  misc_RNA (1)...(19): siRNA sense strand
aagaggacauggugaucau

SEQ ID NO: 359118 - RNA, 19 nt, Homo sapiens
  misc_RNA (1)...(19): siRNA sense strand
uagagcaguuccaauucau

SEQ ID NO: 359119 - RNA, 19 nt, Homo sapiens
  misc_RNA (1)...(19): siRNA sense strand
ggaagaggacauggugauc

SEQ ID NO: 359120 - RNA, 19 nt, Homo sapiens
  misc_RNA (1)...(19): siRNA sense strand
guacagagaugaaccuuua

SEQ ID NO: 359121 - RNA, 19 nt, Homo sapiens
  misc_RNA (1)...(19): siRNA sense strand
gaccagagcugcugaggua

SEQ ID NO: 359122 - RNA, 19 nt, Homo sapiens
  misc_RNA (1)...(19): siRNA sense strand
guacaaaggugaagcaguu

SEQ ID NO: 359123 - RNA, 19 nt, Homo sapiens
  misc_RNA (1)...(19): siRNA sense strand
gaaggacaguuaaagcuuu

SEQ ID NO: 359124 - RNA, 19 nt, Homo sapiens
  misc_RNA (1)...(19): siRNA sense strand
gaaggaaaccaucaaauug

SEQ ID NO: 359125 - RNA, 19 nt, Homo sapiens
  misc_RNA (1)...(19): siRNA sense strand
cuucauggcuccuuauauu

SEQ ID NO: 359126 - RNA, 19 nt, Homo sapiens
  misc_RNA (1)...(19): siRNA sense strand
ggaaagaauguaucagcua

SEQ ID NO: 359127 - RNA, 19 nt, Homo sapiens
  misc_RNA (1)...(19): siRNA sense strand
gaaaguauuaucugaagga

SEQ ID NO: 359128 - RNA, 19 nt, Homo sapiens
  misc_RNA (1)...(19): siRNA sense strand
ugaaggaaaccaucaaauu

SEQ ID NO: 359129 - RNA, 19 nt, Homo sapiens
  misc_RNA (1)...(19): siRNA sense strand
uuacaucccugcugaagau

SEQ ID NO: 359130 - RNA, 19 nt, Homo sapiens
  misc_RNA (1)...(19): siRNA sense strand
guuugugaguucugauuua

SEQ ID NO: 359131 - RNA, 19 nt, Homo sapiens
  misc_RNA (1)...(19): siRNA sense strand
caacagauugggauacuau

SEQ ID NO: 359132 - RNA, 19 nt, Homo sapiens
  misc_RNA (1)...(19): siRNA sense strand
uaaagucuaucucuugucu

SEQ ID NO: 359133 - RNA, 19 nt, Homo sapiens
  misc_RNA (1)...(19): siRNA sense strand
gacgaagucuugaggaaca

SEQ ID NO: 359134 - RNA, 19 nt, Homo sapiens
  misc_RNA (1)...(19): siRNA sense strand
cugcucgacuuccaauuua

SEQ ID NO: 359135 - RNA, 19 nt, Homo sapiens
  misc_RNA (1)...(19): siRNA sense strand
caaaagauguuuacagaca

SEQ ID NO: 359136 - RNA, 19 nt, Homo sapiens
  misc_RNA (1)...(19): siRNA sense strand
ggaaugcuccaacagauca

SEQ ID NO: 359137 - RNA, 19 nt, Homo sapiens
  misc_RNA (1)...(19): siRNA sense strand
ggaguuuacugugaaagga

SEQ ID NO: 359138 - RNA, 19 nt, Homo sapiens
  misc_RNA (1)...(19): siRNA sense strand
gaacaauggcaggugcaua

SEQ ID NO: 359139 - RNA, 19 nt, Homo sapiens
  misc_RNA (1)...(19): siRNA sense strand
ugaagcaguuugugaguuc

SEQ ID NO: 359140 - RNA, 19 nt, Homo sapiens
  misc_RNA (1)...(19): siRNA sense strand
ccacagaacauaaguuuac

SEQ ID NO: 359141 - RNA, 19 nt, Homo sapiens
  misc_RNA (1)...(19): siRNA sense strand
ucaguggacuugcuguuau

SEQ ID NO: 359142 - RNA, 19 nt, Homo sapiens
  misc_RNA (1)...(19): siRNA sense strand
ggagcugauugcagagaaa

SEQ ID NO: 359143 - RNA, 19 nt, Homo sapiens
  misc_RNA (1)...(19): siRNA sense strand
caguacaucucacuucaug

SEQ ID NO: 359144 - RNA, 19 nt, Homo sapiens
  misc_RNA (1)...(19): siRNA sense strand
gaaauaaagacggcugaug

SEQ ID NO: 359145 - RNA, 19 nt, Homo sapiens
  misc_RNA (1)...(19): siRNA sense strand
gaaaucccuuggagacagu

SEQ ID NO: 359146 - RNA, 19 nt, Homo sapiens
  misc_RNA (1)...(19): siRNA sense strand
ggaacaaugagcucucuug

SEQ ID NO: 359147 - RNA, 19 nt, Homo sapiens
  misc_RNA (1)...(19): siRNA sense strand
aagucuaucucuugucuaa

SEQ ID NO: 359148 - RNA, 19 nt, Homo sapiens
  misc_RNA (1)...(19): siRNA sense strand
guuaaagcuuuguguuguu

SEQ ID NO: 359149 - RNA, 19 nt, Homo sapiens
  misc_RNA (1)...(19): siRNA sense strand
caguggacuugcuguuaua

SEQ ID NO: 359150 - RNA, 19 nt, Homo sapiens
  misc_RNA (1)...(19): siRNA sense strand
ggacuugcuguuauagauu

SEQ ID NO: 359151 - RNA, 19 nt, Homo sapiens
  misc_RNA (1)...(19): siRNA sense strand
ggagcugcaggcauuguua

SEQ ID NO: 359152 - RNA, 19 nt, Homo sapiens
  misc_RNA (1)...(19): siRNA sense strand
gaauauuuagccaaaguga

SEQ ID NO: 359153 - RNA, 19 nt, Homo sapiens
  misc_RNA (1)...(19): siRNA sense strand
agacagaagucaagaaagc

SEQ ID NO: 359154 - RNA, 19 nt, Homo sapiens
  misc_RNA (1)...(19): siRNA sense strand
gaagauuucaguggacuug

SEQ ID NO: 359155 - RNA, 19 nt, Homo sapiens
  misc_RNA (1)...(19): siRNA sense strand
gcauaaggaagauguggaa

SEQ ID NO: 359156 - RNA, 19 nt, Homo sapiens
  misc_RNA (1)...(19): siRNA sense strand
gacuugcuguuauagauug

SEQ ID NO: 359157 - RNA, 19 nt, Homo sapiens
  misc_RNA (1)...(19): siRNA sense strand
ggcaaaaugucacuauauu

SEQ ID NO: 359158 - RNA, 19 nt, Homo sapiens
  misc_RNA (1)...(19): siRNA sense strand
gcugauugcagagaaauaa

SEQ ID NO: 359159 - RNA, 19 nt, Homo sapiens
  misc_RNA (1)...(19): siRNA sense strand
gcccggaacuggaacucaa

SEQ ID NO: 359160 - RNA, 19 nt, Homo sapiens
  misc_RNA (1)...(19): siRNA sense strand
cgacuuccaauuuaucaaa

SEQ ID NO: 359161 - RNA, 19 nt, Homo sapiens
  misc_RNA (1)...(19): siRNA sense strand
gauaugaaggagcugauug

SEQ ID NO: 359162 - RNA, 19 nt, Homo sapiens
  misc_RNA (1)...(19): siRNA sense strand
auacagaccuggcagugau

SEQ ID NO: 359163 - RNA, 19 nt, Homo sapiens
  misc_RNA (1)...(19): siRNA sense strand
gacaugaauuuaacugcau

SEQ ID NO: 359164 - RNA, 19 nt, Homo sapiens
  misc_RNA (1)...(19): siRNA sense strand
cugcaggcauuguuauuug

SEQ ID NO: 359165 - RNA, 19 nt, Homo sapiens
  misc_RNA (1)...(19): siRNA sense strand
ccaaauuucgggugcauga

SEQ ID NO: 359166 - RNA, 19 nt, Homo sapiens
  misc_RNA (1)...(19): siRNA sense strand
gauaugggaaagaauguau

SEQ ID NO: 359167 - RNA, 19 nt, Homo sapiens
  misc_RNA (1)...(19): siRNA sense strand
augaggaucuccaccauga

SEQ ID NO: 359168 - RNA, 19 nt, Homo sapiens
  misc_RNA (1)...(19): siRNA sense strand
cuugggagcugcaggcauu

SEQ ID NO: 359169 - RNA, 19 nt, Homo sapiens
  misc_RNA (1)...(19): siRNA sense strand
cagagaugaaccuuuauuu

SEQ ID NO: 359170 - RNA, 19 nt, Homo sapiens
  misc_RNA (1)...(19): siRNA sense strand
aaagauguuuacagacaga

SEQ ID NO: 359171 - RNA, 19 nt, Homo sapiens
  misc_RNA (1)...(19): siRNA sense strand
gaucuagucagcaccauag

SEQ ID NO: 359172 - RNA, 19 nt, Homo sapiens
  misc_RNA (1)...(19): siRNA sense strand
aaagcugaccaagauauua

SEQ ID NO: 359173 - RNA, 19 nt, Homo sapiens
  misc_RNA (1)...(19): siRNA sense strand
aacaauggcaggugcauaa

SEQ ID NO: 359174 - RNA, 19 nt, Homo sapiens
  misc_RNA (1)...(19): siRNA sense strand
caaaagcuuucaugaagga

SEQ ID NO: 359175 - RNA, 19 nt, Homo sapiens
  misc_RNA (1)...(19): siRNA sense strand
gugaagcaguuugugaguu

SEQ ID NO: 359176 - RNA, 19 nt, Homo sapiens
  misc_RNA (1)...(19): siRNA sense strand
ucuaaagucuaucucuugu

SEQ ID NO: 359177 - RNA, 19 nt, Homo sapiens
  misc_RNA (1)...(19): siRNA sense strand
aagcugaccaagauauuaa

SEQ ID NO: 359178 - RNA, 19 nt, Homo sapiens
  misc_RNA (1)...(19): siRNA sense strand
ucuccugguucacuaauga

SEQ ID NO: 359179 - RNA, 19 nt, Homo sapiens
  misc_RNA (1)...(19): siRNA sense strand
cagaagucaagaaagcuua

SEQ ID NO: 359180 - RNA, 19 nt, Homo sapiens
  misc_RNA (1)...(19): siRNA sense strand
acagacagaagucaagaaa

SEQ ID NO: 359181 - RNA, 19 nt, Homo sapiens
  misc_RNA (1)...(19): siRNA sense strand
uaucgaagcauucaguugu

SEQ ID NO: 359182 - RNA, 19 nt, Homo sapiens
  misc_RNA (1)...(19): siRNA sense strand
ugacaucucaugauuaugc

SEQ ID NO: 359183 - RNA, 19 nt, Homo sapiens
  misc_RNA (1)...(19): siRNA sense strand
agugauggcagauacauuu

SEQ ID NO: 359184 - RNA, 19 nt, Homo sapiens
  misc_RNA (1)...(19): siRNA sense strand
ugauuuagggagcuacaua

SEQ ID NO: 359185 - RNA, 19 nt, Homo sapiens
  misc_RNA (1)...(19): siRNA sense strand
gaggaacaaugagcucucu

SEQ ID NO: 359186 - RNA, 19 nt, Homo sapiens
  misc_RNA (1)...(19): siRNA sense strand
gcaggugcauaaggaagau

SEQ ID NO: 359187 - RNA, 19 nt, Homo sapiens
  misc_RNA (1)...(19): siRNA sense strand
aauggcaggugcauaagga

SEQ ID NO: 359188 - RNA, 19 nt, Homo sapiens
  misc_RNA (1)...(19): siRNA sense strand
gcugcaggcauuguuauuu

SEQ ID NO: 359189 - RNA, 19 nt, Homo sapiens
  misc_RNA (1)...(19): siRNA sense strand
gauacagaccuggcaguga

SEQ ID NO: 359190 - RNA, 19 nt, Homo sapiens
  misc_RNA (1)...(19): siRNA sense strand
gcaaguuaucgaagcauuc

SEQ ID NO: 359191 - RNA, 19 nt, Homo sapiens
  misc_RNA (1)...(19): siRNA sense strand
guucacuaaugacacuuug

SEQ ID NO: 359192 - RNA, 19 nt, Homo sapiens
  misc_RNA (1)...(19): siRNA sense strand
caucccugcugaagauuuc

SEQ ID NO: 359193 - RNA, 19 nt, Homo sapiens
  misc_RNA (1)...(19): siRNA sense strand
gaagucaagaaagcuuauu

SEQ ID NO: 359194 - RNA, 19 nt, Homo sapiens
  misc_RNA (1)...(19): siRNA sense strand
ucaacagauugggauacua

SEQ ID NO: 359195 - RNA, 19 nt, Homo sapiens
  misc_RNA (1)...(19): siRNA sense strand
caguuaaagcuuuguguug

SEQ ID NO: 359196 - RNA, 19 nt, Homo sapiens
  misc_RNA (1)...(19): siRNA sense strand
ggagacaugaauuuaacug

SEQ ID NO: 359197 - RNA, 19 nt, Homo sapiens
  misc_RNA (1)...(19): siRNA sense strand
ugauuaugcucugccugua

SEQ ID NO: 359198 - RNA, 19 nt, Homo sapiens
  misc_RNA (1)...(19): siRNA sense strand
gaggaucuccaccaugaca

SEQ ID NO: 359199 - RNA, 19 nt, Homo sapiens
  misc_RNA (1)...(19): siRNA sense strand
gccacaauuauaacguuua

SEQ ID NO: 359200 - RNA, 19 nt, Homo sapiens
  misc_RNA (1)...(19): siRNA sense strand
gaacuggaacucaaaagau

SEQ ID NO: 359201 - RNA, 19 nt, Homo sapiens
  misc_RNA (1)...(19): siRNA sense strand
uuaaagcuuuguguuguuc

SEQ ID NO: 359202 - RNA, 19 nt, Homo sapiens
  misc_RNA (1)...(19): siRNA sense strand
uggacuugcuguuauagau

SEQ ID NO: 359203 - RNA, 19 nt, Homo sapiens
  misc_RNA (1)...(19): siRNA sense strand
gauugcagagaaauaaaga

SEQ ID NO: 359204 - RNA, 19 nt, Homo sapiens
  misc_RNA (1)...(19): siRNA sense strand
ugaaggacaguuaaagcuu

SEQ ID NO: 359205 - RNA, 19 nt, Homo sapiens
  misc_RNA (1)...(19): siRNA sense strand
ccuuugggguuauuauuua

SEQ ID NO: 359206 - RNA, 19 nt, Homo sapiens
  misc_RNA (1)...(19): siRNA sense strand
gaagaaagugcaaaagcuu

SEQ ID NO: 359207 - RNA, 19 nt, Homo sapiens
  misc_RNA (1)...(19): siRNA sense strand
gaauauuggagaccacagu

SEQ ID NO: 359208 - RNA, 19 nt, Homo sapiens
  misc_RNA (1)...(19): siRNA sense strand
caugaaggaaaccaucaaa

SEQ ID NO: 359209 - RNA, 19 nt, Homo sapiens
  misc_RNA (1)...(19): siRNA sense strand
caaguuaucgaagcauuca

SEQ ID NO: 359210 - RNA, 19 nt, Homo sapiens
  misc_RNA (1)...(19): siRNA sense strand
aguuaaagcuuuguguugu

SEQ ID NO: 359211 - RNA, 19 nt, Homo sapiens
  misc_RNA (1)...(19): siRNA sense strand
gagcugcaggcauuguuau

SEQ ID NO: 359212 - RNA, 19 nt, Homo sapiens
  misc_RNA (1)...(19): siRNA sense strand
auuaugcucugccuguauu

SEQ ID NO: 359213 - RNA, 19 nt, Homo sapiens
  misc_RNA (1)...(19): siRNA sense strand
ucccacagaacauaaguuu

SEQ ID NO: 359214 - RNA, 19 nt, Homo sapiens
  misc_RNA (1)...(19): siRNA sense strand
ggauaugaaggagcugauu

SEQ ID NO: 359215 - RNA, 19 nt, Homo sapiens
  misc_RNA (1)...(19): siRNA sense strand
ccugcucgacuuccaauuu

SEQ ID NO: 359216 - RNA, 19 nt, Homo sapiens
  misc_RNA (1)...(19): siRNA sense strand
aaggacaguuaaagcuuug

SEQ ID NO: 359217 - RNA, 19 nt, Homo sapiens
  misc_RNA (1)...(19): siRNA sense strand
acagagaugaaccuuuauu

SEQ ID NO: 359218 - RNA, 19 nt, Homo sapiens
  misc_RNA (1)...(19): siRNA sense strand
gauuaugcucugccuguau

SEQ ID NO: 359219 - RNA, 19 nt, Homo sapiens
  misc_RNA (1)...(19): siRNA sense strand
ggggcaaaaugucacuaua

SEQ ID NO: 359220 - RNA, 19 nt, Homo sapiens
  misc_RNA (1)...(19): siRNA sense strand
aagaagagcugccaauuua

SEQ ID NO: 359221 - RNA, 19 nt, Homo sapiens
  misc_RNA (1)...(19): siRNA sense strand
gcaagaggcucaagaagaa

SEQ ID NO: 359222 - RNA, 19 nt, Homo sapiens
  misc_RNA (1)...(19): siRNA sense strand
gcaaaguacuuccaauuau

SEQ ID NO: 359223 - RNA, 19 nt, Homo sapiens
  misc_RNA (1)...(19): siRNA sense strand
ccaaagaccuuccuucgaa

SEQ ID NO: 359224 - RNA, 19 nt, Homo sapiens
  misc_RNA (1)...(19): siRNA sense strand
gaaauugugucuacaguuc

SEQ ID NO: 359225 - RNA, 19 nt, Homo sapiens
  misc_RNA (1)...(19): siRNA sense strand
ugaaagagcucaaggugaa

SEQ ID NO: 359226 - RNA, 19 nt, Homo sapiens
  misc_RNA (1)...(19): siRNA sense strand
gaaagcccauuuagagaaa

SEQ ID NO: 359227 - RNA, 19 nt, Homo sapiens
  misc_RNA (1)...(19): siRNA sense strand
gaaagugauucagaagaua

SEQ ID NO: 359228 - RNA, 19 nt, Homo sapiens
  misc_RNA (1)...(19): siRNA sense strand
gauaauagaugccacucaa

SEQ ID NO: 359229 - RNA, 19 nt, Homo sapiens
  misc_RNA (1)...(19): siRNA sense strand
gaauaaagguggacagucu

SEQ ID NO: 359230 - RNA, 19 nt, Homo sapiens
  misc_RNA (1)...(19): siRNA sense strand
gaacaccuuuguccuagaa

SEQ ID NO: 359231 - RNA, 19 nt, Homo sapiens
  misc_RNA (1)...(19): siRNA sense strand
gagagguacucgaucauaa

SEQ ID NO: 359232 - RNA, 19 nt, Homo sapiens
  misc_RNA (1)...(19): siRNA sense strand
gguagugaauuaagaauga

SEQ ID NO: 359233 - RNA, 19 nt, Homo sapiens
  misc_RNA (1)...(19): siRNA sense strand
gaaagaagaggcaaguauu

SEQ ID NO: 359234 - RNA, 19 nt, Homo sapiens
  misc_RNA (1)...(19): siRNA sense strand
aaccaaagauucagacaua

SEQ ID NO: 359235 - RNA, 19 nt, Homo sapiens
  misc_RNA (1)...(19): siRNA sense strand
gaccagaaaucucuuuaga

SEQ ID NO: 359236 - RNA, 19 nt, Homo sapiens
  misc_RNA (1)...(19): siRNA sense strand
gaaggaaugugccaagcaa

SEQ ID NO: 359237 - RNA, 19 nt, Homo sapiens
  misc_RNA (1)...(19): siRNA sense strand
ggaagacagugauggugua

SEQ ID NO: 359238 - RNA, 19 nt, Homo sapiens
  misc_RNA (1)...(19): siRNA sense strand
ggaauuagacucuuuaucu

SEQ ID NO: 359239 - RNA, 19 nt, Homo sapiens
  misc_RNA (1)...(19): siRNA sense strand
cuagaugaauugccuauuu

SEQ ID NO: 359240 - RNA, 19 nt, Homo sapiens
  misc_RNA (1)...(19): siRNA sense strand
ggacacaaguaucagcaaa

SEQ ID NO: 359241 - RNA, 19 nt, Homo sapiens
  misc_RNA (1)...(19): siRNA sense strand
gaagaugucccaaauaagu

SEQ ID NO: 359242 - RNA, 19 nt, Homo sapiens
  misc_RNA (1)...(19): siRNA sense strand
guagugaccuuccugauuc

SEQ ID NO: 359243 - RNA, 19 nt, Homo sapiens
  misc_RNA (1)...(19): siRNA sense strand
cagaagagcucagaaacuu

SEQ ID NO: 359244 - RNA, 19 nt, Homo sapiens
  misc_RNA (1)...(19): siRNA sense strand
gaacugggguuguguauga

SEQ ID NO: 359245 - RNA, 19 nt, Homo sapiens
  misc_RNA (1)...(19): siRNA sense strand
gaagagcugccaauuuauu

SEQ ID NO: 359246 - RNA, 19 nt, Homo sapiens
  misc_RNA (1)...(19): siRNA sense strand
gcucagaguuaacguuuga

SEQ ID NO: 359247 - RNA, 19 nt, Homo sapiens
  misc_RNA (1)...(19): siRNA sense strand
cgacgagggucaucauauu

SEQ ID NO: 359248 - RNA, 19 nt, Homo sapiens
  misc_RNA (1)...(19): siRNA sense strand
ggagauggguauucuagug

SEQ ID NO: 359249 - RNA, 19 nt, Homo sapiens
  misc_RNA (1)...(19): siRNA sense strand
gcuagaagcucugauggaa

SEQ ID NO: 359250 - RNA, 19 nt, Homo sapiens
  misc_RNA (1)...(19): siRNA sense strand
ccaguuauaugugauagua

SEQ ID NO: 359251 - RNA, 19 nt, Homo sapiens
  misc_RNA (1)...(19): siRNA sense strand
guagaaauuugacagauca

SEQ ID NO: 359252 - RNA, 19 nt, Homo sapiens
  misc_RNA (1)...(19): siRNA sense strand
caacagaccacuuuccaaa

SEQ ID NO: 359253 - RNA, 19 nt, Homo sapiens
  misc_RNA (1)...(19): siRNA sense strand
cagcuucuguuaaucauuu

SEQ ID NO: 359254 - RNA, 19 nt, Homo sapiens
  misc_RNA (1)...(19): siRNA sense strand
gcacagaagcugacacaga

SEQ ID NO: 359255 - RNA, 19 nt, Homo sapiens
  misc_RNA (1)...(19): siRNA sense strand
gagaacaggcguaauaaug

SEQ ID NO: 359256 - RNA, 19 nt, Homo sapiens
  misc_RNA (1)...(19): siRNA sense strand
ugguguaacuuaugcauua

SEQ ID NO: 359257 - RNA, 19 nt, Homo sapiens
  misc_RNA (1)...(19): siRNA sense strand
gugagggucucucugauaa

SEQ ID NO: 359258 - RNA, 19 nt, Homo sapiens
  misc_RNA (1)...(19): siRNA sense strand
uugaagaugucccaaauaa

SEQ ID NO: 359259 - RNA, 19 nt, Homo sapiens
  misc_RNA (1)...(19): siRNA sense strand
ggaaagaagaggcaaguau

SEQ ID NO: 359260 - RNA, 19 nt, Homo sapiens
  misc_RNA (1)...(19): siRNA sense strand
caagaagagcugccaauuu

SEQ ID NO: 359261 - RNA, 19 nt, Homo sapiens
  misc_RNA (1)...(19): siRNA sense strand
gaaaguauagcaaguaaag

SEQ ID NO: 359262 - RNA, 19 nt, Homo sapiens
  misc_RNA (1)...(19): siRNA sense strand
gacauauacuguacuuuga

SEQ ID NO: 359263 - RNA, 19 nt, Homo sapiens
  misc_RNA (1)...(19): siRNA sense strand
gcauuaaagugugacagua

SEQ ID NO: 359264 - RNA, 19 nt, Homo sapiens
  misc_RNA (1)...(19): siRNA sense strand
gaaaucaaacagucucauu

SEQ ID NO: 359265 - RNA, 19 nt, Homo sapiens
  misc_RNA (1)...(19): siRNA sense strand
uaaaggagguauaucgaau

SEQ ID NO: 359266 - RNA, 19 nt, Homo sapiens
  misc_RNA (1)...(19): siRNA sense strand
gaagucauacucacagaaa

SEQ ID NO: 359267 - RNA, 19 nt, Homo sapiens
  misc_RNA (1)...(19): siRNA sense strand
gaaauaagcagcaauucca

SEQ ID NO: 359268 - RNA, 19 nt, Homo sapiens
  misc_RNA (1)...(19): siRNA sense strand
gcaagcaccugaaauaagc

SEQ ID NO: 359269 - RNA, 19 nt, Homo sapiens
  misc_RNA (1)...(19): siRNA sense strand
cauauugccugaaagaaga

SEQ ID NO: 359270 - RNA, 19 nt, Homo sapiens
  misc_RNA (1)...(19): siRNA sense strand
gaaauagagcccaaagaga

SEQ ID NO: 359271 - RNA, 19 nt, Homo sapiens
  misc_RNA (1)...(19): siRNA sense strand
gaaaccgucuccagucugu

SEQ ID NO: 359272 - RNA, 19 nt, Homo sapiens
  misc_RNA (1)...(19): siRNA sense strand
ggaaagaaacaauaguaga

SEQ ID NO: 359273 - RNA, 19 nt, Homo sapiens
  misc_RNA (1)...(19): siRNA sense strand
gaauugggaucaacaggau

SEQ ID NO: 359274 - RNA, 19 nt, Homo sapiens
  misc_RNA (1)...(19): siRNA sense strand
gaugauagcaguauuccaa

SEQ ID NO: 359275 - RNA, 19 nt, Homo sapiens
  misc_RNA (1)...(19): siRNA sense strand
acccaagucugauaaauuu

SEQ ID NO: 359276 - RNA, 19 nt, Homo sapiens
  misc_RNA (1)...(19): siRNA sense strand
uaagaaggauucaguggau

SEQ ID NO: 359277 - RNA, 19 nt, Homo sapiens
  misc_RNA (1)...(19): siRNA sense strand
gaaaaugccauguuacuuu

SEQ ID NO: 359278 - RNA, 19 nt, Homo sapiens
  misc_RNA (1)...(19): siRNA sense strand
gagaagaauccggaaauuu

SEQ ID NO: 359279 - RNA, 19 nt, Homo sapiens
  misc_RNA (1)...(19): siRNA sense strand
agaagggaauuccauauug

SEQ ID NO: 359280 - RNA, 19 nt, Homo sapiens
  misc_RNA (1)...(19): siRNA sense strand
caagauaaacucaugucua

SEQ ID NO: 359281 - RNA, 19 nt, Homo sapiens
  misc_RNA (1)...(19): siRNA sense strand
cacaacagcugccugaaug

SEQ ID NO: 359282 - RNA, 19 nt, Homo sapiens
  misc_RNA (1)...(19): siRNA sense strand
ccugaagaaugaugagaua

SEQ ID NO: 359283 - RNA, 19 nt, Homo sapiens
  misc_RNA (1)...(19): siRNA sense strand
gaggacaugugcauacuuc

SEQ ID NO: 359284 - RNA, 19 nt, Homo sapiens
  misc_RNA (1)...(19): siRNA sense strand
ccaaagauucagacauaua

SEQ ID NO: 359285 - RNA, 19 nt, Homo sapiens
  misc_RNA (1)...(19): siRNA sense strand
ucaaacagucucauucuuu

SEQ ID NO: 359286 - RNA, 19 nt, Homo sapiens
  misc_RNA (1)...(19): siRNA sense strand
ccacagcgauggaaggaau

SEQ ID NO: 359287 - RNA, 19 nt, Homo sapiens
  misc_RNA (1)...(19): siRNA sense strand
gaagaagggaauuccauau

SEQ ID NO: 359288 - RNA, 19 nt, Homo sapiens
  misc_RNA (1)...(19): siRNA sense strand
gaaagagaaucuaaaagga

SEQ ID NO: 359289 - RNA, 19 nt, Homo sapiens
  misc_RNA (1)...(19): siRNA sense strand
aaacuuagguugggacuuc

SEQ ID NO: 359290 - RNA, 19 nt, Homo sapiens
  misc_RNA (1)...(19): siRNA sense strand
caaggagacauuuguauga

SEQ ID NO: 359291 - RNA, 19 nt, Homo sapiens
  misc_RNA (1)...(19): siRNA sense strand
gaagucagaaagcccauuu

SEQ ID NO: 359292 - RNA, 19 nt, Homo sapiens
  misc_RNA (1)...(19): siRNA sense strand
gccaagaacagccagauaa

SEQ ID NO: 359293 - RNA, 19 nt, Homo sapiens
  misc_RNA (1)...(19): siRNA sense strand
ggacagaaagaaaguuaga

SEQ ID NO: 359294 - RNA, 19 nt, Homo sapiens
  misc_RNA (1)...(19): siRNA sense strand
cagauucccuaacagauga

SEQ ID NO: 359295 - RNA, 19 nt, Homo sapiens
  misc_RNA (1)...(19): siRNA sense strand
ugacucagaaguuguauuu

SEQ ID NO: 359296 - RNA, 19 nt, Homo sapiens
  misc_RNA (1)...(19): siRNA sense strand
gaagggaauuccauauugc

SEQ ID NO: 359297 - RNA, 19 nt, Homo sapiens
  misc_RNA (1)...(19): siRNA sense strand
uagcaacccuucuuugugu

SEQ ID NO: 359298 - RNA, 19 nt, Homo sapiens
  misc_RNA (1)...(19): siRNA sense strand
cuacaguucaugaagauua

SEQ ID NO: 359299 - RNA, 19 nt, Homo sapiens
  misc_RNA (1)...(19): siRNA sense strand
ccaccaagcugagcacaga

SEQ ID NO: 359300 - RNA, 19 nt, Homo sapiens
  misc_RNA (1)...(19): siRNA sense strand
gaaaagaagcccagaaaug

SEQ ID NO: 359301 - RNA, 19 nt, Homo sapiens
  misc_RNA (1)...(19): siRNA sense strand
gaugagagauuggagucaa

SEQ ID NO: 359302 - RNA, 19 nt, Homo sapiens
  misc_RNA (1)...(19): siRNA sense strand
ccauguuacuuugaucuua

SEQ ID NO: 359303 - RNA, 19 nt, Homo sapiens
  misc_RNA (1)...(19): siRNA sense strand
gcaagaagagcugccaauu

SEQ ID NO: 359304 - RNA, 19 nt, Homo sapiens
  misc_RNA (1)...(19): siRNA sense strand
guuuaaagcucgagugaag

SEQ ID NO: 359305 - RNA, 19 nt, Homo sapiens
  misc_RNA (1)...(19): siRNA sense strand
ggagagguacucgaucaua

SEQ ID NO: 359306 - RNA, 19 nt, Homo sapiens
  misc_RNA (1)...(19): siRNA sense strand
gaagagcucagaaacuuag

SEQ ID NO: 359307 - RNA, 19 nt, Homo sapiens
  misc_RNA (1)...(19): siRNA sense strand
aguaaagccuguccucaaa

SEQ ID NO: 359308 - RNA, 19 nt, Homo sapiens
  misc_RNA (1)...(19): siRNA sense strand
ggagguauaucgaauucca

SEQ ID NO: 359309 - RNA, 19 nt, Homo sapiens
  misc_RNA (1)...(19): siRNA sense strand
cacagacacucccaagaaa

SEQ ID NO: 359310 - RNA, 19 nt, Homo sapiens
  misc_RNA (1)...(19): siRNA sense strand
cguuauaaaucuacccuuu

SEQ ID NO: 359311 - RNA, 19 nt, Homo sapiens
  misc_RNA (1)...(19): siRNA sense strand
gaaggaguaugcacgaaac

SEQ ID NO: 359312 - RNA, 19 nt, Homo sapiens
  misc_RNA (1)...(19): siRNA sense strand
ggaaauagagagugauucu

SEQ ID NO: 359313 - RNA, 19 nt, Homo sapiens
  misc_RNA (1)...(19): siRNA sense strand
guacaagucauacagaugu

SEQ ID NO: 359314 - RNA, 19 nt, Homo sapiens
  misc_RNA (1)...(19): siRNA sense strand
ucagaaagcccauuuagag

SEQ ID NO: 359315 - RNA, 19 nt, Homo sapiens
  misc_RNA (1)...(19): siRNA sense strand
cuaguaagcuaccuacauc

SEQ ID NO: 359316 - RNA, 19 nt, Homo sapiens
  misc_RNA (1)...(19): siRNA sense strand
gaaacuuaccugucuggaa

SEQ ID NO: 359317 - RNA, 19 nt, Homo sapiens
  misc_RNA (1)...(19): siRNA sense strand
gguuagaauugaaacuuug

SEQ ID NO: 359318 - RNA, 19 nt, Homo sapiens
  misc_RNA (1)...(19): siRNA sense strand
ggaguaugcacgaaacaaa

SEQ ID NO: 359319 - RNA, 19 nt, Homo sapiens
  misc_RNA (1)...(19): siRNA sense strand
caacauagaagcuaguaag

SEQ ID NO: 359320 - RNA, 19 nt, Homo sapiens
  misc_RNA (1)...(19): siRNA sense strand
gcaauaaacuuucuacaga

SEQ ID NO: 359321 - RNA, 19 nt, Homo sapiens
  misc_RNA (1)...(19): siRNA sense strand
aagaagagcugccaauuua

SEQ ID NO: 359322 - RNA, 19 nt, Homo sapiens
  misc_RNA (1)...(19): siRNA sense strand
gcaagaggcucaagaagaa

SEQ ID NO: 359323 - RNA, 19 nt, Homo sapiens
  misc_RNA (1)...(19): siRNA sense strand
gcaaagaaguauucagaaa

SEQ ID NO: 359324 - RNA, 19 nt, Homo sapiens
  misc_RNA (1)...(19): siRNA sense strand
ggacagaauuauaguguuu

SEQ ID NO: 359325 - RNA, 19 nt, Homo sapiens
  misc_RNA (1)...(19): siRNA sense strand
gcaaaguacuuccaauuau

SEQ ID NO: 359326 - RNA, 19 nt, Homo sapiens
  misc_RNA (1)...(19): siRNA sense strand
ccaaagaccuuccuucgaa

SEQ ID NO: 359327 - RNA, 19 nt, Homo sapiens
  misc_RNA (1)...(19): siRNA sense strand
gaaauugugucuacaguuc

SEQ ID NO: 359328 - RNA, 19 nt, Homo sapiens
  misc_RNA (1)...(19): siRNA sense strand
ugaaagagcucaaggugaa

SEQ ID NO: 359329 - RNA, 19 nt, Homo sapiens
  misc_RNA (1)...(19): siRNA sense strand
gaaagcccauuuagagaaa

SEQ ID NO: 359330 - RNA, 19 nt, Homo sapiens
  misc_RNA (1)...(19): siRNA sense strand
caaauaaucucuuggaucu

SEQ ID NO: 359331 - RNA, 19 nt, Homo sapiens
  misc_RNA (1)...(19): siRNA sense strand
gaaagugauucagaagaua

SEQ ID NO: 359332 - RNA, 19 nt, Homo sapiens
  misc_RNA (1)...(19): siRNA sense strand
gauaauagaugccacucaa

SEQ ID NO: 359333 - RNA, 19 nt, Homo sapiens
  misc_RNA (1)...(19): siRNA sense strand
caaagaggacacugaauua

SEQ ID NO: 359334 - RNA, 19 nt, Homo sapiens
  misc_RNA (1)...(19): siRNA sense strand
gaauaaagguggacagucu

SEQ ID NO: 359335 - RNA, 19 nt, Homo sapiens
  misc_RNA (1)...(19): siRNA sense strand
gaaaagagaugucccaguu

SEQ ID NO: 359336 - RNA, 19 nt, Homo sapiens
  misc_RNA (1)...(19): siRNA sense strand
gaacaccuuuguccuagaa

SEQ ID NO: 359337 - RNA, 19 nt, Homo sapiens
  misc_RNA (1)...(19): siRNA sense strand
gagagguacucgaucauaa

SEQ ID NO: 359338 - RNA, 19 nt, Homo sapiens
  misc_RNA (1)...(19): siRNA sense strand
gguagugaauuaagaauga

SEQ ID NO: 359339 - RNA, 19 nt, Homo sapiens
  misc_RNA (1)...(19): siRNA sense strand
gaaagaagaggcaaguauu

SEQ ID NO: 359340 - RNA, 19 nt, Homo sapiens
  misc_RNA (1)...(19): siRNA sense strand
aaccaaagauucagacaua

SEQ ID NO: 359341 - RNA, 19 nt, Homo sapiens
  misc_RNA (1)...(19): siRNA sense strand
gaccagaaaucucuuuaga

SEQ ID NO: 359342 - RNA, 19 nt, Homo sapiens
  misc_RNA (1)...(19): siRNA sense strand
gaaggaaugugccaagcaa

SEQ ID NO: 359343 - RNA, 19 nt, Homo sapiens
  misc_RNA (1)...(19): siRNA sense strand
ggaagacagugauggugua

SEQ ID NO: 359344 - RNA, 19 nt, Homo sapiens
  misc_RNA (1)...(19): siRNA sense strand
ggaauuagacucuuuaucu

SEQ ID NO: 359345 - RNA, 19 nt, Homo sapiens
  misc_RNA (1)...(19): siRNA sense strand
cagaagggaagauuuauua

SEQ ID NO: 359346 - RNA, 19 nt, Homo sapiens
  misc_RNA (1)...(19): siRNA sense strand
gaagacagcucgagaucca

SEQ ID NO: 359347 - RNA, 19 nt, Homo sapiens
  misc_RNA (1)...(19): siRNA sense strand
cuagaugaauugccuauuu

SEQ ID NO: 359348 - RNA, 19 nt, Homo sapiens
  misc_RNA (1)...(19): siRNA sense strand
ggacacaaguaucagcaaa

SEQ ID NO: 359349 - RNA, 19 nt, Homo sapiens
  misc_RNA (1)...(19): siRNA sense strand
gaagaugucccaaauaagu

SEQ ID NO: 359350 - RNA, 19 nt, Homo sapiens
  misc_RNA (1)...(19): siRNA sense strand
guagugaccuuccugauuc

SEQ ID NO: 359351 - RNA, 19 nt, Homo sapiens
  misc_RNA (1)...(19): siRNA sense strand
cagaagagcucagaaacuu

SEQ ID NO: 359352 - RNA, 19 nt, Homo sapiens
  misc_RNA (1)...(19): siRNA sense strand
gaacugggguuguguauga

SEQ ID NO: 359353 - RNA, 19 nt, Homo sapiens
  misc_RNA (1)...(19): siRNA sense strand
gaagagcugccaauuuauu

SEQ ID NO: 359354 - RNA, 19 nt, Homo sapiens
  misc_RNA (1)...(19): siRNA sense strand
gagcugaaguacuguaaga

SEQ ID NO: 359355 - RNA, 19 nt, Homo sapiens
  misc_RNA (1)...(19): siRNA sense strand
gcucagaguuaacguuuga

SEQ ID NO: 359356 - RNA, 19 nt, Homo sapiens
  misc_RNA (1)...(19): siRNA sense strand
ccaguuauaugugauagua

SEQ ID NO: 359357 - RNA, 19 nt, Homo sapiens
  misc_RNA (1)...(19): siRNA sense strand
ccagagugaugguguagua

SEQ ID NO: 359358 - RNA, 19 nt, Homo sapiens
  misc_RNA (1)...(19): siRNA sense strand
ggagauggguauucuagug

SEQ ID NO: 359359 - RNA, 19 nt, Homo sapiens
  misc_RNA (1)...(19): siRNA sense strand
gcuagaagcucugauggaa

SEQ ID NO: 359360 - RNA, 19 nt, Homo sapiens
  misc_RNA (1)...(19): siRNA sense strand
cgacgagggucaucauauu

SEQ ID NO: 359361 - RNA, 19 nt, Homo sapiens
  misc_RNA (1)...(19): siRNA sense strand
guagaaauuugacagauca

SEQ ID NO: 359362 - RNA, 19 nt, Homo sapiens
  misc_RNA (1)...(19): siRNA sense strand
ccagugaacuagcaaagaa

SEQ ID NO: 359363 - RNA, 19 nt, Homo sapiens
  misc_RNA (1)...(19): siRNA sense strand
caacagaccacuuuccaaa

SEQ ID NO: 359364 - RNA, 19 nt, Homo sapiens
  misc_RNA (1)...(19): siRNA sense strand
cagcuucuguuaaucauuu

SEQ ID NO: 359365 - RNA, 19 nt, Homo sapiens
  misc_RNA (1)...(19): siRNA sense strand
gcacagaagcugacacaga

SEQ ID NO: 359366 - RNA, 19 nt, Homo sapiens
  misc_RNA (1)...(19): siRNA sense strand
gagaacaggcguaauaaug

SEQ ID NO: 359367 - RNA, 19 nt, Homo sapiens
  misc_RNA (1)...(19): siRNA sense strand
ugguguaacuuaugcauua

SEQ ID NO: 359368 - RNA, 19 nt, Homo sapiens
  misc_RNA (1)...(19): siRNA sense strand
uaccacaacugaagacuuu

SEQ ID NO: 359369 - RNA, 19 nt, Homo sapiens
  misc_RNA (1)...(19): siRNA sense strand
ggaaagaagaggcaaguau

SEQ ID NO: 359370 - RNA, 19 nt, Homo sapiens
  misc_RNA (1)...(19): siRNA sense strand
gugagggucucucugauaa

SEQ ID NO: 359371 - RNA, 19 nt, Homo sapiens
  misc_RNA (1)...(19): siRNA sense strand
uugaagaugucccaaauaa

SEQ ID NO: 359372 - RNA, 19 nt, Homo sapiens
  misc_RNA (1)...(19): siRNA sense strand
caagaagagcugccaauuu

SEQ ID NO: 359373 - RNA, 19 nt, Homo sapiens
  misc_RNA (1)...(19): siRNA sense strand
gaaaguauagcaaguaaag

SEQ ID NO: 359374 - RNA, 19 nt, Homo sapiens
  misc_RNA (1)...(19): siRNA sense strand
gacauauacuguacuuuga

SEQ ID NO: 359375 - RNA, 19 nt, Homo sapiens
  misc_RNA (1)...(19): siRNA sense strand
gcaaugagaaugugaaaca

SEQ ID NO: 359376 - RNA, 19 nt, Homo sapiens
  misc_RNA (1)...(19): siRNA sense strand
caucaccacugcccuauga

SEQ ID NO: 359377 - RNA, 19 nt, Homo sapiens
  misc_RNA (1)...(19): siRNA sense strand
gcauuaaagugugacagua

SEQ ID NO: 359378 - RNA, 19 nt, Homo sapiens
  misc_RNA (1)...(19): siRNA sense strand
gaaaucaaacagucucauu

SEQ ID NO: 359379 - RNA, 19 nt, Homo sapiens
  misc_RNA (1)...(19): siRNA sense strand
agaaguacaugcagaaguu

SEQ ID NO: 359380 - RNA, 19 nt, Homo sapiens
  misc_RNA (1)...(19): siRNA sense strand
uaaaggagguauaucgaau

SEQ ID NO: 359381 - RNA, 19 nt, Homo sapiens
  misc_RNA (1)...(19): siRNA sense strand
gaagucauacucacagaaa

SEQ ID NO: 359382 - RNA, 19 nt, Homo sapiens
  misc_RNA (1)...(19): siRNA sense strand
gaaauaagcagcaauucca

SEQ ID NO: 359383 - RNA, 19 nt, Homo sapiens
  misc_RNA (1)...(19): siRNA sense strand
gcaagcaccugaaauaagc

SEQ ID NO: 359384 - RNA, 19 nt, Homo sapiens
  misc_RNA (1)...(19): siRNA sense strand
cauauugccugaaagaaga

SEQ ID NO: 359385 - RNA, 19 nt, Homo sapiens
  misc_RNA (1)...(19): siRNA sense strand
ccaaagaggacacugaauu

SEQ ID NO: 359386 - RNA, 19 nt, Homo sapiens
  misc_RNA (1)...(19): siRNA sense strand
gaaauagagcccaaagaga

SEQ ID NO: 359387 - RNA, 19 nt, Homo sapiens
  misc_RNA (1)...(19): siRNA sense strand
gaaaccgucuccagucugu

SEQ ID NO: 359388 - RNA, 19 nt, Homo sapiens
  misc_RNA (1)...(19): siRNA sense strand
ggaaagaaacaauaguaga

SEQ ID NO: 359389 - RNA, 19 nt, Homo sapiens
  misc_RNA (1)...(19): siRNA sense strand
ugaauaaggagcugaagua

SEQ ID NO: 359390 - RNA, 19 nt, Homo sapiens
  misc_RNA (1)...(19): siRNA sense strand
acagacaacuccaccaauu

SEQ ID NO: 359391 - RNA, 19 nt, Homo sapiens
  misc_RNA (1)...(19): siRNA sense strand
ggaaguuguuugagcaaga

SEQ ID NO: 359392 - RNA, 19 nt, Homo sapiens
  misc_RNA (1)...(19): siRNA sense strand
gaauugggaucaacaggau

SEQ ID NO: 359393 - RNA, 19 nt, Homo sapiens
  misc_RNA (1)...(19): siRNA sense strand
gaugauagcaguauuccaa

SEQ ID NO: 359394 - RNA, 19 nt, Homo sapiens
  misc_RNA (1)...(19): siRNA sense strand
agaagggaauuccauauug

SEQ ID NO: 359395 - RNA, 19 nt, Homo sapiens
  misc_RNA (1)...(19): siRNA sense strand
gaagaauuaccacaacuga

SEQ ID NO: 359396 - RNA, 19 nt, Homo sapiens
  misc_RNA (1)...(19): siRNA sense strand
ccagaugacagauaugaua

SEQ ID NO: 359397 - RNA, 19 nt, Homo sapiens
  misc_RNA (1)...(19): siRNA sense strand
acccaagucugauaaauuu

SEQ ID NO: 359398 - RNA, 19 nt, Homo sapiens
  misc_RNA (1)...(19): siRNA sense strand
uaagaaggauucaguggau

SEQ ID NO: 359399 - RNA, 19 nt, Homo sapiens
  misc_RNA (1)...(19): siRNA sense strand
gaaaaugccauguuacuuu

SEQ ID NO: 359400 - RNA, 19 nt, Homo sapiens
  misc_RNA (1)...(19): siRNA sense strand
gagaagaauccggaaauuu

SEQ ID NO: 359401 - RNA, 19 nt, Homo sapiens
  misc_RNA (1)...(19): siRNA sense strand
caagauaaacucaugucua

SEQ ID NO: 359402 - RNA, 19 nt, Homo sapiens
  misc_RNA (1)...(19): siRNA sense strand
aggaguacauuaagaagua

SEQ ID NO: 359403 - RNA, 19 nt, Homo sapiens
  misc_RNA (1)...(19): siRNA sense strand
cacaacagcugccugaaug

SEQ ID NO: 359404 - RNA, 19 nt, Homo sapiens
  misc_RNA (1)...(19): siRNA sense strand
ccugaagaaugaugagaua

SEQ ID NO: 359405 - RNA, 19 nt, Homo sapiens
  misc_RNA (1)...(19): siRNA sense strand
gaggacaugugcauacuuc

SEQ ID NO: 359406 - RNA, 19 nt, Homo sapiens
  misc_RNA (1)...(19): siRNA sense strand
ccaaagauucagacauaua

SEQ ID NO: 359407 - RNA, 19 nt, Homo sapiens
  misc_RNA (1)...(19): siRNA sense strand
ucaaacagucucauucuuu

SEQ ID NO: 359408 - RNA, 19 nt, Homo sapiens
  misc_RNA (1)...(19): siRNA sense strand
ccacagcgauggaaggaau

SEQ ID NO: 359409 - RNA, 19 nt, Homo sapiens
  misc_RNA (1)...(19): siRNA sense strand
gaaagagaaucuaaaagga

SEQ ID NO: 359410 - RNA, 19 nt, Homo sapiens
  misc_RNA (1)...(19): siRNA sense strand
gcagacaccuccagugaac

SEQ ID NO: 359411 - RNA, 19 nt, Homo sapiens
  misc_RNA (1)...(19): siRNA sense strand
aaacuuagguugggacuuc

SEQ ID NO: 359412 - RNA, 19 nt, Homo sapiens
  misc_RNA (1)...(19): siRNA sense strand
caaggagacauuuguauga

SEQ ID NO: 359413 - RNA, 19 nt, Homo sapiens
  misc_RNA (1)...(19): siRNA sense strand
gaagaagggaauuccauau

SEQ ID NO: 359414 - RNA, 19 nt, Homo sapiens
  misc_RNA (1)...(19): siRNA sense strand
ugacucagaaguuguauuu

SEQ ID NO: 359415 - RNA, 19 nt, Homo sapiens
  misc_RNA (1)...(19): siRNA sense strand
auaaggagcugaaguacug

SEQ ID NO: 359416 - RNA, 19 nt, Homo sapiens
  misc_RNA (1)...(19): siRNA sense strand
gaauuaaagaccgcaauaa

SEQ ID NO: 359417 - RNA, 19 nt, Homo sapiens
  misc_RNA (1)...(19): siRNA sense strand
gccaagaacagccagauaa

SEQ ID NO: 359418 - RNA, 19 nt, Homo sapiens
  misc_RNA (1)...(19): siRNA sense strand
ggacagaaagaaaguuaga

SEQ ID NO: 359419 - RNA, 19 nt, Homo sapiens
  misc_RNA (1)...(19): siRNA sense strand
cagauucccuaacagauga

SEQ ID NO: 359420 - RNA, 19 nt, Homo sapiens
  misc_RNA (1)...(19): siRNA sense strand
gcgcugugcuuccgaauga

SEQ ID NO: 359421 - RNA, 19 nt, Homo sapiens
  misc_RNA (1)...(19): siRNA sense strand
ggagccgacucuaacacua

SEQ ID NO: 359422 - RNA, 19 nt, Homo sapiens
  misc_RNA (1)...(19): siRNA sense strand
cauuaaaggugaagagauc

SEQ ID NO: 359423 - RNA, 19 nt, Homo sapiens
  misc_RNA (1)...(19): siRNA sense strand
ucacccagcuucccgagaa

SEQ ID NO: 359424 - RNA, 19 nt, Homo sapiens
  misc_RNA (1)...(19): siRNA sense strand
gaaggucauuaaaggugaa

SEQ ID NO: 359425 - RNA, 19 nt, Homo sapiens
  misc_RNA (1)...(19): siRNA sense strand
ccaagagcuucaccuucua

SEQ ID NO: 359426 - RNA, 19 nt, Homo sapiens
  misc_RNA (1)...(19): siRNA sense strand
cauaauaaccagcuucuag

SEQ ID NO: 359427 - RNA, 19 nt, Homo sapiens
  misc_RNA (1)...(19): siRNA sense strand
gaaggugcuuuaucugcau

SEQ ID NO: 359428 - RNA, 19 nt, Homo sapiens
  misc_RNA (1)...(19): siRNA sense strand
cauugaaggugcuuuaucu

SEQ ID NO: 359429 - RNA, 19 nt, Homo sapiens
  misc_RNA (1)...(19): siRNA sense strand
caucacagacuucuacuuc

SEQ ID NO: 359430 - RNA, 19 nt, Homo sapiens
  misc_RNA (1)...(19): siRNA sense strand
gggcaggagccgacucuaa

SEQ ID NO: 359431 - RNA, 19 nt, Homo sapiens
  misc_RNA (1)...(19): siRNA sense strand
cagggaaggucauuaaagg

SEQ ID NO: 359432 - RNA, 19 nt, Homo sapiens
  misc_RNA (1)...(19): siRNA sense strand
gaacaucauggagcucuau

SEQ ID NO: 359433 - RNA, 19 nt, Homo sapiens
  misc_RNA (1)...(19): siRNA sense strand
gaaggacucggcauugaag

SEQ ID NO: 359434 - RNA, 19 nt, Homo sapiens
  misc_RNA (1)...(19): siRNA sense strand
gcagggaaggucauuaaag

SEQ ID NO: 359435 - RNA, 19 nt, Homo sapiens
  misc_RNA (1)...(19): siRNA sense strand
uccaagagcuucaccuucu

SEQ ID NO: 359436 - RNA, 19 nt, Homo sapiens
  misc_RNA (1)...(19): siRNA sense strand
cgagaaugguggcuggaau

SEQ ID NO: 359437 - RNA, 19 nt, Homo sapiens
  misc_RNA (1)...(19): siRNA sense strand
gagaaugguggcuggaaug

SEQ ID NO: 359438 - RNA, 19 nt, Homo sapiens
  misc_RNA (1)...(19): siRNA sense strand
ucacagacuucuacuucca

SEQ ID NO: 359439 - RNA, 19 nt, Homo sapiens
  misc_RNA (1)...(19): siRNA sense strand
cggcauugaaggugcuuua

SEQ ID NO: 359440 - RNA, 19 nt, Homo sapiens
  misc_RNA (1)...(19): siRNA sense strand
ggaagccagugccugucau

SEQ ID NO: 359441 - RNA, 19 nt, Homo sapiens
  misc_RNA (1)...(19): siRNA sense strand
ugaaggacucggcauugaa

SEQ ID NO: 359442 - RNA, 19 nt, Homo sapiens
  misc_RNA (1)...(19): siRNA sense strand
ccaaggaauccaagagcuu

SEQ ID NO: 359443 - RNA, 19 nt, Homo sapiens
  misc_RNA (1)...(19): siRNA sense strand
caucauggagcucuaucuu

SEQ ID NO: 359444 - RNA, 19 nt, Homo sapiens
  misc_RNA (1)...(19): siRNA sense strand
gcauugaaggugcuuuauc

SEQ ID NO: 359445 - RNA, 19 nt, Homo sapiens
  misc_RNA (1)...(19): siRNA sense strand
gcaggagccgacucuaaca

SEQ ID NO: 359446 - RNA, 19 nt, Homo sapiens
  misc_RNA (1)...(19): siRNA sense strand
gaucagccugucagacuca

SEQ ID NO: 359447 - RNA, 19 nt, Homo sapiens
  misc_RNA (1)...(19): siRNA sense strand
gaagccagugccugucaug

SEQ ID NO: 359448 - RNA, 19 nt, Homo sapiens
  misc_RNA (1)...(19): siRNA sense strand
gagccgacucuaacacuag

SEQ ID NO: 359449 - RNA, 19 nt, Homo sapiens
  misc_RNA (1)...(19): siRNA sense strand
ugaacaucauggagcucua

SEQ ID NO: 359450 - RNA, 19 nt, Homo sapiens
  misc_RNA (1)...(19): siRNA sense strand
augaaggacucggcauuga

SEQ ID NO: 359451 - RNA, 19 nt, Homo sapiens
  misc_RNA (1)...(19): siRNA sense strand
gcauaauaaccagcuucua

SEQ ID NO: 359452 - RNA, 19 nt, Homo sapiens
  misc_RNA (1)...(19): siRNA sense strand
aaggugcuuuaucugcaua

SEQ ID NO: 359453 - RNA, 19 nt, Homo sapiens
  misc_RNA (1)...(19): siRNA sense strand
ggcaggagccgacucuaac

SEQ ID NO: 359454 - RNA, 19 nt, Homo sapiens
  misc_RNA (1)...(19): siRNA sense strand
gcgcugugcuuccgaauga

SEQ ID NO: 359455 - RNA, 19 nt, Homo sapiens
  misc_RNA (1)...(19): siRNA sense strand
ggagccgacucuaacacua

SEQ ID NO: 359456 - RNA, 19 nt, Homo sapiens
  misc_RNA (1)...(19): siRNA sense strand
cauuaaaggugaagagauc

SEQ ID NO: 359457 - RNA, 19 nt, Homo sapiens
  misc_RNA (1)...(19): siRNA sense strand
ucacccagcuucccgagaa

SEQ ID NO: 359458 - RNA, 19 nt, Homo sapiens
  misc_RNA (1)...(19): siRNA sense strand
gaaggucauuaaaggugaa

SEQ ID NO: 359459 - RNA, 19 nt, Homo sapiens
  misc_RNA (1)...(19): siRNA sense strand
ccaagagcuucaccuucua

SEQ ID NO: 359460 - RNA, 19 nt, Homo sapiens
  misc_RNA (1)...(19): siRNA sense strand
cauaauaaccagcuucuag

SEQ ID NO: 359461 - RNA, 19 nt, Homo sapiens
  misc_RNA (1)...(19): siRNA sense strand
gaaggugcuuuaucugcau

SEQ ID NO: 359462 - RNA, 19 nt, Homo sapiens
  misc_RNA (1)...(19): siRNA sense strand
cauugaaggugcuuuaucu

SEQ ID NO: 359463 - RNA, 19 nt, Homo sapiens
  misc_RNA (1)...(19): siRNA sense strand
caucacagacuucuacuuc

SEQ ID NO: 359464 - RNA, 19 nt, Homo sapiens
  misc_RNA (1)...(19): siRNA sense strand
gggcaggagccgacucuaa

SEQ ID NO: 359465 - RNA, 19 nt, Homo sapiens
  misc_RNA (1)...(19): siRNA sense strand
cagggaaggucauuaaagg

SEQ ID NO: 359466 - RNA, 19 nt, Homo sapiens
  misc_RNA (1)...(19): siRNA sense strand
gaacaucauggagcucuau

SEQ ID NO: 359467 - RNA, 19 nt, Homo sapiens
  misc_RNA (1)...(19): siRNA sense strand
gaaggacucggcauugaag

SEQ ID NO: 359468 - RNA, 19 nt, Homo sapiens
  misc_RNA (1)...(19): siRNA sense strand
gcagggaaggucauuaaag

SEQ ID NO: 359469 - RNA, 19 nt, Homo sapiens
  misc_RNA (1)...(19): siRNA sense strand
uccaagagcuucaccuucu

SEQ ID NO: 359470 - RNA, 19 nt, Homo sapiens
  misc_RNA (1)...(19): siRNA sense strand
cgagaaugguggcuggaau

SEQ ID NO: 359471 - RNA, 19 nt, Homo sapiens
  misc_RNA (1)...(19): siRNA sense strand
gagaaugguggcuggaaug

SEQ ID NO: 359472 - RNA, 19 nt, Homo sapiens
  misc_RNA (1)...(19): siRNA sense strand
ucacagacuucuacuucca

SEQ ID NO: 359473 - RNA, 19 nt, Homo sapiens
  misc_RNA (1)...(19): siRNA sense strand
cggcauugaaggugcuuua

SEQ ID NO: 359474 - RNA, 19 nt, Homo sapiens
  misc_RNA (1)...(19): siRNA sense strand
ggaagccagugccugucau

SEQ ID NO: 359475 - RNA, 19 nt, Homo sapiens
  misc_RNA (1)...(19): siRNA sense strand
ugaaggacucggcauugaa

SEQ ID NO: 359476 - RNA, 19 nt, Homo sapiens
  misc_RNA (1)...(19): siRNA sense strand
ccaaggaauccaagagcuu

SEQ ID NO: 359477 - RNA, 19 nt, Homo sapiens
  misc_RNA (1)...(19): siRNA sense strand
caucauggagcucuaucuu

SEQ ID NO: 359478 - RNA, 19 nt, Homo sapiens
  misc_RNA (1)...(19): siRNA sense strand
gcauugaaggugcuuuauc

SEQ ID NO: 359479 - RNA, 19 nt, Homo sapiens
  misc_RNA (1)...(19): siRNA sense strand
gcaggagccgacucuaaca

SEQ ID NO: 359480 - RNA, 19 nt, Homo sapiens
  misc_RNA (1)...(19): siRNA sense strand
gaucagccugucagacuca

SEQ ID NO: 359481 - RNA, 19 nt, Homo sapiens
  misc_RNA (1)...(19): siRNA sense strand
gaagccagugccugucaug

SEQ ID NO: 359482 - RNA, 19 nt, Homo sapiens
  misc_RNA (1)...(19): siRNA sense strand
gagccgacucuaacacuag

SEQ ID NO: 359483 - RNA, 19 nt, Homo sapiens
  misc_RNA (1)...(19): siRNA sense strand
ugaacaucauggagcucua

SEQ ID NO: 359484 - RNA, 19 nt, Homo sapiens
  misc_RNA (1)...(19): siRNA sense strand
augaaggacucggcauuga

SEQ ID NO: 359485 - RNA, 19 nt, Homo sapiens
  misc_RNA (1)...(19): siRNA sense strand
gcauaauaaccagcuucua

SEQ ID NO: 359486 - RNA, 19 nt, Homo sapiens
  misc_RNA (1)...(19): siRNA sense strand
aaggugcuuuaucugcaua

SEQ ID NO: 359487 - RNA, 19 nt, Homo sapiens
  misc_RNA (1)...(19): siRNA sense strand
ggcaggagccgacucuaac

SEQ ID NO: 359488 - RNA, 19 nt, Homo sapiens
  misc_RNA (1)...(19): siRNA sense strand
ggacaaugcacccuucaga

SEQ ID NO: 359489 - RNA, 19 nt, Homo sapiens
  misc_RNA (1)...(19): siRNA sense strand
ggauaaagagggaaacuca

SEQ ID NO: 359490 - RNA, 19 nt, Homo sapiens
  misc_RNA (1)...(19): siRNA sense strand
acacaaccauggaaaguuc

SEQ ID NO: 359491 - RNA, 19 nt, Homo sapiens
  misc_RNA (1)...(19): siRNA sense strand
gauguucacuuuccuucug

SEQ ID NO: 359492 - RNA, 19 nt, Homo sapiens
  misc_RNA (1)...(19): siRNA sense strand
gcagggcgauaucacuguu

SEQ ID NO: 359493 - RNA, 19 nt, Homo sapiens
  misc_RNA (1)...(19): siRNA sense strand
gggacccgauguucacuuu

SEQ ID NO: 359494 - RNA, 19 nt, Homo sapiens
  misc_RNA (1)...(19): siRNA sense strand
ugacagacccucccucuca

SEQ ID NO: 359495 - RNA, 19 nt, Homo sapiens
  misc_RNA (1)...(19): siRNA sense strand
gguaccgucuggauaaaga

SEQ ID NO: 359496 - RNA, 19 nt, Homo sapiens
  misc_RNA (1)...(19): siRNA sense strand
gaacaugcagggcgauauc

SEQ ID NO: 359497 - RNA, 19 nt, Homo sapiens
  misc_RNA (1)...(19): siRNA sense strand
ucacuuuccuucugaccaa

SEQ ID NO: 359498 - RNA, 19 nt, Homo sapiens
  misc_RNA (1)...(19): siRNA sense strand
guggugaccucaggaguga

SEQ ID NO: 359499 - RNA, 19 nt, Homo sapiens
  misc_RNA (1)...(19): siRNA sense strand
gaacucacaccaacacaac

SEQ ID NO: 359500 - RNA, 19 nt, Homo sapiens
  misc_RNA (1)...(19): siRNA sense strand
caacagggguacauucaga

SEQ ID NO: 359501 - RNA, 19 nt, Homo sapiens
  misc_RNA (1)...(19): siRNA sense strand
gaaggugacccugcugugu

SEQ ID NO: 359502 - RNA, 19 nt, Homo sapiens
  misc_RNA (1)...(19): siRNA sense strand
gcagguucacucugauuga

SEQ ID NO: 359503 - RNA, 19 nt, Homo sapiens
  misc_RNA (1)...(19): siRNA sense strand
gcucagcacagccagagaa

SEQ ID NO: 359504 - RNA, 19 nt, Homo sapiens
  misc_RNA (1)...(19): siRNA sense strand
caacacaaccauggaaagu

SEQ ID NO: 359505 - RNA, 19 nt, Homo sapiens
  misc_RNA (1)...(19): siRNA sense strand
ugucaggcgugucuaggaa

SEQ ID NO: 359506 - RNA, 19 nt, Homo sapiens
  misc_RNA (1)...(19): siRNA sense strand
ccucgggauucuguuauuu

SEQ ID NO: 359507 - RNA, 19 nt, Homo sapiens
  misc_RNA (1)...(19): siRNA sense strand
auaaguaccaggcugaauu

SEQ ID NO: 359508 - RNA, 19 nt, Homo sapiens
  misc_RNA (1)...(19): siRNA sense strand
gaaucugacccuccagugu

SEQ ID NO: 359509 - RNA, 19 nt, Homo sapiens
  misc_RNA (1)...(19): siRNA sense strand
caauguacggagcucauaa

SEQ ID NO: 359510 - RNA, 19 nt, Homo sapiens
  misc_RNA (1)...(19): siRNA sense strand
gauaaagagggaaacucaa

SEQ ID NO: 359511 - RNA, 19 nt, Homo sapiens
  misc_RNA (1)...(19): siRNA sense strand
ucgggauucuguuauuuga

SEQ ID NO: 359512 - RNA, 19 nt, Homo sapiens
  misc_RNA (1)...(19): siRNA sense strand
ccccacaccuccaggauua

SEQ ID NO: 359513 - RNA, 19 nt, Homo sapiens
  misc_RNA (1)...(19): siRNA sense strand
ggcgauaucacuguuacua

SEQ ID NO: 359514 - RNA, 19 nt, Homo sapiens
  misc_RNA (1)...(19): siRNA sense strand
ugucgaggcacauauuaaa

SEQ ID NO: 359515 - RNA, 19 nt, Homo sapiens
  misc_RNA (1)...(19): siRNA sense strand
uaaagagggaaacucaaug

SEQ ID NO: 359516 - RNA, 19 nt, Homo sapiens
  misc_RNA (1)...(19): siRNA sense strand
ucacgguccugaucugucu

SEQ ID NO: 359517 - RNA, 19 nt, Homo sapiens
  misc_RNA (1)...(19): siRNA sense strand
gcacaaaagaagucagauu

SEQ ID NO: 359518 - RNA, 19 nt, Homo sapiens
  misc_RNA (1)...(19): siRNA sense strand
gacccucaauccagcacaa

SEQ ID NO: 359519 - RNA, 19 nt, Homo sapiens
  misc_RNA (1)...(19): siRNA sense strand
aaagagggaaacucaaugu

SEQ ID NO: 359520 - RNA, 19 nt, Homo sapiens
  misc_RNA (1)...(19): siRNA sense strand
uaaguaccaggcugaauuc

SEQ ID NO: 359521 - RNA, 19 nt, Homo sapiens
  misc_RNA (1)...(19): siRNA sense strand
gcgauaucacuguuacuau

SEQ ID NO: 359522 - RNA, 19 nt, Homo sapiens
  misc_RNA (1)...(19): siRNA sense strand
cugggcagguucacucuga

SEQ ID NO: 359523 - RNA, 19 nt, Homo sapiens
  misc_RNA (1)...(19): siRNA sense strand
guuccucgggauucuguua

SEQ ID NO: 359524 - RNA, 19 nt, Homo sapiens
  misc_RNA (1)...(19): siRNA sense strand
ggaacaugcagggcgauau

SEQ ID NO: 359525 - RNA, 19 nt, Homo sapiens
  misc_RNA (1)...(19): siRNA sense strand
ucaauguacggagcucaua

SEQ ID NO: 359526 - RNA, 19 nt, Homo sapiens
  misc_RNA (1)...(19): siRNA sense strand
cagaugcuacggcuaugaa

SEQ ID NO: 359527 - RNA, 19 nt, Homo sapiens
  misc_RNA (1)...(19): siRNA sense strand
auaaagagggaaacucaau

SEQ ID NO: 359528 - RNA, 19 nt, Homo sapiens
  misc_RNA (1)...(19): siRNA sense strand
ccuggacccugaacucaca

SEQ ID NO: 359529 - RNA, 19 nt, Homo sapiens
  misc_RNA (1)...(19): siRNA sense strand
gggcagguucacucugauu

SEQ ID NO: 359530 - RNA, 19 nt, Homo sapiens
  misc_RNA (1)...(19): siRNA sense strand
gcagaaaaccuacccaaac

SEQ ID NO: 359531 - RNA, 19 nt, Homo sapiens
  misc_RNA (1)...(19): siRNA sense strand
uaucacuguuacuaucaga

SEQ ID NO: 359532 - RNA, 19 nt, Homo sapiens
  misc_RNA (1)...(19): siRNA sense strand
acaaugcacccuucagagu

SEQ ID NO: 359533 - RNA, 19 nt, Homo sapiens
  misc_RNA (1)...(19): siRNA sense strand
gaaaacaaggucaaacucu

SEQ ID NO: 359534 - RNA, 19 nt, Homo sapiens
  misc_RNA (1)...(19): siRNA sense strand
gugaucaccuggcauaacc

SEQ ID NO: 359535 - RNA, 19 nt, Homo sapiens
  misc_RNA (1)...(19): siRNA sense strand
gggaacaugcagggcgaua

SEQ ID NO: 359536 - RNA, 19 nt, Homo sapiens
  misc_RNA (1)...(19): siRNA sense strand
gaggcaaacagcagaaagg

SEQ ID NO: 359537 - RNA, 19 nt, Homo sapiens
  misc_RNA (1)...(19): siRNA sense strand
gacccgauguucacuuucc

SEQ ID NO: 359538 - RNA, 19 nt, Homo sapiens
  misc_RNA (1)...(19): siRNA sense strand
cagcagaaaggacaaugca

SEQ ID NO: 359539 - RNA, 19 nt, Homo sapiens
  misc_RNA (1)...(19): siRNA sense strand
caaaagaagucagauucca

SEQ ID NO: 359540 - RNA, 19 nt, Homo sapiens
  misc_RNA (1)...(19): siRNA sense strand
uguacggagcucauaagua

SEQ ID NO: 359541 - RNA, 19 nt, Homo sapiens
  misc_RNA (1)...(19): siRNA sense strand
ggauuacacaguggagaau

SEQ ID NO: 359542 - RNA, 19 nt, Homo sapiens
  misc_RNA (1)...(19): siRNA sense strand
ggaggcaaacagcagaaag

SEQ ID NO: 359543 - RNA, 19 nt, Homo sapiens
  misc_RNA (1)...(19): siRNA sense strand
ccaacaaagugaagagaua

SEQ ID NO: 359544 - RNA, 19 nt, Homo sapiens
  misc_RNA (1)...(19): siRNA sense strand
cgaagaagcuagacucaga

SEQ ID NO: 359545 - RNA, 19 nt, Homo sapiens
  misc_RNA (1)...(19): siRNA sense strand
gaagagauaccuagcaauc

SEQ ID NO: 359546 - RNA, 19 nt, Homo sapiens
  misc_RNA (1)...(19): siRNA sense strand
gcgccuugcuuauuucuga

SEQ ID NO: 359547 - RNA, 19 nt, Homo sapiens
  misc_RNA (1)...(19): siRNA sense strand
ggaagacccacgcaaagaa

SEQ ID NO: 359548 - RNA, 19 nt, Homo sapiens
  misc_RNA (1)...(19): siRNA sense strand
agaccaagcucaaacuaau

SEQ ID NO: 359549 - RNA, 19 nt, Homo sapiens
  misc_RNA (1)...(19): siRNA sense strand
caaagaacuuaaagcugaa

SEQ ID NO: 359550 - RNA, 19 nt, Homo sapiens
  misc_RNA (1)...(19): siRNA sense strand
gugaagagauaccuagcaa

SEQ ID NO: 359551 - RNA, 19 nt, Homo sapiens
  misc_RNA (1)...(19): siRNA sense strand
ugaagcagcaguccacuaa

SEQ ID NO: 359552 - RNA, 19 nt, Homo sapiens
  misc_RNA (1)...(19): siRNA sense strand
caaugucucuucaccaaca

SEQ ID NO: 359553 - RNA, 19 nt, Homo sapiens
  misc_RNA (1)...(19): siRNA sense strand
gaucagaagagcagcagaa

SEQ ID NO: 359554 - RNA, 19 nt, Homo sapiens
  misc_RNA (1)...(19): siRNA sense strand
gaagagcagcagaagcaaa

SEQ ID NO: 359555 - RNA, 19 nt, Homo sapiens
  misc_RNA (1)...(19): siRNA sense strand
ugucauggcucaacaacau

SEQ ID NO: 359556 - RNA, 19 nt, Homo sapiens
  misc_RNA (1)...(19): siRNA sense strand
gaugauagacccagacaag

SEQ ID NO: 359557 - RNA, 19 nt, Homo sapiens
  misc_RNA (1)...(19): siRNA sense strand
gcaccagaauagagagaug

SEQ ID NO: 359558 - RNA, 19 nt, Homo sapiens
  misc_RNA (1)...(19): siRNA sense strand
gagaggaaguggagcacau

SEQ ID NO: 359559 - RNA, 19 nt, Homo sapiens
  misc_RNA (1)...(19): siRNA sense strand
gagaccaagcucaaacuaa

SEQ ID NO: 359560 - RNA, 19 nt, Homo sapiens
  misc_RNA (1)...(19): siRNA sense strand
caaccaccuuggaagacua

SEQ ID NO: 359561 - RNA, 19 nt, Homo sapiens
  misc_RNA (1)...(19): siRNA sense strand
ggcaacccauucagaaaga

SEQ ID NO: 359562 - RNA, 19 nt, Homo sapiens
  misc_RNA (1)...(19): siRNA sense strand
cauguaagauagugcugaa

SEQ ID NO: 359563 - RNA, 19 nt, Homo sapiens
  misc_RNA (1)...(19): siRNA sense strand
aaacaugccaacaaaguga

SEQ ID NO: 359564 - RNA, 19 nt, Homo sapiens
  misc_RNA (1)...(19): siRNA sense strand
caaaggcaacccauucaga

SEQ ID NO: 359565 - RNA, 19 nt, Homo sapiens
  misc_RNA (1)...(19): siRNA sense strand
ugaacuccauagaacagua

SEQ ID NO: 359566 - RNA, 19 nt, Homo sapiens
  misc_RNA (1)...(19): siRNA sense strand
gugcugaacuccauagaac

SEQ ID NO: 359567 - RNA, 19 nt, Homo sapiens
  misc_RNA (1)...(19): siRNA sense strand
cagaagagcagcagaagca

SEQ ID NO: 359568 - RNA, 19 nt, Homo sapiens
  misc_RNA (1)...(19): siRNA sense strand
gauagacccagacaaguuc

SEQ ID NO: 359569 - RNA, 19 nt, Homo sapiens
  misc_RNA (1)...(19): siRNA sense strand
ggagaccaagcucaaacua

SEQ ID NO: 359570 - RNA, 19 nt, Homo sapiens
  misc_RNA (1)...(19): siRNA sense strand
ggaaguggagcacaugauc

SEQ ID NO: 359571 - RNA, 19 nt, Homo sapiens
  misc_RNA (1)...(19): siRNA sense strand
gaacaguaccaagcucaug

SEQ ID NO: 359572 - RNA, 19 nt, Homo sapiens
  misc_RNA (1)...(19): siRNA sense strand
gcagaagcaaagacaagaa

SEQ ID NO: 359573 - RNA, 19 nt, Homo sapiens
  misc_RNA (1)...(19): siRNA sense strand
gagcacaugauccagaaga

SEQ ID NO: 359574 - RNA, 19 nt, Homo sapiens
  misc_RNA (1)...(19): siRNA sense strand
gggaagacccacgcaaaga

SEQ ID NO: 359575 - RNA, 19 nt, Homo sapiens
  misc_RNA (1)...(19): siRNA sense strand
acaagaaccagucaccaaa

SEQ ID NO: 359576 - RNA, 19 nt, Homo sapiens
  misc_RNA (1)...(19): siRNA sense strand
ugauagacccagacaaguu

SEQ ID NO: 359577 - RNA, 19 nt, Homo sapiens
  misc_RNA (1)...(19): siRNA sense strand
cagaauagagagaugauag

SEQ ID NO: 359578 - RNA, 19 nt, Homo sapiens
  misc_RNA (1)...(19): siRNA sense strand
aaaggcaacccauucagaa

SEQ ID NO: 359579 - RNA, 19 nt, Homo sapiens
  misc_RNA (1)...(19): siRNA sense strand
caaagugaagagauaccua

SEQ ID NO: 359580 - RNA, 19 nt, Homo sapiens
  misc_RNA (1)...(19): siRNA sense strand
cagaagaaccaaugucucu

SEQ ID NO: 359581 - RNA, 19 nt, Homo sapiens
  misc_RNA (1)...(19): siRNA sense strand
guaagauagugcugaacuc

SEQ ID NO: 359582 - RNA, 19 nt, Homo sapiens
  misc_RNA (1)...(19): siRNA sense strand
gaagcuagacucagaucag

SEQ ID NO: 359583 - RNA, 19 nt, Homo sapiens
  misc_RNA (1)...(19): siRNA sense strand
gggaaacgaagaagcuaga

SEQ ID NO: 359584 - RNA, 19 nt, Homo sapiens
  misc_RNA (1)...(19): siRNA sense strand
agagauaccuagcaaucca

SEQ ID NO: 359585 - RNA, 19 nt, Homo sapiens
  misc_RNA (1)...(19): siRNA sense strand
gaagaagcuagacucagau

SEQ ID NO: 359586 - RNA, 19 nt, Homo sapiens
  misc_RNA (1)...(19): siRNA sense strand
aagcuagacucagaucaga

SEQ ID NO: 359587 - RNA, 19 nt, Homo sapiens
  misc_RNA (1)...(19): siRNA sense strand
ggccagauuccaaugcaaa

SEQ ID NO: 359588 - RNA, 19 nt, Homo sapiens
  misc_RNA (1)...(19): siRNA sense strand
ucauggcucaacaacauua

SEQ ID NO: 359589 - RNA, 19 nt, Homo sapiens
  misc_RNA (1)...(19): siRNA sense strand
gacccacgcaaagaacuua

SEQ ID NO: 359590 - RNA, 19 nt, Homo sapiens
  misc_RNA (1)...(19): siRNA sense strand
accaaugucucuucaccaa

SEQ ID NO: 359591 - RNA, 19 nt, Homo sapiens
  misc_RNA (1)...(19): siRNA sense strand
gucagcggcuucaaacaca

SEQ ID NO: 359592 - RNA, 19 nt, Homo sapiens
  misc_RNA (1)...(19): siRNA sense strand
gaagcaaagacaagaacca

SEQ ID NO: 359593 - RNA, 19 nt, Homo sapiens
  misc_RNA (1)...(19): siRNA sense strand
gaagacccacgcaaagaac

SEQ ID NO: 359594 - RNA, 19 nt, Homo sapiens
  misc_RNA (1)...(19): siRNA sense strand
cacaagaaccagucaccaa

SEQ ID NO: 359595 - RNA, 19 nt, Homo sapiens
  misc_RNA (1)...(19): siRNA sense strand
aaacuaauggcacgcuaug

SEQ ID NO: 359596 - RNA, 19 nt, Homo sapiens
  misc_RNA (1)...(19): siRNA sense strand
gaccaagcucaaacuaaug

SEQ ID NO: 359597 - RNA, 19 nt, Homo sapiens
  misc_RNA (1)...(19): siRNA sense strand
gaggaaguggagcacauga

SEQ ID NO: 359598 - RNA, 19 nt, Homo sapiens
  misc_RNA (1)...(19): siRNA sense strand
gcacauuaccagagcaaaa

SEQ ID NO: 359599 - RNA, 19 nt, Homo sapiens
  misc_RNA (1)...(19): siRNA sense strand
gauagugcugaacuccaua

SEQ ID NO: 359600 - RNA, 19 nt, Homo sapiens
  misc_RNA (1)...(19): siRNA sense strand
aagcagcaguccacuaagg

SEQ ID NO: 359601 - RNA, 19 nt, Homo sapiens
  misc_RNA (1)...(19): siRNA sense strand
caaacuaauggcacgcuau

SEQ ID NO: 359602 - RNA, 19 nt, Homo sapiens
  misc_RNA (1)...(19): siRNA sense strand
ccucugccaugcaacuuuc

SEQ ID NO: 359603 - RNA, 19 nt, Homo sapiens
  misc_RNA (1)...(19): siRNA sense strand
uggaagccuugcaccagaa

SEQ ID NO: 359604 - RNA, 19 nt, Homo sapiens
  misc_RNA (1)...(19): siRNA sense strand
caacaaagugaagagauac

SEQ ID NO: 359605 - RNA, 19 nt, Homo sapiens
  misc_RNA (1)...(19): siRNA sense strand
agauagugcugaacuccau

SEQ ID NO: 359606 - RNA, 19 nt, Homo sapiens
  misc_RNA (1)...(19): siRNA sense strand
caaaacauguaagauagug

SEQ ID NO: 359607 - RNA, 19 nt, Homo sapiens
  misc_RNA (1)...(19): siRNA sense strand
gaagccuugcaccagaaua

SEQ ID NO: 359608 - RNA, 19 nt, Homo sapiens
  misc_RNA (1)...(19): siRNA sense strand
gcuagacucagaucagaag

SEQ ID NO: 359609 - RNA, 19 nt, Homo sapiens
  misc_RNA (1)...(19): siRNA sense strand
agacucaaccaccuuggaa

SEQ ID NO: 359610 - RNA, 19 nt, Homo sapiens
  misc_RNA (1)...(19): siRNA sense strand
gagaugauagacccagaca

SEQ ID NO: 359611 - RNA, 19 nt, Homo sapiens
  misc_RNA (1)...(19): siRNA sense strand
gaauagagagaugauagac

SEQ ID NO: 359612 - RNA, 19 nt, Homo sapiens
  misc_RNA (1)...(19): siRNA sense strand
gccgguggguagagaggaa

SEQ ID NO: 359613 - RNA, 19 nt, Homo sapiens
  misc_RNA (1)...(19): siRNA sense strand
cagcagaagcaaagacaag

SEQ ID NO: 359614 - RNA, 19 nt, Homo sapiens
  misc_RNA (1)...(19): siRNA sense strand
gggccagauuccaaugcaa

SEQ ID NO: 359615 - RNA, 19 nt, Homo sapiens
  misc_RNA (1)...(19): siRNA sense strand
gaaacgaagaagcuagacu

SEQ ID NO: 359616 - RNA, 19 nt, Homo sapiens
  misc_RNA (1)...(19): siRNA sense strand
gaacuccauagaacaguac

SEQ ID NO: 359617 - RNA, 19 nt, Homo sapiens
  misc_RNA (1)...(19): siRNA sense strand
ccagaauagagagaugaua

SEQ ID NO: 359618 - RNA, 19 nt, Homo sapiens
  misc_RNA (1)...(19): siRNA sense strand
agaauagagagaugauaga

SEQ ID NO: 359619 - RNA, 19 nt, Homo sapiens
  misc_RNA (1)...(19): siRNA sense strand
gcaaaggcaacccauucag

SEQ ID NO: 359620 - RNA, 19 nt, Homo sapiens
  misc_RNA (1)...(19): siRNA sense strand
cugcaaaacauguaagaua

SEQ ID NO: 359621 - RNA, 19 nt, Homo sapiens
  misc_RNA (1)...(19): siRNA sense strand
gcaagaaacacagaaaaca

SEQ ID NO: 359622 - RNA, 19 nt, Homo sapiens
  misc_RNA (1)...(19): siRNA sense strand
ugcugcgccuugcuuauuu

SEQ ID NO: 359623 - RNA, 19 nt, Homo sapiens
  misc_RNA (1)...(19): siRNA sense strand
gcugcgccuugcuuauuuc

SEQ ID NO: 359624 - RNA, 19 nt, Homo sapiens
  misc_RNA (1)...(19): siRNA sense strand
gcagcagaagcaaagacaa

SEQ ID NO: 359625 - RNA, 19 nt, Homo sapiens
  misc_RNA (1)...(19): siRNA sense strand
gauccagaagaaccaaugu

SEQ ID NO: 359626 - RNA, 19 nt, Homo sapiens
  misc_RNA (1)...(19): siRNA sense strand
gcacaugauccagaagaac

SEQ ID NO: 359627 - RNA, 19 nt, Homo sapiens
  misc_RNA (1)...(19): siRNA sense strand
gaaaugaguuguucaccuu

SEQ ID NO: 359628 - RNA, 19 nt, Homo sapiens
  misc_RNA (1)...(19): siRNA sense strand
gaccugagcuccuaugauu

SEQ ID NO: 359629 - RNA, 19 nt, Homo sapiens
  misc_RNA (1)...(19): siRNA sense strand
ggaagacaaugaaaugagu

SEQ ID NO: 359630 - RNA, 19 nt, Homo sapiens
  misc_RNA (1)...(19): siRNA sense strand
gauaaggaauuccaacucu

SEQ ID NO: 359631 - RNA, 19 nt, Homo sapiens
  misc_RNA (1)...(19): siRNA sense strand
gagaucauccagcacuuua

SEQ ID NO: 359632 - RNA, 19 nt, Homo sapiens
  misc_RNA (1)...(19): siRNA sense strand
uaaccggucuccaugaugu

SEQ ID NO: 359633 - RNA, 19 nt, Homo sapiens
  misc_RNA (1)...(19): siRNA sense strand
gauggaagacaaugaaaug

SEQ ID NO: 359634 - RNA, 19 nt, Homo sapiens
  misc_RNA (1)...(19): siRNA sense strand
uccaugauguugaugagua

SEQ ID NO: 359635 - RNA, 19 nt, Homo sapiens
  misc_RNA (1)...(19): siRNA sense strand
ugacggggcuccugaugua

SEQ ID NO: 359636 - RNA, 19 nt, Homo sapiens
  misc_RNA (1)...(19): siRNA sense strand
ggagaucauccagcacuuu

SEQ ID NO: 359637 - RNA, 19 nt, Homo sapiens
  misc_RNA (1)...(19): siRNA sense strand
gaagacaaugaaaugaguu

SEQ ID NO: 359638 - RNA, 19 nt, Homo sapiens
  misc_RNA (1)...(19): siRNA sense strand
caagcgggaugucuacuac

SEQ ID NO: 359639 - RNA, 19 nt, Homo sapiens
  misc_RNA (1)...(19): siRNA sense strand
cagcagaguggacacguuu

SEQ ID NO: 359640 - RNA, 19 nt, Homo sapiens
  misc_RNA (1)...(19): siRNA sense strand
aaacugcuacaacuggaua

SEQ ID NO: 359641 - RNA, 19 nt, Homo sapiens
  misc_RNA (1)...(19): siRNA sense strand
uaaggaauuccaacucuuc

SEQ ID NO: 359642 - RNA, 19 nt, Homo sapiens
  misc_RNA (1)...(19): siRNA sense strand
aaugaguuguucaccuuaa

SEQ ID NO: 359643 - RNA, 19 nt, Homo sapiens
  misc_RNA (1)...(19): siRNA sense strand
gagauggaagacaaugaaa

SEQ ID NO: 359644 - RNA, 19 nt, Homo sapiens
  misc_RNA (1)...(19): siRNA sense strand
ugagauggaagacaaugaa

SEQ ID NO: 359645 - RNA, 19 nt, Homo sapiens
  misc_RNA (1)...(19): siRNA sense strand
ccaugauguugaugaguau

SEQ ID NO: 359646 - RNA, 19 nt, Homo sapiens
  misc_RNA (1)...(19): siRNA sense strand
ccuccuagcugcucugaac

SEQ ID NO: 359647 - RNA, 19 nt, Homo sapiens
  misc_RNA (1)...(19): siRNA sense strand
gaucauccagcacuuuaag

SEQ ID NO: 359648 - RNA, 19 nt, Homo sapiens
  misc_RNA (1)...(19): siRNA sense strand
uagcugcucugaacauugc

SEQ ID NO: 359649 - RNA, 19 nt, Homo sapiens
  misc_RNA (1)...(19): siRNA sense strand
ggucccacccgcaucauug

SEQ ID NO: 359650 - RNA, 19 nt, Homo sapiens
  misc_RNA (1)...(19): siRNA sense strand
ggcuauggcuccacuacca

SEQ ID NO: 359651 - RNA, 19 nt, Homo sapiens
  misc_RNA (1)...(19): siRNA sense strand
ggauaaggaauuccaacuc

SEQ ID NO: 359652 - RNA, 19 nt, Homo sapiens
  misc_RNA (1)...(19): siRNA sense strand
acaacuggauaaggaauuc

SEQ ID NO: 359653 - RNA, 19 nt, Homo sapiens
  misc_RNA (1)...(19): siRNA sense strand
gccaggugcugagccagaa

SEQ ID NO: 359654 - RNA, 19 nt, Homo sapiens
  misc_RNA (1)...(19): siRNA sense strand
auaaggaauuccaacucuu

SEQ ID NO: 359655 - RNA, 19 nt, Homo sapiens
  misc_RNA (1)...(19): siRNA sense strand
ucagcagaguggacacguu

SEQ ID NO: 359656 - RNA, 19 nt, Homo sapiens
  misc_RNA (1)...(19): siRNA sense strand
ggaccugagcuccuaugau

SEQ ID NO: 359657 - RNA, 19 nt, Homo sapiens
  misc_RNA (1)...(19): siRNA sense strand
ccuagcugcucugaacauu

SEQ ID NO: 359658 - RNA, 19 nt, Homo sapiens
  misc_RNA (1)...(19): siRNA sense strand
uguaaccggucuccaugau

SEQ ID NO: 359659 - RNA, 19 nt, Homo sapiens
  misc_RNA (1)...(19): siRNA sense strand
ucgcagcgccuucaaacug

SEQ ID NO: 359660 - RNA, 19 nt, Homo sapiens
  misc_RNA (1)...(19): siRNA sense strand
ugcuacaacuggauaagga

SEQ ID NO: 359661 - RNA, 19 nt, Homo sapiens
  misc_RNA (1)...(19): siRNA sense strand
caaaggacaagcgggaugu

SEQ ID NO: 359662 - RNA, 19 nt, Homo sapiens
  misc_RNA (1)...(19): siRNA sense strand
gaugugacgcuccucuaca

SEQ ID NO: 359663 - RNA, 19 nt, Homo sapiens
  misc_RNA (1)...(19): siRNA sense strand
ggagcagccggaacucuag

SEQ ID NO: 359664 - RNA, 19 nt, Homo sapiens
  misc_RNA (1)...(19): siRNA sense strand
guuacccacuggaccuaga

SEQ ID NO: 359665 - RNA, 19 nt, Homo sapiens
  misc_RNA (1)...(19): siRNA sense strand
aaaugaguuguucaccuua

SEQ ID NO: 359666 - RNA, 19 nt, Homo sapiens
  misc_RNA (1)...(19): siRNA sense strand
acaagcgggaugucuacua

SEQ ID NO: 359667 - RNA, 19 nt, Homo sapiens
  misc_RNA (1)...(19): siRNA sense strand
ugauguugaugaguauaug

SEQ ID NO: 359668 - RNA, 19 nt, Homo sapiens
  misc_RNA (1)...(19): siRNA sense strand
gggaugugacgcuccucua

SEQ ID NO: 359669 - RNA, 19 nt, Homo sapiens
  misc_RNA (1)...(19): siRNA sense strand
gcuuuguggccaagauauu

SEQ ID NO: 359670 - RNA, 19 nt, Homo sapiens
  misc_RNA (1)...(19): siRNA sense strand
gcuacaacuggauaaggaa

SEQ ID NO: 359671 - RNA, 19 nt, Homo sapiens
  misc_RNA (1)...(19): siRNA sense strand
cuguggaccugcaggcuau

SEQ ID NO: 359672 - RNA, 19 nt, Homo sapiens
  misc_RNA (1)...(19): siRNA sense strand
gcggcucagaguacaagua

SEQ ID NO: 359673 - RNA, 19 nt, Homo sapiens
  misc_RNA (1)...(19): siRNA sense strand
ggaugugacgcuccucuac

SEQ ID NO: 359674 - RNA, 19 nt, Homo sapiens
  misc_RNA (1)...(19): siRNA sense strand
gcucgcagcgccuucaaac

SEQ ID NO: 359675 - RNA, 19 nt, Homo sapiens
  misc_RNA (1)...(19): siRNA sense strand
gaaaugaguuguucaccuu

SEQ ID NO: 359676 - RNA, 19 nt, Homo sapiens
  misc_RNA (1)...(19): siRNA sense strand
gaccugagcuccuaugauu

SEQ ID NO: 359677 - RNA, 19 nt, Homo sapiens
  misc_RNA (1)...(19): siRNA sense strand
ggaagacaaugaaaugagu

SEQ ID NO: 359678 - RNA, 19 nt, Homo sapiens
  misc_RNA (1)...(19): siRNA sense strand
gauaaggaauuccaacucu

SEQ ID NO: 359679 - RNA, 19 nt, Homo sapiens
  misc_RNA (1)...(19): siRNA sense strand
gagaucauccagcacuuua

SEQ ID NO: 359680 - RNA, 19 nt, Homo sapiens
  misc_RNA (1)...(19): siRNA sense strand
uaaccggucuccaugaugu

SEQ ID NO: 359681 - RNA, 19 nt, Homo sapiens
  misc_RNA (1)...(19): siRNA sense strand
gauggaagacaaugaaaug

SEQ ID NO: 359682 - RNA, 19 nt, Homo sapiens
  misc_RNA (1)...(19): siRNA sense strand
uccaugauguugaugagua

SEQ ID NO: 359683 - RNA, 19 nt, Homo sapiens
  misc_RNA (1)...(19): siRNA sense strand
ugacggggcuccugaugua

SEQ ID NO: 359684 - RNA, 19 nt, Homo sapiens
  misc_RNA (1)...(19): siRNA sense strand
ggagaucauccagcacuuu

SEQ ID NO: 359685 - RNA, 19 nt, Homo sapiens
  misc_RNA (1)...(19): siRNA sense strand
gaagacaaugaaaugaguu

SEQ ID NO: 359686 - RNA, 19 nt, Homo sapiens
  misc_RNA (1)...(19): siRNA sense strand
caagcgggaugucuacuac

SEQ ID NO: 359687 - RNA, 19 nt, Homo sapiens
  misc_RNA (1)...(19): siRNA sense strand
cagcagaguggacacguuu

SEQ ID NO: 359688 - RNA, 19 nt, Homo sapiens
  misc_RNA (1)...(19): siRNA sense strand
aaacugcuacaacuggaua

SEQ ID NO: 359689 - RNA, 19 nt, Homo sapiens
  misc_RNA (1)...(19): siRNA sense strand
uaaggaauuccaacucuuc

SEQ ID NO: 359690 - RNA, 19 nt, Homo sapiens
  misc_RNA (1)...(19): siRNA sense strand
aaugaguuguucaccuuaa

SEQ ID NO: 359691 - RNA, 19 nt, Homo sapiens
  misc_RNA (1)...(19): siRNA sense strand
gagauggaagacaaugaaa

SEQ ID NO: 359692 - RNA, 19 nt, Homo sapiens
  misc_RNA (1)...(19): siRNA sense strand
ugagauggaagacaaugaa

SEQ ID NO: 359693 - RNA, 19 nt, Homo sapiens
  misc_RNA (1)...(19): siRNA sense strand
ccaugauguugaugaguau

SEQ ID NO: 359694 - RNA, 19 nt, Homo sapiens
  misc_RNA (1)...(19): siRNA sense strand
ccuccuagcugcucugaac

SEQ ID NO: 359695 - RNA, 19 nt, Homo sapiens
  misc_RNA (1)...(19): siRNA sense strand
gaucauccagcacuuuaag

SEQ ID NO: 359696 - RNA, 19 nt, Homo sapiens
  misc_RNA (1)...(19): siRNA sense strand
uagcugcucugaacauugc

SEQ ID NO: 359697 - RNA, 19 nt, Homo sapiens
  misc_RNA (1)...(19): siRNA sense strand
ggucccacccgcaucauug

SEQ ID NO: 359698 - RNA, 19 nt, Homo sapiens
  misc_RNA (1)...(19): siRNA sense strand
ggcuauggcuccacuacca

SEQ ID NO: 359699 - RNA, 19 nt, Homo sapiens
  misc_RNA (1)...(19): siRNA sense strand
ggauaaggaauuccaacuc

SEQ ID NO: 359700 - RNA, 19 nt, Homo sapiens
  misc_RNA (1)...(19): siRNA sense strand
acaacuggauaaggaauuc

SEQ ID NO: 359701 - RNA, 19 nt, Homo sapiens
  misc_RNA (1)...(19): siRNA sense strand
gccaggugcugagccagaa

SEQ ID NO: 359702 - RNA, 19 nt, Homo sapiens
  misc_RNA (1)...(19): siRNA sense strand
auaaggaauuccaacucuu

SEQ ID NO: 359703 - RNA, 19 nt, Homo sapiens
  misc_RNA (1)...(19): siRNA sense strand
ucagcagaguggacacguu

SEQ ID NO: 359704 - RNA, 19 nt, Homo sapiens
  misc_RNA (1)...(19): siRNA sense strand
ggaccugagcuccuaugau

SEQ ID NO: 359705 - RNA, 19 nt, Homo sapiens
  misc_RNA (1)...(19): siRNA sense strand
ccuagcugcucugaacauu

SEQ ID NO: 359706 - RNA, 19 nt, Homo sapiens
  misc_RNA (1)...(19): siRNA sense strand
uguaaccggucuccaugau

SEQ ID NO: 359707 - RNA, 19 nt, Homo sapiens
  misc_RNA (1)...(19): siRNA sense strand
ucgcagcgccuucaaacug

SEQ ID NO: 359708 - RNA, 19 nt, Homo sapiens
  misc_RNA (1)...(19): siRNA sense strand
ugcuacaacuggauaagga

SEQ ID NO: 359709 - RNA, 19 nt, Homo sapiens
  misc_RNA (1)...(19): siRNA sense strand
caaaggacaagcgggaugu

SEQ ID NO: 359710 - RNA, 19 nt, Homo sapiens
  misc_RNA (1)...(19): siRNA sense strand
gaugugacgcuccucuaca

SEQ ID NO: 359711 - RNA, 19 nt, Homo sapiens
  misc_RNA (1)...(19): siRNA sense strand
ggagcagccggaacucuag

SEQ ID NO: 359712 - RNA, 19 nt, Homo sapiens
  misc_RNA (1)...(19): siRNA sense strand
guuacccacuggaccuaga

SEQ ID NO: 359713 - RNA, 19 nt, Homo sapiens
  misc_RNA (1)...(19): siRNA sense strand
aaaugaguuguucaccuua

SEQ ID NO: 359714 - RNA, 19 nt, Homo sapiens
  misc_RNA (1)...(19): siRNA sense strand
acaagcgggaugucuacua

SEQ ID NO: 359715 - RNA, 19 nt, Homo sapiens
  misc_RNA (1)...(19): siRNA sense strand
ugauguugaugaguauaug

SEQ ID NO: 359716 - RNA, 19 nt, Homo sapiens
  misc_RNA (1)...(19): siRNA sense strand
gggaugugacgcuccucua

SEQ ID NO: 359717 - RNA, 19 nt, Homo sapiens
  misc_RNA (1)...(19): siRNA sense strand
gcuuuguggccaagauauu

SEQ ID NO: 359718 - RNA, 19 nt, Homo sapiens
  misc_RNA (1)...(19): siRNA sense strand
gcuacaacuggauaaggaa

SEQ ID NO: 359719 - RNA, 19 nt, Homo sapiens
  misc_RNA (1)...(19): siRNA sense strand
cuguggaccugcaggcuau

SEQ ID NO: 359720 - RNA, 19 nt, Homo sapiens
  misc_RNA (1)...(19): siRNA sense strand
gcggcucagaguacaagua

SEQ ID NO: 359721 - RNA, 19 nt, Homo sapiens
  misc_RNA (1)...(19): siRNA sense strand
ggaugugacgcuccucuac

SEQ ID NO: 359722 - RNA, 19 nt, Homo sapiens
  misc_RNA (1)...(19): siRNA sense strand
gcucgcagcgccuucaaac

SEQ ID NO: 359723 - RNA, 19 nt, Homo sapiens
  misc_RNA (1)...(19): siRNA sense strand
gaaaugaguuguucaccuu

SEQ ID NO: 359724 - RNA, 19 nt, Homo sapiens
  misc_RNA (1)...(19): siRNA sense strand
gaccugagcuccuaugauu

SEQ ID NO: 359725 - RNA, 19 nt, Homo sapiens
  misc_RNA (1)...(19): siRNA sense strand
ggaagacaaugaaaugagu

SEQ ID NO: 359726 - RNA, 19 nt, Homo sapiens
  misc_RNA (1)...(19): siRNA sense strand
gauaaggaauuccaacucu

SEQ ID NO: 359727 - RNA, 19 nt, Homo sapiens
  misc_RNA (1)...(19): siRNA sense strand
gagaucauccagcacuuua

SEQ ID NO: 359728 - RNA, 19 nt, Homo sapiens
  misc_RNA (1)...(19): siRNA sense strand
uaaccggucuccaugaugu

SEQ ID NO: 359729 - RNA, 19 nt, Homo sapiens
  misc_RNA (1)...(19): siRNA sense strand
gauggaagacaaugaaaug

SEQ ID NO: 359730 - RNA, 19 nt, Homo sapiens
  misc_RNA (1)...(19): siRNA sense strand
uccaugauguugaugagua

SEQ ID NO: 359731 - RNA, 19 nt, Homo sapiens
  misc_RNA (1)...(19): siRNA sense strand
ugacggggcuccugaugua

SEQ ID NO: 359732 - RNA, 19 nt, Homo sapiens
  misc_RNA (1)...(19): siRNA sense strand
ggagaucauccagcacuuu

SEQ ID NO: 359733 - RNA, 19 nt, Homo sapiens
  misc_RNA (1)...(19): siRNA sense strand
gaagacaaugaaaugaguu

SEQ ID NO: 359734 - RNA, 19 nt, Homo sapiens
  misc_RNA (1)...(19): siRNA sense strand
caagcgggaugucuacuac

SEQ ID NO: 359735 - RNA, 19 nt, Homo sapiens
  misc_RNA (1)...(19): siRNA sense strand
cagcagaguggacacguuu

SEQ ID NO: 359736 - RNA, 19 nt, Homo sapiens
  misc_RNA (1)...(19): siRNA sense strand
aaacugcuacaacuggaua

SEQ ID NO: 359737 - RNA, 19 nt, Homo sapiens
  misc_RNA (1)...(19): siRNA sense strand
uaaggaauuccaacucuuc

SEQ ID NO: 359738 - RNA, 19 nt, Homo sapiens
  misc_RNA (1)...(19): siRNA sense strand
aaugaguuguucaccuuaa

SEQ ID NO: 359739 - RNA, 19 nt, Homo sapiens
  misc_RNA (1)...(19): siRNA sense strand
gagauggaagacaaugaaa

SEQ ID NO: 359740 - RNA, 19 nt, Homo sapiens
  misc_RNA (1)...(19): siRNA sense strand
ugagauggaagacaaugaa

SEQ ID NO: 359741 - RNA, 19 nt, Homo sapiens
  misc_RNA (1)...(19): siRNA sense strand
ccaugauguugaugaguau

SEQ ID NO: 359742 - RNA, 19 nt, Homo sapiens
  misc_RNA (1)...(19): siRNA sense strand
ccuccuagcugcucugaac

SEQ ID NO: 359743 - RNA, 19 nt, Homo sapiens
  misc_RNA (1)...(19): siRNA sense strand
gaucauccagcacuuuaag

SEQ ID NO: 359744 - RNA, 19 nt, Homo sapiens
  misc_RNA (1)...(19): siRNA sense strand
uagcugcucugaacauugc

SEQ ID NO: 359745 - RNA, 19 nt, Homo sapiens
  misc_RNA (1)...(19): siRNA sense strand
ggucccacccgcaucauug

SEQ ID NO: 359746 - RNA, 19 nt, Homo sapiens
  misc_RNA (1)...(19): siRNA sense strand
ggcuauggcuccacuacca

SEQ ID NO: 359747 - RNA, 19 nt, Homo sapiens
  misc_RNA (1)...(19): siRNA sense strand
ggauaaggaauuccaacuc

SEQ ID NO: 359748 - RNA, 19 nt, Homo sapiens
  misc_RNA (1)...(19): siRNA sense strand
acaacuggauaaggaauuc

SEQ ID NO: 359749 - RNA, 19 nt, Homo sapiens
  misc_RNA (1)...(19): siRNA sense strand
gccaggugcugagccagaa

SEQ ID NO: 359750 - RNA, 19 nt, Homo sapiens
  misc_RNA (1)...(19): siRNA sense strand
auaaggaauuccaacucuu

SEQ ID NO: 359751 - RNA, 19 nt, Homo sapiens
  misc_RNA (1)...(19): siRNA sense strand
ucagcagaguggacacguu

SEQ ID NO: 359752 - RNA, 19 nt, Homo sapiens
  misc_RNA (1)...(19): siRNA sense strand
ggaccugagcuccuaugau

SEQ ID NO: 359753 - RNA, 19 nt, Homo sapiens
  misc_RNA (1)...(19): siRNA sense strand
ccuagcugcucugaacauu

SEQ ID NO: 359754 - RNA, 19 nt, Homo sapiens
  misc_RNA (1)...(19): siRNA sense strand
uguaaccggucuccaugau

SEQ ID NO: 359755 - RNA, 19 nt, Homo sapiens
  misc_RNA (1)...(19): siRNA sense strand
ucgcagcgccuucaaacug

SEQ ID NO: 359756 - RNA, 19 nt, Homo sapiens
  misc_RNA (1)...(19): siRNA sense strand
ugcuacaacuggauaagga

SEQ ID NO: 359757 - RNA, 19 nt, Homo sapiens
  misc_RNA (1)...(19): siRNA sense strand
caaaggacaagcgggaugu

SEQ ID NO: 359758 - RNA, 19 nt, Homo sapiens
  misc_RNA (1)...(19): siRNA sense strand
gaugugacgcuccucuaca

SEQ ID NO: 359759 - RNA, 19 nt, Homo sapiens
  misc_RNA (1)...(19): siRNA sense strand
ggagcagccggaacucuag

SEQ ID NO: 359760 - RNA, 19 nt, Homo sapiens
  misc_RNA (1)...(19): siRNA sense strand
guuacccacuggaccuaga

SEQ ID NO: 359761 - RNA, 19 nt, Homo sapiens
  misc_RNA (1)...(19): siRNA sense strand
aaaugaguuguucaccuua

SEQ ID NO: 359762 - RNA, 19 nt, Homo sapiens
  misc_RNA (1)...(19): siRNA sense strand
acaagcgggaugucuacua

SEQ ID NO: 359763 - RNA, 19 nt, Homo sapiens
  misc_RNA (1)...(19): siRNA sense strand
ugauguugaugaguauaug

SEQ ID NO: 359764 - RNA, 19 nt, Homo sapiens
  misc_RNA (1)...(19): siRNA sense strand
gggaugugacgcuccucua

SEQ ID NO: 359765 - RNA, 19 nt, Homo sapiens
  misc_RNA (1)...(19): siRNA sense strand
gcuuuguggccaagauauu

SEQ ID NO: 359766 - RNA, 19 nt, Homo sapiens
  misc_RNA (1)...(19): siRNA sense strand
gcuacaacuggauaaggaa

SEQ ID NO: 359767 - RNA, 19 nt, Homo sapiens
  misc_RNA (1)...(19): siRNA sense strand
cuguggaccugcaggcuau

SEQ ID NO: 359768 - RNA, 19 nt, Homo sapiens
  misc_RNA (1)...(19): siRNA sense strand
gcggcucagaguacaagua

SEQ ID NO: 359769 - RNA, 19 nt, Homo sapiens
  misc_RNA (1)...(19): siRNA sense strand
ggaugugacgcuccucuac

SEQ ID NO: 359770 - RNA, 19 nt, Homo sapiens
  misc_RNA (1)...(19): siRNA sense strand
gcucgcagcgccuucaaac

SEQ ID NO: 359771 - RNA, 19 nt, Homo sapiens
  misc_RNA (1)...(19): siRNA sense strand
gaauugggcuucuugcuuu

SEQ ID NO: 359772 - RNA, 19 nt, Homo sapiens
  misc_RNA (1)...(19): siRNA sense strand
ggaagaguguguuaaacua

SEQ ID NO: 359773 - RNA, 19 nt, Homo sapiens
  misc_RNA (1)...(19): siRNA sense strand
ggaaauauugucagaguuu

SEQ ID NO: 359774 - RNA, 19 nt, Homo sapiens
  misc_RNA (1)...(19): siRNA sense strand
gaacucagcacgauucaga

SEQ ID NO: 359775 - RNA, 19 nt, Homo sapiens
  misc_RNA (1)...(19): siRNA sense strand
gaagaguugugccucagaa

SEQ ID NO: 359776 - RNA, 19 nt, Homo sapiens
  misc_RNA (1)...(19): siRNA sense strand
gaggaaauauugucagagu

SEQ ID NO: 359777 - RNA, 19 nt, Homo sapiens
  misc_RNA (1)...(19): siRNA sense strand
gacccaagaugcucucauu

SEQ ID NO: 359778 - RNA, 19 nt, Homo sapiens
  misc_RNA (1)...(19): siRNA sense strand
gaucagauguguggagaga

SEQ ID NO: 359779 - RNA, 19 nt, Homo sapiens
  misc_RNA (1)...(19): siRNA sense strand
gaacaaccuuaugugacua

SEQ ID NO: 359780 - RNA, 19 nt, Homo sapiens
  misc_RNA (1)...(19): siRNA sense strand
gucaugaucuucacaguug

SEQ ID NO: 359781 - RNA, 19 nt, Homo sapiens
  misc_RNA (1)...(19): siRNA sense strand
gaagaguguguuaaacuaa

SEQ ID NO: 359782 - RNA, 19 nt, Homo sapiens
  misc_RNA (1)...(19): siRNA sense strand
cagaaacucagcaguauuu

SEQ ID NO: 359783 - RNA, 19 nt, Homo sapiens
  misc_RNA (1)...(19): siRNA sense strand
ggucauugcucuaccuguu

SEQ ID NO: 359784 - RNA, 19 nt, Homo sapiens
  misc_RNA (1)...(19): siRNA sense strand
gguacacacugaagaguug

SEQ ID NO: 359785 - RNA, 19 nt, Homo sapiens
  misc_RNA (1)...(19): siRNA sense strand
cauccugccuuauuacauu

SEQ ID NO: 359786 - RNA, 19 nt, Homo sapiens
  misc_RNA (1)...(19): siRNA sense strand
caucuucgcuacaguuaug

SEQ ID NO: 359787 - RNA, 19 nt, Homo sapiens
  misc_RNA (1)...(19): siRNA sense strand
ccaagaugcucucauugug

SEQ ID NO: 359788 - RNA, 19 nt, Homo sapiens
  misc_RNA (1)...(19): siRNA sense strand
uaacagccgauccaguuua

SEQ ID NO: 359789 - RNA, 19 nt, Homo sapiens
  misc_RNA (1)...(19): siRNA sense strand
ggacgaacaagucuuugaa

SEQ ID NO: 359790 - RNA, 19 nt, Homo sapiens
  misc_RNA (1)...(19): siRNA sense strand
caacuucagucgcaucuac

SEQ ID NO: 359791 - RNA, 19 nt, Homo sapiens
  misc_RNA (1)...(19): siRNA sense strand
gaucuucacaguugaguau

SEQ ID NO: 359792 - RNA, 19 nt, Homo sapiens
  misc_RNA (1)...(19): siRNA sense strand
ucaggaagccaucaaggua

SEQ ID NO: 359793 - RNA, 19 nt, Homo sapiens
  misc_RNA (1)...(19): siRNA sense strand
guguuaaacuaaacuguga

SEQ ID NO: 359794 - RNA, 19 nt, Homo sapiens
  misc_RNA (1)...(19): siRNA sense strand
guacucaggaggaaauauu

SEQ ID NO: 359795 - RNA, 19 nt, Homo sapiens
  misc_RNA (1)...(19): siRNA sense strand
gugcaucucugcuuacgau

SEQ ID NO: 359796 - RNA, 19 nt, Homo sapiens
  misc_RNA (1)...(19): siRNA sense strand
gcacugggaagcuccacua

SEQ ID NO: 359797 - RNA, 19 nt, Homo sapiens
  misc_RNA (1)...(19): siRNA sense strand
aaacuaaacugugaacaac

SEQ ID NO: 359798 - RNA, 19 nt, Homo sapiens
  misc_RNA (1)...(19): siRNA sense strand
ggacgucagcggagccuuu

SEQ ID NO: 359799 - RNA, 19 nt, Homo sapiens
  misc_RNA (1)...(19): siRNA sense strand
uggccauccugccuuauua

SEQ ID NO: 359800 - RNA, 19 nt, Homo sapiens
  misc_RNA (1)...(19): siRNA sense strand
caucccaaaugccaaugua

SEQ ID NO: 359801 - RNA, 19 nt, Homo sapiens
  misc_RNA (1)...(19): siRNA sense strand
caaauccggcuccagcuuu

SEQ ID NO: 359802 - RNA, 19 nt, Homo sapiens
  misc_RNA (1)...(19): siRNA sense strand
caccauggcuaucaucauc

SEQ ID NO: 359803 - RNA, 19 nt, Homo sapiens
  misc_RNA (1)...(19): siRNA sense strand
uuaugugacuacagcaaua

SEQ ID NO: 359804 - RNA, 19 nt, Homo sapiens
  misc_RNA (1)...(19): siRNA sense strand
ugaacaaccuuaugugacu

SEQ ID NO: 359805 - RNA, 19 nt, Homo sapiens
  misc_RNA (1)...(19): siRNA sense strand
caagaacucagcacgauuc

SEQ ID NO: 359806 - RNA, 19 nt, Homo sapiens
  misc_RNA (1)...(19): siRNA sense strand
cgauggcccugguguucua

SEQ ID NO: 359807 - RNA, 19 nt, Homo sapiens
  misc_RNA (1)...(19): siRNA sense strand
gaguugugccucagaauug

SEQ ID NO: 359808 - RNA, 19 nt, Homo sapiens
  misc_RNA (1)...(19): siRNA sense strand
ccacgaaucacgaguuugu

SEQ ID NO: 359809 - RNA, 19 nt, Homo sapiens
  misc_RNA (1)...(19): siRNA sense strand
aaacucagcaguauuucuu

SEQ ID NO: 359810 - RNA, 19 nt, Homo sapiens
  misc_RNA (1)...(19): siRNA sense strand
gugacuacagcaauaauaa

SEQ ID NO: 359811 - RNA, 19 nt, Homo sapiens
  misc_RNA (1)...(19): siRNA sense strand
ugaagaaagcugcauggaa

SEQ ID NO: 359812 - RNA, 19 nt, Homo sapiens
  misc_RNA (1)...(19): siRNA sense strand
acgagugcaucucugcuua

SEQ ID NO: 359813 - RNA, 19 nt, Homo sapiens
  misc_RNA (1)...(19): siRNA sense strand
ucaagguaguauacaagaa

SEQ ID NO: 359814 - RNA, 19 nt, Homo sapiens
  misc_RNA (1)...(19): siRNA sense strand
ccaucaagguaguauacaa

SEQ ID NO: 359815 - RNA, 19 nt, Homo sapiens
  misc_RNA (1)...(19): siRNA sense strand
gaaucaacgagcagacaaa

SEQ ID NO: 359816 - RNA, 19 nt, Homo sapiens
  misc_RNA (1)...(19): siRNA sense strand
cagcggagccuuugucaca

SEQ ID NO: 359817 - RNA, 19 nt, Homo sapiens
  misc_RNA (1)...(19): siRNA sense strand
cgaaugugguggaaacagu

SEQ ID NO: 359818 - RNA, 19 nt, Homo sapiens
  misc_RNA (1)...(19): siRNA sense strand
gguaugcuguggccuucuu

SEQ ID NO: 359819 - RNA, 19 nt, Homo sapiens
  misc_RNA (1)...(19): siRNA sense strand
gagaacaccucugucuaac

SEQ ID NO: 359820 - RNA, 19 nt, Homo sapiens
  misc_RNA (1)...(19): siRNA sense strand
gcacgauucagaucagaug

SEQ ID NO: 359821 - RNA, 19 nt, Homo sapiens
  misc_RNA (1)...(19): siRNA sense strand
gaaagcugcauggaaguug

SEQ ID NO: 359822 - RNA, 19 nt, Homo sapiens
  misc_RNA (1)...(19): siRNA sense strand
aagcccaggucacauuaaa

SEQ ID NO: 359823 - RNA, 19 nt, Homo sapiens
  misc_RNA (1)...(19): siRNA sense strand
aggacacccuggaacguua

SEQ ID NO: 359824 - RNA, 19 nt, Homo sapiens
  misc_RNA (1)...(19): siRNA sense strand
gcaucuaccaccagaauca

SEQ ID NO: 359825 - RNA, 19 nt, Homo sapiens
  misc_RNA (1)...(19): siRNA sense strand
ugacaacacuaggguaugg

SEQ ID NO: 359826 - RNA, 19 nt, Homo sapiens
  misc_RNA (1)...(19): siRNA sense strand
gcccaggucacauuaaaga

SEQ ID NO: 359827 - RNA, 19 nt, Homo sapiens
  misc_RNA (1)...(19): siRNA sense strand
ucgcuacaguuauguucua

SEQ ID NO: 359828 - RNA, 19 nt, Homo sapiens
  misc_RNA (1)...(19): siRNA sense strand
ucuaacagccgauccaguu

SEQ ID NO: 359829 - RNA, 19 nt, Homo sapiens
  misc_RNA (1)...(19): siRNA sense strand
gugauuguauccaacuuca

SEQ ID NO: 359830 - RNA, 19 nt, Homo sapiens
  misc_RNA (1)...(19): siRNA sense strand
gcaaauccggcuccagcuu

SEQ ID NO: 359831 - RNA, 19 nt, Homo sapiens
  misc_RNA (1)...(19): siRNA sense strand
cccagaaacucagcaguau

SEQ ID NO: 359832 - RNA, 19 nt, Homo sapiens
  misc_RNA (1)...(19): siRNA sense strand
aacagccgauccaguuuaa

SEQ ID NO: 359833 - RNA, 19 nt, Homo sapiens
  misc_RNA (1)...(19): siRNA sense strand
gccacauccugaauuucua

SEQ ID NO: 359834 - RNA, 19 nt, Homo sapiens
  misc_RNA (1)...(19): siRNA sense strand
ccugcagccuucugguaua

SEQ ID NO: 359835 - RNA, 19 nt, Homo sapiens
  misc_RNA (1)...(19): siRNA sense strand
guuaugaggaguacaagga

SEQ ID NO: 359836 - RNA, 19 nt, Homo sapiens
  misc_RNA (1)...(19): siRNA sense strand
uacaagaacucagcacgau

SEQ ID NO: 359837 - RNA, 19 nt, Homo sapiens
  misc_RNA (1)...(19): siRNA sense strand
aaccacgaaucacgaguuu

SEQ ID NO: 359838 - RNA, 19 nt, Homo sapiens
  misc_RNA (1)...(19): siRNA sense strand
gcgcaaaugcuuacaugca

SEQ ID NO: 359839 - RNA, 19 nt, Homo sapiens
  misc_RNA (1)...(19): siRNA sense strand
gacacggccugcgucauga

SEQ ID NO: 359840 - RNA, 19 nt, Homo sapiens
  misc_RNA (1)...(19): siRNA sense strand
ucaagcccaggucacauua

SEQ ID NO: 359841 - RNA, 19 nt, Homo sapiens
  misc_RNA (1)...(19): siRNA sense strand
uaaacugugaacaaccuua

SEQ ID NO: 359842 - RNA, 19 nt, Homo sapiens
  misc_RNA (1)...(19): siRNA sense strand
cugcuucacugccuggaaa

SEQ ID NO: 359843 - RNA, 19 nt, Homo sapiens
  misc_RNA (1)...(19): siRNA sense strand
gguauaccaucgucaccau

SEQ ID NO: 359844 - RNA, 19 nt, Homo sapiens
  misc_RNA (1)...(19): siRNA sense strand
gugcguagugucaugagua

SEQ ID NO: 359845 - RNA, 19 nt, Homo sapiens
  misc_RNA (1)...(19): siRNA sense strand
ucaacgagcagacaaacga

SEQ ID NO: 359846 - RNA, 19 nt, Homo sapiens
  misc_RNA (1)...(19): siRNA sense strand
cuacagcaauaauaagcau

SEQ ID NO: 359847 - RNA, 19 nt, Homo sapiens
  misc_RNA (1)...(19): siRNA sense strand
guccuucacugucuucaca

SEQ ID NO: 359848 - RNA, 19 nt, Homo sapiens
  misc_RNA (1)...(19): siRNA sense strand
cugcagcgccuagucguua

SEQ ID NO: 359849 - RNA, 19 nt, Homo sapiens
  misc_RNA (1)...(19): siRNA sense strand
gcacgauggcccugguguu

SEQ ID NO: 359850 - RNA, 19 nt, Homo sapiens
  misc_RNA (1)...(19): siRNA sense strand
cagccgauccaguuuaaau

SEQ ID NO: 359851 - RNA, 19 nt, Homo sapiens
  misc_RNA (1)...(19): siRNA sense strand
cgauucagaucagaugugu

SEQ ID NO: 359852 - RNA, 19 nt, Homo sapiens
  misc_RNA (1)...(19): siRNA sense strand
gacaaacgaagggcacaaa

SEQ ID NO: 359853 - RNA, 19 nt, Homo sapiens
  misc_RNA (1)...(19): siRNA sense strand
ccauggcuaucaucaucuu

SEQ ID NO: 359854 - RNA, 19 nt, Homo sapiens
  misc_RNA (1)...(19): siRNA sense strand
cuucacaguugaguauuug

SEQ ID NO: 359855 - RNA, 19 nt, Homo sapiens
  misc_RNA (1)...(19): siRNA sense strand
gcccugguguucuacuaug

SEQ ID NO: 359856 - RNA, 19 nt, Homo sapiens
  misc_RNA (1)...(19): siRNA sense strand
ggucuucggcuagcaaguu

SEQ ID NO: 359857 - RNA, 19 nt, Homo sapiens
  misc_RNA (1)...(19): siRNA sense strand
aggaggaaauauugucaga

SEQ ID NO: 359858 - RNA, 19 nt, Homo sapiens
  misc_RNA (1)...(19): siRNA sense strand
aauggaagaguguguuaaa

SEQ ID NO: 359859 - RNA, 19 nt, Homo sapiens
  misc_RNA (1)...(19): siRNA sense strand
ucagauguguggagagaac

SEQ ID NO: 359860 - RNA, 19 nt, Homo sapiens
  misc_RNA (1)...(19): siRNA sense strand
cagaggaugagcaggcuuu

SEQ ID NO: 359861 - RNA, 19 nt, Homo sapiens
  misc_RNA (1)...(19): siRNA sense strand
ucuucacaguugaguauuu

SEQ ID NO: 359862 - RNA, 19 nt, Homo sapiens
  misc_RNA (1)...(19): siRNA sense strand
gaugagcaggcuuuuguua

SEQ ID NO: 359863 - RNA, 19 nt, Homo sapiens
  misc_RNA (1)...(19): siRNA sense strand
aagcuagacuggccaggau

SEQ ID NO: 359864 - RNA, 19 nt, Homo sapiens
  misc_RNA (1)...(19): siRNA sense strand
gauuguauccaacuucagu

SEQ ID NO: 359865 - RNA, 19 nt, Homo sapiens
  misc_RNA (1)...(19): siRNA sense strand
gcuguuaugaggaguacaa

SEQ ID NO: 359866 - RNA, 19 nt, Homo sapiens
  misc_RNA (1)...(19): siRNA sense strand
ccagaaacucagcaguauu

SEQ ID NO: 359867 - RNA, 19 nt, Homo sapiens
  misc_RNA (1)...(19): siRNA sense strand
aaauccggcuccagcuuug

SEQ ID NO: 359868 - RNA, 19 nt, Homo sapiens
  misc_RNA (1)...(19): siRNA sense strand
caucggcgacugcuguuau

SEQ ID NO: 359869 - RNA, 19 nt, Homo sapiens
  misc_RNA (1)...(19): siRNA sense strand
acucagcaguauuucuuug

SEQ ID NO: 359870 - RNA, 19 nt, Homo sapiens
  misc_RNA (1)...(19): siRNA sense strand
caugacaacacuaggguau

SEQ ID NO: 359871 - RNA, 19 nt, Homo sapiens
  misc_RNA (1)...(19): siRNA sense strand
cgacgacgccuaucucuac

SEQ ID NO: 359872 - RNA, 19 nt, Homo sapiens
  misc_RNA (1)...(19): siRNA sense strand
cgacgccuaucucuacauc

SEQ ID NO: 359873 - RNA, 19 nt, Homo sapiens
  misc_RNA (1)...(19): siRNA sense strand
gcgacgacgccuaucucua

SEQ ID NO: 359874 - RNA, 19 nt, Homo sapiens
  misc_RNA (1)...(19): siRNA sense strand
gacgacgccuaucucuaca

SEQ ID NO: 359875 - RNA, 19 nt, Homo sapiens
  misc_RNA (1)...(19): siRNA sense strand
gcgacgaguucuucuucga

SEQ ID NO: 359876 - RNA, 19 nt, Homo sapiens
  misc_RNA (1)...(19): siRNA sense strand
gcgcgugugugacgacuac

SEQ ID NO: 359877 - RNA, 19 nt, Homo sapiens
  misc_RNA (1)...(19): siRNA sense strand
gcgccacucaacaucauug

SEQ ID NO: 359878 - RNA, 19 nt, Homo sapiens
  misc_RNA (1)...(19): siRNA sense strand
gcacuguacuucacucuaa

SEQ ID NO: 359879 - RNA, 19 nt, Homo sapiens
  misc_RNA (1)...(19): siRNA sense strand
gcaugaaggccaauaauaa

SEQ ID NO: 359880 - RNA, 19 nt, Homo sapiens
  misc_RNA (1)...(19): siRNA sense strand
gcaccgaggucaugcagaa

SEQ ID NO: 359881 - RNA, 19 nt, Homo sapiens
  misc_RNA (1)...(19): siRNA sense strand
ggacugcgcuccuggacuu

SEQ ID NO: 359882 - RNA, 19 nt, Homo sapiens
  misc_RNA (1)...(19): siRNA sense strand
gaccagugcugaugugaaa

SEQ ID NO: 359883 - RNA, 19 nt, Homo sapiens
  misc_RNA (1)...(19): siRNA sense strand
cuugagaccuuccauauug

SEQ ID NO: 359884 - RNA, 19 nt, Homo sapiens
  misc_RNA (1)...(19): siRNA sense strand
ugaaggaccucaaggacuu

SEQ ID NO: 359885 - RNA, 19 nt, Homo sapiens
  misc_RNA (1)...(19): siRNA sense strand
ugaaagcucugaccuacug

SEQ ID NO: 359886 - RNA, 19 nt, Homo sapiens
  misc_RNA (1)...(19): siRNA sense strand
caggaggugucucagcuua

SEQ ID NO: 359887 - RNA, 19 nt, Homo sapiens
  misc_RNA (1)...(19): siRNA sense strand
ggagccaccuggaaauuuc

SEQ ID NO: 359888 - RNA, 19 nt, Homo sapiens
  misc_RNA (1)...(19): siRNA sense strand
ggaaaugcucuucauccua

SEQ ID NO: 359889 - RNA, 19 nt, Homo sapiens
  misc_RNA (1)...(19): siRNA sense strand
caucgacgccaacgaguua

SEQ ID NO: 359890 - RNA, 19 nt, Homo sapiens
  misc_RNA (1)...(19): siRNA sense strand
gagcugacauugcuaugca

SEQ ID NO: 359891 - RNA, 19 nt, Homo sapiens
  misc_RNA (1)...(19): siRNA sense strand
gacccaaacuucgugcuaa

SEQ ID NO: 359892 - RNA, 19 nt, Homo sapiens
  misc_RNA (1)...(19): siRNA sense strand
ccaauaauaacguguuuga

SEQ ID NO: 359893 - RNA, 19 nt, Homo sapiens
  misc_RNA (1)...(19): siRNA sense strand
ggacuugagaccuuccaua

SEQ ID NO: 359894 - RNA, 19 nt, Homo sapiens
  misc_RNA (1)...(19): siRNA sense strand
gcccagaauuggccaguga

SEQ ID NO: 359895 - RNA, 19 nt, Homo sapiens
  misc_RNA (1)...(19): siRNA sense strand
gcugagagcugacauugcu

SEQ ID NO: 359896 - RNA, 19 nt, Homo sapiens
  misc_RNA (1)...(19): siRNA sense strand
gauaguggauggcauugag

SEQ ID NO: 359897 - RNA, 19 nt, Homo sapiens
  misc_RNA (1)...(19): siRNA sense strand
gggcugaaaucugcuucua

SEQ ID NO: 359898 - RNA, 19 nt, Homo sapiens
  misc_RNA (1)...(19): siRNA sense strand
gaacgugacagccaucauc

SEQ ID NO: 359899 - RNA, 19 nt, Homo sapiens
  misc_RNA (1)...(19): siRNA sense strand
ggcaugaaggccaauaaua

SEQ ID NO: 359900 - RNA, 19 nt, Homo sapiens
  misc_RNA (1)...(19): siRNA sense strand
cgacaucgccguggaaaug

SEQ ID NO: 359901 - RNA, 19 nt, Homo sapiens
  misc_RNA (1)...(19): siRNA sense strand
ugucuccucuccuuccuua

SEQ ID NO: 359902 - RNA, 19 nt, Homo sapiens
  misc_RNA (1)...(19): siRNA sense strand
ccacccagccuccaggaua

SEQ ID NO: 359903 - RNA, 19 nt, Homo sapiens
  misc_RNA (1)...(19): siRNA sense strand
ggccaauaauaacguguuu

SEQ ID NO: 359904 - RNA, 19 nt, Homo sapiens
  misc_RNA (1)...(19): siRNA sense strand
ggaggugcccuaugucaau

SEQ ID NO: 359905 - RNA, 19 nt, Homo sapiens
  misc_RNA (1)...(19): siRNA sense strand
gaggcucuauccugaguau

SEQ ID NO: 359906 - RNA, 19 nt, Homo sapiens
  misc_RNA (1)...(19): siRNA sense strand
auacuacgcuugcugaagu

SEQ ID NO: 359907 - RNA, 19 nt, Homo sapiens
  misc_RNA (1)...(19): siRNA sense strand
gaacuuccgcaccaccuau

SEQ ID NO: 359908 - RNA, 19 nt, Homo sapiens
  misc_RNA (1)...(19): siRNA sense strand
uaagcagccucaccagugu

SEQ ID NO: 359909 - RNA, 19 nt, Homo sapiens
  misc_RNA (1)...(19): siRNA sense strand
gaugcacgcugugguguuc

SEQ ID NO: 359910 - RNA, 19 nt, Homo sapiens
  misc_RNA (1)...(19): siRNA sense strand
acaagacgcugccauccau

SEQ ID NO: 359911 - RNA, 19 nt, Homo sapiens
  misc_RNA (1)...(19): siRNA sense strand
gcaugaaggaccucaagga

SEQ ID NO: 359912 - RNA, 19 nt, Homo sapiens
  misc_RNA (1)...(19): siRNA sense strand
cgacugaccggccacuuug

SEQ ID NO: 359913 - RNA, 19 nt, Homo sapiens
  misc_RNA (1)...(19): siRNA sense strand
gcccuugucuccucuccuu

SEQ ID NO: 359914 - RNA, 19 nt, Homo sapiens
  misc_RNA (1)...(19): siRNA sense strand
caucagugcccgaguacaa

SEQ ID NO: 359915 - RNA, 19 nt, Homo sapiens
  misc_RNA (1)...(19): siRNA sense strand
ggacggccuuauccuccuu

SEQ ID NO: 359916 - RNA, 19 nt, Homo sapiens
  misc_RNA (1)...(19): siRNA sense strand
gacuugagaccuuccauau

SEQ ID NO: 359917 - RNA, 19 nt, Homo sapiens
  misc_RNA (1)...(19): siRNA sense strand
ggaccugauuggagcagau

SEQ ID NO: 359918 - RNA, 19 nt, Homo sapiens
  misc_RNA (1)...(19): siRNA sense strand
cacgaaaacucccuuggua

SEQ ID NO: 359919 - RNA, 19 nt, Homo sapiens
  misc_RNA (1)...(19): siRNA sense strand
gggagccaccuggaaauuu

SEQ ID NO: 359920 - RNA, 19 nt, Homo sapiens
  misc_RNA (1)...(19): siRNA sense strand
gggagcagacccaaacuuc

SEQ ID NO: 359921 - RNA, 19 nt, Homo sapiens
  misc_RNA (1)...(19): siRNA sense strand
gaggugcccuaugucaaug

SEQ ID NO: 359922 - RNA, 19 nt, Homo sapiens
  misc_RNA (1)...(19): siRNA sense strand
cuuuacaucuucaacauca

SEQ ID NO: 359923 - RNA, 19 nt, Homo sapiens
  misc_RNA (1)...(19): siRNA sense strand
ccaaacuucgugcuaaaga

SEQ ID NO: 359924 - RNA, 19 nt, Homo sapiens
  misc_RNA (1)...(19): siRNA sense strand
uagauaucauccugaacuu

SEQ ID NO: 359925 - RNA, 19 nt, Homo sapiens
  misc_RNA (1)...(19): siRNA sense strand
uugcugcucugcccuuuga

SEQ ID NO: 359926 - RNA, 19 nt, Homo sapiens
  misc_RNA (1)...(19): siRNA sense strand
gcaccugaaucgggagauc

SEQ ID NO: 359927 - RNA, 19 nt, Homo sapiens
  misc_RNA (1)...(19): siRNA sense strand
aaagaccagugcugaugug

SEQ ID NO: 359928 - RNA, 19 nt, Homo sapiens
  misc_RNA (1)...(19): siRNA sense strand
gagcagacccaaacuucgu

SEQ ID NO: 359929 - RNA, 19 nt, Homo sapiens
  misc_RNA (1)...(19): siRNA sense strand
ccuuugaccugcuuuacau

SEQ ID NO: 359930 - RNA, 19 nt, Homo sapiens
  misc_RNA (1)...(19): siRNA sense strand
ccgcugcucugggacauug

SEQ ID NO: 359931 - RNA, 19 nt, Homo sapiens
  misc_RNA (1)...(19): siRNA sense strand
ugaccugcuuuacaucuuc

SEQ ID NO: 359932 - RNA, 19 nt, Homo sapiens
  misc_RNA (1)...(19): siRNA sense strand
gaggcaugaaggccaauaa

SEQ ID NO: 359933 - RNA, 19 nt, Homo sapiens
  misc_RNA (1)...(19): siRNA sense strand
cuaaagaccagugcugaug

SEQ ID NO: 359934 - RNA, 19 nt, Homo sapiens
  misc_RNA (1)...(19): siRNA sense strand
gccugcaucugguauguca

SEQ ID NO: 359935 - RNA, 19 nt, Homo sapiens
  misc_RNA (1)...(19): siRNA sense strand
ccaccugguucuucaucga

SEQ ID NO: 359936 - RNA, 19 nt, Homo sapiens
  misc_RNA (1)...(19): siRNA sense strand
ggaggugucucagcuuagc

SEQ ID NO: 359937 - RNA, 19 nt, Homo sapiens
  misc_RNA (1)...(19): siRNA sense strand
uaaagaccagugcugaugu

SEQ ID NO: 359938 - RNA, 19 nt, Homo sapiens
  misc_RNA (1)...(19): siRNA sense strand
gcgcaugcucgaauacuuc

SEQ ID NO: 359939 - RNA, 19 nt, Homo sapiens
  misc_RNA (1)...(19): siRNA sense strand
cagcugccguuuccucuac

SEQ ID NO: 359940 - RNA, 19 nt, Homo sapiens
  misc_RNA (1)...(19): siRNA sense strand
gucuggaggugcccuaugu

SEQ ID NO: 359941 - RNA, 19 nt, Homo sapiens
  misc_RNA (1)...(19): siRNA sense strand
gggagauggaggccaauga

SEQ ID NO: 359942 - RNA, 19 nt, Homo sapiens
  misc_RNA (1)...(19): siRNA sense strand
ggacaguaaucacgaaaac

SEQ ID NO: 359943 - RNA, 19 nt, Homo sapiens
  misc_RNA (1)...(19): siRNA sense strand
ucaaucaggaggugucuca

SEQ ID NO: 359944 - RNA, 19 nt, Homo sapiens
  misc_RNA (1)...(19): siRNA sense strand
agccaucagugcccgagua

SEQ ID NO: 359945 - RNA, 19 nt, Homo sapiens
  misc_RNA (1)...(19): siRNA sense strand
gcagcugccguuuccucua

SEQ ID NO: 359946 - RNA, 19 nt, Homo sapiens
  misc_RNA (1)...(19): siRNA sense strand
caaacuucgugcuaaagac

SEQ ID NO: 359947 - RNA, 19 nt, Homo sapiens
  misc_RNA (1)...(19): siRNA sense strand
gaccugauuggagcagaua

SEQ ID NO: 359948 - RNA, 19 nt, Homo sapiens
  misc_RNA (1)...(19): siRNA sense strand
cccuaucgcugcacaucaa

SEQ ID NO: 359949 - RNA, 19 nt, Homo sapiens
  misc_RNA (1)...(19): siRNA sense strand
gcaucgacgccaacgaguu

SEQ ID NO: 359950 - RNA, 19 nt, Homo sapiens
  misc_RNA (1)...(19): siRNA sense strand
gaccugcuuuacaucuuca

SEQ ID NO: 359951 - RNA, 19 nt, Homo sapiens
  misc_RNA (1)...(19): siRNA sense strand
ggucgugcuguuccucuuu

SEQ ID NO: 359952 - RNA, 19 nt, Homo sapiens
  misc_RNA (1)...(19): siRNA sense strand
acccaaacuucgugcuaaa

SEQ ID NO: 359953 - RNA, 19 nt, Homo sapiens
  misc_RNA (1)...(19): siRNA sense strand
gcuaaagaccagugcugau

SEQ ID NO: 359954 - RNA, 19 nt, Homo sapiens
  misc_RNA (1)...(19): siRNA sense strand
ccaugccucucuccuugug

SEQ ID NO: 359955 - RNA, 19 nt, Homo sapiens
  misc_RNA (1)...(19): siRNA sense strand
ggaggcaugaaggccaaua

SEQ ID NO: 359956 - RNA, 19 nt, Homo sapiens
  misc_RNA (1)...(19): siRNA sense strand
cccgggaccucaccuucaa

SEQ ID NO: 359957 - RNA, 19 nt, Homo sapiens
  misc_RNA (1)...(19): siRNA sense strand
guucuucaucgaccuuauu

SEQ ID NO: 359958 - RNA, 19 nt, Homo sapiens
  misc_RNA (1)...(19): siRNA sense strand
cuagauaucauccugaacu

SEQ ID NO: 359959 - RNA, 19 nt, Homo sapiens
  misc_RNA (1)...(19): siRNA sense strand
caugaaggccaauaauaac

SEQ ID NO: 359960 - RNA, 19 nt, Homo sapiens
  misc_RNA (1)...(19): siRNA sense strand
ccgacugaccggccacuuu

SEQ ID NO: 359961 - RNA, 19 nt, Homo sapiens
  misc_RNA (1)...(19): siRNA sense strand
gcugaggaggugaaggaaa

SEQ ID NO: 359962 - RNA, 19 nt, Homo sapiens
  misc_RNA (1)...(19): siRNA sense strand
ggaccucaaggacuucauc

SEQ ID NO: 359963 - RNA, 19 nt, Homo sapiens
  misc_RNA (1)...(19): siRNA sense strand
ggagauggaggccaaugac

SEQ ID NO: 359964 - RNA, 19 nt, Homo sapiens
  misc_RNA (1)...(19): siRNA sense strand
gaaaacucccuugguagaa

SEQ ID NO: 359965 - RNA, 19 nt, Homo sapiens
  misc_RNA (1)...(19): siRNA sense strand
cugaggaggugaaggaaaa

SEQ ID NO: 359966 - RNA, 19 nt, Homo sapiens
  misc_RNA (1)...(19): siRNA sense strand
ggauaguggauggcauuga

SEQ ID NO: 359967 - RNA, 19 nt, Homo sapiens
  misc_RNA (1)...(19): siRNA sense strand
ccucaccagugugggcuuu

SEQ ID NO: 359968 - RNA, 19 nt, Homo sapiens
  misc_RNA (1)...(19): siRNA sense strand
ggacauuggcugguugcau

SEQ ID NO: 359969 - RNA, 19 nt, Homo sapiens
  misc_RNA (1)...(19): siRNA sense strand
caucugggacggccuuauc

SEQ ID NO: 359970 - RNA, 19 nt, Homo sapiens
  misc_RNA (1)...(19): siRNA sense strand
ccaccaugccucucuccuu

SEQ ID NO: 359971 - RNA, 19 nt, Homo sapiens
  misc_RNA (1)...(19): siRNA sense strand
caggagcaccgggcugaaa

SEQ ID NO: 359972 - RNA, 19 nt, Homo sapiens
  misc_RNA (1)...(19): siRNA sense strand
gacaagacgcugccaucca

SEQ ID NO: 359973 - RNA, 19 nt, Homo sapiens
  misc_RNA (1)...(19): siRNA sense strand
acauugcuaugcaccugaa

SEQ ID NO: 359974 - RNA, 19 nt, Homo sapiens
  misc_RNA (1)...(19): siRNA sense strand
uccuagauaucauccugaa

SEQ ID NO: 359975 - RNA, 19 nt, Homo sapiens
  misc_RNA (1)...(19): siRNA sense strand
gaguggaagcccaggacuu

SEQ ID NO: 359976 - RNA, 19 nt, Homo sapiens
  misc_RNA (1)...(19): siRNA sense strand
ugagagcugacauugcuau

SEQ ID NO: 359977 - RNA, 19 nt, Homo sapiens
  misc_RNA (1)...(19): siRNA sense strand
gagccguacuguccuacac

SEQ ID NO: 359978 - RNA, 19 nt, Homo sapiens
  misc_RNA (1)...(19): siRNA sense strand
ggacaaaccgccuuaauuc

SEQ ID NO: 359979 - RNA, 19 nt, Homo sapiens
  misc_RNA (1)...(19): siRNA sense strand
caacuucgcugagcagauu

SEQ ID NO: 359980 - RNA, 19 nt, Homo sapiens
  misc_RNA (1)...(19): siRNA sense strand
cagcagaacuguaccuguu

SEQ ID NO: 359981 - RNA, 19 nt, Homo sapiens
  misc_RNA (1)...(19): siRNA sense strand
ucagcuaccuggaggcuua

SEQ ID NO: 359982 - RNA, 19 nt, Homo sapiens
  misc_RNA (1)...(19): siRNA sense strand
gcagaacuguaccuguuga

SEQ ID NO: 359983 - RNA, 19 nt, Homo sapiens
  misc_RNA (1)...(19): siRNA sense strand
aaacagagacguggacuuu

SEQ ID NO: 359984 - RNA, 19 nt, Homo sapiens
  misc_RNA (1)...(19): siRNA sense strand
gggcguggcuguccucaau

SEQ ID NO: 359985 - RNA, 19 nt, Homo sapiens
  misc_RNA (1)...(19): siRNA sense strand
gaguacaucuacaugcauu

SEQ ID NO: 359986 - RNA, 19 nt, Homo sapiens
  misc_RNA (1)...(19): siRNA sense strand
gggacaaaccgccuuaauu

SEQ ID NO: 359987 - RNA, 19 nt, Homo sapiens
  misc_RNA (1)...(19): siRNA sense strand
gcuacgauguggaaacaga

SEQ ID NO: 359988 - RNA, 19 nt, Homo sapiens
  misc_RNA (1)...(19): siRNA sense strand
ggagcgaggugacccgaau

SEQ ID NO: 359989 - RNA, 19 nt, Homo sapiens
  misc_RNA (1)...(19): siRNA sense strand
uuaauucagcugaguguua

SEQ ID NO: 359990 - RNA, 19 nt, Homo sapiens
  misc_RNA (1)...(19): siRNA sense strand
cgaaugaucacagcaauga

SEQ ID NO: 359991 - RNA, 19 nt, Homo sapiens
  misc_RNA (1)...(19): siRNA sense strand
gggaguacaucuacaugca

SEQ ID NO: 359992 - RNA, 19 nt, Homo sapiens
  misc_RNA (1)...(19): siRNA sense strand
gcuacacccuggaggauca

SEQ ID NO: 359993 - RNA, 19 nt, Homo sapiens
  misc_RNA (1)...(19): siRNA sense strand
gcacaacuguaucuaugcu

SEQ ID NO: 359994 - RNA, 19 nt, Homo sapiens
  misc_RNA (1)...(19): siRNA sense strand
uggacaguguggaguguua

SEQ ID NO: 359995 - RNA, 19 nt, Homo sapiens
  misc_RNA (1)...(19): siRNA sense strand
ucacacugcaggucaagua

SEQ ID NO: 359996 - RNA, 19 nt, Homo sapiens
  misc_RNA (1)...(19): siRNA sense strand
gagaaucuacguccuugga

SEQ ID NO: 359997 - RNA, 19 nt, Homo sapiens
  misc_RNA (1)...(19): siRNA sense strand
acaacaguguggagaggua

SEQ ID NO: 359998 - RNA, 19 nt, Homo sapiens
  misc_RNA (1)...(19): siRNA sense strand
ucaaggccauguucaccaa

SEQ ID NO: 359999 - RNA, 19 nt, Homo sapiens
  misc_RNA (1)...(19): siRNA sense strand
gcgcuacgauguggaaaca

SEQ ID NO: 360000 - RNA, 19 nt, Homo sapiens
  misc_RNA (1)...(19): siRNA sense strand
ucacagcaaugaacaccau

SEQ ID NO: 360001 - RNA, 19 nt, Homo sapiens
  misc_RNA (1)...(19): siRNA sense strand
ucaaucgucuccuuuaugc

SEQ ID NO: 360002 - RNA, 19 nt, Homo sapiens
  misc_RNA (1)...(19): siRNA sense strand
ggucauggagcgccucauu

SEQ ID NO: 360003 - RNA, 19 nt, Homo sapiens
  misc_RNA (1)...(19): siRNA sense strand
ucaacugggucaaguacga

SEQ ID NO: 360004 - RNA, 19 nt, Homo sapiens
  misc_RNA (1)...(19): siRNA sense strand
cugcacaacuguaucuaug

SEQ ID NO: 360005 - RNA, 19 nt, Homo sapiens
  misc_RNA (1)...(19): siRNA sense strand
gaacgaguggcgaaugauc

SEQ ID NO: 360006 - RNA, 19 nt, Homo sapiens
  misc_RNA (1)...(19): siRNA sense strand
gacaaaccgccuuaauuca

SEQ ID NO: 360007 - RNA, 19 nt, Homo sapiens
  misc_RNA (1)...(19): siRNA sense strand
ccucaaucgucuccuuuau

SEQ ID NO: 360008 - RNA, 19 nt, Homo sapiens
  misc_RNA (1)...(19): siRNA sense strand
gcaggccuuuggcaucaug

SEQ ID NO: 360009 - RNA, 19 nt, Homo sapiens
  misc_RNA (1)...(19): siRNA sense strand
uggagcgccucauugaauu

SEQ ID NO: 360010 - RNA, 19 nt, Homo sapiens
  misc_RNA (1)...(19): siRNA sense strand
ucauggagcgccucauuga

SEQ ID NO: 360011 - RNA, 19 nt, Homo sapiens
  misc_RNA (1)...(19): siRNA sense strand
gcuaugauggucacacguu

SEQ ID NO: 360012 - RNA, 19 nt, Homo sapiens
  misc_RNA (1)...(19): siRNA sense strand
gaggugacccgaaugacau

SEQ ID NO: 360013 - RNA, 19 nt, Homo sapiens
  misc_RNA (1)...(19): siRNA sense strand
gcaucaacugggucaagua

SEQ ID NO: 360014 - RNA, 19 nt, Homo sapiens
  misc_RNA (1)...(19): siRNA sense strand
gaaacagagacguggacuu

SEQ ID NO: 360015 - RNA, 19 nt, Homo sapiens
  misc_RNA (1)...(19): siRNA sense strand
aagcaggccuuuggcauca

SEQ ID NO: 360016 - RNA, 19 nt, Homo sapiens
  misc_RNA (1)...(19): siRNA sense strand
aggaacgaguggcgaauga

SEQ ID NO: 360017 - RNA, 19 nt, Homo sapiens
  misc_RNA (1)...(19): siRNA sense strand
uaauucagcugaguguuac

SEQ ID NO: 360018 - RNA, 19 nt, Homo sapiens
  misc_RNA (1)...(19): siRNA sense strand
gauuggcuguguggaguug

SEQ ID NO: 360019 - RNA, 19 nt, Homo sapiens
  misc_RNA (1)...(19): siRNA sense strand
gaguguuacuacccagaga

SEQ ID NO: 360020 - RNA, 19 nt, Homo sapiens
  misc_RNA (1)...(19): siRNA sense strand
caacuggugacccucauca

SEQ ID NO: 360021 - RNA, 19 nt, Homo sapiens
  misc_RNA (1)...(19): siRNA sense strand
aggacuaccuggucaagau

SEQ ID NO: 360022 - RNA, 19 nt, Homo sapiens
  misc_RNA (1)...(19): siRNA sense strand
acagagacguggacuuucg

SEQ ID NO: 360023 - RNA, 19 nt, Homo sapiens
  misc_RNA (1)...(19): siRNA sense strand
gcaaccgcaccuucagcua

SEQ ID NO: 360024 - RNA, 19 nt, Homo sapiens
  misc_RNA (1)...(19): siRNA sense strand
cuacguccuuggaggcuau

SEQ ID NO: 360025 - RNA, 19 nt, Homo sapiens
  misc_RNA (1)...(19): siRNA sense strand
ggcgaaugaucacagcaau

SEQ ID NO: 360026 - RNA, 19 nt, Homo sapiens
  misc_RNA (1)...(19): siRNA sense strand
ggagcgcuacgauguggaa

SEQ ID NO: 360027 - RNA, 19 nt, Homo sapiens
  misc_RNA (1)...(19): siRNA sense strand
gcaaggacuaccuggucaa

SEQ ID NO: 360028 - RNA, 19 nt, Homo sapiens
  misc_RNA (1)...(19): siRNA sense strand
gacgggacaaaccgccuua

SEQ ID NO: 360029 - RNA, 19 nt, Homo sapiens
  misc_RNA (1)...(19): siRNA sense strand
ugauguacgccuccacuga

SEQ ID NO: 360030 - RNA, 19 nt, Homo sapiens
  misc_RNA (1)...(19): siRNA sense strand
caaguacgacugcgaacag

SEQ ID NO: 360031 - RNA, 19 nt, Homo sapiens
  misc_RNA (1)...(19): siRNA sense strand
cgaggugacccgaaugaca

SEQ ID NO: 360032 - RNA, 19 nt, Homo sapiens
  misc_RNA (1)...(19): siRNA sense strand
gcguggagcgcuacgaugu

SEQ ID NO: 360033 - RNA, 19 nt, Homo sapiens
  misc_RNA (1)...(19): siRNA sense strand
gaaugaucacagcaaugaa

SEQ ID NO: 360034 - RNA, 19 nt, Homo sapiens
  misc_RNA (1)...(19): siRNA sense strand
ccaaugcugacacgaagga

SEQ ID NO: 360035 - RNA, 19 nt, Homo sapiens
  misc_RNA (1)...(19): siRNA sense strand
ggacuaccuggucaagauc

SEQ ID NO: 360036 - RNA, 19 nt, Homo sapiens
  misc_RNA (1)...(19): siRNA sense strand
guuacgacccagauacaga

SEQ ID NO: 360037 - RNA, 19 nt, Homo sapiens
  misc_RNA (1)...(19): siRNA sense strand
guuacuacccagagaggaa

SEQ ID NO: 360038 - RNA, 19 nt, Homo sapiens
  misc_RNA (1)...(19): siRNA sense strand
gacagucgcucagcuaccu

SEQ ID NO: 360039 - RNA, 19 nt, Homo sapiens
  misc_RNA (1)...(19): siRNA sense strand
gggagguggccaagcaaga

SEQ ID NO: 360040 - RNA, 19 nt, Homo sapiens
  misc_RNA (1)...(19): siRNA sense strand
gcaggucaaguaccaggau

SEQ ID NO: 360041 - RNA, 19 nt, Homo sapiens
  misc_RNA (1)...(19): siRNA sense strand
gcgaaugaucacagcaaug

SEQ ID NO: 360042 - RNA, 19 nt, Homo sapiens
  misc_RNA (1)...(19): siRNA sense strand
gaggaacgaguggcgaaug

SEQ ID NO: 360043 - RNA, 19 nt, Homo sapiens
  misc_RNA (1)...(19): siRNA sense strand
gaguguuacgacccagaua

SEQ ID NO: 360044 - RNA, 19 nt, Homo sapiens
  misc_RNA (1)...(19): siRNA sense strand
ccaucggcaucgccaacuu

SEQ ID NO: 360045 - RNA, 19 nt, Homo sapiens
  misc_RNA (1)...(19): siRNA sense strand
acaaaccgccuuaauucag

SEQ ID NO: 360046 - RNA, 19 nt, Homo sapiens
  misc_RNA (1)...(19): siRNA sense strand
ggagguggccaagcaagag

SEQ ID NO: 360047 - RNA, 19 nt, Homo sapiens
  misc_RNA (1)...(19): siRNA sense strand
ggaguacaucuacaugcau

SEQ ID NO: 360048 - RNA, 19 nt, Homo sapiens
  misc_RNA (1)...(19): siRNA sense strand
gcauccaccacaacagugu

SEQ ID NO: 360049 - RNA, 19 nt, Homo sapiens
  misc_RNA (1)...(19): siRNA sense strand
gcguggcugucaccaugga

SEQ ID NO: 360050 - RNA, 19 nt, Homo sapiens
  misc_RNA (1)...(19): siRNA sense strand
ggaagaagauuucagaaga

SEQ ID NO: 360051 - RNA, 19 nt, Homo sapiens
  misc_RNA (1)...(19): siRNA sense strand
ccaaugagcugaagaguga

SEQ ID NO: 360052 - RNA, 19 nt, Homo sapiens
  misc_RNA (1)...(19): siRNA sense strand
gaacacagcccacgaguau

SEQ ID NO: 360053 - RNA, 19 nt, Homo sapiens
  misc_RNA (1)...(19): siRNA sense strand
gaaggaggcugcagaagga

SEQ ID NO: 360054 - RNA, 19 nt, Homo sapiens
  misc_RNA (1)...(19): siRNA sense strand
caaagucucugccuacauu

SEQ ID NO: 360055 - RNA, 19 nt, Homo sapiens
  misc_RNA (1)...(19): siRNA sense strand
gaagagaauugccaccauu

SEQ ID NO: 360056 - RNA, 19 nt, Homo sapiens
  misc_RNA (1)...(19): siRNA sense strand
gagaagagcuggcgagagu

SEQ ID NO: 360057 - RNA, 19 nt, Homo sapiens
  misc_RNA (1)...(19): siRNA sense strand
gaaggacucucucagaaug

SEQ ID NO: 360058 - RNA, 19 nt, Homo sapiens
  misc_RNA (1)...(19): siRNA sense strand
gaaacacccugggcugaua

SEQ ID NO: 360059 - RNA, 19 nt, Homo sapiens
  misc_RNA (1)...(19): siRNA sense strand
gcaaagggcugguccucaa

SEQ ID NO: 360060 - RNA, 19 nt, Homo sapiens
  misc_RNA (1)...(19): siRNA sense strand
ggagauaaauccaagaaag

SEQ ID NO: 360061 - RNA, 19 nt, Homo sapiens
  misc_RNA (1)...(19): siRNA sense strand
gcaagacacuucuguugga

SEQ ID NO: 360062 - RNA, 19 nt, Homo sapiens
  misc_RNA (1)...(19): siRNA sense strand
gaauguuccucaaauguga

SEQ ID NO: 360063 - RNA, 19 nt, Homo sapiens
  misc_RNA (1)...(19): siRNA sense strand
ccaagacccuuccugaauu

SEQ ID NO: 360064 - RNA, 19 nt, Homo sapiens
  misc_RNA (1)...(19): siRNA sense strand
caacaugucuguacuucau

SEQ ID NO: 360065 - RNA, 19 nt, Homo sapiens
  misc_RNA (1)...(19): siRNA sense strand
gcagguggaucuuauaugg

SEQ ID NO: 360066 - RNA, 19 nt, Homo sapiens
  misc_RNA (1)...(19): siRNA sense strand
gaacuguccugcugguaug

SEQ ID NO: 360067 - RNA, 19 nt, Homo sapiens
  misc_RNA (1)...(19): siRNA sense strand
ccacgucucuucagugcua

SEQ ID NO: 360068 - RNA, 19 nt, Homo sapiens
  misc_RNA (1)...(19): siRNA sense strand
caagacccuuccugaauuu

SEQ ID NO: 360069 - RNA, 19 nt, Homo sapiens
  misc_RNA (1)...(19): siRNA sense strand
gaagaagauuucagaagag

SEQ ID NO: 360070 - RNA, 19 nt, Homo sapiens
  misc_RNA (1)...(19): siRNA sense strand
gaucaugaaggaagcuuua

SEQ ID NO: 360071 - RNA, 19 nt, Homo sapiens
  misc_RNA (1)...(19): siRNA sense strand
gaacuucuuuccugugaca

SEQ ID NO: 360072 - RNA, 19 nt, Homo sapiens
  misc_RNA (1)...(19): siRNA sense strand
gcaacaagcacaucaagga

SEQ ID NO: 360073 - RNA, 19 nt, Homo sapiens
  misc_RNA (1)...(19): siRNA sense strand
cauaaugacucugugguuu

SEQ ID NO: 360074 - RNA, 19 nt, Homo sapiens
  misc_RNA (1)...(19): siRNA sense strand
uggaggagauugauaagaa

SEQ ID NO: 360075 - RNA, 19 nt, Homo sapiens
  misc_RNA (1)...(19): siRNA sense strand
gagaagaggcugcccauuc

SEQ ID NO: 360076 - RNA, 19 nt, Homo sapiens
  misc_RNA (1)...(19): siRNA sense strand
cagaaaugcuccagaguuc

SEQ ID NO: 360077 - RNA, 19 nt, Homo sapiens
  misc_RNA (1)...(19): siRNA sense strand
gguauaagauuggacaugu

SEQ ID NO: 360078 - RNA, 19 nt, Homo sapiens
  misc_RNA (1)...(19): siRNA sense strand
caacgcaggacuucuuuaa

SEQ ID NO: 360079 - RNA, 19 nt, Homo sapiens
  misc_RNA (1)...(19): siRNA sense strand
gaacacacccaaagcuuca

SEQ ID NO: 360080 - RNA, 19 nt, Homo sapiens
  misc_RNA (1)...(19): siRNA sense strand
ggauugauuugucggacua

SEQ ID NO: 360081 - RNA, 19 nt, Homo sapiens
  misc_RNA (1)...(19): siRNA sense strand
gaauuugacagcuauaaga

SEQ ID NO: 360082 - RNA, 19 nt, Homo sapiens
  misc_RNA (1)...(19): siRNA sense strand
ccaagaagauccacuacca

SEQ ID NO: 360083 - RNA, 19 nt, Homo sapiens
  misc_RNA (1)...(19): siRNA sense strand
ccaaggccaucaaguucua

SEQ ID NO: 360084 - RNA, 19 nt, Homo sapiens
  misc_RNA (1)...(19): siRNA sense strand
caacuugucccuauggauu

SEQ ID NO: 360085 - RNA, 19 nt, Homo sapiens
  misc_RNA (1)...(19): siRNA sense strand
gaugucaaccucugguaua

SEQ ID NO: 360086 - RNA, 19 nt, Homo sapiens
  misc_RNA (1)...(19): siRNA sense strand
gaaggagccggaccugaaa

SEQ ID NO: 360087 - RNA, 19 nt, Homo sapiens
  misc_RNA (1)...(19): siRNA sense strand
gggcugauacugaaauauu

SEQ ID NO: 360088 - RNA, 19 nt, Homo sapiens
  misc_RNA (1)...(19): siRNA sense strand
gauucgaauugcagccuua

SEQ ID NO: 360089 - RNA, 19 nt, Homo sapiens
  misc_RNA (1)...(19): siRNA sense strand
cggaaggacucucucagaa

SEQ ID NO: 360090 - RNA, 19 nt, Homo sapiens
  misc_RNA (1)...(19): siRNA sense strand
agacagccauggaguucua

SEQ ID NO: 360091 - RNA, 19 nt, Homo sapiens
  misc_RNA (1)...(19): siRNA sense strand
agaaggguguggccuauga

SEQ ID NO: 360092 - RNA, 19 nt, Homo sapiens
  misc_RNA (1)...(19): siRNA sense strand
cacaggcgauuguagauga

SEQ ID NO: 360093 - RNA, 19 nt, Homo sapiens
  misc_RNA (1)...(19): siRNA sense strand
ggagcaggcugugaaguuc

SEQ ID NO: 360094 - RNA, 19 nt, Homo sapiens
  misc_RNA (1)...(19): siRNA sense strand
gaagguguccuccaugcuu

SEQ ID NO: 360095 - RNA, 19 nt, Homo sapiens
  misc_RNA (1)...(19): siRNA sense strand
gagaggaacaagaccaauu

SEQ ID NO: 360096 - RNA, 19 nt, Homo sapiens
  misc_RNA (1)...(19): siRNA sense strand
acgcaggacuucuuuaaug

SEQ ID NO: 360097 - RNA, 19 nt, Homo sapiens
  misc_RNA (1)...(19): siRNA sense strand
acacagcccacgaguauuu

SEQ ID NO: 360098 - RNA, 19 nt, Homo sapiens
  misc_RNA (1)...(19): siRNA sense strand
gagaagaacacacccaaag

SEQ ID NO: 360099 - RNA, 19 nt, Homo sapiens
  misc_RNA (1)...(19): siRNA sense strand
gucaaccucugguauaaga

SEQ ID NO: 360100 - RNA, 19 nt, Homo sapiens
  misc_RNA (1)...(19): siRNA sense strand
caccugagcuggccaugga

SEQ ID NO: 360101 - RNA, 19 nt, Homo sapiens
  misc_RNA (1)...(19): siRNA sense strand
gaaggacuaucggcagugu

SEQ ID NO: 360102 - RNA, 19 nt, Homo sapiens
  misc_RNA (1)...(19): siRNA sense strand
uccaggagcuucugaugaa

SEQ ID NO: 360103 - RNA, 19 nt, Homo sapiens
  misc_RNA (1)...(19): siRNA sense strand
uauggugaauggcagauuu

SEQ ID NO: 360104 - RNA, 19 nt, Homo sapiens
  misc_RNA (1)...(19): siRNA sense strand
gugcagagguccuggucaa

SEQ ID NO: 360105 - RNA, 19 nt, Homo sapiens
  misc_RNA (1)...(19): siRNA sense strand
gcgauucuaugugcgagua

SEQ ID NO: 360106 - RNA, 19 nt, Homo sapiens
  misc_RNA (1)...(19): siRNA sense strand
gugcuacccuggaucauuc

SEQ ID NO: 360107 - RNA, 19 nt, Homo sapiens
  misc_RNA (1)...(19): siRNA sense strand
ggaaggacucucucagaau

SEQ ID NO: 360108 - RNA, 19 nt, Homo sapiens
  misc_RNA (1)...(19): siRNA sense strand
gaagucagccauccuuucu

SEQ ID NO: 360109 - RNA, 19 nt, Homo sapiens
  misc_RNA (1)...(19): siRNA sense strand
gaugaugcgcuaccugaaa

SEQ ID NO: 360110 - RNA, 19 nt, Homo sapiens
  misc_RNA (1)...(19): siRNA sense strand
ucagaauguuccucaaaug

SEQ ID NO: 360111 - RNA, 19 nt, Homo sapiens
  misc_RNA (1)...(19): siRNA sense strand
gcuccaccauugaggauga

SEQ ID NO: 360112 - RNA, 19 nt, Homo sapiens
  misc_RNA (1)...(19): siRNA sense strand
caagcacuguuucacauca

SEQ ID NO: 360113 - RNA, 19 nt, Homo sapiens
  misc_RNA (1)...(19): siRNA sense strand
caccgugucugcugacuug

SEQ ID NO: 360114 - RNA, 19 nt, Homo sapiens
  misc_RNA (1)...(19): siRNA sense strand
ccuaaucacuguccuguac

SEQ ID NO: 360115 - RNA, 19 nt, Homo sapiens
  misc_RNA (1)...(19): siRNA sense strand
ccaccgaugucucacacaa

SEQ ID NO: 360116 - RNA, 19 nt, Homo sapiens
  misc_RNA (1)...(19): siRNA sense strand
ggaacuguccugcugguau

SEQ ID NO: 360117 - RNA, 19 nt, Homo sapiens
  misc_RNA (1)...(19): siRNA sense strand
gaagauuucagaagagagu

SEQ ID NO: 360118 - RNA, 19 nt, Homo sapiens
  misc_RNA (1)...(19): siRNA sense strand
gaggagucauuggagagua

SEQ ID NO: 360119 - RNA, 19 nt, Homo sapiens
  misc_RNA (1)...(19): siRNA sense strand
ggaaauccuacacagagaa

SEQ ID NO: 360120 - RNA, 19 nt, Homo sapiens
  misc_RNA (1)...(19): siRNA sense strand
cgcaggacuucuuuaauga

SEQ ID NO: 360121 - RNA, 19 nt, Homo sapiens
  misc_RNA (1)...(19): siRNA sense strand
ugaacgagcuuuacuaccu

SEQ ID NO: 360122 - RNA, 19 nt, Homo sapiens
  misc_RNA (1)...(19): siRNA sense strand
gaugcacuguucauguuug

SEQ ID NO: 360123 - RNA, 19 nt, Homo sapiens
  misc_RNA (1)...(19): siRNA sense strand
ugcccaaccuccauaauga

SEQ ID NO: 360124 - RNA, 19 nt, Homo sapiens
  misc_RNA (1)...(19): siRNA sense strand
uggauaaccuaaucacugu

SEQ ID NO: 360125 - RNA, 19 nt, Homo sapiens
  misc_RNA (1)...(19): siRNA sense strand
ggacagcacagccguagca

SEQ ID NO: 360126 - RNA, 19 nt, Homo sapiens
  misc_RNA (1)...(19): siRNA sense strand
gccaagcacuguuucacau

SEQ ID NO: 360127 - RNA, 19 nt, Homo sapiens
  misc_RNA (1)...(19): siRNA sense strand
gaacuccaaugagcugaag

SEQ ID NO: 360128 - RNA, 19 nt, Homo sapiens
  misc_RNA (1)...(19): siRNA sense strand
ucaaggacaugaugcugau

SEQ ID NO: 360129 - RNA, 19 nt, Homo sapiens
  misc_RNA (1)...(19): siRNA sense strand
uguacacccucagugauua

SEQ ID NO: 360130 - RNA, 19 nt, Homo sapiens
  misc_RNA (1)...(19): siRNA sense strand
gagccggaccugaaacuug

SEQ ID NO: 360131 - RNA, 19 nt, Homo sapiens
  misc_RNA (1)...(19): siRNA sense strand
agaagagaguggagaaaca

SEQ ID NO: 360132 - RNA, 19 nt, Homo sapiens
  misc_RNA (1)...(19): siRNA sense strand
cauugaggaugaucaugaa

SEQ ID NO: 360133 - RNA, 19 nt, Homo sapiens
  misc_RNA (1)...(19): siRNA sense strand
gaagaacacacccaaagcu

SEQ ID NO: 360134 - RNA, 19 nt, Homo sapiens
  misc_RNA (1)...(19): siRNA sense strand
ggagaagaacacacccaaa

SEQ ID NO: 360135 - RNA, 19 nt, Homo sapiens
  misc_RNA (1)...(19): siRNA sense strand
gaagauccacuaccacaac

SEQ ID NO: 360136 - RNA, 19 nt, Homo sapiens
  misc_RNA (1)...(19): siRNA sense strand
gagaaggauugccgguaca

SEQ ID NO: 360137 - RNA, 19 nt, Homo sapiens
  misc_RNA (1)...(19): siRNA sense strand
ccagaaggguguggccuau

SEQ ID NO: 360138 - RNA, 19 nt, Homo sapiens
  misc_RNA (1)...(19): siRNA sense strand
ggagacagccauggaguuc

SEQ ID NO: 360139 - RNA, 19 nt, Homo sapiens
  misc_RNA (1)...(19): siRNA sense strand
agaggaacaagaccaauuu

SEQ ID NO: 360140 - RNA, 19 nt, Homo sapiens
  misc_RNA (1)...(19): siRNA sense strand
ggcaacaacugcagcacau

SEQ ID NO: 360141 - RNA, 19 nt, Homo sapiens
  misc_RNA (1)...(19): siRNA sense strand
gagcagcggcaguuucuca

SEQ ID NO: 360142 - RNA, 19 nt, Homo sapiens
  misc_RNA (1)...(19): siRNA sense strand
uuaaugagcccaccagcuu

SEQ ID NO: 360143 - RNA, 19 nt, Homo sapiens
  misc_RNA (1)...(19): siRNA sense strand
gcucaacgcaggacuucuu

SEQ ID NO: 360144 - RNA, 19 nt, Homo sapiens
  misc_RNA (1)...(19): siRNA sense strand
gacgaggacucccacucuu

SEQ ID NO: 360145 - RNA, 19 nt, Homo sapiens
  misc_RNA (1)...(19): siRNA sense strand
gguagcauccugaagguau

SEQ ID NO: 360146 - RNA, 19 nt, Homo sapiens
  misc_RNA (1)...(19): siRNA sense strand
ugaggaugaucaugaagga

SEQ ID NO: 360147 - RNA, 19 nt, Homo sapiens
  misc_RNA (1)...(19): siRNA sense strand
agaaggagccggaccugaa

SEQ ID NO: 360148 - RNA, 19 nt, Homo sapiens
  misc_RNA (1)...(19): siRNA sense strand
gacaaagucucugccuaca

SEQ ID NO: 360149 - RNA, 19 nt, Homo sapiens
  misc_RNA (1)...(19): siRNA sense strand
cagagguccuggucaacuu

SEQ ID NO: 360150 - RNA, 19 nt, Homo sapiens
  misc_RNA (1)...(19): siRNA sense strand
gaacuucugugagcaggua

SEQ ID NO: 360151 - RNA, 19 nt, Homo sapiens
  misc_RNA (1)...(19): siRNA sense strand
cagaagaggacaugaauaa

SEQ ID NO: 360152 - RNA, 19 nt, Homo sapiens
  misc_RNA (1)...(19): siRNA sense strand
gaacaacaccgucaucgau

SEQ ID NO: 360153 - RNA, 19 nt, Homo sapiens
  misc_RNA (1)...(19): siRNA sense strand
ccucaaaccugaucggaaa

SEQ ID NO: 360154 - RNA, 19 nt, Homo sapiens
  misc_RNA (1)...(19): siRNA sense strand
agaaggagcugcaggauag

SEQ ID NO: 360155 - RNA, 19 nt, Homo sapiens
  misc_RNA (1)...(19): siRNA sense strand
ggccugaccuuuaacaaga

SEQ ID NO: 360156 - RNA, 19 nt, Homo sapiens
  misc_RNA (1)...(19): siRNA sense strand
gcacagacucccugagaaa

SEQ ID NO: 360157 - RNA, 19 nt, Homo sapiens
  misc_RNA (1)...(19): siRNA sense strand
gaagaggacaugaauaagu

SEQ ID NO: 360158 - RNA, 19 nt, Homo sapiens
  misc_RNA (1)...(19): siRNA sense strand
gaugcaggccugaccuuua

SEQ ID NO: 360159 - RNA, 19 nt, Homo sapiens
  misc_RNA (1)...(19): siRNA sense strand
ggaacgagcaggugauaau

SEQ ID NO: 360160 - RNA, 19 nt, Homo sapiens
  misc_RNA (1)...(19): siRNA sense strand
gacauucacucuggacaaa

SEQ ID NO: 360161 - RNA, 19 nt, Homo sapiens
  misc_RNA (1)...(19): siRNA sense strand
gcacaauacagaauucaga

SEQ ID NO: 360162 - RNA, 19 nt, Homo sapiens
  misc_RNA (1)...(19): siRNA sense strand
gcaacacccucccugcaau

SEQ ID NO: 360163 - RNA, 19 nt, Homo sapiens
  misc_RNA (1)...(19): siRNA sense strand
ucaaguccauggcuucuau

SEQ ID NO: 360164 - RNA, 19 nt, Homo sapiens
  misc_RNA (1)...(19): siRNA sense strand
gcaaagccaacaccacuug

SEQ ID NO: 360165 - RNA, 19 nt, Homo sapiens
  misc_RNA (1)...(19): siRNA sense strand
ggacagcaccaauucugaa

SEQ ID NO: 360166 - RNA, 19 nt, Homo sapiens
  misc_RNA (1)...(19): siRNA sense strand
gagcacagacucccugaga

SEQ ID NO: 360167 - RNA, 19 nt, Homo sapiens
  misc_RNA (1)...(19): siRNA sense strand
cagcagagaccgccaauca

SEQ ID NO: 360168 - RNA, 19 nt, Homo sapiens
  misc_RNA (1)...(19): siRNA sense strand
gaacgagcaggugauaauu

SEQ ID NO: 360169 - RNA, 19 nt, Homo sapiens
  misc_RNA (1)...(19): siRNA sense strand
ccagaucuguggcuucaau

SEQ ID NO: 360170 - RNA, 19 nt, Homo sapiens
  misc_RNA (1)...(19): siRNA sense strand
gcaccggcagcguugauua

SEQ ID NO: 360171 - RNA, 19 nt, Homo sapiens
  misc_RNA (1)...(19): siRNA sense strand
ucacuuggcuacccaucaa

SEQ ID NO: 360172 - RNA, 19 nt, Homo sapiens
  misc_RNA (1)...(19): siRNA sense strand
caacucuguucacguuuga

SEQ ID NO: 360173 - RNA, 19 nt, Homo sapiens
  misc_RNA (1)...(19): siRNA sense strand
aagaggacaugaauaagug

SEQ ID NO: 360174 - RNA, 19 nt, Homo sapiens
  misc_RNA (1)...(19): siRNA sense strand
gcagagaccgccaaucagu

SEQ ID NO: 360175 - RNA, 19 nt, Homo sapiens
  misc_RNA (1)...(19): siRNA sense strand
gaucaguggucaaguccau

SEQ ID NO: 360176 - RNA, 19 nt, Homo sapiens
  misc_RNA (1)...(19): siRNA sense strand
cgagacagauaaugaggau

SEQ ID NO: 360177 - RNA, 19 nt, Homo sapiens
  misc_RNA (1)...(19): siRNA sense strand
gcuccgagacagauaauga

SEQ ID NO: 360178 - RNA, 19 nt, Homo sapiens
  misc_RNA (1)...(19): siRNA sense strand
gaucggacagcaccaauuc

SEQ ID NO: 360179 - RNA, 19 nt, Homo sapiens
  misc_RNA (1)...(19): siRNA sense strand
augcaggccugaccuuuaa

SEQ ID NO: 360180 - RNA, 19 nt, Homo sapiens
  misc_RNA (1)...(19): siRNA sense strand
acaacuaugugcccaugaa

SEQ ID NO: 360181 - RNA, 19 nt, Homo sapiens
  misc_RNA (1)...(19): siRNA sense strand
ccaacucuguucacguuug

SEQ ID NO: 360182 - RNA, 19 nt, Homo sapiens
  misc_RNA (1)...(19): siRNA sense strand
gaacuaugucccuaugcaa

SEQ ID NO: 360183 - RNA, 19 nt, Homo sapiens
  misc_RNA (1)...(19): siRNA sense strand
gaggauguguacaccuuca

SEQ ID NO: 360184 - RNA, 19 nt, Homo sapiens
  misc_RNA (1)...(19): siRNA sense strand
gacagaagaggacaugaau

SEQ ID NO: 360185 - RNA, 19 nt, Homo sapiens
  misc_RNA (1)...(19): siRNA sense strand
gcagaggaagugagauuca

SEQ ID NO: 360186 - RNA, 19 nt, Homo sapiens
  misc_RNA (1)...(19): siRNA sense strand
ggacauucacucuggacaa

SEQ ID NO: 360187 - RNA, 19 nt, Homo sapiens
  misc_RNA (1)...(19): siRNA sense strand
gugauggaguuggcucuuu

SEQ ID NO: 360188 - RNA, 19 nt, Homo sapiens
  misc_RNA (1)...(19): siRNA sense strand
cagcagaggaagugagauu

SEQ ID NO: 360189 - RNA, 19 nt, Homo sapiens
  misc_RNA (1)...(19): siRNA sense strand
gcaggauaguuuuguguuu

SEQ ID NO: 360190 - RNA, 19 nt, Homo sapiens
  misc_RNA (1)...(19): siRNA sense strand
cuucauccgucaccucuga

SEQ ID NO: 360191 - RNA, 19 nt, Homo sapiens
  misc_RNA (1)...(19): siRNA sense strand
gcaccaauucugaagacaa

SEQ ID NO: 360192 - RNA, 19 nt, Homo sapiens
  misc_RNA (1)...(19): siRNA sense strand
ccagaucccuaggacauuc

SEQ ID NO: 360193 - RNA, 19 nt, Homo sapiens
  misc_RNA (1)...(19): siRNA sense strand
cagcgcaccucaggaguau

SEQ ID NO: 360194 - RNA, 19 nt, Homo sapiens
  misc_RNA (1)...(19): siRNA sense strand
guucuggaauacuacaaga

SEQ ID NO: 360195 - RNA, 19 nt, Homo sapiens
  misc_RNA (1)...(19): siRNA sense strand
agagaacuaugucccuaug

SEQ ID NO: 360196 - RNA, 19 nt, Homo sapiens
  misc_RNA (1)...(19): siRNA sense strand
gaucaucaaccugaacuuc

SEQ ID NO: 360197 - RNA, 19 nt, Homo sapiens
  misc_RNA (1)...(19): siRNA sense strand
ccagggcaauggacacugu

SEQ ID NO: 360198 - RNA, 19 nt, Homo sapiens
  misc_RNA (1)...(19): siRNA sense strand
cagauaaugaggaugugua

SEQ ID NO: 360199 - RNA, 19 nt, Homo sapiens
  misc_RNA (1)...(19): siRNA sense strand
ucaagucaccuaucaccaa

SEQ ID NO: 360200 - RNA, 19 nt, Homo sapiens
  misc_RNA (1)...(19): siRNA sense strand
gaacgaucacuccaagaag

SEQ ID NO: 360201 - RNA, 19 nt, Homo sapiens
  misc_RNA (1)...(19): siRNA sense strand
ccugugagaccuacgagua

SEQ ID NO: 360202 - RNA, 19 nt, Homo sapiens
  misc_RNA (1)...(19): siRNA sense strand
gggcaguccucagcagaga

SEQ ID NO: 360203 - RNA, 19 nt, Homo sapiens
  misc_RNA (1)...(19): siRNA sense strand
ccacuugaccugaggaaca

SEQ ID NO: 360204 - RNA, 19 nt, Homo sapiens
  misc_RNA (1)...(19): siRNA sense strand
agacagaagaggacaugaa

SEQ ID NO: 360205 - RNA, 19 nt, Homo sapiens
  misc_RNA (1)...(19): siRNA sense strand
ggaacaacaccgucaucga

SEQ ID NO: 360206 - RNA, 19 nt, Homo sapiens
  misc_RNA (1)...(19): siRNA sense strand
aaaccacaaugccaugaca

SEQ ID NO: 360207 - RNA, 19 nt, Homo sapiens
  misc_RNA (1)...(19): siRNA sense strand
agacagauaaugaggaugu

SEQ ID NO: 360208 - RNA, 19 nt, Homo sapiens
  misc_RNA (1)...(19): siRNA sense strand
cagacucccugagaaaugu

SEQ ID NO: 360209 - RNA, 19 nt, Homo sapiens
  misc_RNA (1)...(19): siRNA sense strand
agaacgaucacuccaagaa

SEQ ID NO: 360210 - RNA, 19 nt, Homo sapiens
  misc_RNA (1)...(19): siRNA sense strand
ccagugaacgcaccuuuua

SEQ ID NO: 360211 - RNA, 19 nt, Homo sapiens
  misc_RNA (1)...(19): siRNA sense strand
agccaacucuguucacguu

SEQ ID NO: 360212 - RNA, 19 nt, Homo sapiens
  misc_RNA (1)...(19): siRNA sense strand
gaagguggacuacguucag

SEQ ID NO: 360213 - RNA, 19 nt, Homo sapiens
  misc_RNA (1)...(19): siRNA sense strand
cgucaccucugaugagaag

SEQ ID NO: 360214 - RNA, 19 nt, Homo sapiens
  misc_RNA (1)...(19): siRNA sense strand
ccaauucugaagacaacua

SEQ ID NO: 360215 - RNA, 19 nt, Homo sapiens
  misc_RNA (1)...(19): siRNA sense strand
ugauggaguuggcucuuuc

SEQ ID NO: 360216 - RNA, 19 nt, Homo sapiens
  misc_RNA (1)...(19): siRNA sense strand
gguagacaauauggauguu

SEQ ID NO: 360217 - RNA, 19 nt, Homo sapiens
  misc_RNA (1)...(19): siRNA sense strand
aagaaggagcugcaggaua

SEQ ID NO: 360218 - RNA, 19 nt, Homo sapiens
  misc_RNA (1)...(19): siRNA sense strand
gaacaguccugccccuaag

SEQ ID NO: 360219 - RNA, 19 nt, Homo sapiens
  misc_RNA (1)...(19): siRNA sense strand
gaccagugaacgcaccuuu

SEQ ID NO: 360220 - RNA, 19 nt, Homo sapiens
  misc_RNA (1)...(19): siRNA sense strand
gagcggugacccagauguu

SEQ ID NO: 360221 - RNA, 19 nt, Homo sapiens
  misc_RNA (1)...(19): siRNA sense strand
ccagcgcaccucaggagua

SEQ ID NO: 360222 - RNA, 19 nt, Homo sapiens
  misc_RNA (1)...(19): siRNA sense strand
ccugguggcugagacagaa

SEQ ID NO: 360223 - RNA, 19 nt, Homo sapiens
  misc_RNA (1)...(19): siRNA sense strand
agaacuaugucccuaugca

SEQ ID NO: 360224 - RNA, 19 nt, Homo sapiens
  misc_RNA (1)...(19): siRNA sense strand
ucaucaaccugaacuucug

SEQ ID NO: 360225 - RNA, 19 nt, Homo sapiens
  misc_RNA (1)...(19): siRNA sense strand
gaggagugacacagcugua

SEQ ID NO: 360226 - RNA, 19 nt, Homo sapiens
  misc_RNA (1)...(19): siRNA sense strand
caagccaagucaggcagaa

SEQ ID NO: 360227 - RNA, 19 nt, Homo sapiens
  misc_RNA (1)...(19): siRNA sense strand
acagaagaggacaugaaua

SEQ ID NO: 360228 - RNA, 19 nt, Homo sapiens
  misc_RNA (1)...(19): siRNA sense strand
cggcagcguugauuaucug

SEQ ID NO: 360229 - RNA, 19 nt, Homo sapiens
  misc_RNA (1)...(19): siRNA sense strand
gagcgucuacaucccaaug

SEQ ID NO: 360230 - RNA, 19 nt, Homo sapiens
  misc_RNA (1)...(19): siRNA sense strand
gcccaugaauccagguucu

SEQ ID NO: 360231 - RNA, 19 nt, Homo sapiens
  misc_RNA (1)...(19): siRNA sense strand
caccaauucugaagacaac

SEQ ID NO: 360232 - RNA, 19 nt, Homo sapiens
  misc_RNA (1)...(19): siRNA sense strand
agagaccgccaaucaguga

SEQ ID NO: 360233 - RNA, 19 nt, Homo sapiens
  misc_RNA (1)...(19): siRNA sense strand
ggagugccagcuucucuca

SEQ ID NO: 360234 - RNA, 19 nt, Homo sapiens
  misc_RNA (1)...(19): siRNA sense strand
gcaaggagugccagcuucu

SEQ ID NO: 360235 - RNA, 19 nt, Homo sapiens
  misc_RNA (1)...(19): siRNA sense strand
gauguguacaccuucaaga

SEQ ID NO: 360236 - RNA, 19 nt, Homo sapiens
  misc_RNA (1)...(19): siRNA sense strand
caacacccucccugcaaug

SEQ ID NO: 360237 - RNA, 19 nt, Homo sapiens
  misc_RNA (1)...(19): siRNA sense strand
cagcaccaauucugaagac

SEQ ID NO: 360238 - RNA, 19 nt, Homo sapiens
  misc_RNA (1)...(19): siRNA sense strand
caggagacagcgaagagaa

SEQ ID NO: 360239 - RNA, 19 nt, Homo sapiens
  misc_RNA (1)...(19): siRNA sense strand
ggagugacacagcuguaca

SEQ ID NO: 360240 - RNA, 19 nt, Homo sapiens
  misc_RNA (1)...(19): siRNA sense strand
gcaagccaucuacuucauc

SEQ ID NO: 360241 - RNA, 19 nt, Homo sapiens
  misc_RNA (1)...(19): siRNA sense strand
gccugaccuuuaacaagaa

SEQ ID NO: 360242 - RNA, 19 nt, Homo sapiens
  misc_RNA (1)...(19): siRNA sense strand
caaagccaacaccacuuga

SEQ ID NO: 360243 - RNA, 19 nt, Homo sapiens
  misc_RNA (1)...(19): siRNA sense strand
ucagagacaguaccuacga

SEQ ID NO: 360244 - RNA, 19 nt, Homo sapiens
  misc_RNA (1)...(19): siRNA sense strand
gagugacacagcuguacaa

SEQ ID NO: 360245 - RNA, 19 nt, Homo sapiens
  misc_RNA (1)...(19): siRNA sense strand
cgggaucaguggucaaguc

SEQ ID NO: 360246 - RNA, 19 nt, Homo sapiens
  misc_RNA (1)...(19): siRNA sense strand
cacuugaccugaggaacaa

SEQ ID NO: 360247 - RNA, 19 nt, Homo sapiens
  misc_RNA (1)...(19): siRNA sense strand
caacuaugugcccaugaau

SEQ ID NO: 360248 - RNA, 19 nt, Homo sapiens
  misc_RNA (1)...(19): siRNA sense strand
agacagcgaagagaacuau

SEQ ID NO: 360249 - RNA, 19 nt, Homo sapiens
  misc_RNA (1)...(19): siRNA sense strand
auaaguggguccagagcau

SEQ ID NO: 360250 - RNA, 19 nt, Homo sapiens
  misc_RNA (1)...(19): siRNA sense strand
gaacuucugugagcaggua

SEQ ID NO: 360251 - RNA, 19 nt, Homo sapiens
  misc_RNA (1)...(19): siRNA sense strand
cagaagaggacaugaauaa

SEQ ID NO: 360252 - RNA, 19 nt, Homo sapiens
  misc_RNA (1)...(19): siRNA sense strand
gaacaacaccgucaucgau

SEQ ID NO: 360253 - RNA, 19 nt, Homo sapiens
  misc_RNA (1)...(19): siRNA sense strand
ccucaaaccugaucggaaa

SEQ ID NO: 360254 - RNA, 19 nt, Homo sapiens
  misc_RNA (1)...(19): siRNA sense strand
agaaggagcugcaggauag

SEQ ID NO: 360255 - RNA, 19 nt, Homo sapiens
  misc_RNA (1)...(19): siRNA sense strand
ggccugaccuuuaacaaga

SEQ ID NO: 360256 - RNA, 19 nt, Homo sapiens
  misc_RNA (1)...(19): siRNA sense strand
gcacagacucccugagaaa

SEQ ID NO: 360257 - RNA, 19 nt, Homo sapiens
  misc_RNA (1)...(19): siRNA sense strand
gaagaggacaugaauaagu

SEQ ID NO: 360258 - RNA, 19 nt, Homo sapiens
  misc_RNA (1)...(19): siRNA sense strand
gaugcaggccugaccuuua

SEQ ID NO: 360259 - RNA, 19 nt, Homo sapiens
  misc_RNA (1)...(19): siRNA sense strand
ggaacgagcaggugauaau

SEQ ID NO: 360260 - RNA, 19 nt, Homo sapiens
  misc_RNA (1)...(19): siRNA sense strand
gacauucacucuggacaaa

SEQ ID NO: 360261 - RNA, 19 nt, Homo sapiens
  misc_RNA (1)...(19): siRNA sense strand
gcacaauacagaauucaga

SEQ ID NO: 360262 - RNA, 19 nt, Homo sapiens
  misc_RNA (1)...(19): siRNA sense strand
gcaacacccucccugcaau

SEQ ID NO: 360263 - RNA, 19 nt, Homo sapiens
  misc_RNA (1)...(19): siRNA sense strand
ucaaguccauggcuucuau

SEQ ID NO: 360264 - RNA, 19 nt, Homo sapiens
  misc_RNA (1)...(19): siRNA sense strand
gcaaagccaacaccacuug

SEQ ID NO: 360265 - RNA, 19 nt, Homo sapiens
  misc_RNA (1)...(19): siRNA sense strand
ggacagcaccaauucugaa

SEQ ID NO: 360266 - RNA, 19 nt, Homo sapiens
  misc_RNA (1)...(19): siRNA sense strand
gaugagcggugacccagau

SEQ ID NO: 360267 - RNA, 19 nt, Homo sapiens
  misc_RNA (1)...(19): siRNA sense strand
gagcacagacucccugaga

SEQ ID NO: 360268 - RNA, 19 nt, Homo sapiens
  misc_RNA (1)...(19): siRNA sense strand
cagcagagaccgccaauca

SEQ ID NO: 360269 - RNA, 19 nt, Homo sapiens
  misc_RNA (1)...(19): siRNA sense strand
gaacgagcaggugauaauu

SEQ ID NO: 360270 - RNA, 19 nt, Homo sapiens
  misc_RNA (1)...(19): siRNA sense strand
ccagaucuguggcuucaau

SEQ ID NO: 360271 - RNA, 19 nt, Homo sapiens
  misc_RNA (1)...(19): siRNA sense strand
gcaccggcagcguugauua

SEQ ID NO: 360272 - RNA, 19 nt, Homo sapiens
  misc_RNA (1)...(19): siRNA sense strand
ucacuuggcuacccaucaa

SEQ ID NO: 360273 - RNA, 19 nt, Homo sapiens
  misc_RNA (1)...(19): siRNA sense strand
caacucuguucacguuuga

SEQ ID NO: 360274 - RNA, 19 nt, Homo sapiens
  misc_RNA (1)...(19): siRNA sense strand
aagaggacaugaauaagug

SEQ ID NO: 360275 - RNA, 19 nt, Homo sapiens
  misc_RNA (1)...(19): siRNA sense strand
gcagagaccgccaaucagu

SEQ ID NO: 360276 - RNA, 19 nt, Homo sapiens
  misc_RNA (1)...(19): siRNA sense strand
gaucaguggucaaguccau

SEQ ID NO: 360277 - RNA, 19 nt, Homo sapiens
  misc_RNA (1)...(19): siRNA sense strand
cgagacagauaaugaggau

SEQ ID NO: 360278 - RNA, 19 nt, Homo sapiens
  misc_RNA (1)...(19): siRNA sense strand
gcuccgagacagauaauga

SEQ ID NO: 360279 - RNA, 19 nt, Homo sapiens
  misc_RNA (1)...(19): siRNA sense strand
gaucggacagcaccaauuc

SEQ ID NO: 360280 - RNA, 19 nt, Homo sapiens
  misc_RNA (1)...(19): siRNA sense strand
augcaggccugaccuuuaa

SEQ ID NO: 360281 - RNA, 19 nt, Homo sapiens
  misc_RNA (1)...(19): siRNA sense strand
acaacuaugugcccaugaa

SEQ ID NO: 360282 - RNA, 19 nt, Homo sapiens
  misc_RNA (1)...(19): siRNA sense strand
ccaacucuguucacguuug

SEQ ID NO: 360283 - RNA, 19 nt, Homo sapiens
  misc_RNA (1)...(19): siRNA sense strand
gaacuaugucccuaugcaa

SEQ ID NO: 360284 - RNA, 19 nt, Homo sapiens
  misc_RNA (1)...(19): siRNA sense strand
gaggauguguacaccuuca

SEQ ID NO: 360285 - RNA, 19 nt, Homo sapiens
  misc_RNA (1)...(19): siRNA sense strand
gacagaagaggacaugaau

SEQ ID NO: 360286 - RNA, 19 nt, Homo sapiens
  misc_RNA (1)...(19): siRNA sense strand
gcagaggaagugagauuca

SEQ ID NO: 360287 - RNA, 19 nt, Homo sapiens
  misc_RNA (1)...(19): siRNA sense strand
ggacauucacucuggacaa

SEQ ID NO: 360288 - RNA, 19 nt, Homo sapiens
  misc_RNA (1)...(19): siRNA sense strand
gugauggaguuggcucuuu

SEQ ID NO: 360289 - RNA, 19 nt, Homo sapiens
  misc_RNA (1)...(19): siRNA sense strand
cagcagaggaagugagauu

SEQ ID NO: 360290 - RNA, 19 nt, Homo sapiens
  misc_RNA (1)...(19): siRNA sense strand
gcaggauaguuuuguguuu

SEQ ID NO: 360291 - RNA, 19 nt, Homo sapiens
  misc_RNA (1)...(19): siRNA sense strand
cuucauccgucaccucuga

SEQ ID NO: 360292 - RNA, 19 nt, Homo sapiens
  misc_RNA (1)...(19): siRNA sense strand
gcaccaauucugaagacaa

SEQ ID NO: 360293 - RNA, 19 nt, Homo sapiens
  misc_RNA (1)...(19): siRNA sense strand
ccagaucccuaggacauuc

SEQ ID NO: 360294 - RNA, 19 nt, Homo sapiens
  misc_RNA (1)...(19): siRNA sense strand
cagcgcaccucaggaguau

SEQ ID NO: 360295 - RNA, 19 nt, Homo sapiens
  misc_RNA (1)...(19): siRNA sense strand
ccagggcaauggacacugu

SEQ ID NO: 360296 - RNA, 19 nt, Homo sapiens
  misc_RNA (1)...(19): siRNA sense strand
gaucaucaaccugaacuuc

SEQ ID NO: 360297 - RNA, 19 nt, Homo sapiens
  misc_RNA (1)...(19): siRNA sense strand
agagaacuaugucccuaug

SEQ ID NO: 360298 - RNA, 19 nt, Homo sapiens
  misc_RNA (1)...(19): siRNA sense strand
guucuggaauacuacaaga

SEQ ID NO: 360299 - RNA, 19 nt, Homo sapiens
  misc_RNA (1)...(19): siRNA sense strand
cagauaaugaggaugugua

SEQ ID NO: 360300 - RNA, 19 nt, Homo sapiens
  misc_RNA (1)...(19): siRNA sense strand
ucaagucaccuaucaccaa

SEQ ID NO: 360301 - RNA, 19 nt, Homo sapiens
  misc_RNA (1)...(19): siRNA sense strand
gaacgaucacuccaagaag

SEQ ID NO: 360302 - RNA, 19 nt, Homo sapiens
  misc_RNA (1)...(19): siRNA sense strand
ccugugagaccuacgagua

SEQ ID NO: 360303 - RNA, 19 nt, Homo sapiens
  misc_RNA (1)...(19): siRNA sense strand
gggcaguccucagcagaga

SEQ ID NO: 360304 - RNA, 19 nt, Homo sapiens
  misc_RNA (1)...(19): siRNA sense strand
ccacuugaccugaggaaca

SEQ ID NO: 360305 - RNA, 19 nt, Homo sapiens
  misc_RNA (1)...(19): siRNA sense strand
agacagaagaggacaugaa

SEQ ID NO: 360306 - RNA, 19 nt, Homo sapiens
  misc_RNA (1)...(19): siRNA sense strand
agaacgaucacuccaagaa

SEQ ID NO: 360307 - RNA, 19 nt, Homo sapiens
  misc_RNA (1)...(19): siRNA sense strand
ggaacaacaccgucaucga

SEQ ID NO: 360308 - RNA, 19 nt, Homo sapiens
  misc_RNA (1)...(19): siRNA sense strand
aaaccacaaugccaugaca

SEQ ID NO: 360309 - RNA, 19 nt, Homo sapiens
  misc_RNA (1)...(19): siRNA sense strand
agacagauaaugaggaugu

SEQ ID NO: 360310 - RNA, 19 nt, Homo sapiens
  misc_RNA (1)...(19): siRNA sense strand
cagacucccugagaaaugu

SEQ ID NO: 360311 - RNA, 19 nt, Homo sapiens
  misc_RNA (1)...(19): siRNA sense strand
ccagugaacgcaccuuuua

SEQ ID NO: 360312 - RNA, 19 nt, Homo sapiens
  misc_RNA (1)...(19): siRNA sense strand
agccaacucuguucacguu

SEQ ID NO: 360313 - RNA, 19 nt, Homo sapiens
  misc_RNA (1)...(19): siRNA sense strand
gaagguggacuacguucag

SEQ ID NO: 360314 - RNA, 19 nt, Homo sapiens
  misc_RNA (1)...(19): siRNA sense strand
cgucaccucugaugagaag

SEQ ID NO: 360315 - RNA, 19 nt, Homo sapiens
  misc_RNA (1)...(19): siRNA sense strand
ccaauucugaagacaacua

SEQ ID NO: 360316 - RNA, 19 nt, Homo sapiens
  misc_RNA (1)...(19): siRNA sense strand
ugauggaguuggcucuuuc

SEQ ID NO: 360317 - RNA, 19 nt, Homo sapiens
  misc_RNA (1)...(19): siRNA sense strand
gguagacaauauggauguu

SEQ ID NO: 360318 - RNA, 19 nt, Homo sapiens
  misc_RNA (1)...(19): siRNA sense strand
gaacaguccugccccuaag

SEQ ID NO: 360319 - RNA, 19 nt, Homo sapiens
  misc_RNA (1)...(19): siRNA sense strand
aagaaggagcugcaggaua

SEQ ID NO: 360320 - RNA, 19 nt, Homo sapiens
  misc_RNA (1)...(19): siRNA sense strand
gaccagugaacgcaccuuu

SEQ ID NO: 360321 - RNA, 19 nt, Homo sapiens
  misc_RNA (1)...(19): siRNA sense strand
gagcggugacccagauguu

SEQ ID NO: 360322 - RNA, 19 nt, Homo sapiens
  misc_RNA (1)...(19): siRNA sense strand
ccagcgcaccucaggagua

SEQ ID NO: 360323 - RNA, 19 nt, Homo sapiens
  misc_RNA (1)...(19): siRNA sense strand
ccugguggcugagacagaa

SEQ ID NO: 360324 - RNA, 19 nt, Homo sapiens
  misc_RNA (1)...(19): siRNA sense strand
agaacuaugucccuaugca

SEQ ID NO: 360325 - RNA, 19 nt, Homo sapiens
  misc_RNA (1)...(19): siRNA sense strand
ucaucaaccugaacuucug

SEQ ID NO: 360326 - RNA, 19 nt, Homo sapiens
  misc_RNA (1)...(19): siRNA sense strand
gaggagugacacagcugua

SEQ ID NO: 360327 - RNA, 19 nt, Homo sapiens
  misc_RNA (1)...(19): siRNA sense strand
caagccaagucaggcagaa

SEQ ID NO: 360328 - RNA, 19 nt, Homo sapiens
  misc_RNA (1)...(19): siRNA sense strand
acagaagaggacaugaaua

SEQ ID NO: 360329 - RNA, 19 nt, Homo sapiens
  misc_RNA (1)...(19): siRNA sense strand
cggcagcguugauuaucug

SEQ ID NO: 360330 - RNA, 19 nt, Homo sapiens
  misc_RNA (1)...(19): siRNA sense strand
gagcgucuacaucccaaug

SEQ ID NO: 360331 - RNA, 19 nt, Homo sapiens
  misc_RNA (1)...(19): siRNA sense strand
gcccaugaauccagguucu

SEQ ID NO: 360332 - RNA, 19 nt, Homo sapiens
  misc_RNA (1)...(19): siRNA sense strand
caccaauucugaagacaac

SEQ ID NO: 360333 - RNA, 19 nt, Homo sapiens
  misc_RNA (1)...(19): siRNA sense strand
agagaccgccaaucaguga

SEQ ID NO: 360334 - RNA, 19 nt, Homo sapiens
  misc_RNA (1)...(19): siRNA sense strand
ggagugccagcuucucuca

SEQ ID NO: 360335 - RNA, 19 nt, Homo sapiens
  misc_RNA (1)...(19): siRNA sense strand
gcaaggagugccagcuucu

SEQ ID NO: 360336 - RNA, 19 nt, Homo sapiens
  misc_RNA (1)...(19): siRNA sense strand
gauguguacaccuucaaga

SEQ ID NO: 360337 - RNA, 19 nt, Homo sapiens
  misc_RNA (1)...(19): siRNA sense strand
caacacccucccugcaaug

SEQ ID NO: 360338 - RNA, 19 nt, Homo sapiens
  misc_RNA (1)...(19): siRNA sense strand
cagcaccaauucugaagac

SEQ ID NO: 360339 - RNA, 19 nt, Homo sapiens
  misc_RNA (1)...(19): siRNA sense strand
caggagacagcgaagagaa

SEQ ID NO: 360340 - RNA, 19 nt, Homo sapiens
  misc_RNA (1)...(19): siRNA sense strand
ggagugacacagcuguaca

SEQ ID NO: 360341 - RNA, 19 nt, Homo sapiens
  misc_RNA (1)...(19): siRNA sense strand
gcaagccaucuacuucauc

SEQ ID NO: 360342 - RNA, 19 nt, Homo sapiens
  misc_RNA (1)...(19): siRNA sense strand
caaagccaacaccacuuga

SEQ ID NO: 360343 - RNA, 19 nt, Homo sapiens
  misc_RNA (1)...(19): siRNA sense strand
gccugaccuuuaacaagaa

SEQ ID NO: 360344 - RNA, 19 nt, Homo sapiens
  misc_RNA (1)...(19): siRNA sense strand
ucagagacaguaccuacga

SEQ ID NO: 360345 - RNA, 19 nt, Homo sapiens
  misc_RNA (1)...(19): siRNA sense strand
gagugacacagcuguacaa

SEQ ID NO: 360346 - RNA, 19 nt, Homo sapiens
  misc_RNA (1)...(19): siRNA sense strand
cgggaucaguggucaaguc

SEQ ID NO: 360347 - RNA, 19 nt, Homo sapiens
  misc_RNA (1)...(19): siRNA sense strand
cacuugaccugaggaacaa

SEQ ID NO: 360348 - RNA, 19 nt, Homo sapiens
  misc_RNA (1)...(19): siRNA sense strand
caacuaugugcccaugaau

SEQ ID NO: 360349 - RNA, 19 nt, Homo sapiens
  misc_RNA (1)...(19): siRNA sense strand
agacagcgaagagaacuau

SEQ ID NO: 360350 - RNA, 19 nt, Homo sapiens
  misc_RNA (1)...(19): siRNA sense strand
guaaaggugucuacuguuu

SEQ ID NO: 360351 - RNA, 19 nt, Homo sapiens
  misc_RNA (1)...(19): siRNA sense strand
guaacuggcucuucagauu

SEQ ID NO: 360352 - RNA, 19 nt, Homo sapiens
  misc_RNA (1)...(19): siRNA sense strand
gcacauugguggaacauuc

SEQ ID NO: 360353 - RNA, 19 nt, Homo sapiens
  misc_RNA (1)...(19): siRNA sense strand
guuaguggaucaucagaua

SEQ ID NO: 360354 - RNA, 19 nt, Homo sapiens
  misc_RNA (1)...(19): siRNA sense strand
gagcaaggcuuagaucaca

SEQ ID NO: 360355 - RNA, 19 nt, Homo sapiens
  misc_RNA (1)...(19): siRNA sense strand
gaaggaaugcuuuggaaga

SEQ ID NO: 360356 - RNA, 19 nt, Homo sapiens
  misc_RNA (1)...(19): siRNA sense strand
ugaauguggugccuguuua

SEQ ID NO: 360357 - RNA, 19 nt, Homo sapiens
  misc_RNA (1)...(19): siRNA sense strand
gauaaguaauggaacauca

SEQ ID NO: 360358 - RNA, 19 nt, Homo sapiens
  misc_RNA (1)...(19): siRNA sense strand
ugaaucagaucaaguggaa

SEQ ID NO: 360359 - RNA, 19 nt, Homo sapiens
  misc_RNA (1)...(19): siRNA sense strand
gugaaguucuuaacacauu

SEQ ID NO: 360360 - RNA, 19 nt, Homo sapiens
  misc_RNA (1)...(19): siRNA sense strand
ggacuuuauuaccgcuuua

SEQ ID NO: 360361 - RNA, 19 nt, Homo sapiens
  misc_RNA (1)...(19): siRNA sense strand
gaacauacacuuacaucuc

SEQ ID NO: 360362 - RNA, 19 nt, Homo sapiens
  misc_RNA (1)...(19): siRNA sense strand
gagcugguauguaaagaau

SEQ ID NO: 360363 - RNA, 19 nt, Homo sapiens
  misc_RNA (1)...(19): siRNA sense strand
gagcaccugugaauuuguu

SEQ ID NO: 360364 - RNA, 19 nt, Homo sapiens
  misc_RNA (1)...(19): siRNA sense strand
agagggacaugaagaauug

SEQ ID NO: 360365 - RNA, 19 nt, Homo sapiens
  misc_RNA (1)...(19): siRNA sense strand
gaacaucuuauuucacgaa

SEQ ID NO: 360366 - RNA, 19 nt, Homo sapiens
  misc_RNA (1)...(19): siRNA sense strand
caucuuauuucacgaaugu

SEQ ID NO: 360367 - RNA, 19 nt, Homo sapiens
  misc_RNA (1)...(19): siRNA sense strand
cagaaggaaugcuuuggaa

SEQ ID NO: 360368 - RNA, 19 nt, Homo sapiens
  misc_RNA (1)...(19): siRNA sense strand
gcucugggauauugaaugu

SEQ ID NO: 360369 - RNA, 19 nt, Homo sapiens
  misc_RNA (1)...(19): siRNA sense strand
gaauuuguggaacaucuua

SEQ ID NO: 360370 - RNA, 19 nt, Homo sapiens
  misc_RNA (1)...(19): siRNA sense strand
cgagugaucucagaaggaa

SEQ ID NO: 360371 - RNA, 19 nt, Homo sapiens
  misc_RNA (1)...(19): siRNA sense strand
acagauggcccuccaaauu

SEQ ID NO: 360372 - RNA, 19 nt, Homo sapiens
  misc_RNA (1)...(19): siRNA sense strand
gaagcugauugaacgaaug

SEQ ID NO: 360373 - RNA, 19 nt, Homo sapiens
  misc_RNA (1)...(19): siRNA sense strand
gcaaggcuuagaucacaua

SEQ ID NO: 360374 - RNA, 19 nt, Homo sapiens
  misc_RNA (1)...(19): siRNA sense strand
gcacuuacgcuucagcaau

SEQ ID NO: 360375 - RNA, 19 nt, Homo sapiens
  misc_RNA (1)...(19): siRNA sense strand
gugaucgucuccagaaaga

SEQ ID NO: 360376 - RNA, 19 nt, Homo sapiens
  misc_RNA (1)...(19): siRNA sense strand
gcuccaguuugaugaguuu

SEQ ID NO: 360377 - RNA, 19 nt, Homo sapiens
  misc_RNA (1)...(19): siRNA sense strand
gaauguggugccuguuuaa

SEQ ID NO: 360378 - RNA, 19 nt, Homo sapiens
  misc_RNA (1)...(19): siRNA sense strand
uaucagcauggacauauua

SEQ ID NO: 360379 - RNA, 19 nt, Homo sapiens
  misc_RNA (1)...(19): siRNA sense strand
gcagagggugggaucagua

SEQ ID NO: 360380 - RNA, 19 nt, Homo sapiens
  misc_RNA (1)...(19): siRNA sense strand
aauggaacaucaucuguga

SEQ ID NO: 360381 - RNA, 19 nt, Homo sapiens
  misc_RNA (1)...(19): siRNA sense strand
cagaucaaguggaauuugu

SEQ ID NO: 360382 - RNA, 19 nt, Homo sapiens
  misc_RNA (1)...(19): siRNA sense strand
guauugcacuuacgcuuca

SEQ ID NO: 360383 - RNA, 19 nt, Homo sapiens
  misc_RNA (1)...(19): siRNA sense strand
gcauggacauauuaacucu

SEQ ID NO: 360384 - RNA, 19 nt, Homo sapiens
  misc_RNA (1)...(19): siRNA sense strand
cgaugcauccgguuugaua

SEQ ID NO: 360385 - RNA, 19 nt, Homo sapiens
  misc_RNA (1)...(19): siRNA sense strand
ccauuaggcucugggauau

SEQ ID NO: 360386 - RNA, 19 nt, Homo sapiens
  misc_RNA (1)...(19): siRNA sense strand
cacgagcaccugugaauuu

SEQ ID NO: 360387 - RNA, 19 nt, Homo sapiens
  misc_RNA (1)...(19): siRNA sense strand
ccagaaagaggccaucaga

SEQ ID NO: 360388 - RNA, 19 nt, Homo sapiens
  misc_RNA (1)...(19): siRNA sense strand
ggaauguuugaaaguguua

SEQ ID NO: 360389 - RNA, 19 nt, Homo sapiens
  misc_RNA (1)...(19): siRNA sense strand
gcugguauguaaagaaugg

SEQ ID NO: 360390 - RNA, 19 nt, Homo sapiens
  misc_RNA (1)...(19): siRNA sense strand
acacauugauccaccacaa

SEQ ID NO: 360391 - RNA, 19 nt, Homo sapiens
  misc_RNA (1)...(19): siRNA sense strand
ccuacgagauaauucuauu

SEQ ID NO: 360392 - RNA, 19 nt, Homo sapiens
  misc_RNA (1)...(19): siRNA sense strand
ucacauagcagaaaacauu

SEQ ID NO: 360393 - RNA, 19 nt, Homo sapiens
  misc_RNA (1)...(19): siRNA sense strand
ggacugauggugaccuguu

SEQ ID NO: 360394 - RNA, 19 nt, Homo sapiens
  misc_RNA (1)...(19): siRNA sense strand
cauuguaacuggcucuuca

SEQ ID NO: 360395 - RNA, 19 nt, Homo sapiens
  misc_RNA (1)...(19): siRNA sense strand
ccacagauggcccuccaaa

SEQ ID NO: 360396 - RNA, 19 nt, Homo sapiens
  misc_RNA (1)...(19): siRNA sense strand
ucaguggccuacgagauaa

SEQ ID NO: 360397 - RNA, 19 nt, Homo sapiens
  misc_RNA (1)...(19): siRNA sense strand
gggacuuuauuaccgcuuu

SEQ ID NO: 360398 - RNA, 19 nt, Homo sapiens
  misc_RNA (1)...(19): siRNA sense strand
gcacgagcaccugugaauu

SEQ ID NO: 360399 - RNA, 19 nt, Homo sapiens
  misc_RNA (1)...(19): siRNA sense strand
cagauggcccuccaaauuc

SEQ ID NO: 360400 - RNA, 19 nt, Homo sapiens
  misc_RNA (1)...(19): siRNA sense strand
gaucaguaccuguuuaaaa

SEQ ID NO: 360401 - RNA, 19 nt, Homo sapiens
  misc_RNA (1)...(19): siRNA sense strand
gggaucaguaccuguuuaa

SEQ ID NO: 360402 - RNA, 19 nt, Homo sapiens
  misc_RNA (1)...(19): siRNA sense strand
ugggaucaguaccuguuua

SEQ ID NO: 360403 - RNA, 19 nt, Homo sapiens
  misc_RNA (1)...(19): siRNA sense strand
gcacugauccccuauggaa

SEQ ID NO: 360404 - RNA, 19 nt, Homo sapiens
  misc_RNA (1)...(19): siRNA sense strand
agaaagaggccaucagaag

SEQ ID NO: 360405 - RNA, 19 nt, Homo sapiens
  misc_RNA (1)...(19): siRNA sense strand
gcagagcugguauguaaag

SEQ ID NO: 360406 - RNA, 19 nt, Homo sapiens
  misc_RNA (1)...(19): siRNA sense strand
gaaguucuuaacacauuga

SEQ ID NO: 360407 - RNA, 19 nt, Homo sapiens
  misc_RNA (1)...(19): siRNA sense strand
gggugaaguucuuaacaca

SEQ ID NO: 360408 - RNA, 19 nt, Homo sapiens
  misc_RNA (1)...(19): siRNA sense strand
uguggaacaucuuauuuca

SEQ ID NO: 360409 - RNA, 19 nt, Homo sapiens
  misc_RNA (1)...(19): siRNA sense strand
aaggaaugcuuuggaagaa

SEQ ID NO: 360410 - RNA, 19 nt, Homo sapiens
  misc_RNA (1)...(19): siRNA sense strand
uauuaacucuuaccugaag

SEQ ID NO: 360411 - RNA, 19 nt, Homo sapiens
  misc_RNA (1)...(19): siRNA sense strand
aaucagaucaaguggaauu

SEQ ID NO: 360412 - RNA, 19 nt, Homo sapiens
  misc_RNA (1)...(19): siRNA sense strand
aaaggugucuacuguuuac

SEQ ID NO: 360413 - RNA, 19 nt, Homo sapiens
  misc_RNA (1)...(19): siRNA sense strand
aggcuuagaucacauagca

SEQ ID NO: 360414 - RNA, 19 nt, Homo sapiens
  misc_RNA (1)...(19): siRNA sense strand
gaucucagaaggaaugcuu

SEQ ID NO: 360415 - RNA, 19 nt, Homo sapiens
  misc_RNA (1)...(19): siRNA sense strand
gggaucgccugguuguuag

SEQ ID NO: 360416 - RNA, 19 nt, Homo sapiens
  misc_RNA (1)...(19): siRNA sense strand
gaauuuguucguacucuca

SEQ ID NO: 360417 - RNA, 19 nt, Homo sapiens
  misc_RNA (1)...(19): siRNA sense strand
cacuuacgcuucagcaaug

SEQ ID NO: 360418 - RNA, 19 nt, Homo sapiens
  misc_RNA (1)...(19): siRNA sense strand
caucagaaggaaacuauca

SEQ ID NO: 360419 - RNA, 19 nt, Homo sapiens
  misc_RNA (1)...(19): siRNA sense strand
gucauuauacccaaagauu

SEQ ID NO: 360420 - RNA, 19 nt, Homo sapiens
  misc_RNA (1)...(19): siRNA sense strand
ucaaguggaauuuguggaa

SEQ ID NO: 360421 - RNA, 19 nt, Homo sapiens
  misc_RNA (1)...(19): siRNA sense strand
gcugauugaacgaauggua

SEQ ID NO: 360422 - RNA, 19 nt, Homo sapiens
  misc_RNA (1)...(19): siRNA sense strand
gaacauucuggacgugugu

SEQ ID NO: 360423 - RNA, 19 nt, Homo sapiens
  misc_RNA (1)...(19): siRNA sense strand
gcauccgguuugauaacaa

SEQ ID NO: 360424 - RNA, 19 nt, Homo sapiens
  misc_RNA (1)...(19): siRNA sense strand
ucagaaggaaacuaucaaa

SEQ ID NO: 360425 - RNA, 19 nt, Homo sapiens
  misc_RNA (1)...(19): siRNA sense strand
aaagaggccaucagaagga

SEQ ID NO: 360426 - RNA, 19 nt, Homo sapiens
  misc_RNA (1)...(19): siRNA sense strand
guaauggaacaucaucugu

SEQ ID NO: 360427 - RNA, 19 nt, Homo sapiens
  misc_RNA (1)...(19): siRNA sense strand
uagagggacaugaagaauu

SEQ ID NO: 360428 - RNA, 19 nt, Homo sapiens
  misc_RNA (1)...(19): siRNA sense strand
ggagcacgagcaccuguga

SEQ ID NO: 360429 - RNA, 19 nt, Homo sapiens
  misc_RNA (1)...(19): siRNA sense strand
ugaaguucuuaacacauug

SEQ ID NO: 360430 - RNA, 19 nt, Homo sapiens
  misc_RNA (1)...(19): siRNA sense strand
agauggcccuccaaauuca

SEQ ID NO: 360431 - RNA, 19 nt, Homo sapiens
  misc_RNA (1)...(19): siRNA sense strand
uugcagcgggacuuuauua

SEQ ID NO: 360432 - RNA, 19 nt, Homo sapiens
  misc_RNA (1)...(19): siRNA sense strand
gaucaucagauaauaccau

SEQ ID NO: 360433 - RNA, 19 nt, Homo sapiens
  misc_RNA (1)...(19): siRNA sense strand
agggaucgccugguuguua

SEQ ID NO: 360434 - RNA, 19 nt, Homo sapiens
  misc_RNA (1)...(19): siRNA sense strand
ccaccacaaugaggcugua

SEQ ID NO: 360435 - RNA, 19 nt, Homo sapiens
  misc_RNA (1)...(19): siRNA sense strand
gugagagugugggauguga

SEQ ID NO: 360436 - RNA, 19 nt, Homo sapiens
  misc_RNA (1)...(19): siRNA sense strand
gacacaacuugcagaggau

SEQ ID NO: 360437 - RNA, 19 nt, Homo sapiens
  misc_RNA (1)...(19): siRNA sense strand
gaugcauccgguuugauaa

SEQ ID NO: 360438 - RNA, 19 nt, Homo sapiens
  misc_RNA (1)...(19): siRNA sense strand
gacaggaccaucaaagucu

SEQ ID NO: 360439 - RNA, 19 nt, Homo sapiens
  misc_RNA (1)...(19): siRNA sense strand
ugacaggaccaucaaaguc

SEQ ID NO: 360440 - RNA, 19 nt, Homo sapiens
  misc_RNA (1)...(19): siRNA sense strand
uaacuggcucuucagauuc

SEQ ID NO: 360441 - RNA, 19 nt, Homo sapiens
  misc_RNA (1)...(19): siRNA sense strand
uggaauguuugaaaguguu

SEQ ID NO: 360442 - RNA, 19 nt, Homo sapiens
  misc_RNA (1)...(19): siRNA sense strand
aacauacacuuacaucucu

SEQ ID NO: 360443 - RNA, 19 nt, Homo sapiens
  misc_RNA (1)...(19): siRNA sense strand
gaagaagcugauugaacga

SEQ ID NO: 360444 - RNA, 19 nt, Homo sapiens
  misc_RNA (1)...(19): siRNA sense strand
uguuucggcuccaguuuga

SEQ ID NO: 360445 - RNA, 19 nt, Homo sapiens
  misc_RNA (1)...(19): siRNA sense strand
gccaucagaaggaaacuau

SEQ ID NO: 360446 - RNA, 19 nt, Homo sapiens
  misc_RNA (1)...(19): siRNA sense strand
ggaauuuguggaacaucuu

SEQ ID NO: 360447 - RNA, 19 nt, Homo sapiens
  misc_RNA (1)...(19): siRNA sense strand
uaguagacuuugacgacaa

SEQ ID NO: 360448 - RNA, 19 nt, Homo sapiens
  misc_RNA (1)...(19): siRNA sense strand
gggcugccgucaauguagu

SEQ ID NO: 360449 - RNA, 19 nt, Homo sapiens
  misc_RNA (1)...(19): siRNA sense strand
ccuggaauguuugaaagug

SEQ ID NO: 360450 - RNA, 19 nt, Homo sapiens
  misc_RNA (1)...(19): siRNA sense strand
guaaaggugucuacuguuu

SEQ ID NO: 360451 - RNA, 19 nt, Homo sapiens
  misc_RNA (1)...(19): siRNA sense strand
guaacuggcucuucagauu

SEQ ID NO: 360452 - RNA, 19 nt, Homo sapiens
  misc_RNA (1)...(19): siRNA sense strand
gcacauugguggaacauuc

SEQ ID NO: 360453 - RNA, 19 nt, Homo sapiens
  misc_RNA (1)...(19): siRNA sense strand
guuaguggaucaucagaua

SEQ ID NO: 360454 - RNA, 19 nt, Homo sapiens
  misc_RNA (1)...(19): siRNA sense strand
gagcaaggcuuagaucaca

SEQ ID NO: 360455 - RNA, 19 nt, Homo sapiens
  misc_RNA (1)...(19): siRNA sense strand
gaaggaaugcuuuggaaga

SEQ ID NO: 360456 - RNA, 19 nt, Homo sapiens
  misc_RNA (1)...(19): siRNA sense strand
ugaauguggugccuguuua

SEQ ID NO: 360457 - RNA, 19 nt, Homo sapiens
  misc_RNA (1)...(19): siRNA sense strand
gauaaguaauggaacauca

SEQ ID NO: 360458 - RNA, 19 nt, Homo sapiens
  misc_RNA (1)...(19): siRNA sense strand
ugaaucagaucaaguggaa

SEQ ID NO: 360459 - RNA, 19 nt, Homo sapiens
  misc_RNA (1)...(19): siRNA sense strand
gugaaguucuuaacacauu

SEQ ID NO: 360460 - RNA, 19 nt, Homo sapiens
  misc_RNA (1)...(19): siRNA sense strand
ggacuuuauuaccgcuuua

SEQ ID NO: 360461 - RNA, 19 nt, Homo sapiens
  misc_RNA (1)...(19): siRNA sense strand
gaacauacacuuacaucuc

SEQ ID NO: 360462 - RNA, 19 nt, Homo sapiens
  misc_RNA (1)...(19): siRNA sense strand
gagcugguauguaaagaau

SEQ ID NO: 360463 - RNA, 19 nt, Homo sapiens
  misc_RNA (1)...(19): siRNA sense strand
gagcaccugugaauuuguu

SEQ ID NO: 360464 - RNA, 19 nt, Homo sapiens
  misc_RNA (1)...(19): siRNA sense strand
agagggacaugaagaauug

SEQ ID NO: 360465 - RNA, 19 nt, Homo sapiens
  misc_RNA (1)...(19): siRNA sense strand
gaacaucuuauuucacgaa

SEQ ID NO: 360466 - RNA, 19 nt, Homo sapiens
  misc_RNA (1)...(19): siRNA sense strand
caucuuauuucacgaaugu

SEQ ID NO: 360467 - RNA, 19 nt, Homo sapiens
  misc_RNA (1)...(19): siRNA sense strand
cagaaggaaugcuuuggaa

SEQ ID NO: 360468 - RNA, 19 nt, Homo sapiens
  misc_RNA (1)...(19): siRNA sense strand
gcucugggauauugaaugu

SEQ ID NO: 360469 - RNA, 19 nt, Homo sapiens
  misc_RNA (1)...(19): siRNA sense strand
gaauuuguggaacaucuua

SEQ ID NO: 360470 - RNA, 19 nt, Homo sapiens
  misc_RNA (1)...(19): siRNA sense strand
cgagugaucucagaaggaa

SEQ ID NO: 360471 - RNA, 19 nt, Homo sapiens
  misc_RNA (1)...(19): siRNA sense strand
acagauggcccuccaaauu

SEQ ID NO: 360472 - RNA, 19 nt, Homo sapiens
  misc_RNA (1)...(19): siRNA sense strand
gaagcugauugaacgaaug

SEQ ID NO: 360473 - RNA, 19 nt, Homo sapiens
  misc_RNA (1)...(19): siRNA sense strand
gcaaggcuuagaucacaua

SEQ ID NO: 360474 - RNA, 19 nt, Homo sapiens
  misc_RNA (1)...(19): siRNA sense strand
gcacuuacgcuucagcaau

SEQ ID NO: 360475 - RNA, 19 nt, Homo sapiens
  misc_RNA (1)...(19): siRNA sense strand
gugaucgucuccagaaaga

SEQ ID NO: 360476 - RNA, 19 nt, Homo sapiens
  misc_RNA (1)...(19): siRNA sense strand
gcuccaguuugaugaguuu

SEQ ID NO: 360477 - RNA, 19 nt, Homo sapiens
  misc_RNA (1)...(19): siRNA sense strand
gaauguggugccuguuuaa

SEQ ID NO: 360478 - RNA, 19 nt, Homo sapiens
  misc_RNA (1)...(19): siRNA sense strand
uaucagcauggacauauua

SEQ ID NO: 360479 - RNA, 19 nt, Homo sapiens
  misc_RNA (1)...(19): siRNA sense strand
gcagagggugggaucagua

SEQ ID NO: 360480 - RNA, 19 nt, Homo sapiens
  misc_RNA (1)...(19): siRNA sense strand
aauggaacaucaucuguga

SEQ ID NO: 360481 - RNA, 19 nt, Homo sapiens
  misc_RNA (1)...(19): siRNA sense strand
cagaucaaguggaauuugu

SEQ ID NO: 360482 - RNA, 19 nt, Homo sapiens
  misc_RNA (1)...(19): siRNA sense strand
guauugcacuuacgcuuca

SEQ ID NO: 360483 - RNA, 19 nt, Homo sapiens
  misc_RNA (1)...(19): siRNA sense strand
gcauggacauauuaacucu

SEQ ID NO: 360484 - RNA, 19 nt, Homo sapiens
  misc_RNA (1)...(19): siRNA sense strand
cgaugcauccgguuugaua

SEQ ID NO: 360485 - RNA, 19 nt, Homo sapiens
  misc_RNA (1)...(19): siRNA sense strand
ccauuaggcucugggauau

SEQ ID NO: 360486 - RNA, 19 nt, Homo sapiens
  misc_RNA (1)...(19): siRNA sense strand
cacgagcaccugugaauuu

SEQ ID NO: 360487 - RNA, 19 nt, Homo sapiens
  misc_RNA (1)...(19): siRNA sense strand
ccagaaagaggccaucaga

SEQ ID NO: 360488 - RNA, 19 nt, Homo sapiens
  misc_RNA (1)...(19): siRNA sense strand
ggaauguuugaaaguguua

SEQ ID NO: 360489 - RNA, 19 nt, Homo sapiens
  misc_RNA (1)...(19): siRNA sense strand
gcugguauguaaagaaugg

SEQ ID NO: 360490 - RNA, 19 nt, Homo sapiens
  misc_RNA (1)...(19): siRNA sense strand
acacauugauccaccacaa

SEQ ID NO: 360491 - RNA, 19 nt, Homo sapiens
  misc_RNA (1)...(19): siRNA sense strand
ccuacgagauaauucuauu

SEQ ID NO: 360492 - RNA, 19 nt, Homo sapiens
  misc_RNA (1)...(19): siRNA sense strand
ucacauagcagaaaacauu

SEQ ID NO: 360493 - RNA, 19 nt, Homo sapiens
  misc_RNA (1)...(19): siRNA sense strand
ggacugauggugaccuguu

SEQ ID NO: 360494 - RNA, 19 nt, Homo sapiens
  misc_RNA (1)...(19): siRNA sense strand
cauuguaacuggcucuuca

SEQ ID NO: 360495 - RNA, 19 nt, Homo sapiens
  misc_RNA (1)...(19): siRNA sense strand
ccacagauggcccuccaaa

SEQ ID NO: 360496 - RNA, 19 nt, Homo sapiens
  misc_RNA (1)...(19): siRNA sense strand
ucaguggccuacgagauaa

SEQ ID NO: 360497 - RNA, 19 nt, Homo sapiens
  misc_RNA (1)...(19): siRNA sense strand
gggacuuuauuaccgcuuu

SEQ ID NO: 360498 - RNA, 19 nt, Homo sapiens
  misc_RNA (1)...(19): siRNA sense strand
gcacgagcaccugugaauu

SEQ ID NO: 360499 - RNA, 19 nt, Homo sapiens
  misc_RNA (1)...(19): siRNA sense strand
cagauggcccuccaaauuc

SEQ ID NO: 360500 - RNA, 19 nt, Homo sapiens
  misc_RNA (1)...(19): siRNA sense strand
gaucaguaccuguuuaaaa

SEQ ID NO: 360501 - RNA, 19 nt, Homo sapiens
  misc_RNA (1)...(19): siRNA sense strand
gggaucaguaccuguuuaa

SEQ ID NO: 360502 - RNA, 19 nt, Homo sapiens
  misc_RNA (1)...(19): siRNA sense strand
ugggaucaguaccuguuua

SEQ ID NO: 360503 - RNA, 19 nt, Homo sapiens
  misc_RNA (1)...(19): siRNA sense strand
gcacugauccccuauggaa

SEQ ID NO: 360504 - RNA, 19 nt, Homo sapiens
  misc_RNA (1)...(19): siRNA sense strand
agaaagaggccaucagaag

SEQ ID NO: 360505 - RNA, 19 nt, Homo sapiens
  misc_RNA (1)...(19): siRNA sense strand
gcagagcugguauguaaag

SEQ ID NO: 360506 - RNA, 19 nt, Homo sapiens
  misc_RNA (1)...(19): siRNA sense strand
gaaguucuuaacacauuga

SEQ ID NO: 360507 - RNA, 19 nt, Homo sapiens
  misc_RNA (1)...(19): siRNA sense strand
gggugaaguucuuaacaca

SEQ ID NO: 360508 - RNA, 19 nt, Homo sapiens
  misc_RNA (1)...(19): siRNA sense strand
uguggaacaucuuauuuca

SEQ ID NO: 360509 - RNA, 19 nt, Homo sapiens
  misc_RNA (1)...(19): siRNA sense strand
aaggaaugcuuuggaagaa

SEQ ID NO: 360510 - RNA, 19 nt, Homo sapiens
  misc_RNA (1)...(19): siRNA sense strand
uauuaacucuuaccugaag

SEQ ID NO: 360511 - RNA, 19 nt, Homo sapiens
  misc_RNA (1)...(19): siRNA sense strand
aaucagaucaaguggaauu

SEQ ID NO: 360512 - RNA, 19 nt, Homo sapiens
  misc_RNA (1)...(19): siRNA sense strand
aaaggugucuacuguuuac

SEQ ID NO: 360513 - RNA, 19 nt, Homo sapiens
  misc_RNA (1)...(19): siRNA sense strand
aggcuuagaucacauagca

SEQ ID NO: 360514 - RNA, 19 nt, Homo sapiens
  misc_RNA (1)...(19): siRNA sense strand
gaucucagaaggaaugcuu

SEQ ID NO: 360515 - RNA, 19 nt, Homo sapiens
  misc_RNA (1)...(19): siRNA sense strand
gggaucgccugguuguuag

SEQ ID NO: 360516 - RNA, 19 nt, Homo sapiens
  misc_RNA (1)...(19): siRNA sense strand
gaauuuguucguacucuca

SEQ ID NO: 360517 - RNA, 19 nt, Homo sapiens
  misc_RNA (1)...(19): siRNA sense strand
cacuuacgcuucagcaaug

SEQ ID NO: 360518 - RNA, 19 nt, Homo sapiens
  misc_RNA (1)...(19): siRNA sense strand
caucagaaggaaacuauca

SEQ ID NO: 360519 - RNA, 19 nt, Homo sapiens
  misc_RNA (1)...(19): siRNA sense strand
gucauuauacccaaagauu

SEQ ID NO: 360520 - RNA, 19 nt, Homo sapiens
  misc_RNA (1)...(19): siRNA sense strand
ucaaguggaauuuguggaa

SEQ ID NO: 360521 - RNA, 19 nt, Homo sapiens
  misc_RNA (1)...(19): siRNA sense strand
gcugauugaacgaauggua

SEQ ID NO: 360522 - RNA, 19 nt, Homo sapiens
  misc_RNA (1)...(19): siRNA sense strand
gaacauucuggacgugugu

SEQ ID NO: 360523 - RNA, 19 nt, Homo sapiens
  misc_RNA (1)...(19): siRNA sense strand
gcauccgguuugauaacaa

SEQ ID NO: 360524 - RNA, 19 nt, Homo sapiens
  misc_RNA (1)...(19): siRNA sense strand
ucagaaggaaacuaucaaa

SEQ ID NO: 360525 - RNA, 19 nt, Homo sapiens
  misc_RNA (1)...(19): siRNA sense strand
aaagaggccaucagaagga

SEQ ID NO: 360526 - RNA, 19 nt, Homo sapiens
  misc_RNA (1)...(19): siRNA sense strand
guaauggaacaucaucugu

SEQ ID NO: 360527 - RNA, 19 nt, Homo sapiens
  misc_RNA (1)...(19): siRNA sense strand
uagagggacaugaagaauu

SEQ ID NO: 360528 - RNA, 19 nt, Homo sapiens
  misc_RNA (1)...(19): siRNA sense strand
ggagcacgagcaccuguga

SEQ ID NO: 360529 - RNA, 19 nt, Homo sapiens
  misc_RNA (1)...(19): siRNA sense strand
ugaaguucuuaacacauug

SEQ ID NO: 360530 - RNA, 19 nt, Homo sapiens
  misc_RNA (1)...(19): siRNA sense strand
agauggcccuccaaauuca

SEQ ID NO: 360531 - RNA, 19 nt, Homo sapiens
  misc_RNA (1)...(19): siRNA sense strand
uugcagcgggacuuuauua

SEQ ID NO: 360532 - RNA, 19 nt, Homo sapiens
  misc_RNA (1)...(19): siRNA sense strand
gaucaucagauaauaccau

SEQ ID NO: 360533 - RNA, 19 nt, Homo sapiens
  misc_RNA (1)...(19): siRNA sense strand
agggaucgccugguuguua

SEQ ID NO: 360534 - RNA, 19 nt, Homo sapiens
  misc_RNA (1)...(19): siRNA sense strand
ccaccacaaugaggcugua

SEQ ID NO: 360535 - RNA, 19 nt, Homo sapiens
  misc_RNA (1)...(19): siRNA sense strand
gugagagugugggauguga

SEQ ID NO: 360536 - RNA, 19 nt, Homo sapiens
  misc_RNA (1)...(19): siRNA sense strand
gacacaacuugcagaggau

SEQ ID NO: 360537 - RNA, 19 nt, Homo sapiens
  misc_RNA (1)...(19): siRNA sense strand
gaugcauccgguuugauaa

SEQ ID NO: 360538 - RNA, 19 nt, Homo sapiens
  misc_RNA (1)...(19): siRNA sense strand
gacaggaccaucaaagucu

SEQ ID NO: 360539 - RNA, 19 nt, Homo sapiens
  misc_RNA (1)...(19): siRNA sense strand
ugacaggaccaucaaaguc

SEQ ID NO: 360540 - RNA, 19 nt, Homo sapiens
  misc_RNA (1)...(19): siRNA sense strand
uaacuggcucuucagauuc

SEQ ID NO: 360541 - RNA, 19 nt, Homo sapiens
  misc_RNA (1)...(19): siRNA sense strand
uggaauguuugaaaguguu

SEQ ID NO: 360542 - RNA, 19 nt, Homo sapiens
  misc_RNA (1)...(19): siRNA sense strand
aacauacacuuacaucucu

SEQ ID NO: 360543 - RNA, 19 nt, Homo sapiens
  misc_RNA (1)...(19): siRNA sense strand
gaagaagcugauugaacga

SEQ ID NO: 360544 - RNA, 19 nt, Homo sapiens
  misc_RNA (1)...(19): siRNA sense strand
uguuucggcuccaguuuga

SEQ ID NO: 360545 - RNA, 19 nt, Homo sapiens
  misc_RNA (1)...(19): siRNA sense strand
gccaucagaaggaaacuau

SEQ ID NO: 360546 - RNA, 19 nt, Homo sapiens
  misc_RNA (1)...(19): siRNA sense strand
ggaauuuguggaacaucuu

SEQ ID NO: 360547 - RNA, 19 nt, Homo sapiens
  misc_RNA (1)...(19): siRNA sense strand
uaguagacuuugacgacaa

SEQ ID NO: 360548 - RNA, 19 nt, Homo sapiens
  misc_RNA (1)...(19): siRNA sense strand
gggcugccgucaauguagu

SEQ ID NO: 360549 - RNA, 19 nt, Homo sapiens
  misc_RNA (1)...(19): siRNA sense strand
ccuggaauguuugaaagug

SEQ ID NO: 360550 - RNA, 19 nt, Homo sapiens
  misc_RNA (1)...(19): siRNA sense strand
guaaaggugucuacuguuu

SEQ ID NO: 360551 - RNA, 19 nt, Homo sapiens
  misc_RNA (1)...(19): siRNA sense strand
guaacuggcucuucagauu

SEQ ID NO: 360552 - RNA, 19 nt, Homo sapiens
  misc_RNA (1)...(19): siRNA sense strand
gcacauugguggaacauuc

SEQ ID NO: 360553 - RNA, 19 nt, Homo sapiens
  misc_RNA (1)...(19): siRNA sense strand
guuaguggaucaucagaua

SEQ ID NO: 360554 - RNA, 19 nt, Homo sapiens
  misc_RNA (1)...(19): siRNA sense strand
gagcaaggcuuagaucaca

SEQ ID NO: 360555 - RNA, 19 nt, Homo sapiens
  misc_RNA (1)...(19): siRNA sense strand
gaaggaaugcuuuggaaga

SEQ ID NO: 360556 - RNA, 19 nt, Homo sapiens
  misc_RNA (1)...(19): siRNA sense strand
ugaauguggugccuguuua

SEQ ID NO: 360557 - RNA, 19 nt, Homo sapiens
  misc_RNA (1)...(19): siRNA sense strand
gauaaguaauggaacauca

SEQ ID NO: 360558 - RNA, 19 nt, Homo sapiens
  misc_RNA (1)...(19): siRNA sense strand
ugaaucagaucaaguggaa

SEQ ID NO: 360559 - RNA, 19 nt, Homo sapiens
  misc_RNA (1)...(19): siRNA sense strand
gugaaguucuuaacacauu

SEQ ID NO: 360560 - RNA, 19 nt, Homo sapiens
  misc_RNA (1)...(19): siRNA sense strand
ggacuuuauuaccgcuuua

SEQ ID NO: 360561 - RNA, 19 nt, Homo sapiens
  misc_RNA (1)...(19): siRNA sense strand
gaacauacacuuacaucuc

SEQ ID NO: 360562 - RNA, 19 nt, Homo sapiens
  misc_RNA (1)...(19): siRNA sense strand
gagcugguauguaaagaau

SEQ ID NO: 360563 - RNA, 19 nt, Homo sapiens
  misc_RNA (1)...(19): siRNA sense strand
gagcaccugugaauuuguu

SEQ ID NO: 360564 - RNA, 19 nt, Homo sapiens
  misc_RNA (1)...(19): siRNA sense strand
agagggacaugaagaauug

SEQ ID NO: 360565 - RNA, 19 nt, Homo sapiens
  misc_RNA (1)...(19): siRNA sense strand
gaacaucuuauuucacgaa

SEQ ID NO: 360566 - RNA, 19 nt, Homo sapiens
  misc_RNA (1)...(19): siRNA sense strand
caucuuauuucacgaaugu

SEQ ID NO: 360567 - RNA, 19 nt, Homo sapiens
  misc_RNA (1)...(19): siRNA sense strand
cagaaggaaugcuuuggaa

SEQ ID NO: 360568 - RNA, 19 nt, Homo sapiens
  misc_RNA (1)...(19): siRNA sense strand
gcucugggauauugaaugu

SEQ ID NO: 360569 - RNA, 19 nt, Homo sapiens
  misc_RNA (1)...(19): siRNA sense strand
gaauuuguggaacaucuua

SEQ ID NO: 360570 - RNA, 19 nt, Homo sapiens
  misc_RNA (1)...(19): siRNA sense strand
cgagugaucucagaaggaa

SEQ ID NO: 360571 - RNA, 19 nt, Homo sapiens
  misc_RNA (1)...(19): siRNA sense strand
acagauggcccuccaaauu

SEQ ID NO: 360572 - RNA, 19 nt, Homo sapiens
  misc_RNA (1)...(19): siRNA sense strand
gaagcugauugaacgaaug

SEQ ID NO: 360573 - RNA, 19 nt, Homo sapiens
  misc_RNA (1)...(19): siRNA sense strand
gcaaggcuuagaucacaua

SEQ ID NO: 360574 - RNA, 19 nt, Homo sapiens
  misc_RNA (1)...(19): siRNA sense strand
gcacuuacgcuucagcaau

SEQ ID NO: 360575 - RNA, 19 nt, Homo sapiens
  misc_RNA (1)...(19): siRNA sense strand
gugaucgucuccagaaaga

SEQ ID NO: 360576 - RNA, 19 nt, Homo sapiens
  misc_RNA (1)...(19): siRNA sense strand
gcuccaguuugaugaguuu

SEQ ID NO: 360577 - RNA, 19 nt, Homo sapiens
  misc_RNA (1)...(19): siRNA sense strand
gaauguggugccuguuuaa

SEQ ID NO: 360578 - RNA, 19 nt, Homo sapiens
  misc_RNA (1)...(19): siRNA sense strand
uaucagcauggacauauua

SEQ ID NO: 360579 - RNA, 19 nt, Homo sapiens
  misc_RNA (1)...(19): siRNA sense strand
gcagagggugggaucagua

SEQ ID NO: 360580 - RNA, 19 nt, Homo sapiens
  misc_RNA (1)...(19): siRNA sense strand
aauggaacaucaucuguga

SEQ ID NO: 360581 - RNA, 19 nt, Homo sapiens
  misc_RNA (1)...(19): siRNA sense strand
cagaucaaguggaauuugu

SEQ ID NO: 360582 - RNA, 19 nt, Homo sapiens
  misc_RNA (1)...(19): siRNA sense strand
guauugcacuuacgcuuca

SEQ ID NO: 360583 - RNA, 19 nt, Homo sapiens
  misc_RNA (1)...(19): siRNA sense strand
gcauggacauauuaacucu

SEQ ID NO: 360584 - RNA, 19 nt, Homo sapiens
  misc_RNA (1)...(19): siRNA sense strand
cgaugcauccgguuugaua

SEQ ID NO: 360585 - RNA, 19 nt, Homo sapiens
  misc_RNA (1)...(19): siRNA sense strand
ccauuaggcucugggauau

SEQ ID NO: 360586 - RNA, 19 nt, Homo sapiens
  misc_RNA (1)...(19): siRNA sense strand
cacgagcaccugugaauuu

SEQ ID NO: 360587 - RNA, 19 nt, Homo sapiens
  misc_RNA (1)...(19): siRNA sense strand
ccagaaagaggccaucaga

SEQ ID NO: 360588 - RNA, 19 nt, Homo sapiens
  misc_RNA (1)...(19): siRNA sense strand
ggaauguuugaaaguguua

SEQ ID NO: 360589 - RNA, 19 nt, Homo sapiens
  misc_RNA (1)...(19): siRNA sense strand
gcugguauguaaagaaugg

SEQ ID NO: 360590 - RNA, 19 nt, Homo sapiens
  misc_RNA (1)...(19): siRNA sense strand
acacauugauccaccacaa

SEQ ID NO: 360591 - RNA, 19 nt, Homo sapiens
  misc_RNA (1)...(19): siRNA sense strand
ccuacgagauaauucuauu

SEQ ID NO: 360592 - RNA, 19 nt, Homo sapiens
  misc_RNA (1)...(19): siRNA sense strand
ucacauagcagaaaacauu

SEQ ID NO: 360593 - RNA, 19 nt, Homo sapiens
  misc_RNA (1)...(19): siRNA sense strand
ggacugauggugaccuguu

SEQ ID NO: 360594 - RNA, 19 nt, Homo sapiens
  misc_RNA (1)...(19): siRNA sense strand
cauuguaacuggcucuuca

SEQ ID NO: 360595 - RNA, 19 nt, Homo sapiens
  misc_RNA (1)...(19): siRNA sense strand
ccacagauggcccuccaaa

SEQ ID NO: 360596 - RNA, 19 nt, Homo sapiens
  misc_RNA (1)...(19): siRNA sense strand
ucaguggccuacgagauaa

SEQ ID NO: 360597 - RNA, 19 nt, Homo sapiens
  misc_RNA (1)...(19): siRNA sense strand
gggacuuuauuaccgcuuu

SEQ ID NO: 360598 - RNA, 19 nt, Homo sapiens
  misc_RNA (1)...(19): siRNA sense strand
gcacgagcaccugugaauu

SEQ ID NO: 360599 - RNA, 19 nt, Homo sapiens
  misc_RNA (1)...(19): siRNA sense strand
cagauggcccuccaaauuc

SEQ ID NO: 360600 - RNA, 19 nt, Homo sapiens
  misc_RNA (1)...(19): siRNA sense strand
gaucaguaccuguuuaaaa

SEQ ID NO: 360601 - RNA, 19 nt, Homo sapiens
  misc_RNA (1)...(19): siRNA sense strand
gggaucaguaccuguuuaa

SEQ ID NO: 360602 - RNA, 19 nt, Homo sapiens
  misc_RNA (1)...(19): siRNA sense strand
ugggaucaguaccuguuua

SEQ ID NO: 360603 - RNA, 19 nt, Homo sapiens
  misc_RNA (1)...(19): siRNA sense strand
gcacugauccccuauggaa

SEQ ID NO: 360604 - RNA, 19 nt, Homo sapiens
  misc_RNA (1)...(19): siRNA sense strand
agaaagaggccaucagaag

SEQ ID NO: 360605 - RNA, 19 nt, Homo sapiens
  misc_RNA (1)...(19): siRNA sense strand
gcagagcugguauguaaag

SEQ ID NO: 360606 - RNA, 19 nt, Homo sapiens
  misc_RNA (1)...(19): siRNA sense strand
gaaguucuuaacacauuga

SEQ ID NO: 360607 - RNA, 19 nt, Homo sapiens
  misc_RNA (1)...(19): siRNA sense strand
gggugaaguucuuaacaca

SEQ ID NO: 360608 - RNA, 19 nt, Homo sapiens
  misc_RNA (1)...(19): siRNA sense strand
uguggaacaucuuauuuca

SEQ ID NO: 360609 - RNA, 19 nt, Homo sapiens
  misc_RNA (1)...(19): siRNA sense strand
aaggaaugcuuuggaagaa

SEQ ID NO: 360610 - RNA, 19 nt, Homo sapiens
  misc_RNA (1)...(19): siRNA sense strand
uauuaacucuuaccugaag

SEQ ID NO: 360611 - RNA, 19 nt, Homo sapiens
  misc_RNA (1)...(19): siRNA sense strand
aaucagaucaaguggaauu

SEQ ID NO: 360612 - RNA, 19 nt, Homo sapiens
  misc_RNA (1)...(19): siRNA sense strand
aaaggugucuacuguuuac

SEQ ID NO: 360613 - RNA, 19 nt, Homo sapiens
  misc_RNA (1)...(19): siRNA sense strand
aggcuuagaucacauagca

SEQ ID NO: 360614 - RNA, 19 nt, Homo sapiens
  misc_RNA (1)...(19): siRNA sense strand
gaucucagaaggaaugcuu

SEQ ID NO: 360615 - RNA, 19 nt, Homo sapiens
  misc_RNA (1)...(19): siRNA sense strand
gggaucgccugguuguuag

SEQ ID NO: 360616 - RNA, 19 nt, Homo sapiens
  misc_RNA (1)...(19): siRNA sense strand
gaauuuguucguacucuca

SEQ ID NO: 360617 - RNA, 19 nt, Homo sapiens
  misc_RNA (1)...(19): siRNA sense strand
cacuuacgcuucagcaaug

SEQ ID NO: 360618 - RNA, 19 nt, Homo sapiens
  misc_RNA (1)...(19): siRNA sense strand
caucagaaggaaacuauca

SEQ ID NO: 360619 - RNA, 19 nt, Homo sapiens
  misc_RNA (1)...(19): siRNA sense strand
gucauuauacccaaagauu

SEQ ID NO: 360620 - RNA, 19 nt, Homo sapiens
  misc_RNA (1)...(19): siRNA sense strand
ucaaguggaauuuguggaa

SEQ ID NO: 360621 - RNA, 19 nt, Homo sapiens
  misc_RNA (1)...(19): siRNA sense strand
gcugauugaacgaauggua

SEQ ID NO: 360622 - RNA, 19 nt, Homo sapiens
  misc_RNA (1)...(19): siRNA sense strand
gaacauucuggacgugugu

SEQ ID NO: 360623 - RNA, 19 nt, Homo sapiens
  misc_RNA (1)...(19): siRNA sense strand
gcauccgguuugauaacaa

SEQ ID NO: 360624 - RNA, 19 nt, Homo sapiens
  misc_RNA (1)...(19): siRNA sense strand
ucagaaggaaacuaucaaa

SEQ ID NO: 360625 - RNA, 19 nt, Homo sapiens
  misc_RNA (1)...(19): siRNA sense strand
aaagaggccaucagaagga

SEQ ID NO: 360626 - RNA, 19 nt, Homo sapiens
  misc_RNA (1)...(19): siRNA sense strand
guaauggaacaucaucugu

SEQ ID NO: 360627 - RNA, 19 nt, Homo sapiens
  misc_RNA (1)...(19): siRNA sense strand
uagagggacaugaagaauu

SEQ ID NO: 360628 - RNA, 19 nt, Homo sapiens
  misc_RNA (1)...(19): siRNA sense strand
ggagcacgagcaccuguga

SEQ ID NO: 360629 - RNA, 19 nt, Homo sapiens
  misc_RNA (1)...(19): siRNA sense strand
ugaaguucuuaacacauug

SEQ ID NO: 360630 - RNA, 19 nt, Homo sapiens
  misc_RNA (1)...(19): siRNA sense strand
agauggcccuccaaauuca

SEQ ID NO: 360631 - RNA, 19 nt, Homo sapiens
  misc_RNA (1)...(19): siRNA sense strand
uugcagcgggacuuuauua

SEQ ID NO: 360632 - RNA, 19 nt, Homo sapiens
  misc_RNA (1)...(19): siRNA sense strand
gaucaucagauaauaccau

SEQ ID NO: 360633 - RNA, 19 nt, Homo sapiens
  misc_RNA (1)...(19): siRNA sense strand
agggaucgccugguuguua

SEQ ID NO: 360634 - RNA, 19 nt, Homo sapiens
  misc_RNA (1)...(19): siRNA sense strand
ccaccacaaugaggcugua

SEQ ID NO: 360635 - RNA, 19 nt, Homo sapiens
  misc_RNA (1)...(19): siRNA sense strand
gugagagugugggauguga

SEQ ID NO: 360636 - RNA, 19 nt, Homo sapiens
  misc_RNA (1)...(19): siRNA sense strand
gacacaacuugcagaggau

SEQ ID NO: 360637 - RNA, 19 nt, Homo sapiens
  misc_RNA (1)...(19): siRNA sense strand
gaugcauccgguuugauaa

SEQ ID NO: 360638 - RNA, 19 nt, Homo sapiens
  misc_RNA (1)...(19): siRNA sense strand
gacaggaccaucaaagucu

SEQ ID NO: 360639 - RNA, 19 nt, Homo sapiens
  misc_RNA (1)...(19): siRNA sense strand
ugacaggaccaucaaaguc

SEQ ID NO: 360640 - RNA, 19 nt, Homo sapiens
  misc_RNA (1)...(19): siRNA sense strand
uaacuggcucuucagauuc

SEQ ID NO: 360641 - RNA, 19 nt, Homo sapiens
  misc_RNA (1)...(19): siRNA sense strand
uggaauguuugaaaguguu

SEQ ID NO: 360642 - RNA, 19 nt, Homo sapiens
  misc_RNA (1)...(19): siRNA sense strand
aacauacacuuacaucucu

SEQ ID NO: 360643 - RNA, 19 nt, Homo sapiens
  misc_RNA (1)...(19): siRNA sense strand
gaagaagcugauugaacga

SEQ ID NO: 360644 - RNA, 19 nt, Homo sapiens
  misc_RNA (1)...(19): siRNA sense strand
uguuucggcuccaguuuga

SEQ ID NO: 360645 - RNA, 19 nt, Homo sapiens
  misc_RNA (1)...(19): siRNA sense strand
gccaucagaaggaaacuau

SEQ ID NO: 360646 - RNA, 19 nt, Homo sapiens
  misc_RNA (1)...(19): siRNA sense strand
ggaauuuguggaacaucuu

SEQ ID NO: 360647 - RNA, 19 nt, Homo sapiens
  misc_RNA (1)...(19): siRNA sense strand
uaguagacuuugacgacaa

SEQ ID NO: 360648 - RNA, 19 nt, Homo sapiens
  misc_RNA (1)...(19): siRNA sense strand
gggcugccgucaauguagu

SEQ ID NO: 360649 - RNA, 19 nt, Homo sapiens
  misc_RNA (1)...(19): siRNA sense strand
ccuggaauguuugaaagug

SEQ ID NO: 360650 - RNA, 19 nt, Homo sapiens
  misc_RNA (1)...(19): siRNA sense strand
ggaaacaggugaugucauu

SEQ ID NO: 360651 - RNA, 19 nt, Homo sapiens
  misc_RNA (1)...(19): siRNA sense strand
gagaugagcuuguguaugu

SEQ ID NO: 360652 - RNA, 19 nt, Homo sapiens
  misc_RNA (1)...(19): siRNA sense strand
gaaaggagccaaaggauuu

SEQ ID NO: 360653 - RNA, 19 nt, Homo sapiens
  misc_RNA (1)...(19): siRNA sense strand
gaaauggccuauacagaga

SEQ ID NO: 360654 - RNA, 19 nt, Homo sapiens
  misc_RNA (1)...(19): siRNA sense strand
gguaggagaucaaaucauu

SEQ ID NO: 360655 - RNA, 19 nt, Homo sapiens
  misc_RNA (1)...(19): siRNA sense strand
caauagaacucaucaaauc

SEQ ID NO: 360656 - RNA, 19 nt, Homo sapiens
  misc_RNA (1)...(19): siRNA sense strand
ggacuuaugaagacaauua

SEQ ID NO: 360657 - RNA, 19 nt, Homo sapiens
  misc_RNA (1)...(19): siRNA sense strand
guacagaaccugagccaua

SEQ ID NO: 360658 - RNA, 19 nt, Homo sapiens
  misc_RNA (1)...(19): siRNA sense strand
cauaugagcucuacgagaa

SEQ ID NO: 360659 - RNA, 19 nt, Homo sapiens
  misc_RNA (1)...(19): siRNA sense strand
caauggaaauggaguagua

SEQ ID NO: 360660 - RNA, 19 nt, Homo sapiens
  misc_RNA (1)...(19): siRNA sense strand
caucaaaucuggaggaaga

SEQ ID NO: 360661 - RNA, 19 nt, Homo sapiens
  misc_RNA (1)...(19): siRNA sense strand
caacaugggcuuuggauuu

SEQ ID NO: 360662 - RNA, 19 nt, Homo sapiens
  misc_RNA (1)...(19): siRNA sense strand
gaagauggaccagcaauaa

SEQ ID NO: 360663 - RNA, 19 nt, Homo sapiens
  misc_RNA (1)...(19): siRNA sense strand
acacagaacuuggaacaaa

SEQ ID NO: 360664 - RNA, 19 nt, Homo sapiens
  misc_RNA (1)...(19): siRNA sense strand
gcagauggaugacacaaag

SEQ ID NO: 360665 - RNA, 19 nt, Homo sapiens
  misc_RNA (1)...(19): siRNA sense strand
ggaaauggaguaguaguaa

SEQ ID NO: 360666 - RNA, 19 nt, Homo sapiens
  misc_RNA (1)...(19): siRNA sense strand
agacgagccugaugaguuu

SEQ ID NO: 360667 - RNA, 19 nt, Homo sapiens
  misc_RNA (1)...(19): siRNA sense strand
caacuaaaccugaagacaa

SEQ ID NO: 360668 - RNA, 19 nt, Homo sapiens
  misc_RNA (1)...(19): siRNA sense strand
ccagaagagugcaaagaaa

SEQ ID NO: 360669 - RNA, 19 nt, Homo sapiens
  misc_RNA (1)...(19): siRNA sense strand
gaggaauuguugauaaaga

SEQ ID NO: 360670 - RNA, 19 nt, Homo sapiens
  misc_RNA (1)...(19): siRNA sense strand
ggauuuggauucagcauuc

SEQ ID NO: 360671 - RNA, 19 nt, Homo sapiens
  misc_RNA (1)...(19): siRNA sense strand
gagucuggauccacuauaa

SEQ ID NO: 360672 - RNA, 19 nt, Homo sapiens
  misc_RNA (1)...(19): siRNA sense strand
ggacagcgggugaaacaaa

SEQ ID NO: 360673 - RNA, 19 nt, Homo sapiens
  misc_RNA (1)...(19): siRNA sense strand
ccacauaaauagaagaaca

SEQ ID NO: 360674 - RNA, 19 nt, Homo sapiens
  misc_RNA (1)...(19): siRNA sense strand
ggagaaagccaguauagag

SEQ ID NO: 360675 - RNA, 19 nt, Homo sapiens
  misc_RNA (1)...(19): siRNA sense strand
cuuaugaccuuaaccauug

SEQ ID NO: 360676 - RNA, 19 nt, Homo sapiens
  misc_RNA (1)...(19): siRNA sense strand
ccagacccauugccugaua

SEQ ID NO: 360677 - RNA, 19 nt, Homo sapiens
  misc_RNA (1)...(19): siRNA sense strand
ggagaaaggagccaaagga

SEQ ID NO: 360678 - RNA, 19 nt, Homo sapiens
  misc_RNA (1)...(19): siRNA sense strand
ugaaggagcagauggauga

SEQ ID NO: 360679 - RNA, 19 nt, Homo sapiens
  misc_RNA (1)...(19): siRNA sense strand
gagacgagccugaugaguu

SEQ ID NO: 360680 - RNA, 19 nt, Homo sapiens
  misc_RNA (1)...(19): siRNA sense strand
gaaaaguggugcucuccua

SEQ ID NO: 360681 - RNA, 19 nt, Homo sapiens
  misc_RNA (1)...(19): siRNA sense strand
aacaugggcuuuggauuua

SEQ ID NO: 360682 - RNA, 19 nt, Homo sapiens
  misc_RNA (1)...(19): siRNA sense strand
aaaggaagcuacagcaaca

SEQ ID NO: 360683 - RNA, 19 nt, Homo sapiens
  misc_RNA (1)...(19): siRNA sense strand
auaaagaccuucgucacua

SEQ ID NO: 360684 - RNA, 19 nt, Homo sapiens
  misc_RNA (1)...(19): siRNA sense strand
gcaauagaacucaucaaau

SEQ ID NO: 360685 - RNA, 19 nt, Homo sapiens
  misc_RNA (1)...(19): siRNA sense strand
gaaggcgaccucauuguug

SEQ ID NO: 360686 - RNA, 19 nt, Homo sapiens
  misc_RNA (1)...(19): siRNA sense strand
acagucaguuccagauaua

SEQ ID NO: 360687 - RNA, 19 nt, Homo sapiens
  misc_RNA (1)...(19): siRNA sense strand
ggaagacacaacuaugaaa

SEQ ID NO: 360688 - RNA, 19 nt, Homo sapiens
  misc_RNA (1)...(19): siRNA sense strand
cagcugggcuuugaacuga

SEQ ID NO: 360689 - RNA, 19 nt, Homo sapiens
  misc_RNA (1)...(19): siRNA sense strand
aaggaggaauuguugauaa

SEQ ID NO: 360690 - RNA, 19 nt, Homo sapiens
  misc_RNA (1)...(19): siRNA sense strand
ccagugauguggucauuca

SEQ ID NO: 360691 - RNA, 19 nt, Homo sapiens
  misc_RNA (1)...(19): siRNA sense strand
gaggauggagucuggauuu

SEQ ID NO: 360692 - RNA, 19 nt, Homo sapiens
  misc_RNA (1)...(19): siRNA sense strand
gaccuuaaccauugugaaa

SEQ ID NO: 360693 - RNA, 19 nt, Homo sapiens
  misc_RNA (1)...(19): siRNA sense strand
gcaaaucauucgugacaac

SEQ ID NO: 360694 - RNA, 19 nt, Homo sapiens
  misc_RNA (1)...(19): siRNA sense strand
gcucaagugugucaagcaa

SEQ ID NO: 360695 - RNA, 19 nt, Homo sapiens
  misc_RNA (1)...(19): siRNA sense strand
gaaugagggcuucggcuuu

SEQ ID NO: 360696 - RNA, 19 nt, Homo sapiens
  misc_RNA (1)...(19): siRNA sense strand
cacccaagcugaacuuaug

SEQ ID NO: 360697 - RNA, 19 nt, Homo sapiens
  misc_RNA (1)...(19): siRNA sense strand
aaaaugagcuuccauaugg

SEQ ID NO: 360698 - RNA, 19 nt, Homo sapiens
  misc_RNA (1)...(19): siRNA sense strand
gcagauguugucaaacuuu

SEQ ID NO: 360699 - RNA, 19 nt, Homo sapiens
  misc_RNA (1)...(19): siRNA sense strand
ccacaaggccacauaagga

SEQ ID NO: 360700 - RNA, 19 nt, Homo sapiens
  misc_RNA (1)...(19): siRNA sense strand
cgagaaaucuagggccauu

SEQ ID NO: 360701 - RNA, 19 nt, Homo sapiens
  misc_RNA (1)...(19): siRNA sense strand
aagcugaacuuaugaccuu

SEQ ID NO: 360702 - RNA, 19 nt, Homo sapiens
  misc_RNA (1)...(19): siRNA sense strand
ucaugcagauguugucaaa

SEQ ID NO: 360703 - RNA, 19 nt, Homo sapiens
  misc_RNA (1)...(19): siRNA sense strand
aaauguaacagaccagaua

SEQ ID NO: 360704 - RNA, 19 nt, Homo sapiens
  misc_RNA (1)...(19): siRNA sense strand
ggaacacgacguuaggaaa

SEQ ID NO: 360705 - RNA, 19 nt, Homo sapiens
  misc_RNA (1)...(19): siRNA sense strand
auacagaaguaguggauau

SEQ ID NO: 360706 - RNA, 19 nt, Homo sapiens
  misc_RNA (1)...(19): siRNA sense strand
gaacuuaugaccuuaacca

SEQ ID NO: 360707 - RNA, 19 nt, Homo sapiens
  misc_RNA (1)...(19): siRNA sense strand
gaccauaacacaaagacaa

SEQ ID NO: 360708 - RNA, 19 nt, Homo sapiens
  misc_RNA (1)...(19): siRNA sense strand
ccagcaccauuauuguuaa

SEQ ID NO: 360709 - RNA, 19 nt, Homo sapiens
  misc_RNA (1)...(19): siRNA sense strand
gaaccugagccauacagaa

SEQ ID NO: 360710 - RNA, 19 nt, Homo sapiens
  misc_RNA (1)...(19): siRNA sense strand
uaaugaaguuuguguccuu

SEQ ID NO: 360711 - RNA, 19 nt, Homo sapiens
  misc_RNA (1)...(19): siRNA sense strand
cagugaacaugaagacaaa

SEQ ID NO: 360712 - RNA, 19 nt, Homo sapiens
  misc_RNA (1)...(19): siRNA sense strand
gaaauggaguaguaguaac

SEQ ID NO: 360713 - RNA, 19 nt, Homo sapiens
  misc_RNA (1)...(19): siRNA sense strand
gaaccagcaccauuauugu

SEQ ID NO: 360714 - RNA, 19 nt, Homo sapiens
  misc_RNA (1)...(19): siRNA sense strand
gcacaagggacaugacaca

SEQ ID NO: 360715 - RNA, 19 nt, Homo sapiens
  misc_RNA (1)...(19): siRNA sense strand
ggaagcuacagcaacauaa

SEQ ID NO: 360716 - RNA, 19 nt, Homo sapiens
  misc_RNA (1)...(19): siRNA sense strand
ggaagaggaauaaaucagu

SEQ ID NO: 360717 - RNA, 19 nt, Homo sapiens
  misc_RNA (1)...(19): siRNA sense strand
gugaugucauugucuauau

SEQ ID NO: 360718 - RNA, 19 nt, Homo sapiens
  misc_RNA (1)...(19): siRNA sense strand
caggugaugucauugucua

SEQ ID NO: 360719 - RNA, 19 nt, Homo sapiens
  misc_RNA (1)...(19): siRNA sense strand
gaagaacacaguuugaaaa

SEQ ID NO: 360720 - RNA, 19 nt, Homo sapiens
  misc_RNA (1)...(19): siRNA sense strand
acacaaagacaacaucaug

SEQ ID NO: 360721 - RNA, 19 nt, Homo sapiens
  misc_RNA (1)...(19): siRNA sense strand
gcaaaguccaugagagugu

SEQ ID NO: 360722 - RNA, 19 nt, Homo sapiens
  misc_RNA (1)...(19): siRNA sense strand
gagccuggacagccuauuu

SEQ ID NO: 360723 - RNA, 19 nt, Homo sapiens
  misc_RNA (1)...(19): siRNA sense strand
ggaagccugauccauauga

SEQ ID NO: 360724 - RNA, 19 nt, Homo sapiens
  misc_RNA (1)...(19): siRNA sense strand
cacggaagccugauccaua

SEQ ID NO: 360725 - RNA, 19 nt, Homo sapiens
  misc_RNA (1)...(19): siRNA sense strand
gcagaaccagcaccauuau

SEQ ID NO: 360726 - RNA, 19 nt, Homo sapiens
  misc_RNA (1)...(19): siRNA sense strand
ggauuuguauguguugaga

SEQ ID NO: 360727 - RNA, 19 nt, Homo sapiens
  misc_RNA (1)...(19): siRNA sense strand
gugaauggccagucuauca

SEQ ID NO: 360728 - RNA, 19 nt, Homo sapiens
  misc_RNA (1)...(19): siRNA sense strand
gacagcgggugaaacaaau

SEQ ID NO: 360729 - RNA, 19 nt, Homo sapiens
  misc_RNA (1)...(19): siRNA sense strand
caaggaggaauuguugaua

SEQ ID NO: 360730 - RNA, 19 nt, Homo sapiens
  misc_RNA (1)...(19): siRNA sense strand
gcaccacaaggccacauaa

SEQ ID NO: 360731 - RNA, 19 nt, Homo sapiens
  misc_RNA (1)...(19): siRNA sense strand
ggaaggugccggguucuga

SEQ ID NO: 360732 - RNA, 19 nt, Homo sapiens
  misc_RNA (1)...(19): siRNA sense strand
gaaagcacaagggacauga

SEQ ID NO: 360733 - RNA, 19 nt, Homo sapiens
  misc_RNA (1)...(19): siRNA sense strand
gaaagcaaggcaagaugug

SEQ ID NO: 360734 - RNA, 19 nt, Homo sapiens
  misc_RNA (1)...(19): siRNA sense strand
ccugagccauacagaagua

SEQ ID NO: 360735 - RNA, 19 nt, Homo sapiens
  misc_RNA (1)...(19): siRNA sense strand
uaccucaacuuacgauuuc

SEQ ID NO: 360736 - RNA, 19 nt, Homo sapiens
  misc_RNA (1)...(19): siRNA sense strand
ggcuucggcuucacuauug

SEQ ID NO: 360737 - RNA, 19 nt, Homo sapiens
  misc_RNA (1)...(19): siRNA sense strand
gauaaagaccuucgucacu

SEQ ID NO: 360738 - RNA, 19 nt, Homo sapiens
  misc_RNA (1)...(19): siRNA sense strand
accaugagcuucagcaaau

SEQ ID NO: 360739 - RNA, 19 nt, Homo sapiens
  misc_RNA (1)...(19): siRNA sense strand
gaacacgacguuaggaaac

SEQ ID NO: 360740 - RNA, 19 nt, Homo sapiens
  misc_RNA (1)...(19): siRNA sense strand
ucgugaagcucaucaagga

SEQ ID NO: 360741 - RNA, 19 nt, Homo sapiens
  misc_RNA (1)...(19): siRNA sense strand
gagaagaaaggugcuaugu

SEQ ID NO: 360742 - RNA, 19 nt, Homo sapiens
  misc_RNA (1)...(19): siRNA sense strand
gaacacaguuugaaaaucc

SEQ ID NO: 360743 - RNA, 19 nt, Homo sapiens
  misc_RNA (1)...(19): siRNA sense strand
gcaaggaggaauuguugau

SEQ ID NO: 360744 - RNA, 19 nt, Homo sapiens
  misc_RNA (1)...(19): siRNA sense strand
aaacggaagaggaauaaau

SEQ ID NO: 360745 - RNA, 19 nt, Homo sapiens
  misc_RNA (1)...(19): siRNA sense strand
ccggcaagguggccuauga

SEQ ID NO: 360746 - RNA, 19 nt, Homo sapiens
  misc_RNA (1)...(19): siRNA sense strand
gagaucaaccagcagaaug

SEQ ID NO: 360747 - RNA, 19 nt, Homo sapiens
  misc_RNA (1)...(19): siRNA sense strand
gaggguaggagaucaaauc

SEQ ID NO: 360748 - RNA, 19 nt, Homo sapiens
  misc_RNA (1)...(19): siRNA sense strand
aaucuagggccauuuauga

SEQ ID NO: 360749 - RNA, 19 nt, Homo sapiens
  misc_RNA (1)...(19): siRNA sense strand
aaucaaggcaguccucaaa

SEQ ID NO: 360750 - RNA, 19 nt, Homo sapiens
  misc_RNA (1)...(19): siRNA sense strand
gaacugcaccaaacucaaa

SEQ ID NO: 360751 - RNA, 19 nt, Homo sapiens
  misc_RNA (1)...(19): siRNA sense strand
caacccggcuuucuucuga

SEQ ID NO: 360752 - RNA, 19 nt, Homo sapiens
  misc_RNA (1)...(19): siRNA sense strand
gcucgagcaucucaucuga

SEQ ID NO: 360753 - RNA, 19 nt, Homo sapiens
  misc_RNA (1)...(19): siRNA sense strand
ucaggaugcuccaaaguga

SEQ ID NO: 360754 - RNA, 19 nt, Homo sapiens
  misc_RNA (1)...(19): siRNA sense strand
uggaguaccucgccaagaa

SEQ ID NO: 360755 - RNA, 19 nt, Homo sapiens
  misc_RNA (1)...(19): siRNA sense strand
ccacuaaagcccagaagaa

SEQ ID NO: 360756 - RNA, 19 nt, Homo sapiens
  misc_RNA (1)...(19): siRNA sense strand
gccaagaacugcaccaaac

SEQ ID NO: 360757 - RNA, 19 nt, Homo sapiens
  misc_RNA (1)...(19): siRNA sense strand
caacgaggccgucuuugau

SEQ ID NO: 360758 - RNA, 19 nt, Homo sapiens
  misc_RNA (1)...(19): siRNA sense strand
gaaggagcaggccagcaua

SEQ ID NO: 360759 - RNA, 19 nt, Homo sapiens
  misc_RNA (1)...(19): siRNA sense strand
aaaggcagcucgagcaucu

SEQ ID NO: 360760 - RNA, 19 nt, Homo sapiens
  misc_RNA (1)...(19): siRNA sense strand
gaacaauggcaaacaguac

SEQ ID NO: 360761 - RNA, 19 nt, Homo sapiens
  misc_RNA (1)...(19): siRNA sense strand
ccaacgaggccgucuuuga

SEQ ID NO: 360762 - RNA, 19 nt, Homo sapiens
  misc_RNA (1)...(19): siRNA sense strand
gucucaggcuguuacaaua

SEQ ID NO: 360763 - RNA, 19 nt, Homo sapiens
  misc_RNA (1)...(19): siRNA sense strand
gaucacacgcccacuaaag

SEQ ID NO: 360764 - RNA, 19 nt, Homo sapiens
  misc_RNA (1)...(19): siRNA sense strand
cgaacaauggcaaacagua

SEQ ID NO: 360765 - RNA, 19 nt, Homo sapiens
  misc_RNA (1)...(19): siRNA sense strand
cuaaagcccagaagaaugu

SEQ ID NO: 360766 - RNA, 19 nt, Homo sapiens
  misc_RNA (1)...(19): siRNA sense strand
gcaaacaguacggcaguga

SEQ ID NO: 360767 - RNA, 19 nt, Homo sapiens
  misc_RNA (1)...(19): siRNA sense strand
guuacaauaucuccaacga

SEQ ID NO: 360768 - RNA, 19 nt, Homo sapiens
  misc_RNA (1)...(19): siRNA sense strand
guacggcagugagggcaaa

SEQ ID NO: 360769 - RNA, 19 nt, Homo sapiens
  misc_RNA (1)...(19): siRNA sense strand
cagaucacacgcccacuaa

SEQ ID NO: 360770 - RNA, 19 nt, Homo sapiens
  misc_RNA (1)...(19): siRNA sense strand
ccugauauguccaccgaau

SEQ ID NO: 360771 - RNA, 19 nt, Homo sapiens
  misc_RNA (1)...(19): siRNA sense strand
ugacgugaguucaaguaca

SEQ ID NO: 360772 - RNA, 19 nt, Homo sapiens
  misc_RNA (1)...(19): siRNA sense strand
gacgugaguucaaguacag

SEQ ID NO: 360773 - RNA, 19 nt, Homo sapiens
  misc_RNA (1)...(19): siRNA sense strand
ggaagucucaggcuguuac

SEQ ID NO: 360774 - RNA, 19 nt, Homo sapiens
  misc_RNA (1)...(19): siRNA sense strand
gcuccaaagugaccugcau

SEQ ID NO: 360775 - RNA, 19 nt, Homo sapiens
  misc_RNA (1)...(19): siRNA sense strand
caucugacgugaguucaag

SEQ ID NO: 360776 - RNA, 19 nt, Homo sapiens
  misc_RNA (1)...(19): siRNA sense strand
gaacugcuucaaccucaag

SEQ ID NO: 360777 - RNA, 19 nt, Homo sapiens
  misc_RNA (1)...(19): siRNA sense strand
cuacugcgccuccaucaag

SEQ ID NO: 360778 - RNA, 19 nt, Homo sapiens
  misc_RNA (1)...(19): siRNA sense strand
gcaaaggcagcucgagcau

SEQ ID NO: 360779 - RNA, 19 nt, Homo sapiens
  misc_RNA (1)...(19): siRNA sense strand
acagaucacacgcccacua

SEQ ID NO: 360780 - RNA, 19 nt, Homo sapiens
  misc_RNA (1)...(19): siRNA sense strand
uggagugccuggcccugaa

SEQ ID NO: 360781 - RNA, 19 nt, Homo sapiens
  misc_RNA (1)...(19): siRNA sense strand
gcuguuacaauaucuccaa

SEQ ID NO: 360782 - RNA, 19 nt, Homo sapiens
  misc_RNA (1)...(19): siRNA sense strand
gcagcucacccaccucuac

SEQ ID NO: 360783 - RNA, 19 nt, Homo sapiens
  misc_RNA (1)...(19): siRNA sense strand
ugcgcuaccuggugaucua

SEQ ID NO: 360784 - RNA, 19 nt, Homo sapiens
  misc_RNA (1)...(19): siRNA sense strand
acaccaacccggcuuucuu

SEQ ID NO: 360785 - RNA, 19 nt, Homo sapiens
  misc_RNA (1)...(19): siRNA sense strand
uccgcuacguggccaagua

SEQ ID NO: 360786 - RNA, 19 nt, Homo sapiens
  misc_RNA (1)...(19): siRNA sense strand
gugcugacccgcagacucu

SEQ ID NO: 360787 - RNA, 19 nt, Homo sapiens
  misc_RNA (1)...(19): siRNA sense strand
gcaagcugcgcuaccucaa

SEQ ID NO: 360788 - RNA, 19 nt, Homo sapiens
  misc_RNA (1)...(19): siRNA sense strand
cacuaaagcccagaagaau

SEQ ID NO: 360789 - RNA, 19 nt, Homo sapiens
  misc_RNA (1)...(19): siRNA sense strand
caccaacccggcuuucuuc

SEQ ID NO: 360790 - RNA, 19 nt, Homo sapiens
  misc_RNA (1)...(19): siRNA sense strand
gcagcucgagcaucucauc

SEQ ID NO: 360791 - RNA, 19 nt, Homo sapiens
  misc_RNA (1)...(19): siRNA sense strand
agaaggagcaggccagcau

SEQ ID NO: 360792 - RNA, 19 nt, Homo sapiens
  misc_RNA (1)...(19): siRNA sense strand
acgaaggccugcacaccau

SEQ ID NO: 360793 - RNA, 19 nt, Homo sapiens
  misc_RNA (1)...(19): siRNA sense strand
caagaacugcaccaaacuc

SEQ ID NO: 360794 - RNA, 19 nt, Homo sapiens
  misc_RNA (1)...(19): siRNA sense strand
cagcccagcccugauaugu

SEQ ID NO: 360795 - RNA, 19 nt, Homo sapiens
  misc_RNA (1)...(19): siRNA sense strand
gcacaccaacccggcuuuc

SEQ ID NO: 360796 - RNA, 19 nt, Homo sapiens
  misc_RNA (1)...(19): siRNA sense strand
gccuggcccugaacugcuu

SEQ ID NO: 360797 - RNA, 19 nt, Homo sapiens
  misc_RNA (1)...(19): siRNA sense strand
gcuaccuggugaucuacug

SEQ ID NO: 360798 - RNA, 19 nt, Homo sapiens
  misc_RNA (1)...(19): siRNA sense strand
gucaggaugcuccaaagug

SEQ ID NO: 360799 - RNA, 19 nt, Homo sapiens
  misc_RNA (1)...(19): siRNA sense strand
cuggaaaccguaacuguca

SEQ ID NO: 360800 - RNA, 19 nt, Homo sapiens
  misc_RNA (1)...(19): siRNA sense strand
ggaaagagacuguuaaaua

SEQ ID NO: 360801 - RNA, 19 nt, Homo sapiens
  misc_RNA (1)...(19): siRNA sense strand
gggaaagucugcagaauaa

SEQ ID NO: 360802 - RNA, 19 nt, Homo sapiens
  misc_RNA (1)...(19): siRNA sense strand
gcacccaucucuaauuaua

SEQ ID NO: 360803 - RNA, 19 nt, Homo sapiens
  misc_RNA (1)...(19): siRNA sense strand
uaaaguagcuggaaugaug

SEQ ID NO: 360804 - RNA, 19 nt, Homo sapiens
  misc_RNA (1)...(19): siRNA sense strand
gaagaagucugguuucaug

SEQ ID NO: 360805 - RNA, 19 nt, Homo sapiens
  misc_RNA (1)...(19): siRNA sense strand
cuaaagagcuguccuauca

SEQ ID NO: 360806 - RNA, 19 nt, Homo sapiens
  misc_RNA (1)...(19): siRNA sense strand
ggaagaggcugacuaugaa

SEQ ID NO: 360807 - RNA, 19 nt, Homo sapiens
  misc_RNA (1)...(19): siRNA sense strand
gagcagagcccuucuauug

SEQ ID NO: 360808 - RNA, 19 nt, Homo sapiens
  misc_RNA (1)...(19): siRNA sense strand
uagcaaagcuguugaagaa

SEQ ID NO: 360809 - RNA, 19 nt, Homo sapiens
  misc_RNA (1)...(19): siRNA sense strand
gaaaagaucuugagaaaca

SEQ ID NO: 360810 - RNA, 19 nt, Homo sapiens
  misc_RNA (1)...(19): siRNA sense strand
gaauaucgauccuauguuc

SEQ ID NO: 360811 - RNA, 19 nt, Homo sapiens
  misc_RNA (1)...(19): siRNA sense strand
gcacuagaauuuaaaccua

SEQ ID NO: 360812 - RNA, 19 nt, Homo sapiens
  misc_RNA (1)...(19): siRNA sense strand
gauccuauguucaaucuaa

SEQ ID NO: 360813 - RNA, 19 nt, Homo sapiens
  misc_RNA (1)...(19): siRNA sense strand
gcaaagcuguugaagaaga

SEQ ID NO: 360814 - RNA, 19 nt, Homo sapiens
  misc_RNA (1)...(19): siRNA sense strand
gggcacccaucucuaauua

SEQ ID NO: 360815 - RNA, 19 nt, Homo sapiens
  misc_RNA (1)...(19): siRNA sense strand
gaagacauuuauugcagua

SEQ ID NO: 360816 - RNA, 19 nt, Homo sapiens
  misc_RNA (1)...(19): siRNA sense strand
gaaagaagaggauauugaa

SEQ ID NO: 360817 - RNA, 19 nt, Homo sapiens
  misc_RNA (1)...(19): siRNA sense strand
cagcaaaucuuucaucuca

SEQ ID NO: 360818 - RNA, 19 nt, Homo sapiens
  misc_RNA (1)...(19): siRNA sense strand
ccaauuaacucaccucuuc

SEQ ID NO: 360819 - RNA, 19 nt, Homo sapiens
  misc_RNA (1)...(19): siRNA sense strand
gaaaugugauccagaggaa

SEQ ID NO: 360820 - RNA, 19 nt, Homo sapiens
  misc_RNA (1)...(19): siRNA sense strand
gaauaugguuguuugaaga

SEQ ID NO: 360821 - RNA, 19 nt, Homo sapiens
  misc_RNA (1)...(19): siRNA sense strand
caauggcaguuaugauuua

SEQ ID NO: 360822 - RNA, 19 nt, Homo sapiens
  misc_RNA (1)...(19): siRNA sense strand
gagaauugcuugaaaugga

SEQ ID NO: 360823 - RNA, 19 nt, Homo sapiens
  misc_RNA (1)...(19): siRNA sense strand
aaaggaagcuggcaaacaa

SEQ ID NO: 360824 - RNA, 19 nt, Homo sapiens
  misc_RNA (1)...(19): siRNA sense strand
gcaaaucuuucaucucaau

SEQ ID NO: 360825 - RNA, 19 nt, Homo sapiens
  misc_RNA (1)...(19): siRNA sense strand
agaagaggguguugauaua

SEQ ID NO: 360826 - RNA, 19 nt, Homo sapiens
  misc_RNA (1)...(19): siRNA sense strand
uuacaagacuucaccagua

SEQ ID NO: 360827 - RNA, 19 nt, Homo sapiens
  misc_RNA (1)...(19): siRNA sense strand
uagauacugugcuagauua

SEQ ID NO: 360828 - RNA, 19 nt, Homo sapiens
  misc_RNA (1)...(19): siRNA sense strand
caagauguauguuugauca

SEQ ID NO: 360829 - RNA, 19 nt, Homo sapiens
  misc_RNA (1)...(19): siRNA sense strand
ccaagcaccuuuaugaaga

SEQ ID NO: 360830 - RNA, 19 nt, Homo sapiens
  misc_RNA (1)...(19): siRNA sense strand
gcaguugucuuaaacagau

SEQ ID NO: 360831 - RNA, 19 nt, Homo sapiens
  misc_RNA (1)...(19): siRNA sense strand
aagcagcucuggaucauaa

SEQ ID NO: 360832 - RNA, 19 nt, Homo sapiens
  misc_RNA (1)...(19): siRNA sense strand
uaaccaagcaccuuuauga

SEQ ID NO: 360833 - RNA, 19 nt, Homo sapiens
  misc_RNA (1)...(19): siRNA sense strand
gaaucagccucgcaacaaa

SEQ ID NO: 360834 - RNA, 19 nt, Homo sapiens
  misc_RNA (1)...(19): siRNA sense strand
guaaaugcaucuuggacaa

SEQ ID NO: 360835 - RNA, 19 nt, Homo sapiens
  misc_RNA (1)...(19): siRNA sense strand
ccaccaagauguauguuug

SEQ ID NO: 360836 - RNA, 19 nt, Homo sapiens
  misc_RNA (1)...(19): siRNA sense strand
gcaaccaacuaccucauau

SEQ ID NO: 360837 - RNA, 19 nt, Homo sapiens
  misc_RNA (1)...(19): siRNA sense strand
cagcagaucuuacagcaau

SEQ ID NO: 360838 - RNA, 19 nt, Homo sapiens
  misc_RNA (1)...(19): siRNA sense strand
gaagucugguuucauguug

SEQ ID NO: 360839 - RNA, 19 nt, Homo sapiens
  misc_RNA (1)...(19): siRNA sense strand
ugaagaagaugacuuugug

SEQ ID NO: 360840 - RNA, 19 nt, Homo sapiens
  misc_RNA (1)...(19): siRNA sense strand
gaaggaagaggcugacuau

SEQ ID NO: 360841 - RNA, 19 nt, Homo sapiens
  misc_RNA (1)...(19): siRNA sense strand
gaagaaaacugugguguug

SEQ ID NO: 360842 - RNA, 19 nt, Homo sapiens
  misc_RNA (1)...(19): siRNA sense strand
gguaagagaacuacagaaa

SEQ ID NO: 360843 - RNA, 19 nt, Homo sapiens
  misc_RNA (1)...(19): siRNA sense strand
gcaaacuggaugaggauua

SEQ ID NO: 360844 - RNA, 19 nt, Homo sapiens
  misc_RNA (1)...(19): siRNA sense strand
gaccugaucagcccuguua

SEQ ID NO: 360845 - RNA, 19 nt, Homo sapiens
  misc_RNA (1)...(19): siRNA sense strand
gcaacuuggugguucguuu

SEQ ID NO: 360846 - RNA, 19 nt, Homo sapiens
  misc_RNA (1)...(19): siRNA sense strand
gggacuaacugcuuccauu

SEQ ID NO: 360847 - RNA, 19 nt, Homo sapiens
  misc_RNA (1)...(19): siRNA sense strand
ggaauaugguuguuugaag

SEQ ID NO: 360848 - RNA, 19 nt, Homo sapiens
  misc_RNA (1)...(19): siRNA sense strand
acacagcaguugucuuaaa

SEQ ID NO: 360849 - RNA, 19 nt, Homo sapiens
  misc_RNA (1)...(19): siRNA sense strand
ucaggaacauaucagauuu

SEQ ID NO: 360850 - RNA, 19 nt, Homo sapiens
  misc_RNA (1)...(19): siRNA sense strand
auacacagcaguugucuua

SEQ ID NO: 360851 - RNA, 19 nt, Homo sapiens
  misc_RNA (1)...(19): siRNA sense strand
caagaagcaauucaugaua

SEQ ID NO: 360852 - RNA, 19 nt, Homo sapiens
  misc_RNA (1)...(19): siRNA sense strand
gcaguuaugauuuagcuaa

SEQ ID NO: 360853 - RNA, 19 nt, Homo sapiens
  misc_RNA (1)...(19): siRNA sense strand
ccaaugagcuguguacgau

SEQ ID NO: 360854 - RNA, 19 nt, Homo sapiens
  misc_RNA (1)...(19): siRNA sense strand
gaagagguacuuaggaaau

SEQ ID NO: 360855 - RNA, 19 nt, Homo sapiens
  misc_RNA (1)...(19): siRNA sense strand
ggacuaacugcuuccauuu

SEQ ID NO: 360856 - RNA, 19 nt, Homo sapiens
  misc_RNA (1)...(19): siRNA sense strand
accagaaacugccaaauuu

SEQ ID NO: 360857 - RNA, 19 nt, Homo sapiens
  misc_RNA (1)...(19): siRNA sense strand
cgaacuggaugaccauuug

SEQ ID NO: 360858 - RNA, 19 nt, Homo sapiens
  misc_RNA (1)...(19): siRNA sense strand
ugaugaggaugaagaaauu

SEQ ID NO: 360859 - RNA, 19 nt, Homo sapiens
  misc_RNA (1)...(19): siRNA sense strand
aagaggagcugcacaggaa

SEQ ID NO: 360860 - RNA, 19 nt, Homo sapiens
  misc_RNA (1)...(19): siRNA sense strand
ggaauuagaagaagcacuu

SEQ ID NO: 360861 - RNA, 19 nt, Homo sapiens
  misc_RNA (1)...(19): siRNA sense strand
aaagacugcugauggaauu

SEQ ID NO: 360862 - RNA, 19 nt, Homo sapiens
  misc_RNA (1)...(19): siRNA sense strand
gcaccagguucucauuaug

SEQ ID NO: 360863 - RNA, 19 nt, Homo sapiens
  misc_RNA (1)...(19): siRNA sense strand
ggucgaaguuacaggauug

SEQ ID NO: 360864 - RNA, 19 nt, Homo sapiens
  misc_RNA (1)...(19): siRNA sense strand
cagagucacuguggaagua

SEQ ID NO: 360865 - RNA, 19 nt, Homo sapiens
  misc_RNA (1)...(19): siRNA sense strand
ugaggaggaugaagagaaa

SEQ ID NO: 360866 - RNA, 19 nt, Homo sapiens
  misc_RNA (1)...(19): siRNA sense strand
cugcugggcugcuauuuaa

SEQ ID NO: 360867 - RNA, 19 nt, Homo sapiens
  misc_RNA (1)...(19): siRNA sense strand
ccaaggaaaucagcuaaau

SEQ ID NO: 360868 - RNA, 19 nt, Homo sapiens
  misc_RNA (1)...(19): siRNA sense strand
uagcugauguguacacuga

SEQ ID NO: 360869 - RNA, 19 nt, Homo sapiens
  misc_RNA (1)...(19): siRNA sense strand
caagugauccguuuacuca

SEQ ID NO: 360870 - RNA, 19 nt, Homo sapiens
  misc_RNA (1)...(19): siRNA sense strand
gauggaagcagaauucaga

SEQ ID NO: 360871 - RNA, 19 nt, Homo sapiens
  misc_RNA (1)...(19): siRNA sense strand
ccagaaacugccaaauuua

SEQ ID NO: 360872 - RNA, 19 nt, Homo sapiens
  misc_RNA (1)...(19): siRNA sense strand
gaucuuacagcaauuaaug

SEQ ID NO: 360873 - RNA, 19 nt, Homo sapiens
  misc_RNA (1)...(19): siRNA sense strand
caagggcacccaucucuaa

SEQ ID NO: 360874 - RNA, 19 nt, Homo sapiens
  misc_RNA (1)...(19): siRNA sense strand
gagauggaaccaagaguuu

SEQ ID NO: 360875 - RNA, 19 nt, Homo sapiens
  misc_RNA (1)...(19): siRNA sense strand
gaaaugcaaggaauggauu

SEQ ID NO: 360876 - RNA, 19 nt, Homo sapiens
  misc_RNA (1)...(19): siRNA sense strand
ggucugcccuggucaacaa

SEQ ID NO: 360877 - RNA, 19 nt, Homo sapiens
  misc_RNA (1)...(19): siRNA sense strand
gcaugguggugucaauauu

SEQ ID NO: 360878 - RNA, 19 nt, Homo sapiens
  misc_RNA (1)...(19): siRNA sense strand
cagcaucacuguggagaaa

SEQ ID NO: 360879 - RNA, 19 nt, Homo sapiens
  misc_RNA (1)...(19): siRNA sense strand
cacaagaugcuuuggaaua

SEQ ID NO: 360880 - RNA, 19 nt, Homo sapiens
  misc_RNA (1)...(19): siRNA sense strand
ugacagaagugggcuuuau

SEQ ID NO: 360881 - RNA, 19 nt, Homo sapiens
  misc_RNA (1)...(19): siRNA sense strand
caacaagugucagcuguca

SEQ ID NO: 360882 - RNA, 19 nt, Homo sapiens
  misc_RNA (1)...(19): siRNA sense strand
agaagaggauauugaaguu

SEQ ID NO: 360883 - RNA, 19 nt, Homo sapiens
  misc_RNA (1)...(19): siRNA sense strand
ugauggaaaugcuaacaaa

SEQ ID NO: 360884 - RNA, 19 nt, Homo sapiens
  misc_RNA (1)...(19): siRNA sense strand
gaaauacccgugcaaccaa

SEQ ID NO: 360885 - RNA, 19 nt, Homo sapiens
  misc_RNA (1)...(19): siRNA sense strand
guuaaugacuccagcacuu

SEQ ID NO: 360886 - RNA, 19 nt, Homo sapiens
  misc_RNA (1)...(19): siRNA sense strand
ggaauacucaaaccuagaa

SEQ ID NO: 360887 - RNA, 19 nt, Homo sapiens
  misc_RNA (1)...(19): siRNA sense strand
ugucagaacucauucagau

SEQ ID NO: 360888 - RNA, 19 nt, Homo sapiens
  misc_RNA (1)...(19): siRNA sense strand
gcagaucuuacagcaauua

SEQ ID NO: 360889 - RNA, 19 nt, Homo sapiens
  misc_RNA (1)...(19): siRNA sense strand
gagguuaccauauccauug

SEQ ID NO: 360890 - RNA, 19 nt, Homo sapiens
  misc_RNA (1)...(19): siRNA sense strand
gagaccaaccugcuuauug

SEQ ID NO: 360891 - RNA, 19 nt, Homo sapiens
  misc_RNA (1)...(19): siRNA sense strand
gagcuggcuuauaucagua

SEQ ID NO: 360892 - RNA, 19 nt, Homo sapiens
  misc_RNA (1)...(19): siRNA sense strand
caaacugcucgaaaucuua

SEQ ID NO: 360893 - RNA, 19 nt, Homo sapiens
  misc_RNA (1)...(19): siRNA sense strand
ggacauggcauugggaaga

SEQ ID NO: 360894 - RNA, 19 nt, Homo sapiens
  misc_RNA (1)...(19): siRNA sense strand
gaagagaaagaagaggaua

SEQ ID NO: 360895 - RNA, 19 nt, Homo sapiens
  misc_RNA (1)...(19): siRNA sense strand
ccacugauucugcauauga

SEQ ID NO: 360896 - RNA, 19 nt, Homo sapiens
  misc_RNA (1)...(19): siRNA sense strand
caucaccacauaucuauuu

SEQ ID NO: 360897 - RNA, 19 nt, Homo sapiens
  misc_RNA (1)...(19): siRNA sense strand
gaagcucuauccuccugaa

SEQ ID NO: 360898 - RNA, 19 nt, Homo sapiens
  misc_RNA (1)...(19): siRNA sense strand
ccagaguguuugagggaua

SEQ ID NO: 360899 - RNA, 19 nt, Homo sapiens
  misc_RNA (1)...(19): siRNA sense strand
gagcuugauuugcaugaug

SEQ ID NO: 360900 - RNA, 19 nt, Homo sapiens
  misc_RNA (1)...(19): siRNA sense strand
ggaaagagacuguuaaaua

SEQ ID NO: 360901 - RNA, 19 nt, Homo sapiens
  misc_RNA (1)...(19): siRNA sense strand
gggaaagucugcagaauaa

SEQ ID NO: 360902 - RNA, 19 nt, Homo sapiens
  misc_RNA (1)...(19): siRNA sense strand
gcacccaucucuaauuaua

SEQ ID NO: 360903 - RNA, 19 nt, Homo sapiens
  misc_RNA (1)...(19): siRNA sense strand
uaaaguagcuggaaugaug

SEQ ID NO: 360904 - RNA, 19 nt, Homo sapiens
  misc_RNA (1)...(19): siRNA sense strand
gaagaagucugguuucaug

SEQ ID NO: 360905 - RNA, 19 nt, Homo sapiens
  misc_RNA (1)...(19): siRNA sense strand
cuaaagagcuguccuauca

SEQ ID NO: 360906 - RNA, 19 nt, Homo sapiens
  misc_RNA (1)...(19): siRNA sense strand
ggaagaggcugacuaugaa

SEQ ID NO: 360907 - RNA, 19 nt, Homo sapiens
  misc_RNA (1)...(19): siRNA sense strand
gagcagagcccuucuauug

SEQ ID NO: 360908 - RNA, 19 nt, Homo sapiens
  misc_RNA (1)...(19): siRNA sense strand
uagcaaagcuguugaagaa

SEQ ID NO: 360909 - RNA, 19 nt, Homo sapiens
  misc_RNA (1)...(19): siRNA sense strand
gaaaagaucuugagaaaca

SEQ ID NO: 360910 - RNA, 19 nt, Homo sapiens
  misc_RNA (1)...(19): siRNA sense strand
gaauaucgauccuauguuc

SEQ ID NO: 360911 - RNA, 19 nt, Homo sapiens
  misc_RNA (1)...(19): siRNA sense strand
gcacuagaauuuaaaccua

SEQ ID NO: 360912 - RNA, 19 nt, Homo sapiens
  misc_RNA (1)...(19): siRNA sense strand
gauccuauguucaaucuaa

SEQ ID NO: 360913 - RNA, 19 nt, Homo sapiens
  misc_RNA (1)...(19): siRNA sense strand
gcaaagcuguugaagaaga

SEQ ID NO: 360914 - RNA, 19 nt, Homo sapiens
  misc_RNA (1)...(19): siRNA sense strand
gggcacccaucucuaauua

SEQ ID NO: 360915 - RNA, 19 nt, Homo sapiens
  misc_RNA (1)...(19): siRNA sense strand
gaagacauuuauugcagua

SEQ ID NO: 360916 - RNA, 19 nt, Homo sapiens
  misc_RNA (1)...(19): siRNA sense strand
gaaagaagaggauauugaa

SEQ ID NO: 360917 - RNA, 19 nt, Homo sapiens
  misc_RNA (1)...(19): siRNA sense strand
cagcaaaucuuucaucuca

SEQ ID NO: 360918 - RNA, 19 nt, Homo sapiens
  misc_RNA (1)...(19): siRNA sense strand
ccaauuaacucaccucuuc

SEQ ID NO: 360919 - RNA, 19 nt, Homo sapiens
  misc_RNA (1)...(19): siRNA sense strand
gaaaugugauccagaggaa

SEQ ID NO: 360920 - RNA, 19 nt, Homo sapiens
  misc_RNA (1)...(19): siRNA sense strand
gaauaugguuguuugaaga

SEQ ID NO: 360921 - RNA, 19 nt, Homo sapiens
  misc_RNA (1)...(19): siRNA sense strand
caauggcaguuaugauuua

SEQ ID NO: 360922 - RNA, 19 nt, Homo sapiens
  misc_RNA (1)...(19): siRNA sense strand
gagaauugcuugaaaugga

SEQ ID NO: 360923 - RNA, 19 nt, Homo sapiens
  misc_RNA (1)...(19): siRNA sense strand
aaaggaagcuggcaaacaa

SEQ ID NO: 360924 - RNA, 19 nt, Homo sapiens
  misc_RNA (1)...(19): siRNA sense strand
gcaaaucuuucaucucaau

SEQ ID NO: 360925 - RNA, 19 nt, Homo sapiens
  misc_RNA (1)...(19): siRNA sense strand
agaagaggguguugauaua

SEQ ID NO: 360926 - RNA, 19 nt, Homo sapiens
  misc_RNA (1)...(19): siRNA sense strand
uuacaagacuucaccagua

SEQ ID NO: 360927 - RNA, 19 nt, Homo sapiens
  misc_RNA (1)...(19): siRNA sense strand
uagauacugugcuagauua

SEQ ID NO: 360928 - RNA, 19 nt, Homo sapiens
  misc_RNA (1)...(19): siRNA sense strand
caagauguauguuugauca

SEQ ID NO: 360929 - RNA, 19 nt, Homo sapiens
  misc_RNA (1)...(19): siRNA sense strand
ccaagcaccuuuaugaaga

SEQ ID NO: 360930 - RNA, 19 nt, Homo sapiens
  misc_RNA (1)...(19): siRNA sense strand
gcaguugucuuaaacagau

SEQ ID NO: 360931 - RNA, 19 nt, Homo sapiens
  misc_RNA (1)...(19): siRNA sense strand
aagcagcucuggaucauaa

SEQ ID NO: 360932 - RNA, 19 nt, Homo sapiens
  misc_RNA (1)...(19): siRNA sense strand
uaaccaagcaccuuuauga

SEQ ID NO: 360933 - RNA, 19 nt, Homo sapiens
  misc_RNA (1)...(19): siRNA sense strand
gaaucagccucgcaacaaa

SEQ ID NO: 360934 - RNA, 19 nt, Homo sapiens
  misc_RNA (1)...(19): siRNA sense strand
guaaaugcaucuuggacaa

SEQ ID NO: 360935 - RNA, 19 nt, Homo sapiens
  misc_RNA (1)...(19): siRNA sense strand
ccaccaagauguauguuug

SEQ ID NO: 360936 - RNA, 19 nt, Homo sapiens
  misc_RNA (1)...(19): siRNA sense strand
gcaaccaacuaccucauau

SEQ ID NO: 360937 - RNA, 19 nt, Homo sapiens
  misc_RNA (1)...(19): siRNA sense strand
cagcagaucuuacagcaau

SEQ ID NO: 360938 - RNA, 19 nt, Homo sapiens
  misc_RNA (1)...(19): siRNA sense strand
gaagucugguuucauguug

SEQ ID NO: 360939 - RNA, 19 nt, Homo sapiens
  misc_RNA (1)...(19): siRNA sense strand
ugaagaagaugacuuugug

SEQ ID NO: 360940 - RNA, 19 nt, Homo sapiens
  misc_RNA (1)...(19): siRNA sense strand
gaaggaagaggcugacuau

SEQ ID NO: 360941 - RNA, 19 nt, Homo sapiens
  misc_RNA (1)...(19): siRNA sense strand
gaagaaaacugugguguug

SEQ ID NO: 360942 - RNA, 19 nt, Homo sapiens
  misc_RNA (1)...(19): siRNA sense strand
gguaagagaacuacagaaa

SEQ ID NO: 360943 - RNA, 19 nt, Homo sapiens
  misc_RNA (1)...(19): siRNA sense strand
gcaaacuggaugaggauua

SEQ ID NO: 360944 - RNA, 19 nt, Homo sapiens
  misc_RNA (1)...(19): siRNA sense strand
gaccugaucagcccuguua

SEQ ID NO: 360945 - RNA, 19 nt, Homo sapiens
  misc_RNA (1)...(19): siRNA sense strand
gcaacuuggugguucguuu

SEQ ID NO: 360946 - RNA, 19 nt, Homo sapiens
  misc_RNA (1)...(19): siRNA sense strand
gggacuaacugcuuccauu

SEQ ID NO: 360947 - RNA, 19 nt, Homo sapiens
  misc_RNA (1)...(19): siRNA sense strand
ggaauaugguuguuugaag

SEQ ID NO: 360948 - RNA, 19 nt, Homo sapiens
  misc_RNA (1)...(19): siRNA sense strand
acacagcaguugucuuaaa

SEQ ID NO: 360949 - RNA, 19 nt, Homo sapiens
  misc_RNA (1)...(19): siRNA sense strand
ucaggaacauaucagauuu

SEQ ID NO: 360950 - RNA, 19 nt, Homo sapiens
  misc_RNA (1)...(19): siRNA sense strand
auacacagcaguugucuua

SEQ ID NO: 360951 - RNA, 19 nt, Homo sapiens
  misc_RNA (1)...(19): siRNA sense strand
caagaagcaauucaugaua

SEQ ID NO: 360952 - RNA, 19 nt, Homo sapiens
  misc_RNA (1)...(19): siRNA sense strand
gcaguuaugauuuagcuaa

SEQ ID NO: 360953 - RNA, 19 nt, Homo sapiens
  misc_RNA (1)...(19): siRNA sense strand
ccaaugagcuguguacgau

SEQ ID NO: 360954 - RNA, 19 nt, Homo sapiens
  misc_RNA (1)...(19): siRNA sense strand
gaagagguacuuaggaaau

SEQ ID NO: 360955 - RNA, 19 nt, Homo sapiens
  misc_RNA (1)...(19): siRNA sense strand
ggacuaacugcuuccauuu

SEQ ID NO: 360956 - RNA, 19 nt, Homo sapiens
  misc_RNA (1)...(19): siRNA sense strand
accagaaacugccaaauuu

SEQ ID NO: 360957 - RNA, 19 nt, Homo sapiens
  misc_RNA (1)...(19): siRNA sense strand
cgaacuggaugaccauuug

SEQ ID NO: 360958 - RNA, 19 nt, Homo sapiens
  misc_RNA (1)...(19): siRNA sense strand
ugaugaggaugaagaaauu

SEQ ID NO: 360959 - RNA, 19 nt, Homo sapiens
  misc_RNA (1)...(19): siRNA sense strand
aagaggagcugcacaggaa

SEQ ID NO: 360960 - RNA, 19 nt, Homo sapiens
  misc_RNA (1)...(19): siRNA sense strand
ggaauuagaagaagcacuu

SEQ ID NO: 360961 - RNA, 19 nt, Homo sapiens
  misc_RNA (1)...(19): siRNA sense strand
aaagacugcugauggaauu

SEQ ID NO: 360962 - RNA, 19 nt, Homo sapiens
  misc_RNA (1)...(19): siRNA sense strand
gcaccagguucucauuaug

SEQ ID NO: 360963 - RNA, 19 nt, Homo sapiens
  misc_RNA (1)...(19): siRNA sense strand
ggucgaaguuacaggauug

SEQ ID NO: 360964 - RNA, 19 nt, Homo sapiens
  misc_RNA (1)...(19): siRNA sense strand
cagagucacuguggaagua

SEQ ID NO: 360965 - RNA, 19 nt, Homo sapiens
  misc_RNA (1)...(19): siRNA sense strand
ugaggaggaugaagagaaa

SEQ ID NO: 360966 - RNA, 19 nt, Homo sapiens
  misc_RNA (1)...(19): siRNA sense strand
cugcugggcugcuauuuaa

SEQ ID NO: 360967 - RNA, 19 nt, Homo sapiens
  misc_RNA (1)...(19): siRNA sense strand
ccaaggaaaucagcuaaau

SEQ ID NO: 360968 - RNA, 19 nt, Homo sapiens
  misc_RNA (1)...(19): siRNA sense strand
uagcugauguguacacuga

SEQ ID NO: 360969 - RNA, 19 nt, Homo sapiens
  misc_RNA (1)...(19): siRNA sense strand
caagugauccguuuacuca

SEQ ID NO: 360970 - RNA, 19 nt, Homo sapiens
  misc_RNA (1)...(19): siRNA sense strand
gauggaagcagaauucaga

SEQ ID NO: 360971 - RNA, 19 nt, Homo sapiens
  misc_RNA (1)...(19): siRNA sense strand
ccagaaacugccaaauuua

SEQ ID NO: 360972 - RNA, 19 nt, Homo sapiens
  misc_RNA (1)...(19): siRNA sense strand
gaucuuacagcaauuaaug

SEQ ID NO: 360973 - RNA, 19 nt, Homo sapiens
  misc_RNA (1)...(19): siRNA sense strand
caagggcacccaucucuaa

SEQ ID NO: 360974 - RNA, 19 nt, Homo sapiens
  misc_RNA (1)...(19): siRNA sense strand
gagauggaaccaagaguuu

SEQ ID NO: 360975 - RNA, 19 nt, Homo sapiens
  misc_RNA (1)...(19): siRNA sense strand
gaaaugcaaggaauggauu

SEQ ID NO: 360976 - RNA, 19 nt, Homo sapiens
  misc_RNA (1)...(19): siRNA sense strand
ggucugcccuggucaacaa

SEQ ID NO: 360977 - RNA, 19 nt, Homo sapiens
  misc_RNA (1)...(19): siRNA sense strand
gcaugguggugucaauauu

SEQ ID NO: 360978 - RNA, 19 nt, Homo sapiens
  misc_RNA (1)...(19): siRNA sense strand
cagcaucacuguggagaaa

SEQ ID NO: 360979 - RNA, 19 nt, Homo sapiens
  misc_RNA (1)...(19): siRNA sense strand
cacaagaugcuuuggaaua

SEQ ID NO: 360980 - RNA, 19 nt, Homo sapiens
  misc_RNA (1)...(19): siRNA sense strand
ugacagaagugggcuuuau

SEQ ID NO: 360981 - RNA, 19 nt, Homo sapiens
  misc_RNA (1)...(19): siRNA sense strand
caacaagugucagcuguca

SEQ ID NO: 360982 - RNA, 19 nt, Homo sapiens
  misc_RNA (1)...(19): siRNA sense strand
agaagaggauauugaaguu

SEQ ID NO: 360983 - RNA, 19 nt, Homo sapiens
  misc_RNA (1)...(19): siRNA sense strand
ugauggaaaugcuaacaaa

SEQ ID NO: 360984 - RNA, 19 nt, Homo sapiens
  misc_RNA (1)...(19): siRNA sense strand
gaaauacccgugcaaccaa

SEQ ID NO: 360985 - RNA, 19 nt, Homo sapiens
  misc_RNA (1)...(19): siRNA sense strand
guuaaugacuccagcacuu

SEQ ID NO: 360986 - RNA, 19 nt, Homo sapiens
  misc_RNA (1)...(19): siRNA sense strand
ggaauacucaaaccuagaa

SEQ ID NO: 360987 - RNA, 19 nt, Homo sapiens
  misc_RNA (1)...(19): siRNA sense strand
ugucagaacucauucagau

SEQ ID NO: 360988 - RNA, 19 nt, Homo sapiens
  misc_RNA (1)...(19): siRNA sense strand
gcagaucuuacagcaauua

SEQ ID NO: 360989 - RNA, 19 nt, Homo sapiens
  misc_RNA (1)...(19): siRNA sense strand
gagguuaccauauccauug

SEQ ID NO: 360990 - RNA, 19 nt, Homo sapiens
  misc_RNA (1)...(19): siRNA sense strand
gagaccaaccugcuuauug

SEQ ID NO: 360991 - RNA, 19 nt, Homo sapiens
  misc_RNA (1)...(19): siRNA sense strand
gagcuggcuuauaucagua

SEQ ID NO: 360992 - RNA, 19 nt, Homo sapiens
  misc_RNA (1)...(19): siRNA sense strand
caaacugcucgaaaucuua

SEQ ID NO: 360993 - RNA, 19 nt, Homo sapiens
  misc_RNA (1)...(19): siRNA sense strand
ggacauggcauugggaaga

SEQ ID NO: 360994 - RNA, 19 nt, Homo sapiens
  misc_RNA (1)...(19): siRNA sense strand
gaagagaaagaagaggaua

SEQ ID NO: 360995 - RNA, 19 nt, Homo sapiens
  misc_RNA (1)...(19): siRNA sense strand
ccacugauucugcauauga

SEQ ID NO: 360996 - RNA, 19 nt, Homo sapiens
  misc_RNA (1)...(19): siRNA sense strand
caucaccacauaucuauuu

SEQ ID NO: 360997 - RNA, 19 nt, Homo sapiens
  misc_RNA (1)...(19): siRNA sense strand
gaagcucuauccuccugaa

SEQ ID NO: 360998 - RNA, 19 nt, Homo sapiens
  misc_RNA (1)...(19): siRNA sense strand
ccagaguguuugagggaua

SEQ ID NO: 360999 - RNA, 19 nt, Homo sapiens
  misc_RNA (1)...(19): siRNA sense strand
gagcuugauuugcaugaug

SEQ ID NO: 361000 - RNA, 19 nt, Homo sapiens
  misc_RNA (1)...(19): siRNA sense strand
caacagcgaucccaaguua

SEQ ID NO: 361001 - RNA, 19 nt, Homo sapiens
  misc_RNA (1)...(19): siRNA sense strand
ggacacggguuccaaauaa

SEQ ID NO: 361002 - RNA, 19 nt, Homo sapiens
  misc_RNA (1)...(19): siRNA sense strand
gcagagacaugaagaaguu

SEQ ID NO: 361003 - RNA, 19 nt, Homo sapiens
  misc_RNA (1)...(19): siRNA sense strand
caacaucccuaugcaguua

SEQ ID NO: 361004 - RNA, 19 nt, Homo sapiens
  misc_RNA (1)...(19): siRNA sense strand
gcagagaacuuugugaaug

SEQ ID NO: 361005 - RNA, 19 nt, Homo sapiens
  misc_RNA (1)...(19): siRNA sense strand
gcaagcagaucacucgaaa

SEQ ID NO: 361006 - RNA, 19 nt, Homo sapiens
  misc_RNA (1)...(19): siRNA sense strand
ggacucaucuucugacugu

SEQ ID NO: 361007 - RNA, 19 nt, Homo sapiens
  misc_RNA (1)...(19): siRNA sense strand
gagaaacucuauaauguca

SEQ ID NO: 361008 - RNA, 19 nt, Homo sapiens
  misc_RNA (1)...(19): siRNA sense strand
ggaagagagugacgaagaa

SEQ ID NO: 361009 - RNA, 19 nt, Homo sapiens
  misc_RNA (1)...(19): siRNA sense strand
cagcauggauuuggaguua

SEQ ID NO: 361010 - RNA, 19 nt, Homo sapiens
  misc_RNA (1)...(19): siRNA sense strand
cagaaguacugucuaauga

SEQ ID NO: 361011 - RNA, 19 nt, Homo sapiens
  misc_RNA (1)...(19): siRNA sense strand
gagucaaccuggauuauga

SEQ ID NO: 361012 - RNA, 19 nt, Homo sapiens
  misc_RNA (1)...(19): siRNA sense strand
ccacagggauagaagauga

SEQ ID NO: 361013 - RNA, 19 nt, Homo sapiens
  misc_RNA (1)...(19): siRNA sense strand
agaagaaacucauggaaug

SEQ ID NO: 361014 - RNA, 19 nt, Homo sapiens
  misc_RNA (1)...(19): siRNA sense strand
gaagaaaggauucguuaca

SEQ ID NO: 361015 - RNA, 19 nt, Homo sapiens
  misc_RNA (1)...(19): siRNA sense strand
gaaguacugucuaaugagu

SEQ ID NO: 361016 - RNA, 19 nt, Homo sapiens
  misc_RNA (1)...(19): siRNA sense strand
gugcagaaguacugucuaa

SEQ ID NO: 361017 - RNA, 19 nt, Homo sapiens
  misc_RNA (1)...(19): siRNA sense strand
gaaacagggagacaucuuu

SEQ ID NO: 361018 - RNA, 19 nt, Homo sapiens
  misc_RNA (1)...(19): siRNA sense strand
gcauggauuuggaguuaaa

SEQ ID NO: 361019 - RNA, 19 nt, Homo sapiens
  misc_RNA (1)...(19): siRNA sense strand
ccaaauaaguuucgcuauc

SEQ ID NO: 361020 - RNA, 19 nt, Homo sapiens
  misc_RNA (1)...(19): siRNA sense strand
gaaacucuauaaugucauc

SEQ ID NO: 361021 - RNA, 19 nt, Homo sapiens
  misc_RNA (1)...(19): siRNA sense strand
gcagaaguacugucuaaug

SEQ ID NO: 361022 - RNA, 19 nt, Homo sapiens
  misc_RNA (1)...(19): siRNA sense strand
caacaaaugccaucuugga

SEQ ID NO: 361023 - RNA, 19 nt, Homo sapiens
  misc_RNA (1)...(19): siRNA sense strand
gcagccaccuuacagauca

SEQ ID NO: 361024 - RNA, 19 nt, Homo sapiens
  misc_RNA (1)...(19): siRNA sense strand
gauagaagaugaagaugcu

SEQ ID NO: 361025 - RNA, 19 nt, Homo sapiens
  misc_RNA (1)...(19): siRNA sense strand
caaccuggauuaugaugga

SEQ ID NO: 361026 - RNA, 19 nt, Homo sapiens
  misc_RNA (1)...(19): siRNA sense strand
guggagagguggaucagaa

SEQ ID NO: 361027 - RNA, 19 nt, Homo sapiens
  misc_RNA (1)...(19): siRNA sense strand
acgagaagcugauacagaa

SEQ ID NO: 361028 - RNA, 19 nt, Homo sapiens
  misc_RNA (1)...(19): siRNA sense strand
cacaagacuuugagaagaa

SEQ ID NO: 361029 - RNA, 19 nt, Homo sapiens
  misc_RNA (1)...(19): siRNA sense strand
gaucaguccuccaaucuac

SEQ ID NO: 361030 - RNA, 19 nt, Homo sapiens
  misc_RNA (1)...(19): siRNA sense strand
gaagaagaaaggauucguu

SEQ ID NO: 361031 - RNA, 19 nt, Homo sapiens
  misc_RNA (1)...(19): siRNA sense strand
caaauucgggacuugcuua

SEQ ID NO: 361032 - RNA, 19 nt, Homo sapiens
  misc_RNA (1)...(19): siRNA sense strand
gaugauggcauuucagaug

SEQ ID NO: 361033 - RNA, 19 nt, Homo sapiens
  misc_RNA (1)...(19): siRNA sense strand
gacaagagacuuuggacaa

SEQ ID NO: 361034 - RNA, 19 nt, Homo sapiens
  misc_RNA (1)...(19): siRNA sense strand
cagagaacuuugugaaugu

SEQ ID NO: 361035 - RNA, 19 nt, Homo sapiens
  misc_RNA (1)...(19): siRNA sense strand
gagaagaaacucauggaau

SEQ ID NO: 361036 - RNA, 19 nt, Homo sapiens
  misc_RNA (1)...(19): siRNA sense strand
uuacgaagccucacacuau

SEQ ID NO: 361037 - RNA, 19 nt, Homo sapiens
  misc_RNA (1)...(19): siRNA sense strand
gaacaaucccagcggcaaa

SEQ ID NO: 361038 - RNA, 19 nt, Homo sapiens
  misc_RNA (1)...(19): siRNA sense strand
acacaagacuuugagaaga

SEQ ID NO: 361039 - RNA, 19 nt, Homo sapiens
  misc_RNA (1)...(19): siRNA sense strand
caaggagagugugguguuu

SEQ ID NO: 361040 - RNA, 19 nt, Homo sapiens
  misc_RNA (1)...(19): siRNA sense strand
gcuauccauucuacuauga

SEQ ID NO: 361041 - RNA, 19 nt, Homo sapiens
  misc_RNA (1)...(19): siRNA sense strand
ggaaugcuguaucugcaau

SEQ ID NO: 361042 - RNA, 19 nt, Homo sapiens
  misc_RNA (1)...(19): siRNA sense strand
gaacacacagaaaggcauu

SEQ ID NO: 361043 - RNA, 19 nt, Homo sapiens
  misc_RNA (1)...(19): siRNA sense strand
gcaagacgugguauaaaug

SEQ ID NO: 361044 - RNA, 19 nt, Homo sapiens
  misc_RNA (1)...(19): siRNA sense strand
gcaaggagagugugguguu

SEQ ID NO: 361045 - RNA, 19 nt, Homo sapiens
  misc_RNA (1)...(19): siRNA sense strand
guucgaggcugcuauacug

SEQ ID NO: 361046 - RNA, 19 nt, Homo sapiens
  misc_RNA (1)...(19): siRNA sense strand
uauggcagguugcaauaaa

SEQ ID NO: 361047 - RNA, 19 nt, Homo sapiens
  misc_RNA (1)...(19): siRNA sense strand
gcagcaagcuccggaacau

SEQ ID NO: 361048 - RNA, 19 nt, Homo sapiens
  misc_RNA (1)...(19): siRNA sense strand
cuaugaagaugauggcauu

SEQ ID NO: 361049 - RNA, 19 nt, Homo sapiens
  misc_RNA (1)...(19): siRNA sense strand
aagagaaacugcacaccaa

SEQ ID NO: 361050 - RNA, 19 nt, Homo sapiens
  misc_RNA (1)...(19): siRNA sense strand
gaggacagcucggagaaag

SEQ ID NO: 361051 - RNA, 19 nt, Homo sapiens
  misc_RNA (1)...(19): siRNA sense strand
ugaagagacacaagacuuu

SEQ ID NO: 361052 - RNA, 19 nt, Homo sapiens
  misc_RNA (1)...(19): siRNA sense strand
ggccuucgcugccuuguag

SEQ ID NO: 361053 - RNA, 19 nt, Homo sapiens
  misc_RNA (1)...(19): siRNA sense strand
aagaagaaaggauucguua

SEQ ID NO: 361054 - RNA, 19 nt, Homo sapiens
  misc_RNA (1)...(19): siRNA sense strand
gaaacugcacaccaacaaa

SEQ ID NO: 361055 - RNA, 19 nt, Homo sapiens
  misc_RNA (1)...(19): siRNA sense strand
gcacuucaucucagacuug

SEQ ID NO: 361056 - RNA, 19 nt, Homo sapiens
  misc_RNA (1)...(19): siRNA sense strand
agccagagauugcguggua

SEQ ID NO: 361057 - RNA, 19 nt, Homo sapiens
  misc_RNA (1)...(19): siRNA sense strand
ggacgugaacacacagaaa

SEQ ID NO: 361058 - RNA, 19 nt, Homo sapiens
  misc_RNA (1)...(19): siRNA sense strand
aaucaaggacccucaaauu

SEQ ID NO: 361059 - RNA, 19 nt, Homo sapiens
  misc_RNA (1)...(19): siRNA sense strand
gaagagacacaagacuuug

SEQ ID NO: 361060 - RNA, 19 nt, Homo sapiens
  misc_RNA (1)...(19): siRNA sense strand
gcaugaagcaguccugugu

SEQ ID NO: 361061 - RNA, 19 nt, Homo sapiens
  misc_RNA (1)...(19): siRNA sense strand
ucucauugcugauguaaag

SEQ ID NO: 361062 - RNA, 19 nt, Homo sapiens
  misc_RNA (1)...(19): siRNA sense strand
gagauguguugguaugugu

SEQ ID NO: 361063 - RNA, 19 nt, Homo sapiens
  misc_RNA (1)...(19): siRNA sense strand
cgacgacgcuaugaagaug

SEQ ID NO: 361064 - RNA, 19 nt, Homo sapiens
  misc_RNA (1)...(19): siRNA sense strand
gaaaugaccauggcucagu

SEQ ID NO: 361065 - RNA, 19 nt, Homo sapiens
  misc_RNA (1)...(19): siRNA sense strand
cacuggaguuccuauagua

SEQ ID NO: 361066 - RNA, 19 nt, Homo sapiens
  misc_RNA (1)...(19): siRNA sense strand
uaugagauguguugguaug

SEQ ID NO: 361067 - RNA, 19 nt, Homo sapiens
  misc_RNA (1)...(19): siRNA sense strand
cagacugaaucaacaaaug

SEQ ID NO: 361068 - RNA, 19 nt, Homo sapiens
  misc_RNA (1)...(19): siRNA sense strand
acacagaaaggcauugaaa

SEQ ID NO: 361069 - RNA, 19 nt, Homo sapiens
  misc_RNA (1)...(19): siRNA sense strand
ccucauaauucgccacaug

SEQ ID NO: 361070 - RNA, 19 nt, Homo sapiens
  misc_RNA (1)...(19): siRNA sense strand
gaucuucggugggcaguag

SEQ ID NO: 361071 - RNA, 19 nt, Homo sapiens
  misc_RNA (1)...(19): siRNA sense strand
ugcaagacgugguauaaau

SEQ ID NO: 361072 - RNA, 19 nt, Homo sapiens
  misc_RNA (1)...(19): siRNA sense strand
gggaauguccaaagugcua

SEQ ID NO: 361073 - RNA, 19 nt, Homo sapiens
  misc_RNA (1)...(19): siRNA sense strand
acuaugagauguguuggua

SEQ ID NO: 361074 - RNA, 19 nt, Homo sapiens
  misc_RNA (1)...(19): siRNA sense strand
caaauaaguuucgcuaucc

SEQ ID NO: 361075 - RNA, 19 nt, Homo sapiens
  misc_RNA (1)...(19): siRNA sense strand
gagaugcaguacccuaaag

SEQ ID NO: 361076 - RNA, 19 nt, Homo sapiens
  misc_RNA (1)...(19): siRNA sense strand
ggaaagccagacugaauca

SEQ ID NO: 361077 - RNA, 19 nt, Homo sapiens
  misc_RNA (1)...(19): siRNA sense strand
cauguggacuuugguggua

SEQ ID NO: 361078 - RNA, 19 nt, Homo sapiens
  misc_RNA (1)...(19): siRNA sense strand
acccuaaagugcagaagua

SEQ ID NO: 361079 - RNA, 19 nt, Homo sapiens
  misc_RNA (1)...(19): siRNA sense strand
gagaagcugauacagaaga

SEQ ID NO: 361080 - RNA, 19 nt, Homo sapiens
  misc_RNA (1)...(19): siRNA sense strand
ggagaugcaguacccuaaa

SEQ ID NO: 361081 - RNA, 19 nt, Homo sapiens
  misc_RNA (1)...(19): siRNA sense strand
ggagcugucugaaguugag

SEQ ID NO: 361082 - RNA, 19 nt, Homo sapiens
  misc_RNA (1)...(19): siRNA sense strand
aaaaggagcugucugaagu

SEQ ID NO: 361083 - RNA, 19 nt, Homo sapiens
  misc_RNA (1)...(19): siRNA sense strand
ccaaauugcugggaauguc

SEQ ID NO: 361084 - RNA, 19 nt, Homo sapiens
  misc_RNA (1)...(19): siRNA sense strand
gagagguggaucagaauga

SEQ ID NO: 361085 - RNA, 19 nt, Homo sapiens
  misc_RNA (1)...(19): siRNA sense strand
gcacaccaacaaauauaau

SEQ ID NO: 361086 - RNA, 19 nt, Homo sapiens
  misc_RNA (1)...(19): siRNA sense strand
ggaaacagggagacaucuu

SEQ ID NO: 361087 - RNA, 19 nt, Homo sapiens
  misc_RNA (1)...(19): siRNA sense strand
gacgagaagcugauacaga

SEQ ID NO: 361088 - RNA, 19 nt, Homo sapiens
  misc_RNA (1)...(19): siRNA sense strand
uagauaaguuggagucucu

SEQ ID NO: 361089 - RNA, 19 nt, Homo sapiens
  misc_RNA (1)...(19): siRNA sense strand
gaaggaaagccagacugaa

SEQ ID NO: 361090 - RNA, 19 nt, Homo sapiens
  misc_RNA (1)...(19): siRNA sense strand
gcgagcacuucaucucaga

SEQ ID NO: 361091 - RNA, 19 nt, Homo sapiens
  misc_RNA (1)...(19): siRNA sense strand
aagugcaucugacccauuu

SEQ ID NO: 361092 - RNA, 19 nt, Homo sapiens
  misc_RNA (1)...(19): siRNA sense strand
ggaagcaguggaucgagaa

SEQ ID NO: 361093 - RNA, 19 nt, Homo sapiens
  misc_RNA (1)...(19): siRNA sense strand
ucacuggaguuccuauagu

SEQ ID NO: 361094 - RNA, 19 nt, Homo sapiens
  misc_RNA (1)...(19): siRNA sense strand
uaaaccaggucaggacaau

SEQ ID NO: 361095 - RNA, 19 nt, Homo sapiens
  misc_RNA (1)...(19): siRNA sense strand
gaaucaaggacccucaaau

SEQ ID NO: 361096 - RNA, 19 nt, Homo sapiens
  misc_RNA (1)...(19): siRNA sense strand
ggaaucaaggacccucaaa

SEQ ID NO: 361097 - RNA, 19 nt, Homo sapiens
  misc_RNA (1)...(19): siRNA sense strand
ccacagagcgcaccauggu

SEQ ID NO: 361098 - RNA, 19 nt, Homo sapiens
  misc_RNA (1)...(19): siRNA sense strand
ggagucaaccuggauuaug

SEQ ID NO: 361099 - RNA, 19 nt, Homo sapiens
  misc_RNA (1)...(19): siRNA sense strand
gaaagaccuccuccuagca

SEQ ID NO: 361100 - RNA, 19 nt, Homo sapiens
  misc_RNA (1)...(19): siRNA sense strand
ggaauucucucuacaguga

SEQ ID NO: 361101 - RNA, 19 nt, Homo sapiens
  misc_RNA (1)...(19): siRNA sense strand
ggaaucaccugguccuuaa

SEQ ID NO: 361102 - RNA, 19 nt, Homo sapiens
  misc_RNA (1)...(19): siRNA sense strand
uggaggagcucguggauaa

SEQ ID NO: 361103 - RNA, 19 nt, Homo sapiens
  misc_RNA (1)...(19): siRNA sense strand
caaugagaauguugucaaa

SEQ ID NO: 361104 - RNA, 19 nt, Homo sapiens
  misc_RNA (1)...(19): siRNA sense strand
gggaaucaccugguccuua

SEQ ID NO: 361105 - RNA, 19 nt, Homo sapiens
  misc_RNA (1)...(19): siRNA sense strand
acacacccauugaagaauu

SEQ ID NO: 361106 - RNA, 19 nt, Homo sapiens
  misc_RNA (1)...(19): siRNA sense strand
ugacacacccauugaagaa

SEQ ID NO: 361107 - RNA, 19 nt, Homo sapiens
  misc_RNA (1)...(19): siRNA sense strand
caugaacucuguguacgaa

SEQ ID NO: 361108 - RNA, 19 nt, Homo sapiens
  misc_RNA (1)...(19): siRNA sense strand
gcgaaggcagaaaucaaua

SEQ ID NO: 361109 - RNA, 19 nt, Homo sapiens
  misc_RNA (1)...(19): siRNA sense strand
gaugaugacgggcuacaau

SEQ ID NO: 361110 - RNA, 19 nt, Homo sapiens
  misc_RNA (1)...(19): siRNA sense strand
caaggaaucgccgugauga

SEQ ID NO: 361111 - RNA, 19 nt, Homo sapiens
  misc_RNA (1)...(19): siRNA sense strand
guacgaacgccaaggaauc

SEQ ID NO: 361112 - RNA, 19 nt, Homo sapiens
  misc_RNA (1)...(19): siRNA sense strand
gaugacgggcuacaauaau

SEQ ID NO: 361113 - RNA, 19 nt, Homo sapiens
  misc_RNA (1)...(19): siRNA sense strand
acaaugagggcuuuggauu

SEQ ID NO: 361114 - RNA, 19 nt, Homo sapiens
  misc_RNA (1)...(19): siRNA sense strand
caaugagggcuuuggauuc

SEQ ID NO: 361115 - RNA, 19 nt, Homo sapiens
  misc_RNA (1)...(19): siRNA sense strand
ugaugacgggcuacaauaa

SEQ ID NO: 361116 - RNA, 19 nt, Homo sapiens
  misc_RNA (1)...(19): siRNA sense strand
ugagaauguugucaaaguc

SEQ ID NO: 361117 - RNA, 19 nt, Homo sapiens
  misc_RNA (1)...(19): siRNA sense strand
agacggugguccugcagaa

SEQ ID NO: 361118 - RNA, 19 nt, Homo sapiens
  misc_RNA (1)...(19): siRNA sense strand
cgacaccgccaggaagaaa

SEQ ID NO: 361119 - RNA, 19 nt, Homo sapiens
  misc_RNA (1)...(19): siRNA sense strand
ccaaggaaucgccgugaug

SEQ ID NO: 361120 - RNA, 19 nt, Homo sapiens
  misc_RNA (1)...(19): siRNA sense strand
acaggcagguggugaacau

SEQ ID NO: 361121 - RNA, 19 nt, Homo sapiens
  misc_RNA (1)...(19): siRNA sense strand
gaagaauucacaccaacac

SEQ ID NO: 361122 - RNA, 19 nt, Homo sapiens
  misc_RNA (1)...(19): siRNA sense strand
augagaauguugucaaagu

SEQ ID NO: 361123 - RNA, 19 nt, Homo sapiens
  misc_RNA (1)...(19): siRNA sense strand
ggacuucuugauugagguu

SEQ ID NO: 361124 - RNA, 19 nt, Homo sapiens
  misc_RNA (1)...(19): siRNA sense strand
gccaaggaaucgccgugau

SEQ ID NO: 361125 - RNA, 19 nt, Homo sapiens
  misc_RNA (1)...(19): siRNA sense strand
gagguuaacaaugagaaug

SEQ ID NO: 361126 - RNA, 19 nt, Homo sapiens
  misc_RNA (1)...(19): siRNA sense strand
ccggaauucucucuacagu

SEQ ID NO: 361127 - RNA, 19 nt, Homo sapiens
  misc_RNA (1)...(19): siRNA sense strand
gugaugacgcccacuguuc

SEQ ID NO: 361128 - RNA, 19 nt, Homo sapiens
  misc_RNA (1)...(19): siRNA sense strand
gacgacaccgccaggaaga

SEQ ID NO: 361129 - RNA, 19 nt, Homo sapiens
  misc_RNA (1)...(19): siRNA sense strand
ggcagguggugaacaugau

SEQ ID NO: 361130 - RNA, 19 nt, Homo sapiens
  misc_RNA (1)...(19): siRNA sense strand
gauaaacccgaggagauag

SEQ ID NO: 361131 - RNA, 19 nt, Homo sapiens
  misc_RNA (1)...(19): siRNA sense strand
agacaugaacucuguguac

SEQ ID NO: 361132 - RNA, 19 nt, Homo sapiens
  misc_RNA (1)...(19): siRNA sense strand
ggaggagcucguggauaaa

SEQ ID NO: 361133 - RNA, 19 nt, Homo sapiens
  misc_RNA (1)...(19): siRNA sense strand
cgaaggcagaaaucaauag

SEQ ID NO: 361134 - RNA, 19 nt, Homo sapiens
  misc_RNA (1)...(19): siRNA sense strand
gaggagcucguggauaaag

SEQ ID NO: 361135 - RNA, 19 nt, Homo sapiens
  misc_RNA (1)...(19): siRNA sense strand
aaagcugacacacccauug

SEQ ID NO: 361136 - RNA, 19 nt, Homo sapiens
  misc_RNA (1)...(19): siRNA sense strand
augacgggcuacaauaaug

SEQ ID NO: 361137 - RNA, 19 nt, Homo sapiens
  misc_RNA (1)...(19): siRNA sense strand
caaagcugacacacccauu

SEQ ID NO: 361138 - RNA, 19 nt, Homo sapiens
  misc_RNA (1)...(19): siRNA sense strand
gacaaugagggcuuuggau

SEQ ID NO: 361139 - RNA, 19 nt, Homo sapiens
  misc_RNA (1)...(19): siRNA sense strand
ucacaccaacaccggcuuu

SEQ ID NO: 361140 - RNA, 19 nt, Homo sapiens
  misc_RNA (1)...(19): siRNA sense strand
aagcugacacacccauuga

SEQ ID NO: 361141 - RNA, 19 nt, Homo sapiens
  misc_RNA (1)...(19): siRNA sense strand
gcugacacacccauugaag

SEQ ID NO: 361142 - RNA, 19 nt, Homo sapiens
  misc_RNA (1)...(19): siRNA sense strand
aaugagggcuuuggauucg

SEQ ID NO: 361143 - RNA, 19 nt, Homo sapiens
  misc_RNA (1)...(19): siRNA sense strand
ggaauucucucuacaguga

SEQ ID NO: 361144 - RNA, 19 nt, Homo sapiens
  misc_RNA (1)...(19): siRNA sense strand
ggaaucaccugguccuuaa

SEQ ID NO: 361145 - RNA, 19 nt, Homo sapiens
  misc_RNA (1)...(19): siRNA sense strand
uggaggagcucguggauaa

SEQ ID NO: 361146 - RNA, 19 nt, Homo sapiens
  misc_RNA (1)...(19): siRNA sense strand
caaugagaauguugucaaa

SEQ ID NO: 361147 - RNA, 19 nt, Homo sapiens
  misc_RNA (1)...(19): siRNA sense strand
gggaaucaccugguccuua

SEQ ID NO: 361148 - RNA, 19 nt, Homo sapiens
  misc_RNA (1)...(19): siRNA sense strand
acacacccauugaagaauu

SEQ ID NO: 361149 - RNA, 19 nt, Homo sapiens
  misc_RNA (1)...(19): siRNA sense strand
ugacacacccauugaagaa

SEQ ID NO: 361150 - RNA, 19 nt, Homo sapiens
  misc_RNA (1)...(19): siRNA sense strand
caugaacucuguguacgaa

SEQ ID NO: 361151 - RNA, 19 nt, Homo sapiens
  misc_RNA (1)...(19): siRNA sense strand
gcgaaggcagaaaucaaua

SEQ ID NO: 361152 - RNA, 19 nt, Homo sapiens
  misc_RNA (1)...(19): siRNA sense strand
gaugaugacgggcuacaau

SEQ ID NO: 361153 - RNA, 19 nt, Homo sapiens
  misc_RNA (1)...(19): siRNA sense strand
caaggaaucgccgugauga

SEQ ID NO: 361154 - RNA, 19 nt, Homo sapiens
  misc_RNA (1)...(19): siRNA sense strand
guacgaacgccaaggaauc

SEQ ID NO: 361155 - RNA, 19 nt, Homo sapiens
  misc_RNA (1)...(19): siRNA sense strand
gaugacgggcuacaauaau

SEQ ID NO: 361156 - RNA, 19 nt, Homo sapiens
  misc_RNA (1)...(19): siRNA sense strand
acaaugagggcuuuggauu

SEQ ID NO: 361157 - RNA, 19 nt, Homo sapiens
  misc_RNA (1)...(19): siRNA sense strand
caaugagggcuuuggauuc

SEQ ID NO: 361158 - RNA, 19 nt, Homo sapiens
  misc_RNA (1)...(19): siRNA sense strand
ugaugacgggcuacaauaa

SEQ ID NO: 361159 - RNA, 19 nt, Homo sapiens
  misc_RNA (1)...(19): siRNA sense strand
ugagaauguugucaaaguc

SEQ ID NO: 361160 - RNA, 19 nt, Homo sapiens
  misc_RNA (1)...(19): siRNA sense strand
agacggugguccugcagaa

SEQ ID NO: 361161 - RNA, 19 nt, Homo sapiens
  misc_RNA (1)...(19): siRNA sense strand
cgacaccgccaggaagaaa

SEQ ID NO: 361162 - RNA, 19 nt, Homo sapiens
  misc_RNA (1)...(19): siRNA sense strand
ccaaggaaucgccgugaug

SEQ ID NO: 361163 - RNA, 19 nt, Homo sapiens
  misc_RNA (1)...(19): siRNA sense strand
acaggcagguggugaacau

SEQ ID NO: 361164 - RNA, 19 nt, Homo sapiens
  misc_RNA (1)...(19): siRNA sense strand
gaagaauucacaccaacac

SEQ ID NO: 361165 - RNA, 19 nt, Homo sapiens
  misc_RNA (1)...(19): siRNA sense strand
augagaauguugucaaagu

SEQ ID NO: 361166 - RNA, 19 nt, Homo sapiens
  misc_RNA (1)...(19): siRNA sense strand
ggacuucuugauugagguu

SEQ ID NO: 361167 - RNA, 19 nt, Homo sapiens
  misc_RNA (1)...(19): siRNA sense strand
gccaaggaaucgccgugau

SEQ ID NO: 361168 - RNA, 19 nt, Homo sapiens
  misc_RNA (1)...(19): siRNA sense strand
gagguuaacaaugagaaug

SEQ ID NO: 361169 - RNA, 19 nt, Homo sapiens
  misc_RNA (1)...(19): siRNA sense strand
ccggaauucucucuacagu

SEQ ID NO: 361170 - RNA, 19 nt, Homo sapiens
  misc_RNA (1)...(19): siRNA sense strand
gugaugacgcccacuguuc

SEQ ID NO: 361171 - RNA, 19 nt, Homo sapiens
  misc_RNA (1)...(19): siRNA sense strand
gacgacaccgccaggaaga

SEQ ID NO: 361172 - RNA, 19 nt, Homo sapiens
  misc_RNA (1)...(19): siRNA sense strand
ggcagguggugaacaugau

SEQ ID NO: 361173 - RNA, 19 nt, Homo sapiens
  misc_RNA (1)...(19): siRNA sense strand
gauaaacccgaggagauag

SEQ ID NO: 361174 - RNA, 19 nt, Homo sapiens
  misc_RNA (1)...(19): siRNA sense strand
agacaugaacucuguguac

SEQ ID NO: 361175 - RNA, 19 nt, Homo sapiens
  misc_RNA (1)...(19): siRNA sense strand
ggaggagcucguggauaaa

SEQ ID NO: 361176 - RNA, 19 nt, Homo sapiens
  misc_RNA (1)...(19): siRNA sense strand
cgaaggcagaaaucaauag

SEQ ID NO: 361177 - RNA, 19 nt, Homo sapiens
  misc_RNA (1)...(19): siRNA sense strand
gaggagcucguggauaaag

SEQ ID NO: 361178 - RNA, 19 nt, Homo sapiens
  misc_RNA (1)...(19): siRNA sense strand
aaagcugacacacccauug

SEQ ID NO: 361179 - RNA, 19 nt, Homo sapiens
  misc_RNA (1)...(19): siRNA sense strand
augacgggcuacaauaaug

SEQ ID NO: 361180 - RNA, 19 nt, Homo sapiens
  misc_RNA (1)...(19): siRNA sense strand
caaagcugacacacccauu

SEQ ID NO: 361181 - RNA, 19 nt, Homo sapiens
  misc_RNA (1)...(19): siRNA sense strand
gacaaugagggcuuuggau

SEQ ID NO: 361182 - RNA, 19 nt, Homo sapiens
  misc_RNA (1)...(19): siRNA sense strand
ucacaccaacaccggcuuu

SEQ ID NO: 361183 - RNA, 19 nt, Homo sapiens
  misc_RNA (1)...(19): siRNA sense strand
aagcugacacacccauuga

SEQ ID NO: 361184 - RNA, 19 nt, Homo sapiens
  misc_RNA (1)...(19): siRNA sense strand
gcugacacacccauugaag

SEQ ID NO: 361185 - RNA, 19 nt, Homo sapiens
  misc_RNA (1)...(19): siRNA sense strand
aaugagggcuuuggauucg

SEQ ID NO: 361186 - RNA, 19 nt, Homo sapiens
  misc_RNA (1)...(19): siRNA sense strand
gggaaacucugacugauuu

SEQ ID NO: 361187 - RNA, 19 nt, Homo sapiens
  misc_RNA (1)...(19): siRNA sense strand
ggagagaaauaucauaaga

SEQ ID NO: 361188 - RNA, 19 nt, Homo sapiens
  misc_RNA (1)...(19): siRNA sense strand
gaagacauuucuaaacuug

SEQ ID NO: 361189 - RNA, 19 nt, Homo sapiens
  misc_RNA (1)...(19): siRNA sense strand
gaagagaaagucacguuua

SEQ ID NO: 361190 - RNA, 19 nt, Homo sapiens
  misc_RNA (1)...(19): siRNA sense strand
gaaagucacguuuaauuug

SEQ ID NO: 361191 - RNA, 19 nt, Homo sapiens
  misc_RNA (1)...(19): siRNA sense strand
gagaaagucacguuuaauu

SEQ ID NO: 361192 - RNA, 19 nt, Homo sapiens
  misc_RNA (1)...(19): siRNA sense strand
gauaggaaguucagcauca

SEQ ID NO: 361193 - RNA, 19 nt, Homo sapiens
  misc_RNA (1)...(19): siRNA sense strand
gaaaagaacugcccgaaca

SEQ ID NO: 361194 - RNA, 19 nt, Homo sapiens
  misc_RNA (1)...(19): siRNA sense strand
cauugaaacuggcccuuua

SEQ ID NO: 361195 - RNA, 19 nt, Homo sapiens
  misc_RNA (1)...(19): siRNA sense strand
ggaccuugaugaugaagaa

SEQ ID NO: 361196 - RNA, 19 nt, Homo sapiens
  misc_RNA (1)...(19): siRNA sense strand
aaagaaaucugcacuggau

SEQ ID NO: 361197 - RNA, 19 nt, Homo sapiens
  misc_RNA (1)...(19): siRNA sense strand
aagagaaagucacguuuaa

SEQ ID NO: 361198 - RNA, 19 nt, Homo sapiens
  misc_RNA (1)...(19): siRNA sense strand
gcuacagccugaaauuauu

SEQ ID NO: 361199 - RNA, 19 nt, Homo sapiens
  misc_RNA (1)...(19): siRNA sense strand
ccaagaaacugggagagaa

SEQ ID NO: 361200 - RNA, 19 nt, Homo sapiens
  misc_RNA (1)...(19): siRNA sense strand
ccaaaaggcugguauauuc

SEQ ID NO: 361201 - RNA, 19 nt, Homo sapiens
  misc_RNA (1)...(19): siRNA sense strand
gagagcacauccacaugaa

SEQ ID NO: 361202 - RNA, 19 nt, Homo sapiens
  misc_RNA (1)...(19): siRNA sense strand
gagcucaacucagucuaaa

SEQ ID NO: 361203 - RNA, 19 nt, Homo sapiens
  misc_RNA (1)...(19): siRNA sense strand
ggacgagaauggcuuuaag

SEQ ID NO: 361204 - RNA, 19 nt, Homo sapiens
  misc_RNA (1)...(19): siRNA sense strand
ugacaaauauacagcuguu

SEQ ID NO: 361205 - RNA, 19 nt, Homo sapiens
  misc_RNA (1)...(19): siRNA sense strand
gaaaugaagguacccuaga

SEQ ID NO: 361206 - RNA, 19 nt, Homo sapiens
  misc_RNA (1)...(19): siRNA sense strand
ucagaggaauuccgaaaug

SEQ ID NO: 361207 - RNA, 19 nt, Homo sapiens
  misc_RNA (1)...(19): siRNA sense strand
cagcaucagugaaacgaaa

SEQ ID NO: 361208 - RNA, 19 nt, Homo sapiens
  misc_RNA (1)...(19): siRNA sense strand
uagaauccaucaaugagaa

SEQ ID NO: 361209 - RNA, 19 nt, Homo sapiens
  misc_RNA (1)...(19): siRNA sense strand
gaacaggaggucccuacuu

SEQ ID NO: 361210 - RNA, 19 nt, Homo sapiens
  misc_RNA (1)...(19): siRNA sense strand
cagcuacuaucgucauuga

SEQ ID NO: 361211 - RNA, 19 nt, Homo sapiens
  misc_RNA (1)...(19): siRNA sense strand
aacaggaggucccuacuuu

SEQ ID NO: 361212 - RNA, 19 nt, Homo sapiens
  misc_RNA (1)...(19): siRNA sense strand
aaaugaagguacccuagaa

SEQ ID NO: 361213 - RNA, 19 nt, Homo sapiens
  misc_RNA (1)...(19): siRNA sense strand
ucaacucagucuaaagaaa

SEQ ID NO: 361214 - RNA, 19 nt, Homo sapiens
  misc_RNA (1)...(19): siRNA sense strand
gcaggaccuugaugaugaa

SEQ ID NO: 361215 - RNA, 19 nt, Homo sapiens
  misc_RNA (1)...(19): siRNA sense strand
gaacugcccgaacagacua

SEQ ID NO: 361216 - RNA, 19 nt, Homo sapiens
  misc_RNA (1)...(19): siRNA sense strand
gcucaacucagucuaaaga

SEQ ID NO: 361217 - RNA, 19 nt, Homo sapiens
  misc_RNA (1)...(19): siRNA sense strand
gcacugaagacgauaggaa

SEQ ID NO: 361218 - RNA, 19 nt, Homo sapiens
  misc_RNA (1)...(19): siRNA sense strand
agagaaggcuugugcaaag

SEQ ID NO: 361219 - RNA, 19 nt, Homo sapiens
  misc_RNA (1)...(19): siRNA sense strand
ggagcaacaucuuccaagu

SEQ ID NO: 361220 - RNA, 19 nt, Homo sapiens
  misc_RNA (1)...(19): siRNA sense strand
ggaauuccgaaaugacuuu

SEQ ID NO: 361221 - RNA, 19 nt, Homo sapiens
  misc_RNA (1)...(19): siRNA sense strand
acgcagaguugaaggaauu

SEQ ID NO: 361222 - RNA, 19 nt, Homo sapiens
  misc_RNA (1)...(19): siRNA sense strand
ggcuuuaagugucauugua

SEQ ID NO: 361223 - RNA, 19 nt, Homo sapiens
  misc_RNA (1)...(19): siRNA sense strand
gaaacugggagagaaauau

SEQ ID NO: 361224 - RNA, 19 nt, Homo sapiens
  misc_RNA (1)...(19): siRNA sense strand
gagcacauccacaugaaug

SEQ ID NO: 361225 - RNA, 19 nt, Homo sapiens
  misc_RNA (1)...(19): siRNA sense strand
cagaggaauuccgaaauga

SEQ ID NO: 361226 - RNA, 19 nt, Homo sapiens
  misc_RNA (1)...(19): siRNA sense strand
gcuacuaucgucauugaaa

SEQ ID NO: 361227 - RNA, 19 nt, Homo sapiens
  misc_RNA (1)...(19): siRNA sense strand
gcugguauauucaguacau

SEQ ID NO: 361228 - RNA, 19 nt, Homo sapiens
  misc_RNA (1)...(19): siRNA sense strand
ccucagcaguuuauggauu

SEQ ID NO: 361229 - RNA, 19 nt, Homo sapiens
  misc_RNA (1)...(19): siRNA sense strand
ccaacaggaucaaguccaa

SEQ ID NO: 361230 - RNA, 19 nt, Homo sapiens
  misc_RNA (1)...(19): siRNA sense strand
ggagacgcuuuggcacuaa

SEQ ID NO: 361231 - RNA, 19 nt, Homo sapiens
  misc_RNA (1)...(19): siRNA sense strand
caagaaacugggagagaaa

SEQ ID NO: 361232 - RNA, 19 nt, Homo sapiens
  misc_RNA (1)...(19): siRNA sense strand
cucagcaguuuauggauua

SEQ ID NO: 361233 - RNA, 19 nt, Homo sapiens
  misc_RNA (1)...(19): siRNA sense strand
cuaaguggcugggcagaga

SEQ ID NO: 361234 - RNA, 19 nt, Homo sapiens
  misc_RNA (1)...(19): siRNA sense strand
aaucugcacuggaugaaau

SEQ ID NO: 361235 - RNA, 19 nt, Homo sapiens
  misc_RNA (1)...(19): siRNA sense strand
ucccagagcucaacucagu

SEQ ID NO: 361236 - RNA, 19 nt, Homo sapiens
  misc_RNA (1)...(19): siRNA sense strand
cgagugcacugaagacgau

SEQ ID NO: 361237 - RNA, 19 nt, Homo sapiens
  misc_RNA (1)...(19): siRNA sense strand
gcagagaaggcuugugcaa

SEQ ID NO: 361238 - RNA, 19 nt, Homo sapiens
  misc_RNA (1)...(19): siRNA sense strand
aaacuugaccagacucauu

SEQ ID NO: 361239 - RNA, 19 nt, Homo sapiens
  misc_RNA (1)...(19): siRNA sense strand
cgagagcacauccacauga

SEQ ID NO: 361240 - RNA, 19 nt, Homo sapiens
  misc_RNA (1)...(19): siRNA sense strand
agcaggaccuugaugauga

SEQ ID NO: 361241 - RNA, 19 nt, Homo sapiens
  misc_RNA (1)...(19): siRNA sense strand
ugaccagacucauuuagag

SEQ ID NO: 361242 - RNA, 19 nt, Homo sapiens
  misc_RNA (1)...(19): siRNA sense strand
gaaaauccucagcaguuua

SEQ ID NO: 361243 - RNA, 19 nt, Homo sapiens
  misc_RNA (1)...(19): siRNA sense strand
auacagcuguugugaagau

SEQ ID NO: 361244 - RNA, 19 nt, Homo sapiens
  misc_RNA (1)...(19): siRNA sense strand
gaagagcaagugagaagag

SEQ ID NO: 361245 - RNA, 19 nt, Homo sapiens
  misc_RNA (1)...(19): siRNA sense strand
gagaaggcuugugcaaagu

SEQ ID NO: 361246 - RNA, 19 nt, Homo sapiens
  misc_RNA (1)...(19): siRNA sense strand
gagacgcuuuggcacuaaa

SEQ ID NO: 361247 - RNA, 19 nt, Homo sapiens
  misc_RNA (1)...(19): siRNA sense strand
ggaaguucagcaucaguga

SEQ ID NO: 361248 - RNA, 19 nt, Homo sapiens
  misc_RNA (1)...(19): siRNA sense strand
agaauggcuuuaaguguca

SEQ ID NO: 361249 - RNA, 19 nt, Homo sapiens
  misc_RNA (1)...(19): siRNA sense strand
ggaccgagugcacugaaga

SEQ ID NO: 361250 - RNA, 19 nt, Homo sapiens
  misc_RNA (1)...(19): siRNA sense strand
gaaaucugcacuggaugaa

SEQ ID NO: 361251 - RNA, 19 nt, Homo sapiens
  misc_RNA (1)...(19): siRNA sense strand
auauacagcuguugugaag

SEQ ID NO: 361252 - RNA, 19 nt, Homo sapiens
  misc_RNA (1)...(19): siRNA sense strand
caacaucuuccaagucaag

SEQ ID NO: 361253 - RNA, 19 nt, Homo sapiens
  misc_RNA (1)...(19): siRNA sense strand
ggacgcagaguugaaggaa

SEQ ID NO: 361254 - RNA, 19 nt, Homo sapiens
  misc_RNA (1)...(19): siRNA sense strand
gaagguacccuagaaucca

SEQ ID NO: 361255 - RNA, 19 nt, Homo sapiens
  misc_RNA (1)...(19): siRNA sense strand
ugaagacgauaggaaguuc

SEQ ID NO: 361256 - RNA, 19 nt, Homo sapiens
  misc_RNA (1)...(19): siRNA sense strand
gacagggacccagaaacua

SEQ ID NO: 361257 - RNA, 19 nt, Homo sapiens
  misc_RNA (1)...(19): siRNA sense strand
aauggaggcuacagaggaa

SEQ ID NO: 361258 - RNA, 19 nt, Homo sapiens
  misc_RNA (1)...(19): siRNA sense strand
agcaacaucuuccaaguca

SEQ ID NO: 361259 - RNA, 19 nt, Homo sapiens
  misc_RNA (1)...(19): siRNA sense strand
ugcagaagcuacgcuggua

SEQ ID NO: 361260 - RNA, 19 nt, Homo sapiens
  misc_RNA (1)...(19): siRNA sense strand
gaccagacucauuuagaga

SEQ ID NO: 361261 - RNA, 19 nt, Homo sapiens
  misc_RNA (1)...(19): siRNA sense strand
gcugaaacuugaccagacu

SEQ ID NO: 361262 - RNA, 19 nt, Homo sapiens
  misc_RNA (1)...(19): siRNA sense strand
gauugauucuggagacaag

SEQ ID NO: 361263 - RNA, 19 nt, Homo sapiens
  misc_RNA (1)...(19): siRNA sense strand
ugggagagaaauaucauaa

SEQ ID NO: 361264 - RNA, 19 nt, Homo sapiens
  misc_RNA (1)...(19): siRNA sense strand
gcaacuggaacuggagaaa

SEQ ID NO: 361265 - RNA, 19 nt, Homo sapiens
  misc_RNA (1)...(19): siRNA sense strand
cuaaaaggguccacaacaa

SEQ ID NO: 361266 - RNA, 19 nt, Homo sapiens
  misc_RNA (1)...(19): siRNA sense strand
gaauuaagcagagaaaaug

SEQ ID NO: 361267 - RNA, 19 nt, Homo sapiens
  misc_RNA (1)...(19): siRNA sense strand
cgagaauggcuuuaagugu

SEQ ID NO: 361268 - RNA, 19 nt, Homo sapiens
  misc_RNA (1)...(19): siRNA sense strand
cagaagcuacgcugguauu

SEQ ID NO: 361269 - RNA, 19 nt, Homo sapiens
  misc_RNA (1)...(19): siRNA sense strand
caaauauacagcuguugug

SEQ ID NO: 361270 - RNA, 19 nt, Homo sapiens
  misc_RNA (1)...(19): siRNA sense strand
gagcaacaucuuccaaguc

SEQ ID NO: 361271 - RNA, 19 nt, Homo sapiens
  misc_RNA (1)...(19): siRNA sense strand
ugaagagaaagucacguuu

SEQ ID NO: 361272 - RNA, 19 nt, Homo sapiens
  misc_RNA (1)...(19): siRNA sense strand
cagagaaggcuugugcaaa

SEQ ID NO: 361273 - RNA, 19 nt, Homo sapiens
  misc_RNA (1)...(19): siRNA sense strand
cauggagauugaagaggaa

SEQ ID NO: 361274 - RNA, 19 nt, Homo sapiens
  misc_RNA (1)...(19): siRNA sense strand
agaaaucugcacuggauga

SEQ ID NO: 361275 - RNA, 19 nt, Homo sapiens
  misc_RNA (1)...(19): siRNA sense strand
ccaaggcuaucgccaacag

SEQ ID NO: 361276 - RNA, 19 nt, Homo sapiens
  misc_RNA (1)...(19): siRNA sense strand
ggaauuaagcagagaaaau

SEQ ID NO: 361277 - RNA, 19 nt, Homo sapiens
  misc_RNA (1)...(19): siRNA sense strand
gguauauucaguacauaga

SEQ ID NO: 361278 - RNA, 19 nt, Homo sapiens
  misc_RNA (1)...(19): siRNA sense strand
gggacgagaauggcuuuaa

SEQ ID NO: 361279 - RNA, 19 nt, Homo sapiens
  misc_RNA (1)...(19): siRNA sense strand
aggagacgcuuuggcacua

SEQ ID NO: 361280 - RNA, 19 nt, Homo sapiens
  misc_RNA (1)...(19): siRNA sense strand
gccugaaauuauugugaaa

SEQ ID NO: 361281 - RNA, 19 nt, Homo sapiens
  misc_RNA (1)...(19): siRNA sense strand
gagaaaaugaugaagagaa

SEQ ID NO: 361282 - RNA, 19 nt, Homo sapiens
  misc_RNA (1)...(19): siRNA sense strand
guugugaagaugauugauu

SEQ ID NO: 361283 - RNA, 19 nt, Homo sapiens
  misc_RNA (1)...(19): siRNA sense strand
aaaaggcuauuguuaagga

SEQ ID NO: 361284 - RNA, 19 nt, Homo sapiens
  misc_RNA (1)...(19): siRNA sense strand
gaacagacuacuggcuaca

SEQ ID NO: 361285 - RNA, 19 nt, Homo sapiens
  misc_RNA (1)...(19): siRNA sense strand
caacucagucuaaagaaaa

SEQ ID NO: 361286 - RNA, 19 nt, Homo sapiens
  misc_RNA (1)...(19): siRNA sense strand
aagaggaggaugauuauua

SEQ ID NO: 361287 - RNA, 19 nt, Homo sapiens
  misc_RNA (1)...(19): siRNA sense strand
gaagguggcauuccuaauc

SEQ ID NO: 361288 - RNA, 19 nt, Homo sapiens
  misc_RNA (1)...(19): siRNA sense strand
aagaagaggaggaugauua

SEQ ID NO: 361289 - RNA, 19 nt, Homo sapiens
  misc_RNA (1)...(19): siRNA sense strand
gaacagccagcucauggaa

SEQ ID NO: 361290 - RNA, 19 nt, Homo sapiens
  misc_RNA (1)...(19): siRNA sense strand
agaggaggaugauuauuag

SEQ ID NO: 361291 - RNA, 19 nt, Homo sapiens
  misc_RNA (1)...(19): siRNA sense strand
gagaugaaacagugcuuug

SEQ ID NO: 361292 - RNA, 19 nt, Homo sapiens
  misc_RNA (1)...(19): siRNA sense strand
cgucuuacaugcucgugaa

SEQ ID NO: 361293 - RNA, 19 nt, Homo sapiens
  misc_RNA (1)...(19): siRNA sense strand
cgaagacgacgacgacgaa

SEQ ID NO: 361294 - RNA, 19 nt, Homo sapiens
  misc_RNA (1)...(19): siRNA sense strand
gaagaggaggaugauuauu

SEQ ID NO: 361295 - RNA, 19 nt, Homo sapiens
  misc_RNA (1)...(19): siRNA sense strand
agacgacgacgacgaagaa

SEQ ID NO: 361296 - RNA, 19 nt, Homo sapiens
  misc_RNA (1)...(19): siRNA sense strand
gaagaagaggaggaugauu

SEQ ID NO: 361297 - RNA, 19 nt, Homo sapiens
  misc_RNA (1)...(19): siRNA sense strand
gcaacgacgccaugaaggu

SEQ ID NO: 361298 - RNA, 19 nt, Homo sapiens
  misc_RNA (1)...(19): siRNA sense strand
uggcugggaugacgacgaa

SEQ ID NO: 361299 - RNA, 19 nt, Homo sapiens
  misc_RNA (1)...(19): siRNA sense strand
acagccagcucauggaaca

SEQ ID NO: 361300 - RNA, 19 nt, Homo sapiens
  misc_RNA (1)...(19): siRNA sense strand
aagguggcauuccuaauca

SEQ ID NO: 361301 - RNA, 19 nt, Homo sapiens
  misc_RNA (1)...(19): siRNA sense strand
agaagaggaggaugauuau

SEQ ID NO: 361302 - RNA, 19 nt, Homo sapiens
  misc_RNA (1)...(19): siRNA sense strand
cgacgacgacgaagaagag

SEQ ID NO: 361303 - RNA, 19 nt, Homo sapiens
  misc_RNA (1)...(19): siRNA sense strand
gggccuuccucgaugagau

SEQ ID NO: 361304 - RNA, 19 nt, Homo sapiens
  misc_RNA (1)...(19): siRNA sense strand
caugaagguggcauuccua

SEQ ID NO: 361305 - RNA, 19 nt, Homo sapiens
  misc_RNA (1)...(19): siRNA sense strand
cgaagaagaggaggaugau

SEQ ID NO: 361306 - RNA, 19 nt, Homo sapiens
  misc_RNA (1)...(19): siRNA sense strand
acgaagaagaggaggauga

SEQ ID NO: 361307 - RNA, 19 nt, Homo sapiens
  misc_RNA (1)...(19): siRNA sense strand
cuuccucgaugagaugaaa

SEQ ID NO: 361308 - RNA, 19 nt, Homo sapiens
  misc_RNA (1)...(19): siRNA sense strand
gcugggaugacgacgaaga

SEQ ID NO: 361309 - RNA, 19 nt, Homo sapiens
  misc_RNA (1)...(19): siRNA sense strand
ccaugaagguggcauuccu

SEQ ID NO: 361310 - RNA, 19 nt, Homo sapiens
  misc_RNA (1)...(19): siRNA sense strand
ugagaugaaacagugcuuu

SEQ ID NO: 361311 - RNA, 19 nt, Homo sapiens
  misc_RNA (1)...(19): siRNA sense strand
cgacgaagaagaggaggau

SEQ ID NO: 361312 - RNA, 19 nt, Homo sapiens
  misc_RNA (1)...(19): siRNA sense strand
cagcaaagcucuaaagauc

SEQ ID NO: 361313 - RNA, 19 nt, Homo sapiens
  misc_RNA (1)...(19): siRNA sense strand
gcaaagcucuaaagaucaa

SEQ ID NO: 361314 - RNA, 19 nt, Homo sapiens
  misc_RNA (1)...(19): siRNA sense strand
aggaggagcugcagaagca

SEQ ID NO: 361315 - RNA, 19 nt, Homo sapiens
  misc_RNA (1)...(19): siRNA sense strand
agaaggaggagcugcagaa

SEQ ID NO: 361316 - RNA, 19 nt, Homo sapiens
  misc_RNA (1)...(19): siRNA sense strand
ccagcaaagcucuaaagau

SEQ ID NO: 361317 - RNA, 19 nt, Homo sapiens
  misc_RNA (1)...(19): siRNA sense strand
agcgagagcugagcgagaa

SEQ ID NO: 361318 - RNA, 19 nt, Homo sapiens
  misc_RNA (1)...(19): siRNA sense strand
gaaggaggagcugcagaag

SEQ ID NO: 361319 - RNA, 19 nt, Homo sapiens
  misc_RNA (1)...(19): siRNA sense strand
ugaagcgcgugugccagaa

SEQ ID NO: 361320 - RNA, 19 nt, Homo sapiens
  misc_RNA (1)...(19): siRNA sense strand
cagcaaagcucuaaagauc

SEQ ID NO: 361321 - RNA, 19 nt, Homo sapiens
  misc_RNA (1)...(19): siRNA sense strand
gcaaagcucuaaagaucaa

SEQ ID NO: 361322 - RNA, 19 nt, Homo sapiens
  misc_RNA (1)...(19): siRNA sense strand
aggaggagcugcagaagca

SEQ ID NO: 361323 - RNA, 19 nt, Homo sapiens
  misc_RNA (1)...(19): siRNA sense strand
agaaggaggagcugcagaa

SEQ ID NO: 361324 - RNA, 19 nt, Homo sapiens
  misc_RNA (1)...(19): siRNA sense strand
ccagcaaagcucuaaagau

SEQ ID NO: 361325 - RNA, 19 nt, Homo sapiens
  misc_RNA (1)...(19): siRNA sense strand
agcgagagcugagcgagaa

SEQ ID NO: 361326 - RNA, 19 nt, Homo sapiens
  misc_RNA (1)...(19): siRNA sense strand
gaaggaggagcugcagaag

SEQ ID NO: 361327 - RNA, 19 nt, Homo sapiens
  misc_RNA (1)...(19): siRNA sense strand
ugaagcgcgugugccagaa

SEQ ID NO: 361328 - RNA, 19 nt, Homo sapiens
  misc_RNA (1)...(19): siRNA sense strand
gaugaucgaugacaaugaa

SEQ ID NO: 361329 - RNA, 19 nt, Homo sapiens
  misc_RNA (1)...(19): siRNA sense strand
ccaagaaguuccucaaugu

SEQ ID NO: 361330 - RNA, 19 nt, Homo sapiens
  misc_RNA (1)...(19): siRNA sense strand
ggacagcccugaccucacu

SEQ ID NO: 361331 - RNA, 19 nt, Homo sapiens
  misc_RNA (1)...(19): siRNA sense strand
gcgccuuccuggaguacua

SEQ ID NO: 361332 - RNA, 19 nt, Homo sapiens
  misc_RNA (1)...(19): siRNA sense strand
gaccucacuuucuccaaga

SEQ ID NO: 361333 - RNA, 19 nt, Homo sapiens
  misc_RNA (1)...(19): siRNA sense strand
uccaagaaguuccucaaug

SEQ ID NO: 361334 - RNA, 19 nt, Homo sapiens
  misc_RNA (1)...(19): siRNA sense strand
cgaagaggacgacgaggaa

SEQ ID NO: 361335 - RNA, 19 nt, Homo sapiens
  misc_RNA (1)...(19): siRNA sense strand
aguuugagaugaucgauga

SEQ ID NO: 361336 - RNA, 19 nt, Homo sapiens
  misc_RNA (1)...(19): siRNA sense strand
gauugccacugcccggaaa

SEQ ID NO: 361337 - RNA, 19 nt, Homo sapiens
  misc_RNA (1)...(19): siRNA sense strand
gcccugaccucacuuucuc

SEQ ID NO: 361338 - RNA, 19 nt, Homo sapiens
  misc_RNA (1)...(19): siRNA sense strand
gagaugaucgaugacaaug

SEQ ID NO: 361339 - RNA, 19 nt, Homo sapiens
  misc_RNA (1)...(19): siRNA sense strand
cgcaacagcugcuauuucg

SEQ ID NO: 361340 - RNA, 19 nt, Homo sapiens
  misc_RNA (1)...(19): siRNA sense strand
gcagccauuucuuccagau

SEQ ID NO: 361341 - RNA, 19 nt, Homo sapiens
  misc_RNA (1)...(19): siRNA sense strand
agaaguuccucaaugucuu

SEQ ID NO: 361342 - RNA, 19 nt, Homo sapiens
  misc_RNA (1)...(19): siRNA sense strand
agccauuucuuccagauga

SEQ ID NO: 361343 - RNA, 19 nt, Homo sapiens
  misc_RNA (1)...(19): siRNA sense strand
acacgcuggugguggauga

SEQ ID NO: 361344 - RNA, 19 nt, Homo sapiens
  misc_RNA (1)...(19): siRNA sense strand
uuccagcgcugcagccauu

SEQ ID NO: 361345 - RNA, 19 nt, Homo sapiens
  misc_RNA (1)...(19): siRNA sense strand
acgcgucgcugguguacga

SEQ ID NO: 361346 - RNA, 19 nt, Homo sapiens
  misc_RNA (1)...(19): siRNA sense strand
gggcaacggcauccugugu

SEQ ID NO: 361347 - RNA, 19 nt, Homo sapiens
  misc_RNA (1)...(19): siRNA sense strand
gcagccaugcagaagauug

SEQ ID NO: 361348 - RNA, 19 nt, Homo sapiens
  misc_RNA (1)...(19): siRNA sense strand
gcgcugcagccauuucuuc

SEQ ID NO: 361349 - RNA, 19 nt, Homo sapiens
  misc_RNA (1)...(19): siRNA sense strand
uguacgacgcggucaagua

SEQ ID NO: 361350 - RNA, 19 nt, Homo sapiens
  misc_RNA (1)...(19): siRNA sense strand
aggaugacuuccaggaguu

SEQ ID NO: 361351 - RNA, 19 nt, Homo sapiens
  misc_RNA (1)...(19): siRNA sense strand
caagaaguuccucaauguc

SEQ ID NO: 361352 - RNA, 19 nt, Homo sapiens
  misc_RNA (1)...(19): siRNA sense strand
gccauuucuuccagaugaa

SEQ ID NO: 361353 - RNA, 19 nt, Homo sapiens
  misc_RNA (1)...(19): siRNA sense strand
ggaugacuuccaggaguuu

SEQ ID NO: 361354 - RNA, 19 nt, Homo sapiens
  misc_RNA (1)...(19): siRNA sense strand
ccugugaccucgagaucuc

SEQ ID NO: 361355 - RNA, 19 nt, Homo sapiens
  misc_RNA (1)...(19): siRNA sense strand
gccacugcccggaaacuga

SEQ ID NO: 361356 - RNA, 19 nt, Homo sapiens
  misc_RNA (1)...(19): siRNA sense strand
uccaggaguuugagaugau

SEQ ID NO: 361357 - RNA, 19 nt, Homo sapiens
  misc_RNA (1)...(19): siRNA sense strand
ccgcaacagcugcuauuuc

SEQ ID NO: 361358 - RNA, 19 nt, Homo sapiens
  misc_RNA (1)...(19): siRNA sense strand
ugagaugaucgaugacaau

SEQ ID NO: 361359 - RNA, 19 nt, Homo sapiens
  misc_RNA (1)...(19): siRNA sense strand
gaucgaugacaaugaagag

SEQ ID NO: 361360 - RNA, 19 nt, Homo sapiens
  misc_RNA (1)...(19): siRNA sense strand
gaugaucgaugacaaugaa

SEQ ID NO: 361361 - RNA, 19 nt, Homo sapiens
  misc_RNA (1)...(19): siRNA sense strand
ccaagaaguuccucaaugu

SEQ ID NO: 361362 - RNA, 19 nt, Homo sapiens
  misc_RNA (1)...(19): siRNA sense strand
ggacagcccugaccucacu

SEQ ID NO: 361363 - RNA, 19 nt, Homo sapiens
  misc_RNA (1)...(19): siRNA sense strand
gcgccuuccuggaguacua

SEQ ID NO: 361364 - RNA, 19 nt, Homo sapiens
  misc_RNA (1)...(19): siRNA sense strand
gaccucacuuucuccaaga

SEQ ID NO: 361365 - RNA, 19 nt, Homo sapiens
  misc_RNA (1)...(19): siRNA sense strand
uccaagaaguuccucaaug

SEQ ID NO: 361366 - RNA, 19 nt, Homo sapiens
  misc_RNA (1)...(19): siRNA sense strand
cgaagaggacgacgaggaa

SEQ ID NO: 361367 - RNA, 19 nt, Homo sapiens
  misc_RNA (1)...(19): siRNA sense strand
aguuugagaugaucgauga

SEQ ID NO: 361368 - RNA, 19 nt, Homo sapiens
  misc_RNA (1)...(19): siRNA sense strand
gauugccacugcccggaaa

SEQ ID NO: 361369 - RNA, 19 nt, Homo sapiens
  misc_RNA (1)...(19): siRNA sense strand
gcccugaccucacuuucuc

SEQ ID NO: 361370 - RNA, 19 nt, Homo sapiens
  misc_RNA (1)...(19): siRNA sense strand
gagaugaucgaugacaaug

SEQ ID NO: 361371 - RNA, 19 nt, Homo sapiens
  misc_RNA (1)...(19): siRNA sense strand
cgcaacagcugcuauuucg

SEQ ID NO: 361372 - RNA, 19 nt, Homo sapiens
  misc_RNA (1)...(19): siRNA sense strand
gcagccauuucuuccagau

SEQ ID NO: 361373 - RNA, 19 nt, Homo sapiens
  misc_RNA (1)...(19): siRNA sense strand
agaaguuccucaaugucuu

SEQ ID NO: 361374 - RNA, 19 nt, Homo sapiens
  misc_RNA (1)...(19): siRNA sense strand
agccauuucuuccagauga

SEQ ID NO: 361375 - RNA, 19 nt, Homo sapiens
  misc_RNA (1)...(19): siRNA sense strand
acacgcuggugguggauga

SEQ ID NO: 361376 - RNA, 19 nt, Homo sapiens
  misc_RNA (1)...(19): siRNA sense strand
uuccagcgcugcagccauu

SEQ ID NO: 361377 - RNA, 19 nt, Homo sapiens
  misc_RNA (1)...(19): siRNA sense strand
acgcgucgcugguguacga

SEQ ID NO: 361378 - RNA, 19 nt, Homo sapiens
  misc_RNA (1)...(19): siRNA sense strand
gggcaacggcauccugugu

SEQ ID NO: 361379 - RNA, 19 nt, Homo sapiens
  misc_RNA (1)...(19): siRNA sense strand
gcagccaugcagaagauug

SEQ ID NO: 361380 - RNA, 19 nt, Homo sapiens
  misc_RNA (1)...(19): siRNA sense strand
gcgcugcagccauuucuuc

SEQ ID NO: 361381 - RNA, 19 nt, Homo sapiens
  misc_RNA (1)...(19): siRNA sense strand
uguacgacgcggucaagua

SEQ ID NO: 361382 - RNA, 19 nt, Homo sapiens
  misc_RNA (1)...(19): siRNA sense strand
aggaugacuuccaggaguu

SEQ ID NO: 361383 - RNA, 19 nt, Homo sapiens
  misc_RNA (1)...(19): siRNA sense strand
caagaaguuccucaauguc

SEQ ID NO: 361384 - RNA, 19 nt, Homo sapiens
  misc_RNA (1)...(19): siRNA sense strand
gccauuucuuccagaugaa

SEQ ID NO: 361385 - RNA, 19 nt, Homo sapiens
  misc_RNA (1)...(19): siRNA sense strand
ggaugacuuccaggaguuu

SEQ ID NO: 361386 - RNA, 19 nt, Homo sapiens
  misc_RNA (1)...(19): siRNA sense strand
ccugugaccucgagaucuc

SEQ ID NO: 361387 - RNA, 19 nt, Homo sapiens
  misc_RNA (1)...(19): siRNA sense strand
gccacugcccggaaacuga

SEQ ID NO: 361388 - RNA, 19 nt, Homo sapiens
  misc_RNA (1)...(19): siRNA sense strand
uccaggaguuugagaugau

SEQ ID NO: 361389 - RNA, 19 nt, Homo sapiens
  misc_RNA (1)...(19): siRNA sense strand
ccgcaacagcugcuauuuc

SEQ ID NO: 361390 - RNA, 19 nt, Homo sapiens
  misc_RNA (1)...(19): siRNA sense strand
ugagaugaucgaugacaau

SEQ ID NO: 361391 - RNA, 19 nt, Homo sapiens
  misc_RNA (1)...(19): siRNA sense strand
gaucgaugacaaugaagag

SEQ ID NO: 361392 - RNA, 19 nt, Homo sapiens
  misc_RNA (1)...(19): siRNA sense strand
gaugaucgaugacaaugaa

SEQ ID NO: 361393 - RNA, 19 nt, Homo sapiens
  misc_RNA (1)...(19): siRNA sense strand
ccaagaaguuccucaaugu

SEQ ID NO: 361394 - RNA, 19 nt, Homo sapiens
  misc_RNA (1)...(19): siRNA sense strand
ggacagcccugaccucacu

SEQ ID NO: 361395 - RNA, 19 nt, Homo sapiens
  misc_RNA (1)...(19): siRNA sense strand
gcgccuuccuggaguacua

SEQ ID NO: 361396 - RNA, 19 nt, Homo sapiens
  misc_RNA (1)...(19): siRNA sense strand
gaccucacuuucuccaaga

SEQ ID NO: 361397 - RNA, 19 nt, Homo sapiens
  misc_RNA (1)...(19): siRNA sense strand
uccaagaaguuccucaaug

SEQ ID NO: 361398 - RNA, 19 nt, Homo sapiens
  misc_RNA (1)...(19): siRNA sense strand
cgaagaggacgacgaggaa

SEQ ID NO: 361399 - RNA, 19 nt, Homo sapiens
  misc_RNA (1)...(19): siRNA sense strand
aguuugagaugaucgauga

SEQ ID NO: 361400 - RNA, 19 nt, Homo sapiens
  misc_RNA (1)...(19): siRNA sense strand
gauugccacugcccggaaa

SEQ ID NO: 361401 - RNA, 19 nt, Homo sapiens
  misc_RNA (1)...(19): siRNA sense strand
gcccugaccucacuuucuc

SEQ ID NO: 361402 - RNA, 19 nt, Homo sapiens
  misc_RNA (1)...(19): siRNA sense strand
gagaugaucgaugacaaug

SEQ ID NO: 361403 - RNA, 19 nt, Homo sapiens
  misc_RNA (1)...(19): siRNA sense strand
cgcaacagcugcuauuucg

SEQ ID NO: 361404 - RNA, 19 nt, Homo sapiens
  misc_RNA (1)...(19): siRNA sense strand
gcagccauuucuuccagau

SEQ ID NO: 361405 - RNA, 19 nt, Homo sapiens
  misc_RNA (1)...(19): siRNA sense strand
agaaguuccucaaugucuu

SEQ ID NO: 361406 - RNA, 19 nt, Homo sapiens
  misc_RNA (1)...(19): siRNA sense strand
agccauuucuuccagauga

SEQ ID NO: 361407 - RNA, 19 nt, Homo sapiens
  misc_RNA (1)...(19): siRNA sense strand
acacgcuggugguggauga

SEQ ID NO: 361408 - RNA, 19 nt, Homo sapiens
  misc_RNA (1)...(19): siRNA sense strand
uuccagcgcugcagccauu

SEQ ID NO: 361409 - RNA, 19 nt, Homo sapiens
  misc_RNA (1)...(19): siRNA sense strand
acgcgucgcugguguacga

SEQ ID NO: 361410 - RNA, 19 nt, Homo sapiens
  misc_RNA (1)...(19): siRNA sense strand
gggcaacggcauccugugu

SEQ ID NO: 361411 - RNA, 19 nt, Homo sapiens
  misc_RNA (1)...(19): siRNA sense strand
gcagccaugcagaagauug

SEQ ID NO: 361412 - RNA, 19 nt, Homo sapiens
  misc_RNA (1)...(19): siRNA sense strand
gcgcugcagccauuucuuc

SEQ ID NO: 361413 - RNA, 19 nt, Homo sapiens
  misc_RNA (1)...(19): siRNA sense strand
uguacgacgcggucaagua

SEQ ID NO: 361414 - RNA, 19 nt, Homo sapiens
  misc_RNA (1)...(19): siRNA sense strand
aggaugacuuccaggaguu

SEQ ID NO: 361415 - RNA, 19 nt, Homo sapiens
  misc_RNA (1)...(19): siRNA sense strand
caagaaguuccucaauguc

SEQ ID NO: 361416 - RNA, 19 nt, Homo sapiens
  misc_RNA (1)...(19): siRNA sense strand
gccauuucuuccagaugaa

SEQ ID NO: 361417 - RNA, 19 nt, Homo sapiens
  misc_RNA (1)...(19): siRNA sense strand
ggaugacuuccaggaguuu

SEQ ID NO: 361418 - RNA, 19 nt, Homo sapiens
  misc_RNA (1)...(19): siRNA sense strand
ccugugaccucgagaucuc

SEQ ID NO: 361419 - RNA, 19 nt, Homo sapiens
  misc_RNA (1)...(19): siRNA sense strand
gccacugcccggaaacuga

SEQ ID NO: 361420 - RNA, 19 nt, Homo sapiens
  misc_RNA (1)...(19): siRNA sense strand
uccaggaguuugagaugau

SEQ ID NO: 361421 - RNA, 19 nt, Homo sapiens
  misc_RNA (1)...(19): siRNA sense strand
ccgcaacagcugcuauuuc

SEQ ID NO: 361422 - RNA, 19 nt, Homo sapiens
  misc_RNA (1)...(19): siRNA sense strand
ugagaugaucgaugacaau

SEQ ID NO: 361423 - RNA, 19 nt, Homo sapiens
  misc_RNA (1)...(19): siRNA sense strand
gaucgaugacaaugaagag

SEQ ID NO: 361424 - RNA, 19 nt, Homo sapiens
  misc_RNA (1)...(19): siRNA sense strand
gagaauggguguugacaaa

SEQ ID NO: 361425 - RNA, 19 nt, Homo sapiens
  misc_RNA (1)...(19): siRNA sense strand
ugacaaagaucgaacaguu

SEQ ID NO: 361426 - RNA, 19 nt, Homo sapiens
  misc_RNA (1)...(19): siRNA sense strand
gcagaggauuguagacauu

SEQ ID NO: 361427 - RNA, 19 nt, Homo sapiens
  misc_RNA (1)...(19): siRNA sense strand
ggaaagcuacggaacauug

SEQ ID NO: 361428 - RNA, 19 nt, Homo sapiens
  misc_RNA (1)...(19): siRNA sense strand
aaagugaaauuccaagcua

SEQ ID NO: 361429 - RNA, 19 nt, Homo sapiens
  misc_RNA (1)...(19): siRNA sense strand
gaugaaggcuuugugauac

SEQ ID NO: 361430 - RNA, 19 nt, Homo sapiens
  misc_RNA (1)...(19): siRNA sense strand
gaaacuuacuguugaagac

SEQ ID NO: 361431 - RNA, 19 nt, Homo sapiens
  misc_RNA (1)...(19): siRNA sense strand
gaagaaagugaaauuccaa

SEQ ID NO: 361432 - RNA, 19 nt, Homo sapiens
  misc_RNA (1)...(19): siRNA sense strand
agagagggauuucuacuuc

SEQ ID NO: 361433 - RNA, 19 nt, Homo sapiens
  misc_RNA (1)...(19): siRNA sense strand
ggaaaacgacccuguauug

SEQ ID NO: 361434 - RNA, 19 nt, Homo sapiens
  misc_RNA (1)...(19): siRNA sense strand
gaaagcuacggaacauuga

SEQ ID NO: 361435 - RNA, 19 nt, Homo sapiens
  misc_RNA (1)...(19): siRNA sense strand
caaugagucucugcaguug

SEQ ID NO: 361436 - RNA, 19 nt, Homo sapiens
  misc_RNA (1)...(19): siRNA sense strand
gcuguucccuggcuccauu

SEQ ID NO: 361437 - RNA, 19 nt, Homo sapiens
  misc_RNA (1)...(19): siRNA sense strand
guauugaaacuuacuguug

SEQ ID NO: 361438 - RNA, 19 nt, Homo sapiens
  misc_RNA (1)...(19): siRNA sense strand
ggagcaagaagaguauuaa

SEQ ID NO: 361439 - RNA, 19 nt, Homo sapiens
  misc_RNA (1)...(19): siRNA sense strand
cgaggcagcugaguugaug

SEQ ID NO: 361440 - RNA, 19 nt, Homo sapiens
  misc_RNA (1)...(19): siRNA sense strand
agaugaaggcuuugugaua

SEQ ID NO: 361441 - RNA, 19 nt, Homo sapiens
  misc_RNA (1)...(19): siRNA sense strand
gcagugaacguauacucaa

SEQ ID NO: 361442 - RNA, 19 nt, Homo sapiens
  misc_RNA (1)...(19): siRNA sense strand
ugaagaaagugaaauucca

SEQ ID NO: 361443 - RNA, 19 nt, Homo sapiens
  misc_RNA (1)...(19): siRNA sense strand
cgacgaggcagcugaguug

SEQ ID NO: 361444 - RNA, 19 nt, Homo sapiens
  misc_RNA (1)...(19): siRNA sense strand
cagacaaggucaagaaacu

SEQ ID NO: 361445 - RNA, 19 nt, Homo sapiens
  misc_RNA (1)...(19): siRNA sense strand
ugccacagaugaaggcuuu

SEQ ID NO: 361446 - RNA, 19 nt, Homo sapiens
  misc_RNA (1)...(19): siRNA sense strand
gauuguagacauucuguau

SEQ ID NO: 361447 - RNA, 19 nt, Homo sapiens
  misc_RNA (1)...(19): siRNA sense strand
gaccagugauaaccuaagu

SEQ ID NO: 361448 - RNA, 19 nt, Homo sapiens
  misc_RNA (1)...(19): siRNA sense strand
guacauccagaacuucaaa

SEQ ID NO: 361449 - RNA, 19 nt, Homo sapiens
  misc_RNA (1)...(19): siRNA sense strand
ucaaugagucucugcaguu

SEQ ID NO: 361450 - RNA, 19 nt, Homo sapiens
  misc_RNA (1)...(19): siRNA sense strand
ucucugcaguugaaucuga

SEQ ID NO: 361451 - RNA, 19 nt, Homo sapiens
  misc_RNA (1)...(19): siRNA sense strand
uugaagacuuggagaaaga

SEQ ID NO: 361452 - RNA, 19 nt, Homo sapiens
  misc_RNA (1)...(19): siRNA sense strand
aauaauuccuguggacaaa

SEQ ID NO: 361453 - RNA, 19 nt, Homo sapiens
  misc_RNA (1)...(19): siRNA sense strand
gcaguugaaucugacaaag

SEQ ID NO: 361454 - RNA, 19 nt, Homo sapiens
  misc_RNA (1)...(19): siRNA sense strand
gacaaagaucgaacaguug

SEQ ID NO: 361455 - RNA, 19 nt, Homo sapiens
  misc_RNA (1)...(19): siRNA sense strand
guucagugguucaagaagu

SEQ ID NO: 361456 - RNA, 19 nt, Homo sapiens
  misc_RNA (1)...(19): siRNA sense strand
gaauggguguugacaaaau

SEQ ID NO: 361457 - RNA, 19 nt, Homo sapiens
  misc_RNA (1)...(19): siRNA sense strand
gaaagugaaauuccaagcu

SEQ ID NO: 361458 - RNA, 19 nt, Homo sapiens
  misc_RNA (1)...(19): siRNA sense strand
ggaggagcaagaagaguau

SEQ ID NO: 361459 - RNA, 19 nt, Homo sapiens
  misc_RNA (1)...(19): siRNA sense strand
acgaguacauccagaacuu

SEQ ID NO: 361460 - RNA, 19 nt, Homo sapiens
  misc_RNA (1)...(19): siRNA sense strand
cuacggaacauugaauuga

SEQ ID NO: 361461 - RNA, 19 nt, Homo sapiens
  misc_RNA (1)...(19): siRNA sense strand
uaaccuaagucgacaugac

SEQ ID NO: 361462 - RNA, 19 nt, Homo sapiens
  misc_RNA (1)...(19): siRNA sense strand
gcccugguguggugcgaaa

SEQ ID NO: 361463 - RNA, 19 nt, Homo sapiens
  misc_RNA (1)...(19): siRNA sense strand
gcugcguauugucaguuua

SEQ ID NO: 361464 - RNA, 19 nt, Homo sapiens
  misc_RNA (1)...(19): siRNA sense strand
gaacauugaauugauuugc

SEQ ID NO: 361465 - RNA, 19 nt, Homo sapiens
  misc_RNA (1)...(19): siRNA sense strand
gauaaccuaagucgacaug

SEQ ID NO: 361466 - RNA, 19 nt, Homo sapiens
  misc_RNA (1)...(19): siRNA sense strand
gcagcaggucaacguauug

SEQ ID NO: 361467 - RNA, 19 nt, Homo sapiens
  misc_RNA (1)...(19): siRNA sense strand
aagugaaauuccaagcuaa

SEQ ID NO: 361468 - RNA, 19 nt, Homo sapiens
  misc_RNA (1)...(19): siRNA sense strand
gcuuugugauaccugauga

SEQ ID NO: 361469 - RNA, 19 nt, Homo sapiens
  misc_RNA (1)...(19): siRNA sense strand
ggacaaauuaguaaaagga

SEQ ID NO: 361470 - RNA, 19 nt, Homo sapiens
  misc_RNA (1)...(19): siRNA sense strand
guugaagacuuggagaaag

SEQ ID NO: 361471 - RNA, 19 nt, Homo sapiens
  misc_RNA (1)...(19): siRNA sense strand
uuaagagaauggguguuga

SEQ ID NO: 361472 - RNA, 19 nt, Homo sapiens
  misc_RNA (1)...(19): siRNA sense strand
acggaacauugaauugauu

SEQ ID NO: 361473 - RNA, 19 nt, Homo sapiens
  misc_RNA (1)...(19): siRNA sense strand
ugaauaaaccgaagaaacc

SEQ ID NO: 361474 - RNA, 19 nt, Homo sapiens
  misc_RNA (1)...(19): siRNA sense strand
ccgaagaaaccucucacuu

SEQ ID NO: 361475 - RNA, 19 nt, Homo sapiens
  misc_RNA (1)...(19): siRNA sense strand
gcuacggaacauugaauug

SEQ ID NO: 361476 - RNA, 19 nt, Homo sapiens
  misc_RNA (1)...(19): siRNA sense strand
acaagcagguuuuaagaga

SEQ ID NO: 361477 - RNA, 19 nt, Homo sapiens
  misc_RNA (1)...(19): siRNA sense strand
uacggaacauugaauugau

SEQ ID NO: 361478 - RNA, 19 nt, Homo sapiens
  misc_RNA (1)...(19): siRNA sense strand
ugcagcaggucaacguauu

SEQ ID NO: 361479 - RNA, 19 nt, Homo sapiens
  misc_RNA (1)...(19): siRNA sense strand
ccauugccuugaagaaagu

SEQ ID NO: 361480 - RNA, 19 nt, Homo sapiens
  misc_RNA (1)...(19): siRNA sense strand
aggaggagcaagaagagua

SEQ ID NO: 361481 - RNA, 19 nt, Homo sapiens
  misc_RNA (1)...(19): siRNA sense strand
ggcugcguauugucaguuu

SEQ ID NO: 361482 - RNA, 19 nt, Homo sapiens
  misc_RNA (1)...(19): siRNA sense strand
gaguacauccagaacuuca

SEQ ID NO: 361483 - RNA, 19 nt, Homo sapiens
  misc_RNA (1)...(19): siRNA sense strand
augagucucugcaguugaa

SEQ ID NO: 361484 - RNA, 19 nt, Homo sapiens
  misc_RNA (1)...(19): siRNA sense strand
acagaugaaggcuuuguga

SEQ ID NO: 361485 - RNA, 19 nt, Homo sapiens
  misc_RNA (1)...(19): siRNA sense strand
ugaaacuuacuguugaaga

SEQ ID NO: 361486 - RNA, 19 nt, Homo sapiens
  misc_RNA (1)...(19): siRNA sense strand
ggaacauugaauugauuug

SEQ ID NO: 361487 - RNA, 19 nt, Homo sapiens
  misc_RNA (1)...(19): siRNA sense strand
ucggaaagcuacggaacau

SEQ ID NO: 361488 - RNA, 19 nt, Homo sapiens
  misc_RNA (1)...(19): siRNA sense strand
uccauugccuugaagaaag

SEQ ID NO: 361489 - RNA, 19 nt, Homo sapiens
  misc_RNA (1)...(19): siRNA sense strand
cacaggaggagcaagaaga

SEQ ID NO: 361490 - RNA, 19 nt, Homo sapiens
  misc_RNA (1)...(19): siRNA sense strand
gcucaggggcugcguauug

SEQ ID NO: 361491 - RNA, 19 nt, Homo sapiens
  misc_RNA (1)...(19): siRNA sense strand
aaauaauuccuguggacaa

SEQ ID NO: 361492 - RNA, 19 nt, Homo sapiens
  misc_RNA (1)...(19): siRNA sense strand
gcccacaggaggagcaaga

SEQ ID NO: 361493 - RNA, 19 nt, Homo sapiens
  misc_RNA (1)...(19): siRNA sense strand
gaagacuuggagaaagaga

SEQ ID NO: 361494 - RNA, 19 nt, Homo sapiens
  misc_RNA (1)...(19): siRNA sense strand
gaugcagcaggucaacgua

SEQ ID NO: 361495 - RNA, 19 nt, Homo sapiens
  misc_RNA (1)...(19): siRNA sense strand
aggcccaucucaacacaga

SEQ ID NO: 361496 - RNA, 19 nt, Homo sapiens
  misc_RNA (1)...(19): siRNA sense strand
ccagaggcccaucucaaca

SEQ ID NO: 361497 - RNA, 19 nt, Homo sapiens
  misc_RNA (1)...(19): siRNA sense strand
uaagcuagaacacgaguac

SEQ ID NO: 361498 - RNA, 19 nt, Homo sapiens
  misc_RNA (1)...(19): siRNA sense strand
aggagcaagaagaguauua

SEQ ID NO: 361499 - RNA, 19 nt, Homo sapiens
  misc_RNA (1)...(19): siRNA sense strand
ggauuguagacauucugua

SEQ ID NO: 361500 - RNA, 19 nt, Homo sapiens
  misc_RNA (1)...(19): siRNA sense strand
caguugaaucugacaaaga

SEQ ID NO: 361501 - RNA, 19 nt, Homo sapiens
  misc_RNA (1)...(19): siRNA sense strand
gccagacaaggucaagaaa

SEQ ID NO: 361502 - RNA, 19 nt, Homo sapiens
  misc_RNA (1)...(19): siRNA sense strand
ccuguggacaaauuaguaa

SEQ ID NO: 361503 - RNA, 19 nt, Homo sapiens
  misc_RNA (1)...(19): siRNA sense strand
ggcagugaacguauacuca

SEQ ID NO: 361504 - RNA, 19 nt, Homo sapiens
  misc_RNA (1)...(19): siRNA sense strand
caagcagguuuuaagagaa

SEQ ID NO: 361505 - RNA, 19 nt, Homo sapiens
  misc_RNA (1)...(19): siRNA sense strand
gcuagaacacgaguacauc

SEQ ID NO: 361506 - RNA, 19 nt, Homo sapiens
  misc_RNA (1)...(19): siRNA sense strand
ccuugaagaaagugaaauu

SEQ ID NO: 361507 - RNA, 19 nt, Homo sapiens
  misc_RNA (1)...(19): siRNA sense strand
augcuggccuggaucaaug

SEQ ID NO: 361508 - RNA, 19 nt, Homo sapiens
  misc_RNA (1)...(19): siRNA sense strand
cggaacauugaauugauuu

SEQ ID NO: 361509 - RNA, 19 nt, Homo sapiens
  misc_RNA (1)...(19): siRNA sense strand
agugaccagugauaaccua

SEQ ID NO: 361510 - RNA, 19 nt, Homo sapiens
  misc_RNA (1)...(19): siRNA sense strand
uucagugguucaagaaguu

SEQ ID NO: 361511 - RNA, 19 nt, Homo sapiens
  misc_RNA (1)...(19): siRNA sense strand
cguauugucaguuuaugga

SEQ ID NO: 361512 - RNA, 19 nt, Homo sapiens
  misc_RNA (1)...(19): siRNA sense strand
gcucugaauaaaccgaaga

SEQ ID NO: 361513 - RNA, 19 nt, Homo sapiens
  misc_RNA (1)...(19): siRNA sense strand
ggaguucccuuuccucuua

SEQ ID NO: 361514 - RNA, 19 nt, Homo sapiens
  misc_RNA (1)...(19): siRNA sense strand
gaaaucgugucuauguuua

SEQ ID NO: 361515 - RNA, 19 nt, Homo sapiens
  misc_RNA (1)...(19): siRNA sense strand
gcaauuugaugaugcauuu

SEQ ID NO: 361516 - RNA, 19 nt, Homo sapiens
  misc_RNA (1)...(19): siRNA sense strand
gaaaguaaauacacaugga

SEQ ID NO: 361517 - RNA, 19 nt, Homo sapiens
  misc_RNA (1)...(19): siRNA sense strand
gcaaggagcuaauucaucu

SEQ ID NO: 361518 - RNA, 19 nt, Homo sapiens
  misc_RNA (1)...(19): siRNA sense strand
uaacaacacugaucucuuc

SEQ ID NO: 361519 - RNA, 19 nt, Homo sapiens
  misc_RNA (1)...(19): siRNA sense strand
gcagagagcauguuuacaa

SEQ ID NO: 361520 - RNA, 19 nt, Homo sapiens
  misc_RNA (1)...(19): siRNA sense strand
ccagacaucucucuaguga

SEQ ID NO: 361521 - RNA, 19 nt, Homo sapiens
  misc_RNA (1)...(19): siRNA sense strand
gagaccacguuuauacaua

SEQ ID NO: 361522 - RNA, 19 nt, Homo sapiens
  misc_RNA (1)...(19): siRNA sense strand
ggaaugacuccucaguuua

SEQ ID NO: 361523 - RNA, 19 nt, Homo sapiens
  misc_RNA (1)...(19): siRNA sense strand
uaucagacauuauggcuuu

SEQ ID NO: 361524 - RNA, 19 nt, Homo sapiens
  misc_RNA (1)...(19): siRNA sense strand
acaagaaacucuacaacaa

SEQ ID NO: 361525 - RNA, 19 nt, Homo sapiens
  misc_RNA (1)...(19): siRNA sense strand
gagagcauguuuacaaaug

SEQ ID NO: 361526 - RNA, 19 nt, Homo sapiens
  misc_RNA (1)...(19): siRNA sense strand
gaagauuaguguuguuugu

SEQ ID NO: 361527 - RNA, 19 nt, Homo sapiens
  misc_RNA (1)...(19): siRNA sense strand
ucaguugacuacucaguua

SEQ ID NO: 361528 - RNA, 19 nt, Homo sapiens
  misc_RNA (1)...(19): siRNA sense strand
caacacugaucucuucaaa

SEQ ID NO: 361529 - RNA, 19 nt, Homo sapiens
  misc_RNA (1)...(19): siRNA sense strand
ggauaaacauagaacaaga

SEQ ID NO: 361530 - RNA, 19 nt, Homo sapiens
  misc_RNA (1)...(19): siRNA sense strand
gaaaaugacucagaagaaa

SEQ ID NO: 361531 - RNA, 19 nt, Homo sapiens
  misc_RNA (1)...(19): siRNA sense strand
cagaugcacuuuacgaauu

SEQ ID NO: 361532 - RNA, 19 nt, Homo sapiens
  misc_RNA (1)...(19): siRNA sense strand
gaagcucucuuuccacuag

SEQ ID NO: 361533 - RNA, 19 nt, Homo sapiens
  misc_RNA (1)...(19): siRNA sense strand
gcaaagaugaccucacuga

SEQ ID NO: 361534 - RNA, 19 nt, Homo sapiens
  misc_RNA (1)...(19): siRNA sense strand
gagcaaagaugaccucacu

SEQ ID NO: 361535 - RNA, 19 nt, Homo sapiens
  misc_RNA (1)...(19): siRNA sense strand
ggaagaggcuagaugucaa

SEQ ID NO: 361536 - RNA, 19 nt, Homo sapiens
  misc_RNA (1)...(19): siRNA sense strand
uauggcagcuggcuugaua

SEQ ID NO: 361537 - RNA, 19 nt, Homo sapiens
  misc_RNA (1)...(19): siRNA sense strand
cagcauacuucuuucauug

SEQ ID NO: 361538 - RNA, 19 nt, Homo sapiens
  misc_RNA (1)...(19): siRNA sense strand
ggaaaauccuguagaguuu

SEQ ID NO: 361539 - RNA, 19 nt, Homo sapiens
  misc_RNA (1)...(19): siRNA sense strand
ccugggaauugaaguauua

SEQ ID NO: 361540 - RNA, 19 nt, Homo sapiens
  misc_RNA (1)...(19): siRNA sense strand
uggaaugacuccucaguuu

SEQ ID NO: 361541 - RNA, 19 nt, Homo sapiens
  misc_RNA (1)...(19): siRNA sense strand
ggacaagcaucagccacua

SEQ ID NO: 361542 - RNA, 19 nt, Homo sapiens
  misc_RNA (1)...(19): siRNA sense strand
uguaacaucucucaugaaa

SEQ ID NO: 361543 - RNA, 19 nt, Homo sapiens
  misc_RNA (1)...(19): siRNA sense strand
cauuuaaacugcuuucuga

SEQ ID NO: 361544 - RNA, 19 nt, Homo sapiens
  misc_RNA (1)...(19): siRNA sense strand
gaaguggucucccuuugca

SEQ ID NO: 361545 - RNA, 19 nt, Homo sapiens
  misc_RNA (1)...(19): siRNA sense strand
gagcaccguuuauuaggaa

SEQ ID NO: 361546 - RNA, 19 nt, Homo sapiens
  misc_RNA (1)...(19): siRNA sense strand
gguaugcgguucuaagaga

SEQ ID NO: 361547 - RNA, 19 nt, Homo sapiens
  misc_RNA (1)...(19): siRNA sense strand
ucacacauaugacagauuc

SEQ ID NO: 361548 - RNA, 19 nt, Homo sapiens
  misc_RNA (1)...(19): siRNA sense strand
gcuaauucaucuugcauug

SEQ ID NO: 361549 - RNA, 19 nt, Homo sapiens
  misc_RNA (1)...(19): siRNA sense strand
gccaaaggauggaaggaaa

SEQ ID NO: 361550 - RNA, 19 nt, Homo sapiens
  misc_RNA (1)...(19): siRNA sense strand
guauccaguucucuuauaa

SEQ ID NO: 361551 - RNA, 19 nt, Homo sapiens
  misc_RNA (1)...(19): siRNA sense strand
gaagagcuauugguacauc

SEQ ID NO: 361552 - RNA, 19 nt, Homo sapiens
  misc_RNA (1)...(19): siRNA sense strand
gggcgucaauguuguuauu

SEQ ID NO: 361553 - RNA, 19 nt, Homo sapiens
  misc_RNA (1)...(19): siRNA sense strand
ugggauugcuuauacauuu

SEQ ID NO: 361554 - RNA, 19 nt, Homo sapiens
  misc_RNA (1)...(19): siRNA sense strand
ccagauauccugccuaugu

SEQ ID NO: 361555 - RNA, 19 nt, Homo sapiens
  misc_RNA (1)...(19): siRNA sense strand
guuaaggacuucuuucauc

SEQ ID NO: 361556 - RNA, 19 nt, Homo sapiens
  misc_RNA (1)...(19): siRNA sense strand
gaagaaacucagacuaugu

SEQ ID NO: 361557 - RNA, 19 nt, Homo sapiens
  misc_RNA (1)...(19): siRNA sense strand
gcagcuggcuugauauugg

SEQ ID NO: 361558 - RNA, 19 nt, Homo sapiens
  misc_RNA (1)...(19): siRNA sense strand
gaucuugccucugucuauu

SEQ ID NO: 361559 - RNA, 19 nt, Homo sapiens
  misc_RNA (1)...(19): siRNA sense strand
gaugauggaguuaaagaaa

SEQ ID NO: 361560 - RNA, 19 nt, Homo sapiens
  misc_RNA (1)...(19): siRNA sense strand
cgaagaaacucagacuaug

SEQ ID NO: 361561 - RNA, 19 nt, Homo sapiens
  misc_RNA (1)...(19): siRNA sense strand
cagagagcauguuuacaaa

SEQ ID NO: 361562 - RNA, 19 nt, Homo sapiens
  misc_RNA (1)...(19): siRNA sense strand
guaaagaagugaagaaacc

SEQ ID NO: 361563 - RNA, 19 nt, Homo sapiens
  misc_RNA (1)...(19): siRNA sense strand
ccacuaguguugucuuguu

SEQ ID NO: 361564 - RNA, 19 nt, Homo sapiens
  misc_RNA (1)...(19): siRNA sense strand
guuguaacaucucucauga

SEQ ID NO: 361565 - RNA, 19 nt, Homo sapiens
  misc_RNA (1)...(19): siRNA sense strand
aaagaaaucgugucuaugu

SEQ ID NO: 361566 - RNA, 19 nt, Homo sapiens
  misc_RNA (1)...(19): siRNA sense strand
ccauguauguuguguauag

SEQ ID NO: 361567 - RNA, 19 nt, Homo sapiens
  misc_RNA (1)...(19): siRNA sense strand
gaguggagauuggagaauu

SEQ ID NO: 361568 - RNA, 19 nt, Homo sapiens
  misc_RNA (1)...(19): siRNA sense strand
guucuucgccuccaucuuu

SEQ ID NO: 361569 - RNA, 19 nt, Homo sapiens
  misc_RNA (1)...(19): siRNA sense strand
cugaugauguggaagauuu

SEQ ID NO: 361570 - RNA, 19 nt, Homo sapiens
  misc_RNA (1)...(19): siRNA sense strand
gauauugcaccauugauga

SEQ ID NO: 361571 - RNA, 19 nt, Homo sapiens
  misc_RNA (1)...(19): siRNA sense strand
aguaucagcucagcaauuu

SEQ ID NO: 361572 - RNA, 19 nt, Homo sapiens
  misc_RNA (1)...(19): siRNA sense strand
agaugcacuuuacgaauua

SEQ ID NO: 361573 - RNA, 19 nt, Homo sapiens
  misc_RNA (1)...(19): siRNA sense strand
gcuauugguacaucuguua

SEQ ID NO: 361574 - RNA, 19 nt, Homo sapiens
  misc_RNA (1)...(19): siRNA sense strand
ccaaacaguucaacauuuu

SEQ ID NO: 361575 - RNA, 19 nt, Homo sapiens
  misc_RNA (1)...(19): siRNA sense strand
gcccagauauccugccuau

SEQ ID NO: 361576 - RNA, 19 nt, Homo sapiens
  misc_RNA (1)...(19): siRNA sense strand
gaagaugucagugcaguug

SEQ ID NO: 361577 - RNA, 19 nt, Homo sapiens
  misc_RNA (1)...(19): siRNA sense strand
ccagaaacaaccagucuuu

SEQ ID NO: 361578 - RNA, 19 nt, Homo sapiens
  misc_RNA (1)...(19): siRNA sense strand
ccuauuaucacacauauga

SEQ ID NO: 361579 - RNA, 19 nt, Homo sapiens
  misc_RNA (1)...(19): siRNA sense strand
uuaaacugcuuucugauuc

SEQ ID NO: 361580 - RNA, 19 nt, Homo sapiens
  misc_RNA (1)...(19): siRNA sense strand
gcuuugaucuugccucugu

SEQ ID NO: 361581 - RNA, 19 nt, Homo sapiens
  misc_RNA (1)...(19): siRNA sense strand
guaugaagcucucuuucca

SEQ ID NO: 361582 - RNA, 19 nt, Homo sapiens
  misc_RNA (1)...(19): siRNA sense strand
ggaauugaaguauuaguuc

SEQ ID NO: 361583 - RNA, 19 nt, Homo sapiens
  misc_RNA (1)...(19): siRNA sense strand
caaagcagagagcauguuu

SEQ ID NO: 361584 - RNA, 19 nt, Homo sapiens
  misc_RNA (1)...(19): siRNA sense strand
aaaggaagagcuauuggua

SEQ ID NO: 361585 - RNA, 19 nt, Homo sapiens
  misc_RNA (1)...(19): siRNA sense strand
acagaaaguuugaugaagu

SEQ ID NO: 361586 - RNA, 19 nt, Homo sapiens
  misc_RNA (1)...(19): siRNA sense strand
gacuacaagcacaauauua

SEQ ID NO: 361587 - RNA, 19 nt, Homo sapiens
  misc_RNA (1)...(19): siRNA sense strand
caagaaacucuacaacaau

SEQ ID NO: 361588 - RNA, 19 nt, Homo sapiens
  misc_RNA (1)...(19): siRNA sense strand
caaccuaccuacuucuaag

SEQ ID NO: 361589 - RNA, 19 nt, Homo sapiens
  misc_RNA (1)...(19): siRNA sense strand
uaacaucucucaugaaaag

SEQ ID NO: 361590 - RNA, 19 nt, Homo sapiens
  misc_RNA (1)...(19): siRNA sense strand
gcgagaagauuaguguugu

SEQ ID NO: 361591 - RNA, 19 nt, Homo sapiens
  misc_RNA (1)...(19): siRNA sense strand
cagaaaguuugaugaagug

SEQ ID NO: 361592 - RNA, 19 nt, Homo sapiens
  misc_RNA (1)...(19): siRNA sense strand
uccaaacaguucaacauuu

SEQ ID NO: 361593 - RNA, 19 nt, Homo sapiens
  misc_RNA (1)...(19): siRNA sense strand
ccacuucuauggaaaugau

SEQ ID NO: 361594 - RNA, 19 nt, Homo sapiens
  misc_RNA (1)...(19): siRNA sense strand
gcucagcaauuugaugaug

SEQ ID NO: 361595 - RNA, 19 nt, Homo sapiens
  misc_RNA (1)...(19): siRNA sense strand
ucucauuguucucgucaua

SEQ ID NO: 361596 - RNA, 19 nt, Homo sapiens
  misc_RNA (1)...(19): siRNA sense strand
gagaagauuaguguuguuu

SEQ ID NO: 361597 - RNA, 19 nt, Homo sapiens
  misc_RNA (1)...(19): siRNA sense strand
acacugaucucuucaaagc

SEQ ID NO: 361598 - RNA, 19 nt, Homo sapiens
  misc_RNA (1)...(19): siRNA sense strand
ucagagacuuuaacuccuu

SEQ ID NO: 361599 - RNA, 19 nt, Homo sapiens
  misc_RNA (1)...(19): siRNA sense strand
gcaguucaguugacuacuc

SEQ ID NO: 361600 - RNA, 19 nt, Homo sapiens
  misc_RNA (1)...(19): siRNA sense strand
ucacugaguuggacuuucu

SEQ ID NO: 361601 - RNA, 19 nt, Homo sapiens
  misc_RNA (1)...(19): siRNA sense strand
ucuagagcaccguuuauua

SEQ ID NO: 361602 - RNA, 19 nt, Homo sapiens
  misc_RNA (1)...(19): siRNA sense strand
cuacucaguuaucgucaaa

SEQ ID NO: 361603 - RNA, 19 nt, Homo sapiens
  misc_RNA (1)...(19): siRNA sense strand
ccaguucucuuauaauacu

SEQ ID NO: 361604 - RNA, 19 nt, Homo sapiens
  misc_RNA (1)...(19): siRNA sense strand
gaacaagaaacucuacaac

SEQ ID NO: 361605 - RNA, 19 nt, Homo sapiens
  misc_RNA (1)...(19): siRNA sense strand
gcauacuucuuucauugau

SEQ ID NO: 361606 - RNA, 19 nt, Homo sapiens
  misc_RNA (1)...(19): siRNA sense strand
gagacuacaagcacaauau

SEQ ID NO: 361607 - RNA, 19 nt, Homo sapiens
  misc_RNA (1)...(19): siRNA sense strand
aaacggacaugcucaucga

SEQ ID NO: 361608 - RNA, 19 nt, Homo sapiens
  misc_RNA (1)...(19): siRNA sense strand
cgaauuagaugaaaaugga

SEQ ID NO: 361609 - RNA, 19 nt, Homo sapiens
  misc_RNA (1)...(19): siRNA sense strand
cagauauccugccuauguu

SEQ ID NO: 361610 - RNA, 19 nt, Homo sapiens
  misc_RNA (1)...(19): siRNA sense strand
gaugucaaccuaccuacuu

SEQ ID NO: 361611 - RNA, 19 nt, Homo sapiens
  misc_RNA (1)...(19): siRNA sense strand
caaaugcaguacagauucu

SEQ ID NO: 361612 - RNA, 19 nt, Homo sapiens
  misc_RNA (1)...(19): siRNA sense strand
uuaaggacuucuuucauca

SEQ ID NO: 361613 - RNA, 19 nt, Homo sapiens
  misc_RNA (1)...(19): siRNA sense strand
ggaguucccuuuccucuua

SEQ ID NO: 361614 - RNA, 19 nt, Homo sapiens
  misc_RNA (1)...(19): siRNA sense strand
gaaaucgugucuauguuua

SEQ ID NO: 361615 - RNA, 19 nt, Homo sapiens
  misc_RNA (1)...(19): siRNA sense strand
gcaauuugaugaugcauuu

SEQ ID NO: 361616 - RNA, 19 nt, Homo sapiens
  misc_RNA (1)...(19): siRNA sense strand
gaaaguaaauacacaugga

SEQ ID NO: 361617 - RNA, 19 nt, Homo sapiens
  misc_RNA (1)...(19): siRNA sense strand
gcaaggagcuaauucaucu

SEQ ID NO: 361618 - RNA, 19 nt, Homo sapiens
  misc_RNA (1)...(19): siRNA sense strand
uaacaacacugaucucuuc

SEQ ID NO: 361619 - RNA, 19 nt, Homo sapiens
  misc_RNA (1)...(19): siRNA sense strand
gcagagagcauguuuacaa

SEQ ID NO: 361620 - RNA, 19 nt, Homo sapiens
  misc_RNA (1)...(19): siRNA sense strand
ccagacaucucucuaguga

SEQ ID NO: 361621 - RNA, 19 nt, Homo sapiens
  misc_RNA (1)...(19): siRNA sense strand
gagaccacguuuauacaua

SEQ ID NO: 361622 - RNA, 19 nt, Homo sapiens
  misc_RNA (1)...(19): siRNA sense strand
ggaaugacuccucaguuua

SEQ ID NO: 361623 - RNA, 19 nt, Homo sapiens
  misc_RNA (1)...(19): siRNA sense strand
uaucagacauuauggcuuu

SEQ ID NO: 361624 - RNA, 19 nt, Homo sapiens
  misc_RNA (1)...(19): siRNA sense strand
acaagaaacucuacaacaa

SEQ ID NO: 361625 - RNA, 19 nt, Homo sapiens
  misc_RNA (1)...(19): siRNA sense strand
gagagcauguuuacaaaug

SEQ ID NO: 361626 - RNA, 19 nt, Homo sapiens
  misc_RNA (1)...(19): siRNA sense strand
gaagauuaguguuguuugu

SEQ ID NO: 361627 - RNA, 19 nt, Homo sapiens
  misc_RNA (1)...(19): siRNA sense strand
ucaguugacuacucaguua

SEQ ID NO: 361628 - RNA, 19 nt, Homo sapiens
  misc_RNA (1)...(19): siRNA sense strand
caacacugaucucuucaaa

SEQ ID NO: 361629 - RNA, 19 nt, Homo sapiens
  misc_RNA (1)...(19): siRNA sense strand
ggauaaacauagaacaaga

SEQ ID NO: 361630 - RNA, 19 nt, Homo sapiens
  misc_RNA (1)...(19): siRNA sense strand
gaaaaugacucagaagaaa

SEQ ID NO: 361631 - RNA, 19 nt, Homo sapiens
  misc_RNA (1)...(19): siRNA sense strand
cagaugcacuuuacgaauu

SEQ ID NO: 361632 - RNA, 19 nt, Homo sapiens
  misc_RNA (1)...(19): siRNA sense strand
gaagcucucuuuccacuag

SEQ ID NO: 361633 - RNA, 19 nt, Homo sapiens
  misc_RNA (1)...(19): siRNA sense strand
gcaaagaugaccucacuga

SEQ ID NO: 361634 - RNA, 19 nt, Homo sapiens
  misc_RNA (1)...(19): siRNA sense strand
gagcaaagaugaccucacu

SEQ ID NO: 361635 - RNA, 19 nt, Homo sapiens
  misc_RNA (1)...(19): siRNA sense strand
ggaagaggcuagaugucaa

SEQ ID NO: 361636 - RNA, 19 nt, Homo sapiens
  misc_RNA (1)...(19): siRNA sense strand
uauggcagcuggcuugaua

SEQ ID NO: 361637 - RNA, 19 nt, Homo sapiens
  misc_RNA (1)...(19): siRNA sense strand
cagcauacuucuuucauug

SEQ ID NO: 361638 - RNA, 19 nt, Homo sapiens
  misc_RNA (1)...(19): siRNA sense strand
ggaaaauccuguagaguuu

SEQ ID NO: 361639 - RNA, 19 nt, Homo sapiens
  misc_RNA (1)...(19): siRNA sense strand
ccugggaauugaaguauua

SEQ ID NO: 361640 - RNA, 19 nt, Homo sapiens
  misc_RNA (1)...(19): siRNA sense strand
uggaaugacuccucaguuu

SEQ ID NO: 361641 - RNA, 19 nt, Homo sapiens
  misc_RNA (1)...(19): siRNA sense strand
ggacaagcaucagccacua

SEQ ID NO: 361642 - RNA, 19 nt, Homo sapiens
  misc_RNA (1)...(19): siRNA sense strand
uguaacaucucucaugaaa

SEQ ID NO: 361643 - RNA, 19 nt, Homo sapiens
  misc_RNA (1)...(19): siRNA sense strand
cauuuaaacugcuuucuga

SEQ ID NO: 361644 - RNA, 19 nt, Homo sapiens
  misc_RNA (1)...(19): siRNA sense strand
gaaguggucucccuuugca

SEQ ID NO: 361645 - RNA, 19 nt, Homo sapiens
  misc_RNA (1)...(19): siRNA sense strand
gagcaccguuuauuaggaa

SEQ ID NO: 361646 - RNA, 19 nt, Homo sapiens
  misc_RNA (1)...(19): siRNA sense strand
gguaugcgguucuaagaga

SEQ ID NO: 361647 - RNA, 19 nt, Homo sapiens
  misc_RNA (1)...(19): siRNA sense strand
ucacacauaugacagauuc

SEQ ID NO: 361648 - RNA, 19 nt, Homo sapiens
  misc_RNA (1)...(19): siRNA sense strand
gcuaauucaucuugcauug

SEQ ID NO: 361649 - RNA, 19 nt, Homo sapiens
  misc_RNA (1)...(19): siRNA sense strand
gccaaaggauggaaggaaa

SEQ ID NO: 361650 - RNA, 19 nt, Homo sapiens
  misc_RNA (1)...(19): siRNA sense strand
guauccaguucucuuauaa

SEQ ID NO: 361651 - RNA, 19 nt, Homo sapiens
  misc_RNA (1)...(19): siRNA sense strand
gaagagcuauugguacauc

SEQ ID NO: 361652 - RNA, 19 nt, Homo sapiens
  misc_RNA (1)...(19): siRNA sense strand
gggcgucaauguuguuauu

SEQ ID NO: 361653 - RNA, 19 nt, Homo sapiens
  misc_RNA (1)...(19): siRNA sense strand
ugggauugcuuauacauuu

SEQ ID NO: 361654 - RNA, 19 nt, Homo sapiens
  misc_RNA (1)...(19): siRNA sense strand
ccagauauccugccuaugu

SEQ ID NO: 361655 - RNA, 19 nt, Homo sapiens
  misc_RNA (1)...(19): siRNA sense strand
guuaaggacuucuuucauc

SEQ ID NO: 361656 - RNA, 19 nt, Homo sapiens
  misc_RNA (1)...(19): siRNA sense strand
gaagaaacucagacuaugu

SEQ ID NO: 361657 - RNA, 19 nt, Homo sapiens
  misc_RNA (1)...(19): siRNA sense strand
gcagcuggcuugauauugg

SEQ ID NO: 361658 - RNA, 19 nt, Homo sapiens
  misc_RNA (1)...(19): siRNA sense strand
gaucuugccucugucuauu

SEQ ID NO: 361659 - RNA, 19 nt, Homo sapiens
  misc_RNA (1)...(19): siRNA sense strand
gaugauggaguuaaagaaa

SEQ ID NO: 361660 - RNA, 19 nt, Homo sapiens
  misc_RNA (1)...(19): siRNA sense strand
cgaagaaacucagacuaug

SEQ ID NO: 361661 - RNA, 19 nt, Homo sapiens
  misc_RNA (1)...(19): siRNA sense strand
cagagagcauguuuacaaa

SEQ ID NO: 361662 - RNA, 19 nt, Homo sapiens
  misc_RNA (1)...(19): siRNA sense strand
guaaagaagugaagaaacc

SEQ ID NO: 361663 - RNA, 19 nt, Homo sapiens
  misc_RNA (1)...(19): siRNA sense strand
ccacuaguguugucuuguu

SEQ ID NO: 361664 - RNA, 19 nt, Homo sapiens
  misc_RNA (1)...(19): siRNA sense strand
guuguaacaucucucauga

SEQ ID NO: 361665 - RNA, 19 nt, Homo sapiens
  misc_RNA (1)...(19): siRNA sense strand
aaagaaaucgugucuaugu

SEQ ID NO: 361666 - RNA, 19 nt, Homo sapiens
  misc_RNA (1)...(19): siRNA sense strand
ccauguauguuguguauag

SEQ ID NO: 361667 - RNA, 19 nt, Homo sapiens
  misc_RNA (1)...(19): siRNA sense strand
gaguggagauuggagaauu

SEQ ID NO: 361668 - RNA, 19 nt, Homo sapiens
  misc_RNA (1)...(19): siRNA sense strand
guucuucgccuccaucuuu

SEQ ID NO: 361669 - RNA, 19 nt, Homo sapiens
  misc_RNA (1)...(19): siRNA sense strand
cugaugauguggaagauuu

SEQ ID NO: 361670 - RNA, 19 nt, Homo sapiens
  misc_RNA (1)...(19): siRNA sense strand
gauauugcaccauugauga

SEQ ID NO: 361671 - RNA, 19 nt, Homo sapiens
  misc_RNA (1)...(19): siRNA sense strand
aguaucagcucagcaauuu

SEQ ID NO: 361672 - RNA, 19 nt, Homo sapiens
  misc_RNA (1)...(19): siRNA sense strand
agaugcacuuuacgaauua

SEQ ID NO: 361673 - RNA, 19 nt, Homo sapiens
  misc_RNA (1)...(19): siRNA sense strand
gcuauugguacaucuguua

SEQ ID NO: 361674 - RNA, 19 nt, Homo sapiens
  misc_RNA (1)...(19): siRNA sense strand
ccaaacaguucaacauuuu

SEQ ID NO: 361675 - RNA, 19 nt, Homo sapiens
  misc_RNA (1)...(19): siRNA sense strand
gcccagauauccugccuau

SEQ ID NO: 361676 - RNA, 19 nt, Homo sapiens
  misc_RNA (1)...(19): siRNA sense strand
gaagaugucagugcaguug

SEQ ID NO: 361677 - RNA, 19 nt, Homo sapiens
  misc_RNA (1)...(19): siRNA sense strand
ccagaaacaaccagucuuu

SEQ ID NO: 361678 - RNA, 19 nt, Homo sapiens
  misc_RNA (1)...(19): siRNA sense strand
ccuauuaucacacauauga

SEQ ID NO: 361679 - RNA, 19 nt, Homo sapiens
  misc_RNA (1)...(19): siRNA sense strand
uuaaacugcuuucugauuc

SEQ ID NO: 361680 - RNA, 19 nt, Homo sapiens
  misc_RNA (1)...(19): siRNA sense strand
gcuuugaucuugccucugu

SEQ ID NO: 361681 - RNA, 19 nt, Homo sapiens
  misc_RNA (1)...(19): siRNA sense strand
guaugaagcucucuuucca

SEQ ID NO: 361682 - RNA, 19 nt, Homo sapiens
  misc_RNA (1)...(19): siRNA sense strand
ggaauugaaguauuaguuc

SEQ ID NO: 361683 - RNA, 19 nt, Homo sapiens
  misc_RNA (1)...(19): siRNA sense strand
caaagcagagagcauguuu

SEQ ID NO: 361684 - RNA, 19 nt, Homo sapiens
  misc_RNA (1)...(19): siRNA sense strand
aaaggaagagcuauuggua

SEQ ID NO: 361685 - RNA, 19 nt, Homo sapiens
  misc_RNA (1)...(19): siRNA sense strand
acagaaaguuugaugaagu

SEQ ID NO: 361686 - RNA, 19 nt, Homo sapiens
  misc_RNA (1)...(19): siRNA sense strand
gacuacaagcacaauauua

SEQ ID NO: 361687 - RNA, 19 nt, Homo sapiens
  misc_RNA (1)...(19): siRNA sense strand
caagaaacucuacaacaau

SEQ ID NO: 361688 - RNA, 19 nt, Homo sapiens
  misc_RNA (1)...(19): siRNA sense strand
caaccuaccuacuucuaag

SEQ ID NO: 361689 - RNA, 19 nt, Homo sapiens
  misc_RNA (1)...(19): siRNA sense strand
uaacaucucucaugaaaag

SEQ ID NO: 361690 - RNA, 19 nt, Homo sapiens
  misc_RNA (1)...(19): siRNA sense strand
gcgagaagauuaguguugu

SEQ ID NO: 361691 - RNA, 19 nt, Homo sapiens
  misc_RNA (1)...(19): siRNA sense strand
cagaaaguuugaugaagug

SEQ ID NO: 361692 - RNA, 19 nt, Homo sapiens
  misc_RNA (1)...(19): siRNA sense strand
uccaaacaguucaacauuu

SEQ ID NO: 361693 - RNA, 19 nt, Homo sapiens
  misc_RNA (1)...(19): siRNA sense strand
ccacuucuauggaaaugau

SEQ ID NO: 361694 - RNA, 19 nt, Homo sapiens
  misc_RNA (1)...(19): siRNA sense strand
gcucagcaauuugaugaug

SEQ ID NO: 361695 - RNA, 19 nt, Homo sapiens
  misc_RNA (1)...(19): siRNA sense strand
ucucauuguucucgucaua

SEQ ID NO: 361696 - RNA, 19 nt, Homo sapiens
  misc_RNA (1)...(19): siRNA sense strand
gagaagauuaguguuguuu

SEQ ID NO: 361697 - RNA, 19 nt, Homo sapiens
  misc_RNA (1)...(19): siRNA sense strand
acacugaucucuucaaagc

SEQ ID NO: 361698 - RNA, 19 nt, Homo sapiens
  misc_RNA (1)...(19): siRNA sense strand
ucagagacuuuaacuccuu

SEQ ID NO: 361699 - RNA, 19 nt, Homo sapiens
  misc_RNA (1)...(19): siRNA sense strand
gcaguucaguugacuacuc

SEQ ID NO: 361700 - RNA, 19 nt, Homo sapiens
  misc_RNA (1)...(19): siRNA sense strand
ucacugaguuggacuuucu

SEQ ID NO: 361701 - RNA, 19 nt, Homo sapiens
  misc_RNA (1)...(19): siRNA sense strand
ucuagagcaccguuuauua

SEQ ID NO: 361702 - RNA, 19 nt, Homo sapiens
  misc_RNA (1)...(19): siRNA sense strand
cuacucaguuaucgucaaa

SEQ ID NO: 361703 - RNA, 19 nt, Homo sapiens
  misc_RNA (1)...(19): siRNA sense strand
ccaguucucuuauaauacu

SEQ ID NO: 361704 - RNA, 19 nt, Homo sapiens
  misc_RNA (1)...(19): siRNA sense strand
gaacaagaaacucuacaac

SEQ ID NO: 361705 - RNA, 19 nt, Homo sapiens
  misc_RNA (1)...(19): siRNA sense strand
gcauacuucuuucauugau

SEQ ID NO: 361706 - RNA, 19 nt, Homo sapiens
  misc_RNA (1)...(19): siRNA sense strand
gagacuacaagcacaauau

SEQ ID NO: 361707 - RNA, 19 nt, Homo sapiens
  misc_RNA (1)...(19): siRNA sense strand
aaacggacaugcucaucga

SEQ ID NO: 361708 - RNA, 19 nt, Homo sapiens
  misc_RNA (1)...(19): siRNA sense strand
cgaauuagaugaaaaugga

SEQ ID NO: 361709 - RNA, 19 nt, Homo sapiens
  misc_RNA (1)...(19): siRNA sense strand
cagauauccugccuauguu

SEQ ID NO: 361710 - RNA, 19 nt, Homo sapiens
  misc_RNA (1)...(19): siRNA sense strand
gaugucaaccuaccuacuu

SEQ ID NO: 361711 - RNA, 19 nt, Homo sapiens
  misc_RNA (1)...(19): siRNA sense strand
caaaugcaguacagauucu

SEQ ID NO: 361712 - RNA, 19 nt, Homo sapiens
  misc_RNA (1)...(19): siRNA sense strand
uuaaggacuucuuucauca

SEQ ID NO: 361713 - RNA, 19 nt, Homo sapiens
  misc_RNA (1)...(19): siRNA sense strand
gaggaaccauuuauguauu

SEQ ID NO: 361714 - RNA, 19 nt, Homo sapiens
  misc_RNA (1)...(19): siRNA sense strand
uaaggugguugaacucuuu

SEQ ID NO: 361715 - RNA, 19 nt, Homo sapiens
  misc_RNA (1)...(19): siRNA sense strand
gaaauaccuuuaccgaagu

SEQ ID NO: 361716 - RNA, 19 nt, Homo sapiens
  misc_RNA (1)...(19): siRNA sense strand
ggaggaaccauuuauguau

SEQ ID NO: 361717 - RNA, 19 nt, Homo sapiens
  misc_RNA (1)...(19): siRNA sense strand
cagcauggauuuauggaau

SEQ ID NO: 361718 - RNA, 19 nt, Homo sapiens
  misc_RNA (1)...(19): siRNA sense strand
gcuaugaacaugcugcuaa

SEQ ID NO: 361719 - RNA, 19 nt, Homo sapiens
  misc_RNA (1)...(19): siRNA sense strand
aaagauaacagcauggauu

SEQ ID NO: 361720 - RNA, 19 nt, Homo sapiens
  misc_RNA (1)...(19): siRNA sense strand
ucucauaugcguugguuua

SEQ ID NO: 361721 - RNA, 19 nt, Homo sapiens
  misc_RNA (1)...(19): siRNA sense strand
acacacgcauuccucauug

SEQ ID NO: 361722 - RNA, 19 nt, Homo sapiens
  misc_RNA (1)...(19): siRNA sense strand
ugaacaugcugcuaacugu

SEQ ID NO: 361723 - RNA, 19 nt, Homo sapiens
  misc_RNA (1)...(19): siRNA sense strand
cauaugcguugguuuaucu

SEQ ID NO: 361724 - RNA, 19 nt, Homo sapiens
  misc_RNA (1)...(19): siRNA sense strand
cuucauugcugcuucuuau

SEQ ID NO: 361725 - RNA, 19 nt, Homo sapiens
  misc_RNA (1)...(19): siRNA sense strand
gcagcuggaggaaccauuu

SEQ ID NO: 361726 - RNA, 19 nt, Homo sapiens
  misc_RNA (1)...(19): siRNA sense strand
ucugaugacugcugggaaa

SEQ ID NO: 361727 - RNA, 19 nt, Homo sapiens
  misc_RNA (1)...(19): siRNA sense strand
gcuccaugguuaaaucuuc

SEQ ID NO: 361728 - RNA, 19 nt, Homo sapiens
  misc_RNA (1)...(19): siRNA sense strand
ccaucgagcuccagccaau

SEQ ID NO: 361729 - RNA, 19 nt, Homo sapiens
  misc_RNA (1)...(19): siRNA sense strand
aauauaaggugguugaacu

SEQ ID NO: 361730 - RNA, 19 nt, Homo sapiens
  misc_RNA (1)...(19): siRNA sense strand
gugcauuacuacgccauuu

SEQ ID NO: 361731 - RNA, 19 nt, Homo sapiens
  misc_RNA (1)...(19): siRNA sense strand
uggaggaaccauuuaugua

SEQ ID NO: 361732 - RNA, 19 nt, Homo sapiens
  misc_RNA (1)...(19): siRNA sense strand
ugacaucaaugaacaacac

SEQ ID NO: 361733 - RNA, 19 nt, Homo sapiens
  misc_RNA (1)...(19): siRNA sense strand
guggugacaucaaugaaca

SEQ ID NO: 361734 - RNA, 19 nt, Homo sapiens
  misc_RNA (1)...(19): siRNA sense strand
aagauaacagcauggauuu

SEQ ID NO: 361735 - RNA, 19 nt, Homo sapiens
  misc_RNA (1)...(19): siRNA sense strand
ucuacaguauuucacauug

SEQ ID NO: 361736 - RNA, 19 nt, Homo sapiens
  misc_RNA (1)...(19): siRNA sense strand
guuaaaucuucgugaacuu

SEQ ID NO: 361737 - RNA, 19 nt, Homo sapiens
  misc_RNA (1)...(19): siRNA sense strand
gguuaaaucuucgugaacu

SEQ ID NO: 361738 - RNA, 19 nt, Homo sapiens
  misc_RNA (1)...(19): siRNA sense strand
cuacaguauuucacauugu

SEQ ID NO: 361739 - RNA, 19 nt, Homo sapiens
  misc_RNA (1)...(19): siRNA sense strand
ggaaccauuuauguauuuc

SEQ ID NO: 361740 - RNA, 19 nt, Homo sapiens
  misc_RNA (1)...(19): siRNA sense strand
uuacuacgccauuuggaaa

SEQ ID NO: 361741 - RNA, 19 nt, Homo sapiens
  misc_RNA (1)...(19): siRNA sense strand
caucucauaugcguugguu

SEQ ID NO: 361742 - RNA, 19 nt, Homo sapiens
  misc_RNA (1)...(19): siRNA sense strand
gggacucugugcccucuuc

SEQ ID NO: 361743 - RNA, 19 nt, Homo sapiens
  misc_RNA (1)...(19): siRNA sense strand
ccaacuugcuaugaacaug

SEQ ID NO: 361744 - RNA, 19 nt, Homo sapiens
  misc_RNA (1)...(19): siRNA sense strand
uaacagcauggauuuaugg

SEQ ID NO: 361745 - RNA, 19 nt, Homo sapiens
  misc_RNA (1)...(19): siRNA sense strand
cagcuggaggaaccauuua

SEQ ID NO: 361746 - RNA, 19 nt, Homo sapiens
  misc_RNA (1)...(19): siRNA sense strand
caugugugauagaaugguu

SEQ ID NO: 361747 - RNA, 19 nt, Homo sapiens
  misc_RNA (1)...(19): siRNA sense strand
gcauggauuuauggaaugg

SEQ ID NO: 361748 - RNA, 19 nt, Homo sapiens
  misc_RNA (1)...(19): siRNA sense strand
gagcauuguuuucacaugu

SEQ ID NO: 361749 - RNA, 19 nt, Homo sapiens
  misc_RNA (1)...(19): siRNA sense strand
ucacauuguaucauggaaa

SEQ ID NO: 361750 - RNA, 19 nt, Homo sapiens
  misc_RNA (1)...(19): siRNA sense strand
gcuugggaguuguguucuu

SEQ ID NO: 361751 - RNA, 19 nt, Homo sapiens
  misc_RNA (1)...(19): siRNA sense strand
gauuccagcgguucaugaa

SEQ ID NO: 361752 - RNA, 19 nt, Homo sapiens
  misc_RNA (1)...(19): siRNA sense strand
uaugcuccaugguuaaauc

SEQ ID NO: 361753 - RNA, 19 nt, Homo sapiens
  misc_RNA (1)...(19): siRNA sense strand
gaaaagauaacagcaugga

SEQ ID NO: 361754 - RNA, 19 nt, Homo sapiens
  misc_RNA (1)...(19): siRNA sense strand
gcuggaggaaccauuuaug

SEQ ID NO: 361755 - RNA, 19 nt, Homo sapiens
  misc_RNA (1)...(19): siRNA sense strand
cacacacgcauuccucauu

SEQ ID NO: 361756 - RNA, 19 nt, Homo sapiens
  misc_RNA (1)...(19): siRNA sense strand
gcauuacuacgccauuugg

SEQ ID NO: 361757 - RNA, 19 nt, Homo sapiens
  misc_RNA (1)...(19): siRNA sense strand
uucuuaugcuccaugguua

SEQ ID NO: 361758 - RNA, 19 nt, Homo sapiens
  misc_RNA (1)...(19): siRNA sense strand
ucauaugcguugguuuauc

SEQ ID NO: 361759 - RNA, 19 nt, Homo sapiens
  misc_RNA (1)...(19): siRNA sense strand
agauaacagcauggauuua

SEQ ID NO: 361760 - RNA, 19 nt, Homo sapiens
  misc_RNA (1)...(19): siRNA sense strand
gaugacugcugggaaaaga

SEQ ID NO: 361761 - RNA, 19 nt, Homo sapiens
  misc_RNA (1)...(19): siRNA sense strand
cacauuguaucauggaaaa

SEQ ID NO: 361762 - RNA, 19 nt, Homo sapiens
  misc_RNA (1)...(19): siRNA sense strand
cuucuuaugcuccaugguu

SEQ ID NO: 361763 - RNA, 19 nt, Homo sapiens
  misc_RNA (1)...(19): siRNA sense strand
auaaggugguugaacucuu

SEQ ID NO: 361764 - RNA, 19 nt, Homo sapiens
  misc_RNA (1)...(19): siRNA sense strand
uuaaaucuucgugaacuug

SEQ ID NO: 361765 - RNA, 19 nt, Homo sapiens
  misc_RNA (1)...(19): siRNA sense strand
cagccuugguggugacauc

SEQ ID NO: 361766 - RNA, 19 nt, Homo sapiens
  misc_RNA (1)...(19): siRNA sense strand
auguauuucucuaccauga

SEQ ID NO: 361767 - RNA, 19 nt, Homo sapiens
  misc_RNA (1)...(19): siRNA sense strand
ggacagacuuucuacuaug

SEQ ID NO: 361768 - RNA, 19 nt, Homo sapiens
  misc_RNA (1)...(19): siRNA sense strand
gcccugagcuccaaagaga

SEQ ID NO: 361769 - RNA, 19 nt, Homo sapiens
  misc_RNA (1)...(19): siRNA sense strand
gcaggaggcuauacuucaa

SEQ ID NO: 361770 - RNA, 19 nt, Homo sapiens
  misc_RNA (1)...(19): siRNA sense strand
gaaauucugggucuugaaa

SEQ ID NO: 361771 - RNA, 19 nt, Homo sapiens
  misc_RNA (1)...(19): siRNA sense strand
gggacagacuuucuacuau

SEQ ID NO: 361772 - RNA, 19 nt, Homo sapiens
  misc_RNA (1)...(19): siRNA sense strand
acagaacagucgaaccuuu

SEQ ID NO: 361773 - RNA, 19 nt, Homo sapiens
  misc_RNA (1)...(19): siRNA sense strand
gaaaggaguguauucaacu

SEQ ID NO: 361774 - RNA, 19 nt, Homo sapiens
  misc_RNA (1)...(19): siRNA sense strand
ggcuauacuucaaauccua

SEQ ID NO: 361775 - RNA, 19 nt, Homo sapiens
  misc_RNA (1)...(19): siRNA sense strand
caacagaacagucgaaccu

SEQ ID NO: 361776 - RNA, 19 nt, Homo sapiens
  misc_RNA (1)...(19): siRNA sense strand
ccaaagagaacuaccaaaa

SEQ ID NO: 361777 - RNA, 19 nt, Homo sapiens
  misc_RNA (1)...(19): siRNA sense strand
gggagggacagacuuucua

SEQ ID NO: 361778 - RNA, 19 nt, Homo sapiens
  misc_RNA (1)...(19): siRNA sense strand
ucaugucaauggcaacaga

SEQ ID NO: 361779 - RNA, 19 nt, Homo sapiens
  misc_RNA (1)...(19): siRNA sense strand
gacagacuuucuacuaugc

SEQ ID NO: 361780 - RNA, 19 nt, Homo sapiens
  misc_RNA (1)...(19): siRNA sense strand
ggaaauucugggucuugaa

SEQ ID NO: 361781 - RNA, 19 nt, Homo sapiens
  misc_RNA (1)...(19): siRNA sense strand
gcaacucggccucgaacau

SEQ ID NO: 361782 - RNA, 19 nt, Homo sapiens
  misc_RNA (1)...(19): siRNA sense strand
gagcugaaaggaaauucug

SEQ ID NO: 361783 - RNA, 19 nt, Homo sapiens
  misc_RNA (1)...(19): siRNA sense strand
ggaacgaccauggcacuca

SEQ ID NO: 361784 - RNA, 19 nt, Homo sapiens
  misc_RNA (1)...(19): siRNA sense strand
agccagaacacaugaguuu

SEQ ID NO: 361785 - RNA, 19 nt, Homo sapiens
  misc_RNA (1)...(19): siRNA sense strand
cagcaguaccugagcaaga

SEQ ID NO: 361786 - RNA, 19 nt, Homo sapiens
  misc_RNA (1)...(19): siRNA sense strand
ggucuugaaaggaguguau

SEQ ID NO: 361787 - RNA, 19 nt, Homo sapiens
  misc_RNA (1)...(19): siRNA sense strand
guaccagccagaacacaug

SEQ ID NO: 361788 - RNA, 19 nt, Homo sapiens
  misc_RNA (1)...(19): siRNA sense strand
uauuuggaaugggauguuu

SEQ ID NO: 361789 - RNA, 19 nt, Homo sapiens
  misc_RNA (1)...(19): siRNA sense strand
agcaguaccugagcaagaa

SEQ ID NO: 361790 - RNA, 19 nt, Homo sapiens
  misc_RNA (1)...(19): siRNA sense strand
cagaacagucgaaccuuuc

SEQ ID NO: 361791 - RNA, 19 nt, Homo sapiens
  misc_RNA (1)...(19): siRNA sense strand
agggacagacuuucuacua

SEQ ID NO: 361792 - RNA, 19 nt, Homo sapiens
  misc_RNA (1)...(19): siRNA sense strand
caacucggccucgaacauc

SEQ ID NO: 361793 - RNA, 19 nt, Homo sapiens
  misc_RNA (1)...(19): siRNA sense strand
aaagagaacuaccaaaagg

SEQ ID NO: 361794 - RNA, 19 nt, Homo sapiens
  misc_RNA (1)...(19): siRNA sense strand
acacaugaguuuugaggaa

SEQ ID NO: 361795 - RNA, 19 nt, Homo sapiens
  misc_RNA (1)...(19): siRNA sense strand
aagacuaccaccagcagua

SEQ ID NO: 361796 - RNA, 19 nt, Homo sapiens
  misc_RNA (1)...(19): siRNA sense strand
aaacuggccaugcagaagu

SEQ ID NO: 361797 - RNA, 19 nt, Homo sapiens
  misc_RNA (1)...(19): siRNA sense strand
cagaacacaugaguuuuga

SEQ ID NO: 361798 - RNA, 19 nt, Homo sapiens
  misc_RNA (1)...(19): siRNA sense strand
ggagggacagacuuucuac

SEQ ID NO: 361799 - RNA, 19 nt, Homo sapiens
  misc_RNA (1)...(19): siRNA sense strand
aaaggaaauucugggucuu

SEQ ID NO: 361800 - RNA, 19 nt, Homo sapiens
  misc_RNA (1)...(19): siRNA sense strand
aggaaauucugggucuuga

SEQ ID NO: 361801 - RNA, 19 nt, Homo sapiens
  misc_RNA (1)...(19): siRNA sense strand
cgaccucugccaagcaaau

SEQ ID NO: 361802 - RNA, 19 nt, Homo sapiens
  misc_RNA (1)...(19): siRNA sense strand
gcacacaucuucagacaug

SEQ ID NO: 361803 - RNA, 19 nt, Homo sapiens
  misc_RNA (1)...(19): siRNA sense strand
gaacggagaggugguguua

SEQ ID NO: 361804 - RNA, 19 nt, Homo sapiens
  misc_RNA (1)...(19): siRNA sense strand
gcucuuuggugaaggauua

SEQ ID NO: 361805 - RNA, 19 nt, Homo sapiens
  misc_RNA (1)...(19): siRNA sense strand
ccaaggagcuguucaacga

SEQ ID NO: 361806 - RNA, 19 nt, Homo sapiens
  misc_RNA (1)...(19): siRNA sense strand
caaggaauguaguaagaaa

SEQ ID NO: 361807 - RNA, 19 nt, Homo sapiens
  misc_RNA (1)...(19): siRNA sense strand
gaaaugugauaccucaaag

SEQ ID NO: 361808 - RNA, 19 nt, Homo sapiens
  misc_RNA (1)...(19): siRNA sense strand
gcuggaggcucuucaggaa

SEQ ID NO: 361809 - RNA, 19 nt, Homo sapiens
  misc_RNA (1)...(19): siRNA sense strand
gcuggaggaugcuuaaaug

SEQ ID NO: 361810 - RNA, 19 nt, Homo sapiens
  misc_RNA (1)...(19): siRNA sense strand
gaaacaaagacuuccaaga

SEQ ID NO: 361811 - RNA, 19 nt, Homo sapiens
  misc_RNA (1)...(19): siRNA sense strand
cgaaacauccagaacauga

SEQ ID NO: 361812 - RNA, 19 nt, Homo sapiens
  misc_RNA (1)...(19): siRNA sense strand
gaggaaggaguccaacuuu

SEQ ID NO: 361813 - RNA, 19 nt, Homo sapiens
  misc_RNA (1)...(19): siRNA sense strand
ggugaaauugcucaaauaa

SEQ ID NO: 361814 - RNA, 19 nt, Homo sapiens
  misc_RNA (1)...(19): siRNA sense strand
aaacaaagacuuccaagag

SEQ ID NO: 361815 - RNA, 19 nt, Homo sapiens
  misc_RNA (1)...(19): siRNA sense strand
gaagggagaauuccacaag

SEQ ID NO: 361816 - RNA, 19 nt, Homo sapiens
  misc_RNA (1)...(19): siRNA sense strand
uaaauucaaccucagugua

SEQ ID NO: 361817 - RNA, 19 nt, Homo sapiens
  misc_RNA (1)...(19): siRNA sense strand
gccuauggcuuucgaaaca

SEQ ID NO: 361818 - RNA, 19 nt, Homo sapiens
  misc_RNA (1)...(19): siRNA sense strand
gcaugugacagcuguauga

SEQ ID NO: 361819 - RNA, 19 nt, Homo sapiens
  misc_RNA (1)...(19): siRNA sense strand
gaggugguguuacgcuuug

SEQ ID NO: 361820 - RNA, 19 nt, Homo sapiens
  misc_RNA (1)...(19): siRNA sense strand
gacgauagcugcggauuuu

SEQ ID NO: 361821 - RNA, 19 nt, Homo sapiens
  misc_RNA (1)...(19): siRNA sense strand
aacaugauccugaagcuua

SEQ ID NO: 361822 - RNA, 19 nt, Homo sapiens
  misc_RNA (1)...(19): siRNA sense strand
aaauucaaccucaguguaa

SEQ ID NO: 361823 - RNA, 19 nt, Homo sapiens
  misc_RNA (1)...(19): siRNA sense strand
gaaauugcucaaauaaugg

SEQ ID NO: 361824 - RNA, 19 nt, Homo sapiens
  misc_RNA (1)...(19): siRNA sense strand
gcacugcacgcgcaaggaa

SEQ ID NO: 361825 - RNA, 19 nt, Homo sapiens
  misc_RNA (1)...(19): siRNA sense strand
gcaccuggcacacaucuuc

SEQ ID NO: 361826 - RNA, 19 nt, Homo sapiens
  misc_RNA (1)...(19): siRNA sense strand
cgcaaggaauguaguaaga

SEQ ID NO: 361827 - RNA, 19 nt, Homo sapiens
  misc_RNA (1)...(19): siRNA sense strand
cucaaucuuugccuuauuu

SEQ ID NO: 361828 - RNA, 19 nt, Homo sapiens
  misc_RNA (1)...(19): siRNA sense strand
gcaaggaauguaguaagaa

SEQ ID NO: 361829 - RNA, 19 nt, Homo sapiens
  misc_RNA (1)...(19): siRNA sense strand
gggagaauuccacaaguug

SEQ ID NO: 361830 - RNA, 19 nt, Homo sapiens
  misc_RNA (1)...(19): siRNA sense strand
gagaaacaaagacuuccaa

SEQ ID NO: 361831 - RNA, 19 nt, Homo sapiens
  misc_RNA (1)...(19): siRNA sense strand
gcagauggaaggcauuuac

SEQ ID NO: 361832 - RNA, 19 nt, Homo sapiens
  misc_RNA (1)...(19): siRNA sense strand
gaagggcaaguucccauuc

SEQ ID NO: 361833 - RNA, 19 nt, Homo sapiens
  misc_RNA (1)...(19): siRNA sense strand
gaacaugauccugaagcuu

SEQ ID NO: 361834 - RNA, 19 nt, Homo sapiens
  misc_RNA (1)...(19): siRNA sense strand
aaacugaugaccaagagaa

SEQ ID NO: 361835 - RNA, 19 nt, Homo sapiens
  misc_RNA (1)...(19): siRNA sense strand
aggugaaauugcucaaaua

SEQ ID NO: 361836 - RNA, 19 nt, Homo sapiens
  misc_RNA (1)...(19): siRNA sense strand
agaaaugugauaccucaaa

SEQ ID NO: 361837 - RNA, 19 nt, Homo sapiens
  misc_RNA (1)...(19): siRNA sense strand
acaugauccugaagcuuaa

SEQ ID NO: 361838 - RNA, 19 nt, Homo sapiens
  misc_RNA (1)...(19): siRNA sense strand
ccucaaucuuugccuuauu

SEQ ID NO: 361839 - RNA, 19 nt, Homo sapiens
  misc_RNA (1)...(19): siRNA sense strand
gggcgcugacugcguguua

SEQ ID NO: 361840 - RNA, 19 nt, Homo sapiens
  misc_RNA (1)...(19): siRNA sense strand
agggagaauuccacaaguu

SEQ ID NO: 361841 - RNA, 19 nt, Homo sapiens
  misc_RNA (1)...(19): siRNA sense strand
gaaacauccagaacaugau

SEQ ID NO: 361842 - RNA, 19 nt, Homo sapiens
  misc_RNA (1)...(19): siRNA sense strand
cgacgauagcugcggauuu

SEQ ID NO: 361843 - RNA, 19 nt, Homo sapiens
  misc_RNA (1)...(19): siRNA sense strand
acacacagccuggacauca

SEQ ID NO: 361844 - RNA, 19 nt, Homo sapiens
  misc_RNA (1)...(19): siRNA sense strand
guccaacuuucccagcaaa

SEQ ID NO: 361845 - RNA, 19 nt, Homo sapiens
  misc_RNA (1)...(19): siRNA sense strand
acucugugguuuccucaaa

SEQ ID NO: 361846 - RNA, 19 nt, Homo sapiens
  misc_RNA (1)...(19): siRNA sense strand
uaacugaugcauccagaag

SEQ ID NO: 361847 - RNA, 19 nt, Homo sapiens
  misc_RNA (1)...(19): siRNA sense strand
uggcacacaucuucagaca

SEQ ID NO: 361848 - RNA, 19 nt, Homo sapiens
  misc_RNA (1)...(19): siRNA sense strand
uuaguauccuggagaguca

SEQ ID NO: 361849 - RNA, 19 nt, Homo sapiens
  misc_RNA (1)...(19): siRNA sense strand
ggugcacuauguauuugau

SEQ ID NO: 361850 - RNA, 19 nt, Homo sapiens
  misc_RNA (1)...(19): siRNA sense strand
gaaggcauuuacgcugaca

SEQ ID NO: 361851 - RNA, 19 nt, Homo sapiens
  misc_RNA (1)...(19): siRNA sense strand
cagacggacaugcggauaa

SEQ ID NO: 361852 - RNA, 19 nt, Homo sapiens
  misc_RNA (1)...(19): siRNA sense strand
cuguaugacugcagaggaa

SEQ ID NO: 361853 - RNA, 19 nt, Homo sapiens
  misc_RNA (1)...(19): siRNA sense strand
gcacacacagccuggacau

SEQ ID NO: 361854 - RNA, 19 nt, Homo sapiens
  misc_RNA (1)...(19): siRNA sense strand
gaggucacccuugagaaga

SEQ ID NO: 361855 - RNA, 19 nt, Homo sapiens
  misc_RNA (1)...(19): siRNA sense strand
uggaggcucuucaggaaag

SEQ ID NO: 361856 - RNA, 19 nt, Homo sapiens
  misc_RNA (1)...(19): siRNA sense strand
ucugaaccuuaacaagaaa

SEQ ID NO: 361857 - RNA, 19 nt, Homo sapiens
  misc_RNA (1)...(19): siRNA sense strand
cccgagaggugcugcauac

SEQ ID NO: 361858 - RNA, 19 nt, Homo sapiens
  misc_RNA (1)...(19): siRNA sense strand
uccagaacaugauccugaa

SEQ ID NO: 361859 - RNA, 19 nt, Homo sapiens
  misc_RNA (1)...(19): siRNA sense strand
gcuaucgccagcacaguga

SEQ ID NO: 361860 - RNA, 19 nt, Homo sapiens
  misc_RNA (1)...(19): siRNA sense strand
acgcuuugcugcagccuau

SEQ ID NO: 361861 - RNA, 19 nt, Homo sapiens
  misc_RNA (1)...(19): siRNA sense strand
cacacagccuggacaucaa

SEQ ID NO: 361862 - RNA, 19 nt, Homo sapiens
  misc_RNA (1)...(19): siRNA sense strand
gaaccuuaacaagaaaugu

SEQ ID NO: 361863 - RNA, 19 nt, Homo sapiens
  misc_RNA (1)...(19): siRNA sense strand
cgucgacacucuguuugga

SEQ ID NO: 361864 - RNA, 19 nt, Homo sapiens
  misc_RNA (1)...(19): siRNA sense strand
aggaaggaguccaacuuuc

SEQ ID NO: 361865 - RNA, 19 nt, Homo sapiens
  misc_RNA (1)...(19): siRNA sense strand
gaaugugucagccgaugca

SEQ ID NO: 361866 - RNA, 19 nt, Homo sapiens
  misc_RNA (1)...(19): siRNA sense strand
uguguguccucaaucuuug

SEQ ID NO: 361867 - RNA, 19 nt, Homo sapiens
  misc_RNA (1)...(19): siRNA sense strand
agaggaaggaguccaacuu

SEQ ID NO: 361868 - RNA, 19 nt, Homo sapiens
  misc_RNA (1)...(19): siRNA sense strand
agacggacaugcggauaag

SEQ ID NO: 361869 - RNA, 19 nt, Homo sapiens
  misc_RNA (1)...(19): siRNA sense strand
ucagacaugcggccaagga

SEQ ID NO: 361870 - RNA, 19 nt, Homo sapiens
  misc_RNA (1)...(19): siRNA sense strand
gcgcaaggaauguaguaag

SEQ ID NO: 361871 - RNA, 19 nt, Homo sapiens
  misc_RNA (1)...(19): siRNA sense strand
guccucaaucuuugccuua

SEQ ID NO: 361872 - RNA, 19 nt, Homo sapiens
  misc_RNA (1)...(19): siRNA sense strand
ugacugcguguuaacauca

SEQ ID NO: 361873 - RNA, 19 nt, Homo sapiens
  misc_RNA (1)...(19): siRNA sense strand
gcacgcgcaaggaauguag

SEQ ID NO: 361874 - RNA, 19 nt, Homo sapiens
  misc_RNA (1)...(19): siRNA sense strand
ggacuucuuccgcguucug

SEQ ID NO: 361875 - RNA, 19 nt, Homo sapiens
  misc_RNA (1)...(19): siRNA sense strand
ggcgcugacugcguguuaa

SEQ ID NO: 361876 - RNA, 19 nt, Homo sapiens
  misc_RNA (1)...(19): siRNA sense strand
gcugguagugucugugugu

SEQ ID NO: 361877 - RNA, 19 nt, Homo sapiens
  misc_RNA (1)...(19): siRNA sense strand
ccugagaaacaaagacuuc

SEQ ID NO: 361878 - RNA, 19 nt, Homo sapiens
  misc_RNA (1)...(19): siRNA sense strand
caugggcucuuuggugaag

SEQ ID NO: 361879 - RNA, 19 nt, Homo sapiens
  misc_RNA (1)...(19): siRNA sense strand
gcaggucaugggcucuuug

SEQ ID NO: 361880 - RNA, 19 nt, Homo sapiens
  misc_RNA (1)...(19): siRNA sense strand
aaacauccagaacaugauc

SEQ ID NO: 361881 - RNA, 19 nt, Homo sapiens
  misc_RNA (1)...(19): siRNA sense strand
gagagaagggagaauucca

SEQ ID NO: 361882 - RNA, 19 nt, Homo sapiens
  misc_RNA (1)...(19): siRNA sense strand
gaagauuuuccacgucauu

SEQ ID NO: 361883 - RNA, 19 nt, Homo sapiens
  misc_RNA (1)...(19): siRNA sense strand
aggauuauuucgccagaca

SEQ ID NO: 361884 - RNA, 19 nt, Homo sapiens
  misc_RNA (1)...(19): siRNA sense strand
gcacacaucuucagacaug

SEQ ID NO: 361885 - RNA, 19 nt, Homo sapiens
  misc_RNA (1)...(19): siRNA sense strand
gaacggagaggugguguua

SEQ ID NO: 361886 - RNA, 19 nt, Homo sapiens
  misc_RNA (1)...(19): siRNA sense strand
gcucuuuggugaaggauua

SEQ ID NO: 361887 - RNA, 19 nt, Homo sapiens
  misc_RNA (1)...(19): siRNA sense strand
ccaaggagcuguucaacga

SEQ ID NO: 361888 - RNA, 19 nt, Homo sapiens
  misc_RNA (1)...(19): siRNA sense strand
caaggaauguaguaagaaa

SEQ ID NO: 361889 - RNA, 19 nt, Homo sapiens
  misc_RNA (1)...(19): siRNA sense strand
gaaaugugauaccucaaag

SEQ ID NO: 361890 - RNA, 19 nt, Homo sapiens
  misc_RNA (1)...(19): siRNA sense strand
gcuggaggcucuucaggaa

SEQ ID NO: 361891 - RNA, 19 nt, Homo sapiens
  misc_RNA (1)...(19): siRNA sense strand
gcuggaggaugcuuaaaug

SEQ ID NO: 361892 - RNA, 19 nt, Homo sapiens
  misc_RNA (1)...(19): siRNA sense strand
gaaacaaagacuuccaaga

SEQ ID NO: 361893 - RNA, 19 nt, Homo sapiens
  misc_RNA (1)...(19): siRNA sense strand
cgaaacauccagaacauga

SEQ ID NO: 361894 - RNA, 19 nt, Homo sapiens
  misc_RNA (1)...(19): siRNA sense strand
gaggaaggaguccaacuuu

SEQ ID NO: 361895 - RNA, 19 nt, Homo sapiens
  misc_RNA (1)...(19): siRNA sense strand
ggugaaauugcucaaauaa

SEQ ID NO: 361896 - RNA, 19 nt, Homo sapiens
  misc_RNA (1)...(19): siRNA sense strand
aaacaaagacuuccaagag

SEQ ID NO: 361897 - RNA, 19 nt, Homo sapiens
  misc_RNA (1)...(19): siRNA sense strand
gaagggagaauuccacaag

SEQ ID NO: 361898 - RNA, 19 nt, Homo sapiens
  misc_RNA (1)...(19): siRNA sense strand
uaaauucaaccucagugua

SEQ ID NO: 361899 - RNA, 19 nt, Homo sapiens
  misc_RNA (1)...(19): siRNA sense strand
gccuauggcuuucgaaaca

SEQ ID NO: 361900 - RNA, 19 nt, Homo sapiens
  misc_RNA (1)...(19): siRNA sense strand
gcaugugacagcuguauga

SEQ ID NO: 361901 - RNA, 19 nt, Homo sapiens
  misc_RNA (1)...(19): siRNA sense strand
gaggugguguuacgcuuug

SEQ ID NO: 361902 - RNA, 19 nt, Homo sapiens
  misc_RNA (1)...(19): siRNA sense strand
gacgauagcugcggauuuu

SEQ ID NO: 361903 - RNA, 19 nt, Homo sapiens
  misc_RNA (1)...(19): siRNA sense strand
aacaugauccugaagcuua

SEQ ID NO: 361904 - RNA, 19 nt, Homo sapiens
  misc_RNA (1)...(19): siRNA sense strand
aaauucaaccucaguguaa

SEQ ID NO: 361905 - RNA, 19 nt, Homo sapiens
  misc_RNA (1)...(19): siRNA sense strand
gaaauugcucaaauaaugg

SEQ ID NO: 361906 - RNA, 19 nt, Homo sapiens
  misc_RNA (1)...(19): siRNA sense strand
gcacugcacgcgcaaggaa

SEQ ID NO: 361907 - RNA, 19 nt, Homo sapiens
  misc_RNA (1)...(19): siRNA sense strand
gcaccuggcacacaucuuc

SEQ ID NO: 361908 - RNA, 19 nt, Homo sapiens
  misc_RNA (1)...(19): siRNA sense strand
cgcaaggaauguaguaaga

SEQ ID NO: 361909 - RNA, 19 nt, Homo sapiens
  misc_RNA (1)...(19): siRNA sense strand
cucaaucuuugccuuauuu

SEQ ID NO: 361910 - RNA, 19 nt, Homo sapiens
  misc_RNA (1)...(19): siRNA sense strand
gcaaggaauguaguaagaa

SEQ ID NO: 361911 - RNA, 19 nt, Homo sapiens
  misc_RNA (1)...(19): siRNA sense strand
gggagaauuccacaaguug

SEQ ID NO: 361912 - RNA, 19 nt, Homo sapiens
  misc_RNA (1)...(19): siRNA sense strand
gagaaacaaagacuuccaa

SEQ ID NO: 361913 - RNA, 19 nt, Homo sapiens
  misc_RNA (1)...(19): siRNA sense strand
gcagauggaaggcauuuac

SEQ ID NO: 361914 - RNA, 19 nt, Homo sapiens
  misc_RNA (1)...(19): siRNA sense strand
gaagggcaaguucccauuc

SEQ ID NO: 361915 - RNA, 19 nt, Homo sapiens
  misc_RNA (1)...(19): siRNA sense strand
gaacaugauccugaagcuu

SEQ ID NO: 361916 - RNA, 19 nt, Homo sapiens
  misc_RNA (1)...(19): siRNA sense strand
aaacugaugaccaagagaa

SEQ ID NO: 361917 - RNA, 19 nt, Homo sapiens
  misc_RNA (1)...(19): siRNA sense strand
aggugaaauugcucaaaua

SEQ ID NO: 361918 - RNA, 19 nt, Homo sapiens
  misc_RNA (1)...(19): siRNA sense strand
agaaaugugauaccucaaa

SEQ ID NO: 361919 - RNA, 19 nt, Homo sapiens
  misc_RNA (1)...(19): siRNA sense strand
acaugauccugaagcuuaa

SEQ ID NO: 361920 - RNA, 19 nt, Homo sapiens
  misc_RNA (1)...(19): siRNA sense strand
ccucaaucuuugccuuauu

SEQ ID NO: 361921 - RNA, 19 nt, Homo sapiens
  misc_RNA (1)...(19): siRNA sense strand
gggcgcugacugcguguua

SEQ ID NO: 361922 - RNA, 19 nt, Homo sapiens
  misc_RNA (1)...(19): siRNA sense strand
agggagaauuccacaaguu

SEQ ID NO: 361923 - RNA, 19 nt, Homo sapiens
  misc_RNA (1)...(19): siRNA sense strand
gaaacauccagaacaugau

SEQ ID NO: 361924 - RNA, 19 nt, Homo sapiens
  misc_RNA (1)...(19): siRNA sense strand
cgacgauagcugcggauuu

SEQ ID NO: 361925 - RNA, 19 nt, Homo sapiens
  misc_RNA (1)...(19): siRNA sense strand
acacacagccuggacauca

SEQ ID NO: 361926 - RNA, 19 nt, Homo sapiens
  misc_RNA (1)...(19): siRNA sense strand
guccaacuuucccagcaaa

SEQ ID NO: 361927 - RNA, 19 nt, Homo sapiens
  misc_RNA (1)...(19): siRNA sense strand
acucugugguuuccucaaa

SEQ ID NO: 361928 - RNA, 19 nt, Homo sapiens
  misc_RNA (1)...(19): siRNA sense strand
uaacugaugcauccagaag

SEQ ID NO: 361929 - RNA, 19 nt, Homo sapiens
  misc_RNA (1)...(19): siRNA sense strand
uggcacacaucuucagaca

SEQ ID NO: 361930 - RNA, 19 nt, Homo sapiens
  misc_RNA (1)...(19): siRNA sense strand
uuaguauccuggagaguca

SEQ ID NO: 361931 - RNA, 19 nt, Homo sapiens
  misc_RNA (1)...(19): siRNA sense strand
ggugcacuauguauuugau

SEQ ID NO: 361932 - RNA, 19 nt, Homo sapiens
  misc_RNA (1)...(19): siRNA sense strand
gaaggcauuuacgcugaca

SEQ ID NO: 361933 - RNA, 19 nt, Homo sapiens
  misc_RNA (1)...(19): siRNA sense strand
cagacggacaugcggauaa

SEQ ID NO: 361934 - RNA, 19 nt, Homo sapiens
  misc_RNA (1)...(19): siRNA sense strand
cuguaugacugcagaggaa

SEQ ID NO: 361935 - RNA, 19 nt, Homo sapiens
  misc_RNA (1)...(19): siRNA sense strand
gcacacacagccuggacau

SEQ ID NO: 361936 - RNA, 19 nt, Homo sapiens
  misc_RNA (1)...(19): siRNA sense strand
gaggucacccuugagaaga

SEQ ID NO: 361937 - RNA, 19 nt, Homo sapiens
  misc_RNA (1)...(19): siRNA sense strand
uggaggcucuucaggaaag

SEQ ID NO: 361938 - RNA, 19 nt, Homo sapiens
  misc_RNA (1)...(19): siRNA sense strand
ucugaaccuuaacaagaaa

SEQ ID NO: 361939 - RNA, 19 nt, Homo sapiens
  misc_RNA (1)...(19): siRNA sense strand
cccgagaggugcugcauac

SEQ ID NO: 361940 - RNA, 19 nt, Homo sapiens
  misc_RNA (1)...(19): siRNA sense strand
uccagaacaugauccugaa

SEQ ID NO: 361941 - RNA, 19 nt, Homo sapiens
  misc_RNA (1)...(19): siRNA sense strand
gcuaucgccagcacaguga

SEQ ID NO: 361942 - RNA, 19 nt, Homo sapiens
  misc_RNA (1)...(19): siRNA sense strand
acgcuuugcugcagccuau

SEQ ID NO: 361943 - RNA, 19 nt, Homo sapiens
  misc_RNA (1)...(19): siRNA sense strand
cacacagccuggacaucaa

SEQ ID NO: 361944 - RNA, 19 nt, Homo sapiens
  misc_RNA (1)...(19): siRNA sense strand
gaaccuuaacaagaaaugu

SEQ ID NO: 361945 - RNA, 19 nt, Homo sapiens
  misc_RNA (1)...(19): siRNA sense strand
cgucgacacucuguuugga

SEQ ID NO: 361946 - RNA, 19 nt, Homo sapiens
  misc_RNA (1)...(19): siRNA sense strand
aggaaggaguccaacuuuc

SEQ ID NO: 361947 - RNA, 19 nt, Homo sapiens
  misc_RNA (1)...(19): siRNA sense strand
gaaugugucagccgaugca

SEQ ID NO: 361948 - RNA, 19 nt, Homo sapiens
  misc_RNA (1)...(19): siRNA sense strand
uguguguccucaaucuuug

SEQ ID NO: 361949 - RNA, 19 nt, Homo sapiens
  misc_RNA (1)...(19): siRNA sense strand
agaggaaggaguccaacuu

SEQ ID NO: 361950 - RNA, 19 nt, Homo sapiens
  misc_RNA (1)...(19): siRNA sense strand
agacggacaugcggauaag

SEQ ID NO: 361951 - RNA, 19 nt, Homo sapiens
  misc_RNA (1)...(19): siRNA sense strand
ucagacaugcggccaagga

SEQ ID NO: 361952 - RNA, 19 nt, Homo sapiens
  misc_RNA (1)...(19): siRNA sense strand
gcgcaaggaauguaguaag

SEQ ID NO: 361953 - RNA, 19 nt, Homo sapiens
  misc_RNA (1)...(19): siRNA sense strand
guccucaaucuuugccuua

SEQ ID NO: 361954 - RNA, 19 nt, Homo sapiens
  misc_RNA (1)...(19): siRNA sense strand
ugacugcguguuaacauca

SEQ ID NO: 361955 - RNA, 19 nt, Homo sapiens
  misc_RNA (1)...(19): siRNA sense strand
gcacgcgcaaggaauguag

SEQ ID NO: 361956 - RNA, 19 nt, Homo sapiens
  misc_RNA (1)...(19): siRNA sense strand
ggacuucuuccgcguucug

SEQ ID NO: 361957 - RNA, 19 nt, Homo sapiens
  misc_RNA (1)...(19): siRNA sense strand
ggcgcugacugcguguuaa

SEQ ID NO: 361958 - RNA, 19 nt, Homo sapiens
  misc_RNA (1)...(19): siRNA sense strand
gcugguagugucugugugu

SEQ ID NO: 361959 - RNA, 19 nt, Homo sapiens
  misc_RNA (1)...(19): siRNA sense strand
ccugagaaacaaagacuuc

SEQ ID NO: 361960 - RNA, 19 nt, Homo sapiens
  misc_RNA (1)...(19): siRNA sense strand
caugggcucuuuggugaag

SEQ ID NO: 361961 - RNA, 19 nt, Homo sapiens
  misc_RNA (1)...(19): siRNA sense strand
gcaggucaugggcucuuug

SEQ ID NO: 361962 - RNA, 19 nt, Homo sapiens
  misc_RNA (1)...(19): siRNA sense strand
aaacauccagaacaugauc

SEQ ID NO: 361963 - RNA, 19 nt, Homo sapiens
  misc_RNA (1)...(19): siRNA sense strand
gagagaagggagaauucca

SEQ ID NO: 361964 - RNA, 19 nt, Homo sapiens
  misc_RNA (1)...(19): siRNA sense strand
gaagauuuuccacgucauu

SEQ ID NO: 361965 - RNA, 19 nt, Homo sapiens
  misc_RNA (1)...(19): siRNA sense strand
aggauuauuucgccagaca

SEQ ID NO: 361966 - RNA, 19 nt, Homo sapiens
  misc_RNA (1)...(19): siRNA sense strand
ggucagauauggucacuuu

SEQ ID NO: 361967 - RNA, 19 nt, Homo sapiens
  misc_RNA (1)...(19): siRNA sense strand
caaaugauguccuugaaga

SEQ ID NO: 361968 - RNA, 19 nt, Homo sapiens
  misc_RNA (1)...(19): siRNA sense strand
gcaaacagcuuuaauacac

SEQ ID NO: 361969 - RNA, 19 nt, Homo sapiens
  misc_RNA (1)...(19): siRNA sense strand
ccagauuccugcuguguua

SEQ ID NO: 361970 - RNA, 19 nt, Homo sapiens
  misc_RNA (1)...(19): siRNA sense strand
gcuguuugcuguuuccuua

SEQ ID NO: 361971 - RNA, 19 nt, Homo sapiens
  misc_RNA (1)...(19): siRNA sense strand
gaaguuugcuugucauuuu

SEQ ID NO: 361972 - RNA, 19 nt, Homo sapiens
  misc_RNA (1)...(19): siRNA sense strand
uaagugcuguggaguagua

SEQ ID NO: 361973 - RNA, 19 nt, Homo sapiens
  misc_RNA (1)...(19): siRNA sense strand
ucagugaccuuuaucaaga

SEQ ID NO: 361974 - RNA, 19 nt, Homo sapiens
  misc_RNA (1)...(19): siRNA sense strand
ccaguacaauggucagaua

SEQ ID NO: 361975 - RNA, 19 nt, Homo sapiens
  misc_RNA (1)...(19): siRNA sense strand
aagccaggaugacaaauua

SEQ ID NO: 361976 - RNA, 19 nt, Homo sapiens
  misc_RNA (1)...(19): siRNA sense strand
gggacuaccuaaauaaugu

SEQ ID NO: 361977 - RNA, 19 nt, Homo sapiens
  misc_RNA (1)...(19): siRNA sense strand
aaaccaagccugucaagaa

SEQ ID NO: 361978 - RNA, 19 nt, Homo sapiens
  misc_RNA (1)...(19): siRNA sense strand
gcucugggcucuguauuau

SEQ ID NO: 361979 - RNA, 19 nt, Homo sapiens
  misc_RNA (1)...(19): siRNA sense strand
gaacuggcuuguggcguuu

SEQ ID NO: 361980 - RNA, 19 nt, Homo sapiens
  misc_RNA (1)...(19): siRNA sense strand
guagaacuguugaaaccaa

SEQ ID NO: 361981 - RNA, 19 nt, Homo sapiens
  misc_RNA (1)...(19): siRNA sense strand
gaagggagccugggacaga

SEQ ID NO: 361982 - RNA, 19 nt, Homo sapiens
  misc_RNA (1)...(19): siRNA sense strand
gcuguggaguaguauauuu

SEQ ID NO: 361983 - RNA, 19 nt, Homo sapiens
  misc_RNA (1)...(19): siRNA sense strand
gaagaucucagugaccuuu

SEQ ID NO: 361984 - RNA, 19 nt, Homo sapiens
  misc_RNA (1)...(19): siRNA sense strand
gaugagggacuaccuaaau

SEQ ID NO: 361985 - RNA, 19 nt, Homo sapiens
  misc_RNA (1)...(19): siRNA sense strand
gaaaagaaaucuguugcuu

SEQ ID NO: 361986 - RNA, 19 nt, Homo sapiens
  misc_RNA (1)...(19): siRNA sense strand
cagagaagauuccgugaag

SEQ ID NO: 361987 - RNA, 19 nt, Homo sapiens
  misc_RNA (1)...(19): siRNA sense strand
gccaugauucucaccauua

SEQ ID NO: 361988 - RNA, 19 nt, Homo sapiens
  misc_RNA (1)...(19): siRNA sense strand
guacaauggucagauaugg

SEQ ID NO: 361989 - RNA, 19 nt, Homo sapiens
  misc_RNA (1)...(19): siRNA sense strand
ucugggcucuguauuauga

SEQ ID NO: 361990 - RNA, 19 nt, Homo sapiens
  misc_RNA (1)...(19): siRNA sense strand
gagaagauuccgugaagug

SEQ ID NO: 361991 - RNA, 19 nt, Homo sapiens
  misc_RNA (1)...(19): siRNA sense strand
caaacaggcccaccaggaa

SEQ ID NO: 361992 - RNA, 19 nt, Homo sapiens
  misc_RNA (1)...(19): siRNA sense strand
cagauauggucacuuugaa

SEQ ID NO: 361993 - RNA, 19 nt, Homo sapiens
  misc_RNA (1)...(19): siRNA sense strand
caagaggguugugggaaga

SEQ ID NO: 361994 - RNA, 19 nt, Homo sapiens
  misc_RNA (1)...(19): siRNA sense strand
acacaaauccuggccauga

SEQ ID NO: 361995 - RNA, 19 nt, Homo sapiens
  misc_RNA (1)...(19): siRNA sense strand
gcuguuuccuuaucauugu

SEQ ID NO: 361996 - RNA, 19 nt, Homo sapiens
  misc_RNA (1)...(19): siRNA sense strand
cagcuuuaauacacacuuu

SEQ ID NO: 361997 - RNA, 19 nt, Homo sapiens
  misc_RNA (1)...(19): siRNA sense strand
caaacagcuuuaauacaca

SEQ ID NO: 361998 - RNA, 19 nt, Homo sapiens
  misc_RNA (1)...(19): siRNA sense strand
gagaggaaccaaacaacug

SEQ ID NO: 361999 - RNA, 19 nt, Homo sapiens
  misc_RNA (1)...(19): siRNA sense strand
ggaaguuugcuugucauuu

SEQ ID NO: 362000 - RNA, 19 nt, Homo sapiens
  misc_RNA (1)...(19): siRNA sense strand
gaccaaaugauguccuuga

SEQ ID NO: 362001 - RNA, 19 nt, Homo sapiens
  misc_RNA (1)...(19): siRNA sense strand
ucagauauggucacuuuga

SEQ ID NO: 362002 - RNA, 19 nt, Homo sapiens
  misc_RNA (1)...(19): siRNA sense strand
augagggacuaccuaaaua

SEQ ID NO: 362003 - RNA, 19 nt, Homo sapiens
  misc_RNA (1)...(19): siRNA sense strand
cauaugaacaggaacuuau

SEQ ID NO: 362004 - RNA, 19 nt, Homo sapiens
  misc_RNA (1)...(19): siRNA sense strand
ugagauggaggaguuauaa

SEQ ID NO: 362005 - RNA, 19 nt, Homo sapiens
  misc_RNA (1)...(19): siRNA sense strand
ggccaugauucucaccauu

SEQ ID NO: 362006 - RNA, 19 nt, Homo sapiens
  misc_RNA (1)...(19): siRNA sense strand
ugauguccuugaagaauga

SEQ ID NO: 362007 - RNA, 19 nt, Homo sapiens
  misc_RNA (1)...(19): siRNA sense strand
aaccaagccugucaagaau

SEQ ID NO: 362008 - RNA, 19 nt, Homo sapiens
  misc_RNA (1)...(19): siRNA sense strand
ugagggacuaccuaaauaa

SEQ ID NO: 362009 - RNA, 19 nt, Homo sapiens
  misc_RNA (1)...(19): siRNA sense strand
ccaagccugucaagaaucu

SEQ ID NO: 362010 - RNA, 19 nt, Homo sapiens
  misc_RNA (1)...(19): siRNA sense strand
ugaaagccaggaugacaaa

SEQ ID NO: 362011 - RNA, 19 nt, Homo sapiens
  misc_RNA (1)...(19): siRNA sense strand
gguagaggaagcagucauu

SEQ ID NO: 362012 - RNA, 19 nt, Homo sapiens
  misc_RNA (1)...(19): siRNA sense strand
gguuggaaaugacagagau

SEQ ID NO: 362013 - RNA, 19 nt, Homo sapiens
  misc_RNA (1)...(19): siRNA sense strand
ccugucaugucccucagua

SEQ ID NO: 362014 - RNA, 19 nt, Homo sapiens
  misc_RNA (1)...(19): siRNA sense strand
gaaaccaagccugucaaga

SEQ ID NO: 362015 - RNA, 19 nt, Homo sapiens
  misc_RNA (1)...(19): siRNA sense strand
uaauacacacuuugagaug

SEQ ID NO: 362016 - RNA, 19 nt, Homo sapiens
  misc_RNA (1)...(19): siRNA sense strand
ugauugcuguuugcuguuu

SEQ ID NO: 362017 - RNA, 19 nt, Homo sapiens
  misc_RNA (1)...(19): siRNA sense strand
ugaagaaugacaacucuca

SEQ ID NO: 362018 - RNA, 19 nt, Homo sapiens
  misc_RNA (1)...(19): siRNA sense strand
guagaggaagcagucauuu

SEQ ID NO: 362019 - RNA, 19 nt, Homo sapiens
  misc_RNA (1)...(19): siRNA sense strand
gagggacuaccuaaauaau

SEQ ID NO: 362020 - RNA, 19 nt, Homo sapiens
  misc_RNA (1)...(19): siRNA sense strand
guuagagaauucccaggau

SEQ ID NO: 362021 - RNA, 19 nt, Homo sapiens
  misc_RNA (1)...(19): siRNA sense strand
ggacauaugaacaggaacu

SEQ ID NO: 362022 - RNA, 19 nt, Homo sapiens
  misc_RNA (1)...(19): siRNA sense strand
ggucaugauugcuguuugc

SEQ ID NO: 362023 - RNA, 19 nt, Homo sapiens
  misc_RNA (1)...(19): siRNA sense strand
ggaugacaaauuauggauu

SEQ ID NO: 362024 - RNA, 19 nt, Homo sapiens
  misc_RNA (1)...(19): siRNA sense strand
ggaugagggacuaccuaaa

SEQ ID NO: 362025 - RNA, 19 nt, Homo sapiens
  misc_RNA (1)...(19): siRNA sense strand
acacauccauggcaaacag

SEQ ID NO: 362026 - RNA, 19 nt, Homo sapiens
  misc_RNA (1)...(19): siRNA sense strand
gcucuacgcccucaaucug

SEQ ID NO: 362027 - RNA, 19 nt, Homo sapiens
  misc_RNA (1)...(19): siRNA sense strand
uuacucaugcuuggaauuu

SEQ ID NO: 362028 - RNA, 19 nt, Homo sapiens
  misc_RNA (1)...(19): siRNA sense strand
ccagagaagauuccgugaa

SEQ ID NO: 362029 - RNA, 19 nt, Homo sapiens
  misc_RNA (1)...(19): siRNA sense strand
gcuuuaauacacacuuuga

SEQ ID NO: 362030 - RNA, 19 nt, Homo sapiens
  misc_RNA (1)...(19): siRNA sense strand
ggacuaccuaaauaauguu

SEQ ID NO: 362031 - RNA, 19 nt, Homo sapiens
  misc_RNA (1)...(19): siRNA sense strand
cagaccaaaugauguccuu

SEQ ID NO: 362032 - RNA, 19 nt, Homo sapiens
  misc_RNA (1)...(19): siRNA sense strand
cacaaauccuggccaugau

SEQ ID NO: 362033 - RNA, 19 nt, Homo sapiens
  misc_RNA (1)...(19): siRNA sense strand
aaagccaggaugacaaauu

SEQ ID NO: 362034 - RNA, 19 nt, Homo sapiens
  misc_RNA (1)...(19): siRNA sense strand
guggaacggugaaaagaaa

SEQ ID NO: 362035 - RNA, 19 nt, Homo sapiens
  misc_RNA (1)...(19): siRNA sense strand
auacacacuuugagaugga

SEQ ID NO: 362036 - RNA, 19 nt, Homo sapiens
  misc_RNA (1)...(19): siRNA sense strand
cuucuugcaugguacuuug

SEQ ID NO: 362037 - RNA, 19 nt, Homo sapiens
  misc_RNA (1)...(19): siRNA sense strand
aaucugcucuuuugguuaa

SEQ ID NO: 362038 - RNA, 19 nt, Homo sapiens
  misc_RNA (1)...(19): siRNA sense strand
gacaaauuauggauuaccu

SEQ ID NO: 362039 - RNA, 19 nt, Homo sapiens
  misc_RNA (1)...(19): siRNA sense strand
ccaugauucucaccauuac

SEQ ID NO: 362040 - RNA, 19 nt, Homo sapiens
  misc_RNA (1)...(19): siRNA sense strand
acuuugagauggaggaguu

SEQ ID NO: 362041 - RNA, 19 nt, Homo sapiens
  misc_RNA (1)...(19): siRNA sense strand
ggcaaacagcuuuaauaca

SEQ ID NO: 362042 - RNA, 19 nt, Homo sapiens
  misc_RNA (1)...(19): siRNA sense strand
agauaucgguggcuuacuc

SEQ ID NO: 362043 - RNA, 19 nt, Homo sapiens
  misc_RNA (1)...(19): siRNA sense strand
uuuggaaguuugcuuguca

SEQ ID NO: 362044 - RNA, 19 nt, Homo sapiens
  misc_RNA (1)...(19): siRNA sense strand
gacuuacuuuccugugguu

SEQ ID NO: 362045 - RNA, 19 nt, Homo sapiens
  misc_RNA (1)...(19): siRNA sense strand
guuuaagugcuguggagua

SEQ ID NO: 362046 - RNA, 19 nt, Homo sapiens
  misc_RNA (1)...(19): siRNA sense strand
gccaggaugacaaauuaug

SEQ ID NO: 362047 - RNA, 19 nt, Homo sapiens
  misc_RNA (1)...(19): siRNA sense strand
uuggacauaugaacaggaa

SEQ ID NO: 362048 - RNA, 19 nt, Homo sapiens
  misc_RNA (1)...(19): siRNA sense strand
ugaacaggaacuuaugguu

SEQ ID NO: 362049 - RNA, 19 nt, Homo sapiens
  misc_RNA (1)...(19): siRNA sense strand
accaaaugauguccuugaa

SEQ ID NO: 362050 - RNA, 19 nt, Homo sapiens
  misc_RNA (1)...(19): siRNA sense strand
ugggcucuguauuaugaua

SEQ ID NO: 362051 - RNA, 19 nt, Homo sapiens
  misc_RNA (1)...(19): siRNA sense strand
gagaauucccaggauguuc

SEQ ID NO: 362052 - RNA, 19 nt, Homo sapiens
  misc_RNA (1)...(19): siRNA sense strand
ugucaugucccucaguaga

SEQ ID NO: 362053 - RNA, 19 nt, Homo sapiens
  misc_RNA (1)...(19): siRNA sense strand
uaauguccaucaguguguu

SEQ ID NO: 362054 - RNA, 19 nt, Homo sapiens
  misc_RNA (1)...(19): siRNA sense strand
uggcaaacagcuuuaauac

SEQ ID NO: 362055 - RNA, 19 nt, Homo sapiens
  misc_RNA (1)...(19): siRNA sense strand
guugaaaccaagccuguca

SEQ ID NO: 362056 - RNA, 19 nt, Homo sapiens
  misc_RNA (1)...(19): siRNA sense strand
gcucuguauuaugauagaa

SEQ ID NO: 362057 - RNA, 19 nt, Homo sapiens
  misc_RNA (1)...(19): siRNA sense strand
ccuaaauaauguucucacu

SEQ ID NO: 362058 - RNA, 19 nt, Homo sapiens
  misc_RNA (1)...(19): siRNA sense strand
aagauuccgugaagugucu

SEQ ID NO: 362059 - RNA, 19 nt, Homo sapiens
  misc_RNA (1)...(19): siRNA sense strand
acauaugaacaggaacuua

SEQ ID NO: 362060 - RNA, 19 nt, Homo sapiens
  misc_RNA (1)...(19): siRNA sense strand
ucaaucugcucuuuugguu

SEQ ID NO: 362061 - RNA, 19 nt, Homo sapiens
  misc_RNA (1)...(19): siRNA sense strand
cugcuuggaugagggacua

SEQ ID NO: 362062 - RNA, 19 nt, Homo sapiens
  misc_RNA (1)...(19): siRNA sense strand
agaucucagugaccuuuau

SEQ ID NO: 362063 - RNA, 19 nt, Homo sapiens
  misc_RNA (1)...(19): siRNA sense strand
gugcuguggaguaguauau

SEQ ID NO: 362064 - RNA, 19 nt, Homo sapiens
  misc_RNA (1)...(19): siRNA sense strand
gauaucgguggcuuacuca

SEQ ID NO: 362065 - RNA, 19 nt, Homo sapiens
  misc_RNA (1)...(19): siRNA sense strand
cacuuuaacugcagaaacg

SEQ ID NO: 362066 - RNA, 19 nt, Homo sapiens
  misc_RNA (1)...(19): siRNA sense strand
aaacaucccugcucauuau

SEQ ID NO: 362067 - RNA, 19 nt, Homo sapiens
  misc_RNA (1)...(19): siRNA sense strand
ccaauaaugucaccucgaa

SEQ ID NO: 362068 - RNA, 19 nt, Homo sapiens
  misc_RNA (1)...(19): siRNA sense strand
cccagaaccucgccaauaa

SEQ ID NO: 362069 - RNA, 19 nt, Homo sapiens
  misc_RNA (1)...(19): siRNA sense strand
ccaaaguuguguuuacuga

SEQ ID NO: 362070 - RNA, 19 nt, Homo sapiens
  misc_RNA (1)...(19): siRNA sense strand
gaacuucuacgucaucaau

SEQ ID NO: 362071 - RNA, 19 nt, Homo sapiens
  misc_RNA (1)...(19): siRNA sense strand
gaccacagauggacagcaa

SEQ ID NO: 362072 - RNA, 19 nt, Homo sapiens
  misc_RNA (1)...(19): siRNA sense strand
gaucauggaugcccugaac

SEQ ID NO: 362073 - RNA, 19 nt, Homo sapiens
  misc_RNA (1)...(19): siRNA sense strand
gaauaucggaacaagcaua

SEQ ID NO: 362074 - RNA, 19 nt, Homo sapiens
  misc_RNA (1)...(19): siRNA sense strand
ggacuucagaucuucauug

SEQ ID NO: 362075 - RNA, 19 nt, Homo sapiens
  misc_RNA (1)...(19): siRNA sense strand
agacggagcccacggauga

SEQ ID NO: 362076 - RNA, 19 nt, Homo sapiens
  misc_RNA (1)...(19): siRNA sense strand
aaaguuguguuuacugaga

SEQ ID NO: 362077 - RNA, 19 nt, Homo sapiens
  misc_RNA (1)...(19): siRNA sense strand
gcagaaucgucucuuuaca

SEQ ID NO: 362078 - RNA, 19 nt, Homo sapiens
  misc_RNA (1)...(19): siRNA sense strand
gagaaacucggcuccagaa

SEQ ID NO: 362079 - RNA, 19 nt, Homo sapiens
  misc_RNA (1)...(19): siRNA sense strand
agaaucgucucuuuacaga

SEQ ID NO: 362080 - RNA, 19 nt, Homo sapiens
  misc_RNA (1)...(19): siRNA sense strand
gcggggaucuugaagcuua

SEQ ID NO: 362081 - RNA, 19 nt, Homo sapiens
  misc_RNA (1)...(19): siRNA sense strand
caccagcuaugagaagaua

SEQ ID NO: 362082 - RNA, 19 nt, Homo sapiens
  misc_RNA (1)...(19): siRNA sense strand
gaaacucggcuccagaauc

SEQ ID NO: 362083 - RNA, 19 nt, Homo sapiens
  misc_RNA (1)...(19): siRNA sense strand
agacggacauuggaagaaa

SEQ ID NO: 362084 - RNA, 19 nt, Homo sapiens
  misc_RNA (1)...(19): siRNA sense strand
gcugaugagcggauccuua

SEQ ID NO: 362085 - RNA, 19 nt, Homo sapiens
  misc_RNA (1)...(19): siRNA sense strand
aaacaagccucugggacuu

SEQ ID NO: 362086 - RNA, 19 nt, Homo sapiens
  misc_RNA (1)...(19): siRNA sense strand
acagauggacagcaaauuu

SEQ ID NO: 362087 - RNA, 19 nt, Homo sapiens
  misc_RNA (1)...(19): siRNA sense strand
gaacgaagaagagccgaau

SEQ ID NO: 362088 - RNA, 19 nt, Homo sapiens
  misc_RNA (1)...(19): siRNA sense strand
gacaagagccagcccaaca

SEQ ID NO: 362089 - RNA, 19 nt, Homo sapiens
  misc_RNA (1)...(19): siRNA sense strand
gaaccucgccaauaauguc

SEQ ID NO: 362090 - RNA, 19 nt, Homo sapiens
  misc_RNA (1)...(19): siRNA sense strand
gcccaugguugaaagacaa

SEQ ID NO: 362091 - RNA, 19 nt, Homo sapiens
  misc_RNA (1)...(19): siRNA sense strand
gaagagccgaaugcacaua

SEQ ID NO: 362092 - RNA, 19 nt, Homo sapiens
  misc_RNA (1)...(19): siRNA sense strand
uuguugagaucccugaaua

SEQ ID NO: 362093 - RNA, 19 nt, Homo sapiens
  misc_RNA (1)...(19): siRNA sense strand
gagcagggcgagaggagaa

SEQ ID NO: 362094 - RNA, 19 nt, Homo sapiens
  misc_RNA (1)...(19): siRNA sense strand
gauagugggcaacaccaaa

SEQ ID NO: 362095 - RNA, 19 nt, Homo sapiens
  misc_RNA (1)...(19): siRNA sense strand
cauauccgcacaccuguaa

SEQ ID NO: 362096 - RNA, 19 nt, Homo sapiens
  misc_RNA (1)...(19): siRNA sense strand
gcucugccgugaucaugga

SEQ ID NO: 362097 - RNA, 19 nt, Homo sapiens
  misc_RNA (1)...(19): siRNA sense strand
uggcagaaucgucucuuua

SEQ ID NO: 362098 - RNA, 19 nt, Homo sapiens
  misc_RNA (1)...(19): siRNA sense strand
gcuuagaaacgccgacauu

SEQ ID NO: 362099 - RNA, 19 nt, Homo sapiens
  misc_RNA (1)...(19): siRNA sense strand
ggaccagaccuacuuggau

SEQ ID NO: 362100 - RNA, 19 nt, Homo sapiens
  misc_RNA (1)...(19): siRNA sense strand
gaaaggcgagacggacauu

SEQ ID NO: 362101 - RNA, 19 nt, Homo sapiens
  misc_RNA (1)...(19): siRNA sense strand
cgaccuguguccgcaguuu

SEQ ID NO: 362102 - RNA, 19 nt, Homo sapiens
  misc_RNA (1)...(19): siRNA sense strand
gaauaugaccccacucuga

SEQ ID NO: 362103 - RNA, 19 nt, Homo sapiens
  misc_RNA (1)...(19): siRNA sense strand
uuagaaacgccgacauuga

SEQ ID NO: 362104 - RNA, 19 nt, Homo sapiens
  misc_RNA (1)...(19): siRNA sense strand
aaacucggcuccagaaucc

SEQ ID NO: 362105 - RNA, 19 nt, Homo sapiens
  misc_RNA (1)...(19): siRNA sense strand
caccaaaguccuggagaua

SEQ ID NO: 362106 - RNA, 19 nt, Homo sapiens
  misc_RNA (1)...(19): siRNA sense strand
cagauggacagcaaauuug

SEQ ID NO: 362107 - RNA, 19 nt, Homo sapiens
  misc_RNA (1)...(19): siRNA sense strand
cugaugagcggauccuuaa

SEQ ID NO: 362108 - RNA, 19 nt, Homo sapiens
  misc_RNA (1)...(19): siRNA sense strand
gaaagacaagacacagaca

SEQ ID NO: 362109 - RNA, 19 nt, Homo sapiens
  misc_RNA (1)...(19): siRNA sense strand
guggcagaaucgucucuuu

SEQ ID NO: 362110 - RNA, 19 nt, Homo sapiens
  misc_RNA (1)...(19): siRNA sense strand
gacuucagaucuucauugg

SEQ ID NO: 362111 - RNA, 19 nt, Homo sapiens
  misc_RNA (1)...(19): siRNA sense strand
ccauuaaacaggagcagaa

SEQ ID NO: 362112 - RNA, 19 nt, Homo sapiens
  misc_RNA (1)...(19): siRNA sense strand
cagaaugccacgagccaaa

SEQ ID NO: 362113 - RNA, 19 nt, Homo sapiens
  misc_RNA (1)...(19): siRNA sense strand
guauuugaauccgaacgaa

SEQ ID NO: 362114 - RNA, 19 nt, Homo sapiens
  misc_RNA (1)...(19): siRNA sense strand
cagaaccucgccaauaaug

SEQ ID NO: 362115 - RNA, 19 nt, Homo sapiens
  misc_RNA (1)...(19): siRNA sense strand
caucauguacugcgagaau

SEQ ID NO: 362116 - RNA, 19 nt, Homo sapiens
  misc_RNA (1)...(19): siRNA sense strand
gagcugcccaugguugaaa

SEQ ID NO: 362117 - RNA, 19 nt, Homo sapiens
  misc_RNA (1)...(19): siRNA sense strand
ccucuucgacuaugaguau

SEQ ID NO: 362118 - RNA, 19 nt, Homo sapiens
  misc_RNA (1)...(19): siRNA sense strand
acaccaaaguccuggagau

SEQ ID NO: 362119 - RNA, 19 nt, Homo sapiens
  misc_RNA (1)...(19): siRNA sense strand
ggaguuccagcacaucaug

SEQ ID NO: 362120 - RNA, 19 nt, Homo sapiens
  misc_RNA (1)...(19): siRNA sense strand
ggagcccacggaugaauau

SEQ ID NO: 362121 - RNA, 19 nt, Homo sapiens
  misc_RNA (1)...(19): siRNA sense strand
cgucaucaaugggaagaga

SEQ ID NO: 362122 - RNA, 19 nt, Homo sapiens
  misc_RNA (1)...(19): siRNA sense strand
gcauauccgcacaccugua

SEQ ID NO: 362123 - RNA, 19 nt, Homo sapiens
  misc_RNA (1)...(19): siRNA sense strand
gacuaugaguauuugaauc

SEQ ID NO: 362124 - RNA, 19 nt, Homo sapiens
  misc_RNA (1)...(19): siRNA sense strand
ccacagauggacagcaaau

SEQ ID NO: 362125 - RNA, 19 nt, Homo sapiens
  misc_RNA (1)...(19): siRNA sense strand
uuacugagaagaccacaga

SEQ ID NO: 362126 - RNA, 19 nt, Homo sapiens
  misc_RNA (1)...(19): siRNA sense strand
aagacgagcuugacuucuc

SEQ ID NO: 362127 - RNA, 19 nt, Homo sapiens
  misc_RNA (1)...(19): siRNA sense strand
uuaaacaggagcagaacuu

SEQ ID NO: 362128 - RNA, 19 nt, Homo sapiens
  misc_RNA (1)...(19): siRNA sense strand
cgacuaugaguauuugaau

SEQ ID NO: 362129 - RNA, 19 nt, Homo sapiens
  misc_RNA (1)...(19): siRNA sense strand
ugaccaaaaggaaguauua

SEQ ID NO: 362130 - RNA, 19 nt, Homo sapiens
  misc_RNA (1)...(19): siRNA sense strand
ugacuucuccauccucuuc

SEQ ID NO: 362131 - RNA, 19 nt, Homo sapiens
  misc_RNA (1)...(19): siRNA sense strand
caagagccagcccaacaug

SEQ ID NO: 362132 - RNA, 19 nt, Homo sapiens
  misc_RNA (1)...(19): siRNA sense strand
uagaaacgccgacauugag

SEQ ID NO: 362133 - RNA, 19 nt, Homo sapiens
  misc_RNA (1)...(19): siRNA sense strand
gagaagauagugggcaaca

SEQ ID NO: 362134 - RNA, 19 nt, Homo sapiens
  misc_RNA (1)...(19): siRNA sense strand
ucauguacugcgagaauuu

SEQ ID NO: 362135 - RNA, 19 nt, Homo sapiens
  misc_RNA (1)...(19): siRNA sense strand
gcaaauuugggagauggaa

SEQ ID NO: 362136 - RNA, 19 nt, Homo sapiens
  misc_RNA (1)...(19): siRNA sense strand
gacagcaaauuugggagau

SEQ ID NO: 362137 - RNA, 19 nt, Homo sapiens
  misc_RNA (1)...(19): siRNA sense strand
gacauuggaagaaagaaca

SEQ ID NO: 362138 - RNA, 19 nt, Homo sapiens
  misc_RNA (1)...(19): siRNA sense strand
caaaacaucccugcucauu

SEQ ID NO: 362139 - RNA, 19 nt, Homo sapiens
  misc_RNA (1)...(19): siRNA sense strand
gaaugccacgagccaaaga

SEQ ID NO: 362140 - RNA, 19 nt, Homo sapiens
  misc_RNA (1)...(19): siRNA sense strand
acauugagcugcggaaagg

SEQ ID NO: 362141 - RNA, 19 nt, Homo sapiens
  misc_RNA (1)...(19): siRNA sense strand
gagccaaagagccgccaaa

SEQ ID NO: 362142 - RNA, 19 nt, Homo sapiens
  misc_RNA (1)...(19): siRNA sense strand
ggaaaggcgagacggacau

SEQ ID NO: 362143 - RNA, 19 nt, Homo sapiens
  misc_RNA (1)...(19): siRNA sense strand
ccaaaguccuggagauacc

SEQ ID NO: 362144 - RNA, 19 nt, Homo sapiens
  misc_RNA (1)...(19): siRNA sense strand
gcggaagccaccaggaguu

SEQ ID NO: 362145 - RNA, 19 nt, Homo sapiens
  misc_RNA (1)...(19): siRNA sense strand
acagcugccuggucuaugg

SEQ ID NO: 362146 - RNA, 19 nt, Homo sapiens
  misc_RNA (1)...(19): siRNA sense strand
cuuuacagacugcaucuaa

SEQ ID NO: 362147 - RNA, 19 nt, Homo sapiens
  misc_RNA (1)...(19): siRNA sense strand
gagacggacauuggaagaa

SEQ ID NO: 362148 - RNA, 19 nt, Homo sapiens
  misc_RNA (1)...(19): siRNA sense strand
ccagucagucaggcucuua

SEQ ID NO: 362149 - RNA, 19 nt, Homo sapiens
  misc_RNA (1)...(19): siRNA sense strand
ccucgccugugauccacua

SEQ ID NO: 362150 - RNA, 19 nt, Homo sapiens
  misc_RNA (1)...(19): siRNA sense strand
gcacaccuguaaaagugaa

SEQ ID NO: 362151 - RNA, 19 nt, Homo sapiens
  misc_RNA (1)...(19): siRNA sense strand
cgaguccaaaguuguguuu

SEQ ID NO: 362152 - RNA, 19 nt, Homo sapiens
  misc_RNA (1)...(19): siRNA sense strand
gaucacuccgucccacgaa

SEQ ID NO: 362153 - RNA, 19 nt, Homo sapiens
  misc_RNA (1)...(19): siRNA sense strand
ggcagaaucgucucuuuac

SEQ ID NO: 362154 - RNA, 19 nt, Homo sapiens
  misc_RNA (1)...(19): siRNA sense strand
gagggcaaccaucgacugu

SEQ ID NO: 362155 - RNA, 19 nt, Homo sapiens
  misc_RNA (1)...(19): siRNA sense strand
ggaucuugaagcuuagaaa

SEQ ID NO: 362156 - RNA, 19 nt, Homo sapiens
  misc_RNA (1)...(19): siRNA sense strand
uaaacaggagcagaacuug

SEQ ID NO: 362157 - RNA, 19 nt, Homo sapiens
  misc_RNA (1)...(19): siRNA sense strand
guugagaucccugaauauc

SEQ ID NO: 362158 - RNA, 19 nt, Homo sapiens
  misc_RNA (1)...(19): siRNA sense strand
ugagaagaccacagaugga

SEQ ID NO: 362159 - RNA, 19 nt, Homo sapiens
  misc_RNA (1)...(19): siRNA sense strand
cuucgacuaugaguauuug

SEQ ID NO: 362160 - RNA, 19 nt, Homo sapiens
  misc_RNA (1)...(19): siRNA sense strand
ugaauccgaacgaagaaga

SEQ ID NO: 362161 - RNA, 19 nt, Homo sapiens
  misc_RNA (1)...(19): siRNA sense strand
ccgcacaccuguaaaagug

SEQ ID NO: 362162 - RNA, 19 nt, Homo sapiens
  misc_RNA (1)...(19): siRNA sense strand
cugaauaucggaacaagca

SEQ ID NO: 362163 - RNA, 19 nt, Homo sapiens
  misc_RNA (1)...(19): siRNA sense strand
ggacauuggaagaaagaac

SEQ ID NO: 362164 - RNA, 19 nt, Homo sapiens
  misc_RNA (1)...(19): siRNA sense strand
gacggacauuggaagaaag

SEQ ID NO: 362165 - RNA, 19 nt, Homo sapiens
  misc_RNA (1)...(19): siRNA sense strand
cgagacggacauuggaaga

SEQ ID NO: 362166 - RNA, 19 nt, Homo sapiens
  misc_RNA (1)...(19): siRNA sense strand
aaacaucccugcucauuau

SEQ ID NO: 362167 - RNA, 19 nt, Homo sapiens
  misc_RNA (1)...(19): siRNA sense strand
ccaauaaugucaccucgaa

SEQ ID NO: 362168 - RNA, 19 nt, Homo sapiens
  misc_RNA (1)...(19): siRNA sense strand
cccagaaccucgccaauaa

SEQ ID NO: 362169 - RNA, 19 nt, Homo sapiens
  misc_RNA (1)...(19): siRNA sense strand
ccaaaguuguguuuacuga

SEQ ID NO: 362170 - RNA, 19 nt, Homo sapiens
  misc_RNA (1)...(19): siRNA sense strand
gaacuucuacgucaucaau

SEQ ID NO: 362171 - RNA, 19 nt, Homo sapiens
  misc_RNA (1)...(19): siRNA sense strand
gaccacagauggacagcaa

SEQ ID NO: 362172 - RNA, 19 nt, Homo sapiens
  misc_RNA (1)...(19): siRNA sense strand
gaucauggaugcccugaac

SEQ ID NO: 362173 - RNA, 19 nt, Homo sapiens
  misc_RNA (1)...(19): siRNA sense strand
gaauaucggaacaagcaua

SEQ ID NO: 362174 - RNA, 19 nt, Homo sapiens
  misc_RNA (1)...(19): siRNA sense strand
ggacuucagaucuucauug

SEQ ID NO: 362175 - RNA, 19 nt, Homo sapiens
  misc_RNA (1)...(19): siRNA sense strand
agacggagcccacggauga

SEQ ID NO: 362176 - RNA, 19 nt, Homo sapiens
  misc_RNA (1)...(19): siRNA sense strand
aaaguuguguuuacugaga

SEQ ID NO: 362177 - RNA, 19 nt, Homo sapiens
  misc_RNA (1)...(19): siRNA sense strand
gcagaaucgucucuuuaca

SEQ ID NO: 362178 - RNA, 19 nt, Homo sapiens
  misc_RNA (1)...(19): siRNA sense strand
gagaaacucggcuccagaa

SEQ ID NO: 362179 - RNA, 19 nt, Homo sapiens
  misc_RNA (1)...(19): siRNA sense strand
agaaucgucucuuuacaga

SEQ ID NO: 362180 - RNA, 19 nt, Homo sapiens
  misc_RNA (1)...(19): siRNA sense strand
gcggggaucuugaagcuua

SEQ ID NO: 362181 - RNA, 19 nt, Homo sapiens
  misc_RNA (1)...(19): siRNA sense strand
caccagcuaugagaagaua

SEQ ID NO: 362182 - RNA, 19 nt, Homo sapiens
  misc_RNA (1)...(19): siRNA sense strand
gaaacucggcuccagaauc

SEQ ID NO: 362183 - RNA, 19 nt, Homo sapiens
  misc_RNA (1)...(19): siRNA sense strand
agacggacauuggaagaaa

SEQ ID NO: 362184 - RNA, 19 nt, Homo sapiens
  misc_RNA (1)...(19): siRNA sense strand
gcugaugagcggauccuua

SEQ ID NO: 362185 - RNA, 19 nt, Homo sapiens
  misc_RNA (1)...(19): siRNA sense strand
aaacaagccucugggacuu

SEQ ID NO: 362186 - RNA, 19 nt, Homo sapiens
  misc_RNA (1)...(19): siRNA sense strand
acagauggacagcaaauuu

SEQ ID NO: 362187 - RNA, 19 nt, Homo sapiens
  misc_RNA (1)...(19): siRNA sense strand
gaacgaagaagagccgaau

SEQ ID NO: 362188 - RNA, 19 nt, Homo sapiens
  misc_RNA (1)...(19): siRNA sense strand
gacaagagccagcccaaca

SEQ ID NO: 362189 - RNA, 19 nt, Homo sapiens
  misc_RNA (1)...(19): siRNA sense strand
gaaccucgccaauaauguc

SEQ ID NO: 362190 - RNA, 19 nt, Homo sapiens
  misc_RNA (1)...(19): siRNA sense strand
gcccaugguugaaagacaa

SEQ ID NO: 362191 - RNA, 19 nt, Homo sapiens
  misc_RNA (1)...(19): siRNA sense strand
gaagagccgaaugcacaua

SEQ ID NO: 362192 - RNA, 19 nt, Homo sapiens
  misc_RNA (1)...(19): siRNA sense strand
uuguugagaucccugaaua

SEQ ID NO: 362193 - RNA, 19 nt, Homo sapiens
  misc_RNA (1)...(19): siRNA sense strand
gagcagggcgagaggagaa

SEQ ID NO: 362194 - RNA, 19 nt, Homo sapiens
  misc_RNA (1)...(19): siRNA sense strand
gauagugggcaacaccaaa

SEQ ID NO: 362195 - RNA, 19 nt, Homo sapiens
  misc_RNA (1)...(19): siRNA sense strand
cauauccgcacaccuguaa

SEQ ID NO: 362196 - RNA, 19 nt, Homo sapiens
  misc_RNA (1)...(19): siRNA sense strand
gcucugccgugaucaugga

SEQ ID NO: 362197 - RNA, 19 nt, Homo sapiens
  misc_RNA (1)...(19): siRNA sense strand
uggcagaaucgucucuuua

SEQ ID NO: 362198 - RNA, 19 nt, Homo sapiens
  misc_RNA (1)...(19): siRNA sense strand
gcuuagaaacgccgacauu

SEQ ID NO: 362199 - RNA, 19 nt, Homo sapiens
  misc_RNA (1)...(19): siRNA sense strand
ggaccagaccuacuuggau

SEQ ID NO: 362200 - RNA, 19 nt, Homo sapiens
  misc_RNA (1)...(19): siRNA sense strand
gaaaggcgagacggacauu

SEQ ID NO: 362201 - RNA, 19 nt, Homo sapiens
  misc_RNA (1)...(19): siRNA sense strand
cgaccuguguccgcaguuu

SEQ ID NO: 362202 - RNA, 19 nt, Homo sapiens
  misc_RNA (1)...(19): siRNA sense strand
gaauaugaccccacucuga

SEQ ID NO: 362203 - RNA, 19 nt, Homo sapiens
  misc_RNA (1)...(19): siRNA sense strand
uuagaaacgccgacauuga

SEQ ID NO: 362204 - RNA, 19 nt, Homo sapiens
  misc_RNA (1)...(19): siRNA sense strand
aaacucggcuccagaaucc

SEQ ID NO: 362205 - RNA, 19 nt, Homo sapiens
  misc_RNA (1)...(19): siRNA sense strand
caccaaaguccuggagaua

SEQ ID NO: 362206 - RNA, 19 nt, Homo sapiens
  misc_RNA (1)...(19): siRNA sense strand
cagauggacagcaaauuug

SEQ ID NO: 362207 - RNA, 19 nt, Homo sapiens
  misc_RNA (1)...(19): siRNA sense strand
cugaugagcggauccuuaa

SEQ ID NO: 362208 - RNA, 19 nt, Homo sapiens
  misc_RNA (1)...(19): siRNA sense strand
gaaagacaagacacagaca

SEQ ID NO: 362209 - RNA, 19 nt, Homo sapiens
  misc_RNA (1)...(19): siRNA sense strand
guggcagaaucgucucuuu

SEQ ID NO: 362210 - RNA, 19 nt, Homo sapiens
  misc_RNA (1)...(19): siRNA sense strand
gacuucagaucuucauugg

SEQ ID NO: 362211 - RNA, 19 nt, Homo sapiens
  misc_RNA (1)...(19): siRNA sense strand
ccauuaaacaggagcagaa

SEQ ID NO: 362212 - RNA, 19 nt, Homo sapiens
  misc_RNA (1)...(19): siRNA sense strand
cagaaugccacgagccaaa

SEQ ID NO: 362213 - RNA, 19 nt, Homo sapiens
  misc_RNA (1)...(19): siRNA sense strand
guauuugaauccgaacgaa

SEQ ID NO: 362214 - RNA, 19 nt, Homo sapiens
  misc_RNA (1)...(19): siRNA sense strand
cagaaccucgccaauaaug

SEQ ID NO: 362215 - RNA, 19 nt, Homo sapiens
  misc_RNA (1)...(19): siRNA sense strand
caucauguacugcgagaau

SEQ ID NO: 362216 - RNA, 19 nt, Homo sapiens
  misc_RNA (1)...(19): siRNA sense strand
gagcugcccaugguugaaa

SEQ ID NO: 362217 - RNA, 19 nt, Homo sapiens
  misc_RNA (1)...(19): siRNA sense strand
ccucuucgacuaugaguau

SEQ ID NO: 362218 - RNA, 19 nt, Homo sapiens
  misc_RNA (1)...(19): siRNA sense strand
acaccaaaguccuggagau

SEQ ID NO: 362219 - RNA, 19 nt, Homo sapiens
  misc_RNA (1)...(19): siRNA sense strand
ggaguuccagcacaucaug

SEQ ID NO: 362220 - RNA, 19 nt, Homo sapiens
  misc_RNA (1)...(19): siRNA sense strand
ggagcccacggaugaauau

SEQ ID NO: 362221 - RNA, 19 nt, Homo sapiens
  misc_RNA (1)...(19): siRNA sense strand
cgucaucaaugggaagaga

SEQ ID NO: 362222 - RNA, 19 nt, Homo sapiens
  misc_RNA (1)...(19): siRNA sense strand
gcauauccgcacaccugua

SEQ ID NO: 362223 - RNA, 19 nt, Homo sapiens
  misc_RNA (1)...(19): siRNA sense strand
gacuaugaguauuugaauc

SEQ ID NO: 362224 - RNA, 19 nt, Homo sapiens
  misc_RNA (1)...(19): siRNA sense strand
ccacagauggacagcaaau

SEQ ID NO: 362225 - RNA, 19 nt, Homo sapiens
  misc_RNA (1)...(19): siRNA sense strand
uuacugagaagaccacaga

SEQ ID NO: 362226 - RNA, 19 nt, Homo sapiens
  misc_RNA (1)...(19): siRNA sense strand
aagacgagcuugacuucuc

SEQ ID NO: 362227 - RNA, 19 nt, Homo sapiens
  misc_RNA (1)...(19): siRNA sense strand
uuaaacaggagcagaacuu

SEQ ID NO: 362228 - RNA, 19 nt, Homo sapiens
  misc_RNA (1)...(19): siRNA sense strand
cgacuaugaguauuugaau

SEQ ID NO: 362229 - RNA, 19 nt, Homo sapiens
  misc_RNA (1)...(19): siRNA sense strand
ugaccaaaaggaaguauua

SEQ ID NO: 362230 - RNA, 19 nt, Homo sapiens
  misc_RNA (1)...(19): siRNA sense strand
ugacuucuccauccucuuc

SEQ ID NO: 362231 - RNA, 19 nt, Homo sapiens
  misc_RNA (1)...(19): siRNA sense strand
caagagccagcccaacaug

SEQ ID NO: 362232 - RNA, 19 nt, Homo sapiens
  misc_RNA (1)...(19): siRNA sense strand
uagaaacgccgacauugag

SEQ ID NO: 362233 - RNA, 19 nt, Homo sapiens
  misc_RNA (1)...(19): siRNA sense strand
gagaagauagugggcaaca

SEQ ID NO: 362234 - RNA, 19 nt, Homo sapiens
  misc_RNA (1)...(19): siRNA sense strand
ucauguacugcgagaauuu

SEQ ID NO: 362235 - RNA, 19 nt, Homo sapiens
  misc_RNA (1)...(19): siRNA sense strand
gcaaauuugggagauggaa

SEQ ID NO: 362236 - RNA, 19 nt, Homo sapiens
  misc_RNA (1)...(19): siRNA sense strand
gacagcaaauuugggagau

SEQ ID NO: 362237 - RNA, 19 nt, Homo sapiens
  misc_RNA (1)...(19): siRNA sense strand
gacauuggaagaaagaaca

SEQ ID NO: 362238 - RNA, 19 nt, Homo sapiens
  misc_RNA (1)...(19): siRNA sense strand
caaaacaucccugcucauu

SEQ ID NO: 362239 - RNA, 19 nt, Homo sapiens
  misc_RNA (1)...(19): siRNA sense strand
gaaugccacgagccaaaga

SEQ ID NO: 362240 - RNA, 19 nt, Homo sapiens
  misc_RNA (1)...(19): siRNA sense strand
acauugagcugcggaaagg

SEQ ID NO: 362241 - RNA, 19 nt, Homo sapiens
  misc_RNA (1)...(19): siRNA sense strand
gagccaaagagccgccaaa

SEQ ID NO: 362242 - RNA, 19 nt, Homo sapiens
  misc_RNA (1)...(19): siRNA sense strand
ggaaaggcgagacggacau

SEQ ID NO: 362243 - RNA, 19 nt, Homo sapiens
  misc_RNA (1)...(19): siRNA sense strand
ccaaaguccuggagauacc

SEQ ID NO: 362244 - RNA, 19 nt, Homo sapiens
  misc_RNA (1)...(19): siRNA sense strand
gcggaagccaccaggaguu

SEQ ID NO: 362245 - RNA, 19 nt, Homo sapiens
  misc_RNA (1)...(19): siRNA sense strand
acagcugccuggucuaugg

SEQ ID NO: 362246 - RNA, 19 nt, Homo sapiens
  misc_RNA (1)...(19): siRNA sense strand
cuuuacagacugcaucuaa

SEQ ID NO: 362247 - RNA, 19 nt, Homo sapiens
  misc_RNA (1)...(19): siRNA sense strand
gagacggacauuggaagaa

SEQ ID NO: 362248 - RNA, 19 nt, Homo sapiens
  misc_RNA (1)...(19): siRNA sense strand
ccagucagucaggcucuua

SEQ ID NO: 362249 - RNA, 19 nt, Homo sapiens
  misc_RNA (1)...(19): siRNA sense strand
ccucgccugugauccacua

SEQ ID NO: 362250 - RNA, 19 nt, Homo sapiens
  misc_RNA (1)...(19): siRNA sense strand
gcacaccuguaaaagugaa

SEQ ID NO: 362251 - RNA, 19 nt, Homo sapiens
  misc_RNA (1)...(19): siRNA sense strand
cgaguccaaaguuguguuu

SEQ ID NO: 362252 - RNA, 19 nt, Homo sapiens
  misc_RNA (1)...(19): siRNA sense strand
gaucacuccgucccacgaa

SEQ ID NO: 362253 - RNA, 19 nt, Homo sapiens
  misc_RNA (1)...(19): siRNA sense strand
ggcagaaucgucucuuuac

SEQ ID NO: 362254 - RNA, 19 nt, Homo sapiens
  misc_RNA (1)...(19): siRNA sense strand
gagggcaaccaucgacugu

SEQ ID NO: 362255 - RNA, 19 nt, Homo sapiens
  misc_RNA (1)...(19): siRNA sense strand
ggaucuugaagcuuagaaa

SEQ ID NO: 362256 - RNA, 19 nt, Homo sapiens
  misc_RNA (1)...(19): siRNA sense strand
uaaacaggagcagaacuug

SEQ ID NO: 362257 - RNA, 19 nt, Homo sapiens
  misc_RNA (1)...(19): siRNA sense strand
guugagaucccugaauauc

SEQ ID NO: 362258 - RNA, 19 nt, Homo sapiens
  misc_RNA (1)...(19): siRNA sense strand
ugagaagaccacagaugga

SEQ ID NO: 362259 - RNA, 19 nt, Homo sapiens
  misc_RNA (1)...(19): siRNA sense strand
cuucgacuaugaguauuug

SEQ ID NO: 362260 - RNA, 19 nt, Homo sapiens
  misc_RNA (1)...(19): siRNA sense strand
ugaauccgaacgaagaaga

SEQ ID NO: 362261 - RNA, 19 nt, Homo sapiens
  misc_RNA (1)...(19): siRNA sense strand
ccgcacaccuguaaaagug

SEQ ID NO: 362262 - RNA, 19 nt, Homo sapiens
  misc_RNA (1)...(19): siRNA sense strand
cugaauaucggaacaagca

SEQ ID NO: 362263 - RNA, 19 nt, Homo sapiens
  misc_RNA (1)...(19): siRNA sense strand
ggacauuggaagaaagaac

SEQ ID NO: 362264 - RNA, 19 nt, Homo sapiens
  misc_RNA (1)...(19): siRNA sense strand
gacggacauuggaagaaag

SEQ ID NO: 362265 - RNA, 19 nt, Homo sapiens
  misc_RNA (1)...(19): siRNA sense strand
cgagacggacauuggaaga

SEQ ID NO: 362266 - RNA, 19 nt, Homo sapiens
  misc_RNA (1)...(19): siRNA sense strand
gcacauggauuauaaguau

SEQ ID NO: 362267 - RNA, 19 nt, Homo sapiens
  misc_RNA (1)...(19): siRNA sense strand
caacaagccucucauaguu

SEQ ID NO: 362268 - RNA, 19 nt, Homo sapiens
  misc_RNA (1)...(19): siRNA sense strand
caacagaauuaccaugaua

SEQ ID NO: 362269 - RNA, 19 nt, Homo sapiens
  misc_RNA (1)...(19): siRNA sense strand
ggaagaggauggaaacuga

SEQ ID NO: 362270 - RNA, 19 nt, Homo sapiens
  misc_RNA (1)...(19): siRNA sense strand
ggacggaugugcacaguga

SEQ ID NO: 362271 - RNA, 19 nt, Homo sapiens
  misc_RNA (1)...(19): siRNA sense strand
ccaaauacaucgcauuaga

SEQ ID NO: 362272 - RNA, 19 nt, Homo sapiens
  misc_RNA (1)...(19): siRNA sense strand
gcaagugcgucagcauuua

SEQ ID NO: 362273 - RNA, 19 nt, Homo sapiens
  misc_RNA (1)...(19): siRNA sense strand
caacaaaugugaugugaag

SEQ ID NO: 362274 - RNA, 19 nt, Homo sapiens
  misc_RNA (1)...(19): siRNA sense strand
gaagggaaauaaagugaau

SEQ ID NO: 362275 - RNA, 19 nt, Homo sapiens
  misc_RNA (1)...(19): siRNA sense strand
ugaggaagguguuauuaaa

SEQ ID NO: 362276 - RNA, 19 nt, Homo sapiens
  misc_RNA (1)...(19): siRNA sense strand
ugaaugaggugcugaauag

SEQ ID NO: 362277 - RNA, 19 nt, Homo sapiens
  misc_RNA (1)...(19): siRNA sense strand
guacugggauuuaaugaau

SEQ ID NO: 362278 - RNA, 19 nt, Homo sapiens
  misc_RNA (1)...(19): siRNA sense strand
ggacaauguugcuaaagau

SEQ ID NO: 362279 - RNA, 19 nt, Homo sapiens
  misc_RNA (1)...(19): siRNA sense strand
caucagaccucucuucauc

SEQ ID NO: 362280 - RNA, 19 nt, Homo sapiens
  misc_RNA (1)...(19): siRNA sense strand
gauagacacguguuugaua

SEQ ID NO: 362281 - RNA, 19 nt, Homo sapiens
  misc_RNA (1)...(19): siRNA sense strand
ggaaaugggagaugauuau

SEQ ID NO: 362282 - RNA, 19 nt, Homo sapiens
  misc_RNA (1)...(19): siRNA sense strand
gauagacuuucacaaauuc

SEQ ID NO: 362283 - RNA, 19 nt, Homo sapiens
  misc_RNA (1)...(19): siRNA sense strand
uagcugaacuuucugaaga

SEQ ID NO: 362284 - RNA, 19 nt, Homo sapiens
  misc_RNA (1)...(19): siRNA sense strand
cgacaaggaucauuacaag

SEQ ID NO: 362285 - RNA, 19 nt, Homo sapiens
  misc_RNA (1)...(19): siRNA sense strand
gaagaaugcucagaagaag

SEQ ID NO: 362286 - RNA, 19 nt, Homo sapiens
  misc_RNA (1)...(19): siRNA sense strand
cgaaagacuccaaccguua

SEQ ID NO: 362287 - RNA, 19 nt, Homo sapiens
  misc_RNA (1)...(19): siRNA sense strand
ggaagguguuauuaaaguu

SEQ ID NO: 362288 - RNA, 19 nt, Homo sapiens
  misc_RNA (1)...(19): siRNA sense strand
gaauuaccaugauagacuu

SEQ ID NO: 362289 - RNA, 19 nt, Homo sapiens
  misc_RNA (1)...(19): siRNA sense strand
caugauagacuuucacaaa

SEQ ID NO: 362290 - RNA, 19 nt, Homo sapiens
  misc_RNA (1)...(19): siRNA sense strand
gaagaaagccaagacuaug

SEQ ID NO: 362291 - RNA, 19 nt, Homo sapiens
  misc_RNA (1)...(19): siRNA sense strand
gaaaugggagaugauuaua

SEQ ID NO: 362292 - RNA, 19 nt, Homo sapiens
  misc_RNA (1)...(19): siRNA sense strand
ugaaggauucccuguaaua

SEQ ID NO: 362293 - RNA, 19 nt, Homo sapiens
  misc_RNA (1)...(19): siRNA sense strand
gaaagacuccaaccguuau

SEQ ID NO: 362294 - RNA, 19 nt, Homo sapiens
  misc_RNA (1)...(19): siRNA sense strand
gaacaucagaccucucuuc

SEQ ID NO: 362295 - RNA, 19 nt, Homo sapiens
  misc_RNA (1)...(19): siRNA sense strand
cagaaguacugggauuuaa

SEQ ID NO: 362296 - RNA, 19 nt, Homo sapiens
  misc_RNA (1)...(19): siRNA sense strand
uaaagacgaugcccauuac

SEQ ID NO: 362297 - RNA, 19 nt, Homo sapiens
  misc_RNA (1)...(19): siRNA sense strand
caaggaucauuacaaguug

SEQ ID NO: 362298 - RNA, 19 nt, Homo sapiens
  misc_RNA (1)...(19): siRNA sense strand
caaagcaaauucgagagaa

SEQ ID NO: 362299 - RNA, 19 nt, Homo sapiens
  misc_RNA (1)...(19): siRNA sense strand
ucugaaggauucccuguaa

SEQ ID NO: 362300 - RNA, 19 nt, Homo sapiens
  misc_RNA (1)...(19): siRNA sense strand
gaagagaauagcugaacuu

SEQ ID NO: 362301 - RNA, 19 nt, Homo sapiens
  misc_RNA (1)...(19): siRNA sense strand
guucuaugcugauuugaug

SEQ ID NO: 362302 - RNA, 19 nt, Homo sapiens
  misc_RNA (1)...(19): siRNA sense strand
gaaguacugggauuuaaug

SEQ ID NO: 362303 - RNA, 19 nt, Homo sapiens
  misc_RNA (1)...(19): siRNA sense strand
gcaaagcaaauucgagaga

SEQ ID NO: 362304 - RNA, 19 nt, Homo sapiens
  misc_RNA (1)...(19): siRNA sense strand
caaaugugaugugaagaga

SEQ ID NO: 362305 - RNA, 19 nt, Homo sapiens
  misc_RNA (1)...(19): siRNA sense strand
gaagaggaaagcugguaaa

SEQ ID NO: 362306 - RNA, 19 nt, Homo sapiens
  misc_RNA (1)...(19): siRNA sense strand
gaagcagaguuuggaguau

SEQ ID NO: 362307 - RNA, 19 nt, Homo sapiens
  misc_RNA (1)...(19): siRNA sense strand
ugaagaaugcucagaagaa

SEQ ID NO: 362308 - RNA, 19 nt, Homo sapiens
  misc_RNA (1)...(19): siRNA sense strand
auaaagacgaugcccauua

SEQ ID NO: 362309 - RNA, 19 nt, Homo sapiens
  misc_RNA (1)...(19): siRNA sense strand
ugaauauucucuacgacaa

SEQ ID NO: 362310 - RNA, 19 nt, Homo sapiens
  misc_RNA (1)...(19): siRNA sense strand
guguugacauggacgauaa

SEQ ID NO: 362311 - RNA, 19 nt, Homo sapiens
  misc_RNA (1)...(19): siRNA sense strand
uaccaaauacaucgcauua

SEQ ID NO: 362312 - RNA, 19 nt, Homo sapiens
  misc_RNA (1)...(19): siRNA sense strand
acgaagagaugcuggaaau

SEQ ID NO: 362313 - RNA, 19 nt, Homo sapiens
  misc_RNA (1)...(19): siRNA sense strand
cuagaacucuuccagaaca

SEQ ID NO: 362314 - RNA, 19 nt, Homo sapiens
  misc_RNA (1)...(19): siRNA sense strand
acaaggaucauuacaaguu

SEQ ID NO: 362315 - RNA, 19 nt, Homo sapiens
  misc_RNA (1)...(19): siRNA sense strand
aaagcaaauucgagagaaa

SEQ ID NO: 362316 - RNA, 19 nt, Homo sapiens
  misc_RNA (1)...(19): siRNA sense strand
ggaagaggaaagcugguaa

SEQ ID NO: 362317 - RNA, 19 nt, Homo sapiens
  misc_RNA (1)...(19): siRNA sense strand
gaugaaguauggcgacucu

SEQ ID NO: 362318 - RNA, 19 nt, Homo sapiens
  misc_RNA (1)...(19): siRNA sense strand
ccaagacuaugaagaaugc

SEQ ID NO: 362319 - RNA, 19 nt, Homo sapiens
  misc_RNA (1)...(19): siRNA sense strand
ugaagaaagccaagacuau

SEQ ID NO: 362320 - RNA, 19 nt, Homo sapiens
  misc_RNA (1)...(19): siRNA sense strand
gaccucacguugucgaaga

SEQ ID NO: 362321 - RNA, 19 nt, Homo sapiens
  misc_RNA (1)...(19): siRNA sense strand
gugcugcgguccuguaugu

SEQ ID NO: 362322 - RNA, 19 nt, Homo sapiens
  misc_RNA (1)...(19): siRNA sense strand
gccaacaaaugugauguga

SEQ ID NO: 362323 - RNA, 19 nt, Homo sapiens
  misc_RNA (1)...(19): siRNA sense strand
gagcaagugcgucagcauu

SEQ ID NO: 362324 - RNA, 19 nt, Homo sapiens
  misc_RNA (1)...(19): siRNA sense strand
agacacguguuugauauga

SEQ ID NO: 362325 - RNA, 19 nt, Homo sapiens
  misc_RNA (1)...(19): siRNA sense strand
auacaucgcauuagacauu

SEQ ID NO: 362326 - RNA, 19 nt, Homo sapiens
  misc_RNA (1)...(19): siRNA sense strand
caaccaggagggacgauaa

SEQ ID NO: 362327 - RNA, 19 nt, Homo sapiens
  misc_RNA (1)...(19): siRNA sense strand
gcacauuacaacuucaaga

SEQ ID NO: 362328 - RNA, 19 nt, Homo sapiens
  misc_RNA (1)...(19): siRNA sense strand
caucaacaagccucucaua

SEQ ID NO: 362329 - RNA, 19 nt, Homo sapiens
  misc_RNA (1)...(19): siRNA sense strand
ggauuugucugagcagugu

SEQ ID NO: 362330 - RNA, 19 nt, Homo sapiens
  misc_RNA (1)...(19): siRNA sense strand
gggagcagcuagaacucuu

SEQ ID NO: 362331 - RNA, 19 nt, Homo sapiens
  misc_RNA (1)...(19): siRNA sense strand
ucauagaccucacguuguc

SEQ ID NO: 362332 - RNA, 19 nt, Homo sapiens
  misc_RNA (1)...(19): siRNA sense strand
ucagaccucucuucaucaa

SEQ ID NO: 362333 - RNA, 19 nt, Homo sapiens
  misc_RNA (1)...(19): siRNA sense strand
gaauagcugaacuuucuga

SEQ ID NO: 362334 - RNA, 19 nt, Homo sapiens
  misc_RNA (1)...(19): siRNA sense strand
ggaaggccauaauauagcu

SEQ ID NO: 362335 - RNA, 19 nt, Homo sapiens
  misc_RNA (1)...(19): siRNA sense strand
ucagaaguacugggauuua

SEQ ID NO: 362336 - RNA, 19 nt, Homo sapiens
  misc_RNA (1)...(19): siRNA sense strand
ugaugaauauucucuacga

SEQ ID NO: 362337 - RNA, 19 nt, Homo sapiens
  misc_RNA (1)...(19): siRNA sense strand
auagacacguguuugauau

SEQ ID NO: 362338 - RNA, 19 nt, Homo sapiens
  misc_RNA (1)...(19): siRNA sense strand
caugauaagauaccagaaa

SEQ ID NO: 362339 - RNA, 19 nt, Homo sapiens
  misc_RNA (1)...(19): siRNA sense strand
caaccaagucucuguuugu

SEQ ID NO: 362340 - RNA, 19 nt, Homo sapiens
  misc_RNA (1)...(19): siRNA sense strand
uggacaauguugcuaaaga

SEQ ID NO: 362341 - RNA, 19 nt, Homo sapiens
  misc_RNA (1)...(19): siRNA sense strand
gauuaugugcgacugauga

SEQ ID NO: 362342 - RNA, 19 nt, Homo sapiens
  misc_RNA (1)...(19): siRNA sense strand
gagugaagacgaagagaug

SEQ ID NO: 362343 - RNA, 19 nt, Homo sapiens
  misc_RNA (1)...(19): siRNA sense strand
gaagaagagcugagaacag

SEQ ID NO: 362344 - RNA, 19 nt, Homo sapiens
  misc_RNA (1)...(19): siRNA sense strand
aaacugaggaguccaggaa

SEQ ID NO: 362345 - RNA, 19 nt, Homo sapiens
  misc_RNA (1)...(19): siRNA sense strand
gugaaugaggugcugaaua

SEQ ID NO: 362346 - RNA, 19 nt, Homo sapiens
  misc_RNA (1)...(19): siRNA sense strand
gaaggauucccuguaauag

SEQ ID NO: 362347 - RNA, 19 nt, Homo sapiens
  misc_RNA (1)...(19): siRNA sense strand
aagcagaguuuggaguauu

SEQ ID NO: 362348 - RNA, 19 nt, Homo sapiens
  misc_RNA (1)...(19): siRNA sense strand
cagccaucaugaagaaauu

SEQ ID NO: 362349 - RNA, 19 nt, Homo sapiens
  misc_RNA (1)...(19): siRNA sense strand
gaagaagagggaacgagau

SEQ ID NO: 362350 - RNA, 19 nt, Homo sapiens
  misc_RNA (1)...(19): siRNA sense strand
aaacagaggcuugcgauag

SEQ ID NO: 362351 - RNA, 19 nt, Homo sapiens
  misc_RNA (1)...(19): siRNA sense strand
ucaacaagccucucauagu

SEQ ID NO: 362352 - RNA, 19 nt, Homo sapiens
  misc_RNA (1)...(19): siRNA sense strand
gaacucuuccagaacauca

SEQ ID NO: 362353 - RNA, 19 nt, Homo sapiens
  misc_RNA (1)...(19): siRNA sense strand
aaugugaugugaagagaau

SEQ ID NO: 362354 - RNA, 19 nt, Homo sapiens
  misc_RNA (1)...(19): siRNA sense strand
gugaagaaagccaagacua

SEQ ID NO: 362355 - RNA, 19 nt, Homo sapiens
  misc_RNA (1)...(19): siRNA sense strand
agaagcagaguuuggagua

SEQ ID NO: 362356 - RNA, 19 nt, Homo sapiens
  misc_RNA (1)...(19): siRNA sense strand
agaccucucuucaucaaca

SEQ ID NO: 362357 - RNA, 19 nt, Homo sapiens
  misc_RNA (1)...(19): siRNA sense strand
gacaauguugcuaaagauu

SEQ ID NO: 362358 - RNA, 19 nt, Homo sapiens
  misc_RNA (1)...(19): siRNA sense strand
uggagaguaugacagugua

SEQ ID NO: 362359 - RNA, 19 nt, Homo sapiens
  misc_RNA (1)...(19): siRNA sense strand
cugggaaggccauaauaua

SEQ ID NO: 362360 - RNA, 19 nt, Homo sapiens
  misc_RNA (1)...(19): siRNA sense strand
aggaagguguuauuaaagu

SEQ ID NO: 362361 - RNA, 19 nt, Homo sapiens
  misc_RNA (1)...(19): siRNA sense strand
uugggcacauggauuauaa

SEQ ID NO: 362362 - RNA, 19 nt, Homo sapiens
  misc_RNA (1)...(19): siRNA sense strand
gacgagagcagacguggau

SEQ ID NO: 362363 - RNA, 19 nt, Homo sapiens
  misc_RNA (1)...(19): siRNA sense strand
gaagagaugcuggaaaucc

SEQ ID NO: 362364 - RNA, 19 nt, Homo sapiens
  misc_RNA (1)...(19): siRNA sense strand
ucaacagaauuaccaugau

SEQ ID NO: 362365 - RNA, 19 nt, Homo sapiens
  misc_RNA (1)...(19): siRNA sense strand
gggaagaggaaagcuggua

SEQ ID NO: 362366 - RNA, 19 nt, Homo sapiens
  misc_RNA (1)...(19): siRNA sense strand
ggauacagcuucaggcuuu

SEQ ID NO: 362367 - RNA, 19 nt, Homo sapiens
  misc_RNA (1)...(19): siRNA sense strand
ggacugacccacuguacaa

SEQ ID NO: 362368 - RNA, 19 nt, Homo sapiens
  misc_RNA (1)...(19): siRNA sense strand
gcaccgcgcuccaagucuu

SEQ ID NO: 362369 - RNA, 19 nt, Homo sapiens
  misc_RNA (1)...(19): siRNA sense strand
gccuggagcugcugaguga

SEQ ID NO: 362370 - RNA, 19 nt, Homo sapiens
  misc_RNA (1)...(19): siRNA sense strand
gcucauguacugcuacgua

SEQ ID NO: 362371 - RNA, 19 nt, Homo sapiens
  misc_RNA (1)...(19): siRNA sense strand
ugacuccucuucucuacaa

SEQ ID NO: 362372 - RNA, 19 nt, Homo sapiens
  misc_RNA (1)...(19): siRNA sense strand
ggaagaagaccuuuaucca

SEQ ID NO: 362373 - RNA, 19 nt, Homo sapiens
  misc_RNA (1)...(19): siRNA sense strand
ugaaugugcugguguccuu

SEQ ID NO: 362374 - RNA, 19 nt, Homo sapiens
  misc_RNA (1)...(19): siRNA sense strand
uaacugcuuuccugaaugg

SEQ ID NO: 362375 - RNA, 19 nt, Homo sapiens
  misc_RNA (1)...(19): siRNA sense strand
gagccaucguggucaugua

SEQ ID NO: 362376 - RNA, 19 nt, Homo sapiens
  misc_RNA (1)...(19): siRNA sense strand
cugacccacuguacaauuu

SEQ ID NO: 362377 - RNA, 19 nt, Homo sapiens
  misc_RNA (1)...(19): siRNA sense strand
ccuaauggauacagcuuca

SEQ ID NO: 362378 - RNA, 19 nt, Homo sapiens
  misc_RNA (1)...(19): siRNA sense strand
guauggaagaagaccuuua

SEQ ID NO: 362379 - RNA, 19 nt, Homo sapiens
  misc_RNA (1)...(19): siRNA sense strand
uguacaauuucuaccacua

SEQ ID NO: 362380 - RNA, 19 nt, Homo sapiens
  misc_RNA (1)...(19): siRNA sense strand
cuccucagcuucaucguau

SEQ ID NO: 362381 - RNA, 19 nt, Homo sapiens
  misc_RNA (1)...(19): siRNA sense strand
acuaacugcuuuccugaau

SEQ ID NO: 362382 - RNA, 19 nt, Homo sapiens
  misc_RNA (1)...(19): siRNA sense strand
caauuucuaccacuacuuc

SEQ ID NO: 362383 - RNA, 19 nt, Homo sapiens
  misc_RNA (1)...(19): siRNA sense strand
uauggaagaagaccuuuau

SEQ ID NO: 362384 - RNA, 19 nt, Homo sapiens
  misc_RNA (1)...(19): siRNA sense strand
cuaacugcuuuccugaaug

SEQ ID NO: 362385 - RNA, 19 nt, Homo sapiens
  misc_RNA (1)...(19): siRNA sense strand
ccuuggcacuaacugcuuu

SEQ ID NO: 362386 - RNA, 19 nt, Homo sapiens
  misc_RNA (1)...(19): siRNA sense strand
gauacagcuucaggcuuug

SEQ ID NO: 362387 - RNA, 19 nt, Homo sapiens
  misc_RNA (1)...(19): siRNA sense strand
ccaucguggucauguaugu

SEQ ID NO: 362388 - RNA, 19 nt, Homo sapiens
  misc_RNA (1)...(19): siRNA sense strand
ccagagucccacccuaaug

SEQ ID NO: 362389 - RNA, 19 nt, Homo sapiens
  misc_RNA (1)...(19): siRNA sense strand
guacaauuucuaccacuac

SEQ ID NO: 362390 - RNA, 19 nt, Homo sapiens
  misc_RNA (1)...(19): siRNA sense strand
ucagcuucaucguauggaa

SEQ ID NO: 362391 - RNA, 19 nt, Homo sapiens
  misc_RNA (1)...(19): siRNA sense strand
gggccaaggugcuguucac

SEQ ID NO: 362392 - RNA, 19 nt, Homo sapiens
  misc_RNA (1)...(19): siRNA sense strand
ggagagcaccaccccauga

SEQ ID NO: 362393 - RNA, 19 nt, Homo sapiens
  misc_RNA (1)...(19): siRNA sense strand
ucagagccaucguggucau

SEQ ID NO: 362394 - RNA, 19 nt, Homo sapiens
  misc_RNA (1)...(19): siRNA sense strand
gacccacuguacaauuucu

SEQ ID NO: 362395 - RNA, 19 nt, Homo sapiens
  misc_RNA (1)...(19): siRNA sense strand
cagagucccacccuaaugg

SEQ ID NO: 362396 - RNA, 19 nt, Homo sapiens
  misc_RNA (1)...(19): siRNA sense strand
gagcgcagcuuccggauca

SEQ ID NO: 362397 - RNA, 19 nt, Homo sapiens
  misc_RNA (1)...(19): siRNA sense strand
caaccucacuaaugccaua

SEQ ID NO: 362398 - RNA, 19 nt, Homo sapiens
  misc_RNA (1)...(19): siRNA sense strand
gcacuggaggguuuaauuu

SEQ ID NO: 362399 - RNA, 19 nt, Homo sapiens
  misc_RNA (1)...(19): siRNA sense strand
gcagcaaccucacuaaugc

SEQ ID NO: 362400 - RNA, 19 nt, Homo sapiens
  misc_RNA (1)...(19): siRNA sense strand
ccuacaagcuggcugagaa

SEQ ID NO: 362401 - RNA, 19 nt, Homo sapiens
  misc_RNA (1)...(19): siRNA sense strand
gcaacaaccacaccugcua

SEQ ID NO: 362402 - RNA, 19 nt, Homo sapiens
  misc_RNA (1)...(19): siRNA sense strand
ggcuuugccuugaauuuaa

SEQ ID NO: 362403 - RNA, 19 nt, Homo sapiens
  misc_RNA (1)...(19): siRNA sense strand
gagcagagcgggaccaucu

SEQ ID NO: 362404 - RNA, 19 nt, Homo sapiens
  misc_RNA (1)...(19): siRNA sense strand
gcacgcugaucgagaaugg

SEQ ID NO: 362405 - RNA, 19 nt, Homo sapiens
  misc_RNA (1)...(19): siRNA sense strand
gcaaagacggcaacaacca

SEQ ID NO: 362406 - RNA, 19 nt, Homo sapiens
  misc_RNA (1)...(19): siRNA sense strand
uggagagccugaucaacaa

SEQ ID NO: 362407 - RNA, 19 nt, Homo sapiens
  misc_RNA (1)...(19): siRNA sense strand
caagcuggcugagaacauc

SEQ ID NO: 362408 - RNA, 19 nt, Homo sapiens
  misc_RNA (1)...(19): siRNA sense strand
ucuggaggcuucucauuca

SEQ ID NO: 362409 - RNA, 19 nt, Homo sapiens
  misc_RNA (1)...(19): siRNA sense strand
gcuuugccuugaauuuaaa

SEQ ID NO: 362410 - RNA, 19 nt, Homo sapiens
  misc_RNA (1)...(19): siRNA sense strand
cggcuuugccuugaauuua

SEQ ID NO: 362411 - RNA, 19 nt, Homo sapiens
  misc_RNA (1)...(19): siRNA sense strand
uggaggaguuggucaagga

SEQ ID NO: 362412 - RNA, 19 nt, Homo sapiens
  misc_RNA (1)...(19): siRNA sense strand
gcagcagcaaccucacuaa

SEQ ID NO: 362413 - RNA, 19 nt, Homo sapiens
  misc_RNA (1)...(19): siRNA sense strand
caacugcuccaaccucauc

SEQ ID NO: 362414 - RNA, 19 nt, Homo sapiens
  misc_RNA (1)...(19): siRNA sense strand
ccggaucaccuuugacuga

SEQ ID NO: 362415 - RNA, 19 nt, Homo sapiens
  misc_RNA (1)...(19): siRNA sense strand
cagcagcaccaccggcuuu

SEQ ID NO: 362416 - RNA, 19 nt, Homo sapiens
  misc_RNA (1)...(19): siRNA sense strand
uggaggaggugaccaaggu

SEQ ID NO: 362417 - RNA, 19 nt, Homo sapiens
  misc_RNA (1)...(19): siRNA sense strand
gauccucaaugcgcacaug

SEQ ID NO: 362418 - RNA, 19 nt, Homo sapiens
  misc_RNA (1)...(19): siRNA sense strand
ggaccaggagcucgacuuc

SEQ ID NO: 362419 - RNA, 19 nt, Homo sapiens
  misc_RNA (1)...(19): siRNA sense strand
ggaacuggauuuucuuugg

SEQ ID NO: 362420 - RNA, 19 nt, Homo sapiens
  misc_RNA (1)...(19): siRNA sense strand
gcacccaccggcuuugugu

SEQ ID NO: 362421 - RNA, 19 nt, Homo sapiens
  misc_RNA (1)...(19): siRNA sense strand
ggagagccugaucaacaaa

SEQ ID NO: 362422 - RNA, 19 nt, Homo sapiens
  misc_RNA (1)...(19): siRNA sense strand
caaauggagccuggagcua

SEQ ID NO: 362423 - RNA, 19 nt, Homo sapiens
  misc_RNA (1)...(19): siRNA sense strand
ccaccggcuuugccuugaa

SEQ ID NO: 362424 - RNA, 19 nt, Homo sapiens
  misc_RNA (1)...(19): siRNA sense strand
cagccucuuugcgucaaua

SEQ ID NO: 362425 - RNA, 19 nt, Homo sapiens
  misc_RNA (1)...(19): siRNA sense strand
gaucgagaauggagaaaag

SEQ ID NO: 362426 - RNA, 19 nt, Homo sapiens
  misc_RNA (1)...(19): siRNA sense strand
ccaccggccuguucucacu

SEQ ID NO: 362427 - RNA, 19 nt, Homo sapiens
  misc_RNA (1)...(19): siRNA sense strand
cccaggaucucaaggacau

SEQ ID NO: 362428 - RNA, 19 nt, Homo sapiens
  misc_RNA (1)...(19): siRNA sense strand
acuggacucucccucugua

SEQ ID NO: 362429 - RNA, 19 nt, Homo sapiens
  misc_RNA (1)...(19): siRNA sense strand
agacgacaggcuucacuuu

SEQ ID NO: 362430 - RNA, 19 nt, Homo sapiens
  misc_RNA (1)...(19): siRNA sense strand
acaggcggguucacguuug

SEQ ID NO: 362431 - RNA, 19 nt, Homo sapiens
  misc_RNA (1)...(19): siRNA sense strand
gcuuccggaucaccuuuga

SEQ ID NO: 362432 - RNA, 19 nt, Homo sapiens
  misc_RNA (1)...(19): siRNA sense strand
ugcaguggaucgaccagaa

SEQ ID NO: 362433 - RNA, 19 nt, Homo sapiens
  misc_RNA (1)...(19): siRNA sense strand
cuggagagccugaucaaca

SEQ ID NO: 362434 - RNA, 19 nt, Homo sapiens
  misc_RNA (1)...(19): siRNA sense strand
ggcacuggaggguuuaauu

SEQ ID NO: 362435 - RNA, 19 nt, Homo sapiens
  misc_RNA (1)...(19): siRNA sense strand
aauggagccuggagcuaga

SEQ ID NO: 362436 - RNA, 19 nt, Homo sapiens
  misc_RNA (1)...(19): siRNA sense strand
gcugaucgagaauggagaa

SEQ ID NO: 362437 - RNA, 19 nt, Homo sapiens
  misc_RNA (1)...(19): siRNA sense strand
ugagcccacuggaggaguu

SEQ ID NO: 362438 - RNA, 19 nt, Homo sapiens
  misc_RNA (1)...(19): siRNA sense strand
caucuggaggcuucucauu

SEQ ID NO: 362439 - RNA, 19 nt, Homo sapiens
  misc_RNA (1)...(19): siRNA sense strand
cagcagcaaccucacuaau

SEQ ID NO: 362440 - RNA, 19 nt, Homo sapiens
  misc_RNA (1)...(19): siRNA sense strand
gcagagcgggaccaucuac

SEQ ID NO: 362441 - RNA, 19 nt, Homo sapiens
  misc_RNA (1)...(19): siRNA sense strand
accaggagcucgacuucau

SEQ ID NO: 362442 - RNA, 19 nt, Homo sapiens
  misc_RNA (1)...(19): siRNA sense strand
ggaacagcgacucuugcuu

SEQ ID NO: 362443 - RNA, 19 nt, Homo sapiens
  misc_RNA (1)...(19): siRNA sense strand
ggcagcagcaaccucacua

SEQ ID NO: 362444 - RNA, 19 nt, Homo sapiens
  misc_RNA (1)...(19): siRNA sense strand
gcaccuccacaacaacauc

SEQ ID NO: 362445 - RNA, 19 nt, Homo sapiens
  misc_RNA (1)...(19): siRNA sense strand
ucugcaagauccucaaugc

SEQ ID NO: 362446 - RNA, 19 nt, Homo sapiens
  misc_RNA (1)...(19): siRNA sense strand
gagagccugaucaacaaau

SEQ ID NO: 362447 - RNA, 19 nt, Homo sapiens
  misc_RNA (1)...(19): siRNA sense strand
ccaccggcuuuguguuugg

SEQ ID NO: 362448 - RNA, 19 nt, Homo sapiens
  misc_RNA (1)...(19): siRNA sense strand
agagccugaucaacaaaug

SEQ ID NO: 362449 - RNA, 19 nt, Homo sapiens
  misc_RNA (1)...(19): siRNA sense strand
cuacaggcggguucacguu

SEQ ID NO: 362450 - RNA, 19 nt, Homo sapiens
  misc_RNA (1)...(19): siRNA sense strand
caccggcuuugccuugaau

SEQ ID NO: 362451 - RNA, 19 nt, Homo sapiens
  misc_RNA (1)...(19): siRNA sense strand
cagccaccaucaccaguac

SEQ ID NO: 362452 - RNA, 19 nt, Homo sapiens
  misc_RNA (1)...(19): siRNA sense strand
ccacagcaggugccacaca

SEQ ID NO: 362453 - RNA, 19 nt, Homo sapiens
  misc_RNA (1)...(19): siRNA sense strand
acccuccgguuucaacauu

SEQ ID NO: 362454 - RNA, 19 nt, Homo sapiens
  misc_RNA (1)...(19): siRNA sense strand
gagcgcagcuuccggauca

SEQ ID NO: 362455 - RNA, 19 nt, Homo sapiens
  misc_RNA (1)...(19): siRNA sense strand
caaccucacuaaugccaua

SEQ ID NO: 362456 - RNA, 19 nt, Homo sapiens
  misc_RNA (1)...(19): siRNA sense strand
gcacuggaggguuuaauuu

SEQ ID NO: 362457 - RNA, 19 nt, Homo sapiens
  misc_RNA (1)...(19): siRNA sense strand
gcagcaaccucacuaaugc

SEQ ID NO: 362458 - RNA, 19 nt, Homo sapiens
  misc_RNA (1)...(19): siRNA sense strand
ccuacaagcuggcugagaa

SEQ ID NO: 362459 - RNA, 19 nt, Homo sapiens
  misc_RNA (1)...(19): siRNA sense strand
gcaacaaccacaccugcua

SEQ ID NO: 362460 - RNA, 19 nt, Homo sapiens
  misc_RNA (1)...(19): siRNA sense strand
ggcuuugccuugaauuuaa

SEQ ID NO: 362461 - RNA, 19 nt, Homo sapiens
  misc_RNA (1)...(19): siRNA sense strand
gagcagagcgggaccaucu

SEQ ID NO: 362462 - RNA, 19 nt, Homo sapiens
  misc_RNA (1)...(19): siRNA sense strand
gcacgcugaucgagaaugg

SEQ ID NO: 362463 - RNA, 19 nt, Homo sapiens
  misc_RNA (1)...(19): siRNA sense strand
gcaaagacggcaacaacca

SEQ ID NO: 362464 - RNA, 19 nt, Homo sapiens
  misc_RNA (1)...(19): siRNA sense strand
uggagagccugaucaacaa

SEQ ID NO: 362465 - RNA, 19 nt, Homo sapiens
  misc_RNA (1)...(19): siRNA sense strand
caagcuggcugagaacauc

SEQ ID NO: 362466 - RNA, 19 nt, Homo sapiens
  misc_RNA (1)...(19): siRNA sense strand
ucuggaggcuucucauuca

SEQ ID NO: 362467 - RNA, 19 nt, Homo sapiens
  misc_RNA (1)...(19): siRNA sense strand
gcuuugccuugaauuuaaa

SEQ ID NO: 362468 - RNA, 19 nt, Homo sapiens
  misc_RNA (1)...(19): siRNA sense strand
cggcuuugccuugaauuua

SEQ ID NO: 362469 - RNA, 19 nt, Homo sapiens
  misc_RNA (1)...(19): siRNA sense strand
uggaggaguuggucaagga

SEQ ID NO: 362470 - RNA, 19 nt, Homo sapiens
  misc_RNA (1)...(19): siRNA sense strand
gcagcagcaaccucacuaa

SEQ ID NO: 362471 - RNA, 19 nt, Homo sapiens
  misc_RNA (1)...(19): siRNA sense strand
caacugcuccaaccucauc

SEQ ID NO: 362472 - RNA, 19 nt, Homo sapiens
  misc_RNA (1)...(19): siRNA sense strand
ccggaucaccuuugacuga

SEQ ID NO: 362473 - RNA, 19 nt, Homo sapiens
  misc_RNA (1)...(19): siRNA sense strand
cagcagcaccaccggcuuu

SEQ ID NO: 362474 - RNA, 19 nt, Homo sapiens
  misc_RNA (1)...(19): siRNA sense strand
uggaggaggugaccaaggu

SEQ ID NO: 362475 - RNA, 19 nt, Homo sapiens
  misc_RNA (1)...(19): siRNA sense strand
gauccucaaugcgcacaug

SEQ ID NO: 362476 - RNA, 19 nt, Homo sapiens
  misc_RNA (1)...(19): siRNA sense strand
ggaccaggagcucgacuuc

SEQ ID NO: 362477 - RNA, 19 nt, Homo sapiens
  misc_RNA (1)...(19): siRNA sense strand
ggaacuggauuuucuuugg

SEQ ID NO: 362478 - RNA, 19 nt, Homo sapiens
  misc_RNA (1)...(19): siRNA sense strand
gcacccaccggcuuugugu

SEQ ID NO: 362479 - RNA, 19 nt, Homo sapiens
  misc_RNA (1)...(19): siRNA sense strand
ggagagccugaucaacaaa

SEQ ID NO: 362480 - RNA, 19 nt, Homo sapiens
  misc_RNA (1)...(19): siRNA sense strand
caaauggagccuggagcua

SEQ ID NO: 362481 - RNA, 19 nt, Homo sapiens
  misc_RNA (1)...(19): siRNA sense strand
ccaccggcuuugccuugaa

SEQ ID NO: 362482 - RNA, 19 nt, Homo sapiens
  misc_RNA (1)...(19): siRNA sense strand
cagccucuuugcgucaaua

SEQ ID NO: 362483 - RNA, 19 nt, Homo sapiens
  misc_RNA (1)...(19): siRNA sense strand
gaucgagaauggagaaaag

SEQ ID NO: 362484 - RNA, 19 nt, Homo sapiens
  misc_RNA (1)...(19): siRNA sense strand
ccaccggccuguucucacu

SEQ ID NO: 362485 - RNA, 19 nt, Homo sapiens
  misc_RNA (1)...(19): siRNA sense strand
cccaggaucucaaggacau

SEQ ID NO: 362486 - RNA, 19 nt, Homo sapiens
  misc_RNA (1)...(19): siRNA sense strand
acuggacucucccucugua

SEQ ID NO: 362487 - RNA, 19 nt, Homo sapiens
  misc_RNA (1)...(19): siRNA sense strand
agacgacaggcuucacuuu

SEQ ID NO: 362488 - RNA, 19 nt, Homo sapiens
  misc_RNA (1)...(19): siRNA sense strand
acaggcggguucacguuug

SEQ ID NO: 362489 - RNA, 19 nt, Homo sapiens
  misc_RNA (1)...(19): siRNA sense strand
gcuuccggaucaccuuuga

SEQ ID NO: 362490 - RNA, 19 nt, Homo sapiens
  misc_RNA (1)...(19): siRNA sense strand
ugcaguggaucgaccagaa

SEQ ID NO: 362491 - RNA, 19 nt, Homo sapiens
  misc_RNA (1)...(19): siRNA sense strand
cuggagagccugaucaaca

SEQ ID NO: 362492 - RNA, 19 nt, Homo sapiens
  misc_RNA (1)...(19): siRNA sense strand
ggcacuggaggguuuaauu

SEQ ID NO: 362493 - RNA, 19 nt, Homo sapiens
  misc_RNA (1)...(19): siRNA sense strand
aauggagccuggagcuaga

SEQ ID NO: 362494 - RNA, 19 nt, Homo sapiens
  misc_RNA (1)...(19): siRNA sense strand
gcugaucgagaauggagaa

SEQ ID NO: 362495 - RNA, 19 nt, Homo sapiens
  misc_RNA (1)...(19): siRNA sense strand
ugagcccacuggaggaguu

SEQ ID NO: 362496 - RNA, 19 nt, Homo sapiens
  misc_RNA (1)...(19): siRNA sense strand
caucuggaggcuucucauu

SEQ ID NO: 362497 - RNA, 19 nt, Homo sapiens
  misc_RNA (1)...(19): siRNA sense strand
cagcagcaaccucacuaau

SEQ ID NO: 362498 - RNA, 19 nt, Homo sapiens
  misc_RNA (1)...(19): siRNA sense strand
gcagagcgggaccaucuac

SEQ ID NO: 362499 - RNA, 19 nt, Homo sapiens
  misc_RNA (1)...(19): siRNA sense strand
accaggagcucgacuucau

SEQ ID NO: 362500 - RNA, 19 nt, Homo sapiens
  misc_RNA (1)...(19): siRNA sense strand
ggaacagcgacucuugcuu

SEQ ID NO: 362501 - RNA, 19 nt, Homo sapiens
  misc_RNA (1)...(19): siRNA sense strand
ggcagcagcaaccucacua

SEQ ID NO: 362502 - RNA, 19 nt, Homo sapiens
  misc_RNA (1)...(19): siRNA sense strand
gcaccuccacaacaacauc

SEQ ID NO: 362503 - RNA, 19 nt, Homo sapiens
  misc_RNA (1)...(19): siRNA sense strand
ucugcaagauccucaaugc

SEQ ID NO: 362504 - RNA, 19 nt, Homo sapiens
  misc_RNA (1)...(19): siRNA sense strand
gagagccugaucaacaaau

SEQ ID NO: 362505 - RNA, 19 nt, Homo sapiens
  misc_RNA (1)...(19): siRNA sense strand
ccaccggcuuuguguuugg

SEQ ID NO: 362506 - RNA, 19 nt, Homo sapiens
  misc_RNA (1)...(19): siRNA sense strand
agagccugaucaacaaaug

SEQ ID NO: 362507 - RNA, 19 nt, Homo sapiens
  misc_RNA (1)...(19): siRNA sense strand
cuacaggcggguucacguu

SEQ ID NO: 362508 - RNA, 19 nt, Homo sapiens
  misc_RNA (1)...(19): siRNA sense strand
caccggcuuugccuugaau

SEQ ID NO: 362509 - RNA, 19 nt, Homo sapiens
  misc_RNA (1)...(19): siRNA sense strand
cagccaccaucaccaguac

SEQ ID NO: 362510 - RNA, 19 nt, Homo sapiens
  misc_RNA (1)...(19): siRNA sense strand
ccacagcaggugccacaca

SEQ ID NO: 362511 - RNA, 19 nt, Homo sapiens
  misc_RNA (1)...(19): siRNA sense strand
acccuccgguuucaacauu

SEQ ID NO: 362512 - RNA, 19 nt, Homo sapiens
  misc_RNA (1)...(19): siRNA sense strand
gagcgcagcuuccggauca

SEQ ID NO: 362513 - RNA, 19 nt, Homo sapiens
  misc_RNA (1)...(19): siRNA sense strand
caaccucacuaaugccaua

SEQ ID NO: 362514 - RNA, 19 nt, Homo sapiens
  misc_RNA (1)...(19): siRNA sense strand
gcacuggaggguuuaauuu

SEQ ID NO: 362515 - RNA, 19 nt, Homo sapiens
  misc_RNA (1)...(19): siRNA sense strand
gcagcaaccucacuaaugc

SEQ ID NO: 362516 - RNA, 19 nt, Homo sapiens
  misc_RNA (1)...(19): siRNA sense strand
ccuacaagcuggcugagaa

SEQ ID NO: 362517 - RNA, 19 nt, Homo sapiens
  misc_RNA (1)...(19): siRNA sense strand
gcaacaaccacaccugcua

SEQ ID NO: 362518 - RNA, 19 nt, Homo sapiens
  misc_RNA (1)...(19): siRNA sense strand
ggcuuugccuugaauuuaa

SEQ ID NO: 362519 - RNA, 19 nt, Homo sapiens
  misc_RNA (1)...(19): siRNA sense strand
gagcagagcgggaccaucu

SEQ ID NO: 362520 - RNA, 19 nt, Homo sapiens
  misc_RNA (1)...(19): siRNA sense strand
gcacgcugaucgagaaugg

SEQ ID NO: 362521 - RNA, 19 nt, Homo sapiens
  misc_RNA (1)...(19): siRNA sense strand
gcaaagacggcaacaacca

SEQ ID NO: 362522 - RNA, 19 nt, Homo sapiens
  misc_RNA (1)...(19): siRNA sense strand
uggagagccugaucaacaa

SEQ ID NO: 362523 - RNA, 19 nt, Homo sapiens
  misc_RNA (1)...(19): siRNA sense strand
caagcuggcugagaacauc

SEQ ID NO: 362524 - RNA, 19 nt, Homo sapiens
  misc_RNA (1)...(19): siRNA sense strand
ucuggaggcuucucauuca

SEQ ID NO: 362525 - RNA, 19 nt, Homo sapiens
  misc_RNA (1)...(19): siRNA sense strand
gcuuugccuugaauuuaaa

SEQ ID NO: 362526 - RNA, 19 nt, Homo sapiens
  misc_RNA (1)...(19): siRNA sense strand
cggcuuugccuugaauuua

SEQ ID NO: 362527 - RNA, 19 nt, Homo sapiens
  misc_RNA (1)...(19): siRNA sense strand
uggaggaguuggucaagga

SEQ ID NO: 362528 - RNA, 19 nt, Homo sapiens
  misc_RNA (1)...(19): siRNA sense strand
gcagcagcaaccucacuaa

SEQ ID NO: 362529 - RNA, 19 nt, Homo sapiens
  misc_RNA (1)...(19): siRNA sense strand
caacugcuccaaccucauc

SEQ ID NO: 362530 - RNA, 19 nt, Homo sapiens
  misc_RNA (1)...(19): siRNA sense strand
ccggaucaccuuugacuga

SEQ ID NO: 362531 - RNA, 19 nt, Homo sapiens
  misc_RNA (1)...(19): siRNA sense strand
cagcagcaccaccggcuuu

SEQ ID NO: 362532 - RNA, 19 nt, Homo sapiens
  misc_RNA (1)...(19): siRNA sense strand
uggaggaggugaccaaggu

SEQ ID NO: 362533 - RNA, 19 nt, Homo sapiens
  misc_RNA (1)...(19): siRNA sense strand
gauccucaaugcgcacaug

SEQ ID NO: 362534 - RNA, 19 nt, Homo sapiens
  misc_RNA (1)...(19): siRNA sense strand
ggaccaggagcucgacuuc

SEQ ID NO: 362535 - RNA, 19 nt, Homo sapiens
  misc_RNA (1)...(19): siRNA sense strand
ggaacuggauuuucuuugg

SEQ ID NO: 362536 - RNA, 19 nt, Homo sapiens
  misc_RNA (1)...(19): siRNA sense strand
gcacccaccggcuuugugu

SEQ ID NO: 362537 - RNA, 19 nt, Homo sapiens
  misc_RNA (1)...(19): siRNA sense strand
ggagagccugaucaacaaa

SEQ ID NO: 362538 - RNA, 19 nt, Homo sapiens
  misc_RNA (1)...(19): siRNA sense strand
caaauggagccuggagcua

SEQ ID NO: 362539 - RNA, 19 nt, Homo sapiens
  misc_RNA (1)...(19): siRNA sense strand
ccaccggcuuugccuugaa

SEQ ID NO: 362540 - RNA, 19 nt, Homo sapiens
  misc_RNA (1)...(19): siRNA sense strand
cagccucuuugcgucaaua

SEQ ID NO: 362541 - RNA, 19 nt, Homo sapiens
  misc_RNA (1)...(19): siRNA sense strand
gaucgagaauggagaaaag

SEQ ID NO: 362542 - RNA, 19 nt, Homo sapiens
  misc_RNA (1)...(19): siRNA sense strand
ccaccggccuguucucacu

SEQ ID NO: 362543 - RNA, 19 nt, Homo sapiens
  misc_RNA (1)...(19): siRNA sense strand
cccaggaucucaaggacau

SEQ ID NO: 362544 - RNA, 19 nt, Homo sapiens
  misc_RNA (1)...(19): siRNA sense strand
acuggacucucccucugua

SEQ ID NO: 362545 - RNA, 19 nt, Homo sapiens
  misc_RNA (1)...(19): siRNA sense strand
agacgacaggcuucacuuu

SEQ ID NO: 362546 - RNA, 19 nt, Homo sapiens
  misc_RNA (1)...(19): siRNA sense strand
acaggcggguucacguuug

SEQ ID NO: 362547 - RNA, 19 nt, Homo sapiens
  misc_RNA (1)...(19): siRNA sense strand
gcuuccggaucaccuuuga

SEQ ID NO: 362548 - RNA, 19 nt, Homo sapiens
  misc_RNA (1)...(19): siRNA sense strand
ugcaguggaucgaccagaa

SEQ ID NO: 362549 - RNA, 19 nt, Homo sapiens
  misc_RNA (1)...(19): siRNA sense strand
cuggagagccugaucaaca

SEQ ID NO: 362550 - RNA, 19 nt, Homo sapiens
  misc_RNA (1)...(19): siRNA sense strand
ggcacuggaggguuuaauu

SEQ ID NO: 362551 - RNA, 19 nt, Homo sapiens
  misc_RNA (1)...(19): siRNA sense strand
aauggagccuggagcuaga

SEQ ID NO: 362552 - RNA, 19 nt, Homo sapiens
  misc_RNA (1)...(19): siRNA sense strand
gcugaucgagaauggagaa

SEQ ID NO: 362553 - RNA, 19 nt, Homo sapiens
  misc_RNA (1)...(19): siRNA sense strand
ugagcccacuggaggaguu

SEQ ID NO: 362554 - RNA, 19 nt, Homo sapiens
  misc_RNA (1)...(19): siRNA sense strand
caucuggaggcuucucauu

SEQ ID NO: 362555 - RNA, 19 nt, Homo sapiens
  misc_RNA (1)...(19): siRNA sense strand
cagcagcaaccucacuaau

SEQ ID NO: 362556 - RNA, 19 nt, Homo sapiens
  misc_RNA (1)...(19): siRNA sense strand
gcagagcgggaccaucuac

SEQ ID NO: 362557 - RNA, 19 nt, Homo sapiens
  misc_RNA (1)...(19): siRNA sense strand
accaggagcucgacuucau

SEQ ID NO: 362558 - RNA, 19 nt, Homo sapiens
  misc_RNA (1)...(19): siRNA sense strand
ggaacagcgacucuugcuu

SEQ ID NO: 362559 - RNA, 19 nt, Homo sapiens
  misc_RNA (1)...(19): siRNA sense strand
ggcagcagcaaccucacua

SEQ ID NO: 362560 - RNA, 19 nt, Homo sapiens
  misc_RNA (1)...(19): siRNA sense strand
gcaccuccacaacaacauc

SEQ ID NO: 362561 - RNA, 19 nt, Homo sapiens
  misc_RNA (1)...(19): siRNA sense strand
ucugcaagauccucaaugc

SEQ ID NO: 362562 - RNA, 19 nt, Homo sapiens
  misc_RNA (1)...(19): siRNA sense strand
gagagccugaucaacaaau

SEQ ID NO: 362563 - RNA, 19 nt, Homo sapiens
  misc_RNA (1)...(19): siRNA sense strand
ccaccggcuuuguguuugg

SEQ ID NO: 362564 - RNA, 19 nt, Homo sapiens
  misc_RNA (1)...(19): siRNA sense strand
agagccugaucaacaaaug

SEQ ID NO: 362565 - RNA, 19 nt, Homo sapiens
  misc_RNA (1)...(19): siRNA sense strand
cuacaggcggguucacguu

SEQ ID NO: 362566 - RNA, 19 nt, Homo sapiens
  misc_RNA (1)...(19): siRNA sense strand
caccggcuuugccuugaau

SEQ ID NO: 362567 - RNA, 19 nt, Homo sapiens
  misc_RNA (1)...(19): siRNA sense strand
cagccaccaucaccaguac

SEQ ID NO: 362568 - RNA, 19 nt, Homo sapiens
  misc_RNA (1)...(19): siRNA sense strand
ccacagcaggugccacaca

SEQ ID NO: 362569 - RNA, 19 nt, Homo sapiens
  misc_RNA (1)...(19): siRNA sense strand
acccuccgguuucaacauu

SEQ ID NO: 362570 - RNA, 19 nt, Homo sapiens
  misc_RNA (1)...(19): siRNA sense strand
gagcgcagcuuccggauca

SEQ ID NO: 362571 - RNA, 19 nt, Homo sapiens
  misc_RNA (1)...(19): siRNA sense strand
caaccucacuaaugccaua

SEQ ID NO: 362572 - RNA, 19 nt, Homo sapiens
  misc_RNA (1)...(19): siRNA sense strand
gcacuggaggguuuaauuu

SEQ ID NO: 362573 - RNA, 19 nt, Homo sapiens
  misc_RNA (1)...(19): siRNA sense strand
gcagcaaccucacuaaugc

SEQ ID NO: 362574 - RNA, 19 nt, Homo sapiens
  misc_RNA (1)...(19): siRNA sense strand
ccuacaagcuggcugagaa

SEQ ID NO: 362575 - RNA, 19 nt, Homo sapiens
  misc_RNA (1)...(19): siRNA sense strand
gcaacaaccacaccugcua

SEQ ID NO: 362576 - RNA, 19 nt, Homo sapiens
  misc_RNA (1)...(19): siRNA sense strand
ggcuuugccuugaauuuaa

SEQ ID NO: 362577 - RNA, 19 nt, Homo sapiens
  misc_RNA (1)...(19): siRNA sense strand
gagcagagcgggaccaucu

SEQ ID NO: 362578 - RNA, 19 nt, Homo sapiens
  misc_RNA (1)...(19): siRNA sense strand
gcacgcugaucgagaaugg

SEQ ID NO: 362579 - RNA, 19 nt, Homo sapiens
  misc_RNA (1)...(19): siRNA sense strand
gcaaagacggcaacaacca

SEQ ID NO: 362580 - RNA, 19 nt, Homo sapiens
  misc_RNA (1)...(19): siRNA sense strand
uggagagccugaucaacaa

SEQ ID NO: 362581 - RNA, 19 nt, Homo sapiens
  misc_RNA (1)...(19): siRNA sense strand
caagcuggcugagaacauc

SEQ ID NO: 362582 - RNA, 19 nt, Homo sapiens
  misc_RNA (1)...(19): siRNA sense strand
ucuggaggcuucucauuca

SEQ ID NO: 362583 - RNA, 19 nt, Homo sapiens
  misc_RNA (1)...(19): siRNA sense strand
gcuuugccuugaauuuaaa

SEQ ID NO: 362584 - RNA, 19 nt, Homo sapiens
  misc_RNA (1)...(19): siRNA sense strand
cggcuuugccuugaauuua

SEQ ID NO: 362585 - RNA, 19 nt, Homo sapiens
  misc_RNA (1)...(19): siRNA sense strand
uggaggaguuggucaagga

SEQ ID NO: 362586 - RNA, 19 nt, Homo sapiens
  misc_RNA (1)...(19): siRNA sense strand
gcagcagcaaccucacuaa

SEQ ID NO: 362587 - RNA, 19 nt, Homo sapiens
  misc_RNA (1)...(19): siRNA sense strand
caacugcuccaaccucauc

SEQ ID NO: 362588 - RNA, 19 nt, Homo sapiens
  misc_RNA (1)...(19): siRNA sense strand
ccggaucaccuuugacuga

SEQ ID NO: 362589 - RNA, 19 nt, Homo sapiens
  misc_RNA (1)...(19): siRNA sense strand
cagcagcaccaccggcuuu

SEQ ID NO: 362590 - RNA, 19 nt, Homo sapiens
  misc_RNA (1)...(19): siRNA sense strand
uggaggaggugaccaaggu

SEQ ID NO: 362591 - RNA, 19 nt, Homo sapiens
  misc_RNA (1)...(19): siRNA sense strand
gauccucaaugcgcacaug

SEQ ID NO: 362592 - RNA, 19 nt, Homo sapiens
  misc_RNA (1)...(19): siRNA sense strand
ggaccaggagcucgacuuc

SEQ ID NO: 362593 - RNA, 19 nt, Homo sapiens
  misc_RNA (1)...(19): siRNA sense strand
ggaacuggauuuucuuugg

SEQ ID NO: 362594 - RNA, 19 nt, Homo sapiens
  misc_RNA (1)...(19): siRNA sense strand
gcacccaccggcuuugugu

SEQ ID NO: 362595 - RNA, 19 nt, Homo sapiens
  misc_RNA (1)...(19): siRNA sense strand
ggagagccugaucaacaaa

SEQ ID NO: 362596 - RNA, 19 nt, Homo sapiens
  misc_RNA (1)...(19): siRNA sense strand
caaauggagccuggagcua

SEQ ID NO: 362597 - RNA, 19 nt, Homo sapiens
  misc_RNA (1)...(19): siRNA sense strand
ccaccggcuuugccuugaa

SEQ ID NO: 362598 - RNA, 19 nt, Homo sapiens
  misc_RNA (1)...(19): siRNA sense strand
cagccucuuugcgucaaua

SEQ ID NO: 362599 - RNA, 19 nt, Homo sapiens
  misc_RNA (1)...(19): siRNA sense strand
gaucgagaauggagaaaag

SEQ ID NO: 362600 - RNA, 19 nt, Homo sapiens
  misc_RNA (1)...(19): siRNA sense strand
ccaccggccuguucucacu

SEQ ID NO: 362601 - RNA, 19 nt, Homo sapiens
  misc_RNA (1)...(19): siRNA sense strand
cccaggaucucaaggacau

SEQ ID NO: 362602 - RNA, 19 nt, Homo sapiens
  misc_RNA (1)...(19): siRNA sense strand
acuggacucucccucugua

SEQ ID NO: 362603 - RNA, 19 nt, Homo sapiens
  misc_RNA (1)...(19): siRNA sense strand
agacgacaggcuucacuuu

SEQ ID NO: 362604 - RNA, 19 nt, Homo sapiens
  misc_RNA (1)...(19): siRNA sense strand
acaggcggguucacguuug

SEQ ID NO: 362605 - RNA, 19 nt, Homo sapiens
  misc_RNA (1)...(19): siRNA sense strand
gcuuccggaucaccuuuga

SEQ ID NO: 362606 - RNA, 19 nt, Homo sapiens
  misc_RNA (1)...(19): siRNA sense strand
ugcaguggaucgaccagaa

SEQ ID NO: 362607 - RNA, 19 nt, Homo sapiens
  misc_RNA (1)...(19): siRNA sense strand
cuggagagccugaucaaca

SEQ ID NO: 362608 - RNA, 19 nt, Homo sapiens
  misc_RNA (1)...(19): siRNA sense strand
ggcacuggaggguuuaauu

SEQ ID NO: 362609 - RNA, 19 nt, Homo sapiens
  misc_RNA (1)...(19): siRNA sense strand
aauggagccuggagcuaga

SEQ ID NO: 362610 - RNA, 19 nt, Homo sapiens
  misc_RNA (1)...(19): siRNA sense strand
gcugaucgagaauggagaa

SEQ ID NO: 362611 - RNA, 19 nt, Homo sapiens
  misc_RNA (1)...(19): siRNA sense strand
ugagcccacuggaggaguu

SEQ ID NO: 362612 - RNA, 19 nt, Homo sapiens
  misc_RNA (1)...(19): siRNA sense strand
caucuggaggcuucucauu

SEQ ID NO: 362613 - RNA, 19 nt, Homo sapiens
  misc_RNA (1)...(19): siRNA sense strand
cagcagcaaccucacuaau

SEQ ID NO: 362614 - RNA, 19 nt, Homo sapiens
  misc_RNA (1)...(19): siRNA sense strand
gcagagcgggaccaucuac

SEQ ID NO: 362615 - RNA, 19 nt, Homo sapiens
  misc_RNA (1)...(19): siRNA sense strand
accaggagcucgacuucau

SEQ ID NO: 362616 - RNA, 19 nt, Homo sapiens
  misc_RNA (1)...(19): siRNA sense strand
ggaacagcgacucuugcuu

SEQ ID NO: 362617 - RNA, 19 nt, Homo sapiens
  misc_RNA (1)...(19): siRNA sense strand
ggcagcagcaaccucacua

SEQ ID NO: 362618 - RNA, 19 nt, Homo sapiens
  misc_RNA (1)...(19): siRNA sense strand
gcaccuccacaacaacauc

SEQ ID NO: 362619 - RNA, 19 nt, Homo sapiens
  misc_RNA (1)...(19): siRNA sense strand
ucugcaagauccucaaugc

SEQ ID NO: 362620 - RNA, 19 nt, Homo sapiens
  misc_RNA (1)...(19): siRNA sense strand
gagagccugaucaacaaau

SEQ ID NO: 362621 - RNA, 19 nt, Homo sapiens
  misc_RNA (1)...(19): siRNA sense strand
ccaccggcuuuguguuugg

SEQ ID NO: 362622 - RNA, 19 nt, Homo sapiens
  misc_RNA (1)...(19): siRNA sense strand
agagccugaucaacaaaug

SEQ ID NO: 362623 - RNA, 19 nt, Homo sapiens
  misc_RNA (1)...(19): siRNA sense strand
cuacaggcggguucacguu

SEQ ID NO: 362624 - RNA, 19 nt, Homo sapiens
  misc_RNA (1)...(19): siRNA sense strand
caccggcuuugccuugaau

SEQ ID NO: 362625 - RNA, 19 nt, Homo sapiens
  misc_RNA (1)...(19): siRNA sense strand
cagccaccaucaccaguac

SEQ ID NO: 362626 - RNA, 19 nt, Homo sapiens
  misc_RNA (1)...(19): siRNA sense strand
ccacagcaggugccacaca

SEQ ID NO: 362627 - RNA, 19 nt, Homo sapiens
  misc_RNA (1)...(19): siRNA sense strand
acccuccgguuucaacauu

SEQ ID NO: 362628 - RNA, 19 nt, Homo sapiens
  misc_RNA (1)...(19): siRNA sense strand
gguguaagcucuagcaauu

SEQ ID NO: 362629 - RNA, 19 nt, Homo sapiens
  misc_RNA (1)...(19): siRNA sense strand
ggaaacagcuacauugaag

SEQ ID NO: 362630 - RNA, 19 nt, Homo sapiens
  misc_RNA (1)...(19): siRNA sense strand
caauggagguccugaugua

SEQ ID NO: 362631 - RNA, 19 nt, Homo sapiens
  misc_RNA (1)...(19): siRNA sense strand
uguaagcucuagcaauuua

SEQ ID NO: 362632 - RNA, 19 nt, Homo sapiens
  misc_RNA (1)...(19): siRNA sense strand
aaauggagcucucuaugaa

SEQ ID NO: 362633 - RNA, 19 nt, Homo sapiens
  misc_RNA (1)...(19): siRNA sense strand
gcagucagauucacauauc

SEQ ID NO: 362634 - RNA, 19 nt, Homo sapiens
  misc_RNA (1)...(19): siRNA sense strand
ggcaccaaguggaauauua

SEQ ID NO: 362635 - RNA, 19 nt, Homo sapiens
  misc_RNA (1)...(19): siRNA sense strand
caucauucuugucacauua

SEQ ID NO: 362636 - RNA, 19 nt, Homo sapiens
  misc_RNA (1)...(19): siRNA sense strand
ggcagaagcuguauuaaac

SEQ ID NO: 362637 - RNA, 19 nt, Homo sapiens
  misc_RNA (1)...(19): siRNA sense strand
gaagauugucauucugaua

SEQ ID NO: 362638 - RNA, 19 nt, Homo sapiens
  misc_RNA (1)...(19): siRNA sense strand
uggcagaucucuuguccua

SEQ ID NO: 362639 - RNA, 19 nt, Homo sapiens
  misc_RNA (1)...(19): siRNA sense strand
gggcagaagcuguauuaaa

SEQ ID NO: 362640 - RNA, 19 nt, Homo sapiens
  misc_RNA (1)...(19): siRNA sense strand
aaacucaucuggauacauc

SEQ ID NO: 362641 - RNA, 19 nt, Homo sapiens
  misc_RNA (1)...(19): siRNA sense strand
caacaaacucaucuggaua

SEQ ID NO: 362642 - RNA, 19 nt, Homo sapiens
  misc_RNA (1)...(19): siRNA sense strand
gaagcuguauuaaacuugu

SEQ ID NO: 362643 - RNA, 19 nt, Homo sapiens
  misc_RNA (1)...(19): siRNA sense strand
caaaucaacuggugagacu

SEQ ID NO: 362644 - RNA, 19 nt, Homo sapiens
  misc_RNA (1)...(19): siRNA sense strand
cagagcagaugaugaugaa

SEQ ID NO: 362645 - RNA, 19 nt, Homo sapiens
  misc_RNA (1)...(19): siRNA sense strand
acagcuacauugaagauaa

SEQ ID NO: 362646 - RNA, 19 nt, Homo sapiens
  misc_RNA (1)...(19): siRNA sense strand
ugaaaguccugcugaaaca

SEQ ID NO: 362647 - RNA, 19 nt, Homo sapiens
  misc_RNA (1)...(19): siRNA sense strand
ccacuugacuauaaauaca

SEQ ID NO: 362648 - RNA, 19 nt, Homo sapiens
  misc_RNA (1)...(19): siRNA sense strand
uaccaggacugaugcaauu

SEQ ID NO: 362649 - RNA, 19 nt, Homo sapiens
  misc_RNA (1)...(19): siRNA sense strand
ccagagacccugaaauaug

SEQ ID NO: 362650 - RNA, 19 nt, Homo sapiens
  misc_RNA (1)...(19): siRNA sense strand
gcagaucucuuguccuacu

SEQ ID NO: 362651 - RNA, 19 nt, Homo sapiens
  misc_RNA (1)...(19): siRNA sense strand
ucaacaaacucaucuggau

SEQ ID NO: 362652 - RNA, 19 nt, Homo sapiens
  misc_RNA (1)...(19): siRNA sense strand
gagcagaugaugaugaaga

SEQ ID NO: 362653 - RNA, 19 nt, Homo sapiens
  misc_RNA (1)...(19): siRNA sense strand
ggaacagucucuugauggu

SEQ ID NO: 362654 - RNA, 19 nt, Homo sapiens
  misc_RNA (1)...(19): siRNA sense strand
gauggguggugucuaguga

SEQ ID NO: 362655 - RNA, 19 nt, Homo sapiens
  misc_RNA (1)...(19): siRNA sense strand
cagagacccugaaauaugg

SEQ ID NO: 362656 - RNA, 19 nt, Homo sapiens
  misc_RNA (1)...(19): siRNA sense strand
ugaggaagauugucauucu

SEQ ID NO: 362657 - RNA, 19 nt, Homo sapiens
  misc_RNA (1)...(19): siRNA sense strand
ggcagaagcugaggaagau

SEQ ID NO: 362658 - RNA, 19 nt, Homo sapiens
  misc_RNA (1)...(19): siRNA sense strand
cagaagcuguauuaaacuu

SEQ ID NO: 362659 - RNA, 19 nt, Homo sapiens
  misc_RNA (1)...(19): siRNA sense strand
ugccagagacccugaaaua

SEQ ID NO: 362660 - RNA, 19 nt, Homo sapiens
  misc_RNA (1)...(19): siRNA sense strand
ugaacuugcuccaggugua

SEQ ID NO: 362661 - RNA, 19 nt, Homo sapiens
  misc_RNA (1)...(19): siRNA sense strand
gaacuugcuccagguguaa

SEQ ID NO: 362662 - RNA, 19 nt, Homo sapiens
  misc_RNA (1)...(19): siRNA sense strand
gguggugucuagugacuug

SEQ ID NO: 362663 - RNA, 19 nt, Homo sapiens
  misc_RNA (1)...(19): siRNA sense strand
uaucagugcugccaaugga

SEQ ID NO: 362664 - RNA, 19 nt, Homo sapiens
  misc_RNA (1)...(19): siRNA sense strand
ggauacaucauucuuguca

SEQ ID NO: 362665 - RNA, 19 nt, Homo sapiens
  misc_RNA (1)...(19): siRNA sense strand
gagccucaguccauuguuc

SEQ ID NO: 362666 - RNA, 19 nt, Homo sapiens
  misc_RNA (1)...(19): siRNA sense strand
ggaagauugucauucugau

SEQ ID NO: 362667 - RNA, 19 nt, Homo sapiens
  misc_RNA (1)...(19): siRNA sense strand
guccauuguuccacguuua

SEQ ID NO: 362668 - RNA, 19 nt, Homo sapiens
  misc_RNA (1)...(19): siRNA sense strand
cuaugaagccaucaaguuu

SEQ ID NO: 362669 - RNA, 19 nt, Homo sapiens
  misc_RNA (1)...(19): siRNA sense strand
aacagucucuugaugguuu

SEQ ID NO: 362670 - RNA, 19 nt, Homo sapiens
  misc_RNA (1)...(19): siRNA sense strand
gauggcguguauaucagua

SEQ ID NO: 362671 - RNA, 19 nt, Homo sapiens
  misc_RNA (1)...(19): siRNA sense strand
ucaggagucugugcuuaaa

SEQ ID NO: 362672 - RNA, 19 nt, Homo sapiens
  misc_RNA (1)...(19): siRNA sense strand
uaaugaugaugacagcaaa

SEQ ID NO: 362673 - RNA, 19 nt, Homo sapiens
  misc_RNA (1)...(19): siRNA sense strand
caccagagguucaacaaac

SEQ ID NO: 362674 - RNA, 19 nt, Homo sapiens
  misc_RNA (1)...(19): siRNA sense strand
caaucagaccaaaguauuu

SEQ ID NO: 362675 - RNA, 19 nt, Homo sapiens
  misc_RNA (1)...(19): siRNA sense strand
ugaagagccucaguccauu

SEQ ID NO: 362676 - RNA, 19 nt, Homo sapiens
  misc_RNA (1)...(19): siRNA sense strand
gaagagccucaguccauug

SEQ ID NO: 362677 - RNA, 19 nt, Homo sapiens
  misc_RNA (1)...(19): siRNA sense strand
caaaauggcagaucucuug

SEQ ID NO: 362678 - RNA, 19 nt, Homo sapiens
  misc_RNA (1)...(19): siRNA sense strand
aggcacaacuccagauguu

SEQ ID NO: 362679 - RNA, 19 nt, Homo sapiens
  misc_RNA (1)...(19): siRNA sense strand
ucagaucauuggagcaguu

SEQ ID NO: 362680 - RNA, 19 nt, Homo sapiens
  misc_RNA (1)...(19): siRNA sense strand
aaaugaaaguccugcugaa

SEQ ID NO: 362681 - RNA, 19 nt, Homo sapiens
  misc_RNA (1)...(19): siRNA sense strand
gcaacuuguaccugauaua

SEQ ID NO: 362682 - RNA, 19 nt, Homo sapiens
  misc_RNA (1)...(19): siRNA sense strand
gcucgagaacucuuccuaa

SEQ ID NO: 362683 - RNA, 19 nt, Homo sapiens
  misc_RNA (1)...(19): siRNA sense strand
ggaauauuacagguacaua

SEQ ID NO: 362684 - RNA, 19 nt, Homo sapiens
  misc_RNA (1)...(19): siRNA sense strand
guagggcuaugcaacuugu

SEQ ID NO: 362685 - RNA, 19 nt, Homo sapiens
  misc_RNA (1)...(19): siRNA sense strand
gagcucaguggauguuuga

SEQ ID NO: 362686 - RNA, 19 nt, Homo sapiens
  misc_RNA (1)...(19): siRNA sense strand
acaaucagaccaaaguauu

SEQ ID NO: 362687 - RNA, 19 nt, Homo sapiens
  misc_RNA (1)...(19): siRNA sense strand
gaggaagauugucauucug

SEQ ID NO: 362688 - RNA, 19 nt, Homo sapiens
  misc_RNA (1)...(19): siRNA sense strand
cagcuacauugaagauaau

SEQ ID NO: 362689 - RNA, 19 nt, Homo sapiens
  misc_RNA (1)...(19): siRNA sense strand
cucgagaacucuuccuaaa

SEQ ID NO: 362690 - RNA, 19 nt, Homo sapiens
  misc_RNA (1)...(19): siRNA sense strand
cagaaaacaucggcagaua

SEQ ID NO: 362691 - RNA, 19 nt, Homo sapiens
  misc_RNA (1)...(19): siRNA sense strand
gacaaucagaccaaaguau

SEQ ID NO: 362692 - RNA, 19 nt, Homo sapiens
  misc_RNA (1)...(19): siRNA sense strand
gagcagucagauucacaua

SEQ ID NO: 362693 - RNA, 19 nt, Homo sapiens
  misc_RNA (1)...(19): siRNA sense strand
caacuuguaccugauauag

SEQ ID NO: 362694 - RNA, 19 nt, Homo sapiens
  misc_RNA (1)...(19): siRNA sense strand
gaaacagcuacauugaaga

SEQ ID NO: 362695 - RNA, 19 nt, Homo sapiens
  misc_RNA (1)...(19): siRNA sense strand
caggacugaugcaauucua

SEQ ID NO: 362696 - RNA, 19 nt, Homo sapiens
  misc_RNA (1)...(19): siRNA sense strand
cggcagauaccaaaggaaa

SEQ ID NO: 362697 - RNA, 19 nt, Homo sapiens
  misc_RNA (1)...(19): siRNA sense strand
acaagaagcagaucagagu

SEQ ID NO: 362698 - RNA, 19 nt, Homo sapiens
  misc_RNA (1)...(19): siRNA sense strand
ugacuuggaccucagauca

SEQ ID NO: 362699 - RNA, 19 nt, Homo sapiens
  misc_RNA (1)...(19): siRNA sense strand
guuggaaacagcuacauug

SEQ ID NO: 362700 - RNA, 19 nt, Homo sapiens
  misc_RNA (1)...(19): siRNA sense strand
cguuuaagaacuaggaaua

SEQ ID NO: 362701 - RNA, 19 nt, Homo sapiens
  misc_RNA (1)...(19): siRNA sense strand
aaacaucggcagauaccaa

SEQ ID NO: 362702 - RNA, 19 nt, Homo sapiens
  misc_RNA (1)...(19): siRNA sense strand
gcaccaaguggaauauuac

SEQ ID NO: 362703 - RNA, 19 nt, Homo sapiens
  misc_RNA (1)...(19): siRNA sense strand
gaacagucucuugaugguu

SEQ ID NO: 362704 - RNA, 19 nt, Homo sapiens
  misc_RNA (1)...(19): siRNA sense strand
cgagaacucuuccuaaaag

SEQ ID NO: 362705 - RNA, 19 nt, Homo sapiens
  misc_RNA (1)...(19): siRNA sense strand
cgagcucaguggauguuug

SEQ ID NO: 362706 - RNA, 19 nt, Homo sapiens
  misc_RNA (1)...(19): siRNA sense strand
uuucaggagucugugcuua

SEQ ID NO: 362707 - RNA, 19 nt, Homo sapiens
  misc_RNA (1)...(19): siRNA sense strand
aaacagcuacauugaagau

SEQ ID NO: 362708 - RNA, 19 nt, Homo sapiens
  misc_RNA (1)...(19): siRNA sense strand
uaaaagcaguagaagaaga

SEQ ID NO: 362709 - RNA, 19 nt, Homo sapiens
  misc_RNA (1)...(19): siRNA sense strand
ucuaugaagccaucaaguu

SEQ ID NO: 362710 - RNA, 19 nt, Homo sapiens
  misc_RNA (1)...(19): siRNA sense strand
caguggauguuugaacuug

SEQ ID NO: 362711 - RNA, 19 nt, Homo sapiens
  misc_RNA (1)...(19): siRNA sense strand
cagcagcaacucacauuuc

SEQ ID NO: 362712 - RNA, 19 nt, Homo sapiens
  misc_RNA (1)...(19): siRNA sense strand
cagaagcugaggaagauug

SEQ ID NO: 362713 - RNA, 19 nt, Homo sapiens
  misc_RNA (1)...(19): siRNA sense strand
cuggauacaucauucuugu

SEQ ID NO: 362714 - RNA, 19 nt, Homo sapiens
  misc_RNA (1)...(19): siRNA sense strand
cacaagacacagacaauca

SEQ ID NO: 362715 - RNA, 19 nt, Homo sapiens
  misc_RNA (1)...(19): siRNA sense strand
cgucuggccugcuugaaag

SEQ ID NO: 362716 - RNA, 19 nt, Homo sapiens
  misc_RNA (1)...(19): siRNA sense strand
ugucagagcagaugaugau

SEQ ID NO: 362717 - RNA, 19 nt, Homo sapiens
  misc_RNA (1)...(19): siRNA sense strand
ucagagcagaugaugauga

SEQ ID NO: 362718 - RNA, 19 nt, Homo sapiens
  misc_RNA (1)...(19): siRNA sense strand
auacaucauucuugucaca

SEQ ID NO: 362719 - RNA, 19 nt, Homo sapiens
  misc_RNA (1)...(19): siRNA sense strand
aagaagcagaucagaguuu

SEQ ID NO: 362720 - RNA, 19 nt, Homo sapiens
  misc_RNA (1)...(19): siRNA sense strand
ccuaaaagcaguagaagaa

SEQ ID NO: 362721 - RNA, 19 nt, Homo sapiens
  misc_RNA (1)...(19): siRNA sense strand
guacaagaagcagaucaga

SEQ ID NO: 362722 - RNA, 19 nt, Homo sapiens
  misc_RNA (1)...(19): siRNA sense strand
ucgugucccuguacaagaa

SEQ ID NO: 362723 - RNA, 19 nt, Homo sapiens
  misc_RNA (1)...(19): siRNA sense strand
caagacacagacaaucaga

SEQ ID NO: 362724 - RNA, 19 nt, Homo sapiens
  misc_RNA (1)...(19): siRNA sense strand
gagcuugagagcagucaga

SEQ ID NO: 362725 - RNA, 19 nt, Homo sapiens
  misc_RNA (1)...(19): siRNA sense strand
uaccugauauagaguucaa

SEQ ID NO: 362726 - RNA, 19 nt, Homo sapiens
  misc_RNA (1)...(19): siRNA sense strand
acacagacaaucagaccaa

SEQ ID NO: 362727 - RNA, 19 nt, Homo sapiens
  misc_RNA (1)...(19): siRNA sense strand
caagaagcagaucagaguu

SEQ ID NO: 362728 - RNA, 19 nt, Homo sapiens
  misc_RNA (1)...(19): siRNA sense strand
gguguaagcucuagcaauu

SEQ ID NO: 362729 - RNA, 19 nt, Homo sapiens
  misc_RNA (1)...(19): siRNA sense strand
ggaaacagcuacauugaag

SEQ ID NO: 362730 - RNA, 19 nt, Homo sapiens
  misc_RNA (1)...(19): siRNA sense strand
caauggagguccugaugua

SEQ ID NO: 362731 - RNA, 19 nt, Homo sapiens
  misc_RNA (1)...(19): siRNA sense strand
uguaagcucuagcaauuua

SEQ ID NO: 362732 - RNA, 19 nt, Homo sapiens
  misc_RNA (1)...(19): siRNA sense strand
aaauggagcucucuaugaa

SEQ ID NO: 362733 - RNA, 19 nt, Homo sapiens
  misc_RNA (1)...(19): siRNA sense strand
gcagucagauucacauauc

SEQ ID NO: 362734 - RNA, 19 nt, Homo sapiens
  misc_RNA (1)...(19): siRNA sense strand
ggcaccaaguggaauauua

SEQ ID NO: 362735 - RNA, 19 nt, Homo sapiens
  misc_RNA (1)...(19): siRNA sense strand
caucauucuugucacauua

SEQ ID NO: 362736 - RNA, 19 nt, Homo sapiens
  misc_RNA (1)...(19): siRNA sense strand
ggcagaagcuguauuaaac

SEQ ID NO: 362737 - RNA, 19 nt, Homo sapiens
  misc_RNA (1)...(19): siRNA sense strand
gaagauugucauucugaua

SEQ ID NO: 362738 - RNA, 19 nt, Homo sapiens
  misc_RNA (1)...(19): siRNA sense strand
uggcagaucucuuguccua

SEQ ID NO: 362739 - RNA, 19 nt, Homo sapiens
  misc_RNA (1)...(19): siRNA sense strand
gggcagaagcuguauuaaa

SEQ ID NO: 362740 - RNA, 19 nt, Homo sapiens
  misc_RNA (1)...(19): siRNA sense strand
aaacucaucuggauacauc

SEQ ID NO: 362741 - RNA, 19 nt, Homo sapiens
  misc_RNA (1)...(19): siRNA sense strand
caacaaacucaucuggaua

SEQ ID NO: 362742 - RNA, 19 nt, Homo sapiens
  misc_RNA (1)...(19): siRNA sense strand
gaagcuguauuaaacuugu

SEQ ID NO: 362743 - RNA, 19 nt, Homo sapiens
  misc_RNA (1)...(19): siRNA sense strand
caaaucaacuggugagacu

SEQ ID NO: 362744 - RNA, 19 nt, Homo sapiens
  misc_RNA (1)...(19): siRNA sense strand
cagagcagaugaugaugaa

SEQ ID NO: 362745 - RNA, 19 nt, Homo sapiens
  misc_RNA (1)...(19): siRNA sense strand
acagcuacauugaagauaa

SEQ ID NO: 362746 - RNA, 19 nt, Homo sapiens
  misc_RNA (1)...(19): siRNA sense strand
ugaaaguccugcugaaaca

SEQ ID NO: 362747 - RNA, 19 nt, Homo sapiens
  misc_RNA (1)...(19): siRNA sense strand
ccacuugacuauaaauaca

SEQ ID NO: 362748 - RNA, 19 nt, Homo sapiens
  misc_RNA (1)...(19): siRNA sense strand
uaccaggacugaugcaauu

SEQ ID NO: 362749 - RNA, 19 nt, Homo sapiens
  misc_RNA (1)...(19): siRNA sense strand
ccagagacccugaaauaug

SEQ ID NO: 362750 - RNA, 19 nt, Homo sapiens
  misc_RNA (1)...(19): siRNA sense strand
gcagaucucuuguccuacu

SEQ ID NO: 362751 - RNA, 19 nt, Homo sapiens
  misc_RNA (1)...(19): siRNA sense strand
ucaacaaacucaucuggau

SEQ ID NO: 362752 - RNA, 19 nt, Homo sapiens
  misc_RNA (1)...(19): siRNA sense strand
gagcagaugaugaugaaga

SEQ ID NO: 362753 - RNA, 19 nt, Homo sapiens
  misc_RNA (1)...(19): siRNA sense strand
ggaacagucucuugauggu

SEQ ID NO: 362754 - RNA, 19 nt, Homo sapiens
  misc_RNA (1)...(19): siRNA sense strand
gauggguggugucuaguga

SEQ ID NO: 362755 - RNA, 19 nt, Homo sapiens
  misc_RNA (1)...(19): siRNA sense strand
cagagacccugaaauaugg

SEQ ID NO: 362756 - RNA, 19 nt, Homo sapiens
  misc_RNA (1)...(19): siRNA sense strand
ugaggaagauugucauucu

SEQ ID NO: 362757 - RNA, 19 nt, Homo sapiens
  misc_RNA (1)...(19): siRNA sense strand
ggcagaagcugaggaagau

SEQ ID NO: 362758 - RNA, 19 nt, Homo sapiens
  misc_RNA (1)...(19): siRNA sense strand
cagaagcuguauuaaacuu

SEQ ID NO: 362759 - RNA, 19 nt, Homo sapiens
  misc_RNA (1)...(19): siRNA sense strand
ugccagagacccugaaaua
